United States Patent Application Publication US 2019/0348154 A1 - sequence listing, part 4

SEQ ID NO: 9667 - DNA, 864 bp, Escherichia coli
atgcgacgccacccgttaggtatttatgaaaaagcgctacccaggaataccagttgggtagagaaactagccctggctaaatcttgcggttttgattttgttgagatgtcggtagatgagaatgatgaacgactcgcccgcctggactggtcgctcaccgagcgtatggagcttattagcgccattcagcaaacggggatccgtattccgacaatgtgcctgtctgctcaccggcgttttccatttggtagccatgatagagatactcgtcagcaggcgcgtacgattatgttgaaggcgttacgcctggcgcaggatttggggattcgaacaatccaactggcaggctatgacgtttattatgagccgcagaatgaagaaactatcgcctggtttgaagatgcgatggcctggacagctgaacaggccgcagcggcacaagttatgtgtgctgtagaaatcatggatacgccatttattaattctattagtaaatggaaagtcctggatacaaaaattaattccccttggtttaccgtttatccggatgttggcaatctgaccgcatggggtaatgaactggaaagtgagctggtaaaggggattgatcgaattgccgcaatccatcttaaagatacgtacccagtaacgcctgattctccagggcaatttcgtgacgttccttttggtgaagggtgtgtagattttattaaattatttaagattctgcgtaatcttaattatcgcggaacgtttctgatagaaatgtggacagaaaaagcgacggaacctctattagaaattattcatgcacgtcaatggattgaagagaaaatgcgccttgccggctgggataatatttag

SEQ ID NO: 9668 - DNA, 1047 bp, Escherichia coli
atgaacaagcggatattttttccactagatggtacccgttcaggcttattatcaatatgttttattgtggtggtgttatttagtctggcaatgccggggcgttttttcaccgacaatacttttctgagcattgcatttcaattgccagagcttgggttgctcacgtttgcgatgtttataccgatgttgagcggggggcttaatctggcaatcatcggtactgcgaatctgaccagcctgtttatggcctgggtattgattcaatatgtacccgcagatgcatctacaggtagtcagttgttttggctcttcctggctattgtcggggcgatgcttattgccatcatcattggagctattactgggttaattatttctcatataggcgctcaccctattttggtcacattgggtagcatgaccattattagtggtatcggtatttacctgactaagggggcagctttaagtggtatgccaccagtagtccgcagtattgggtctgaagttatcatggggatcccagtaccgatgatgatttttatcgtcaccaccgttgctttagctctgttcctcggcaaaacccgtacgggaaaaacgatttatatgtgtggcagtaatattaacgccacatggtttagcggtattcgcaccgaccgcgtattaattgctatatatgctatatccagcatgttgtgtgtattagcaggtcttattatgctcgcgcgatttaattcggcgcgtatgggctatggcgattcctatttgctcttgacggttcttgcaattgtattgggaggcacagatccattcggtggggcgggtaaagtcagtcatgttttttgtgccttacttgtgcttcaggttattgctaccggccttagtctgttgggacttagtttgcatttcaatctggcggtatgggggatcacattgatcgccgcattggcatttaaattcatcaaacaaaaatggcagttgcagcgtgacatgaataagagccggaaaatctttcaacaacaattgatcactcgtgagggaaaataa

SEQ ID NO: 9669 - DNA, 993 bp, Escherichia coli
atggttagctttatgcggctgcggtttcctcgttcagtcgaagcttggttaggatgggtcattgttctcatgctggtatttttttccatcatgagcgatgagtttttatcaatacagaacttgctcgatctctcggaaagttatgccgtaacgggtattttcgccctcggattatttgtcgtattggttactggcggaattgatatctcttttgcagcagtagcttcggttgtacaatatgttgtggcgtcgttactgcttaatgaaacgctatcaaatccatttttctgcctggtgtttgctgttttttttggcatcatttttggtttgataaacgctattcttatttattaccttaatgtcgtttccatcatcattacgattagtatgcagtcgttactgttcggtatgttgatgtggttgactaatggtcacagtatttacgatttaccggattggtggattacgcagcgttctttcctgagttttgaatttggcggagaagattaccagatcggattaccgttagtggttatgctgggaatggcatttctgacgtgggtgataatgaacaaaacccatattgggcgtcagctttatgccgtgggagggaataccgaatcagcaagacgtattgggattcgggtgtcgctaatttatctgtttgcttacggttatcttggtgccgctgcagcaattggtggaatgctgcaagcttaccgtatgagtgaagttgtgccgaatgcattggttggcggagagttggatgtgctggctgcagcggtattgggcggtgccagtttatcaggcggacgtggtacggtcattggtacgcttatgggcgtatttcttatcggtattcttaaaaacggccttaatttgattggtgtctcgagttatttcgtcaatatcgttattggggtggttattgtctcggcgatttgtgtgacccattacaaaaagcgtaaagaaactgatgttggtttcgtctaa

SEQ ID NO: 9670 - DNA, 1518 bp, Escherichia coli
atgatgcctcatattatagagaagaatgcggagcaaccattagtgacgctaaggtcactaacgaaaagtttcggtggccatagggctctaaaaaatatcaatcttaccttaaataaaggtgaggttcattgtcttgctggtgcgaatgggtgtggtaaaagtactctgatcaaaacgctgtgtggtgtttatgttcctgattcgggaagtgaaattattatagatggtaagtcctggactcgtctttctcctgataaagctcgggaactgggtattcaggtgatatatcaggatctttctttattcccaaatctttctgtggctgaaaatatcgcttttgaatacaacctgaagggatatttagggctgcacagaaaaaaacaacttcgggatgtatcacagaaaataattcaggagctggaattcaatctcgatcctgatgcgttagtacaacatttgccgattgcacaacgccaacaggtcgctatttgccgggctctgattgccgatgcccggttagtcatcatggacgagccaacggcgtcattgacgcgcactgaagttaatcaattactacgcacagtgaattacttacgcgataaaaatattaccgtagtttttgttagccaccgccttgatgaagttaaggaaatctcagatcgaattacggtcatccgtgatggagagataattggaacgtgggctgccaatcaactttctccaggcgatattactgagttaatgaccggaaaaactatagtccaccagaaaaaactaccaaatagcgttgaaggtaaagtagttcttgaactaaaaaaattatgcagaaaagggcaatttgaagatgtatctctaaaactacaccagggcgaggttctgggattgtgtggtttacttggtgcggggagaaccgaattagcattgagtcttttcggtattactcgagcagatagtggtgatatttatcttgaaggtaagcccgttacaattaaagacaacacgcatgcggtaaaactgggaatagcatatgtttcagaagatcgcctgacactgggggccgtattaccccaatctatcagcgataatatggtgctctcgattctggatcgtttaaagacgccatcggggtttattgatgaaaatcgaaaagaaaccttagtcaaggagtggatccaggatttggatattaaggtcaccgatccaaataatccactttcaacgctatctggtggcaatcaacaaaaggttgtcctggctaaatggattttaacacgacctaaggttttaattctggatgcgccaacggtaggtgtagatattggcgcaaaagatagtatttaccagcttattcatcggctttcaggtgtgggtatttcagtgatattaattactgatgaagcaccagaagcttattataactgcgatcgtatttttcatatgaagcgcggaaagattattcatgagctgttgccttcgaattataccgagcagcagttggcggaggtgattaatggttag

SEQ ID NO: 9671 - DNA, 1005 bp, Escherichia coli
atgaaaaaattaatcttaccctgccttattgctaccgtattatcttccactgctgcatgggctgatcagactgtaacatcacaaaaagcgaataaaccttttacgatgggggtagtagtaaaagtcggtggcattccctggtttaatgtgatggaacaaggcattaaagatgaaggaaaactattgggggttgatgcatggcaggtcggccctacaacggcagatccagctgaacaggttcgggcgattgaagatttaattgcacgaaaagtggatgttattggggttgttcctaacgatgcaaaggttcttgaacctgtacttaagcgtgcacaagaagccggtattaaagttattacccacgaatcaccagatcaaaaaaatgcagattgggattttgagttgttaaatacccagacaatgggtgccaatcatatgaaagatatggcgaagtgcatgggcgaagaaggtaaatacgccatgtttgtcggcagtctgaccgtgcctttggtaaatgactgggccaatgccgcgattgcttatcaaaaagaacattatccaaatatgacgttggttgaagatcgttttggtgttgctgaatcggtggatgattcaatgcgcacgacgaacgatttaatgtctaaatataaagatcttaaaggcattatgtcatttggttcacaaggaccaattggtgcggggcgtgctattgataagcggaagaaaaatgacgcaatttgcgtttttggaaccttcactccaggtcagggaattaagctactcgaaaaaggcgctattgatgggggatatatttcaaaccctatgattgcgggtaaggtttttgtccaggttgcgacggcaatgatgaacggtgaacctattaaagacggtgtaaaaatcggtgatatgggcgagatcaaggttaataacaacactatttatagtgataatccagaaaagctcgatcttgaaaatacacgacatttagtgaagttaggcttgtaa

SEQ ID NO: 9672 - DNA, 810 bp, Escherichia coli
atgttgcaggcagagcgccataaaatgatatgcgcacatgtacaaaaacaaggtgctgtacgggtaacagaattatcacgattatttaaagcgtctcctgagacaattcgtcgggatttaacggtactggagcgcaacaaaaagttaatccgtagctttggtggcgcggtcgctctggattcatctgatagcgctccggttatgctcgccgataatgcgtggcaagataatagtatcgatcgtgcggaatcattccgtaaacggactgaagaaaatcctgatataaaagccagaattgcgaaggccgcattgcaatttattcaccctggtgattgtattttaatggataacagtagtacttgttggtttttagctcgtcaaattcccgatatagatgttactgtagttacaaattcattacggataattcaggcgttggcttgccgtgatcgagttcgaattattggtatcggtggtgagtattctgagcgacatgatgattttcatggcccggttgcagagggggcgatccgaaattttcaaatcaacagttttttcttttcatgccaggggttgaatctggggaatggtgtccgcgatggcagtgaaattaatgccagacttaaacaggtgatgcttcaggtgtcaggacaaaaaatattgctggtcgactccagtaagtttgaacagtatgcatttagtaaaatatgcacgctggatgaaatcgatattctggtgactaatgtttgtacagatactcggtatcgaacacaatttccacaattaaacattgtggaggttgataaataa

SEQ ID NO: 9673 - DNA, 693 bp, Escherichia coli
atggatacgctaaaggaaaaagttcttgctgcgaatttatcactaccccttcatcagttagtgacgtttacctggggaaatgttagcggtattgagcgcgaaaaaggtgtcatggttattaaaccttctggggtcgaatacagccaaatgggcattgcagatatggtggtagtggatttacaaagtggtgaagttattgatggacacaggaaaccctcttcagacacagatactcatctggcgctataccgtgctttcccggatattggaggtatcgttcatacccattcccgacacgccacaatatgggctcaggccggaaaagatctcacggcctttgggacaacccatgcagattatttctacggcattatcccctgtacacgccccatgaaggatgacgaaattaatggacaatatgaatatgaaacggggcgagtgattattgaaacgttcagacaacgagaaatatctcccgctgacattccggctgttttagtaaacagtcatggcccctttgcctggggaactgatcccgcgaacgccgtgcataacgccgttgtacttgaagaaatcgcctatatgaatctctttacacaacagctacaccctcatcttacggctattcaacagcctctactggataagcattttttacgcaagcatggtgccaatgcttattacgggcagtaa

SEQ ID NO: 9674 - DNA, 186 bp, Escherichia coli
atgaaaattaaaatacttgctgcgggtatcgcattaacattgccgttctgggcttgcgccaaagatgtcaccatcatttataccaacgacctccatgcgcatgtcgagccttataaagtgccgtggatcgctgatggtaaacgggatattggcggctgggcaaatatcactacgctggttaagtaa

SEQ ID NO: 9675 - DNA, 273 bp, Escherichia coli
atggtcacagttaaccttcattgtccccgttgccagtccgttcaggtttaccgtcacgggcagaaccccaaaagacatgatcgattccgcggccgtgactgtcaccgggtatttcagctcagttactgttacgagccccgtaaaccaggagttaaagaccaaatcgctgaaatggctttcaacggtgccggggttcgctatactgcccgtacgctgaaaatcggcattaatacagtcatccgaactttaaaaaactctcgccacgaaaaataa

SEQ ID NO: 9676 - DNA, 279 bp, Escherichia coli
atgtcatttgagaaaaaagagcagaatgaggtaaaaatctttggctgtgtattcagtctggtaatcatccaaggaaagctcatcagaagggtgatgactccaattagtagaacatatattttcgataaaagcaccgatgactttttcatgaagttctacagaacgcgagaaacagatggttctgcgggccagacgtttgattcgggttctcagggtcagattgttacgctcaatgtgctgagtaaaaatcttaccagtcagatgcttctcctttggtaa

SEQ ID NO: 9677 - DNA, 324 bp, Escherichia coli
atgaaggtaatacaatgttgttatttccttgctttagtctccagtcatttaatggctggagttatgagtgatgacaatatatttttaagtaattcggatttagctgctttatattgtgtggctaaaatatttccagatggagaaaatattttaatatataaagtaaatataattaatgctagttcaaaaaaagatgtatttttttatgaaagcccaacatcaacccacaatgacataatggggggcgggggaatgtcatatgcctatgaatatgatgtaaaatataatatatgtcatttgagaaaaaagagcagaatgaggtaa

SEQ ID NO: 9678 - DNA, 894 bp, Escherichia coli
atgctcgaccggctggaaagtgaaatcctggctgaccgggtgagtgaggaaagccgccgctggctggcatcgtgcggcctgacggtggagcagatacaaaaccagatggacccggtgtacacgccggcgcgaaaaatccacctgtaccactgcgaccatcgcggcctgccgctggcgcttgtcagcacggaagggacaacagcgtggtacgcagaatacgatgaatggggtaaccagctgaatgaagagaacccgcatcagctgcagcagctcatccgcctgccgggtcagcagtatgatgaggagtccggcctgtattacaaccgccaccgctattatgacccgctgcaggggcggtatatcactcaggatccgattgggctgaaggggggatggaatttttatcagtatccgttgaatccgatctcaaatatagatccattaggattatatgaatttaaatcaaaaaatatagatgatattggaatatttgcattggcaatgtgtaatggagaatcaattaacgagaataaagaatatggtgggctaatatgtaagaagcaaggtgaatatttccctatgaatccgataagttcaaatgataatgatagtgtagacttgcgaaatataaaatgccctgaaggttcagagagagtaggcgattatcacactcacggtttttactctgacgataaaggcaataaagtaacaaaagaaaatgatgtttatgatagtctaaatttttcaagcaaagatttaacgaattcttatatgaatggaatgggaaaaaaagaatacagtagttacttgggaacaccaaataacacctatctaaaatataatctcaaagctaaagggaatggagttacaattatcaggcaagggagtaattaa

SEQ ID NO: 9679 - DNA, 861 bp, Escherichia coli
atgaatatcgcaattgtgacaataaatcaggagaatgccgcaacagcgagctggcaggcggcgcaggatttcagcggttgtaccctggcgcactggaagattgaacctcagcccgctgtggcggaacaggtgctggatgcgctggtggaacagtggcagcgaacgccagcggacgttgttctctttccgccgggaacgtttggcgatgaactgtcgacccggctggcctggcgtttacatggtgcaagcatctgccaggtgacttcgttagatattccaaccgtaagcgtgcgcaaatcccactggggaaatgcgctaacggcgacgctgcaaacagaaaaacgcccgctatgcctttcgctggcacgtcaggcgggagcagataaaaacgccacgttgccctctggtatgcagcaactgaacattgtcccaggtgcgcttcccgactggctggttagcatagaaaacctgaaaaatgttacccgcgacccattagctgaggccagacgggtgctggtggtggggcagggcggagaggcagataaccaggaaatcgctatgctggcagaaaagctgggagccgaagtgggctacagtcgggcacgagtgatgaacggtggcgttgatgccgaaaaagtgattggtatttctggacatctgctggcacctgaggtgtgtattgttgttggcgcttccggcgcagcagcgttaatggcgggcgtacgcaatagcaagtttgtggtggcgattaatcatgacgccagcgcagcggtattttcacaggcagatgttggcgtggttgatgactggaaagtggtgctggaggcactggtgacaaacattcacgcagaatgccaataa

SEQ ID NO: 9680 - DNA, 873 bp, Escherichia coli
atgcgctatttcatactaatattcacattcgtgtgttcctttgttgcagcccaaccaactattgtcccatcattacagcaacaagttacggatcttacgagtagcttaaactcacaagaaaagaaagaactgacgtacaagttagaatctattttcaataatacccaagtgcaaattgctgtattaattgttcccacaaccaaagacgagacaattgaaaaatatgctacacgggtttttgacaattggcgtttaggagatgccaaacgtaatgatgggatactgatcattgttgcctggtcggatcgtactgtccgcatccaggtaggttatgggctggaagaaaaggtaaccgatgctctggctggagatatcatccgtagcaacatgatacccgcatttaaacaacaaaaattagctcagggattagagctagctataaacgctttgaataaccaactcacttcacaacaccaatatccggctaatccttcagaaattgaatcagcgtcttccagtgatcattattactttgctattttttgggtatttgcagtgatgttcttccctttctggttttttcatcaaggcagtaatttttgtcgcgcatgtaaaagcagtgtctgtatttcagcaatctatcttttagatttattcctgttctccgataaaactttttccagtgctgtatttttcttcttttttactttcaccaccattatggtctttacctgtttatgtgtacttcagaaaaaagcatctggtagaagttatcattcagacaacagcggttccggtggcggctcaagtggcggcggatttagcggcgggggcggttcttctggcggtggcggcgcgtccggtcgctggtaa

SEQ ID NO: 9681 - DNA, 1002 bp, Escherichia coli
atgagtaaagttggtattaacggttttggtcgtatcggtcgactggtgttgcgtcgattacttgaagtcaaaagcaacatagacattgtcgctattaatgatctcacttccccaaaaattctcgcctacctgctgaaacatgattcaaactatggaccgttcccctggagcgttgattttacggaagattcacttatcgttgatgggaaaagtatcgcggtttacgccgaaaaagaggctaaaaatattccgtggaaagcgaaaggggcagaaattattgtcgaatgtactggcttttatacctccgccgagaaatcgcaggcgcatcttgatgctggtgcgaagaaggtgttgatttccgcccctgccggtgaaatgaaaactatcgtttataacgtcaatgacgacactctggatggcaacgacaccattgtttccgtggcgtcatgcaccactaactgccttgcgccgatggccaaagccttgcacgacagtttcggaatagaagtcggcacgatgacgaccattcatgcctataccggcactcagtcactggtggatggcccgcgtggtaaagatttacgtgcttcacgcgcagcggcagaaaatatcattccccacactacgggggcggcaaaagccattggtctggtgatcccagaactgagcggcaaactgaaaggtcatgcgcaacgcgtgccggtgaaaacaggttccgtcactgaactggtatcgattctcggaaaaaaagtgactgccgaagaggtgaataacgcacttaaacaagcaaccaccaataacgagtcatttggttataccgatgaagaaatagtctcttccgatatcattggcagccatttcggttcggtgtttgatgccacgcaaaccgaaattaccgccgtgggcgatttacaactggtgaaaacggtcgcctggtacgataacgaatatggcttcgtcacgcagcttattcgcaccctcgaaaaattcgctaaactctga

SEQ ID NO: 9682 - DNA, 1440 bp, Escherichia coli
atgtcagtacccgttcaacatcctatgtatattgatggacagtttgttacctggcgtggagacgcatggattgatgtggtaaaccctgctacagaggctgtcatttcccgcattcccgatggtcaggccgaggatgcccgtaaggcaatcgatgcagcagaacgtgcacaaccagaatgggaagcgttgcctgctattgaacgcgccagttggttgcgcaaaatctccgtcgggatccgcgaacgcgccagtgaaatcagtgcgctgattgttgaagaagggggcaagatccagcagctggctgaagtcgaagtggcttttactgcggactatatcgattacatggcggagtgggcacggcgttacgagggcgagattattcaaagcgatcgtccaggagaaaatattcttctgtttaaacgtgcgcttggtgtgactaccggcattctgccgtggaacttcccgttcttcctcattgcccgcaaaatggctcccgctcttttgactggtaataccattgtcattaaacccagtgaatttacgccaaacaatgcgattgcattcgccaaaatcgtcgatgaaataggccttccgcgcggcgtgtttaaccttgttctggggcgtggtgaaaccgttgggcaagaactggcgggtaacccaaaggtcgcaatggtcagtatgacaggcagcgtctctgcaggtgaaaagatcatggcgactgcggcgaaaaacatcaccaaagtgtgcctggaattggggggtaaagcaccagctatcgtaatggacgatgccgatcttgaactggcagtcaaagccatcgttgattcacgcgtcattaatagtgggcaagtgtgtaactgtgcagaacgtgtttatgtacagaaaggcatttatgatcagttcgtcaatcggctgggtgaagcgttgcaggcggttcaatttggtaaccccgcagaacgcaacgacattgcgatggggccgttgattaacgccgcggcgctggaaagggtcgagcaaaaagtggcgcgcgcagtagaagaaggggcgagagtggcgttgggtggcaaagcggtagaggggaaaggatattattatccgccgacattgctgctggatgttcgccaggaaatgtcgattatgcatgaggaaacctttggcccggttctgccagtggtcgcatttgacacgctggaagatgctatcgcaatggcgaatgacagtgattacggcctgacctcatcaatctatacccaaaatctgaacgtcgcgatgaaagccattaaagggctgaagtttggtgaaacttacatcaaccgtgaaaacttcgaagctatgcaaggcttccacgccggatggcgtaaatccggtattggcggcgcagatggtaaacatggcctgcatgaatatctgcagacccaggtggtttatttacagtcttaa

SEQ ID NO: 9683 - DNA, 378 bp, Escherichia coli
atggatgaatgttttataaatatcactccgacttcattgtcttttaaaaatgccgaactatcagatttaagctataaaaatgccaggcttgaacttaccctcatatgtccggcgatcaagtcagaagttaagttatcatttgactggatacattcatttcgtgttactgacgaaggtgatttgttaggaatgtcaggaattcacggtattaaccaaacggggatctatagagtagtgaattccgcctactttgcatggtttactatgcaaagttgtgaaatttataaaaataatgtgatcgagcattatgtcattgccacgtcaaatgatgttattgatgttttatcaacagtttctccgcaaatacagtatgactaa

SEQ ID NO: 9684 - DNA, 450 bp, Escherichia coli
atgaatttgagtaataccaaatgcgacaaattgtctttttatgaagaaaaaatccgctggcgaatgcgtcggcaaatctcgaatgcagaggcaatattttacgagaatcaggaagaacacattcagcgctttttaggcagatatacctgccgcaaaccggttcttgtttattgggaaagtgaacaaagatggacatctgtaaacggtctggaagtaatgagtatgtttgatgagtattgtcatcacatctaccttgatgatatcaataaaaaaatacaagctgaattacctgaagataaaacattaggtttcaaacgtcaattgcaatttttcattttaggggatgagaagattagaatatgggtgccacagggggaattatatttcgcattaatgaatgtattgcagatgttccccctgaaaaaaatggttgatgactggacaaggtaa

SEQ ID NO: 9685 - DNA, 339 bp, Escherichia coli
atgaaaaatttagacaatattatctggcatgatggtgttttagtagaaaccagaatggaatgtcaccacaccgagtataattttatattgacggcagaactttatgttgatgaatttacagccggaagggaacgaaaaaggttcgagtttacgggagtggaacatttatcgcaggttatggatattgctgaacttatagataaccaaaatgcaggtaatattaaagatgcggtaattgtttataaggcaaagaagtatgaaatttcacttcatttgtttggcggttttttaaattttatatttaaaaccatgcgagttgttgacaatgaatttgagtaa

SEQ ID NO: 9686 - DNA, 135 bp, Escherichia coli
atgagtaagcatgatattttaatgagatcgtattatgagcgaataatagagcttgattgcgtcggtcaggctttaatctctttctatgaaaaacttccagaggaaattttatcagaaagtaatggattggattaa

SEQ ID NO: 9687 - DNA, 5022 bp, Escherichia coli
atgcaaaggaaaactttattgtcggcctgtattgcattagctctgagtggtcagggttgggcggcagatatcacagaggtagaaaccaccacaggtgaaaagaaaaatactaatgtgacttgtccggcagatccaggaaaactcagtccggaagagcttaaacgcttaccctctgaatgcacccctttagtcgaacaaaacctgatgccatggcttgccacaggcgctgctgcgttaatcacgaccttagccgtagtggaactaaacgacgatgatgatcatcatcatcgcaacaattctccactcccaccgacgccccctgatgatgattcagacgacactccagtgcccccaactcctggcggagatgagataataccggacgttccggatgatacgcctacacctcccaaaccgatttcgtttaataatgacgttattctcgataaaacagaaaaaacgttaactattcgcgattcagtttttacttataccgagaatgctgacgggactatttctctgcaagataacagtggtcgtaaggcaacgattaatctttggcagattgatgaagcgaataatactgttgcccttgaaggtgtgagcgcagatggcacaacaaagtggcgatataatcacaacggtgagcttgttataacgggtgataatgccacagtaaacaacaatggcaaaaccaccgttgacggtaaagactccaccggcacggaaatcaacggtaataacggaaaagttatccaggacggcgatctggatgtcagcggcggcggtcacggcattgatatttctggcgataatgccgccgtcgataacaaaggcaatatgaccgtcacggacgcagactcgatcggtgtactgatcaatggcgacaacgcgacacttgccaatactggtgatgtggatgtcagtaattcagcgacgggatttgctattaccagcgacgaggggaaaatctccctcgcgggaagtatgcaggtcggtgatttttcaacagggctgacattaactggcgataataatagcctgacaatggcaatgcaggatcttaatgtcgttggtcagaaagctacaggtattaacgtctccggtgatgccaacacaattgatataactggtaatattctggttgataaagatcagagcgcagacaatgcggcagagtatttttatgacgcttccgtgggcgtaaatgtcagtggtcataataacaatgtgacactggatggtaaattaacgcttgttgcggatggtgaaactaccacacgtgatgtctcgaattttgatggtagccaggaaaatatttctggtcttattgtttccggtgatggtaacaacatcaatctgaatggcgggattgcatttgttggtgaaataaatgcgctgaccgatggttcagccattgctaacaaacggactttcttcggtaatacgccacttattggtattgatggtgaatcgaaggtatatctgaatggtgactcaacgatcagtggtgatctgcaactaggatatgcaagccttatccagttaaaaaataaagcagctattgagattggcagtgaagctactttcaatatgcgggatattgaaaattatgatcattactatgcacaaacaccacagattataaaggcagaaagtagctctgaggtcataaataacggtaatgttgatatctggaatatcagttttgctggtatctttggcgaaaataccacaggtatcaataacgggaatatcacactttctctgtatgattatgcctcaactaatacgccagcaccggaaccagataacacggccttcttgacctctaacggcggcagcgcagtaaacaaaggggtaattacctcaaaagtaatggagcaacatagcgttgttaatatggctgcactcacggggtcaacggatcagcgcgtgtttaataacagcgtagcaagcatgatggggatggaggcgtataataaaggctctgttctcaatgccgaagatgctgtcattgatatgtatggacgcggtagcattggcatgttagccatcgataactcaacggcggataatgcaggcaatattacggtggatacgttatggattgatgacaatgacaccaccagtttgcataccgatcttccgggggcaacggcaaaagattatggcgttggtatggcaaccgggacagacaccgggggtggcgctcgtaacaacgctattgcgaccaacctggaaggtggtgtaattactgtatataacgcaggtgccggtatggccgcctacggtaacagtaatatggttattaaccagggaatcattaacctcgagaaaaatgcagattacgatgcaaacctgggtagtaatacgctggtagggatggcagtgtataaaggtgctacggcaataaacgaccaaactggtgtaatcaatattaatgttgatacgggccaggcgttttataatgatggtacaggcattatcctcaactatggtgagattaatctcaacggagcggaaattgatagcaccgactctcattatggtgctcctgcagagaatctggaactgttatctgaattgagtgccagtggagagaacattacaaaaacagttatccgagatggctttgttaccattaaaccgctggctaattatggtacagaaatactgaacggcgatgtcgatgccaacctatggttatataacgaggataaggccagcctgacagttaatggtgatttgaatattgtccaggggctggaaaacagcgggagcatggatgccgacaagcttactgccaatgccagtgtttacaatcgcgcctcgggcagtatgacaaccgaactgttaatgttaaaaggcgggtctgccttcttcaatgagggaagctttagcggagtaattagcggtgatagttataaacaaaacgttgtaaatacgggggagatgacaactgtcacagatggtagtgccttaattaacggcagtttcgtactttataatgaagccggttcaacgcttacaaatagcggcaatgctattgcgggaggggaaaatgccatcgttaatatcacacgcaccagtgattctctttcacaggttaaccgcggaaaaattaccgccacaaacggttacagtgcgattaaaactgccagcacagcctctaacagcaacggcaaatggatttggaatacagaaaccggtgtaattaatggtatcaatccagatgctccactgattgatttaggtcgcgggtataattttgctaacgccggaacaattaatgttcagggtgatggttcagttgctattagcggaggcaccaccagctatactgttcagttagtgaacagcggcacaattaacgtgggtactgaacagggcaaagcagatggaagcaacggtgaaggtctgattggcatcaaaggaaatggttctgcaacaacgattaataatactaaagacggtgtcattaacgtttatgcagataattcatgggcgtttggtggttccactaaagcgattgtgaataatgggataatcaacctgttgtgtaatattggttgcgagatttatgcgccaaataccacagggacgagaaacagtcaggatggaactgcggatataatcgtaccggtcgcttctgcgacgcctgggcaaggtaatgttcctgcggcaccagtcaatgctgtaagtcagcaaaaacttaccaattacactattggtactaatagcgacggaagttccggcaccttgaaagccaataaccttgttatcagtgacaacgtcaaggtaaatactggctttagtgcaggaactgctgatactaccgtggtgattgatgatgttttcaaaggtgaaaatatcagcggcgcggagaatatcacttcctcttcagttgtctggaacgctaaaggcagtaccgatgccagcggcaacgttgacgtcactatgagcaaaaacgcttataccgatgtggcgaccgatgcttcggtgaatgacgtcgcgaaagcactggatgcgggttacaccaacaacgagctgtataccagcctgaacgtcggcacgactgccgaactgaacagcgccctgaaacaggtcagcggtagccaggcgaccacggtattccgcgaagcgcgtgtgctcagcaaccgctttagcatgctggcagatgccgcaccgaaagtgggtaacggtctggcgttcaacgtggtggcgaaaggcgatccgcgcgcggagctggggaacaataccgagtacgacatgctggcactgcgtaaaaccattgacctgagtgaaagtcagaccatgagtctggagtacggtatcgctcgtctcgatggcgacggtgcgcagaaagctggcgataatggtgttacaggcggttacagccagttctttggcctgaaacatcagatgtccttcgacaatggcatgaactggaacaacgcattgcgttatgacgttcacaaccttgacagcagccgttcgattgcatttagcaacacgaacaaaactgctgataccgacgtgaaacagcagtacctggagttccgcagcgaaggagcgaagactttcgaaccgagcgaagggctgaaggtcacaccatatgcgggtgtgaaactgcgtcacacactggaaggtggctatcaggagcgcaatgccggagactttaacctgaatatgaacagtggtagcgaaacggcggtggacagcatcgtcgggctgaaactggactatgcaggtaaagacggctggagcgctagcgctacgctggaaggcgggccgaacttgagctacgcgaagagccagcgcacagcaagcctggcaggtgcaggcagtcagcactttaacatcgatgacggtcagaagggcggcggcatcaacagcctggcaagtgtcggcgtgaagtacagcagcaaagaaagttcgctgaatctggatgcgtacaactggaaagaggaaggcatcagcgacaaaggcgtgatgctgaacttcaagaaaacgttctaa

SEQ ID NO: 9688 - DNA, 591 bp, Escherichia coli
atgccaatttaccagatagacggtctgactccggttgtaccagaagagagttttgttcatccgacagcggtattgatcggcgatgttattctcggcaagggcgtgtacgttgggccaaatgccagcctgcgtggcgatttcggtcgtatcgtggtgaaagatggcgcgaacattcaggataattgcgttatgcacggttttcccgatcaggatactgtcgtggaagaagatgggcatattggtcatagcgctatccttcacggctgcattatccgccgcaatgcattagtgggtatgaacgcggtagtgatggacggtgcggtgattggcgagaacagcattgttggcgcttccgcatttgtgaaagccaaagcagaaatgcctgctaattacctgattgtcggcagcccggcaaaagcgattcgtgaacttagtgagcaggaactggcatggaaaaagcagggcacgcatgagtatcaggtgctggtgacacgctgtaagcagacgttacatcaagtcgagccattgcgggaagttgaacctggcaggaaacgcctggtatttgatgagaatctgcgaccgaaacagtaa

SEQ ID NO: 9689 - DNA, 951 bp, Escherichia coli
atgagtaaacttgatacttttatccaacatgctgtaaacgctgttcctgtcagtggcacatctttgatctcctctctgtatggtgattcgctttcccatcgtggtggtgaaatctggctgggtagtctggctgctttgctggaagggctgggatttggtgagcgtttcgtccgcaccgctttgtttcgtcttaataaagaaggctggctggatgtttcccgcatcgggcgacgcagtttctatagcctcagtgataaaggcttgcgcctgacgcgacgggcagaaagtaaaatttatcgcgcagagcaacctgcatgggatggtaaatggctcctgttgctctcggaaggtttagataaagcgacgctggctgatgtcaaaaagcagttgatctggcaaggttttggcgcactggcacccagtctgatggcatcgccgtcgcaaaaactggccgatgtacagacacttttgcatgaagcgggtgtggcggataacgtgatttgttttgaagcgcaaataccactggcgctttctcgcgcagcactgcgtgccagagtagaagagtgctggcatttaactgaacaaaatgccatgtacgaaacctttattcagtcattccgcccgctggtgccgctgttaaaagaggcggcagacgaattaaccccggagcgtgcatttcatattcagcttttactgatccatttttatcgccgtgtcgtccttaaagacccattgttgccggaggagttgcttccggctcactgggcagggcatacggcgcgtcagctgtgtatcaacatttatcagcgcgtagcgcctgctgctttagcgttcgttagtgaaaaaggtgaaacctcggtcggtgaactgcctgcgccgggaagcctgtattttcaacgttttggcggtttgaacattgaacaggaggcgttatgccaatttaccagatag

SEQ ID NO: 9690 - DNA, 1314 bp, Escherichia coli
atgataaccaatacaaagcttgacccgattgaaaccgcgtctgttgatgagttacaggcgttgcaaacacagcgtctgaaatggacgctcaaacacgcgtatgaaaatgtgccgatgtatcggcgcaaattcgacgcagcaggcgtacatactgatgatttcagggaactttcagacctgcgtaaatttccctgtaccaccaaacaggatctgcgcgacaactatccctttgacacctttgccgtgccaatggaacaagtggtgcgcattcatgcttcttcgggaaccacaggtaaaccgacagttgtcggctatacgcaaaacgatattgataactgggccaatattgtagcgcgttctttgcgtgcggcagggggctcgcccaaagacaaaattcatgtcgcctatggttacggcctgtttactggcgggctgggtgcgcactatggtgccgaacgtctgggcgctacggtgatcccgatgtctggcgggcagacggaaaaacaagcgcaactgatccgtgattttcaaccagatatgatcatggttacgccatcttattgccttaacctgattgaagagctggagcggcagttgggcggtgatgccagcggttgctcgctgcgggttggagtatttggtgctgagccgtggacacaggccatgcgtaaagaaattgagcgtcgcctggggatcaccgcactggatatttatggcctgtcagaagtgatggggccgggggtggcgatggagtgtctggaaactaccgacggcccaaccatttgggaagatcatttctatcctgaaattgttaatcctcaggacggcacaccgcttgccgatggtgaacatggcgaactgttattcaccacgctgaccaaagaagcattgccggtcattcgttaccgcacgcgtgatttaacccgactgttaccaggaacggcgcggactatgcgccgcatggatcgcatcagcggacgcagcgatgacatgttgattattcgcggtgtaaatgtctttccgtcacaactggaagaagagattgtcaaattcgaacatttatcgccgcattaccaactggaggtgaaccgccgggggcatcttgattcactttctgtgaaagtggagttgaaagaaagcagcctgacattgacgcatgagcagcgttgccaggtgtgccaccagctacgccatcggattaagtcgatggtggggatctctactgatgtaatgatcgtgaactgtggcagtatcccgcgttcagaaggcaaggcgtgtcgggtgtttgatctgcgcaatattgttggtgcctga

SEQ ID NO: 9691 - DNA, 1206 bp, Escherichia coli
atgcgtgaagcctttatctgtgacggaattcgtacgccaattggtcgctacggcggggcattatcaggtgttcgggctgatgatctggctgctatccctttgcgggaactgctggtgcgaaacccgcgtctcgatgcggaatgtatcgatgatgtgatcctcggctgtgctaatcaggcgggagaagataaccgtaacgtagcccggatggcgactttactggcggggctgccgcagagtgtttccggcacaaccattaaccgcttgtgtggttccggactggacgcactggggttcgccgcacgggcgattaaagcgggcgatggcgatttgctgatcgctggtggcgtggagtcaatgtctcgggcaccgtttgttatgggcaaggcaaccagtgcattttctcgtcaggctgagatgtttgataccactattggctggcgatttgtgaacccgctcatggctcaacaatttggaactgacagcatgccggaaacggcagagaatgtagctgaactgttaaaaatctcgcgagaagatcaagatagttttgcgctacgcagtcagcaacgtacagcaaaagcgcaatcttcaggcattttagctgaagagattgttccggttgtgttgaaaaacaaaaaaggtgttgtaacagaaatacaacatgacgagcatctgcgcccggaaacgacgctggaacagttacgtggactaaaagcaccatttcgtgccaatggagtgatcaccgcaggcaatgcctccggggtgaatgatggagccgctgcgttgattattgccagtgaacagatggcagcagcgcaaggactgacaccgcgagcgcgtatcgtagccatggcaaccgccggggtggaaccgcgcctgatggggcttggtccggtgcctgcaactcgtcgggtgctggaacgcgcggggttgagtattcacgatatggacgtgattgaactgaacgaagcgttcgcggcccaggcgttgggtgtactacgcgaattggggctgcctgatgatgccccacatgttaaccccaacggaggcgctatcgccttaggccatccattgggaatgagtggtgcccgcctggcactggctgccagccatgagctgcatcggcgtaacggtcgttatgcattatgcaccatgtgcatcggtgtcggtcagggcatcgccatgattctggagcgtgtttga

SEQ ID NO: 9692 - DNA, 423 bp, Escherichia coli
atgagtaataaggcctggcaaaatgcccatgcaatgtatgagaacgatgcctgcgccaaagcgcttggcatcgacattatctcaatggatgaaggctttgctgtagtgaccatgaccgtcactgcacaaatgcttaatggtcatcaaagttgccacggcgggcagctattttcactggctgatactgcctttgcctacgcctgcaatagccaggggctggcagccgtcgcttctgcctgcacgattgattttttgcgtccaggctttgccggagacaccttaactgctactgcgcaggtacgtcatcagggcaagcaaaccggtgtttacgacatcgaaattgttaaccaacaacaaaaaacggttgcgctgtttcgcggtaaatctcaccgcatcggcggcaccattacaggagaagcctga

SEQ ID NO: 9693 - DNA, 1380 bp, Escherichia coli
atgggggctggcattgctgaagttgccgccagtcatggacatcaggttttactgtatgacatttctgctgaagcgctgacccgcgcaatcgacgggatacacgcgcggctaaattcacgagtgacgcggggaaaactgactgctgaaacctgtgaacgcacattgaaacgcctgatcccggtgaccgatattcacgcgctggcagctgcggacctggtcattgaagcggcgtctgaacgtctggaagtcaaaaaagcgctctttgcacagctggcggaagtttgcccgccacaaacgctattgaccactaacacttcgtcaatctctataaccgcgattgctgcggaggtaaaaaatcctgaacgtgttgcggggctgcatttttttaacccggcaccggtgatgaagttggtggaggtggtcagtgggctggcaacggcagcggaagttgttgagcagttgtgtgaactaacgttgagttggggtaagcagcctgtgcgctgtcattcgactcctggatttatcgttaaccgtgttgcgcgtccttattattccgaggcctggcgggcactggaagagcaggttgctgcaccagaagtgattgacgctgcacttcgcgatggcgctggtttcccgatggggccgctggaattaaccgatctgattggtcaggacgtcaattttgctgtcacctgttcggtgtttaacgctttctggcaggagcgtcgttttttaccttcgctggtgcaacaggaactggtgattggtggacggttgggcaagaaaagtgggctgggcgtgtacgactggcgcgcggaacgtgaggcagttgttggcctggaagcggtaagcgacagttttagccccatgaaagtagaaaagaaaagtgacggtgtcacggaaattgacgatgttttattgattgagacacaaggcgagacggcacaggcgctggcaatacgactggcacgcccggtggtagtggtcgacaaaatggcgggcaaggtggtgaccattgctgcggcagcggtgaacccggactcagcgacccgcaaggccatttattacctgcaacagcagggcaaaacagtgctgcaaattgcagattacccaggaatgctgatttggcgaacggtagcaatgatcatcaatgaagcccttgatgcgcttcaaaaaggcgtggcctctgaacaggatatcgataccgccatgcgtcttggggtgaattatccatatggcccgcttgcctggggagcgcaacttggctggcagcgaatattaaggctcctggaaaatctacaacatcactatggcgaagaacgctatcgcccatgttcattgctgcgccaacgagcgcttctggagagcggttatgagtaa

SEQ ID NO: 9694 - DNA, 789 bp, Escherichia coli
atgatggaattcatcctcagtcatgtagaaaagggcgtgatgacactaacgctcaaccgcccggaacgcctgaacagttttaatgatgagatgcacgcacaactggcagagtgcctgaaacaggtcgagcgcgacgacactatccgttgcttgttaattacaggtgccggacgtggattttgtgctggtcaggatcttaacgatcgtaacgttgatcccacaggccccgcaccggatttaggtatgtcagtggagcgtttctataacccactggtacgtcgcctggcaaaactgccaaaaccggtgatctgtgcagttaatggcgtggctgcaggggcaggcgcaacactggcactggggtgcgatatcgttattgctgcccgttcagcaaaattcgtcatggcgtttagtaagttagggttggtacccgattgcggtggtacctggttactgccacgcgttgccggacgagcgcgcgccatggggctggcactgctggggaatcaactgagtgctgaacaggcgcacgaatgggggatgatctggcaggttgttgatgatgaaacgctggcagataccgcgcaacagctggcacggcatctggcgacacaaccgacatttggtcttggacttatcaagcaagcgataaatagcgctgaaaccaatacgcttgatacgcaactggatctggaacgtgactatcagcgacttgccggacggagcgcagattatcgtgaaggtgtcagtgcgttcctggctaaacgctcaccgcagttcacggggaaatag

SEQ ID NO: 9695 - DNA, 768 bp, Escherichia coli
atgagcgaactgatcgtcagccgtcagcaacgagtattgttgctgacccttaaccgtcctgccgcacgtaatgcgctgaataatgtcctgctgacgcaactggtaaatgagctggaagctgcggctatcgatcccagcatttcggtctgtgtgattaccggtaatgcacgcttttttgccgctggggccgatctcaacgaaatggcagaaaaagatctcgcggccaccttaaacgatacacgtccgcagctatgggcgcgattgcaggcctttaacaaaccactcatcgcagccgtcaacggttacgcgcttggtgcgggttgcgaactggcattgttgtgcgatgtggtggttgccggagagaacgcgcgttttgggttgccggaaatcactctcggcatcatgcctggcgcaggcggaacgcaacgtttaatccgtagtgtcggtaaatcgttagccagcaaaatggtgctgagcggagaaagtatcaccgctcagcaagcacagcaggccgggctggttagcgacgtcttccccagcgatttaaccctcgaatacgccttacagctggcgtcgaaaatggcacgtcactcgccgctggccttacaagcggcaaagcaagcgctgcgccagtcgcaggaagtggctttgcaagccggacttgcccaggagcgacagttattcaccttgctggcggcaacagaagatcgtcatgaaggcatctccgctttcttacaaaaacgcacgcccgactttaaaggacgctaa

SEQ ID NO: 9696 - DNA, 1071 bp, Escherichia coli
atgacaacgtttcattccttaacggtggcaaaagtggagccagaaacccgtgatgcggtaaccattacctttgcggtaccccagcctttgcaggaggcgtatcgctttcgtcccggtcaacatttgaccttaaaagccagccttaatggtgaagaattacgccgttgttactccatttgccgtagctacctgcctggcgaaattagtgtggcggtgaaagccattgaaggcggacgtttctcccgctatgcccgcgaacacatccgccaggggatgacgctggaagtcatggtgccgcaggggcatttcggctatcagccacaggccgaacgccagggccgctatctggctattgcagcaggatcgggtattacgccaatgctggcgattatcgccaccactttacaaaccgagcctgaaagtcagttcactctgatttacggtaaccgtaccagccagagcatgatgtttcgccaggcactggcagacctgaaagacaaatatcctcagcgtttacagttgttgtgcattttcagtcaggaaactctcgacagcgatctgcttcacgggcgtattgacggtgaaaaattacagtcacttggggcctcgctcattaattttcgtctttatgatgaggcgtttatttgtggtccggcggcgatgatggatgacgcggaagctgccttaaaagcactgggaatgccagaaaaagcgattcatctggagcggtttaatacggctggcacgcgcgtcaaacgtaacgttaacgtgcaaagtgacggacaaaaagtgactgtgcgtcaggatgggcgggatcgggaaatcgtgcttaatgccgacgatgaaagcattctcgatgcggcattgcgccagggggctgatctgccctatgcctgcaaaggcggcgtctgtgcgacctgcaaatgcaaagtgctgcgtggcaaagtggcgatggaaaccaattacagtctggaaccggatgaactggctgcaggctatgtgttgagttgccaggcactgccgctgaccagcgatgtggtggttgactttgacgcgaaggggatggcatga

SEQ ID NO: 9697 - DNA, 498 bp, Escherichia coli
atgcaacgtctggccaccattgcaccgccacaggtgcatgagatatgggcgctactcagccagatcccggatccggagatcccggtgctgaccattactgatttaggcatggtgcgtaatgtgacacagatgggagaaggatgggtgatcggctttacgccgacatattccggttgtccggcaacggaacatttgattggcgcgatacgtgaggcaatgacaaccaacgggtttacccccgttcaggttgtgctgcaactcgacccggcgtggaccaccgactggatgacccccgatgcccgtgagcgtctgcgacagtatggcattagcccgcccgccggacacagttgccatgcccatttgccgccagaagtacgttgcccgcgttgcgccagcgtccataccacacttatcagtgaatttggttccacggcctgcaaagcattgtatcgctgcgatagctgtcgcgaacctttcgattatttcaaatgtatttga

SEQ ID NO: 9698 - DNA, 747 bp, Escherichia coli
atgaatcagttaacggcttacaccttgcgcctgggcgataactgcctggtgctctcccagcggttgggtgaatggtgcggtcacgcaccggaactggaaatcgatctcgcactggcaaacattggcctcgatttattaggtcaggcacgcaacttcttatcgtatgccgctgaattagcgggagaaggcgatgaagataccctggccttcacccgagacgagcgccagttcagcaacttattgttggttgaacaaccaaacggcaattttgccgacaccattgcacgtcagtatttcatcgatgcatggcatgtggcgctctttacccgtctgatggaaagccgcgagccgcaactggcggcgatttctgccaaagcaattaaagaagctcgctatcacctgcgttttagtcgtggctggctggagcgactgggcaatggtactgacgtatcagggcaaaagatgcagcaggccatcaacaagttgtggcgttttaccgccgaactgttcgatgccgacgagattgatattgcactgagtgaagagggtattgcggttgacccacgcactttacgcgcagcgtgggaagccgaagtttttgctgggttcaacgaagccacattgaacgtaccgcaagagcaggcgtatcgcactggcggtaaaaaaggactgcataccgaacaccttggacccatggtggcagaaatgcagtatctccagcgtgtcttacccggtcagcaatggtaa

SEQ ID NO: 9699 - DNA, 288 bp, Escherichia coli
atgagtaatgtttactggccgttatacgaagttttcgtgcgtggcaaacagggcttatcacaccgccatgttggcagtttacatgctgccgatgagcggatggcactggaaaatgcccgtgatgcttatacccgtcgtagcgaaggatgttcaatttgggtggtgaaggcgagtgaaattgttgcctcgcaaccggaagaacgcggtgaattttttgatccggctgaaagcaaggtctatcgccatccaacgttttacaccatccctgatggcattgagcacatgtga

SEQ ID NO: 9700 - DNA, 930 bp, Escherichia coli
gtgacccaagaagaacgctttgagcaacggatagcccaggaaacggctatcgagccgcaggactggatgcccgatgcttaccgaaagacattgatccgccagattgggcagcatgcgcactccgagattgttggtatgttgcctgaaggtaactggatcactcgcgcaccaaccttacggcgtaaagccattctgttggccaaagtgcaggatgaagcaggtcatggtctgtatctctatagcgccgccgaaacactgggctgcgccagagaagacatctaccaaaaaatgctcgacggacggatgaaatattcctccatctttaattatccgacattgagttgggctgatatcggtgttatcggctggctggtggatggcgcagcgatcgtcaatcaggtggcgttatgccgcacttcttatggcccgtatgccagagcaatggtgaaaatctgcaaagaagagagttttcaccagcgtcaggggtttgaagcctgcatggcactggcgcagggcagcgaagctcaaaagcagatgttgcaagacgccattaaccgtttctggtggccagccttaatgatgttcgggccaaacgatgataactcgccaaacagcgccagaagtctcgcctggaaaatcaaacgtttcaccaacgacgaactccgccagcgtttcgtggataacaccgttccacaggttgaaatgctcggtatgaccgttcctgacccggatctgcattttgatactgaaagcggtcactaccgctttggtgagatcgactggcaggagtttaacgaagtgataaacggtcgcggaatttgtaatcaggagcggctcgacgccaaacgtaaagcctgggaagaaggtacctgggtacgggaagctgcgctggcccatgcacaaaaacaacatgcctgtaaggtcgcataa

SEQ ID NO: 9701 - DNA, 2046 bp, Escherichia coli
atgcagcagttagccagtttcttatccggtacctggcagtctggccggggccgtagccgtttgattcaccacgctattagcggcgaggcgttatgggaagtgaccagtgaaggtcttgatatggcggctgcccgccagtttgccattgaaaaaggtgcccccgccctccgcgcgatgacctttatcgaacgtgcggcgatgcttaaagcggtcgctaaacatctgctgagtgaaaaagagcgtttctatgctctttctgcacaaacaggcgcaacgcgggcagatagttgggttgatattgaaggcggtattgggacgttatttacttacgccagcctcggtggccgggagctgcctgacgatacgctgtggccggaagatgaattgatccccttatcgaaagaaggtggatttgccgcgcgccatgtactgacctcgaagtcaggtgtggcggtgcatattaacgcctttaacttcccctgctggggaatgctggaaaagctggcaccaacgtggctgggcggaatgccagccatcataaaaccagctaccgcgacggcccaactgactcaggcgatggtgaaatcaattgtcgatagtggtcttgttcccgaaggcgcaattagtctgatctgcggtagtgcgggcgaccttttggatcatctggacagccaggatgtggtgactttcacggggtccgcgacgaccggacagatgctgcgagttcagccaaatatcgttgccaaatctatccccttcactatggaagctgattccctgaactgctgcgtactgggcgaagatgtcaccccagatcaaccggagtttgcgctgtttattcgtgaagttgtgcgtgagatgaccacaaaagccgggcaaaaatgtacggcaatccggcggattattgtgccgcaagtattggttaatgctgtcagtgacgctctggttgcgcgattacagaaagtcgtggtcggtgatcctgcgcaggaaggcgtgaaaatgggcgcactggtaaatgctgagcagcgtgccgatgtgcaggaaaaagtgaacacattgctggctgcaggatgcgagattcgcctcggtggtcaggcggatttatctgctgcgggtgccttcttcccgccaaccttattgtactgtccgcagccggatgaaacaccggcggtacatgcaacagaagcctttggccctgtcgcaacgctaatgccagcacaaaaccaacaacatgctctgcaactggcttgtgcaggcggcggtagccttgcgggaacgctggtgacggctgatccgcaaatagcgcgtcagtttattgccgacgcggcacgtacgcatgggcgaattcagatcctcaatgaagaatcggcaaaagaatccaccgggcatggctccccactgccacaactggtacatggtgggcctggtcgcgcaggaggcggtgaagaattaggtggtttacgggcggtgaaacattacatgcagcgaaccgctgttcagggtagtccgacgatgcttgccgctatcagtaaacagtgggtgcgtggtgcgaaagtcgaagaagatcgtattcatccgttccgcaaatattttgaggagctgcaaccaggcgacagcctgttgactccccgccgcacaatgacagaggccgatattgtgaactttgcttgcctcagcggcgatcatttctatgcacatatggataagattgctgctgccgaatctatttttggtgagcgtgtagtacatgggtattttgtgctttctgcggctgcgggtctgtttgtcgatgccggagttggtccggtcattgctaactacgggctggaaaacttgcgttttatcgaacccgtaaaaccaggcgataccatccaggtgcgtctcacctgtaagcgcaagacgctgaaaaaacagcgtagcgcagaagaaaaaccaacaggtgtagtagaatggtcggtagaggtattcaatcagcatcaaaccccggtggcgctgtattcaattctgacgctggtggccaggcagcacggtgattttgtcgattaa

SEQ ID NO: 9702 - DNA, 2274 bp, Escherichia coli
atgggaagcccctctctgtattctgcccgtaaaacagccctggcgttggcagtcgccttaagtttcgcctggcaagcgccggtatttgcccacggtggtgaagcgcatatggtgccaatggataaaacgcttaaagaatttggtgccgatgtgcagtgggacgactacgcccagatctttaccctgattaaagatggcgcgtacgtgaaagtgaagcctggtgcgcaaacagcaattgttaatggtcagcctctggcactgcaagtcccggtagtgatgaaagacaataaagcctgggtttctgacacctttattaacgatgttttccagtccgggctggatcaaacctttcaggtagaaaagcgccctcacccacttaatgcgctaactgcggacgaaattaaacaggccgttgaaattgttaaagcttccgcggacttcaaacccaatacccgttttactgagatctccctgctaccgccagataaagaggctgtctgggcgtttgcgctggaaaacaaaccggttgaccagccgcgcaaagccgacgtcattatgctcgacggcaaacatatcatcgaagcggtagtggatctgcaaaacaacaaattgctatcctggcaacccattaaagacgcccacggaatggtgttgctggatgatttcgccagtgtgcagaacattattaacaacagtgaagaatttgccgctgccgtgaagaagcgcggtattactgatacgaagaaagtgattaccacgccgctgaccgtaggttatttcgatggtaaagatggcctgaaacaagatgcccggttgctcaaagtcatcagctatcttgatgtcggtgatggcaactactgggcacatcccatcgaaaacctggtggcggtcgttgatttagaacagaaaaaaatcgttaagattgaagaaggtccggtagttccggtgccaatgaccgcacgcccatttgatggccgtgaccgtgttgctccggcagttaagcctatgcaaatcatcgagcctgaaggtaaaaattacaccattactggcgatatgattcactggcgtaactgggattttcacctcagcatgaattctcgcgtcgggccgatgatctccaccgtgacttataacgacaatggcaccaaacgcaaagtcatgtacgaaggttctctcggcggcatgattgtaccttacggtgatcctgatattggctggtactttaaagcgtatctggactctggtgactacggtatgggcacgctaacctcgccaattgcccgtggtaaagatgcaccgtctaacgcagtgctccttaatgaaaccattgccgactacactggcgtgccgatggagatccctcgcgctatcgcggtatttgaacgttatgccgggcctgagtataagcatcaggaaatgggccagcccaacgtcagtaccgaacgccgggagttggtggtgcgctggatcagtacagtgggtaactatgactacatttttgactggatcttccatgaaaacggcactattggcattgatgccggtgctacgggcatcgaagcggtgaaaggtgttaaagcgaaaaccatgcacgatgagacggcgaaagatgacacgcgctacggcacgcttatcgatcacaatatcgtgggtactacacaccagcatatttataatttccgcctcgatctggatgtagatggcgagaataacagcctggtggcgatggacccggtggtaaaaccgaatactgccggtggcccacgcaccagtaccatgcaagttaatcagtacaacatcggcaatgaacaggatgccgcgcagaagtttgatccgggcacgattcgtctgttgagtaacccgaacaaagagaaccgcatgggcaatccagtttcctatcaaattattccttatgcaggtggtactcacccggtagcaaaaggtgcccagttcgccccggacgagtggatctatcatcgtttaagctttatggacaagcagctttgggtaacgcgttatcaccctggcgagcgtttcccggaaggcaaatatccgaaccgttcctctcatgacaccggtcttggacaatacagtaaggataacgagtcgctggacaacaccgacgccgttatctggatgactaccggcaccacacatgtggcccgtgccgaagagtggccgattatgccgaccgaatgggtacatactctgcttaaaccatggaacttctttgacgaaacgccaacgctaggggcgataaagaaagataagtga

SEQ ID NO: 9703 - DNA, 1500 bp, Escherichia coli
atgacagagccgcatgtagcagtattaagccaggtccaacagtttctcgatcgtcaacacggtctttatattgatggtcgtcctggccccgcacaaagtgaaaaacggttggcgatctttgatccggccaccgggcaagaaattgcgtcaactgttgatgccaacgaagcggatgtagataacgcggtcatgtctgcctggcgggcctttgtctcgcgtcgctgggccgggcgattacccgcagagcgtgaacgtatcctgctacgttttgccgatctggtggaacagcacggtgaggagctggcacagctggaaaccctggagcaaggtaagtcaattgctatttcccgtgcttttgaagtgggctgtacgctgaactggatgcgttataccgccgggttaacgaccaaaatcgcgggtaaaacgctggacttgtcgattcccttaccccagggggcgcgttatcaggcctggacgcgtaaagagccggttggcgtggtagcgggaattgtgccatggaactttccgttgatgattggcatgtggaaggtgatgccagcactggcagcaggctgttcaatcgtgattaagccatcggaaaccacgccactgactatgttgcgcgtggcggaactggccagcgaggcaggtattcctgatggcgtttttaatgtggtcaccgggtcaggttctgtatgcggcgcggccctgacgtcacatcctcatgttgcgaaaatcagttttaccggttcaaccgcgacgggcaaaggtattgccagaactgctgctgatcgcttgacgcgtgtaacgctggaactgggcggtaaaaacccggcaattgtattaaaagatgctgatccgcaatgggttattgaaggcttgatgaccggaagtttcctgaatcaggggcaagtatgcgccgccagttcgcgaatttatattgaagcgccgttgtttgacacgctggttagtggatttgagcaggcggtaaaatcgttgcaagtgggaccggggatgtcacctgttgcacagattaaccctttggtttctcgtgcgcattgcgacaaagtgcgttcattccttgacgatgcgcaggcacagcaagcagagctgattcgcggggcgagtggacctgccggagagggatattatgttgcgccaacgctggtggtaaatcccaatgctaaattgcgcttaactcgtgaagaggtgtttggtccggtggttaacctggtgcgtgtagcggatggagaagaggcgttacaactggcaaacgacacggaatatggcttaactgccagcgtctggacgcaaaatctctcccaggctctggaatatagcgatcgcttacaggcaggtacggtgtgggtaaacagtcataccttaattgacgctaacttaccgtttggtgggatgaagcagtcaggaacaggccgtgattttggcccggactggctggacggttggtgtgaaaccaagtcggtgtgtgtacggtattaa

SEQ ID NO: 9704 - DNA, 138 bp, Escherichia coli
atgggtgcgaaaattttaatagcaaaaccgcaatatcgggataacgctacaggagaaggcgattattctattttccggaaacaaggtgaatattcaaaaattcctgtcaaattgcctttcgccctgaaaaatgcatag

SEQ ID NO: 9705 - DNA, 915 bp, Escherichia coli
atgtactcaataaaaaaagtaaccatgctcttggggtgcctcgccctcacctgctcgatcgcatttcaggcgagtgcaactgaaaaattcaaggtcattacaacatttaccatcatcgcagatatggccaaaaacgtggctggagatgctgcagaagtctcatccataaccaagcccggtgcagaaattcatgagtatcagcctacccctggcgatattaaacgtgcgcagggggcacaactgattctcgccaatggtatgaatctggaattgtggttccaacgcttttaccagcatcttaatggggttccagaagtaattgtctcttcgggtgtgacgccagtagggatcactgaaggcccctatgagggcaaacctaacccccatgcctggatgtcgccagataatgctctgatttacgtcgataatattcgtgatgcgttgataaaatacgatccggcaaatgcacaaacctaccaacgtaatgccgatacttataaagccaagattacccaaacccttgcccccctgcgtaagcagattgctgaactccctgagaatcagcgatggatggtcaccagtgaaggggctttttcttatctcgcacgcgatttggggctaaaagagctttatctgtggccgattaatgccgatcaacaaggcacgccgcagcaggtacgtaaggttgttgatatggtgaagaaaaatcatatcccggcagtctttagcgagagtacgatttccgataaaccagcgcgtcaggttgcgcgtgaaaccggcgcgcactacggcggtgtactctatgtcgattccctgagcacagaaaacggcccggtacctacgtatatcgaccttctgaaggttactaccagtacgctggtacagggaattaaagccgggaaaagggagaaataa

SEQ ID NO: 9706 - DNA, 189 bp, Escherichia coli; identical to SEQ ID NO: 6132

SEQ ID NO: 9707 - DNA, 189 bp, Escherichia coli; identical to SEQ ID NO: 6133

SEQ ID NO: 9708 - DNA, 219 bp, Escherichia coli
atgcagaaacgagaacccgtcatcatcgtgccagactataccgatgatgaactttatgagtggatacaccagaaaattaaggctgcgcaggacctgaaatgggccaatgaagccagggctaagcaggctgaaaatctgtccgctctggagcaggatatcaccaggctggaaaaagcagcggcattaagcattgccagaatgattacatacccgcgttaa

SEQ ID NO: 9709 - DNA, 162 bp, Escherichia coli
gtgatactacgtcatcgtactggcccggcattccaggccataaaagacggtctggcagtgggactaaatgcactgacgctgacggatattaccaaaaatgcaacgtatggcgttgagatggaaagtctggtgctggagataaatgcaccggcatcatcataa

SEQ ID NO: 9710 - DNA, 510 bp, Escherichia coli
gtggctacgcagactgaagttgccaggcatttaagtctgaccgatcgccagcttcgcagattgcagaaattgccgggtgccccgatatcgaataagcgagggcaactggatctggatgcctggcgcgatttttacatatcgtatctgagaagaagtaaaaacgatgtgcctgatggcgatagcgaagacgactatgaggagaaattgcttattgccagatgggaactgacagcagaacaggctgttacacagcagttaaaaaatgaggtgtcaaaaggaaaacttattgataccgggttctgtatttttgctctcagcaagctggcaatggcgttatccagtacgcttgattccatccctttatccatgcagcgacagtttcctgatttaacaccgcgccatcttgaccatctgaaaacccttattgcgaagggggcaaatcagtgtgcgcgggcgggggataaattaccggatttactcgatgaatatatcagagcaacaactgaataa

SEQ ID NO: 9711 - DNA, 1044 bp, Escherichia coli
atgaacgatagattatgctttgaagtgcacgataacaagggttatttcgtatttccggatacctggtttggcccattgctgggggagtttgaagaagtgcttgatgcatacgacgctgatgaaatcagcgagacgagttacatcaacaaactccgacgccttgctcaacgggagccggactttattgatatacacgctcatctggcatatgcatttctggaacagaatgccccgcgtaaggcactgaacgccgctcttaaaggactggcggcaggtaatcgtatcatcccggaaagtttctgtggtgaaataatctggatgcatcccgaaaaccggccttatctgcgcgcgctttatgcagcaattctcgcaaatgtgcacttacagcgccatcaggatgcggttatgctcactgataaaatactggcatacaatcctgaagataatcagggggctcgctggttgttgggttcagagctgttacgcaccggcgatcatgagcgagccttcagtgtactgaaagagcatgctgatgaattttcaccttactggtatgaactcggtctcctgcattttctgaacggggaacatgttaaggccgccacagcttttcgccatggctttgccacaaacacttacatcgcagaaatgctgtgcggaaatctgcatccatttccacttgctgtgtggcatgacttctccggctctctggatacggcagaagattactatgcaacatactcaccattatggggacaatattcggaagcattgctgtttgtaaactggctctataaccattcctccgtgctgcatgaacgttcagaaatcattaaatgcgccgaaatgctgattcaggaagatgatttcgaaatatgcgaaagtattttaagacagcaggagcacctgtggaaaagaattgacaagacactttctgaggaaattgtacagaaatgcagaaatatgaacggtgaatatatctggccctggatattgcccttttccgcagcagggataaaacattcaagcatccagcatcagtag

SEQ ID NO: 9712 - DNA, 2187 bp, Escherichia coli
atgattactcgtattcctcgtagttctttctctgcaaatattaataatacagcccagacaaatgaacaccaaaccctgagtgaattgttttataaagaactcgaggataaattttctggcaaggagctggcgacgcctctattaaaaagcttctcagagaactgtagacaaaatggtcgtcatatctttagtaacaaggattttgtcattaagttttccacgtccgtcttacagactgataaaaaagaaattacgataattaataaaaatgaaaacacgacactcactcaaaccattgctccaatatttgaagaatacctgatggaaattttacctcaacgctcagacgctcttgataaacaaaaattaaatctaaaatcagatagaaaagaaaaagaatttccaagaattaaacttaatggtcaatgttattttccggggcgaccccaaaaccgtatagtatgccgacacattgctgcacaatatattaatgatatttatcagaatgttgattacaaaccccatcaagatgattactcttcagctgaaaaatttctcactcacttcaacaaaaaatgcaaaaaccagactttggcgttgatttccagccgtcctgaggggcgttgcgttgctgcctgcggtgatttcgggctagttatgaaagcatattttgacaagatggaatcaaatggcatcagtgttatggcagccatattattggtggataaccatgctttgacggtccggctaagaataaagaacacaactgaaggatgtacccattacgtggtttcggtttatgatccaaatgtaactaacgataaaataagaatcatgagcgaaagtaaagaggatattaaacactattcactgatggactttatgaatgtagattatagcctcctgaaatggtcaaatgatcatgttattaaccaatctgttgcaataattccagcacttccgaaagaacagctattgatgctaaaaggatctgtggatgaaataccccctccattatcacctgcaacgatgaatttgctaatggcaattggtcagaatcatcaacttacgcaactgatgactcaactccagaaaatgccagaactacatagaacagaaatgttgactgcctataatagtattaacctccccggtttatatttggctataaattatggtaatgcggatatcgttgagactattttcaattcattgtcagagccaggatatgaagggttactctcgaaaaaaaatctcatgcatattctggaggcaaaagataaaaatggtttttctggattatttttagcgatatcacgtaaggataaaaatgttgtaacctcgattctgaacgtcttacctaaactggccgcaacacatcatttagataatgaacaggtgtataaattcctgagtgccaaaaatagaacgtccagccatgttttataccatgttatggcgaatggtgatgccgacatgctgaaaattgttttggacgcgttacctttgttaattcgcacatgtcatttgactaaagaacaggtactcgatctcctgaaggcaaaggatttttatggttgcccaggactatacctggcgatgcaaaatggacatagcgatatcgtgaaagttattctcgaagcattaccctgtctggcccaggaaattaacatttcagcttccgatattgtagatcttctgaccgctaaaagtcttgcgcgcgacacgggtttgtttatggccatgcagcgcggacatatgaacgttattaagactatttttaacgcattacccactctgtttaatacgtttaaattcgataaaaaaaatatgaagcccctcctcctggcaaataattctaatgaatatcccggtttgttttcagcgatacagcataaacaacaaaacgttgtagagacggtttatcttgctttatctgaccatgcacgcctgtttggatttactgctgaagatattatggatttttggcaacataaagcgccacaaaaatactctgcctttgagttggcttttgaattggatcaccgggttattgctgaattaatccttaatacgataaataagatggctgaaagctttggctttacggataaccctcgatacattgcggagaaaaattatatggaagctttactcaaaaaagcatctccccataccgtacgctaa

SEQ ID NO: 9713 - DNA, 411 bp, Escherichia coli
atgttttatcccgcctatatccacagtgatcctgacggcagcgccagcggttttttccctgatgttccaggctgttattttgctggtgatacgctggacaacgctttccaggatgcgcgaagtgcactggtcgcgcacttcgaaaccttatgcgagatgaatgaagagttgccgcttccaggctctgtggaaacacatctggtccagcgtgcgcaggactttattggtgggcaatggttgctggtggatatcaatatgaatcagttcgaaggtcgggctgaacgtatcaatattacgatgccgaaaaggttactgaacaagattgatacctacgtgcgcaataacccagactacgccaacagaagtgcgtttctggcagaagctgcccggcgtgtattgccgggcgtttaa

SEQ ID NO: 9714 - DNA, 186 bp, Escherichia coli
gtgaaaagtgcagacgtgatcgccatcctgaagcagcatggctgggaacatattcgaacccgtggcagtcatcatcagttccgccaccctgttcatccgggtctggtgacggttccgcaccctaaaaaagatattaagcccggtacgctggcgcaaattgggcgtcaggctggtttaacattttaa

SEQ ID NO: 9715 - DNA, 1539 bp, Escherichia coli
atgaccaataatcccccttcagcacagattaagcccggcgagtatggtttccccctcaagttaaaaacccgctatgacaactttattggcggcgaatgggtagcccctgccgatggtgagtattaccagaacctgacgccggtgaccgggcagctgctgtgcgaagtggcgtcttcgggcaaacgagacatcgatctggcgctggatgctgcgcacaaagtgaaagataaatgggcgcatacttcggtgcaggatcgtgcggcgattctgtttaagattgccgatcgaatggaacaaaaccttgaactgttagcgacggctgaaacctgggataacggcaaacccattcgcgaaaccagtgctgctgatgtaccgctggcgattgaccatttccgctatttcgcctcgtgtattcgggcgcaggaaggcgggatcagtgaagttgatagcgaaaccgtggcctatcatttccatgaaccgttaggcgtggtggggcagattatcccgtggaacttcccgctgctgatggcgagctggaaaatggctcccgcgctggcggcgggcaactgtgtggtgctgaaacccgcacgtcttaccccgctttctgtactgctgctaatggaaatcgtcggtgatttactgccgccgggcgtggtgaacgtggttaacggcgctggtggggaaattggcgaatatctggcgacctcgaaacgcatcgccaaagtggcgtttaccggctcaacggaagtgggccaacaaattatgcagtacgccacgcaaaatattattccggtaaccctggaactgggcggtaagtcgccaaatatcttctttgctgatgtgatggatgaagaagatgcctttttcgataaagcgctggaaggctttgcactgtttgcctttaaccagggcgaagtttgcacctgtccaagccgtgctttagtgcaggagtctatctacgaacgcttcatggaacgcgccatccgccgtgttgaaagtattcgtagcggtaacccgctcgacagcgtgacgcaaatgggcgcgcaggtttctcacgggcaactggaaaccatcctcaactacattgatattggtaaaaaagagggcgcagacgtgctcaccggcgggcggcgcaagctgctggaaggcgaactgaaagacggctactacctcgaaccgacgattctgtttggtcagaataatatgcgcgtgttccaggaggagatttttggcccggtgctggcggtaaccaccttcaaaacaatggacgaggcgctggagctggcgaatgacacgcaatatggcctgggcgcgggcgtctggagccgcaacggtaatctggcctataagatggggcgcggcatacaggccgggcgcgtgtggaccaactgttatcacgcttacccggcacatgcggcgtttggtggctacaaacaatcaggtatcggccgtgaaacccacaagatgatgctggagcattaccagcaaaccaagtgcctgctggtgagctactcggataaaccgttggggctgttctga

SEQ ID NO: 9716 - DNA, 1152 bp, Escherichia coli
atggcagcttcaaccttttttattccttccgtgaatgttattggtgctgattcattgaatgatgcaatgaatatgatggcagattatggatttacccgtaccttaattgtcactgacaatatgttaacgaaattgggtatggcgggtgatgtgcaaaaagcactggaagaacgcaatatttttagcgttatttatgatggcacccaacctaaccccaccacggaaaacgtcgctgcaggtttgaaattacttaaagaaaataattgcgatagcgtgatttccttaggcggtggttctccacacgactgcgcaaaaggtattgcgctggtggcagccaatggtggcgatattcgcgattacgaaggcgttgaccgctctgcaaaaccgcagctgccgatgatcgccatcaataccacggcgggtacggcctctgaaatgacccgtttctgcatcatcactgacgaagcgcgtcatatcaaaatggcgattgttgataaacatgtaactccgttgctttctgtcaatgactcctcgctgatgatcggtatgccgaagtcactgaccgccgcaacgggtatggatgccttaacacacgctatcgaagcgtatgtttctatcgctgcaacgccgatcactgacgcttgtgcactgaaagcggtgaccatgattgccgaaaacctgccgttagccgttgaagatggcagcaatgctaaagcgcgtgaagcaatggcttatgcccagttcctcgctggtatggcgttcaacaacgcatctcttggttatgttcatgcgatggcgcaccaactgggcggtttctacaacctgccacacggtgtatgtaatgctgttctgctgccacacgttcaggtgttcaacagcaaagtcgctgctgcgcgtctgcgtgactgtgctgctgccatgggcgttaacgtgacaggcaaaaatgacgcggaaggcgcagaagcgtgcatcaatgccatccgtgaactggcgaagaaagtgaatatcccggcaggcctgcgtgacctgaacgtgaaagaagaggatttcgcggtactggccaccaatgccctgaaagatgcgtgtgggtttactaacccgattcaggcaactcacgaagagattgtggcaatttatcgcgctgcgatgtaa

SEQ ID NO: 9717 - DNA, 609 bp, Escherichia coli
atgaaactcgtcggtagctacaccagcccgtttgtacgcaaactttctattctgttgttagaaaagggcataactttcgaatttattaatgaactgccctataacgcggacaacggcgtggcgcaatttaacccgttaggaaaagtgccggtgctggtgaccgaagagggcgaatgctggtttgattcgccgatcatcgctgaatatattgaattaatgaatgtcgctccggcgatgttgccgcgcgatccgctggagtcgttgcgggtgcgcaaaattgaggcgctggcggatggcattatggatgccggactggtatcggtgcgtgaacaggcgcgtccggcggcgcagcagtctgaagatgaattgttacgccagcgggagaaaatcaaccgcagtctggatgtgctggaaggatatctggtcgatggcacactcaaaaccgatacggtcaatctggcgactatcgccattgcctgtgccgtcggatatctcaatttccgccgcgttgcgccaggttggtgtgtcgaccgcccacacttagtcaaactggtcgaaaacctgtttagccgcgaaagttttgctcgcaccgaaccgccaaaggcttga

SEQ ID NO: 9718 - DNA, 273 bp, Escherichia coli
atgggttgccagaaagatattgcagagaagatacaaaaacagggcggtgattatgtattcgctgtaaaaggaaatcagggacgactaaataaagcctttgaggaaaaattcccactgaaagaattaaataatccagagcatgacagttacgcaatgagtgaaaagagtcacggcagagaagaaatccgtcttcatattgtttgcgatgtccctgatgaacttattgatttcacgtttgaatggaaagggcagccatggacagaaactacctga

SEQ ID NO: 9719 - DNA, 1482 bp, Escherichia coli
atgaataaacacgcatcacagccgcgcgctatttactatgtcgttgcgctgcaaatctgggaatattttagcttttacggcatgcgtgccctgctgattctctatctcaccaatcaactaaaatacaacgatactcacgcctacgagttatttagcgcctactgttcgctggtgtatgtcacgccaatcctcggtggctttttggcggataaagttctcggtaatcgcatggcggtgatgctgggggcgttgttgatggcgatcggtcatgtggtgctgggtgccagtgagatccatccgtcattcctctatctgtccctggcgattatcgtttgtggctatggtctgtttaaatccaacgtcagttgcctgctcggcgagctgtatgagccaaccgatccgcgtcgtgatggcggtttctcgctgatgtatgcggcgggtaacgtggggtctattatcgcacctatcgcctgtggttacgcccaggaagagtatagctgggcgatgggctttggcctggcggcggttggcatgatcgcgggtctggtcattttcttatgtggcaatcgtcatttcactcatacccgcggcgttaacaaaaaagtactgcgtgcgacaaactttctcctgcccaactggggatggctgctggttctgctggtggcaacgcctgcgctgatcaccgtactgttctggaaagagtggtcggtatacgccttgattgtcgcgactattattggcctgggtgtattggcaaaaatttatcgcaaagcagaaaaccagaaacagcgtaaggagctggggctgattgttaccctcaccttcttcagcatgttgttctgggcattcgcacaacaggggggtagctcgattagcctttatatcgaccgcttcgttaaccgcgatatgtttggttataccgttccgactgctatgttccagtcgattaatgccttcgcagttatgctgtgcggtgtgttcctggcgtgggtggttaaagagagcgtcgcaggtaatcgtaccgtgcgcatctggggaaaatttgctcttggccttggcctgatgagcgccggattctgcattctgaccttaagcgcccgctggtccgcaatgtatggtcactcttctctgccactaatggtgttaggcctggcggtgatgggctttgcggaactgtttatcgacccggttgctatgtcgcagattacgcgcattgaaatccctggcgtgactggcgtattaactggcatttatatgctgctttccggcgcgattgcgaactatctggctggcgtgattgccgatcagacatcgcaggcttcgtttgatacttccggggcgatcaactactccatcaatgcatatattgaagtatttgatcaaattacctggggcgcactggcgtgtgtaggagtggtgttgatgatttggctgtatcaggcgctgaaattcagaaaccgcgcgctggcgctggagtcttaa

SEQ ID NO: 9720 - DNA, 732 bp, Escherichia coli
atgacatttatgaaaggactaccccttttgttgttggttgccagtctgtgcagctacgctgcgctacaacccgatcgcactcgcattgtgtttaacgctaatgataaagccaccagcctgcgagtggataatcgtagcgataaactcccctacctcgcttattcctggctcgaaaatgaaaaaggggagaaaagcgatgatcttctggtcgccctgccaccgatacaacgtctggaaccgaaagcaacaacgcaggtgcggatagtcaagcaagcctcgaccgcgaaattacctggcgatcgcgaaacgctatttttctacaatatgcgtgaaattcctcccgccccagaaaaaaatagcgaccatgccgttctgcaagtcgccattcagagtcgtatcaaggtattctggcgaccggctgcattacgcaagaaagcaggagaaaaggtcgaactgcagttacaggtcagccagcaggccaaccaactgacactgaaaaatcctaccgcgtattatctgaccattgcctatctggggagaaatgaaaaaggcgttctccccggcttcaaaaccgtgatggttgcgccttttagtacggtcaacacaaacaccggaagttatagcggcaggcagttttatctcggttatatggatgattacggcgcgttacgcatgacgacgctcaactgcagcggacaatgccgtttacaagcagtggaggcgaagaaatga

SEQ ID NO: 9721 - DNA, 2412 bp, Escherichia coli
atggcgataccttccgcattggcggtcgaattcaacctgaatgtcctcgataaatcgatgcgagatcgcattgatatttcattattaaaggaaaaagggggcattgctcccggtgaatattttgttagcgttgcagtaaataacaaccaaatcagtaacggacaaaaaattgactggaaaaagaacggtgaccaaaccattccgtgtattaatgatttactggtagataaatttggtttaaaacctgaagttcgtcagtcgttaccacggttaaaccagtgcgtcgattttagctcccggcctgaaattctcttcatttttgatcaggctagccagcaactgaatatcactattccacaagcctggctggcgtggcactcagataactggactcccccctcaacatggaaagaaggtgtcgccggcgtcctgatggactacaacctgtttgccagcagctaccgcccacaggatggtagcaacagcactaacctgaacgcctatggaacagccggaattaacgcgggagcatggcgtttacgcagtgattaccaattgaatcagaccgatagcgatgataaccatgaacagtcaggcgaaatatcacgcacctatctttttcgtccattaccgcaattaggttcaaaattaacccttggtgaaacggatttcagttccaatattttcgacggcttttcttataccggcgcggcactggcaagtgacgatcggatgttaccgtgggagctacgcggctacgccccacaaatcagcggcattgcacaaaccaacgccaccgtcaccgtgagtcactcagggcgagttatttaccagaaaaaagtcctaccaggtccgtttatcattgatgaccttaatcagtccgtccagggtacgttggatgtcaaagtgacggaagaagatggtcgggtgaacaatttccaggtttcggcagcatcgacgcctttccttacgcgccaggggcaggttcgctataaacttgctgccggtcagccgcgaacatctatgtctcatcaaactgaaaatgaaaccttttttagcaatgaagtttcctgggggatgctgtcaaatacctcactgtacggcggcctgctgatttcgggtgacaactaccattctgccgcaatgggtatcgggcaaaatatgctctggcttggtgcattgtcgtttgatgtcacctgggccagtagtcagtttgatactcagcaggacgagcggggcttaagttaccgctttaattacagcaaacaagtggatgccactaacagcacgatttcgctcgccgcttatcgcttctcagatcgtcattttcacagctacgccaactatctggatcacaaatacaacgacaacgatgcgcaggacgaaaaacagacgatcagcttatccgtggggcaaccgattaccccactgaacctcaatctgtacgccaacctgctgcatcaaacctggtggaatgcagacgcctccacgaccgccaacatcacggcgggttttaatgttgatattggtaactggagagatatctcgatctcgacgtcattcaatacaacccattacgaagataaagatcgcgacaatcagatttacctgtcgatttcgctccccttcggtaacggggggcgggtcggttatgacatgcaaaacagtaatcacagcaccacgcaccgcatgtcgtggaatgatacgttagatgaacgtaatagctggggcatgtctaccggactgcaatccgaccgtccggataatggagcccaggtgagcggtaactatcagcacctgagttcagcgggtgagtgggatatttctggtacctatgccgccaatgattacagttccgtcagcagcagctggagcggttctttcacggcaactcaatatggtgcggcgttccatcgccgcagctccaccaatgaaccacgcctgatggtcagcaccgatggcgtggcagatattccggttcagggcaatctcgactacaccaaccattttggcattgcggtggtgccgttgatttccagttaccagccttccaccgtggcggtgaacatgaatgatttacccgacggcgtaacagtggcagataacgttatcaaagaaacgtggattgaaggcgcgataggttacaaatcgctggcttcccgttccggtaaagacgttaacgtcatcattcgcaacgccagcggtcagctcccccccctcggtgcggatatccgccaggaggatagcggcattagcgtgggaatagttggtgaggaaggacacgcctggttaagtggagtcgctgaaaatcaacaatttaccgtgatctggggtgatagccagcgttgctcgatccatcttcctgaacatatggaagacaccgcaaatcgcctgattttaccttgtcattaa

SEQ ID NO: 9722 - DNA, 567 bp, Escherichia coli
atgtttaaaggacaaaaaacattggccgcactggccgtatctctgctgttcactgcacctgtttatgcggctgatgaaggatccggtgaaattcactttaaaggtgaagttattgaagcaccgtgtgaaatacatcaggatgatattgataaagaggttgaactcggtcaggtgaccaccagccacattaatcagtcgcatcacagcgatgccgttgctgtcgacctgcgcttagtcaactgcgatctggaaaactccaacaacggttccggcggcaagatttctaaagttgcagtcacctttgacagctcagcgaaaaccaccggcgcagatccgattctcaacaacaccagcacgggtgaagcgaccggtgtcggcgtgcgtttaatgaataaagatcaaagcaatatcgttttaggcaccgctactccagatatcgacctggcaccaacctccagcgaacaaacgttaaatttctttgcgtggatggaacaaattgatcaggctacgcccgtaacaccaggtgcagttacggcgaatgcaacctacgtgctggattataaataa

SEQ ID NO: 9723 - DNA, 1218 bp, Escherichia coli
atgagtagcgtagatattctggtccctgacctgcctgaatccgtagccgatgccaccgtcgcaacctggcataaaaaacccggcgacgcagtcgtacgtgatgaagtgctggtagaaatcgaaactgacaaagtggtactggaagtaccggcatcagcagacggcattctggatgcggttctggaagatgaaggtacaacggtaacgtctcgtcagatccttggtcgcctgcgtgaaggcaacagcaccggtaaagaaaccagcgccaaatctgaagagaaagcgtccactccggcgcaacgccagcaggcgtctctggaagagcaaaacaacgatgcgttaagcccggcgatccgtcgcctgctggctgaacacaacctcgacgccagcgccattaaaggcaccggtgtgggtggtcgtctgactcgtgaagatgtggaaaaacatctggcgaaagccccggcgaaagagtctgctccggcagcggctgctccggcggcgcaaccggctctggctgcacgtagcgaaaaacgtgtgccgatgactcgcctgcgtaagcgtgtggcagagcgtctgcttgaagcgaaaaactccaccgctatgctgaccacgttcaacgaagtcaacatgaagccgattatggatctgcgtaagcagtacggtgaagcgtttgaaaaacgtcacggtattcgtctgggctttatgtccttctacgtgaaagcggtggttgaagccctgaaacgttacccggaagtgaatgcttctatcgacggcgatgatgtggtttaccacaactatttcgacgtcagcatggcggtttctacgccgcgcggcctggtgacgccggtactgcgtgatgtcgataccctaggcatggcagacatcgagaagaaaatcaaagagctggcagttaaaggccgtgacggcaagctgacggttgaagatctgaccggtggtaacttcaccatcaccaatggtggtgtgttcggttccctgatgtctacgccgatcatcaacccgccgcagagcgcaattctgggtatgcacgctatcaaagatcgtccgatggcggtgaatggtcaggttgagatcctgccgatgatgtacctggcgctgtcctacgatcaccgtctgatcgatggtcgcgaatccgtgggcttcctggtaacgatcaaagagttgctggaagatccgactcgtctgctgctggacgtgtag

SEQ ID NO: 9724 - DNA, 1281 bp, Escherichia coli
atgaagaaaataagtttaaccacgatgattcttttggcgctggtacttggaatgattatcggcgtagtgctcaataacactgcttcaccggaaaccgcaaaactctatgcgcaagaaatatcgatattcacgacgattttcttacgactgataaaaatgattatcgctccgttagtggtctctaccctggtggtaggtatagctaaaatgggagatgccaaagcccttggtcgtattttttctaaaacactctttttatttatttgcgcctcattgctgtcaattgccttaggcttgataacagtaaatttcttcatgccaggcacaggaattaattttgttgcacacggagccgaaaccaccggagtggtcgcgtcagaaccctttacgctaaaagtatttatttcgcatgctttccccaccagcattgtcgatgccatggcgcacaatgaaattttgcaaatcgtggtgttctcaattttcctcggctgtagcctgacggcgattggcgagaaaggcagcgccatcgttcacgccttagattcgctggcacatgccatgttaaagctcactggctacgtcatgctcttcgctcccctgaccgtattcgctgctatttcagcattgattgctgaacgaggactggcagttatggtgagcgccgggatctttatgggtgaattttatttcaccatgttattactttgggtgctgcttatcggtctggccatcgtttatgttggcccctgcatcagacgcctgacccgcgccctttcggaacccgccctgctggcatttaccacatccagttctgaagcggcttttccgggaacgcttgaaaaactggagcaatttggcgtttcccccaaaattgccagctttgtcttacccattggctactcatttaatctcgttggatcaatggcctactgctccttcgccacagttttcatcgcccaggcctgcaatatccatttatccatcggtgagcaaatcaccatgctgttgatcctgatgttgacctcgaaaggaatggctggcgtaccacgcgcctcaatggtggttatcgccgccacgctcaaccagttcaatattccggaagcggggctgatcttgctgatgggcgttgatccgttccttgatatggggcgttcagcgacaaacgtcatgagcaacgcaatgggcgctgcgatggtgagtcggtgggaaggcgaacatttcggcgagggctgtcggggtaaagcattaaaacccaatgaatcgaacgttgctctgccctga

SEQ ID NO: 9725 - DNA, 324 bp, Escherichia coli
gtgaataaccgttattggatgatctccttccataaaaatacgcgcaatctaacggttcgctctgtgccaaaaaaagacattgctcacaatatcgagttaatcattcggccgttgaacattcccattgaaaaatttctcagtatagaatataccaatgttgagggcattcctcttacatctcgaaggataactatcatgggtctaaaaccaggtccaaaaccaattgctaagtcaacaggaaaaccggatcaacgccgacgcgataataaagatactcctggcaatactccgggattaaagccaagtaagtccacaggtaagtaa

SEQ ID NO: 9726 - DNA, 441 bp, Escherichia coli
atgacttctgaagtgaaactgaaaaccggtggtgacccccggtcattaccggattatgctgccctgcgcgatgaaatcagcaaactgacccacccggcacgccctgatgtggactggcgttacgtggaaacgctctgcctgcgtctgtatgaacacaatggcgtggaattacagacggcatcctggtacaccattgcccggatgcatacaacagggttaagtggtctgaatgaagggctggctctgattgctgcgctgacccggcatcactggtcagtgatgtggccgctgaatacacactcccggctggaaattattaccggtctgttcaaccgtctgcaaaaaacgctccgggccatgcctccggataaccgtgacaacctgcccctgctgtatcagaccgaaacattcctgaagacactgagtgatctccttccatga

SEQ ID NO: 9727 - DNA, 1746 bp, Escherichia coli
atgacgtccggggagaggagggtggcttcacgactggagagctttctgaatgatgattgctttgtctggtacgatatcccggtgggacggaaaaaccgacatccggattttgtcattattgacccggataacgggctggtatttctggaggtcaaggactggactgtatccacattacgtaaagcaaatcaggagcaggttacactggaaaccgacggtcttctgaaatcagaaataaatccgctggtacaggctcgtcgttatgcatgtgatacggttaatgccttacctgctgacccgtgcttacggcagaatgacggtcagtataaggggcggctgaacctggcctgggcgtatggtgtggtgttcacccgcattacccgtcagcaactgaaggcactgacagggaatgatgagaatgcggtggaaaagatttttccttcagcacagacaatctgtcaggatgaaatgacgcagtctgttttacctgagatattccggcaaaaaattgccgggatgtttaccacgggattcagaacccaggtgacaccccggatgagagatattctgcgcgcccatctgtttcctgaagtgaccgtaaaacagaactcacaaatcaaaatcatggatattcagcaggagattctggccagaaatattggtgacgggcatcgtgtcattcatggtgtggccggctccggaaaaaccatgattcttttattccgttgcctttacctggctgaaaccacgcccggaaagattctggtgctgtgctacaacattactttggccagttatctgcgggaatgcattgatgtcagagggctgacgtcacgggttacggtatctcattttcacagctggtgtgcctcaatgataaaacgccacggtattcaggtgacggctgacagaaaggattacccggagaaatgcttcagcacactggaagaggctgtgaacagcgggaaaatcaccgacgccggatatgatgctgtactggtggatgaagggcatgattttgacagtcgctggctggccctgattgcccgtctgtttgataacgcatcccgttcactgctcctgatgtacgatgatgcccagtccatttatcggcgggagcgggctctgaacttttctctggccagtgtgggaattcaggcgcagggacgcacttctgtcctgccggtcaattatcgtaatccgaaacgcattctgcactttgcttatgcattctctcgcgagtattttgaaaaacatcagaaccgtgaaataccacttgttcagccacaggcaggcggtgaagagggtacagagccggaaatcctgcattgtgcttctgaacgtgatgaagccagacaggttgcagactggctggagaagtgccatgccctgtgcggtcactggagtgatatggctgtgctgtgtccgacagagcattcagcgaaacaattgcaggacgttatgacacaacgcgggatgccttttgccacctgttttgacagggaaggcaagaaggcatactcgcgacgtaaggatgtggtgcatttactgacatatcagagcagtaaggggctggagttcccgtatgtggcggttatcaatgcgtctttcattccttctggtgtagcggatgagtctgaagtaatcccggtgctttatgtggcgttcacccgggcaacccgtgaattactggtgacctgttaccgtgaaaacagtatcagtcgtcaccttgaggattttgcataa

SEQ ID NO: 9728 - DNA, 207 bp, Escherichia coli
atggaacgcttcttcaggagtctgaagaacgaatggatgccggtggtgggttacgtaagcttcagcgaggcagctcacgccataacggactatatcgttggatattacagcgcactaagaccgcacgaatataatggtgggttacccccaaacgaatcggaaaatcgatactggaaaaactctaacgcggtggccagtttttgttga

SEQ ID NO: 9729 - DNA, 237 bp, Escherichia coli
atgatccaggcccgaaatcagcttcttgctgaagcggcgaaaagtccagcgttaaacatggttcgtcctaacggcatgaacgatgagcctcagttccagattctgattgatgacgagaaagttcaggcgcttaaactgagcatgagcgacgtcgacaacataatgtcagcagcctggggttcgatgtatgtaaatgattttaacgatcgtggacgggtgaaaaaagtctatatttag

SEQ ID NO: 9730 - DNA, 567 bp, Escherichia coli
atgcctaaatcttacacaccaaactggttttttaccgctttacttgacaatcacatcaatcaaatgatggcacgctattcctgcctgcgggccttacgcatggatttcttctacaggaaagatacgcctgatttcttacaacctgatcatcgctggcttgaattgcagttgcgtatgctgctggagcaggtggaacaatttgaaaatatcgttggtttcttctgggtgattgaatggacggctgatcatggttttcatgcgcatgcggttttgtggatcgatcgtcagagggttaaaaaaatatatccctttgcggagcggattacggaatgctggcggtctattacacataacagcggttcggcacaccgctgtacatatcagccgcattatacatacaacatcaacattcctgtgcgccacaacgatcctgaaagcatcgataatattcgcggtgccctgcattatctggcaaaagaagagcaaaaagacgggctgtgtgcctacggctgcaatgaagttcctgaacgtcctgctgcagggcgtcctcgtaaccctcacttctga

SEQ ID NO: 9731 - DNA, 276 bp, Escherichia coli
atgatgatcttgcgcattaatatttattttaaatactctactaacaataatatctttattttcatctacaataaattctgtcgtcgcattaaagcgccattgttgatcttgatcggcgagagatttaattttattaaatatatcagctttatcaccagtttccgacacgaaatctataatggcttgtttagcctccttaatatgatacatgggaaaaagatcgagtataaattcccaaagacttcgtttaaggaaagattgactatcaccagctaa

SEQ ID NO: 9732 - DNA, 1224 bp, Escherichia coli
atgtcaattgactttaccccaggtataataaatacatatcacggcgatatttataactgcacaacaaataccgataatgctaaaacgccagatacaccgaagtggccttgcgataattgggaagaacaacaacccattaattccacattctctggagaaggatatacctctgatcaatatgatttagcgcaacaccaacttcaacaaattaatgcgtgccacacgaacactacatatacaaatgcagactactcaaaaattgtggctcaacttgtaagtcttattaataacattgaaacgataagttcgacaccacttacgcaacagacacaatcaatacttaatcagattaataacattagatacgaaaagaataaaaattctgaatgtcgaatcattgttgtcgctaatcctaaacccgacaaggcaatcataactaaaattagcgtagaagagggaataccagtaagattcagtgtccaaaccatgttttcagatactaattttaatgctgaacaacgagctgacttaccgactaatataaaagatattcaaagcctgtatcaaaaaatgacgaagttatatattgaacacagtgaaaataaaaacaggatgaaagtctttgccggaaccaactttattgatttcaatatgacaggacagaacctgtccgggttcgttctaaccttgtcaaggttttatttcgaagatctacttaatataaatttcactgacgcaaatttaggtgacactattttttcacataaagaacaccctaccccaaaattatataaagacgaacaatatcttgacaaacaaatcgaaggtttattttcaacattattaaccattaatgacaactttttacgagcaaaagcggaaattgcttcgacaataattaaattcttagaggccaggataaccaatctttcatacaatgacatattaaaatatcagcaagaattccaaaaacaatgttataagcaagttaaagcctttacgacactctcccgatacaataaaattcaaacatgggcagaaatgtctgaatatcaattcgaagtatttcaatacgagacacttaacccaaaaaaaatgtcacgcacgccttatttaaagagatcgctacctgatgaaaaaactataaattatggggtggaaatagaaataccatccggcaaaagaattcgcttatcaaatcattatcagaatataataccataa

SEQ ID NO: 9733 - DNA, 843 bp, Escherichia coli
atgctcagttatcgccacagctttcacgctggcaaccacgccgacgtccttaaacataccgttcagagcctgatcatcgagtcgctgaaagagaaagataaaccgtttctctatctcgatacccacgcaggggccgggcgttatcagttaggcagcgaacatgccgagcgtaccggcgaatatctcgaaggtatcgcccgtatctggcagcaggacgatttgcctgcagagctggaggcgtacatcaatgtggtaaaacacttcaaccgtagcggtcagttgcgttactaccccggttcgccgttgattgctcgtcagttactgcgtgaacaggacagcctgcaactgaccgaactgcacccgagcgattacccgttgctacgttctgaatttcagaaagacaatcgtgcgcgcgtcgaaaaagccgatggtttccagcagcttaaggccaaactgccgccggtttcccgccgtggtttaatccttatcgacccgccgtatgaaatgaaaaccgactatcaggcggtggtcagcgggatagcagaaggctataaacgtttcgccactggcacttacgcactgtggtatccagtggtgttgcgccagcaaattaagcgcatgatccacgacctggaagcgaccggcattcgcaaaattctgcaaattgaactggcggtactgccagacagcgatcgccgtggcatgaccgcttccggcatgattgtgattaacccgccgtggaagctggaacagcagatgaataacgtgctgccgtggctgcacagcaaactggttccggcaggcaccgggcacgccaccgtaagctggatcgtgccggagtaa

SEQ ID NO: 9734 - DNA, 1590 bp, Escherichia coli
atgaaagtatttcacaatatatttaagcacttctcttcaaaccatcaagataagcattcagataaagttaacagtcatcaacaccatggcaaggttgataaaaaacatcgttcaaagatagttgaaattgataagctggataaacattcgcaaatagataacgattttggcctgcatatcatctatttcctgcaacatggctgctggaacgtaactgaacatagtcctcagatagaaaaactatggttttacaatagtgagccatctatagatattaaagaatataatagtttcgccgataatactactgacacgtttatctttacaattataccagacaataaccatgtgataaaattatcgtctcccattaccgttacgattgagcgtaaggacggttattattttattaatttctccggagataaatcagacataatttataaagttgatgggttttctatcatagagagaaatttctttactcttcttagtggtaatttcaaacctgactggcgttgggctgtctctaaagagacgtttactaaggaaaagtttgatagctatgttgaatctgttttttcaaaaatagacttttataaacagtgtggtgtgattaatccacaaaatgccaacacggcttattttggcgatacagatggaagagtaggcgctgtactttatgcattgctcgtttcagggcatataggcatcaggggagaggggtggagtttattatgtgatttattaaaacacgaagacatggcttcattcgcatatgaaaataaaaaattgaaaaaactcttcactttattagatacgagagacatgatcttgaatgagttgcatcaacatgtttttttaaaaggcgatgcgattaccccttgtatcttccttggggatcatacaggcgatagatttagtactatttttggtgataaatatatccttactttgctaaattctatgcgaaatatggagggtaataaagatagtcgtataaataaaaatgtcgtcgttctggctggaaatcatgaaatcaattttaatggtaactatagtgcacgactagcaaatcataaactctcttccggtgatacatatgacttaattaaaacgctcgatgtttgtaattatgactcagaaacgaaagttttaaccagtcatcacggaataataagaaatgaagaaaatgaatgttattgtctaggtgctttgcagattccatttaatcagatgaaagacccaattgatcctgaggaattagcaaatatatttaataaaaaacataaacaacacatggatgatcgtcttatccatctaattagaagcaatgctatagcatccacacctgtatatgacaattattttaataacactactgctttcagaccaaaacctgaagatatcttcaaatgtggacagacgctcaaaaaaagtaaacagaaatatggccattatggattaggggtagatcagcatcaaaaaattgataattataccatggggctaaattcctggaagatagcacctaacgaacgtggtgataaaaaaggtgtcccagggcttagttgttttcaatctcattaa

SEQ ID NO: 9735 - DNA, 1623 bp, Escherichia coli
atgaaacttggaactgtggcaggcactaacgacagtacaacgacaatcgcaacaaatgatatggtgcaagagcatgttactaacttcactaaagaactgtttgggtatattgcaaatggtataggtgatgatatatcaagtattgccaggacaatgctcggtgaagttgtggaaaaaattgatgattggcaaatagaacgtttccaacaatcttttcaagatgacaaaatttcatttaccatagaaacgaatcattcagaaaaatatagtatgctatcgggcatgcgtgcccatattctacgtaggaataatagttatcagtttattgtgacaattaatagtaaaaattacggttgccctcttgatgataccgatattaattggtgcagcattgtttatttacttaataatatgacagtaaatgataatgctaatgatgttgcagttactgagtcgtacaaacccatctggaactggaaaatatcgcaatacaatgtatctgatattaaattcgaaacaatgataaaaccccagttcgctgacagaacctatttctccaattgttcacctgttgatcccacaagtaccagaccaacctattttggcgataccgatggctcagttggtgcagttttgtacgcgcttttcgcaacgggacatttgggaatcatggctgaaggagaaaatttccttggccagttgcttaatatagaagatgaagttctcaacgtattgctaagggagaactttaatgagcaacttgacactaatgttaatacaataatcagtattctgaacagaagagatatagttttagaaagtcttcagccttatttagttattaataaagacgctgtgacgccatgtacgtttctgggtgaccaaaccggcgatcgatttagtaatatctgtggcgatcaatttatcatcgatttgttaaaacgtataatgagtatcaatgaaaacgttcatgtattagctggaaatcatgaaacgaattgcaatggtaactatatgcagaacttcacgcgtatgaaaccacttgatgaggatacctacgctgggataaaagattatcctgtatgtttctatgaccctaaatacaaaataatggcaaatcatcatgggataacttttgatgatcagcgaaaacgttacattataggaccgataacagtctctattgatgaaatgaccaatgctctcgatccggtcgaattagcggcaattattaataaaaagcatcatactataattaatggtaaaaagtttaaaactagccgggctatctcttgtcgatcctttaatcgttatttttctgtttcgacagattacagacctaaacttgaagcactattagcatgctcacaaatgttaggtataaatcaagttgttgcacataacggaaatggtgggagagaacgcataggtgaaacggggacagttttaggtcttaacgcccgtgacagtaaacatgctggaagaatgttcagcatgcataattgccaaattaaccctggtgcggggcctgagataaccactccctggaagtcttaccagcatgaaaaaaacaaaaatggacttatgcctttgattagaaggcgcacaatgttacagctctga

SEQ ID NO: 9736 - DNA, 435 bp, Escherichia coli
atgaaacttaaaaaattgatggaacatatttctattatccccgattacagacaagcctggaaagtggagcataaattgtcagatattctacttttgactatttgtgccgttatttctggtgcagaaggttgggaagatatagaggattttggggaaactcatctcgattttttgaagcaatatggtgattttgaaaatggtattcctgttcacgataccattgccagagttgtatcctgtatcagtcctgaaaaatttcacgagtgctttattaactggatgcgtgactgccattcttcagatgataaagacgtcattgtaattgatggaaaaacgctccggcactcttatgacaagagtcgccgcaggggagcgattcatgtcatttctcgcgtcagtccttgcggggagcaggctttcgtaatcttgccctga

SEQ ID NO: 9737 - DNA, 480 bp, Escherichia coli
atgaagtgctttttatttattctgattgcaaatgttttctttttctcttgttgttcatatggaggtgaaatccccccccctattaagctccataacattgaaataagctcaacatctgaatcgtttaatttaagtgaaaatcaaagatatgaacttgatattaaatctgagggcggggatggtgatgcgtcatatcgattacatcaatattatacatatgtttgctttaatatacccaagcaaattaaatatctggcaaggtctgcatctcaaggaaatatcatagcgcaatataattatgctatgattctatcctcagaggaggatgattcctatttaaaatattataatttagataatgcaattaattggctgaaaatggctgcctcacatggctatattaaagccgaggttgaattgctaaggcttgaaaggctaaaagaaactataaggttagggaaagatcatccaatgccgtag

SEQ ID NO: 9738 - DNA, 660 bp, Escherichia coli
atgctcgaccggctggaaagtgaaatcctggctgaccgggtgagtgaggaaagccgccgctggctggcatcgtgcggcctgacggtgaagcagatgcaaaaccagatggacccggtgtacacgccggcgcgaaaaatccacctgtaccactgcgaccatcgcggcctgccgctggtgcttatcagcacggaaggggcaacagaatggtgcgcagaatacgatgaatggggcaacctgctgaatgaagagaacccgcaacagctgcagcaactcatccgcctgccgggtcagcagtatgatgaggagtccggcctgtattacaaccgccaccgctattatgacccgctgcaggggaggtatatcactcaggattcgattgggctgaaggggggatggaatttttatgagtatccgttgaatccggttcagtatatagacccttttggattagctgatatgaatttctatgatgaggggatacgcagaaatgtatcactgcatgctgcaacagataaaataaatattcctggcgtttttactattggaggacatggatatcctggttttattacagatgaaaatggaaactatgaaactgctgagggattagccaagagaatcagagctaatccacgctataaaaagggaatgtctgtttga

SEQ ID NO: 9739 - DNA, 843 bp, Escherichia coli
atgtcaaatacataccagaaaagaaaggcaagtaaagagtatggtttatataatcaatgtaagaaactaaatgatgatgaattatttcgcttacttgatgatcacaattccttgaaaaggatttcatctgccagagtattacagttaagaggtggtcaagacgctgttagattggcaattgagttctgctctgataaaaattatatccgtagagatatcggagcatttatactcgggcaaataaaaatttgcaaaaaatgcaaagataatgtgtttaatattttgaacaatatggcattgaatgataagagcgcttgcgttcgagctacggcaatcgagtcaacggctcagcgatgcaagaaaaacccaatttattcacctaaaatagtagaacaatctcaaattactgcttttgataaatcgactaatgtcagacgtgctacagcatttgctatttctgttatcaatgataaagcaacaattccactattgattaatctgttaaaagatccaaatggagatgtcagaaactgggccgcatttgcaataaatatcaataaatatgataatagtgatattagggattgttttgtggagatgcttcaggataaaaatgaggaagtccgtattgaagcaataatcggactttcctacagaaaagataaaagggttttatctgttttatgcgatgagttaaaaaaaaatactgtttatgatgatatcattgaagctgcgggtgaattaggtgataaaacgctacttcctgttttagatactatgttgtacaagtttgatgacaatgaaattataacttccgctattgataagctgaagcgttcatag

SEQ ID NO: 9740 - DNA, 267 bp, Escherichia coli
atgcgcaagtatgaatgtgaggggaaatacaccgttagaaatttggtaaaaaataaagctatagcattggaattagctgagatgtatgttaaaaatcgttatgggcatgatgccgcagaagaagaaaaaccatacaaaatcatggaattaccaacaagttggattgttgaaggcaccattgaatcagaccaaattgctggtagggtttttattatagaaataggcaaaaatgacgggagaattctaaattttggccacggaaaataa

SEQ ID NO: 9741 - DNA, 366 bp, Escherichia coli
atgataagaatcgcatttttaataaccaataaatttcttgagatagatagtaccactcttgctggatatgattttagcgggatgaatctacatcgtgccaccctcaatggttattgtcttgatggggcgaaatttgaaaaaactcatttaagaaatgtaatgattcaacatacatcaactagaaatgctgtctttcacaatgcggctctgatgaatgctattctgaataactcagatttcactggaagtgattgtagtaattcaaggtcaataggtgaaaattttaaagcaatagataatcatgggaaagatataataaatggaaaaggattgtctaatgtttgcaaaatacatgacaacgtataa

SEQ ID NO: 9742 - DNA, 1035 bp, Escherichia coli
atgaaccttatatggtatgaattttataaaacagaagatgtagtatatagaaatgcttatcgaggctaccttgagtctggaaaactattagtatttagctcgttgacatttttattactaagtaaaaataaattcaggcaaaatgaaaaactacattttatttcagctatcttagttcaaataatcatgctatgtagagcatattatcaagggatatatttgcatgcagaccgcattcccctctccgccatgaatgggaatattggtcagatgggggcagcgactattgcggcttatgtgattacatttacaactttatattcttcaattgtattcataaaaatgcaatcgaaatataaatggtttctattttatgctaactttgctttaagctttgcagcagtaatgatgacaggaacgcgtgcggcaattttcacattcccacttatgattatggtcatattatttcttcagcatcgtgatcaaaaagtgtttttatttaaaggattgagtggtgtttttatattgctacttgcttgtggtttgatatttaataaggaaattgataggcgaattaattcattaaaagctgatgttatttcatatgctacaaaaaataacagtcaatcctcggtcggagcacgttttgcaatggttaatgcaggaattaaaggaagtcctgatggttttaattggcaatctcttgagcagcgtgctgaaaagataaaagcattaagtgcagaaaataatatttatagtggagctttattattccttgatgtacatatgcataacgaaattgtggaatctctttccacgaaaggaaaaattggtcttcttgttcttattatgttctatgttgcaatgatctattactgtatacgagagaaaaaatatatactcttggttttccctgcttctattatgttatttggcattagtgatgtcattacacatgctaaaccaataccggcatcgtggattgtgtgcctcttcctgtctatatcgtttttgagtaaaaatgaaccacaataa

SEQ ID NO: 9743 - DNA, 975 bp, Escherichia coli
atgcaatacaaccccttaggaaaaaccgaccttcgcgtttcccgactttgcctcggctgtatgacctttggcgagccagatcgtggtaatcacgcatggacactgccggaagaaagcagccgtcccatcattaaacgcgcgctggaaggcggcataaatttctttgataccgccaatagctattccgatggcagcagcgaagggatcgttggtcgcgcactgcgggatttcgcccgtcgtgaagacgtggtcgttgccaccaaagtgttccatcgcgttggtgatttgccggaaggattatcccgtgcgcaaatattgcgctctatcgacgacagcctgcgccgtctcggcatggattatgtcgatatcctgcaaattcatcgctgggattacaacacgccgatcgaagagacgctggaagccctcaacgacgtggtaaaagccgggaaagcgcgttatatcggcgcgtcatccatgcacgcttcgcagtttgctcaggcactggaactacaaaaacagcacggctgggcgcagtttgtcagtatgcaggatcactacaatctgatttatcgagaagaagagcgcgagatgctgccactgtgttaccaggagggcgtagcggtgattccatggagcccgctggcgcggggtcgtctgacacgtccgtggggagaaactaccgcacgactggtgtctgatgaggtggggaaaaatctctataaagaaagcgatgaaaatgacgcgcagatcgcagagcggttaacgggcgtcagtgaagaactgggtgcaacacgagcacaagttgcgctggcctggttgttgagtaaaccgggcattgccgcaccgattatcggaacttcgcgggaagaacagcttgatgagctgctgaacgcggtggatatcaccttgaagccggaacagattgctgaactggaaacgccgtataaaccgcatccggtagtaggatttaagtaa

SEQ ID NO: 9744 - DNA, 423 bp, Escherichia coli; identical to SEQ ID NO: 7909

SEQ ID NO: 9745 - DNA, 777 bp, Escherichia coli
atgaacgaaaacacaacgctgaacgcactgatttgtcgtcacgcccgtaacctgctgctggcgcagggctggccggaagagacggatgtcgaccagcgtaacccgaagtatccgggctggatcagcatttatgttctgctggatgcgccccggctggcgacgttactcgttaaccgccacggcggcgtactgccgccgcacctggcctccgccattcagaaactgaccggaaccggagcggaacttgttctgtccggcagtcagtggcagtcgctgccggtgcttccggcagacggaacgcaggtgtcttttccgtatgccggtgaatggctgaccgaagacgaaatcagggctgtacttgcggcggtgcgcgatgcggtacgcagtgtcagttgccgggtggcagaagatatgcggcgtatccgggcggcgctgaccaccaccggtcagacgttactgacccgccagacgcgccgctttcgcctggtcgtgaaggaaagcgatcacccctgctggctcgatgaggacgacgaaaacctgcccgtggtgctcgatgccatcctgaaccggggcgcacgtttttcggcggtggaaatgtatctggtcagcgattgtattgaacatatcctgtctagtgggctggcctgcgatgtgctgcgtataccggatgaaccgccccgccagtggtttgaccgtggtgttctgagggaagttgtccgggaagcccgggccgaaatccgcagcatggcggatgccctggcaaaaatcaggggctga

SEQ ID NO: 9746 - DNA, 948 bp, Escherichia coli
atgtctggggcaaacattgttcacagcggatatggactgcgctgtgaaaaactcgacaagcctctgaatcttggctgggggctggacaatagcgcggtgttgcactggcccggggagctgccaacagggtggctgtgcgacgcgctggatcagatatttatcgccgcaccacaactttcagcagtggttcttccctggtccgaatggtgtgaggagccacaggcgctgacgcttttcggacaggtacaaagcgacattatccatcgttccgctttctggcagttaccgttatggctgagttctccggcaaaccgggcctccggtgaaatggtttttgatgcagagcgtgagatttatttcccgcagcgccccccccgtccgcagggtgaagtttatcgtcgttacgatccacgcattcgcaggatgctgagtttccgcattgccgatcccgtttctgatgcagaacgtttcactcgctggatgaacgatccgcgcgttgagtatttctgggagcaaagtggctcactggaggtacagattgcctatctggaacgccagctcaccagtaaacatgcattcccgctgattggttgtttcgacgatcggccgttcagttatttcgaaatctactgggcggcggaagaccgcattggtcgccactattcgtggcagccctttgaccgtggcctgcatctgctggttggtgaacagcaatggcgcggagcccactatgtgcaaagctggctgcgcggggtgacacattacctgctgctgaatgagccacgtacgcagcgcacagtactggagccacgcaccgataaccagcgcctgttccgccatcttgagcctgcgggataccggacaattaaagagttcgacttcccacataaacgctcgcgcatggtgatggcggatcgtcatcacttcttcacggaggtcggtctgtaa

SEQ ID NO: 9747 - DNA, 1167 bp, Escherichia coli
ttgaaacgccgtcttattattgctgcttctttgttcgtttttaatttatcgtctggttttgcggcggaaaacattcctttttcacctcagcctccagagattcatgccgagtcctgggtattgatggattacaccaccggtcagattctcaccgcgggtaatgagcatcaacagcgcaatcccgccagcctgacaaagctgatgacgggctatgtcgtggatcgcgctatcgatagtcatcgcattacgccagacgatattgtcaccgtggggcgtgatgcgtgggcgaaagataatccggtgtttgtcggttcttcactgatgtttttgaaagagggcgatcgcgtatcggtacgtgatttaagccgaggtttaattgtggattccggaaatgacgcgtgtgttgctctggctgactatattgccggtgggcaacggcagtttgttgaaatgatgaacaactatgccgagaagctgcatctcaaggatacgcattttgaaacagtgcatggtctggatgcacctggccagcatagctcggcttatgatttagccgtgctttctcgcgctatcatccacggcgagcccgagttttatcatatgtacagtgagaaaagcctcacctggaacggtatcacccagcaaaaccgtaacgggttattgtgggataagaccatgaatgttgacggcctgaaaacgggccatacttctggtgccgggtttaatcttattgcttcggctgtagacgggcagcgtcgcctcattgcagtggtaatgggtgctgacagcgcaaaaggtcgtgaggaagaggcaaaaaaattactgcgttgggggcaacaaaactttactacggtgcaaattttgcaccgtaggaaaaaggtcggtacggaacgcatctggtatggtgataaagaaaatatcgccctgggaacggaacaagagttctggatggtgctaccgaaagccgaaattccacatatcaaagccaaatatacccttaatggtaaagagctcaccgcgccaattagcgcccatcagcgggtaggggaaattgaactttacgaccgtgataaacaggtggcgcactggccgctggttaccctggaatctgtcggggaaggcagcatgttttctcgcctgagtgattatttccaccataaggcctga

SEQ ID NO: 9748 - DNA, 1080 bp, Escherichia coli
atgacatacaatactatattcaaaatatacatctcaattttcatttctgttattgtcactataatagccatatccagtataacattcctgggggacaactggattattccagacacatatcatctatttaatactgcaaaatatgataccacattttcactcagcgatatttattcccagcataaaacatctgttttatttctctttataaacaaagtgctctatagcatagggttatattctttctgtatcgcgaacacagcaatgattatctatgcttttttcaaacatcacgaagaccgtagattttgttttgtgtttttggttttgtcacctctatttttcattaatataccgttaccatccaaagatataatggtgacatttcttttttgcatatgggtatatgcagtttactctgaggcaagcctgacaaaaacaatcctgctgtctttaatcatcctattagttagagatggctttgggataattttaattgccacttcaattatcttaaaacaaaagataatatataaagcaccaatactactgattataatagcaactctcatcgcatctttaatatcggatgttttgcctaactatgcaaatgacttttttctgttccagagagtaattgatatagccaatgaatataatagttcaagttatattcttcgtatatttgggaatgtaacaaatttctcatcacgcaacccattgattactgataagtccacattaaacattacatttatgtgctatacaatcacgggagttactatattgagtacattccttctttcaattaaagcaatacgttcaaattataaaagtgatgtcagaatatcattttgttattttttaattaccattgctttttctatttcaccacttattcaagcaagatacatggctccgttaattttaatgccgacattttataagtgtatttcaaaaaaagatgtctttatttgctatatggcaagcatatttatctcaataatattatcattattatatgtatatttaggtgtttaccctgaaaaagcaccagtggaaaactttacaataaattaa

SEQ ID NO: 9749 - DNA, 594 bp, Escherichia coli
atgaaacctgtttttgatgaaaatgggctggctacagtaccgggtaatatgcgttgtttttattatgaggcagttacgtatgaatatactggctggtctgatgaatatattaatactggcgtaagtatgcccgcctgttccactggtattgacccgggcgaatacattccgggaagagtggcagtatttacgggtaagggatggagccatgaagaagaccatcgcaatgagactgtttactcaacagaaaatggcgtagctgttacagtggattatatcggtgccatcaaagacggttatgtcacgctttcaccgttaacgccatacgataaatgggatggtgagaaatgggtgacggataccgaggcacagcatagcgccgcactagacgcggcagaagtaaagcgccagtcgctgattgatgctgcaatggcttccatcagtctgattcagctgaaattacaggccgggcggaagctgacgcaggcagaaaccacccggcttaacgctgtgctggattacattgacgcggtggcggcaacagataccagcaccgcgcctgatgtcatctggcctgccctttatgaagtataa

SEQ ID NO: 9750 - DNA, 288 bp, Escherichia coli
atgacttttgatgaaaaagaacttgataatgcaattaataaaatcatcgtaacgtcgctcttttcctgtctcagcgacactcagcaaaaacagttctacgaatcggctttcaacatgatcgagcgttgttgtttctgcgatgccgacgagttacctgaaaaaatcaggaaacagttggctgatgctcttcgagtgcgactttacgcggtgaatttattcgtggctgggatgacggacgtggtgtggatgccgggcgacaattattatcttcacagggggatgcaataa

SEQ ID NO: 9751 - DNA, 519 bp, Escherichia coli
ttgatagatagtcatcgtgatatgattctcccattattccagattaatgaagatttgctcaatttatgtaatgacttgcatatttacaaaaaagtgatatgtgagaatgctaacacaacttcactacatatcaggcgtggagactacatcaccaaccctcacgcctctaaatttcatggggtgttgcccatggattactatgaaaaggctattcgttatattgaggatgttcaaggagaacaggtgattatcgtattttcagatgatgtgaaatgggctgagaatacatttgctaatcaacctaattattacgttgttaataattctgaatgcgagtacagtgcgattgatatgtttttaatgtcaaagtgtaaaaacaatataatagccaatagtacatatagttggtggggggcatggttaaatactttcgaagataaaatagttgtttcccctcgtaagtggtttgctggaaataataaatctaagttgaccatggatagttggattaatctttga

SEQ ID NO: 9752 - DNA, 540 bp, Escherichia coli
atgaaacaggaagtggagaagtggcgaccttttggacatccggatggtgatattcgtgatttatcatttcttgatgctcatcaggctgtctacgttcagcatcatgagggcaaagagcctttagagtatcgcttctgggttacctactctcttcactgcttcacaaaagattatgaacatcagactaacgaagaaaaacaatcgttaatgtaccacgcgcctaaagaatctcgtcccttctgccagcaccgttataacttagcgcgcatacacttaaaaagaaccattttggcgctgccagaaagcaacgttattcatgctgggtatggtagctatgccgtgattgaagtggatttaaacggaggagacaaggcattttactttgttgcgttcagggctttcagggaaaagaaaaaacttcgtttgcatgtaactagcgcttatcccatttctgaaaaacagaaaggtaaatcagtgaaatttttcaccattgcctacaacttattgagaaataagcagcttcctcagccctcaaaataa

SEQ ID NO: 9753 - DNA, 207 bp, Escherichia coli
atgaataccccagtttcactgatggatgaccagatggtcgacatggcatttatcactcaactgaccggcctgaccgataaatggttttacaagctcatcaaagatggggcctttccggcccccatcaaactcggccgcagttcccgctggctgaaaagtgaagtggaaacctggttgcaggcgcgtattgcacagtcccgtccgtaa

SEQ ID NO: 9754 - DNA, 195 bp, Escherichia coli
atggtgatacgcaaaaagaagtgcagggactgtggtaacgcgattactcataatacggtgtgttgtccgtactgtggttctgtcgaccccttcggctattaccggaatacggacaggatcttcacggccctgctggcgctgctggttgtggttttgctggtgacatctgctgtcagcatgtatgtgctgtggtag

SEQ ID NO: 9755 - DNA, 570 bp, Escherichia coli
atgacctacaaatacaaccccttctggcaacaacgcatccgtgagatggtgctgtgcgcactggatgttcatccccgcctgacggcacttcgggttgacctgcggctcccggatgtaccggcagcaacggacgcggcggtgatatcccgctttatcaatgccctgaaagcccgaatcaacgcttaccagaagcgtaagcgccgtgaaggtaaacgcgtgcatcccacgaccctgcattacgcctgggcccgggaattcggggagctaaaaggcaaaaaacactatcacctgctgctgctggtcaaccgggatacctggtgtcgtgcaggtgattaccgcgatccggggtcactggccgggatgattaaacaggcctggtgcagtgccctgggtgtggataccggagatcataccacgctggtgcattttccggtcaggccggcggtgtggctggcgcgtaatgatgacaccggctttcagcaggtgctggagcgtgctgactatctggcgaaggagagtaccaaagcttacggcaccggtgagcgcaactttggctgcagtcgtggctga

SEQ ID NO: 9756 - DNA, 384 bp, Escherichia coli
atgtacgcaaaatcctttatcgctcttgatggcaacggacgtctgacgggcgcccgtactgcacaggccgcatcttatgctaactacacctgccacttgtgtggcagtgcactcagataccatccgcaatacgacactgaacttccctggtttgaacacactgacgacaggctgacagagcacggtcaacagtgcccttatgtcaggccggagcgcagagaaatacagttgattaaacgtctgcagcaattcgtaccggatgccttacccgtggtgcgtaaagcctgctggtactgcagacaatgtcgccacgcttattatggggagcagtactgtacacactgccagaccggaggattcagtgaggaggcagtggcaggatga

SEQ ID NO: 9757 - DNA, 411 bp, Escherichia coli
atgaacggtataaaaacggggctggggatcacgcctggtgagcacattatcagtgccgacgctgcgctcagcagaaagatccggcattgtttctgcctttcctgtcgtggccggttgattctgcagacagatgctcagggggcgtggtatgagcacgatttacatgccctgaccgcgcaacagaaggcagactgtgtggtgctgaatccggaaaagtcccacccttacattgcggatatggcgatgtttttatcgccattaccgatcgtgctggagtggcattgtgtgatgtgcgacaagttttttcccgggaagaagttctgtgaggcctgtggtacggggatttattgcagagcggtatgtacgaaatctgtttacagctaccggtcagatttgctgctggccccctga

SEQ ID NO: 9758 - DNA, 234 bp, Escherichia coli; identical to SEQ ID NO: 6080

SEQ ID NO: 9759 - DNA, 534 bp, Escherichia coli
gtgcagataaccgaagccttacttgcagagccgggagatatccggcgttttattcagcaggcggtggaccactggccgcgtctgctggcatttcacttcacgctccattcggcagaaggaatcaacgggcaacagattcatgcattctgtacttccttttatgaacgtattactgagcgtaatcacatggccagtccatcctcaccggtggtgttacgctggttgcgggaacaacatggaggagcaacaatacgatgcctgttgctgctcagccagacgagcatttgccatccgcaggccagtgccacggttgatgaacaatgttcgcaagtggtggatttactgcaacagacctggcggatgataagtgctggcggacaatgccgggtggaaaagtgttttcgggttgcccggggtgatacatccggccagtatgttgcgttaaaaacagtcgcattgtctctggggttaccggttgtgaccgccattatccatcgtccggtacagcgctgtacattgattacagctcagtga

SEQ ID NO: 9760 - DNA, 477 bp, Escherichia coli
atggtaacgctgaccattaaccgtaaaccgcagggcattttcagtaaatcaccggcaacgccgctgcaggataaaacgaacactgcacacaacgagaagcctcttcgggtgaggaatcaaacaccatggcgacatatgacaaaacgccagcgcaaaaaccgtaagcgtataaatcgtcttgtggaactctggcctgagttattcagccgggaaaaaccaaaaccacttaaagtggggatacctgacgacctgatacaggataccgccatcagaaaactggcgtttggcgcaggtgcattacgcgcggcagtagcgtcttatgtgcagtctccgcactattaccgggcgttaatggctggcgacgcccgttacgacctgaaggggcagccgtgcggggaagtaactccacaggaacagaaagaggcagagacccggctaatgatgctgaatgaccgacgaaaagccagaaagcgctga

SEQ ID NO: 9761 - DNA, 627 bp, Escherichia coli
atgcgtacacgaattgattatctggcggataaatactgttttacagaactgaacgaatcgccccgtcttcgccagcagtggcaggatgttctggaggagtgtcagcagacagaggccgggccggaagagcggctgcgtattgctctgctgaatgtggattacgtcaccagttttgaactgccttttcgcttgttgcttacccggacaccacaactgattgccgcgctgcgtgaagaatgggacatcagtcagaaaaatgtggtgtttaacgataaacggtttggttgcgtgtacagcctgaaggccagcctttccggtgtgccggatacattccggtatcatctgtctcatcgtattcgccggatggtcgggaatgaaaacacatcatcgccataccagcagattgcccgggaagtgaaagcgccccgtgaacgactgaagtatgtactggaggcgggtttactggtgactgcactggacggcctgttctggtctggtagccagcgtattgcagctgatgttttgagactgagaaagcacgggatacggattgcgacatcatccgttgatatcagagaaaatttgactgaaacgacatgtcgtatccttgtttactttcttacctga

SEQ ID NO: 9762 - DNA, 3606 bp, Escherichia coli
atgaaagagtcatctgtacatatcctttcagcatggaaggattatttgacacttcgtggtgctgaaaagagtaagatatcagcagctcaggtgcatgagtatcatcagcttatgcttggttctgagaattgtgaagaacatccagacgggattgttcttcatattgaacaggaaaaacgcaataactggtgcagggattttgtcaggtatgatgataacggagaaattacttatattgagccggtgaacttgttatttcctgtattacgttatattgaaaatgagcgtggtaaagccactgtaaaatattctccgttgttttctttcccactcccgaaatctttttttgaaaaaaaagcttcctcactgttagtacctgttaaaaatggccaacttgtcagtgcctttcccttttcttttcaggaaatgacgggaataagactggatgagctgggggaaaatcgtcatatgatgagtatcgtcagtgccctgactggttatcagtacgatacctttctggacgcatttaatgccctgcaggaatggcttatccgccagggaaatcctgtgtattccgggcttgaaacggcctttaacgcttttgtggcacctcttcataataacgactacaacctcaggcgtgaggtggaagagttcagctggctgctcaataatcagccagggaactttcccttgctggagcagtatcttaatggtgtacataataactcagagtcccaggcttgttatgacgtggtgacaggtggactgtttgaaccccattattctctgggacacggacaaatggctgcgattcaggctatgaatcaggacgaacgtcttattgccgttcagggggctcccgggaccgggaaaacaacactgttcaagtcacttatagcacaacaggtagttgcgagagcactggctgttgctgacggaaaagaccagaatctggggatgctggtaacgtccacggcaataaaagctgtcgaaaatattattgatgatttgaaaaatgatcctgttacccgtgagctggactggttgtggtttcatagtgggtctaacgagcagatccagcatgagctttccaggctggaaagacttttaattcgctggagaagggaacgttatgacgaaaatcaacagcgtgattttttggctgtgctaagagtgaatcaggcattattgaattcccggtatcttgcctatctgaatgagaaggctgctgtgcttcagtcagtagaagaatgtgatcttgatactctggatacagaagagcttcttgcacggtttatggagaaactttctcctctccacgagcaggcccggcgtctgggtattgacgtttcagtacatcatccggaggatttgaatatcctgaactgtaccctcaaacaaaaacttgctgacattcgtaaaataaacacacagcgtctgcatgctgagaaacgctgccagacagtattggcgacatggccatctccgtataatccggaacaactggttcgctggatggagtcgccactgcgtcctgcattgcagcaatattatcaggattatccgcgcagaggtgtgaaatgttatttcgtccactttttggggagcagatattcgaaaaggctgcagcaaatgcgttttgctgcaccggatgattttgattatttcggcctttcttccctgtctcatcgtcagctcgcagctctggctgacgcaggggaaatcctctcgcatcaggaagagacgttaaccttattaaaagtatttctggatgccggaacaggtgagccccgggaggatgatatcctgggatttcttgctgatgttgaacacttacaggatcaatggaaacgtgttgtccaggcgcaacaggttatgacccggtacaggcaggattaccctgaagataactggtgcgacattttacgtaaacgctttgtaaagcaacaccgcgaaatgtttgaggcagcgattggttatttatggcaggaacagcttaagcggaaagatttgctggaggaagtactgaatcactggcggtcactaataagccagcgtcgatgtgcaggctattaccggtggctggagaatccggatgaattctattgttctctgtcactggtttatcccgtgatggcaaccacgctggtatcggcatggaaagtggctggttaccgaacgctgaatgagctcaggggatataagccatggcatattgctctgtgtgatgaggcaggaatgatctctcctgaatctttggttcctttattaagtcgcagtgaaaaagcgatgattgtcggagatcctctgcaaatagaacctatcagaaatttttctgaaaaccttcagacacagttacgtgcacgtcatttttccggtgataatgcgttatatgagcgggtatctcccgtaagtgtcactgcctggcaccgtgctgcaggaacgctttctggttgtggagaggagaccggaaatggaattattcttgatgaacaccggcgttgtcagaagcccatagcagacctgtttatcctgcttgccggttatcgcggtgtttatgtgaagacagctgcaccttctgagcgtattgtcagggcgtttgaaaaatcaggtggtcatcatttgatgttctacagtgtggaaggtcataaaggtgggcttattaacaccaatacagatgaagttgatgccattgaacagttactgaataaacttgaagattctggttatgatctgacgacggatgttggtatcgtaaccccttacagcaaccagaagtcgttactgctcaggcgttttgcccggcggatgaatcacagacagaaaaactgtataggtacagtacaccagtttcagggcacggggttcgaggtgattatttacagtccggtgatatttcatccgctggataaaccgaattttcagaatgatgcgcctaacatgctgaatgtagtggtttcacgtgccagacagcaatttattgtggtgggaaattatcatcggctacggcaggccggtggttatctgaaacgccttgcggacatcgttgctgcgtcttttctgcttgagcaggggagtcaacatccggatttctcccggctgagtcagactcctcgtttgcagcgttattatcgtgattgcgaacatatcgcggcattcagtgcacttgtgtcgaggagtgagcgggaggtgattatcattacaccgtggatccgttatggaagtgttcacagcaggagaacagagctggaacagttagcagcaacacagcaacggggggtcagggttaaagtgtattacggttattgtcataagcgcctggagcgtgtggatgataatgatgagattctggtatcagactatcgtgaacggctgggaaaagagaatgtcattcggttgactgaaggaacgcatgaaaaagttctgatgatagatggacgctatattgttatcggaagctggaactggttgtctcatggttatcatgaaaactgtaagagaagtgagcagttcagtaatgccatcaggcatgagctcagcgctgagttggatgatgtgtcactggtgaatgcccttagggagagactgaagctggatgcctga

SEQ ID NO: 9763 - DNA, 495 bp, Escherichia coli
atggaaaaaaccgattctttaaaagaaattctcacttatcagaaaaaaagagatctggattatcccctgcaggaacattacctgacacaactctgtatgagaatgaattataaaatgaaacaaacattgagtatggtactgaatgactaccgtatcaatgaagccatgtttatgatgatgataatattgtcaaatcagaacggtaattcagtatctccgtccgatatcagccacatcctggactgcacccgaaccaatgtcacaaggataacagacgcactggaaaaaaaaggatatatacaacgcatcaacagcaacaatgaccgccgggctatatatattcagttgacagataaaggcaccggacttttacagagcgtgaccgatgcacagaaacgccatctgaaaaatatgtggtcagttctcagtgaaacagaaattacacaactggaacacctcaacagaaaactgctacaacacttttctctgttctga

SEQ ID NO: 9764 - DNA, 165 bp, Escherichia coli
atgagtcggaaaactggaaataaagtactgacggtcctgatgtcattgcaaagtgagatcaataaagctcagaccgggaaaagtttcactgtcagatttaatggttcttgtcggcaatacagccctgtaaaaggctgcgagaagggcgggaaggatgaaatatga

SEQ ID NO: 9765 - DNA, 390 bp, Escherichia coli
atgaataaaataaaaatgttaatggcaagttgcattatgctgttaaatgccggaactttcagtatatcgtcggctgcggctcttgacagaaatatgcagatcattgcagccagtgttgccgtgttgcagtcttcatcagataagactgtgctgatgacagctcttgatagtatggaaaaagctgttgatgattcaatgggaacattaccagaaaagatttccgaggatgatgaaaagagtgtggatgagtataacagtgggttgaatgcgctgaaaaaggagatccagtttgcccgggagagtattgcagcgggccgattatccgatgtcaacggtgctgtcagaaggatgaatgatataaaagtggaaaatcataaaaaattcaggtga

SEQ ID NO: 9766 - DNA, 135 bp, Escherichia coli
atgcagagagttttgatgttaaatgaaaaaataaagaacctggatgcccaggtaaatattttctattttattataatgcagggactctggttttgggtatggtttgctacagactgcctgcatgattattactga

SEQ ID NO: 9767 - DNA, 1098 bp, Escherichia coli
gtgctttttcatcttgtggctgatgtggcccgcaggagaaaacgtcatttcactgtactgttcattgactgggaggctcagtaccagtgcaccattgaacatgttcagaagatgcgggagatgtaccgggatatgacggacatcttttactgggtggcacttcccctgaccacggtaaacggcgtctcgcagtttcagccggagtggatatgctgggagccaggagtggcctgggttcgccagccaccggaagaggccattacagacatgacgtattttcccttttaccggtatgccatgacgtttgaagaatttgttccggcattttcttcctggtttgccggcaaccggtgtggagtggcagtgctgactggtgtccgggcggatgaatctctcaaccgctttatgggactggtgtctcagcgcaaactgagatacgccgatgataaaccctggaccacagcgtcacctgaagggttttattacaccatgtatccgttatatgactggaaggcccgcgatatctggatatataacgccagagcccgtgccatctacaatcccctgtatgacctgatgtaccgtgccggcgtgccgttacgcaacatgcgtgtctgtgagccttttggtcctgaacagcgtaagggactgtggctttaccatgttctggagccggaaacctgggccaggatgtgtgagcgggtgtcaggggctgccagcggggcgctttatgccaatgaaagcggtgcctattttgccctgcgtaagcgcatatcaaaaccagcccatcatacctggcgcagctatgcgatgtttctgctggatgtgatgccggaaagaacggcagaacattaccgtaacaagatagctgtctatctgcgctggtatcagacgcggggtttcccggatgatatcccggatgaacaggagaatgacctggggagcagggatattccgtcctggcggcgtatctgtaagactctcataaagaatgatttctggtgccggacgctgtccttcagcccgaacaaaccccggcactatgaacgttatctgcagcgtatgaaggaaaggaggaaggaatgggggattctgtga

SEQ ID NO: 9768 - DNA, 213 bp, Escherichia coli
atgggggattctgtgacaccggagatgctgggcgacatgattcgtcagtacttcagtcaggcacgaactgaagaagagaccatacaggccctgaatcatctgcgcagggtacttcatgaagtcagtccttttgcacaggagccggtggactgtgtgctgtgggtgaaagtggatgaggtggtggccaacgattataactgtcagcgccagtga

SEQ ID NO: 9769 - DNA, 1173 bp, Escherichia coli; identical to SEQ ID NO: 8889

SEQ ID NO: 9770 - DNA, 798 bp, Escherichia coli; identical to SEQ ID NO: 8888

SEQ ID NO: 9771 - DNA, 240 bp, Escherichia coli
atgaatgatgacatggatttttcagtgaattatgaacagttaacacaggctgctgagcaactgttatccagatgtaagccaaccccgaatactccatctgactgtgaaaggctgaataaggcctgcggtatctgtgaactctggcaccatctggcgctgagaggcgtcagggacatttccggattccggagaatcaatgctgacagggaaagatttaacgactttcttcagataaagtaa

SEQ ID NO: 9772 - DNA, 174 bp, Escherichia coli
atgggtaatctgccagtgggaagtcgtagtttatataaaggtaaaaaacgcagcgccggtatgaatgaattacgtcatccgggaagcacacagatgacgcgcactggtcaggcgcatcgtggtggcgaacactggctgaacacggggccaccggactggcaggccgtggaataa

SEQ ID NO: 9773 - DNA, 483 bp, Escherichia coli
atgaaaaaattagcgatcatggccgcggccagcatgatggttgccgtgagcaccgctcatgcgcagttctcatatagcggcaacaccggcacagtcaaagtcaccgttaccgaagaatgccaaatacaagtgggcgacttttccacgaccaagccgcgaagccagcttactaatggtgccgcgatcggtccgttcaacgtcaccgcgagaggatgcgacaccagacagattgcattgcaggctggtgcagacaacatcgagggggataagctctacatgcgaagcgacaacggtggagataagctatacgtagtgttaagcgcgctggatggatccaactggacgacggacaatggtgtcttttacaacacggtaccagggagttggggtggcactatcggggtcaaagttcagggggaccagacactcacgccgactggtaattacactttaacactgactggcggttactggacaaattga

SEQ ID NO: 9774 - DNA, 759 bp, Escherichia coli
atgaagagcattaaccgggctatactgaattcatcaggaaaaagagactcattactcctgaatgaaaaaatgatgcagattttgccgcagcagataattgagtttacccttccggagggacgaggacaaccctcccgcaaagtccagcaggagctacgcttagcaaggttgacgctgcatccacccaccggtcgaagagaaaagttacgttgttctccggtaacggtaactgtattacttgcaaaggaaataaatgctccagaaagtgtccagccattagtatggtggctaatgagtagtgtacctccagaaaagctgacggaacccgcacagcttattcaatggtatttattacgctggcagattgaagatttcattaaggtattaaaaagcggatgtcaggttgagaaattacaacttgagacatttgaacgcacaaggaactgtctggccttataccttataatttcatggagaatactttatcttagctcattgtataaaatggttccggaggaaccctgtgatttaattttcgaaaagaaagaatatgagtatctctggatattggtagagaatacgcctccacctgaaaacataccgaatataagaacggcagttttaatgcttgcaagattaggaggatacctggcaagaaaaaatgattcacccccaggtcctaaagcaatatggtcaggattaacacgattaatgctatcaattaatgccatagaaatagcccagaaaacttgtgggtaa

SEQ ID NO: 9775 - DNA, 351 bp, Escherichia coli
atggaaacctgttttaagatccttcagctcaagttcgacaagaagctgactaaccgttgtatcggactgacgttacacatcaacgcctcaaccgtttttgaggttcttgcccgcttcaaagcttcttctctgtcatggccattacctgctgatatatcccatgacacgctggagaaactcatttttccgcccaaagacacctttgcatcagagcttgtaatgcctgacatgttgtacttcgatacggaaatgagaaaaccaggtgtgacgcggcaactgttgtggatggaatacaaggcacaggcgggtgacaaagcgatgggatactcgcacttctgcgtattaccgtga

SEQ ID NO: 9776 - DNA, 1311 bp, Escherichia coli
atggcatttgaaaagacaatcccactcaatgaatttattacacttcaaagaggttttgacttacctcaagataaaagaataaaaggtgatattccagtcatagcgtcaacgggtattgttggttaccataatgaagaaaaagtgcaggcgccgggagttgtcattggccgaagtggtagtattggtggtggtcaatatattacaaacaatttctggcctttgaacacaacattatgggttaaagattttaaagggcatcacccaagatttgtttattacttattaaaaagcattgattttagccaatttaatgttggttcaggtgtacccacattaaatagaaaccaccttagtggagtactcgtagcagatacaagttatagttatgaaaaagaagtttctaatgtcattggtattttagatgataaaataaatttaaataaaaagatcaaccaaaccttggaacaaatgtcccaaactctcttcaaatcctggtttgtggattttgatccggtgattgataacgctctggatgcaggaaatccaatcccggaggctctgcaatctcgtgccgagttgcgtcaaaaagtacgtaatagtgcagattttaaaccgcttccggcggaaattcgctcgcttttcccaagtgaatttgaagaaacggagttgggttgggtgccaaaaggctggaagattgataatattggtggcctttccgacaaaattttcagtggtggaacgccgaataccagtacggaagaatattggaatggtgcgttaaactggttctcatctggggaaacaaggaacgcattaattattgaaactgaaaaaaaaattaccgctactggtgttaaaaattcctcaacgcgattatcagttgctggagatatattaattgcaagtgctggacaaggtcatacacggggacaaacgtcactaaacactattgatacctatattaatcaatcagtagtatgtattcggccaattaaaccatcttatagcacatggctgtattttaatctttcgtcacgatacactgaaatgcgtgcaatatcagactctcatagtatcagaggaagtttaacgacaaagttaatttcgtcaatgaaagtcgcgtctccaactgatgaattaatttcattatttgatataaattgttcagtgtttattagcaaaattaaaaataatttagagctaagtcgtgaactaaaaaaactccgcgacaccctgctcccgaaactcatctccggtgagctatccctggaagatcttccggatctcaccaccgatacagaagctgcataa

SEQ ID NO: 9777 - DNA, 1281 bp, Escherichia coli
atgaataaactcattgaactcagacgcgccaaaatgttggcgctctctttactgcttatcgccgctgctacctttgtcgttacgctgtttttgccgcccaatttttgggtgagcggtgtgaaggcgattgctgaagcggcgatggtcggcgcgctggcggactggtttgcggtggtggcgctgtttcgccgcgtgccgattccgatcatttctcgtcatacggcgattatcccgcgtaataaagaccggattggcgaaaatctcggccagttcgtgcaggaaaaatttctcgatacccaatcgctggtggcattgattcgacgtcacgaaccggcgttgttgattggcaactggtttagtcagccggagaacgcccgccgcgttggtcagcatctgttacagatcatgagcggttttctcgaactgaccgatgatgcgcgtattcagcgcctgcttaagcgcgcggtccaccgggcgatcgataaggtcgatctttccggcaccagcgcactgattctggagagcatgaccagaaacgatcgtcatcaggtgctgctcgatacgctgatcgcacagttgatcgcccttctccagcgcgataaatcgcgcaagtttatcgcccagcaaattgttcgctggctggagagcgagcatccactgaaagccaaaattttgcccactgaatggctgggcgaacatagcgcggagttggtttctgacgcggtgaattctttgcttgatgatatcagccgcgatcgtgcgcatcagatccgccatgcgtttgatcgcgccacttttgccctgatcgacaagctgaaaaacgatccggaaatggcagcgcgagccgatgccgtaaaaagctatctgaaagaagatgaagcttttaaccgctatctcagtgaattgtggggggatttacgggaatggctgaaagcggatatcaacagtgaagattctcgtgtgaaagaacgtatcgcgcgggcgggtcaatggtttggcgaaacgttaattgccgatgatgccttgcgggcgtcgttaaatggtcatctggaacaagccgcacaccgcattgcgcctgagttttccgcattcctgactcgccatatcagcgacacggtaaaaagctgggacgcacgggatatgtcgcggcaaatcgagttaaatatcggcaaagatctccagtttatccgtgtcaacggtacgctggttggcggttgtattggacttattttgtatttgctgtcgcagctcccggccttgttccccctcggcaatttatag

SEQ ID NO: 9778 - DNA, 732 bp, Escherichia coli
atgaaaacaaaaaaattgatgatggttgcactggtcagttccactctggccctttcagggtgtggtgcgatgagcacagcaatcaagaagcgtaaccttgaggtgaagactcagatgagtgagaccatctggcttgaacccgccagcgaacgcacggtatttctgcagatcaaaaacacgtctgataaagacatgagtgggctgcagggcaaaattgctgatgctgtgaaagcaaaagggtatcaggtggtgacttctccggataaagcctactactggattcaggcgaatgtgctgaaggccgataagatggatctgcgggagtctcagggatggctgaaccgtggttatgaaggcgcagcagttggtgcagcgttaggtgccggtatcaccggatataattccaattctgccggtgccacactcggtgtgggccttgctgccggtctggtgggtatggctgcagatgcgatggtggaagatgtgaactataccatgatcacggatgtgcagattgcagagcgtactaaggcaacggtgacaacggataatgttgccgccctgcgtcagggcacatcaggtgcgaaaattcagaccagtactgaaacaggtaaccagcataaataccagacccgtgtggtctcaaatgcgaacaaggttaacctgaaatttgaagaggcgaagcctgttctcgaagaccagctggccaaatcaatcgcaaatattctctga

SEQ ID NO: 9779 - DNA, 510 bp, Escherichia coli
atgatcactcactatgatataaaaatggagacacagaaactaaaggatgtactctctgtagagggggttaatatcccgccattattacaggtcataaagccaggggggtatgtgtttttatgggttttattatggccaacatttcttcgtttgctggcagataaagttgatatccgagatgccggatttgatatatgttttagtggcgtaatgggttttatcctttttgttgccattactaatggaatgatgttgtatcttgctatacctgaaaaattcagagatgagtcgaaagttatatcttttatgtatgataagaacaaaaattatatcttgtcatttttgattgctttttcaatggtttcatttgcccatacactcttatatgagtttttattaattgctttgtttataatctttttctttatttatgctatagatataaatcgttataatctctcagctatagcctcagtaatagggctgttcaaaaaagagtctgttagttaa

SEQ ID NO: 9780 - DNA, 2826 bp, Escherichia coli
gtgaatgaagtttatgtgattgccggtggtgagtggttgcggaataacctgaacgccattgccgcctttatgggaaccaggacgtgggattccattgaaaaaattgcgctcacattgtctgttctcgcggtggccgtaatgtgggtacagcggcacaacgtgatggatttgctgggctgggtggccgtgtttgtgcttatcagcctgctggttaatgtccgcacatcggtgcagattattgataacagtgacctggtcaaagttcaccgggtggataatgtgccggtcggtctggcgatgccactttcactgacgacccgcatcgggcatgcaatggtggccagttacgagatgatcttcacgcaaccggacagtgtcacctacagcaaaacggggatgctgtttggcgcagaaatggtatcaaaaagcaccgactttttgtcccggaatccggaaatcgccaatattttccaggattatgtgcagaactgcgtgatgggggatatttacctgaaccacaaatacacgctggaggagctgatggcctccgctgatccctacacgctgattttttcccgccccagcccgctgcggggcgtttatgacagcaataataatttcgtaacctgtaaggacgcgtcggtttcgctgaaagacaagctgaatctggacacacagagtggcggaaaaacctggcattattatgcccagcagctatttggtggacgccctgatccgaacctgttgttcagtacgctgattggcgacagttacagttacttctatggctcaagtaaatcagccagccagatcatccgccagaatgttaccatcaatgcgctgaaggaggggatcaccagttatgccgctcgtaatggtgattcggccagcctggtgaatctggccaccacctcatcgatggagaagcaacgtctggcacatgtctccatcggccatgtagcgatgcggacactgcccatgacgcagaccatcctgacggggatcgccattggtattttcccgctcctggtactggcggctgtcttcaataaactgacgctgtccgtcctgaaaggctatgtgtttgccctgatgtggctgcagtcatggccaatgttgtacgccattctgaacagtgccatgacattttatgcgaagcagaatggtgcaccggtggtgctctcggaaatttcacagatacagctgaaatactccgatctggcctccactgccgggtatctttccatgatgatcccgccattatcctggatgatggtcaggggactcggggccggattttccagtgtgtacagccatttcgcttcctctgctatcagcccgactgccagtgcggcaggtagtgtggttgacggtaattactcctacggcaacatgcagacggaaaacgtgaacggcttcagctggagcaccaacagcaccacgtcgtttggtcagatgatgtaccagaccggcagtggcgcaactgccacacagacccgtgacggtaatatggtgatggatgcgagcggggcgatgtcccggttaccggtcggcatcaatacaacgcgtcagattgcggcggcacaacaggaaatggcccgggaagcatcgaacagagcagaaagtgccctgcatgggttcagcagcagtattgccagtgcctggaacacgctcagtcagtttggttctaaccgggggagcagtgattctgtcaccggtggcgctgacagtacgatgagtgcacaggactccatgatggccagccgtatgcgcagtgcagtggaaagctatgcgaaggcgcataatatcagtaatgagcaggcgacaagagaactggcatcgagaagtacgactgcatcagctggattgtatggtgatgctcatgccggattagatgcaaagcccagcctttttggtgtgcgtgttgatgttggcgctaaggttggtgggcgagccagtattgacggtagtgatctggactcacatgaagccagtagtggcagcagggcttcccatgatgctcgccatgatattgacgctagagccagtaaggactttaaagaggccagcgattactttaccagtcgcaaagtcagtgaatccggcagccatactgacaataatgccgattcccgtgtggaccagctgtctgcagccctgaactcagcaaaacagagttacgaccagtacacgacgaatatgacccgcagccatgaatatgctgaaatggcatcccgtactgaaagcatgagtgggcagatgagtgaagacctatcgcaacagtttgcacagtatgtgatgaaacacgctccgcaggatgcagaagctattctgacaaataccagttcgccggagattgcagaacgccgtcgggcaatggcgtggtcttttgtgcaggaacaggtgcagcctggtgttgataatgcctggcgtgaatcccgtggtgatattggtaaaggaatggagagcgtaccttcgggtggtggcagccaggatattattgctgaccatcagggacatcaggccattattgagcaaagaacgcaggacagtaatatccgaaatgatgtaaaacatcaggttgataatatggtcacagaataccgaggcaatatcggggatactcagagcagcatacatggcgaagaaaatattgtaggaagacagtattctgaactacaaaatcaccataaaacagaagcattatctcagaataataaatatgatgaagagcgagaaagtcaaaagataatacctgagccatcaggagaggctgtgaaagaaatgattgatggtaaaaaggaacgactgaaggggccattatga

SEQ ID NO: 9781 - DNA, 1374 bp, Escherichia coli
atgcttcgcattaagcctctttttattctttgtgccgccttactgacggtgacgcctgcagcgtcagcggatgtgaacagcgacatgaatcagttctttaacaagctgggcttcgcctccaataccacacagccgggcgtctggcaggggcaggctgccggctatgcttacggcggctccctgtatgcccgtactcaggtcaaaaatgttcagctgatttccatgacgctgccggatatcaatgccggatgtggcggcatcgacgcttatctcggttcgttcagttttattaatggtgagcagctgcagcgttttgttaagcagattatgagtaatgctgccggttacttttttgaccttgccctgcagacaacggtgccggaaatcaaaaccgcaaaagacttcctgcagaaaatggcaagcgacattaacagcatgaacctcagttcctgccaggcggcgcaggggattatcggcgggcttttcccccggacgcaggtgtcccagcaaaaagtctgtcaggacattgccggtgagagcaatatttttgctgactgggcggcttcccggcagggatgtaccgttggcggtaaatctgacagcgtcagggataaagccagcgacaaggataaggagcgggtgaccaaaaacattaacatcatgtggaatgcgctttccaaaaacagaatgtttgacggcaacaaagagctgaaagagtttgtgatgacgctgaccggctcactggtgtttggtcccaacggcgaaatcacaccgctgtcagccagaaccactgaccgctcaattatccgggccatgatggaaggcggcacagcaaaaatttatcactgcaacgattctgataaatgcctgaaagtggtggcagacacaccggtgaccatcagccgggataatgcactgaagtctcagattactaaacttctggccagcattcagaacaaggctgtcagtgacacgcctctggatgacaaggaaaaaggctttatttccagtaccaccatccccgtcttcaaatacctggttgacccgcagatgctcggtgtttccaacagtatgatttaccagctgacggactatatcggttacgacatcctgctgcagtacattcaggagctgatacagcaggcccgggcgatggtggccacgggaaattatgacgaagcggttatcgggcatattaacgacaacatgaatgatgccacccggcagattgcggcgtttcagtcacaggtgcaggtacagcaggatgcgctgctggttgtcgatcgtcagatgagctacatgcgtcagcagctttccgcccgcatgctcagtcgttaccagaacaactatcacttcggagggagcacgctgtga

SEQ ID NO: 9782 - DNA, 189 bp, Escherichia coli
atgagagaaaataaaaataatcctgaactcaaaatcagaagtacagaacgagattataaatacatttccagaattactgacaggtatgctggattgtctctggtattcctgactgccggaattgttttatggacagctatgaatattatttttgatgcctgtattgattcgtggaaaacggacccgtaa

SEQ ID NO: 9783 - DNA, 546 bp, Escherichia coli
atgtctctcactaaattactgccggtcattttgttgatgatggtcacaggtgtgcaggcctccacccgggatgaaattgaacgactctggaatccgcagggcatggccgcgcagcctgcacaaccggcagcagacacatcagccaggacagaaaagccggctccccgctggttccgcctcagcaacggtaggcaggttaacctggccgactggaaggtggtgctgtttatgcaggggcattgcccttactgtcaccagtttgacccggtactgaagcagctggcacagcagtacggcttttccgtttttccctacaccctggatggtcagggggataccgcctttccggaagcattaccggtgccaccggacgtgatgcagaccttcttcccgaatatttcggtggccacaccgaccaccttcctggtcaacgtcaacacgcttgaggcattaccgcttttacagggggcaacggatgccgccggttttatggcgcggatggataccgttctgcagatgtacggagggaaaaaaggtgcgaaataa

SEQ ID NO: 9784 - DNA, 285 bp, Escherichia coli
atgataagtaaacgcagattctctttaccccggcttgatattacgggaatgtgggtattttccctgggtgtctggtttcatatcgtcgcccgtcttgtttacagcaaaccctggatggctttttttctggcggagctgattgcggccatccttgtgctgttcggcgcataccaggtgctggatgcatggattgcccgtgtcagccgggaagagcgtgaggcactggaagccaggcaacaggccatgatggcagagcagcaggagggcggacatgtctctcactaa

SEQ ID NO: 9785 - DNA, 276 bp, Escherichia coli
atggaaaagcgatcttttaaagaaaaactggaaataatcagaaacataataagagagtcgttactgggaaatgcggcaattattgcgctgatatatgcagcatcacattcattaccggtcaatgccttccctgactatcttgtaataagtttattaagtatctatatttatttttgtgagctattcagaagccactggattgcggtatggtttatcatatggtcttcagtaatcaacctcattattttgtatggtttttatgaccgttttatatga

SEQ ID NO: 9786 - DNA, 198 bp, Escherichia coli; identical to SEQ ID NO: 5330

SEQ ID NO: 9787 - DNA, 294 bp, Escherichia coli
gtgatcggcttccgcaatgttgatatggcggaactgcgtatccacaccccggctgagcgcgtagctatagctgaaggccatcttttccgggtggcttttgcgatattttttcagctcagtcaggctgctgaattccaggacgtcccactcttccccggtgtttttttcttcccggcaacaagaagcgtgtacgacgcggtgttaacgtggatatttcgggtactcatcctgctttctcctctctctggttttcagcccccatcatcttttgagtttcgggagccgcggttttga

SEQ ID NO: 9788 - DNA, 1434 bp, Escherichia coli
atgaataagaaatcgttatggaagctaattctgatattagcaatcccatgtattattggctttatgccagctccagcaggattaagcgaactggcgtgggtgctttttggtatttacctggcggccattgtggggctggttatcaagcctttcccggaacctgtcgtactgttaattgccgtcgccgcatcgatggtagtggtgggtaacttatcaggtggggaatttaaaaccaccgccgtattaagcggttactcttccggtaccacctggctggtgttttctgcgtttactttaagcgccgcgtttgtaaccacaggcttaggtaaacgtattgcctatctgctgattggtaaaattggtagcactaccctgggtctgggttacgttacggtatttctcgatctggtactggctccggcaacaccgtctaacaccgcgcgtgcgggcggcattgtgttaccgatcatcaacagcgtggcggtggctttggggtcagaaccggaaaaaagtccgcgtcgtgtcggacattacctgatgatgtccatttacatggtcaccaaaaccaccagctatatgttctttaccgcaatggcggggaacattctggcgctgaaaatgatcaacgacattctgcacctgcaaattagctggggtggatgggcgctagccgccggattgcctggcatcattatgctgctggtcaccccgctggtgatttacaccatgtatccaccagaaattaagaaggtggataacaaaaccatcgctaaagcgggccttgccgaactgggaccgatgaaaatccgcgaaaaaatgctgctcggtgtctttgtgctggcgctgctgggctggattttcagtaagtctctgggggttgatgaatccaccgtggcaatcgttgttatggcaactatgctgctgctgggtatcgttacctgggaagacgtggttaaaaataaaggcggctggaataccttaatctggtacggcggtattatcggcttaagctccttattatcgaaagttaaattcttcgaatggttagctgaagtctttaaaaataacctggcatttgatggtcacgggaacgttgctttcttcgttattattttcctcagcatcatcgtgcgttatttcttcgcttctggtagtgcctatatcgttgccatgttaccggtatttgccatgctggcgaatgtctccggcgcaccgttaatgttaaccgcgctggcactgttgttctctaactcctatggcggcatggttactcactatggcggcgcggcaggtccggtcatctttggcgtgggttacaacgatattaaatcctggtggttggtcggtgcggtactgacgatattaaccttcctggtgcatatcaccctcggcgtgtggtggtggaatatgctgatcggctggaacatgctgtaa

SEQ ID NO: 9789 - DNA, 2262 bp, Escherichia coli
atgatcaagttatctgaaaaaggcgtgtttctcgccagtaataacgaaataattgccgaagaacatttcaccggcgaaattaaaaaagaagaagccaaaaaaggcactattgcctggtctattctctcttctcataatacgtccggaaatatggataaacttaaaattaagtttgattcattagcctctcacgatattacctttgttggtattgtacagaccgctaaagcgtccggtatggaacgtttcccgctgccgtatgtgctgaccaactgccataactcactctgcgccgtcggcggcactattaacggtgatgatcatgtttttggtttatcggcagcccagcgttatggcggtatttttgtgcctccgcacattgcggtcatccatcaatatatgcgtgagatgatggcaggcggcggcaaaatgatcctcgggtcagacagccatacccgttacggtgcgttagggacaatggcggttggcgagggcggcggcgagttggtaaaacaactgcttaatgacacctgggatatcgactatccgggcgtggttgcggtgcatctgaccggaaaacctgcgccgtatgtggggccgcaggatgtggcgctggctatcatcggtgccgtgttcaaaaacggttacgtcaaaaacaaagtgatggagttcgtaggtcccggtgttgcagcgctctctaccgatttccgcaacagcgttgacgtgatgaccactgaaacgacctgtttaagttctgtctggcaaaccgatgaagaagtccataactggctggcgttgcacggtcgcggccaggattactgccagcttaaccctcaaccaatggcgtactacgatggctgcatcagcgttgatttaagcgccatcaaaccaatgattgcgctgccgttccacccgagcaacgtctatgaaatcgacacgctgaaccagaacctgaccgacattctgcgtgagattgaaattgagtccgaacgcgtggcgcacggtaaagccaaactctcgctgctggataaagtcgaaaacggtcgcctgaaagtgcagcaggggattatcgcgggctgttctggcggtaactacgaaaacgtcatcgcggcggcgaatgcactgcgcggtcaatcctgtggcaatgacaccttctcgctggcggtttacccgtcatcacagccggtgtttatggatctcgccaaaaaaggtgtggtcgcagatttgattggcgcaggctcaatcatcagaaccgcgttctgcggcccatgctttggcgcgggcgatacgccaatcaacaacggtttgagtattcgccacaccacgcgtaacttcccgaaccgcgaaggctctaagccagctaatgggcagatgtcagcggtggcgttgatggacgctcgttctattgcggcgactgcggcaaacggtggctatttaacctctgccagcgagctggattgctgggacaacgtgccggagtacgccttcgatgtaacgccgtataaaaaccgtgtttatcagggctttgtgaaaggggcgacccagcaaccgctgatttacggaccgaacattaaagactggccagaattgggtgcgctgactgacaatatcgtcctcaaagtgtgctcgaagatcctcgacgaagtgaccaccaccgacgaactgattccttccggtgaaacctcttcttatcgttcaaatccgattggtctggcggagtttaccctgtcacgccgcgatccaggttatgttggtagaagtaaagcgactgctgagctggaaaatcagcgtctggcgggaaatgtcagcgagctgacagaggtgtttgcgcgcattaagcagattgctggtcaggagcatattgatccgctgcaaactgaaattggcagcatggtttatgcggtgaaaccaggcgatgggtctgcgcgtgaacaggcggcgagttgtcagcgtgtgattggcggtctggcgaatattgccgaggagtacgcgactaaacgctatcgttctaacgtcatcaactgggggatgttaccgctgcagatggcggaagcaccgaactttgacgtaggtgattacatttacatccctggcattaaagcagcgctggataatccgggtacgacgtttaaaggttatgtgatccatgaagatgcgccggtaacggaaattacgctttacatggaaagcctgacggccgaagagcgcgagattatcaaggcgggtagtttgattaacttcaataaaaaccgtcagatgtaa

SEQ ID NO: 9790 - DNA, 1071 bp, Escherichia coli
atgggaagaaggcgaagtcatgagcgccgggatttaccccctaacctttatataagaaacaatggatattactgctacagggacccaaggacgggtaaagagtttggattaggcagagacaggcgaatcgcaatcactgaagccatacaggccaacattgagttattttcaggacacaaacacaagcctctgacagcgagaatcaacagtgataattccgttacgttacattcatggcttgatcgctacgaaaaaatcctggccagcagaggaatcaagcagaagacactcataaattacatgagcaaaattaaagcaataaggagggggctgcctgatgctccacttgaagacatcaccacaaaagaaattgcggcaatgctcaatggatacatagacgagggcaaggcggcgtcagccaagttaatcagatcaacactgagcgatgcattccgagaggcaatagctgaaggccatataacaacaaaccctgtcgctgccactcgcgcagcaaaatcagaggtaaggagatcaagacttacggctgacgaatacctgaaaatttatcaagcagcagaatcatcaccatgttggctcagacttgcaatggaactggctgttgttaccgggcaacgagttggtgatttatgcgaaatgaagtggtctgatatcgtagatggatatctttatgtcgagcaaagcaaaacaggcgtaaaaattgccatcccaacagcattgcatgttgatgctctcggaatatcaatgaaggaaacacttgataaatgcaaagagattcttgacggagaaaccataattgcatctactcgtcgtgaaccgctttcatccggcacagtatcaaggtattttatgcgcgcacgaaaagcatcaggtctttccttcgaaggggatccgcctacctttcacgagttgcgcagtttgtctgcaagactctatgagaagcagataagcgataagtttgctcaacatcttctcgggcataagtcggacaccatggcatcacagtatcgtgatgacagaggcagggagtgggacaaaattgaaatcaaataa

SEQ ID NO: 9791 - DNA, 150 bp, Escherichia coli
gtggatgaccccgatctacatgagaatattcgcatttgctatccgtatggcaattatgagtacgataatattatctatgttgaaaagaaaattaatatattaggtgcggtagtgacatatgcacagaccgcgcgtgatgatactgaatga

SEQ ID NO: 9792 - DNA, 861 bp, Escherichia coli; identical to SEQ ID NO: 5314

SEQ ID NO: 9793 - DNA, 360 bp, Escherichia coli
gtgtcactggccgagaaggtgttcggagccgtggagacggtcgaaggggtggcgcaaaggttgaacgccaaaataatggggtctgtgcagccgatggccgagaaagccgctgtaagcgcccagaacgagcgaagagccaaggagctaagggaaaccctagcccagcagcaaaaacgcttacaggcccttcaggagccgtttaaggggctatccaaggatcaggtagcgggactgatccggcaggcggtgaaattgcggcaggagaacgagcaggagaagcaggagcgcgcccagcagatcaaagagcgattcaaggccaagcgggaacgggagcgcagcgaccgcagcaggggccgttaa

SEQ ID NO: 9794 - DNA, 222 bp, Escherichia coli
atggccatgagcatgtattacatcaagacaggtctggagtactggaaacccaagggctacgggtacaccaagagccgcgaggaggcgggggttttcaccctcaaggacatggaagaattgaacctcgatggctgcaccctggaacgcgccgaagtggcgttcctggacgaggacggccccagtcccgacctaccccaccgcgtcaccctgccccgcgattga

SEQ ID NO: 9795 - DNA, 204 bp, Escherichia coli
atgacagatccactcaaagcccttttcggcaagcctgattactcccatatcgtaagggacaccacggccactatcagcatcacagccgctgaaatggccgctgttttggaggcttacgacaggggtatagacacgctggacggcaccaccagaacggcgctggattccgttatatcgaaactcaaggacgaggtatggccatga

SEQ ID NO: 9796 - DNA, 816 bp, Escherichia coli; identical to SEQ ID NO: 6090

SEQ ID NO: 9797 - DNA, 957 bp, Escherichia coli
atgtggctgtccattgctattcgtggtctgctggcaatgggagaaaaccgtaaccgtcgtgtgtggtttttctgtgacgagttacccacgttacacaaactgccggacctggtggagatcctgccggaagcccgtaagttcggtggctgttatgtgtttggtatccagtcctatgcccagctggaagatatctacggtgagaaagcggctgccacgctgtttgacgtcatgaacacccgtgcctttttccgttctcccagccataagattgcagagttcgctgccggtgaaattggtgagaaagagcacctgaaagccagcgagcagtattcctacggtgctgatccggtacgtgacggggtatcgaccggtaaggatatggagcgtcagacgctggtcagttattccgacattcagtctctgccggatctgacctgttatgtcaccctgcccggaccgtatccggcagtaaaactctccctgaaatatcagacacgaccgaaggtcgctccggagtttattccgcgtgacatcaacccggaaatggagaaccgtctgagtgccgtacttgccgcaagggaagcagaaggtcgtcagatggccagcctcttcgaaccggatgtcccggaggttgtttccggagaagacgtgactcaggctgaacagccgcaacagccggtgtctcctgccatcaacgataagaagtcagatgcaggtgtgaatgttccggcaggggggatcgagcaggagctgaaaatgaaaccggaagaagagatggaacagcaactgccacccgggatcagtgaatccggtgaagtggtggatatggccgtttatgaggcatggcaacgggagcagaatccggatatccagcagaagatgcagcgtcgtgaagaggtgaacatcaatgtgcaccgggagcgcggggagaatgttgagccgggagatgatttctga

SEQ ID NO: 9798 - DNA, 399 bp, Escherichia coli
atgctgaagtttatgctcgataccaacatctgcattttcacgatgaagaacaaacccgccagcgtcagggagcgttttaacctgaaccaggggagaatgtgtatcagttcggtcaccctgatggagctgatatatggtgcagaaaaaagccagatgcctgaacgtaatctcgctgtgatcgagggatttgtttcccgcattgatgttctggattacgacgctgccgcagccacacacagcggccagataagagcagaacttgcccgtcagggacgccctgtcgggccatttgatcaaatgatcgcaggtcatgcccgcagtcggggactgattattgtgactaataacacccgggaatttgaacgtgtggacggtctgagaattgaagactggagctga

SEQ ID NO: 9799 - DNA, 228 bp, Escherichia coli
atggaaaccaccgtatttttcagcaaccgcagccaggcggtcagactgccaaaagcggttgcattgccggaaaacgtaaaacgcgttgaagtgattgctgtcggacgaaccagaatcattacgccagccggagagacatgggacgaatggttcgacggacacaacgtcagcgccgattttatggataacagggaacagcccggcatgcaggaaagggagtcattctga

SEQ ID NO: 9800 - DNA, 5271 bp, Escherichia coli
atgatgagtatcgcgcaggtcagatcggccggaagtgccggtaactattataccgacaaggataattactatgtgctgggcagcatgggagaacgctgggccggcaggggggctgaacagctggggctgcagggcagcgtcgataaggatgtttttacccgtcttctggaggggaagctgccggacggagcggatttaagccgcatgcaggatggcagtaataagcatcgtcccggctacgacctgaccttctccgcccccaaaagtgtctccgtgatggccatgttaggcggtgataaacgtcttattgatgcacataaccaggccgtggattttgctgtccgtcaggtggaggcgctggcttccacacgggttatgacggacggacagtcagaaacggtgctgaccggtaatcttgtgatggcactgtttaaccacgacaccagtcgcgatcaggaaccacagttacacacacatgcggtagtggccaatgtcacgcagcataacggcgagtggaagacactgagcagtgacaaagtggggaaaacggggttcattgagaatgtgtacgctaatcagattgccttcggcaggctctaccgggaaaaactgaaagagcaggttgaggcgctgggctatgaaacggaagtggttggtaagcacggtatgtgggagatgccgggcgtaccggtggaggccttctccggacgctcacaggctatccgggaggccgtcggggaagacgcctcgctgaaatcccgggatgtggcggcactggatacgcgaaaatccaaacagcacgtcgatcctgaagtcagaatggctgaatggatgcagacgctgaaggaaaccgggttcgacatccgggcgtatcgtgacgcggcggaccaacgggcggagacccgcacgcagacgcccggacccgcttcacaggacgggccggatgtgcagcaggcggtgacacaggccattgccggattaagtgaacgcaaagtgcagtttacgtacacggacgtgctggccagaacggtcggcatactgccgccggaaaatggtgtgattgaacgggcacgcgccggtatcgatgaggccatcagccgtgagcagcttatccccctcgatcgtgagaaggggctgttcacgtccgggattcatgtgctcgatgagctgtcagtccgggcactcagtcgtgacatcatgaaacagaaccgggtgaccgtacatccggagaaaagtgtcccccggacggccggttacagcgatgcggtcagtgttctggcacaggatcgcccgtcgctggctattgtgtccgggcagggcggtgcagccgggcagcgtgagcgggtggcggagctggtcatgatggcccgggagcaggggcgggaggtgcagattatcgccgctgaccgtcgctcgcagatgaacctgaagcaggatgaacggctgtccggtgagctgataaccggacgtcgtcagctgcaggagggcatggccttcacgccgggcaatactgttatcgttgaccagggcgaaaaactctccctgaaagagacgttaaccctgctggacggtgccgcacgtcataacgtacaggtcctgataaccgacagcgggcagcgaaccggtacaggcagtgcactgatggccatgaaagatgccggggtgaacacatatcgctggcaggggggagaacagcggccggccaccatcatcagtgaaccggaccgtaatgtccgctatgcccggctggcaggagattttgctgccagcgtgaaagccggagaagagagcgtggcacaggtcagcggggtacgggaacaggccatactgacacaggccattcgcagtgagctgaaaacacagggcgtgctcggacgcccggaggtaaccatgaccgccctgtcgccggtctggctggacagccggagccgttatctgcgggatatgtaccgtccggggatggtgatggagcagtggaacccggagacacgcagtcatgaccgctatgttatcgaccgggtgacggcgcagagtaacagcctgaccctgcgggatgcgcagggtgaaacgcaggtggtgcgtatttcctccctggacagcagctggtcgctgttccggccggaaaaaatgccggtggcagacggcgagcgactgagggtgacagggaaaattcccggactccgcgtctccggcggtgaccgcctgcaggtggcatccgtcagtgaagatgcgatgacggttgttgtgccggggcgggctgaaccggcttccctgcctgtgagcgattcaccattcatggcactgaagctggagaacggctgggtggaaacgcctgggcattccgtcagcgacagtgcgaaggtttttgcctccgtcacacagatggcaatggacaacgccaccctgaacggtctggcccgcagcggtcgtgatgtccggctgtattcctcactggatgaaacccgtactgcggaaaaacttgcccgccatccctcctttacggtggtttctgagcagataaaggcgcgtgccggtgagacattgctggaaaccgctatcagtctgcagaaaaccgggcttcacacgccggcacagcaggctattcatctggcgcttcctgtggtggaaagtaaaaacctggccttcagcatggtggacctgctgacagaggcgaagtcgtttgctgcagaaggaaccagttttactgaactgggaggggaaatcaatgcgcagataaaacgcggtgatttactgtatgtggatgtggcaaaaggctatggcacaggcctgctggtttcccgtgcgtcgtatgaggcagaaaagagcattcttcgccatattctcgaaggtaaggaggcggtcacgccactgatggagagagtacctggcgaactcatggagaaactgacatcaggacagcgtgccgctacccgcatgatactggaaacgtccgaccgtttcacggtggtgcagggctatgccggtgtgggtaagaccacacagttccgggcggtgatgtcagccgtgaacatgctgccggagagtgaacgtccccgtgtcgtggggctggggcccacgcaccgtgcggtcggtgagatgcgcagcgccggcgtggatgcacagacgctggcgtcctttctgcatgacacgcagctgctgcagcgcagcggagaaacgccgaatttcagcaacacgctgttcctgctcgatgagagctctatggtgggcaataccgacatggcacgggcatacgccctgattgcggccggtggcggtcgtgccgtggccagtggtgacacggaccagttgcaggccatcgcgcccggtcagcctttccgtctccagcagacgcgcagtgctgccgatgtggccatcatgaaggagattgtgcgccagacgccggagctgcgggaggcggtatacagcctgattaaccgggatgtggaaagggcactgtccgggcttgagagtgtgaaaccgtctcaggtgccacgtcaggagggcgcatgggtaccggagcactccgtgacggagttcagtcacagccaggaagcgaaactggcagaagcgcagcagaaggcgatgctgaaaggtgaggcttttccggatattcccatgacactgtatgaagccattgtccgcgattataccggcaggacgccggaagcacgggagcagacgctgattgtcacgcatctgaatgaggaccggcgcgtactgaacagcatgattcatgatgcacgggaaaaggccggtgagctgggaaaagagcaggtcatggtgcctgtcctgaacacagcgaatatacgcgacggggagttgcgtcgtctctccacctgggagacacatcgggacgcacttgccctggtggataatgtgtatcaccggattgccggtatcagcaaggatgacgggctgataaccctgcaggatgcggaaggtaacacgcggctgatttcgccccgggaggcggtggctgaaggcgtcacactgtacactccggacaccatccgggtgggaaccggtgaccggatgcgcttcacgaagagtgaccgggagcgcggttatgtggccaacagcgtctggacggtgacagcggtttccggtgacagtgtcacgctgtcggacggacagcagacccgtgtgattcgccccggtcaggagcgggcagagcaacatattggcctggcctatgccatcaccgcccacggtgcgcagggggcaagtgaaacctttgccattgcgcttgaaggcacggaaggtaaccggaaacagatggccggctttgagtcagcctacgtggccctgtcgcgtatgaagcagcatgtgcaggtgtataccgataaccgtcagggctggacggatgccattaacaatgccgtacagaaaggaactgcccacgatgtgctagagccgaaatcggaccgggaggtcatgaatgcagagcggctgttcagtacggcgcgggagctgcgggacgtggtggccggccgtgccgttctccgtcaggcagggctggccgggggagacagtcctgcacggtttattgcacccgggcgcaaatatccgcagccgtatgtggcactgccggcttttgaccgtaacggcaagtcagctggtatctggctgaacccgctgaccacggatgacggaaacgggctgcggggcttcagtggtgaaggccgggtgaaaggcagcggggatgcgcagttcgtggccctgcagggcagccgtaacggagagagcctgctggctgataatatgcaggatggtgtccggattgcccgtgataatcctgacagcggtgtggtggtaagaatcgccggtgaaggtcgtccgtggaatcccagaaccatcaccggtggtcgcgtgtggggggatatcccggacaacagcgttcagccgggagccggaaatggcgaaccggtcacggcagaggtactggcacagcggcaggctgaagaggccatccgccgtgaaacggaacgccgtgcggatgaaattgtccgtaaaatggcagagaacaaacctgacctgccggacggcaaaacagagcaggctgtcagggatattgccgggctggagcgtgaccggtctgccatatctgaacgggaagccgcgctgccggagagtgtactgcgtgaaccacaacgggtgcgggaagcggtccgggaggttgcccgggaaaatctgctgcaggagcgactgcagcagatggagcgggatatggttcgtgacctgcagaaagagaaaaccctgggcggagactga

SEQ ID NO: 9801 - DNA, 495 bp, Escherichia coli
atgacaacggataacacgaacacaacacgtaatgattcactggctgcccggaccgatacctggttgcagtcgttgctggtctggtcacccggacagcgggatatcatcaaaacggtggcacaggtgctgacatggtgtgaaacgcgcacctggtggcgttccgcagagaccatgttgcttctggcaatgtggttgcctttctccggcaccagttacggcattgccgggctgctgatgctggcagtcagccacaggctgtaccgggcggaagacagaatggaacgtctggcgctggtcgcctgcctgctggctgttattccggcgcttaaccttgccaccagtgatgcagcggcggtggccggccttgtgatgacggtgctgactgttggtctggtgtcctgtacagggaaatcactaccccgtttctggtacggggattttttcccgacgttctatgcctgtcatcttactgtgctgggcgttctggctgtgtga

SEQ ID NO: 9802 - DNA, 561 bp, Escherichia coli
atgacagagcagaaacgaccggtactgacactgaaacggaaaacggaaggggaaacaccgacccggagccggaaaaccatcatcaatgtcaccacgccaccaaaatggaaggtgaaaaagcagaaactggcggagaaggctgcccgggaagcagagctggcggcgaagaaagcacaggccagacaggcgctgtccatttatctgacgctgccctcgctggatgaggcggtgaacactctgaaaccttggtggccgggattgtttgacggtaacacgccccggcttctggcctgcggtatccgggacgtgttactggaagacgtggcgcagcggaatatcccgctctcgcataaaaaactgcgccgggcgctgaaggccatcacccgttcagaaagctatctgtgtgccatgaaagccggtgcctgccggtatgacacggaagggtatgtgacggagcatatttctcaggaggaggaagcgtatgcggcagggcgtctggagaaaattcgccgccagaaccggacaaaggcagaacttcaggccgtgcttgatgggaaataa

SEQ ID NO: 9803 - DNA, 207 bp, Escherichia coli
atgaagtaccttaacactactgattgtagcctcttctttgctgagaggtcaaagtttatgacgaaatatgcccttatcgggttgctcgccgtgtgcgccacggtgttgtgtttttcactgatattcagggaacggttatgtgagctgaatattcacagaggaaatacagtggtgcaggtaactctggcctacgaagcacggaagtaa

SEQ ID NO: 9804 - DNA, 258 bp, Escherichia coli
atgtcgcagacagaaaatgcagtgacttcctcatcaggcaccaagcgtacataccggaaaggtaaccctgttccggccagagagaggcaaagagcttctctggctcgcagaagcaacactcataaggcttttcatgcggttattcaggcccggttaaaagacaggctgagtgaactggcggatgaggaaggtattactcaggcgcagatgcttgaaaaactgattgaatcagagctgaaacgcagagcgacttcgtaa

SEQ ID NO: 9805 - DNA, 483 bp, Escherichia coli
gtggctaatcatgaaacacattcagtaatagcgggtgggattgaatcagatcttcacattgattccagcaagtatcctcacccgttttgcagccttctccagaaaagggctcattttgactccttcaagcatctgatcttcatcagaggtttgcttgcaatagcgcatggcaaacgtaaaaataaaatcagcgcgtcgatggttagtttttatgtttccctcgtacaagtaatgtgcgcacactacatccctgatacgaacaaagttaacttatctgttaaagagctttcagtttgtagtggaggttcatacactcgtgtttggagagccctcaaaactcttgataatgatcttcatctcatcgcttttgatggaggaaccatctggttcagaccagatatgttcgaaactttacgtgtcggcccagacgagctagttaccgcccgtaggagggggaatagtgttggagggggacatggctga

SEQ ID NO: 9806 - DNA, 858 bp, Escherichia coli
atggctgatctccttcaaaaatactattcacaggttaaaaatccgaatccggtgttcacaccccgtgaaggtgccggaacgctgaagttctgcgaaaaactgatggaaaaggcggtgggcttcacctcccgttttgatttcgccattcatgtggcacatgcccgttcgaagggactgcgtcggcgcatgccaccggtactgcgtcgccgggctattgatgcgctgctgcaggggctgtgttttcactatgacccgctggccaaccgcgtccagtgctccatcactacgctggccattgagtgcggactggcgacggagtctgctgccggaaaactctccatcacccgggcctcccgagccttgacgttccttgcagagctgggactgattacctaccagacggaatatgatccgcttatcgggtgctacattccgaccgatatcacgttcacaccggcgttatttgccgcccttgatgtgtctgaggatgcagtggttgctgcgcgccgcagtcgtgttgaatgggaaaacagacagcgcaaaaagcaggggctggataccctgggtatggatgaactgatagcgaaagcctggcgttttgtgcgtgagcgtttccgcagttaccagacagagcttaagtcccgtggaataaagcgtgcccgtgcgcgtcgtgatgcgaacagggaacgtcaggatatcgtcaccctggtgaaacggcagctgacgcgtgaaatctcggaagggcgcttcactgccaatcgtgaggcggtaaaacgcgaagtggagcgtcgtgtgaaagagcgcatgattctgtcacgtaaccgtaattacagccggctggccacagcttccccctga

SEQ ID NO: 9807 - DNA, 162 bp, Escherichia coli
atggatatcccacgtatttttaccatcagcgaaagtgaacaccgcatccataacccgttcaccgaagagaagtacgccacgctgggtcgcgtgctgcgcatgaagccgggcacccgcattcttgacctcggcagcggctcgggcgagatgctctgcacctag

SEQ ID NO: 9808 - DNA, 915 bp, Escherichia coli
atggctggtttaaggaataataacaacacacagaatgcacagtgggctgattatgtgggtgacattcttcggggggctcaaccgataaaccagctagtacctcagcacccttatcttaacgacgtcccactcattgatgaattaaggcgtcagaacactcatcatgttattctcttgacacttgatgttgcaaaaaaaatactcagctcaataacatcatttgattacattcattttatcactacacatccttcaggtataaaagatacactcgcttggttagttaacgcgggtaaattaatgactgagtttgatggaaatgggaaaattatatttaactttaataccttaaagtatacaaaagcaagttactttgaaatacttggagagaaatatataaaaattacaacatccagcccctggcttttagaaaagctcggtaaatatattttctcttcacgagcgcctcaagttctggaactcgctattggctggcgaggagctttatctgaatcaataaaaggagttaagttctgtatctggttttcagtagcctggagaaccatagaatttattatgagttcagagcgagatctggttaattttcttggtgatttttcaatggatgtggccaaagcagtgattgcaggcggtgttgcaactgctattggaagcctggcttcttttgcctgtcttagttttggccttccagtaattcttgtaggaggagcaattttacttacagggatagtgtgtacagttgttttaaatgaaatcgatgctcaataccatttatcagaaaaattaaaagatgcaattagagatggactaaaacggcaacaggaacttgataaatggaaaagggaaaacatgactccatttatgtatgttcttaacactccccccgtgatatga

SEQ ID NO: 9809 - DNA, 483 bp, Escherichia coli
atggcaaatatgagttatttatctttgagtggagagacacaagggctgatttcagcaggttgctcaacgcttgattctgtcggaaacaaagcacagccagaacataaagatcagatcatggtttatgcgttaatgcattccatctcaagaagtcaaaatgtcaatcatcatgaattaattatcaccaaaccggttgataaatcctcaccattgctggcaaaagcacttagtgacaatgaaaaaatggtaacatgtgaatttatactctaccgaaccagtaaagcgggtatttaccagccttattataaaataaacctgtcaaaagcccgaatatcaagtattgattttgtcacaccgcatgctgtcctggaaaaagaactggagccacaggagagaattgcctttatttatgaagatatttcctgggagcatacgttagccggtacgaatgcaatgagtaaatggcaggatcgtgtacagtaa

SEQ ID NO: 9810 - DNA, 1353 bp, Escherichia coli
atgaatagtaacggactgacacaaactatcgttaccggcagtgacccgcgcgggctgccggaattcagcgccatccgcgaggaaataaacaaagccagccatccgtcacagcctgagctgaactggaaactggtggagtcgctggcgctggcgatttttaaagccaacggtgtggatttacacaccgccacctactatacgcttgcccggacacggacacagggactggcgggattctgcgaaggtgcggaactgctggcggcaatggtaagccacgactgggataaattctggccgcagggcggtccggcgcgtactgaaatgctggactggtttaactcccgaaccggcaatattctgcgtcagcaaatctcctttgcggaacccgatctgccgctgatctaccgcacagagcgggcattgcagcttatctgcgacaagcttcagcaggtggagctgaagcgcgttccgcgcgtggagaatctgctctattttatgcagaacacgcgtaagcggcttgaaccccagccgaagagtaacgttgaaaacgccgtacagaccacggttagaacactgatttatgccccggaaacaacggcttcctccacgccagaagcggtagtgcctcccctgcccgacctgcctgagatgaaagtagaagtgcgcagtctgtcagagaatcccccacaggccagtgtgatgaagcaaggcagtacggtaagagggtttatcacggggatcgcctgttcagtggctgtcgcctcagcattgtggtggtggcaggtctatccggtgcaacagcaactgttacaggttaacgacaccgcgcagggcgcagcaacggtgtggatggcctcacctgaactagaaaactatgagcgcaggctgcaacagcttcttggcgtctccccggtacaaccgctggaaaccgggatgcagatgatgcgtgttgccgacagtcgctggccggaaagcctgcagcagcagcaggcctcgacacattggaatgaagcactcaaaacccgcgcacagagtagcccgcagttgcgtggctggttgcagacccgtcaggacttacatgcttttgcagatctcgtgatgcggcgcgagaaagagggactaaccctttcctatatcaaaaatgtcatctggcaggcggagcggggactggggcaggaaacacccgttgagtctctgttgacgcagtaccaggatacccgtgcgcagaagcagaatatagatgcgctggaaaaacaaattaatgagcgactcgaaggcgtgttaatccgctggctgctgctgaagaataacgtcatgccagaggcggcaaccgggaccacggccgaaaaataa

SEQ ID NO: 9811 - DNA, 3525 bp, Escherichia coli
gtgttcagattaccaacaccccgactactcagcggactcaaatcagccctacgcccggcgatgccccggtttaaagtctccgctttctggctgctgatactggcgtggatttttctgctggtatggatctggtggaaaggcccgacgtggacgctgtatgaagaacagtggctcaaaccactggcgaaccgctggctggcaacggcggcatgggggattatcgccctagtgtggcttaccgtccgggtgatgaagcgcctgcaacagcttgaaaaaatgcaaaagcagcagcgcgaggaggccattgatccgctcagtgtggagctgaacgcccagcagcgttaccttgaccgctggctgctgcgcctgcaacgccatctcgacaaccgccgtttcctgtggcagttgccgtggtatatggtcatcggcccggcgggcagtggcaaaacgacactgctgcgcgagggttttccgtccgacattatttatgccccggagggcgcacgcggcgcagaacaacgcctgtatctcacgccccatgtcggtaaacaggcggtgatctttgatatcgacggcacactctgcgctcccgctgatgcggatatcctgcatcgccgtctgtgggaacatgccctcggctggctgaaagaaaagcgcgcgcgccagtcgctgaacgggattattctgacactcgatttacccgatctgcttaccgcagacaaacgccgccgcgaacatctgttacagacgctgcgcagccgcttgcaggatatacgccagcatcttcactgccagttaccggtttacgtggtactcacccggcttgatttattgcagggttttgccgccctgttccagtcactgaacagacaggatcgcgatgcaattctaggggtcacgttcacccgccgcgcccatgaaaatgatgactggcgaacagagttgaatgctttctggcagacatgggtggatcgaatgaacctagcgttgccggatctgatggtcgctcagactcacacccgcgcgtctttatttagtttttcccgccagatgcagggaagccgtgaaccactggtgtcactgcttgagggtctgcttgacggcgaaaatatgaacgtgatgctgcgtggcgtctatctcacctcttcgcttcagcgcggacagatggatgatattttcacccagtctgccgcccgccaataccggctgggcaataacccactggcgtcctggcctctggtggacaccgcaccctatttcacccgtagcctgttcccgcaggcgttactcgcagagcctaatctggcaacggagagccgcgcctggctgatgcgttcccgtcgccgcctgacggttttctctgccactggcggcgtggcggcactgctgctcatcaccggctggcatcactattacaatggtaactatcagtccggcatcaccgtgcttaagcaggccaaagcctttatggatgtgccgcctccgcagggggaagatgactatggcaacctgcaactgccgctgctgaacccggtacgcgatgccactctggcctacggtgactggggcgaccgcagccgccttgcggagatgggattatatcaggggcgacgcatcgggccttatgtggaacggacctacctgcaactgctggagcaacgctatcttccgtcgctgtttaacgggctggtcaaagagatgaacgccgcgccaccggagagtgaggaaaaactcgccgtgctgcgcgtgatgcgaatgctggaggataagagcggacgtaacaatgaggtggtgaagcagtatatggcaaaacgctggagcgaaaagttccacggccagcgcgatatccaggcgcaactgatgtcccatcttgactacgcgctggctcacacagactggcatgcagagcgtcaggcgggcgacggtgacgctatcagccgctggacgccgtatgacaagcccgttgtgtcagcacagaaagaactaagcaaactacctgtctaccagcgagtttaccagagcctgaaaacgcgggcgctgggcgttcttcctgccgacctcaatctgcgtgaccaggtagggccaacctttgaccaggtgtttacatctgccgatgacaataaactggttgttccacagtttcttacccgttacggcctgcaaagctattttgtaaaacagcgcgatgaactggttgaactgacggcgatggattcctgggtactcaacctcacccgcagcgtgaaatacagtgacgccgaccgggcggaaatccagcgccagttgaccgagcagtatatcagcgactacaccgccacctggcgggctgggatggacaatctgaatatccgcaattttgagtccatcggacaactgaccggggcgctggagcaggttatcagcggtgaccagcctttgcagcgggcgctgaccgtgctgcgtgacaacacacaaccaggcgccttttctgaaaagctatctgctaaagaacgggatgaggccctggctgaaccagactaccagttactcacccgccttgggcatgagttcgccccggaaaacagtaccctgacagtccagaaagataaagaaagcacgatgcaggccgtgtacctgcagctcaccgagttacaccgctacctgctggcgatccagaacgcgcctgtacctgggaaatcggcactgaaagccgtgcagttacggcttgatcagaacagcagcgatcccatattcgccacccgccagatgtcaaaaacactgcctgctccgctcaaccgctgggcaggcaggctggctgaccaggcctggcatgtggtgatggtggaagccgttcactatatggaagtggactggcgcgacagcgtggtgaaaccgtttaacgagcaactggcaaataactatccgtttaatccacattctgcacaggatgcctcactggatgccttcgaacgattctttaaaccagatggcatactggataccttctaccagcagaacctaaagctgtttatcgacaatgacctgagtctggaggatggcgataacaacgtcattattcgcgaagatattattgcgcaactggaaaccgcgcagaaaatccgtgacatattcttcagcaaacagaacggtctgggaacatcctttgccgtggaaacggtatcgctttccggcaacaaacgccgcagcgtactgaaccttgacggtcagttagtcgattacagccagggccgtaactataccgcccatctggtctggcctaacaatatgcgcgaaggcaacgaaagcaaactgacgctggttggtgcccgcggcggcgcaccgcgcagtatcagcttcagcgggccgtgggctcagttccgcctgttcggggccggacagctgaccggagtacaggatggcaactttaccgtgcgctttagtgtggacggtggcgcaatgacctaccgcgtgcataccgacacggaagataacccgttcagcggtgggttattcagccagtttggcctgtcagacacactgtactga

SEQ ID NO: 9812 - DNA, 1413 bp, Escherichia coli
atggcaatggacttacgcgatccgaatgtctggataacgcacctgctggaaaacctgccggaagaaaaactggcatcggcgctgaaagatgacaacccggactgggagtatatcgacggcgaaatcgtcaaactgggatctctggcccacagtcaactggatatcccggaactccagcgccgggggctggtcattctggcttcggagagtaaggactttcgtctgctggcgcatctgctgagaaccctgcaacacgccggtgatcctcatctcgcattgcgcctgctggcgctgtatgtggagcattactggtcggtggctgcgccgcagaatatggcacataaaaaacgctttgccagccaggtcattaaacgcttcgaaacaggtattgaaggcttttcacagaacgccgccacagcgcagcgcgacgcgctgtcaggggaactggcgaaactggcgcagtgctggcagtcacataacgccccggaactggcactggctaccgatgatctttttgccctgtaccagcgtgcgtttaatcgtgcggcaccggctcctgcccccactccagcggcctccgatagttcacgacagaccaccgccacgtctgaaagcggcgtgacgcaacccagtgctccggctccccaaatcgccatcgacagtcacgacgacaaagcctggcgcgacacgctgttaaaagtggcggctattttatgtgaacgccagccggactcgccgcagggctatcgcctgcgccgccatgccctgtggcaatccatcaccagtacaccccaggcggaaagcgatggacgtaccccattggctgcggtctctgccgatatggtggcggattaccagtcccggcttgccagcgcggatatggcgctgtggcagcaggttgagaaaagcgtattgctggctccttactggctggacggtcactgtctttctgcacagacggcactgcgtctgggttacaaacaggtggcagacaccatccgcgatgaggtcatccgcttccttgagcgtctgccccagcttaccgggctgctgtttaatgaccgcacaccgtttctcagtgagcagacgaaacaatggctggcagcttcgcccgacggcaaagttgcaccggttgcgcaaatcggtgaggaatcgcaggcagccagagcctgttttgctgggcagggtctggaggcggcgctgcgatatctggacatgctacccgaaggcgatccccgcgatcagtttcaccgccagtaccttgccgcacagttgacggaggaggcggggctgatacagcttgcgcagcaacagtaccggatgttgttgatgatagggagtcagatgatggtgtctgactgggagccatcattacttacgcagcttgaacaaaaattcacggcagaacaataa

SEQ ID NO: 9813 - DNA, 762 bp, Escherichia coli
atggatgaggggtcactgtctctgccaccatttaccggacaccacgaaaaaagccagcgcgactatcatctcgcgcttcgtggcaacagcctgaatccgatgatcgacgcagccacgccgctcctcggtatggtgatgcgcctttcaaccatgaacagtcagacgatgccggagcatctttttgctcaggtggtgacagatgttcaggccgtggagcaactgcttcaggagcagggctacgaaccgggcgtgattatctcgtttcgctacatcctctgcacgtttattgatgaagcggcgctcggtaacggctggtcgaacaagaacgagtggatcaagcagtcattgctggtccatttccacaacgaagcctggggtggagagaaagttttcatcctgctggagcgcctgatccgtgaacccaaacgttaccaggatctgctggaatttctctggatctgtttttctctgggatttcgcgggcgctacaaagtggcagcacaggatcagggggaatttgagcagatctaccgccgtctgtaccacgttctgcataaactgcgcggcgatgcccctttcccgctgttacaccaggacaaaaaaacccagggcgggcgttatcagctcatcagtcgcctgactgttaaacatattttttgtggtggcgttgtcgtgctggcgttgttttacctgttctatctgttgcggctggacagccagacgcaggacatcctgcaccagctaaacaaattacttcgataa

SEQ ID NO: 9814 - DNA, 1332 bp, Escherichia coli
atggcaaccacccgcaacaaggtgatgtggcaggaagggatgctgatgcgcccacaccatttccagcaacagcagcgttacaacgactacctggataaccagcgtttccgggccatgaatgatttatcctggggatttaccgaactcaccctcaacaatgaactgctggcgcagggtaagatcatgattgacagcgcgtcaggcacactgcccgacggcaccgtcttttctatccccgaccaggacgcactgcccgatccgctgcacccgcaacattttccggacgaaagaagccgcaatatttacctcgctctgccggtcgccagtgatgtgagaaatgaaatcagcgacgggcggcgaatcgggcgttaccggctgaattatgccgatgtccgggatctgcattcagaagaaggtgacgcgcgaacactgacgctgggtcaactgacgccgcgcattatgagcggtgcagaagatatgagcgcctatattacgctcccgctttgccgtatcagcgatcgccatgccgacggctccctgacgctggatgacgattttatcccctcctgccagaatattcaggtcagtaagaaactgcgtgtttatctcaaagaggtacagggggccattggcggacgggcaagcgatctggcaaaccgcattggctctccggcgcagagcggcatcgcggatgtggcggaatttatgatgttgcagttacttaaccgtaaccagacccggtttacccatcgcgctcgtcgatcccagctccacccggaagatttctaccttgatcttgccgggttgctgggtgaactgatgacctttaccgagccgtcgcgcctgccctgcccgcttgatgtgtatgatcatcatgacctgaccaaaacatttaaaacgctgttaccggaagtcaaacgggcgctgcataccgtactgtcgccaagagccgttaatctgccgctgcatctgcgtgacggtatctggcaggccgatatccatgacacagaactgctgcaatctgccacctttgtgctggccgtggcggcaaacatgccggtcgatcagatccagcgccagtttatccagcagtcgaaaatttcctcgccggaaaaaatccgcaatatggtcagtgtgcagatacccggcattccattgcgtgccctgatggtggctccccgccagcttccttaccattccgggttcagctatttcgaactcgacaagagcggccaggcctggacagaaatggctgccgccggggccgttgcactgcatgtatccggcagtttcccggatctgaacatgcaactgtgggcgataagagggtaa

SEQ ID NO: 9815 - DNA, 525 bp, Escherichia coli
atgaacaggaaggcgtttctggcctgcgtgctgatgtgcgtcatattaaccggctgcgaaacggcgaaaaaaatcagcgaggtgatcaaaaacccggatatccaggtcgggagcctgaaggagcaaccttcggaaataaccgtcaccctgctgaccgaaccggacaccaataccaatgcggagggtgaatcagccgccgtggatgtgcaactggtgtacctgactgacgactcaaaattgctggcagccgactatgaccagatagccagtacgccgctaccggatgtgttgggtaaaaactatatcgaccaccaggatttcaacctgttgccggacaccatcaaaaccctgccgccggtaaagctggatgagaaaacgcagtttattggtgtcgtggcctatttctccgatgaccaggccactgaatggaaacaaatcgagacggtggaaggaaccggccaccattaccgcctgctggtgcatgtacgtcaaagcagcatcgaaatgaaaaaagaggatgaataa

SEQ ID NO: 9816 - DNA, 1281 bp, Escherichia coli
atgccggaagagaaactacagacgctttcattgcaggtcattaacggcagtgagctggaaagcgggcgggcggcgcgctgtctgttcacacagcagggaaatgtcggccatggccccgaatgccactggtcggtacaggatcgtcagcagagcattccggctcaggcttttaccgttatcctgcacgatggcacattttgtctgcgcccgcagacggcacaactgtggctgaaccaggcaaaagtcacagcaacatcagacctgatacagctgcgccagggcgatgagatccagatagggcgtctgatggtgagggttcatctgaaccggggagatatcccccattacgatgaggaaatggccactcccgaaaccatcgtcaccaatcgcgatatgctcacggataccctgctgtcaacggagggtgcgccacactatccgggaatgactcaccggcatcagcttgcagacaccgtggtaaacggtttttctaccgatccactccaggcacttcagtccgaaagcctgattaccacgggcgatccgctttcaggcattgcggctgtccggccatcggcaccgctgtccgatccggcaagtaatggtgggatcaatactccgtttatggatctaccgcccatttatgccagccccggcgatcgtaatgatgacttccctgtggcagaaatggcgcaacgccaccttgcggtcacccccttactgcgcggtctcggcggctcgcttaccgtgagcaattctgacgatgcggatgattttctggaagaggccggacgcacgttacaggccgcaataaaaggtctgctcgatttgcagcaacagcgtaacagcctctcagacaaacatttgcgcccgctggaagataacccgctgcgcctgaacatggattacgccaccgcgctcgacgtgatgtttgccgaaggtaaaagtccggtacatctggcggctcccgccgctgtcagtgaaagcctgcgtaatgtccgccaccacgaagaagctaaccgggcagcgattgtggagtcacttcgtgtcctgcttgacgctttctcaccacaaaatctgctgcgccgctttgtgcagtaccgccgcagccatgaactgcgccagccgctggatgatgccggagcatggcaaatgtacagccattattacgaagaactggcctccgatcgccagcaggggtttgagatgctgtttaacgaggtctacgcccagatctatgaccgggtgcttcgtgaaaaacagcgggagccggaagcatga

SEQ ID NO: 9817 - DNA, 1083 bp, Escherichia coli
atggacggaaagaaccgggcagcatcctcttatctgagtccgggaaatcccccggcagataaagagcagaatgatccgctggcacaggtttttcataacgcctgctcttacaatttttttgcgatggcggagctgttgcaccgcctggcacagggtgaaaaggggacgccggaattatccctgcgcgacgatccggcacaggaaaccctgcgtttcagcgccgatgccagccttgcgtttcccctgagtgatatcagtgcgctgaaacgggatacgtcaggggcattcaggatgaccactacctttatggggttacaggggagccagtcgcctctccccggttattacctcgatcacctggcctggaaagcggtacatgaacaaagtccggtaggtgattttctggatatgttcagccaccgcctgacccagtttgtctggcatatctggcgtaagtaccgctatcacatcagttttcgtaacggcggtgtggatgcgttctcgcagcgcatgtactcccttgttgggctgggccaccgccagcttcgcgataagctggcgattaatcacagcaaaatgctggcgtattccgggatcctggcaaatccgggacgatccccggaaataatctgcggtctggtgtcccactgttttgatttgtcagacgtgacgctgcaaaactggcaacgtcgcaaggtggatattgaaccggatcagcaaaatagcctggggagttattcacttaaaaatggcgaaaaactggcaggaagatcggtactgggcaactttgttctgggtacacgggtgcccgatctcagcggaaaattccagctcagtattaccagcctgacccgaaaacagttcctctcttttctgccgtccggcgaaaacttcctgccactgacgatgtttgtgtccttcatcctgcgcgatcagcttgcctgggacttacatctggggctggcgccggagcaggtgggcgcaatgcgcctgggcgataacaaaagtgcgctgctgggctggaccagcttcctcggcacaccggaagaacgaccttcagtcaccatcagggtacggtcgtaa

SEQ ID NO: 9818 - DNA, 1851 bp, Escherichia coli
atggaatttgaagaacgctatttccgggaagaactcgattacctgcgccagcttagcaagctgctggcaacggaaaaaccccatctggcccgcttcctggccgaaaaagatgcagatccggatattgaacgcctgctggaaggggtggcttttcttaccggcaatctccgccagaaaattgaggatgaattcccagaactgacgcacgggcttattaagatgctatggcctaattacctgcgtccggttccggcaatgacccttattgaatatacgccggatatggataagtcttctgtgccggtgttaatcccccgtaatgagcagtttacaaccaacgccggggaaattagagtcgatgaagtgctgccctccgatgctaaaaaggaggagccgcctccctgtaccttcaccctctgccgggatatctggctgctgcccgttcgcctggagcagattgaaaaccgcagtacgacccgtaatggtgttatcaacatcaccttttcggtcgcaccgggaacggacttccgcacgctggatctgaacaaacttcgcttctggctcggcaatgacgacaactatacccgtgaccagctttatttatggttctgtgaatacttgcagggtgccgacctgactgtgggtgaacagcatattcgcctgcctgagtttatgctgaaagctgtcggttttgagccacaggatgccatgctgccctggccgaaaaacgtccacagcggctaccggatccttcaggagtatttctgttacccggatgcgtttctcttttttgatctttgtggttgtccggcgttgcctgacggattgcaggctgaatcctttaccctgcaactgcgtttttcgcgcccattgcccgtggacatccggttgcgccgcgactccctgcgcctgtattgcgcacctgccattaatttatttatccaccatgcagaagccatcacgctggacaaccggcgggcagactatccgctggttcccagccgccattatccggaacattacgatgtcttttccgttaacggcgtgataagccaggtgcaggatatgttcaggaaaaaagatctggggcgtcctgtttcgacgcaggccgcgcgccagtggcctgcctttgaaagtttcagccatcagatggaatacagccggaagcgggaagtggtgtactggcatcaccggaccaaaacatccctgttccatcgcggctttgatcatacccttgcttttatacatgctgatggcagttatccgtcagacgaatcgctgctcagtaatgaagtggtttcggtatcgctgacctgtaccaaccgtgagcttccgtcacaaattcgttccggcgatatcaccggcacaaccggtaaaaatgcggctgttgcttcatttcgcaacattacccgcccgacgcaaccgctctggccggtcattgatggcagcctgcactggtccctgctctccgccatgaacctgaattatctgtcattactggatacggacgcgctgaagcaggtcatcgccaactttgatcgccacgcaatccatcatccgcagacggcgcggctgtcacaacaaaagctggatgccattgagcgtctggagactcgccctgtcgaccgcctgtttacgggcattcccgtccgggggctggcctccacgctgtatctgcacccggagccgtttgtctgtgaaggggaaatgtatctgctcggtacggtgctttcgcattttctgtcgctgtacgccagcgttaactcattccacatgctgaccgttgtgaacacagaaagccaggagacatggaaatggacggaaagaaccgggcagcatcctcttatctga

SEQ ID NO: 9819 - DNA, 414 bp, Escherichia coli
atgataccggatcgggaaagaaccacaggttctctttttgagcgtatggaagcctcttcagccagaaaccggcagggaggcagtattcattcgctcaggcaatccattcgccagaacctacgaaacattcttaatacccggtccggtagttgccggggtgcgcctgagctgggcattgatgaaccggaaggggctgaaaacttccgcgaatcaatgagtcgggccatcgcgcaatgtatagaacgctatgaaccccggatctcacgcgctgaagtgcaggcagtggtttcatccgcctccagcccgctggatatgacgtttcatattacagcctgggtgacatttaacgaaacgcatgaggtgcttgaatttgatatggcaccgaatggcagccagcattaccgggtggactga

SEQ ID NO: 9820 - DNA, 1476 bp, Escherichia coli
atgtctttacaggaagaggaactcgtttccagtcatgccgggcagactgatcaggcatcgtcgctgcttgatcaaatcatggctcagacccgtattcagcccggttcagaaggttatgacgttgcccgccagggtgtgacagcctttattgccagcatcctgcaatccactgcatctgccgaaccggtcaataaactggccgtggacagcatgattgcagatattgatgaacgcatcagccgccagatggatgtcatcatccatgcgcctgcctttcagcaggtcgagtcgttctggcgctcactgaaaaccatggtggatcgcgttgatttccgtgaaaacatcaaggtcaacgtgcttcatgtcaccaagcaggaacttctggaagactttgagtttgcgccagaaattattcagtccggattttataagcacgtttattcgtccggtttcggacagtttggcggtgaacccatcgctgccgtgctgggcgcttatgagttcaaaaataccgcgcctgacatgaaactgctgcaatacgtcagtgccgtgggcgcaatggcgcacgcaccgttcctgtcctccgtttccccggagtttatggggctgaactcgtggaccgaactgcctaatatcaaagatctttatgccatctttgaaggtccggcctacaccaaatggcgcgccctgcgtgactcggaagattcgcgctatttagggcttacggcaccccgcttcctgcttcgccagccctattcaccaacagataaccctgttaagaactttaactattacgaagatgtcagccagaaccacgaagattatctgtggggtaatacggcctggatgctggcatgcaatatcgcagacagttttgccaaataccgctggtgtccaaacattatcggtccgcaaagcggcggcgcagtgaaagatctgccggtgcatctgttcgaaacgatggggcagattcaggccaaaatcccaaccgaggtgctggtcaccgatcgccgcgaatttgaactggctgaagagggttttatcacccttaccatgcgtaaagactctgataatgcagcctttttctctgcaaactcggtacaaaaaccgaagcactttccgggaaaagacgcagaaaccaactataagctgggtacgcagcttccttatctcttcatcatcaatcggttagcgcactacatcaaggtgttgcagcgtgaacaactggggtcatggaaagaaaggagcgacttagaaagagagcttaatacctggatccgtcagtatgttgccgaccaggaaaacccgcctgcagacgtgcgcagccgcaaacctctgcgcgctgccaaagttgaggttatggatgtagaaggcgaacccggctggtaccaggttgcgctaagcgtgaggcctcattttaaatttatgggggcaaattttgagctttccctggttggccggttagacagggagtaa

SEQ ID NO: 9821 - DNA, 225 bp, Escherichia coli
atggcggcacacaaaaatatctccgggaaacaccccctctctgacgaagacattttgcaggcggtttaccgggtatgtttcagcccgtccggtgaaatcaaccgggatggcgtggatgcgctgattacaacactggatcgccgtatcagtgatctattggatgagattatccatctttgtgagtttcagcagagcgcgccgtactggcggcgcgtacttcactga

SEQ ID NO: 9822 - DNA, 501 bp, Escherichia coli
atgagcaaaaaatttgaaggcagcgtcgcgcctcgcgagcgtataaatatatcctatgtcccgaagacggacggccagacggctgaagtggagcttccgcttaacatgctcgttgtcggcgataccggaaatacgcaggagacatccccactggatgaacgtcaggcagtttccgttaacaagcacaatttcggtgcggtgatggctgaagcagccattggcctcaattttaccgtccccgccacgctgaagggaagcacaacggacgatgaactgaatgtggcgctgaatatcaagccactggatgatttttcaccggacagcgtggcccggcaggttccggaagttaataaattgctggaattgcgtgaagcactgactgcgctgaaggggccgatgggcaaccttccggcattccgtacccagctccaggcattgctggaaaatgaggagtcccgcgagcagttgctcaaagaaatcggccaagtgagtgggaaataa

SEQ ID NO: 9823 - DNA, 519 bp, Escherichia coli
atgccaacaccgtgttatatctccatcactggtcagacccagggaaatattactgcaggtgcatttaccgctgattctgtcggcaacatctatgtgcaggggcacgaagacgagatgctggtgcaggaattcctgcataacgttactgtcccgaccgatcctcagtccggccagcctgcgggtcagcgtgctcacaagccgttcatttttaccgtggcgctgaacaaagctgttccgctgatgtacaacgcactggcctccggcgaaatgctgccaaccactgaacttcactggtggcgtacctctgtggaaggcaaacaggagcattatttcaccacccgcctgaccgattcgacgattgtcgatatgaaactgcatatgccgcattgccaggatccggcgaaacgcgagttcacccagttgctcgaagtttcactggcctaccgcaaaatagagtgggaacacgtcaagtctggcacctccggtgccgacgactggcgcgcaccgctggaagcataa

SEQ ID NO: 9824 - DNA, 489 bp, Escherichia coli
atggccgaacggttcgtgaaaacgatgagggaagactatatcgcgttcatgccaaaaccggatgtgagaacagccctgcgaaaccttgcagcagcgttcacgcattacaatgaaaaccacccgcacagcgcgctggcgtttaatcaacggattatgcagggagaagcctctctgtcgacgctgagtcaaccggaattttatgatccagaaattgtcttctttgcagacaaactggacgcttatacagatcagccagagtttcgcatgatcgctcccgatggcaccacgtttgttactcgtttctccagtgctgaactaaattatgtgacacgctggatcctttataacggcgagcaacaggtagccgcctttgcattacctgcaacctgtagacctgaggggtatcttgccgcgcaacgtaatggcacgctgattcaggttgcaccgcagcaaacgcgcacttttacagttaccacaggaattgcataa

SEQ ID NO: 9825 - DNA, 306 bp, Escherichia coli
atgagagagcataacctgttgttactgcataacaaaccagagcgaccgaagcgtgaacacaagggcaaaatcgcggtggcagaaagcgatatgcgctggtgttcagatggcttcgagctcggctgcgacaacggtgaaaaacttcgtgtgacgttcgcgctggactgttgcgacagagaggccatagactgggcagcgagtacgggaggctacgacagttcgaccgtgcaggatgtgatgctgaggtcggtggaaaagcgcttcggcgacaggttgccggacacaccgtgcagtggcgacggataa

SEQ ID NO: 9826 - DNA, 261 bp, Escherichia coli
atgtctaacactaactccaattttgagatgaccgggatcctgttagggcaagaagtctgtaaacgtaaaactcctcaggataatatcgccattatccagcagacgatggatccgggcatgaatgtttcacatgtcgccgcctgcatggtatccagcccagcctgctgtttaagtggaagaagcaatatcaggaaggtagcctcaccgccgttgcggtcggagaggaagtcgttcctgcttctgagcttactgctgctctga

SEQ ID NO: 9827 - DNA, 1332 bp, Escherichia coli
atggaaaatgctaaaatgaactcgctcatcgcccagtatccgttggtcaaggatctggttgctcttcaagaaaccacctggtttaatcctggcacgacctcattggctgaaggtttaccttatgttggcctgaccgaacaggatgttcaggacgcccatgcgcgcttatctcgttttgcaccctatctggcaaaagcatttcctgaaactgctgccactggggggattattgaatcagaactggttgccattccggctatgcaaaaacggctggaaaaggaatatcaccagccgatcgccggacaattgctactaaaaaaagacagccatttgccgatttccggctccataaaagcacgtggcgggatttatgaagtcctggcccatgctgaaaaactggctctggaagcgggtttgctgacacttgaggatgattacagcaaactgctttccccggagtttaaacagttctttagccaatacagtattgctgtgggatcaaccggaaatctggggttatcaattggtattatgagcgcccgcatcggctttaaagtaacggtgcatatgtctgctgatgcccgggcgtggaaaaaagcgaaactgcgcagtcatggcgttactgtcgtggaatatgagcaagattatggtgttgctgtcgaggaaggacgtaaagccgcgcagtctgacccgaactgtttctttattgatgacgagaattcccgcacgttgttccttgggtattccgtcgctggccagcgtcttaaagcgcaatttgcccagcaaggccgtatcgtcgatgctgataaccctctgtttgtctatctgccgtgtggtgttggtggtggtcctggtggcgtcgcattcggacttaaactggcgtttggcgatcatgttcactgcttttttgccgaaccaacgcactccccttgtatgttgttaggcgtccatacaggattacacgatcagatttctgttcaggatattggtatcgacaaccttaccgcagcggatggccttgcagttggtcgcgcatctggctttgtcgggcgggcgatggagcgtctgctggatggcttctatacccttagcgatcaaaccatgtatgacatgcttggctggctggcgcaggaagaaggtattcgtcttgaaccttcggcactggcgggtatggccgggcctcagcgcgtgtgcgcatcagtaagttaccaacagatgcacggtttcagcgcagaacaactgcgtaatgccactcatctggtgtgggcgacgggaggtggaatggtgccggaagaagaaatggaacaatatctggctaagggcactgactaa

SEQ ID NO: 9828 - DNA, 1338 bp, Escherichia coli
atgcactctcaaatctgggttgtgagcacgctgcttatcagcatcgtgttaattgtactgaccatcgtgaagttcaaattccacccgtttctggcgctgttgctggccagcttcttcgtaggaacgatgatgggcatggggccactggatatggtaaatgctattgaaagtggaattggcggaacgctgggattcctcgctgcggttatcggccttggcacgatactgggaaaaatgatggaagtatccggggccgcagaaagaattggtctgacacttcaacgctgccggtggctttcagctgatgtcattatggtgctggttggcctgatttgcggcatcacgctgtttgttgaagtgggcgttgtgctattgattcctctggctttttcaattgccaaaaaaaccaatacctcattgttaaagctggccattccgctgtgtaccgcattgatggcagtgcactgcgtggttcccccacatccggctgctttatatgttgccaataagcttagcgcagatatcggttcggtgatcgtctacggtttgctggttgggctgatggcatcactgatcggtggcccacttttccttaaatttctggggcaacgactgccctttaaacctgtacccacagagtttgccgatctcaaagttcgcgatgaaaaaacactaccgtcattaggcgcaacgttattcaccatactgctacccattgcgctgatgttggttaaaacgattgccgaattgaatatggcacgtgagagtggtttgtataccttgcttgagtttattggcaaccctatcactgccatgtttatcgccgtgtttgtcgcctattatgtgttgggtatacgtcagcatatgagcatggggacaatgctcacacatacggaaaatggttttggttctattgctaatattttgctgattatcggggccggaggcgcattcaacgccattttaaaaagcagcagtctcgctgatacgttggcagttattctctccaatatgcatatgcacccgattcttctggcctggttggtggcacttattctgcatgctgcagtgggctccgctacggtggcaatgatgggggcaacggcaattgttgcacccatgctgccgctgtatcccgacatcagcccggaaattattgcgattgctatcggttcaggtgcgattggctgcacgatcgttacggactcgcttttctggctggtgaagcaatattgcggcgctacgctcaatgaaacatttaaatactatacgacagcaacatttatcgcttcagtcgtcgctctggcgggcacattcctgctgtcatttatcatctaa

SEQ ID NO: 9829 - DNA, 945 bp, Escherichia coli
atggaaccccttcgtgaaataagaaatcgactgcttaacggctggcaactatcaaaactgcatacttttgaagtggctgccaggcatcagtccttcgcccttgcggcagaggaattgtcgctgagccccagtgcggtaagtcaccgtatcaatcagctggaagaagaattaggtattcagttgtttgtccgttcccatcgcaaagtggaattaacgcacgaggggaaacgcgtttattgggcgctaaaatcgtcgctggataccctgaaccaggaaattcttgatataaaaaatcaggagttatcgggaacgttaactctgtattcccggccctctgtcgcccaatgctggttggtacccgcattaggtgactttacacgccgctatccgtctatttcgctcaccgtgctcactggtaatgacaatgtcaatctgcaacgtgccggaatcgatttggcaatctattttgatgacgcaccctcagcgcaactgactcatcactttctgatggatgaagaaatcctgcctgtatgtagcccggagtacgctcaaagacatgatttaaccaacacggtaattaaccttagccactgtacgttgctccatgacagacaggcctggagcaacgactccggtacggatgaatggcatagttgggcgcaacattatgcggttaatttgccgacatcttctggaattggctttgatcgttctgatttagctgttatcgccgcgatgaatcatattggggtggcgatgggaaggaaacgcctggtacaaaaaaggcttgccagtggtgagctcgtcgcgccgtttggcgatatgacggtgaaatgccatcagcattattacatcaccacattaccgggcaggcagtggccaaaaattgaggcatttattacctggctaagagagcaggtatgtcagtcttgtcagtatcagtga

SEQ ID NO: 9830 - DNA, 372 bp, Escherichia coli
gtgctggatgcgctggagcaggcgttgtgggcccgtcgtccgtccggcaccatccatcacagcgataaaggctctcagtatgtgtcactggcctatacggagcgattaaaagaagcaaaactgctggcatcaacaggaagtacaggcgactcgtatgacaacgcgatggcggagagcatcaatggtctttacaaagcggaggtaatacaccgtaagagctggaaaaaccgtgcagaagtggaactgtccacactcacgtgggtggactggtataacaatcgacgattgctgggaaggctgggccacatccctccggcagaagcagaaaaagcgtattatgcttccatcggaaatgatgagctggcagcctga

SEQ ID NO: 9831 - DNA, 2400 bp, Escherichia coli
atgaagctaaccgatgcggataatgccgccgatggcatttttttccccgcccttgagcaaaatatgatgggcgcggtgttaattaacgaaaatgatgaagtaatgtttttcaaccccgccgcagagaagctctggggatacaaacgtgaagaagtcattggcaataacattgatatgctgattccgcgggatttgcgtcccgcgcatcctgaatacatccgtcacaaccgtgaaggcggtaaagcgcgcgtcgaggggatgagtcgggagctgcagctggagaaaaaagacggcagtaaaatctggacccgttttgcgctatcgaaagtgagcgccgagggtaaaatttattacctggcgctggtacgggatgccagcgtagaaatggcgcaaaaagaacagacccgacaattgattattgccgttgaccatctcgaccgaccggtgattgtcctcgatccggaacgccatattgtgcagtgcaatcgcgcatttaccgaaatgtttggttactgcattagcgaagccagcggtatgcagcccgattcactccttaacattccagaattccctgctgataaccgcattcgtttacaacagttgctatggaaaaccgcccgcgatcaggacgaatttctgctgttgacgcgcaccggtgaaaaaatctggattaaagcctctatcagcccggtctatgatgtgctcgcgcatctgcagaacctggtaatgactttctcggatatcaccgaagaacggcaaatccgccagcttgaaggcaatattctcgccgccatgtgcagcagcccgccatttcatgaaatgggggaaatcatttgtcgtaacatcgaatctgtactcaacgaatcgcatgtttcgctgttcgcgctgcgcaacgggatgccgatacactgggcgtcatcttcgcacggtgcagaagttcaaaatgcgcaaagctggtcagcgaccattcgtcagcgtgatggtgcgccggcggggatcctgcaaattaaaacctcgtcaggagcagaaaccagcgcctttatcgaacgcgtggcagatatcagccagcatatggccgcgctggcgctggaacaggaaaaaagccgtcagcatattgaacaactcatccaatttgatccgatgaccggtctgccaaatcgcaataacctgcacaattacctcgatgacctggtcgacaaagccgtctctccggtggtctatctcattggtgttgaccatattcaggatgtgattgatagccttggctatgcgtgggccgatcaggcattgctggaagtggtcaatcgctttcgtgaaaaactcaaaccggatcaatatctctgtcgtatcgaaggtacgcagtttgtcctcgtgagcctggaaaacgacgtcagtaacattacccaaatcgccgatgagctacggaatgtggtcagcaagccgataatgattgacgataagccattcccgctcaccttgagcattggcatcagctacgacgtgggtaaaaaccgcgattacctgctctccactgctcacaatgcaatggattttattcgcaaaaatggcggtaacggctggcagttcttcagcccggcgatgaacgaaatggtaaaagagcgtttggttttaggcgcggcgctgaaagaagcaattagcaataaccaactgaaactggtttaccagccgcaaatcttcgcagaaacgggtgaactgtacggcatcgaagcccttgctcgctggcacgatcccctgcatggtcatgtgcccccttcacggtttattcctctcgcagaagagatcggtgaaatcgaaaatattgggcgctgggtcatcgcggaagcttgccgtcagttagcagaatggcgtagccagaatattcatatcccggcgctttccgttaacttgtcggcgctgcactttcgcagtaatcagctgcctaatcaggtgtctgatgcaatgcaagcctggggtatcaacggccaccagctgacggtggaaatcacggaaagcatgatgatggaacacgataccgaaatctttaagcgcattcagatcctgcgcgatatgggcgtgggtttatcggtagatgattttggcacgggcttttccggattatcccgcttagtcagtcttccggtaacggaaatcaaaattgacaaaagttttgtcgatcgttgtctgaccgaaaaacgcatccttgccttacttgaagccattaccagcattgggcaaagccttaatttaaccgtcgtggcggaaggcgtcgaaaccaaagagcaatttgagatgctacgcaagatccactgtcgcgttattcagggatatttcttttcccgccccctacccgccgaagaaattccaggctggatgagcagcgtgttaccgctgaaaatctga

SEQ ID NO: 9832 - DNA, 1320 bp, Escherichia coli
atggatatctgctcccgaaacgagaaattagcgattagaagaccagcgatactggttgcactggcacttttactgtgtagttgtaaaagcacgcctccagagtccatggtgacaccaccagcgggttcaaagccaccagccacgacgcaacaatcgtcacaaccgatgcgtggcatctggctggctacggtgtctcgcctcgactggccaccggtttcctcggttaacattagtaaccccaccagccgggcccgtgtacaacaacaggcgatgatcgacaaactggatcatctgcaacgtctcggcataaacacggtctttttccaggtcaagccggacggtaccgccctgtggccatcaaaaattttgccgtggtccgatcttatgaccggaaagattggtgaaaatccaggttacgatccgctgcaatttatgctcgacgaagcccacaagcgtgggatgaaagtacacgcctggtttaacccctatcgcgtatcggttaatacgaagcccggtactatcagggaactgaatagcactctgtctcaacaaccagcgagcgtctatgtgcaacaccgcgactggatcagaacgtccggcgatcgctttgtcctcgacccgggcatccctgaagttcaggactggatcacatcaatagtcgcggaagtggtttcccgctatccggtagatggcgtgcagtttgacgactatttctatactgagtcaccagcttcacggctaaatgataacgaaacgtaccgcaaatacggaggcgcatttgcgtcaaaagcagactggcggcgcaacaatactcagcagttaattgcgaaggtatcgcacaccattaaaagcattaagccggaagtcgaatttggcgttagcccggcaggcgtgtggcgtaaccgatcacacgatccgctcggttccgatacccgaggcgcggcagcctatgacgaatcctacgctgacacccgtcgatgggtggaacaaggattgctggattacattgctccccaaatttactggccgttctcacggagtgccgcacgttatgacgttttggcaaaatggtgggcagatgtcgttaaaccgaccaggacccgcctgtatatcggtatcgccttctataaagtgggtgaaccttcaaagatagagccagactggatgattaacggcggcgtaccggaactgaaaaaacagctcgatcttaacgatgccgtgccagaaattagcggcacaatcttgttccgtgaggactatctgaataaaccgcagactcaacaagcggttagctatctgcaaagtcgttggggcagttaa

SEQ ID NO: 9833 - DNA, 1425 bp, Escherichia coli
atgtgtgggttcctggtttggctctatagtctttcaatgttgccaccaatggttgtagcattgttttataaagaaaaaagcctgttcgttttctttataactttcgttatatttttttgcattggtggcggagcgtggtatacaactaagaaatctggcattcaattacgtacccgtgatgggtttattataattgtaatgttttggattttgttttctgttattagtgcattccctttatggattgactcagaacttaatttaacgttcattgatgctctgtttgaaggggtttctggaataacaacaacaggagcaactgtaattgatgatgttagttcattacctcgggcatatttgtactatcggtcacagttaaattttataggtggtttaggagttattgttctggcggttgctgtattgccattattgggtattggtggtgcaaagctttatcagtcagaaatgccggggccatttaaggatgacaaactcactccccgcctggccgatacgtcacggacactgtggataacttattctttattaggtattgcttgtattgtctgttatagacttgcaggaatgcctttgtttgatgctatttgtcacgggatttccacagtttcgcttggtggtttctcaactcatagcgagagtatcggatattttaataactatttggttgagctggtggctggttctttttccctgctatcggctttcaacttcactctttggtatattgttattagcaggaaaacgataaaacctttaatcagagatattgaacttcgtttctttctgttaatagccttaggggtgatcattgttacctctttccaggtctggcatataggtatgtatgacttgcatggaagttttattcattcgttttttcttgccagctccatgctcactgataatggtttagctacgcaggattatgcaagttggcccacgcacacgatagtgtttttgctgttgtcaagtttctttgggggatgtataggttcaacttgtggtggaattaagtcacttcgatttcttatacttttcaaacaaagcaaacacgagataaatcagctttctcatcccagagcgttgttgagtgtaaatgtaggagggaagatagttacagatcgtgtaatgaggtctgtatggagtttcttttttctttatactctcttcacggtgttttttatactggtgttaaatggtatgggatatgattttcttacatcatttgcaacagtggctgcatgtattaataatatgggattaggttttggggctactgcatcgtcattcggagtgcttaatgacattgcaaaatgtttaatgtgcatagctatgattcttggtcgccttgaaatttatcctgttattatattgttttcaggttttttttggcgctcctaa

SEQ ID NO: 9834 - DNA, 792 bp, Escherichia coli
atgagcgagaaattaaagatagtctatcgcccattacaagaattgtcaccgtatgcgcacaacgccaggacgcacagccctgagcaggtggcacaactggtagaaagtattaagcaattcggctggactaatccggtgctgattgacgaaaagggcgaaattattgcgggtcacggtcgtgttatggcggctgaaatgctcaaaatggattctgttccggtcattgttctgtctggcctgacggatgagcagaaaaaggcgtaccgcctggcagataatcgcctgccgatgaatgctggctgggatgaagatctgttgcggatggagctgtcggacctaatcaatgctgattttgatgtctccctgacaggcttcatcccgacagaaattgatgaactgttgacggatgttttgcccggtacaggaaatgaggaggagccgtatacgacgaaaattgatacgcctgtttatgagccgtcgggcggtaaaccggatatcagtgaactgtacgacgatacgaaaactcaggagctgatcagccggatacgttcggcgtcccttgagcctgatattgagaaattcctcctgtgtgcggcagaacgtcacacggtgtttaatttcagcagaattgcggactattacgctcacgccccctctgaaattcagtgttttttcgaggagtcggcgctggtgatcattgattatcagcaggctattgaaaatggatttgtccggatgacgcagcgcatggtggagatcatgcatggtggtgaggaggaggaatatgcgtga

SEQ ID NO: 9835 - DNA, 933 bp, Escherichia coli
atgcgtgatgatttttgcgcctttattctgactcacgggcgaccggacaaagttctgacttaccggacgttgcgtcgtgctggctataccgggaaaatttttatcgttgttgatgatgaagataagacacggaatcagtacatggctgaatttggtgaacaggtgctggtgttttccaaagccgatatcgccagtcgttttgacgaagccgataatttctgtgaccgccgctcaattttttacgcccgtaatgcctgtttcgacctggcaaaactggtcgggtgtaaatacttcattcagctcgatgatgattatcacgagttccagtttcgggtggatcgcaactatgaccaggcctattttccgataaggaaactggatgcgatcctttctgaaatgctggcgtactacgaatcaatacctgctctttccatcgctatgtcgcagggcggggattttcttggtgacaatggcggccatgcttcgtgggtgaaacgcaaggcaatgaacagctttatctgttcggttgatcgaccgttctcattcatggggcgcattaacgaggatgtgaatacgtacacgaatctcggtcgctgtggtgaattgtttatgacgatcggtgctgtccagttagggcagaaacagacgcagaaaaacagcggcggaatgaccgagctgtatctggattccggaacctacgttaaaagtttttactccgtcatgtatgcgccgtcgtgcgtaaaaatctcactgatgggtgccagccataaacgcattcaccatcaggtcacctggaacaacgctgcagtaaaaatccttcacgaaaaatacaggaagaagacaccctgcatatcaatgggggtgacaaatgattccgtattcgaaagtcgagtctctggcagcgtgccggatgactgcacaacaaatcgctga

SEQ ID NO: 9836 - DNA, 210 bp, Escherichia coli
atgactgcacaacaaatcgctgacgttctggatgttgatctgaaccgactgaaagaaaatcgggaagcaatgacagatttttatgcggccatccgtaagggcagagcgaaaggtgaagccgagttacgagcggcattgtttaagcttgccagaaaaggggatgcctttgctctgcgcgaactactcagggtggataaaaatcaggactaa

SEQ ID NO: 9837 - DNA, 1095 bp, Escherichia coli
atgagcagaccggactggggggcgttgcagcaggagtatattgctgaatacacccgctccggtatatctccggtggcatggtgtgaagcaaggggactgaattacgcaacagcccgtcgttacatcaaaaaaactccgaaaaatgcgcagacagaaatgtgcaaaactgcgcaaaaaagtgcgcagaaaaaatctgcgcagactgcacaaaagcggaacgaaaaatctcaggaaaaaaagccagtattcgatgcgggcctgaatgagggcgacgcggaggaattttcgttctgtcccgatgaattcggcatttctgaccagcaggctaagtttgcgatgcttgttgctcagggtaaaaagccgacagaggcgtaccgactagccggttatgaggggcaaggtgcgacagctaacagcaacgccagtcgtatgcttagaaatgccagggtttttcgcgctatcagctacttccgcaatcagtaccagaaacgctataccgcagacctggatttactagtgagtcagttgatggctattgtcctggccgaccccaatcagcttgcacaatttcgccgtgttaactgccgttattgctggggcgagaatcatctctaccagtggcgcgatatagcagaattcgacaaggcagcggcgcaggcttccagagatggcaaacccgaaccggaatatggaggcctcggctttgttgataacgccatacccaatccggactgcccgaagtgctgcggtgagggaacgggacagctttatatggctgataccactctgcttgatggggatgcgcggcaattatatgcaggggcaaaattcggaaaattcggcgttgagatcctgctggaggataaggctgccgcccggcgtgaattgttgcgtttgctttctgctggcggggatttatgtgcagataagcggctacaggaactggaaattgaacggcgcagaatggaaaaccagaagctgcgcaaagagatcgaaacggtggaagataatgaacatccccagcctgtggcgatcaatattaatgtggttgatgccagagtaaggagtgatgaagatgatctctccgacgcttaa

SEQ ID NO: 9838 - DNA, 1302 bp, Escherichia coli
atgatctctccgacgcttaatgtgcctcaggcgcgatttctttcaatgccccataaatttaaagcctatattgctggttttggctcgggcaaaacatgggttgggtgtggcggcatatgcaaggggatttgggagcatccaggtataaatcagggatattttgcgccaacgtatccccaaattcgcgatattttttaccctacagtggaagaagttgctgctgactggggattgaacgtaaaaattaatgagggaaataaagaggttcacttttattacggacgccagtatcggggaaccactatctgcagatcgatggagaagccacaaacgatcgtcggtttcaaaattggtaatgcgttggtggatgaactggacattttgccgaaggaaaaagccagaacggcgtggcgcaagataattgcgcgtatgcgttataagattgatggacttcgcaacggtattgacgttacaaccacgccggaaggattcaaatttgtctacgagcagtttgttaaagccgtgcgtgaaaaaacagagctggcctcactgtatggtctggtgcaggcatctactttcgataatgaaaagaacctgccagcagattacattccttcgcttcttgaatcataccctccagagctgattaaagcctatctgcgaggacagtttactaacctgacaagtggtactgtttaccatcagtttgaccggaaactgaataattgcgaagaagtggagcagccaggggagccgatttatattgggatggattttaacgttggaaagatggcgggaatcgtccatgtgctgcgtttggggcttccatgtgcggtaactgaaatcatcaatgcctacgatacgccggatatgatccgcatcattaaagaacgcttctggctgtatgatgggaatgattaccggaaagtgagggaaatttatatttatccagatgcttccggggattccagaaaatcaagtaacgcaagtacgacggatatagcccagcttaagcaggctggttttaacgttgtggtgaacagctcgaacccgccagtaaaagatcgcgttaactcaatgaatgcaatgttctgcaatgccaatggtgagcgtcgctataaagttaatgtgaagcgttgcccgttatatgccgaatctctggagcaacaggtctgggatgagaagggggagcctgataaaaaatctggcaatgatcacccgaatgatgccggaggttatttcatcgttaagcaattccctattgtcaaaccgaccggaagagtcacatcacttcggatttaa

SEQ ID NO: 9839 - DNA, 1407 bp, Escherichia coli
atggctgatatatcaacacccaacctcgactataacgatatgctggaggcgtgggatattaacgacgcactgatgggcggtacgcttgaaatgcgcaggcagggggaaaattatctcccaaaatggcctaacgaagatgaagacgcttataaaaaacgcctgtctgtggctacgctacttcctgtgtatgaagaaagcatcaagcaaaatattgggcgcatatttgcagagccgacagtattgagtgaggaaacgccggcaaaaatcagggaatatgcagaaaatatcgacatggagggaagccgactggatgtgtgggcgcagcaatttttcagcctcgcatttcagtatggtgtggcacatgcgctggtggactatccacgaacggatatgaaagagattcggacaaaagccgatgaaaacgcggccggtagtcgtccgtacgttacgatgctgaatccacgccaggttattggatggaaatcgaaagttgaaaaagggaaagttgttctcactgatttgcgtataaaagaggtcatcattattgatggtgatgatttcgggcagaagaaggtggagcagatccgccatattatgccccgtcgagttgaaatttatcgacgtagcgaaggcactaatggcgaatctgtctggacgcttcatgagtcatggaataccagccgtgatgatattcctctggtaacactgtacacgaagaaaacaggatttatgcgtggtacaccgccattgcttaatcttggcttgctgaatatcaagcactggcaaagccagagcgagcaggacaatattcttcatgttgcccgcgttccattgctggtggcctacgggctggacaggaatgaagaactgacggttggtgcatccaccgctacgatttttgaggacagaacaaaaaatggcctcgaatatgttgaacatagtggcgcagcgatagaatctggcgaaacatcacttgagaagctggaaaatcagatgcgtcatgccggcgctaaacttctgcgtgctgaaaatacatccaccaaatctgttgatcagactaatgaagagcgaatgcaggaaaactcgccgctttatacaatggcgaactccctcgaagatgccctcgataatattctccagataatggcggaatggatcggagagagttgcggtggcaatgtggatgtgcgcactgaactggatgtatctgcccaggtgtttgactcatcctccgcgctggctgttcagtcattgcgtcagggcggtgatatacgtcagattgatgcgattcgggtgttgcaggcgttgaaatttatcgatcaggattcccgtccagaggaagtgatcgatgaattaaaaaatcagagtgtaatgctgatggaaatcaatgatgcaaaccgtgaatga

SEQ ID NO: 9840 - DNA, 1116 bp, Escherichia coli
atgatgcaaaccgtgaatgaacggctgcgtgatgaatcaattgctcatgcagtctggatatcccgctatagcactggcgtggctgccagaatggtgaaaatactgaatgacagcgatgcggaacttactgctcgcctgctgatagcactggacagcctcgatccaggtagttttaccgttaagcgcctggagtcacttctggcgagcgtcagagaggttaaccgcactgctattaacagcatgtttaccagtctctccggagagctgaacgagctggcaatttatgaggctggttatcagttaagtctgtttgattctatgctacctgattttgttgctgatgttcaccctctggttggtatctctcctgatgcactttatgccgctgcaatggcgcgaccatttcagggacgactgctcagtgagtgggcctcagatcttgaggcggatcggctcagacgcataacaaatacagtgcgtcagggttttttgctgggggataccaatgagcagatcgcaagaaaaattcggggacatgtcagtaagggatttcaggatggtgcattgcagatgagccgggctaatgcggccagcattgcaaaaacagcggttggacatcttgctgctactgcccgtgagagttttgccagcgcgaataatgatttgattaagggtaagcaatggttatcaacgcttgataatcgtactacgccacaatgtcgaatcagggatcgcctcaaatatacgctgaataataaacctgtaggtcacagcgtgccttatttgcaggggccgggaaaaattcatttctgctgccgctcaacggaaacgttcattctgaaatcagcgaaggaactgggtattgatgttcgcgatatttccccggctgagcgggccagcatggatggcgtggtggccggagatacaacctacagggaatggtttttgcgtcagccttacaccagacaaaaacagattgtgggggaaacccgagcaaagctgattcgggatggtggtatgtcgccagatgaattttacaccgataaaggcgaatggctgacgctgaagcagctccgtgagcgtgatgcacaggtattcagaaaagcagggatttaa

SEQ ID NO: 9841 - DNA, 765 bp, Escherichia coli
atgaaactgaaaacggtcgagattaacggaaaacaatacgcagaaattgatactgctggcctgccagtttatgtgcacgacgatggtaaagaaattggcttcgatgcaccgctggcgacaaaaaaaattacagagcttaatagcgaggcaaaaaatcatcgcctggctaaagaagctgcagaggaaaaactggctaagtttgccgctatcgaagacccgaagaaggcgatcgaggcactggaaatgctgtcaaaaatcgaccagaaaaagctgctcgatgcgggacaggttgaccaggttaaggcagaaattacgaaaaattttcagcagcaattagatgaagaaaagcaacgctctcagatgctggagaagcagctttacgattctatgattggcggtagttttgcgggttcaaaatatattgccgataaaattgcgatcccggcagatttattacaatcacgcttcgggcaggcattcaaagtggaagaagggaggatcgttgcttatgacgcttccggcaacaaaatttattcccgcgcgaagcctggcgaactggcgcagtttgatgaggcgctggagttccttgtcgaaaattaccctcagaaagactacatcctgaaagccagtggcaacaatggcggcggctcccgtccgacacagcatgatattggtcagaaaacgatgaaacgctctgcttttgatgcactggatgttgcaggtaagcaaaacgcattgaaagacggtatcacaatcgttgattaa

SEQ ID NO: 9842 - DNA, 1140 bp, Escherichia coli
atggctggaaataccctgaccgggttgatcccgactatttataccgccctggatgttgtatcccgtgagcaggtaggttttatccctgcggtagcaaaaaacgcaaaagctgacgccgcagcaaaagatcagacggtaaccgcgccagttgcgcctgaggcgaaaaccgaagatatcgtaccggggccgtcagctccgaataccggtgatcaaaatattggcactgttgatgtaaaaattactaaatccaaaatggcaccggttaaatggaatggtgaagaacaactggctcttggtccttcagggacttacaacaccattctggctgatcagttcaagcaggcttttcgcgcccttgcaaacgaggttgaggctgatcttggtgcgttgtatttcggtgcttcccgcgccgtgggaaccgcagggacaacgccgtttggtgttaaagatgatctttctgatgctgctctggctcgtcaggttctggaggataacggcgcaccgacaaccgatctgcagatggtgcttggctccactgccattgctaatttgcgcggaaaacagtctgtattgtttaaagtgaatgaatccggcactgaacagctactgcgtgagggcgtgttggggcgtctggagggattcaatattcacagttcggcaggtgtgaaacgagcgccaaaggttgctgcaactggttatctcgtgaatggagagaaaaaagaaggcgatgttcttatttccattgatactggttcggggagtatttctgcaggtcagattgttacgttcgctggtgatccgaatcagtatgttgtggcagcagcgaccagcaatctgattactcttgcagcgcccggactgcgtcaggatctggccgatgatactgccatcacagttgttggggcctttactgcaaatatggcgtttgatcgcaacgcgtttctgctggcatcccgtactccggcaatgccggaaggtggcgataatgctgatgatgtaatgaatgttacggacccgatttcagggattacgttccagattgcactgtatcgtcagtatcgccaggtgcgctatgaagttggactggcatggggtgtttcatcagtgaagccggcacatggttgtctgattcttggttaa

SEQ ID NO: 9843 - DNA, 177 bp, Escherichia coli
atggccggattaactaaagagcaaagagcacagcgtgaagccgcacaaaaaacgcaaattgagttagtggttatggtgaccgattatcagatgtttcccggcgcaccaactatcgctaatgttcatcctgatgaagttgacaactggaaggctatgggctggaaaactcaggagtaa

SEQ ID NO: 9844 - DNA, 396 bp, Escherichia coli
atgatcacttacgtgacctgtgatgacgttgataatgcgtttgggaacgcctggacgagtgagaacgctaaaaataaagctgttttaatggctaatgcctggcttaatggcttcaacctgaaaattaacccatcccgtattccggaagaggtaaaacttgcgggagcatatgcagccagaattgcctcatttggtaagttgtttcagcagaaaaatgattctggcgttgttatcagtaaagccgtgtcggctgacggggtcagtgtatcgaaatcattttctgagttgccagcaaacagcactgcattgcttgaacccgatttacagcttgcgatagcactgctgaaaccgtacggacttagtcgctcacaagtcagggttgtgagggggggataa

SEQ ID NO: 9845 - DNA, 384 bp, Escherichia coli
atggggcttcgtgaagagattcagtcagaggttgccgctgcttttgatgaggatttagcggacgccgtgagtgatttttctggttattacgttacgcaccggcactgggatcctgtgacggaaactggcggcgaatccaccgcaatctataccgggcgaggcgtgttgacacgttataagctgggcagaattgatgggattaatattttgcatggtgaccttaaattaaccgctctggtatgcgaggttacggataaaccagctgtcgaccatattattgagatttatgatcctgtatcaaggcagttacaacgatacgaggtaattacagcaagtttagatccttccgcatcagtttactctatccagttaaggagagcgtaa

SEQ ID NO: 9846 - DNA, 381 bp, Escherichia coli
atggcaaaggcatgggatatagaaccgtcaatatttgccgggatgattgaggaagatgtagggctgaagattcgctacatcgctatgcagattcttactgctattgatattgctgctccggttgataccggacgtttcagaaataacaacctggtgtcgttacagcatcccgattttggtatatctgataacgtggatccgaacggtacgattgctgttcagcgtgggatcggggttatttcgaaagctgcaaattacggggttatttatatccagaataaccttccttatgcagaggctcttgaaaacggtcattcacaacaagcgccaactggcgtgtatgccaacgctttttatggtgttttacaggcttacaaatga

SEQ ID NO: 9847 - DNA, 393 bp, Escherichia coli
atgaagtttactgaaatcagaaatacggttatttccagaatgacggcacagacgattattgatggaaaagacgtattgtatccgaacgggccaacgttcgatccttccggtaagttaatctgggcgcggttaagtaatattcccgggcaggctggggttaatgaaattggcgcggggccggttgtttatcgcacggggataatcattattcagttatttgtccccgcaggttctggttcaaaactcattactgagacagccgataaattgcgggaactgtttgagtttcaggatgacgatcgtctcagttaccaggctgtttcctcaatagccgtcggcgaaaagaatggctggttccagcttaatcttcaaattccatatcgcgcgctctag

SEQ ID NO: 9848 - DNA, 963 bp, Escherichia coli
gtgagttcaggtgcaaaggttatctcggcatttatccgggagacagttgcaggcactacgccagcaagtggtgactggagtttattaaaacgcacaagctggggagtaaaacccacccagaataaaggcgaaaataatgagattggtggctcccggatggctcagggggcgacgcctggcactgtggatgtcggcggtgatgttggtaccaaatttcgctggggtcaacatgatgattttcttgcatcctgtttcggcgcggaatggtcaggcgattctctgacaatggggaatgagcgaataacattttctctggcgacctatgcgtccgatgtcggaattgcctctgtcgtcagaggagcgcaggttggctcatggaaaatgcagatccctaacgacggcgatattacagcgaccgtaacctttgccgggctgggctgggaaacaaaggccgatgatacgaattttatcaaaggcaaacctgtggatagtgcaggaaagttacgctattcgtttaaggaggtttcagcagtaagcctgaatggtgttgccggaggtaacggtttttgtatcgacagttttgatattcagttcgataacaaactccagacacagcgttgtatcgggactggctcgccttatgcaggagcaaatattccgactacttttacaccgtccggtacggtgacgctttcatggtctaaagccgcgtgggaaatctggagtaaaacactgactggagaaacagttccgttcagcttcacgctttcgaatggagagggggcatacactttcagtttcccgaaggttcaggtgtcaggtgaatggcctgatgggggtaatactgacattatccaggttcaattgagcattaccgcagcagatgaagcacctacgataaccagaaaaaaatgctccccgactgccgtgatcgcaaaagccagtgctgatgcgattagttga

SEQ ID NO: 9849 - DNA, 450 bp, Escherichia coli
atgtttattcttaatcagaaaattatcatcggtggagaacgctggtttacgccaatgaaggacttaaaacctgtagacgggttaaaactgttggtggcaagcagcgataacgatcagtatcgctcccgtaatgcattaatccgtcgtcacattgagaaaatggatgccagtttgcacgtcggaacgaaggagtttgatatttcaaaggtttccgaggtagattctgttgatgatttactcattgataatgctgctcgttatctgctgaaagactggaaaggggttggtgaactggttaatggtgctgaggttgcactggaatatacgccagaacgagggatcgcgctgcttaagcagaatccagagttgtactggcagatccttgcagaagcagccagcatcgcccagggtaaagagcagcagaagcaggatacgataaaaaagccatag

SEQ ID NO: 9850 - DNA, 2499 bp, Escherichia coli
atggcagagcaaacctcgcgtctcgcaataattattgatagcactggagcaaaaaataatgctgacaatctgacctcctcattagtcaaaatgacgcaggccggggaaactgctgcaaatagcgcagggaaagtgactaaggcaacagaagatgagaagaacgcgctcgcaaaattaaaagcagctattgatccagttggtgccgcaattgatactgtcggtcgacgctattctgaattaaagaaatttttcgataaagggcttattgataaagaagaatatgaatttcttgtccgtaaacttaatgaaaccacagaggaattgagcggggttgcgcaagcgcagagagaagccgagaaggccggaaaacttgctgccgcccagcaggaagcgcaggctcaggcctttcaaagaatgctggacaagatcgaccctctggctgcggcgctaagaaatcttgaacaacagcaggatgaacttaatgctgcgtttgcatccgggaaaataaatggttctcagtttgagaattatagccgaaaaatacaggaaacacggcgagagcttaccggagaggctcaggcagagcgagaagcagcaaaagcgcatgatgaacaggttgctgctttgcaacgtctgattgctcaacttgaccctgtcggaactgcttttaatcgtctggtagaacaacagaaacagctcaatgaagcaaaagctaaggggatgctctctcctgaaatgtatgaggaactttctggaaaacttcgtgctatgcggagtgagcttgaggttactcaatctcaattaagcaaaaccggaatgtcggcaaaacaaacggcttttgctatgcgcatgttgcctgcacaaatgacggatattgttgttgggttgtccactggtcagtcgccttttatggtgttaatgcagcagggcggccagctaaaagatatgttcggtgggattggcccggcgatcaaaggtgttggttcttatgtgctgggattaattaatccttttaccctggccgcagcagccgttggcgtcttagggctggcttactataaaggctctcaggagcaggacgaatttaataaatctcttattcttaccggaaatcagttggggacaaccagcgggcaattggccgatatagctcaacgtgccgggaatgcggctgattcgacaactggcgctgcggcggcagtattaaaccagcttgtgcgttcgggaaaggtagcgagcagttcgctggagcaagtgacgacagcgatagtaaaaacgagcgaagtaacaggaatatcaaccgaacaactggttaatgacttcaatgaaattgcaaaggatcctgtcagtgccatatcaaaacttaatgatcagtaccattttctgacaattgcgacttataaccagattaaggcgctacaggatgaagggaaccagcaggaggccgcccgcattgcgacagaagcatactcatcctcaatgatccagcgcaccaaccagattaaagaaaatcttggttatcttgagactgcatggaaagctgtcgcagactccgcaaaatgggcatgggattccatgctggacattggccgtgaggcctcccttgatcaaaaaatctcagatgttctccgtcaaattgatgaaatagaaaaaaatacccgacccggagttttcgggttaggtggcattggagatggcggagctcaaaataaaaggctggcacgattaaagcagcaattgggcgtacttcaagcagaaaaaattgctcaggacgtcctaaattcatcaataaacgattacaacaagcgacaacaggaaggaattgaactcagacagagagcagatgccttttcaaaacaatatcagacccgggagcagcagagagctagtgaacttgcaaaactggaaaagctaaagagtcagtattcaaaggaagaatataataattttatcgctcaaataaatgagcgttataaagatccaaagcaaccaaaggcgaaaggttattcggatgatgctgcccaacgaatgattgatcatctgaatcaacagaatgcgttactaagttcacaaactgaattaaccgttaaattaagttcctctgaacaggaactggttaagtggcgtcagcagattgccgacctggagtcacgaccgtcatcgaaattaacccaggatcagaaatcgcttctcttacaccgggaagaaataaccgcgttgatggagaaaaatgttgcgattgaaaaaaataacaggctaatcaaggaatccgccgaaatagctgcatggcgtgatttattgcaggcttcgattgataatcgtcaacaggggtatgatattcagattgctggttatggggttggcgataaaaatcagcaacgccagcaggaattactgcggattgaacgtgaatataacaatcagcgtctgcaacttgaacgtgactatgcagataaatcccgtgggatgtcaaatcatgtttttcaggagaaaatgtag

SEQ ID NO: 9851 - DNA, 570 bp, Escherichia coli
atgtttgatggaatgaccgatgcgctgggtgattttgtcacgacaggcaaggcaaattttcgttctttcgctacttccgtgatttcggatcttagtcgaatagcattaaaggcttcaattactgggattttcgacagcattagtaacagttcttcgggggggattttaggaactatcgggagtgctattagtaaatttattccgaatgcaaagggcggtgtttatgagtctccgtcattgaacacgtattcgaacggtatttatgattccccgcaattttttgcttttgcaaaaggggctggtgtttttggtgaggctggtccggaagccattatgccattaacacgaacatccgatggttctcttggtgtcagagctattaatagtaaaagtggtaatggaggcggagatattacctatgcccctgtataccaaatcactattcaaaatgacggccagaatggagagattggccctcaggcaataaaagcacttatggggatggttgatcagcgggtgcagggcaatctgttaaatatgcgacgtgatgggggaatgttaagtggctaa

SEQ ID NO: 9852 - DNA, 297 bp, Escherichia coli
atgaaaacagaaaataaaccatcgataaaaactgtaagatttggcgatggttatgagcaacgaagtccaaatggacttaatcattctctgcgcgttttcacctgtgatttcaaagttgaggcgaatgaacgtgattcatttgaaaaatttttagcccggcatgaaggctataaatcttttttttggcgcccgcctggtattaacagaaaaatcagagtggtgtgtcgaacgtggtcagcgacagaacatatcacctataccgatttttcgtgtcagtttgacgaagtggtgatctga

SEQ ID NO: 9853 - DNA, 657 bp, Escherichia coli
atgaaaaaaaacacagatgatggggctaaaatttacacaccacttaccctaaagctttatgactggtgggttttgggagtatcaaattggcttgcatggggatgtcctacaaaggaacaccttcttccacactttctggaacatttaggtaacaaccatctggatattggcgttggaactgggttttaccttactcacgtacctgagagcagtctgatatctttaatggatttgaacgaagctagcctgaacgcggcatcgacaagggctggggaatcaaaaattaaacataaaattagccatgatgtttttgatccttatcccgcggcgttacatggtcaatttgattccatttccatgttttaccttcttcactgcctgcctggaaatatatctacaaaaagctgtgtaatacgcaatgcggcgcaggccttaactgacgatggaactctatacggagccacaattcttggtgacggcgttgtgcacaatagcttcggtcaaaaactgatgcgcatttacaatcagaaaggcatcttttcaaacacaaaagattccgaagaaggcttaacacatatactctcagagcatttcgagaatgttaaaaccaaggttcaaggtactgtagtaatgttttccgcttcagggaaaaaatag

SEQ ID NO: 9854 - DNA, 1977 bp, Escherichia coli
atgcagcttaatcatatcgttaaaagtctgctaataacgggattattcaccaccagttctttacctctcctcgcggcggaagctcctaaagacgccaccgcagccacgcaacaagcaaacaatttactctacaaccagttgccgtttgccgataacactgactttactgatgcccataaaggttttattgcccctatccctcaagacgtgattaagggcgaacaagggaatgttatctgggatccacaacattacgcttttatcaaagaaggcgataaagcccctgatacggtgaatccgagtttatggcgtcaggcgcaactgataaatatcagcgggttattcgaagtaactgaaggtgtctatcagattcgcaatctcgatctatcaaatatgaccatcattgaaggcaaagagggtattaccgtcgttgatccccttgtttcagcagaaacagccaaagtgggtatggatctctattacaaaaatcgcggcaaaaaaccggtagtggcggttatctatacacacagtcatgtcgatcactacggtggtgttcgtggcgtaattgatgaagctgacgttaaatcaggcaaagttaaaatctatgcgccagccggatttttggaggaagccgtttccgaaaacatcatggctggcaatgttatgagccgacgagccagttatatgtatggcaacttattgaaacctgatgttaaaggccaggtgggggctggactgggaacgactacttcagcaggaacagtcacgttgattgctcctactaactacatcaccaaaaccggacaaatagaaactattgacgggttgacttatgatttcctgatggcgccaggttctgaagcgccttctgaaatgctgtggtttattgaagaaaagaaactgatcgaaaccgctgaagatgtcacgcacacccttcataacacctattcgctgcgtggggctaaaattcgccaaccgctgccgtggtcaaaatatattaatgaagctctcaatttgtggggtgataaagccgagattattctcgctcaacatcactggccaacctggggcaacgataacgtggtcaaactgcttaaaagccagcgtgatttgtatcgttacatcaatgatcaaactctgcgcatggctaatcaagggatgacccgtgatgaaattgccgcaaactttaaactgccctcttcactggctaacacctgggcgaatcgcggctattacggttcggtaagtcatgacgtgaaagcaacttacgtgctttatctcggctggtttgatggtaaccccgcgacgcttgatgaactgccgccagaagaaggcgcaaaaaaattcgtcgagtatatgggcggtgctgatgccattttacagaaagccacacaggattatgaccagggtaatttccgctgggttgcccaagttgttagtaaggtggtgtttgccgatccaaacaaccaggcagcgagagatctggaagctgatgcgcttgagcagttaggctatcaggctgaatctgggccgtggcgtaatttctatctcactggtgcacaggaattgcgtaatggcgtacaaaaattaccaacaccaaatactgccagcccagacaccgtgcgtgcgatgacgccggagatgttctttgattatcttgccgtccatattaatggtgagaaagcggcagatgccaaaaccgtgttgaatttcgattttggtgaagatggcggcacctataaagtggagcttgaaaatggtgttctcaatcataccgctggtgtagaggcttcggatgctgatgccactatcactctgtctcgtgatgtattgaacaaaattgtactgaaagaagagacgctgaaagaagccacggccaaaggagatgtcaaaattactggcaatgaggaaaaactcaacgagctgttaggttatatggataattttgaattttggttcaatatagtgacaccataa

SEQ ID NO: 9855 - DNA, 267 bp, Escherichia coli
atgcttgaagatactacaattcataatgcaataactgataaagcgttatcaagctactttcgtagttcaggtaatttgttagaagaagagtcagctgtgttagggcaggctgtgaccaatttaatgctttcaggcgataatgttaataataaaaatattatcttaagtctgatacactctctggaaacaacaagtgatattctcaaagctgatgtgattagaaaaacactggaaatcgtgttgcgatacacagctgatgatatgtaa

SEQ ID NO: 9856 - DNA, 219 bp, Escherichia coli
atgaacaatagtaataatctggattatttcactctctatatcatcttttccattgcatttatgctgatcactatcctggtcatccttattgcaaaacccagtaccgggctgggagaagtgcttgtgacgataaatttgcttaatgcccttgtttggctggcgatcaatctgattaatcgattaagggaaagactcgtcagccacagggatcagcaataa

SEQ ID NO: 9857 - DNA, 294 bp, Escherichia coli
atgtgcgataccgccggtatcgacaatcagcgtgcctccggcacgaatattgctgccagttgccgtacctcctttctcaacaacctgcttgctcccggaagagatatttgttgtgtcagctttcccgccgctcttgatattttgcgtgccactgttgatattagttcccgtagcaataccatgattataaatattctgtgtaccgccattaattatggtattagtcgcgttcccggcaacatccatggccccgccgttatctattcgggtcgcatcagctttagcattcgttaa

SEQ ID NO: 9858 - DNA, 1095 bp, Escherichia coli
atggacaacagagaaaaagagatactcaggatcctgcgtcacaacccactgatccagcagaatgaaattgctgagattttacaaatcagtcggtcgcgtgttgctgcacacattatggatctgatgcgcaaaggtgcgattaaagggaaaggctacatcctgacagaacaggaatactgtgttgttcttggggcgattaacatggatatccgtggggtggcggatatccattatccacagaaatcctccagtccgggcagtatttactgctctgccggaggtgtcggacgcaacatcgcccataatctcgcccttctgggccgcaatgtgcatctgatatctgctgtaggcaatgatttttatggcgaaacattactggagcagacccgcctggccggcgttaatgtcaccaattgtattcgactgaacggacaaaatacttcaacttatgtctccatcgccgacctacaggcagaaacagtgatggcgattaatgatacccatattctgcaacaactgacgccgcagttgctggacgcctcacgtatgttaatccgtcacgctggcgtggtgctggctgactgtaatctgacacctgccgcccttgaatggatctttacggtcgctgacggcattcccgtttttattgatacagtgtcgaaatttaaggctgttaatgtaaaaaactggcttccgcatatccataccctgaaacccacacaaaaagaactggagatattatggggttcccctgtcaacaatgagaccgatctactcaccgcagtgaacgcactacatcagcagggtgtgcaacagatttttgtctggatgggagatgaatccgttttctgtagccaaagagagggagaacaatttctgctcacaccgcccgttcatgccgttgtggacagctttggtgcagatgatggctttatggcaggtctgctttacagttttctggaaggaagtagtttccaggaaagtgctcactttgcgatggcatgtgcagcactgtcacgtgccagcaccagcatcaataacccaacactttccgttaataacgcgcaatatctgttaaaaacatcccgggggtaa

SEQ ID NO: 9859 - DNA, 1251 bp, Escherichia coli
atggacatcatgagaagtatagtgggaatggcagtattgctgataattgcatttctactatcagtgaataaaaaacgtatcagtttacgtaccacaggagctgcactggttcttcaaatcgcgattggtgggatcatgctctatttccccccggggaaatggctggttgaacaggctgcactgggcgtacataaaattatgtcttacagtgatgcgggcagtgcctttatttttggctctctggtaggggacaaaatggacgtactgttcgatggggcgggttttatcttcgccttccgtgtacttcctgccatcatttttgttacagcgcttatcagtctgctgtactacatcagagtgatgggggggcttatccgtattctgggggggatttttcagaaagctctgaacataagtaaagttgagtcatttgtggcagtaacgacaattttcctggggcaaaacgagatcccggcaattgtaaaaccgtttattaatcgtctgaatcgtaatgaattatttactgtcatctgcagtgggatggcttcgattgccggttcaatgatgatcggctatgccgggatgggggttccgattgactatttgctggcggcgtcgttgatggcgatcccgggggggatcctttttgcccgtattctgagtccggccacagaagaatcaaaagtcacttttgaaaatctttctttcactgatactcctcccaaaagtgttattgaagcagtggccagcggggcgatgaccgggttgaaaatcgctgtcggagttgcaacggtagtgatgacctttgttgctattattgctctgattaacggtataatcggtggtatcggaggctggtttggttatggtaatattacccttgagggcattttcggctggattttggctccccttgcgtggatcatgggcgttgactgggcggatgcttcactggcaggaagtctgattggtcagaagctggcaattaacgaatttgttgcttatctcaatctttcaccctatttacagccaggcagtacgcttgatgtgaaaaccaccgcaattatttcttttgcactgtgtggttttgccaactttggctccattggtgtggtggtgggtgccttttcagccatatcacctcagcgtgcacctgaaattgcacaactgggcatgcgtgcactggcggcggccaccctgtcaaacctgatgagtgcgactatcgctggttttttcattgggctggcataa

SEQ ID NO: 9860 - DNA, 936 bp, Escherichia coli
atgtctgaaataaccatttcttctgaattactgcaaatttcaccggaagtacaggatgccattaacagtaaaaaacctgttgttgctctcgagtcaacaattatctcacatggtatgccttttcctcagaatgctcagacggctattgaagtcgaagaaactatacgtaaacacggagcagtaccagccaccattgccgttattggcggtgtaatgaaagtcgggttaagtaaagatgagattgaattactgggtcgcgaaggacataacgttaccaaagtcagtcgccgggatttacctttcgttattgctgaaggaaaacatggtgcaacaacggtagcttcaaccatgattattgctgctcttgccggaattaaagtttttgccacaggaggaattggcggcgttcatcgcggtgcagaacacacttttgatatttcagccgacctacaggaactggcacatactaatgtcaccgtggtttgtgcaggcgcgaaatccattctcgatttagggttaaccacggaatatttagaaacatttggtgtacctttaattggctatcagacaagatcattgccggcatttttttgccgcaccagtccgtttgaggtcagtatacgtctggacagtgcaaaagagattgcccgcgcgatggcagtgaaatggcaaaccggcctgaacggtggtctggttgttgccaatccgattccggaagcttacgccatggcggaagagaaaattaatgcagcaattgaccaggccgtaaaagaagcggaagtgcagggcattaccggtaaagaaagcacaccgttcctgctggcacgggtggcagaattaaccggtggtgacagtctgaaatcaaatattcagctggtattcaacaacgcagttctggcctgtgagatagcaaaagaatatcaacaaattgtctga

SEQ ID NO: 9861 - DNA, 936 bp, Escherichia coli
atgtgtgataaggaatacatcatcacaattggctctgccaatatagatatagccggatattcgtatgcctccttaaattatgctgattctaacccggggaagattaaattcacgcccggaggtgtggggcgtaatattgcacataatcttgctctgctgggtaaaaactcatggctgatgtcagctgtgggagatgatttctacgggcaatcattattagcacaaacgactcagtccggcgttaatgttgataaatgtctgattgttaatggagaaaatacctcaagttatttatcacttctcgataaaaccggtgaaatgttggtggcaataaatgacatgacgattagtgaacatatttcagctgagtttttatcacagcatattgattttattcagggagcgaaggttattgttgcagactgtaatatcagtgagtcaacacttgtctggctactgaataatgcaggtaaggttccggtatttgttgacccggtatctgcatggaagtgtgtcaaaattcgtgaacatttagcacaaattcatactctcaagcccaaccggcttgaagcagaaacactcagtggtatttcgctttcagatcggaatgatgctgaaaaagtggcggtatggttccatacacatggtctgaatcgccttgtgctcagcatggggggggatggagtttattacagcgaactgtacggagccagcggctggtcgccgccagtaaaaacacaggtggtgaacgttacgggggcaggggatgccatgatggcagggctggcttcctgctgggttgataatatgccatttattgattccattcgatttgcacaggggtgttcatcaatggcgctggccagtgagtataccaataatcctgaattatctgttgctaacgttaaaagcttagtggagaaacagaatgtctga

SEQ ID NO: 9862 - DNA, 453 bp, Escherichia coli
atgcacgttattaacagcggcattcgtgatgtgaaatttggtgaaaatgtgaaagtcgtcatgccagtaaacctctatgaatgtgaactgggggatgatgtttttatcggtccctttgtggaaatacagaagggatgcatcattggcaagcggagccgaattcagtcccacagtttcatctgtgagaacgtcattttaggtgatggctgtttcatcggtcatggcgtaacttttgctaatgatctttttaagtgtggtggtcccgatgcctctgcagaaagctggatacgtatcgtattaggtaacactgtaacagtgggtagcggagcgactattttaacaacagaaatttgcagtggagcagtgattggggctggtagtgtggttacaaagcccgtgctggtaaaaggcgtgtatgccggtaatccagccagacttttgagaacgctttaa

SEQ ID NO: 9863 - DNA, 531 bp, Escherichia coli
atgaagctaacagaagaaagtctgaatctagtcattgacatcctgaatgatttgatctgtgaaggaaaaatgctgaacgatgtggagcgcagatctctgctcaatgcagttatggcaattacagcggtaaaagaacgttctgtcgtatctgtatcatcccgaaaagagcaaagtaagaaggagaagaaggaaagagagatcgatcctcgtttcccaaatgctggtgtggcatggaatgaggcagacgagagtttattgcgagatgttctggaggatgtaccggacgatgaaattggtaaacaccttttctggctagcagagaaactagggcgaaccccgtacagtgtagcctgtaaagtcagacaaattaagaaattacctgcagaatggaaggatcaatttcgtaaaatctctgacaggatccgtagttctggaatgtcagtcagtgaatatctacaacgccagggactgttaagcccagagtcaggggaagaaaacaatcctgtcagtcataacaacaatgtagcttaa

SEQ ID NO: 9864 - DNA, 1224 bp, Escherichia coli
atggctaaaaacaaaggtatctgtcggaataaaaaatgcagtaatcctgtttcagaatttgatgaggcaaatgccttaaggttatgcgatgatcattataagctatggaagcgaaataaagagaatcgtcgggtcaggaatatttgtcgtataattagtagatatgacaaaagtctggactgggagatattttatagagtaagagatgctgcaaaaaataaaacgggaaagagaattattgaggacgcaaaaatattacatcaatggcgtgcttcaaagcaagtaagaaaaagttttcacaagggtgtgcttcggtcacgggaatggcttaatacacaggagttactgagcagaaaacatatatctgttacaggtgaactatttaaattttacataaaagatattatcagattatattgctataagtttctctacagcagagaatatcttaatgaaaacgcatacaaaaaacgatatcagagagatattcaccccagaaaagttaatgttccgatactgcaacttgaagttgcatggataaataataattgccgctcaagtgattcaagcactgatattattatccttccgaggatgataagaagaatggttgtatttaattatacgaagataaataaacaattagagaaagtgttgggggggatagcacgaaaacaaacctcagaaagaaataaaggcggtctctataccagaataaaaaaagaaagtgactttctttctatggatagatttatggtggaaatagaaaatatcataagacctgaaaggtttcctacatcaatttatccagtcttttcacattcatttattgaacgagagcttccgctactgaatcttgctcgatcacagtataaaagagcaataagtaaaagagtggcgaattcaattttttatactttgcaaaaaactaacgtggcattatggctatatcttgaaatgtttgctctggtggcattcattaaactgtatacaggaaaaggttttgaattcataaagaacatgtgtgtatttatcgattatgagaaagggataataaaatccacacatgaagaactgctgggtgaaattaagcgtaacattcaagtgaatttgaaggtgaatcctgataattttccagagttaatagacatatacaattcatgctttagtgaaaatatattgtcatatgatattcaggatggtaattttaaatggcgctcatga

SEQ ID NO: 9865 - DNA, 885 bp, Escherichia coli
atgccattcagcaattcttccctctccgcgcaagtgaaatcatatctgacgtttcttcctgaagaaattcgccagaaaatccttgaacatctccacggtgttattcattacgagcccgtgattggcattatgggtaaatccggcaccggcaaaagcagtctgtgtaatgccatttttcagtcccgtatctgcgccacgcatcccctgaacggctgcacccgccaggctcatcgcctcaccctgcagattggtgaacgcagaatgacgctggtcgatctgcccggcattggtgagacaccgcagcatgatcaggaataccgggagctttaccgtcagttactgccggaactggatctgattatctggatcctgcgggctgatgaacgtgcgtatgctgccgatattgccatgcatcagtttttactgaatgaaggtgcagatccctcgcgttttctgtttgttctcagccatgccgatcgcgtgtttcctgctgaagaatggaatgccacagaaaaatgcccatcccgtcaccaggaactctcactggcaactgttacagccagggtggcaaccctgttcccgtcatcatttccggtactccccgttgctgcgcctgtcggctggaatcttccggcgtttgtgtcgctgatgatccacgccctgccaccgcaggcaaccagtgcggtttattcacatatccggggggaaaaccgctctgaacaggcccagaaacacgcacaacagacttttggtgacgccatcgggaaaagttttgacgacgccgttgcccggttcacttttccggtctggatgttacagcttctgcgtaaagcccgggaccgcattatccgcctgctagaaacactgcgggatcgtctgttctga

SEQ ID NO: 9866 - DNA, 135 bp, Escherichia coli
atgcagcagaaaaaatattcctttaattatctgatttttaatgatgatttcataaaaagaagaatactcattaatccagcgacacatcctgtcggcgtgagtgtgtcagaacagacgatcccgcagtgtttctag

SEQ ID NO: 9867 - DNA, 1131 bp, Escherichia coli
atgaccaataatattagcaatataaacaatacagctcataataagaatctcgataaaacaacattcgatgaacaacctgcttatgaaacaagagtatcacaagctaaaaaaatactgcaaagttttgcgccaaatgatattaaagttgatacaaatactaaatttattagtctgatagagtctgtccgtgctctctctcctgaattacaatgtaaggtactagatggtcttaattatgctaagaatacactacataatataaatcaaaattctgccatagcaacaaaatcatcctgtcagtctaccgagtcaatagagaaaaccataacatttaatattctcgatatgttagataatttgacgatgagacaacagaacattatggaggcctttctaagagtctttacatcaatgtacaatgcctctgccaaggctgatgctagcatgagcatcgtttttgaacagcttgtccatcttcagagtagcgaaacaaaaaatgcttcttgggcaaattttgcaggtgcattagcaggctcagctattaatgctacgggagctgtatttatggcaggtgcagaacttgcgaagcccgcgggaaagatagatgatatcgcagaaaaccaggaacaaaatacagacaaaccagatagccaaactcggataaaatcaaaagaagatatggcaaatgcgaaagccagacttgccgaaatagaaaatcaacaaaaagatttatcaaataacaagaatattgaggataatgacaaacaagagcaatcaagtaagttacaaaaagaaaaagaaagtatcactaataaaattaaagacaaagaaaaaattaatagtcacaatctaagatatggtattaccagttctatttctcataccaataatctatttcagtctattgcaaatctatctcaatacggcggaacagtggcagcagaacatactcgtgcagaaaaagacttggctgagcaagctaaaaatgttatgcattcagttatgagtagctatctggatcaaattaatcgtgatgttcaaggaagagatcaagcactcaatttattacagcaaataatacaaaccattattgatactgatagtgcaatcgttcaaggcattcgctcataa

SEQ ID NO: 9868 - DNA, 1782 bp, Escherichia coli
atgtcggcaccgattacgggacaaacgatcacgtttgaacaaatcagcgaaacattgcgcacacagtatagcgatgcggaaaaaagactgcaggacagcaacaaaacgcaagttgatcccatgcggcttaataaaaacccgaaatcccttgataatgatattcgcgctcgtcttgaaaacaaaccgatgcttgctccgcctgcaatgcaggtttcagattccgacaacgccactacagcaaagacgaacgatgcccgcctgacaatgattttgggtaatctaacaggcattgccgatcaggatattacaacacgtttgcataataaccttgacagcaccctgcttcgacacgaaatggcacataataagtttcgtgaattaagtgacgcttactcatcgtcattagattccgcgcaaaaagccgacgacatcatgcatcaggccaataataattacaatgcggtcgataaaaaggtgcaatcgctggagaaaaaagtcaacacattgaatcaagagctctcgcaactgcaacctggcgatccgcaatataataaagtagtgacgcaaaaaagtgcggctgaaaaaacactcacgctgtcattacaaaaaaaatcgttagctgagaaatcgttaaatacagccattatggatgctgatgctgcgatcggccaaagtatggaaatttttgacgaaattcaacagcaagaacagattaataacttcaccaccaatatttgcctgacgcaagaaaaccagaaaaacagaaacgcgacagccacatttatccttttgattacctcagtaatggaagttattggtgataccaattgcgactctattaaaaatcaatctgaggtaatgaaagagattaaccatgtcagggaaaataaactcaatgaaacagcgcgtagctatactacatggacaaaagttttaaacattattaatgaggtcgttactgtagttacatttgccgtaagtgcagccttaattgtgattggtattgtcgcagcagttccaagtgctggggcaagctttgctggagcgctggcactaattggaggaatcgcgggggcagtagtattaggtgttgatattatttgtcaaatcactctgggtaccacggctaccggttggattttgggaaaactaactgaaggtcttgcgggtattatttctaaatatgaccccacactactcgcaatctgcgctcttctggacgccttgggtgtccaacaaacgactattgatttagtacaagatatttactcatctgcagccgcttctattgttatggtaacattaatgattggtgcaacattaatttgttcagtagcaataagtgaacttgtaaaggcactctcaaaaactgccgccgaagaaatcacaaaagaaataactgacagtataaaatccaccgtggaatctatgatcaagtcagtatcaaaaaaaatcatgtcagcattaaattttctcggtgacaaaataaaagcatcatcacaatttataatgatatttgcaaaaataactattcttcttgaaaaaattgcctcgggcgtttgtacaataattacatcgagcatgaatcaatacgctgccagtaagtctgcagatatcgaaattctacaacaagatataagcaatctatcaaaaacgcgcgaacaaatgcttacagtgatgcaaaggatagataaaaccgtcgaacaagaggtagctcagatggtgcgtgtattacaacaccgaactgaagctttgaaatttgcttctcattctatcgtataa

SEQ ID NO: 9869 - DNA, 843 bp, Escherichia coli
atgtctgaaatcacagccccccgtccggaagtggtcaacgggcatacggacgttatctgctcaaccagtatccgccacattctggctgtacaaaagagtacgctgctgcaaatcgacacacttacccggcaactggcagaaatctcagcaatgacagaaagtattggcggtaaaaccgcactggactgggcgatgaaacaggattttcgctgtggttgctggctgatggaaaaacctgaaacggcaatgaaagccatcacccgcaatctcgatcgcgaaatctggcgtgacctgatgcaacgttccgggatgctgtcattaatggatgcgcaggcccgtgagacatggtaccggtcactggaatacgataattttccggaaatcagcgaagcgaacattctgagcacatttaaacaactgcaccagaacaaagatgaagtgtttgagcgaggggtgatcaacgtcttcaggggactgagctggaattacaaaactaattgcccctgtaaatttggcagtaaaattatcattaacaacctggtaaggtgggaccggtggggatttcatcttatcaccgggcaacaggctgaccgactcgccgatctggaaagaatgttgcacctgttcagcggtaaaccgatccccgacaaccgggaaaacatcaccattcatctggatgatcacatccggtctgttcagggtaaagagtgctatgaagatgagatgttcatcatcagatactttaagaaaggctccgcgcacatcaggttcaggaaaccagaactggttgacaggctgaatgatattattgcgaaacactatccgggagtgttaccttcataa

SEQ ID NO: 9870 - DNA, 423 bp, Escherichia coli
atgaaactggccctgacgctggaggcagacagcgttaacgtgcaggcgctgaacatggggcgcattgtcgttgacgtcgatggtattaagctcgcagaactgattaacaaagtcgctgaaaacggttattcactccgcgtggtggatgaacatgacgctaccgaaacaccggcaacttctgccagccctcatcagttgccggaagacaatacagtgatacagagcgtgatgccattaaccactgaaacagcgctggatatcctcattgcgtggctgcaggacaatattgactgcgaatcggaaattatctttgacaacgatgaggacaaaacggattcggcagcactgttgccctgtattgaacaggccagggaggatatccgtaccctgcgccaactgcagcttctgtaccagaaccggtga

SEQ ID NO: 9871 - DNA, 369 bp, Escherichia coli
gtgtcagacacactccccgggacaacgcttcccgacgacaataacgaccgcacctggtggggactgccctgcaccgtgacgccctgttttggtgcccgtctggtacaggaaggcaaccggttgcattaccttgccgaccgcgccggtatcagagggcggttcagcgatgcggattcgtaccacctggaccaggcctttccgctgctgatgaaacaactggaactcatgctcaccagcggtgaactgaatccccgccatcagcataccgtcacgctgtatgcaaaagggctgacctgcgaagccgacaccctcggcagttgtggctacgtttatatggctgtttatccgacgcccgaaacgaaaaagtaa

SEQ ID NO: 9872 - DNA, 849 bp, Escherichia coli
atgaataatgatgagctggccaccagacgtgcgcaggcgattgccgaagacaggtgtttctcgaagggacgtctgcgcgatgaattcagaatgaaaccagcccccggtgctgagccggttaagtggtataaaaacacttatggtggcaggttcgctgtataccgaattgcagactgtgttccgatgcgtgagaaacgccctctgacgagtaaacaacagctggctggccagcggctttccgttttatcccgactaaacagcaccagtggccggatggcacggcaggcatatgactggctgagtctggcaccactctttctggatactgaaacgacaggactggataataccgcggaagccctggaaatcggcctgaccgatgcggccggtcaggtggtatttgaaaccaggctgaagcccacggtcgccatcggggcgcaggctgccgccgtgcatggtatcagtgagcaggctctctgcggtgcaccatcatggacagatgtggcgcgtcaactgcggcatgcaatcggggaccgaccagtaattatctttaatgcccggttcgacatccgcattctgaaacagactgctgccgcacatagcgatccggctgactggctggaagaactgacggtatattgtgcgatggagctggctgcaggatattatggggccaccaaccgctatggcacgatttcactggcctgtgctgccagccaggccggactgacctgggaagggcaggcacattcagcgatcgccgacgcacggatgacggcaggggtggtaaacgctattgctgcatatcatctggaactgctgcaggaacaggcacggctggaaatctga

SEQ ID NO: 9873 - DNA, 747 bp, Escherichia coli
atgaaaaaggttattgttgtttcagcgcttgctatggcgggcgtattttcagcccaggctctggctgataggggtaaaacaggcttttatgtgaccggtaaagctggtgcttcggttgtgactcagactgaccagcgcttccgtcaggactttggggatgatgtttataagtataagggcggtgataaaaacgatactgtatttggtgcaggccttgcggtgggctatgatttttatcaacattacaatgttcctgtgcgcacggaagtggaattctatggccgcggagctgcagactcccattatacactggatacatggcattctccgatgggggatggtggtcgggaagacacacagaacaggctcagtgtgaataccctgatggtgaatacgtattatgacttcagaaacagcagtgcattcactccatgggtgtctgttggactgggttatgcacggatacatcataaggcaacatatactgatacctcctggaataaatctggtgaggtgagcgatatttctgcgttgcattactcgggatatgataacaatttcgcatggagcattggggccggtgttcgctatgacataaccccggatatcgctcttgacctcagctatcgctatctggatgctggtaaatcctccctgtcttacaaggatgcagaaggggataaatataaatcagaggctgacgttaaaagtcacgacatcatgtttggtgtgacttataacttctga

SEQ ID NO: 9874 - DNA, 354 bp, Escherichia coli
atgacctctgacaaaatcctaaagcaagcgatatcaaatatcaccatctggcgcaaaggtgaacaacgtgcgccacataagccattattgctgctgtacgttctctcacactatcggcagggtcatggtcgcctgtttaactatgcttctgaaatctacgagcccctgttggatctcctggaacgttatgggccgcagcgccgtgaccagcgcccggacatgccgttctggcgtctgaagggcgatggcttctgggaactacattacgcggaactgtgctcaaccagtggtaacactgagcacgcagttcatccgtcaggcgtggtgcaccgtaacgctgttttgaccgggtaa

SEQ ID NO: 9875 - DNA, 957 bp, Escherichia coli
atggcagtgagtatcgcggaatatttaggtcaaagaacagatgtagaccaacagattgttcccgttgcaaaaggtacgcaaatacaatgcccttttatggatcgaacctgtgacaaagcaagtaaggtcaaaaatcctacacctcctgtatgcagtgtccgcaaaccagatggaactgtttggatagtttgcgaacatcggctatgttctactcgccagaaaaagacagtcattgtaaatggtcgtaaaaaacaaattgaaaatattttggttgaacatcaaagagatatattacggaaagtagcaaaactcatttatcaggatcctgaattacaggattcagaaattggtgtaagaagagaagtcaatattcctttaccagattctgataatagctaccatgcagactatgtaatgagaaatttttcgggtaggggaagagttgatgaggtcctgcttgagatgcaaggtggtggagaaacaagtagcactggagaaattactcgacatatcgctgcatgggctgatcttgagtttcctactaatgaaattctaagacaacctgtagcagcaaatactatcgaaacaaacgcatggagacgacagcaagaacaatttcttgtcaaagggaatgttgtcgatcaaaccggagggaaaatcgtttttgctgtcggtagcttactctatgactatttacacagacgttttaggaatgcaaatctcagagatctgaaagcccataactggacattatgtattttagctttcaaggaagatacatcggatgaaccacgtccagggccgatcccgttaatcattgatgactcaaaaacactattcaccaattattcaacatttgtaagatttctaacagatcagggcgcaccacgccctgaactattcgaaggatcatttttacgtttagataatagttctgttacgataatgcctcgttga

SEQ ID NO: 9876 - DNA, 243 bp, Escherichia coli
atgcttccggagcctctgctacaggcctatcaaaagcagatatctattctatccagcatgcaagtattggacgaaaagcaaccgcaggacctcaagcaaaaggatacaggaacgatggagaaacctacactcttgactcaagaggaagttcagatgctgtatgtgcgccggatgctgccttccgagtacgagcgtctacagggatttcccgagaactggactctaatcgattcagagcagtag

SEQ ID NO: 9877 - DNA, 1452 bp, Escherichia coli
atgaataataacaatactccaagatccccaactctggtggaatcattattaccaatactagcgatgatactattgctgggatttggttatgcggcattcgatctgccacctgagccattaatggttctttcaaccgtcattgctgcactgttagttaagcggttggggtatggctacaatgcaatccttgaatcaatatcgcagaaaatcgctaaaacaatgcctgctctgctaattttgatcagcgtgggcctcctgattgggacatggatgataggcggtactattccgctgatgatttattacggccttaatctgataaatccttccatgatctatgtgacggccctgctcgttactgccgtcgtctctgtatgcacagggacatcctggggatccgcaggcaccgtcggtgttgcgtttatgggtgtggctatcggaatggaggctaatctggcagcaactgcaggcgctattgtggcaggggcttacttcggggacaaactgtctcccctttctggcgatactaacttagccgcaatggcagcccagatagatctctatgaacacatcgctcatttactttatacaacccttccttcattgatactgtcagcctttgttatgacgctctatgggatgaatagcgagctcggcggctcaaccattcccgaaaaaattcagctaatcactgaaggattaaaaggaatttatcattttaatttattgttattgctacccattgccattgtcctgtacggttcgattaccaagaaaccaaccattccaattatgcttgtttcggcactggtagccatgatcaacgccagcgttattcaggggttcgcactacacgacattgttaaaagtgcagtagacggatttaacgtttcaatgcttaccgataaagatgttaatccgctattaggtaatttgttaaaccgcggtggcatgaactcgatgatgagtacgttgcttatttgtttctgcgccctttcatttgcgggaacattagccttgagcggcgctttagaagtcatcgtccataatctgctcaaattagttcattccacaggaaccatgattcttgcgacgattgcctgtggtttaacaatgattagcgtgacctgtaatggtcagatatcaatcctgattccgattgaaatgctacgaagtgcttatattgagcgcggcctacatccaaaaaatctggcaaggactgtagaagactctgccaccatatttgaaccaattctgccctggactgccgcgggtgcctacatggcaggtacacttggcgttgctacattaagctatcttccgtgggctattctctgctggagtggcattttctttgcgacgctgtgggggttcacaggctttggtatcgcccgactgtccaaagaaaagcagcaacagctcatgatggaaaccataaatgaaagcaaatag

SEQ ID NO: 9878 - DNA, 168 bp, Escherichia coli
atgcacgctgataacagaagtggcaatccgcataccggattttcccagcctcagtatatccgccgtcagatgctggctgctggatcaaaacatgccatccagtgcgatgagcattcatccggcttccagagcgcgcttcagcaggttgtgtcccgtcctgccgaataa

SEQ ID NO: 9879 - DNA, 2232 bp, Escherichia coli
atgatccctaatctgaatgaactgacggatactccgattgcccgaaccaatttgatcaagcttgaagaagatcagctgacgatcatccagcgtctattggctcctgtatctaatatctatacgatagactttatggttcagcgctttactaaagagcgaaaagaaaaatccgctgattactatgcgcgaattcatcaggaggtaaaatcttgcgtgcggcagaagcttgggctggaggccgggcaggaggtaaaatatgaactgcattgcttaccaaattaccatcacgtcttttttttcctagcgcctgcaactaacccgaacagtcaggcccataggacgttggcagaacgtattgaaacactttgtcagcaactcaccgctgaaaattatgacctatctcgcctgattcagggattatttagcctgcatttgaaaatggtcatgctggaaaaagccagtgagcgcttttcggtatcgccgacttacttcaactcaacacttttccttaatgctcgcctgactcagcccgtcacgcagaaaagcggcactggagtgatggaagcattcgaactcgacatttatgcatcagaatataatgagctcgcctttacactgcataaaagaaaatttctggtcgaaccggaggatgagatgctcctctccctggacgataccagcgtgtggtttaacatcaataatcgtcggcttaaagcccggcgcaaacttgatgcccgtgatagcaaactggatttttttcgtgagcgcagcggttatggcgaatgccaggcctatacctataacgtggtcatgaatgctgcctgcgagcggctcagtgaactagagatcccccatcaacctattccatttcaggctacacacgaggtcaatcagtttgctaccgacctcgatcaacagctggctaatacgctgttggtggttaataacggcgttaaattcagcgccacgcaagaagcttatttctttgacgcattagccatccagttccccgggtatcaactctggccgctggcatcgcttaaacattctcagcaaaccggcttttctgagctgcctgccgatacatctattctggtgctcaatgcggtagaaggagaacggagcaacagcatcagccagcaggataatgcatctgttgagtacaatgatttctatgcggcctttgccgacgcccgaaaacaacctgaactcaactgggatacctatacccaacttaaactggatcgtttgcaagggtggctaaatcagcaaccgctacctgtggtcctgcagggtatgaatattgatcgcaaattgctggatgcgattgatcttattaatgaacgatcgaagagagaccctgctcaatacgaaatcgatcttacgaaacctcacagccgtcttaaatcagcagttaccttactaaacagtaagatacgccgaacgaaaaccgaactatggttcaaagaaagcttactcaatcagcatcacatcctcctaccagatttggcggacgggcactataccgcctatgcggtacgcaaaacgaaaaataatcctttcctgcttggatatgttgaaatgaaaacagagtgcggtcaacttagggtagttgataccgggatcactgaaggtgaattcgagtatctatctgttgatcatccagctctgggacgactaaagaaattattcgataaaagcttctatctctacgaccacacaacagatgtgctgcttaccacctataacagctcccgcgtgccgcgtctgattggtccggcgcaatttaatatcgtcgattcatatgtttatcaggaacaagaaaaagcgctggcggagcgtcaaggtgataaatttagtgggtatactatcacccgctcagcaaaaccagaacaaaacgtactgccctatctgatatcaccggctcgctcgaaatacgattcgttggctaaaactcaaaaaatgaagcatcatcatatttacctacaaccgcatgagaatggcgtgtttgttctggtaagcgatgctcagcctacaaatcctactattgcacaccctaacctggtggagaatcttctgatatgggatgctcagggcaaagccgtagatgtatttaaccacccgttaactggcgcttatctcaatagcttcaccctggatatgctcaggagcggcgaaagcagtaaaagttcaatttttactaagcttgcccgattgatggttgagaattaa

SEQ ID NO: 9880 - DNA, 4710 bp, Escherichia coli
atgagaaaaagctggactatagaggaagattgtaagctgcttaccttggtacgtcggtacttttccacgttggtaagccataaccggctgaatgccacaatgccatttagccagcagcttcacgatgcatttgactcacctgatcgcgatgccgcagcattgttgtatcgactcgaacaggcaaaaatcctgggatttgccagccgtcctggaggcgatcccactaaacagctgtttcgctgtctgataaacaatgatttggcgctatacgattacagcctcacctttcccactctcagaaaatcattgcatccagataccattgcagcagcactaaacctcttcacaattagcaatccacacgaacctttatccaatactatcaatgaaattgcaacagccttgcatcttgcccccatgcaagtggaaaagattctgctcgaaagcggtcaaataatcataaatagttaccgtaattatgagcgtgttggcgagaaaattatcaataataatctgcaagatctcatctccagacaaatccctgacataacgctggtcaaagacattaacgcttgccgtgcccaagtatctcaactttaccacgtgcatgaacgtgatggtgctgaggttatattcagttccgatggcacgggattcggaaaaagctatggcgtacttcaagggtatgtcgaatatctggagcgtttcgccaaaaaaacaaagtcaaatgatctgtttcctgaaggtggctttaccaacctgctgttcatgtcgccgcaaaaatcacaaatcgacctggacaacagccagaaagataaaattctggcctctggtggcgaattcatttgcatactatctcgtcaggatattgctgatctcgacttcagggactgggccactggcctgaaaaatcgcgaccgctatattcagtggtacaaaggggcgaaagatagcaaatatatcggtagcacaatgcgttcgctctattaccatgtctcacaaattgatcgctgtgaagagcagttaaaaaagctgacaacatacggttctcaggataccagctacgaaagagatattcttgaagagcagctaaaaagctgtcgtcacagtatccgcagtacgattgagtcagcctgtaaattactatttggaccagatagcgaaaaagcatccattaaagagtacattcgtcgcggactccaggcgcgccagaagcgaatgcaaaatgcggagacagcacgaaaaacagttaaaccggaactaagcgtatacgaagtctacttcgagcttatcaaacaggtattgcctttcgaagtttgccagtaccgcccgtcggtgttactaatgactacaaataagttcgacacatcaacttaccgactggtgccttgtcagcgaggtgaaggcgtacgttttcagtccataagtttcgacttgctgattggcggcaagttgctccccaaagctccacagatcagcagcgttgcgactgctgggcataccgtgcaggtagactatcttcgtaatgaacacttcagacgtaatccagactgcccttttcgccagaaaaatattcgctttacggtaatcattgatgaactacatgaagcctacacccgccttgaagaagcatgtcatgtaaagctaatcacacaggaaaataatctggcgcatgttatttctgtcgtgggacgtattcacaacgcggtactcagcctggagcgacggaacaagcccaaagaagcgcaaacgacttttgaacaagagatggtcaaattcattaccatcctgcgagatctactggcgaaaaagtgcgaattatcacccggtacaacactgggctcgctcctggagatgtttcgtgaccagttaggggcatttgaagtcaacggcgacgccgccgaacgcatcatcgcaatcacccgcaatgtattcagctttaatcccaaaatgtacgtcaatgaagaggggctgaaacgcattcgcatgcgcaacagtgaaggcgacataacgcgtaccgagctgtattatgaagtcgaaaatgataccagtgacaccaaccccaccctgcacgatctgttccagttgatctctgtcatccttgccgcttgctctgaaatcaccaaccgacattttaagcgctgggtaaagaatggcggtcaggataactccagcagccagaatacccctttgggccagtttgttgacgctgccaataacgtagctggcgtggtgcgccatattttcgatcgcaccactgataaaaatttattgattgatcatttctacacctatctgcaacccaaaactgtattcactatgacaccgatagctgaactcaattacgtgaacagtggagctgagcgcacaattattctggcgttcgagatggatttggtacaagagttgccagaagtcatgctgcttcgtttattaaccggcacgcacaacaaagtgattggacttagcgccaccagtggttttagccacaccaaaaacggtaacttcaatcgtcactttctggcgcgctatagccgtgaccttgggtatcgggttgtagaacgccaaaagacagatatcgatacgctcagagcactacgcgggttgagagccagtatccgcaacgtcgacttcagggtgttcgatgataatcagttaaaattgaccgatatctaccaaaattgtgaaatctatcgcaggacatatgacaactttttcgacgcgttgaagaaaccgctggaatacgtactgaaaaacacctataaacagcgtcagtgcatgcgggagctggaagcgttattgcttgccgcctgggagggtaaaaacagtctgattttgtccctttcagggacatttaaacgggcctttatcagtgcctggcgcactcatcaatcagcctggcgtcagcagtatggtatgcactcacggtgcgatgaaaaaacagatataaataagaaacatgaccagatcctgacatttactccattcaaagggcgtcacaccgtccatttggtcttttttgattcatcactggctaatgtcgaagatatcaggcaagaaacctatcttcagaacagcaataccgtactggtatttatgagtagctacaaaagtgcaggcaccggcctcaactactttgttaaataccatgacggtgatattaatgatatcaatgccccacatctggatgtcgattttgaacgcttagtgctcatcaattccccgttttacagcgaagtaaaggacaacagtggcaacctcaatacattacctaactacgttactgtgcttaaacactacgccgatgacgatattaacgtccataggctggccgatttcagcgttaatttcgcccatggtgaaaactatcgtttgttaatggccgaacatgatatgagtctattcaaagtcgtcgtgcaggccgtaggacgggtcgagcgtcgtgacacgctattgaaaactgaaatctttttaccccgcgatgtgttccgtaatgttgcattccaatttgcagctctcagtgaagatagaggtaatgaggtagtatcagaaagcatgtccttgcttaaccaccgtctcatggaggagtgtgagaaactgagtcagagtcagtcatttagtgatgcagaacagcgacatgcgtttgaacaggccatcgtagaaaatggtcgccgcattgatgcaattcataagagagtcctgaaaaaagactggataaatcaggtacgtgccggcaaccttgaatatcttgaattgtgtaatttattccgcgattctgactcctttaccgatccccagcgttggctggaaaaacttcaggctaattccttgtatgctgccaatcggcaaatgcaatttatccaccactccctgtttatcgatcgccaacaagggaatcaaatgattttactttgccacaaacgtggcccggatggacttgttcacagagactattccgccctgtcggatttcgctggcggcgcaagagagtaccgaccagaactcaccctctttccgcagtatagaaacgatgtcgattttacccccggcaacctggtcggtgagttgattcgtgaatgtaacaacatccaggaaacggcattcaaaaaatgggtacccaaccccaggctggttccgttgctcaaaggcaatgtcggtgaatatctttttgataaggtgttaaaacattacagggtgacacctcttaccgaccagcaggtgttcgggcgccttgctccgttggtctatgagttttttgaccgctttattgaagtgggtgacgatctgctctgcatcgacgttaagcgctggtcgacgcaactggacgatttaacgcgggcagaaaacacacttgagaaaagcaaaaacaagattcgtcagatccgcaatattgccagccaaaaggcggatacagatgggcagaaacagatccttgcagcactgtcaggtcgctatgagcgcattcgatttgtctatctgaacgtcgcctacagccagaatcccaataatctgatgtggcaggataacgtggatcacacaatccattaccttaacctgttgcaaaccgactaccagtattatcagcccaaaaatcgagagagcggacgtgctcagggaatctcgaaactgcgcatggctctggacattaacccaatgttactaaccctgttgggtgtggaaaagctgctgactaaaggaaaaatctcatga

SEQ ID NO: 9881 - DNA, 477 bp, Escherichia coli
gtggacgtgacggcgctggatgacgatgagataatgcagcactgttttatgggggcactgacgctgcttatgaaacacagctgcagctgtgacatcatgctgcagatggacaggcgggttcagctgaaacagagttcgctgaatgaagaactggtgcaggccctgttctactatctgctgaacggcagtgaacatgtgacggtaaggtttttgcaggcgctggcgcagcggctgtcacagcacgagggcaacataatgacactggctgaacaacttaagcagaaaggggaagtcaagggatttgcgcgtggcaagcttgaaggtaaactcgaaggcagaatggaagggcgactagaaggacaactggaaggcaaacaggaaaccgcacgtaatatgctgaattccgggataagtcggaatatgctccaagagcttaccagcattgcagaagaagagcttaacatgctgaagtactga

SEQ ID NO: 9882 - DNA, 246 bp, Escherichia coli
gtggatcaggatctgaaacagtatgcgtgtgatgcgctgttcagcatgaagaccgtcagcggtgagaagggggatatttattgcctcgcgaaacaccagagcacggaaaacgcatttatagcgttcaggatgctcagatatgcggtggcagcgatgcagcgtcattttgaacagcatcatgagctgtcgctggtgatcccgctgttgttctatcacggagagcggagccgtatccgtacagcatga

SEQ ID NO: 9883 - DNA, 126 bp, Escherichia coli
atgacggtgagcagaaaagagaaaaatatgcccacgccgcatgatgccgccttcagggcatttatggcctcagcggaggtggcccgtgattttgttgagctgcatcttccgacggaataccggtag

SEQ ID NO: 9884 - DNA, 459 bp, Escherichia coli
atgaaaatatactggacaagaaaaagcattcctgaactttcagcacttccaccttcattaagaaagaaaaattttactgacgcatataatgctgcatcttctcatatcgaatactggataggtgctggcgtctcatttatctcgatgatgattttattcagagtatatgacttttttttacccgcccaagatactttcccgggtgatatcatcagaagtttatgtgttatgtgtccatccatattaatctggtttcagttttcggtatatgtcatgaggaaatattacaggcatattctggtgcgaggaaaggaaaccgaaactatttcagaaaggttgatacgtgaggctgatacacgagaatatgaactatggcgtccggtccgtcgctttttctccattctttttctcattgttctattagtttgcattcattcactgataacaactataaaataa

SEQ ID NO: 9885 - DNA, 207 bp, Escherichia coli
atggctaccccagtttcactgatggatgaccagatggtcgacatggcatttatcactcaactgaacggcctgacagataagtggttttacaggctcatcagggatggggcctttccggctcccatcaagctgggccgcagctcccgctggctgaaaagtgaagtggaagcctggctacaggcgcgtattgcacagccccgcccgtaa

SEQ ID NO: 9886 - DNA, 348 bp, Escherichia coli
atgtctgaaatcacagtctcccgtccggaagtggtcaacggacatacggacgttatctgctcaacctcagtcagccacattctggctgtacgaaagagtacactgttgcaaatcgacatacttatccggcaactggctgaaatctcagcaatgacagaaagtattggcggtaaaaccgcactggactgggccatgaaacaggattttcgctgcggctgctggctcatggagaaacctgaaacggcaatgaaagccattacccgcaaccttgaccgtgaaatctggcgtgacctgatgcaacgctccgggatgctgtcattaatggatgcgcagacccgtgatacatga

SEQ ID NO: 9887 - DNA, 444 bp, Escherichia coli
atgagcacatttgaacaactgcaccagaataaggatgaggtgtttgagcggggagtgattaacgtcttcaggggactgagctggaattataaaaccaactctccctgtaaatttggcagtaaaattatcgtcaacaatctggtgagatggggccggtggggatttcatcttatcaccggaccacagactgaccgggttgccgacctggaaaggatgctgcatctcttcagtggcatccccactcccgacaaccgggaaaatatcataattcgtctggatgagcatatccggtctgttcagggtaaagagtactatgaagacgaaatgtttatcattaaatactttaagaagggatctgcacacatcactttcaaaaggctggaactgattgacagaattaacgatataatagtcaggcactttccttctgtgctctcagcctga

SEQ ID NO: 9888 - DNA, 567 bp, Escherichia coli
atgtatacagaatcaaatgttaagctttcctgtaacgccctctggcaaaagtgtgtccttgcaactctgtatcgggctgcagccacacatcctgaaattaaattattacaatttaaattaataccagggcagggtattaataaggccattccctctctgatggctgattttactggtgaactgcatagactcatttctgaatatttgcagtgtaagcgacgtaaagatcaatctgttgagcccacccctttatattatctctggagtagggaagctgtggctaacgataccactccttatcttatggtgctgctacttaataacgatgtctggtgtaagagtcgtgaggtggtggttctcagaaatctgattgagcaggcgtggggaaaagtattgggtgaagataactccattacacatctggttgtgtatcctgaagtgctgtcgttggtatttgatgcagctaacacatacaacgctgagcctggtgtactggaacagacagcccgggcttacattgaatcacatggtgccattgaacgtcatcttgggtgtagtgacttttaa

SEQ ID NO: 9889 - DNA, 792 bp, Escherichia coli; identical to SEQ ID NO: 9021

SEQ ID NO: 9890 - DNA, 207 bp, Escherichia coli
atgaccaccccagtttcgctgatggatgaccagatggtcgatatgacgtttatcactcaactgaccggcctgaccgataagtggttttacaagctcatcaaggatggggcctttccggctcccatcaaactcggccgcagctcccgctggctgaaaagtgaagtggaagcctggctgcaggcgcgtattgcacagtcccgtccgtaa

SEQ ID NO: 9891 - DNA, 786 bp, Escherichia coli
ttgaattcaaaaaaggtttgttgtatatatgtattattctcgctgcttgcaggatgtgtctctgaatctcttattgatgaaaagaagaaaaaagctcaaaccacacaaagtaattttaataaaaacgctccgcagcaactaacagacaaagacttatttggtaatgaaaccacactagccgtatccgaggaggatattcaagctgcgcttgatggagatgagttccgcgttccccttaattcacctgtaatacttgttcaatccggcaaccgcgcaccggaaaccattatgcaggaggagatgcgaaaatattatactgtttccacattctctggtatcccggacagacaaaagcctctgacttgtaacaaaaacaaagataaaaatgagaacgaggatgttgccagtgctgaaaatatgaactggatgcaggcattacgttttgtggcggcaaaaggccatcagaaagcgattattgtttaccaggatacgttgcagacaggaaaatatgacactgcactgaaatcaacagtatggtccgattataaaaatgaaaaactgactaacacaatctcactgcgctatctggtgcgattcacgctggtggatgtagctacaggtgagtgggctgcctggtcgccggtgaattatgaatataaagtgcttccaccatttcccggcaagaatgaagccagtacgactgatatgacagagcagcaaatcatacaacttaagcaaaagacctataaagcgatggtaaaagatttggttaaccgctatcaataa

SEQ ID NO: 9892 - DNA, 369 bp, Escherichia coli
atgcttcatactaccaatcccgttatcaaacacaaagccggtttgctcaatctggctgaagaactcagcaacgtatcaaaagcctgtaaaatcatgggcgtttcgcgtgatacgttttatcgttaccacgaactggccgatgaaagcggtgtggatgcgctgattaatcgtagtcgccggctcctaaccttaagaaccgtaccgatgaggcaactgaacaggctgttgttgattacgccgtcgctttcccggcacacggtcagcaccggaccagcaacgagctgcgtaaacagggcgtttttatctccggcagtggtgtccgttctgcctggttacgccataaccttgagaatttcaaaaaacgtctga

SEQ ID NO: 9893 - DNA, 198 bp, Escherichia coli
atggaaccgctcgcagatgccgttggtctgcggggacatcgcctttgttttcgtgtgttctatatcgtttattgccagataaagctgataatcatgctgctctactttgccacagtactctgtgcctctgtcggtcagtattctcagcatcggcaggccctgagacgcataaaacggcagtacacgatcattcggtaa

SEQ ID NO: 9894 - DNA, 1791 bp, Escherichia coli
atgccggttagtattcgaagaattgaaatcacgaattttcgatcaattcagaaaatagttattgatagtgcgcgactacagattattgttggtaataatgatgctggtaaatcaaatatattaagagctttaaacctcttctttaattcacaaacaaatccaggagaatcttttgatttttcaactgactataatatttatgcggcaaaaaaatattctaaaaaagctagagagataaaaattaaattacttcttgatattccatctagttatcatgcaacaaatggaaatttaattgaatggacgaagtcatggcgctcaggtggattttatgatgagagtatacttgggattaaatcatatagtggccctagaggcggtcgacgaacagaaaagcaagaaattccagctcgttcaaatataagacagttacttaataatgtaaaatatgtttatattcctgcaattaaggataaagggtatattgcaaaattaaggagtgaaatatattttgttgtaaatgctgtgttcaatgagaattttagcgattcaagcaaagcatttgagaagagtatagctgagaatcttcatgagttaacaaaagagattaacgaatctcttggttttaactctgaactttcgcttcctagagatctaagtaatttatttgggaatttagactttctaaatgaaatgaaaatatctcttaatgaacgaggtgatggaatcaaagctcgccacattccattaatattaaaatatattgctgagaaaacaaaaacactacaggcaagaggcaacccaccgtatacatttatatggggctatgaagagccagaaaataaccttgagttaacgtcatcaatcaagcttgccatacagtttaaaactttcgtgccagatcctgtatcacaattatttataactacacattctcctgcattttataatctctcaaaacaagatagatctgttaattgcatttttattgagaaagacttggctgatgtaacctcttgtgatgataaatatgcactgcttgatgacagaatgggggttatggaattgctttcaccctatattgatgaggtaaaatctcgtatagaaaatattgaatccgttggtaaacttggtgatgaaaaagctgtaatgtacgtagagggagccagcgataaaattataattgaaagggcgatacaagttttcataccagaaaggatgaatgacattgaggtaattacaaaagattttggcgcaggaacaaactatgtttgtgacatgttaaaagcttattatcatatccataaacatcatcaaaacaaatataaatgtgttggcattgtagatgcagataaagatggtataaatgtcaaaaaagaacttggtgatattcaagatattggtaaatcagttaaatgctttacattaaaaccaacgcaagatgttctcagtgcaaaaaaagatggttataaaataccaggggttttagagtccaattatcctattgcaatatggaaagaagagttagaagaaaacaatcttgaaagaagagctaatttaaatgaaatgcttacaccagaaaaagttaatgagttaattcaatcagaaatgaaactctctgataatttaaaagacaaagactactcaattaagattgagtatcttatacccaaaaaacgaaagatcccgttagcaaaaaaaatagctcaaatgagcgatgatgattgcagagaatctttgcgttttttagaaaagactttaaaagaggttgaggcgtttttatttacttaa

SEQ ID NO: 9895 - DNA, 732 bp, Escherichia coli
atgaatcaaccaatacacaatgcttactggttatcccgttttgaaagtattctcaacagtgccctggcgcaacaccgtgccgtctcgttaatccgggtggatttacgtttccctgagtatatgcctgccaccatcatggataccgatttagattcagcggtgatttctcgtttttttgcatccctgaaagcaaaaattcaggcttaccagcgacataaacgacgtgccaacaagcgtgtgcgtgcaaccactctgcgttatttctggtgtcgggagtttggcaaggaaaaaggcaggaaacattatcacgtgatattactgctcaacaaagatacctggtgctcgccaggggatttcaccgttccttcttcgctggcgacgctgatacaactggcatggtgtagcgctctgcatcttgagccctggcagggtaatggactggttcatttttccaggcggacgcctttccgtaaaccgacatcatctgatgctcgcccttcttccgatgatacgcctttgtcgggtggatgttctgaaaccaggaaggcttcagacaaaaagccgggtgaagccgctgttctctggatcaagcgtggtgatgtggaagcgatgcagaaagcccagaacagagccagttatctcgtgaagtatgagacgaagcagcatgacggttccgggcaacgtaattatggttgcagtcgtgggccggggcgtcttctggatggcaggtga

SEQ ID NO: 9896 - DNA, 1131 bp, Escherichia coli
atgaccggacgtaaaaacaaatgtgtcagaaaaaattgtaacaatcaggttttctcagtaaaaatggcagtggagaaaagactgtgcagaaaacattatgagaggttttgtgagctcaaaaaaagaagagagcaaaatcctgttcacagattaaatgaagcattgccaagaaaggtagaaggcccaaaaagaaagaggaaattagtaaaagaaagagaaatcattaacagcaggacgaaacataaacaggagcagggaccatctctggctgaacttaataaaaaagttcgtgagatactgaaaaccccggcatggagaacgctggaaacgagaattcgaagaaacggtatcacatttaattcaaaagcagagttagatgcgctttctgaactttatgcaatttattcatgggtttcatattgcaaacgtggcgataattattctgtgtggtttttgaattgtccggatgtaaatataaatcttcatgtgtgcgaatgccggtcttctgaaagcgattgttatctgccatcccgttttattattcttccagctccattaaggcaaaaagtaaaaagaaaatactctgctaattcatctggggtatcaggacataatgattcaaaaagtctttataagacagttttgtctgtttgtggtgggaaaagagaaaccgaattgttcttttattcactgccagtaaagactaatcatcatccttactggattaaaagtggtgtggttaaaagatttcctcctgtttttggtttgttgttttatgaacaggaaagattaacaggaggtgtttttcgttatgtattgataaggttttataatacttttaaggagaatttgttttttgttgagattgtctcgtgctgttttcttgttgagctttttcatgatattgattcgttttttataaatcaacgattaagtaagctggaaagttttatagataagtggagggagggtaaagaaatctggataaaagcatatctacaactgatacataatacattgggaataactgaaacagaaaaactcgtcaatctatataattcattttttactgataaagtggttatctggaatgaatcagtaaaaaaagttaagtggatttatgagaaatag

SEQ ID NO: 9897 - DNA, 279 bp, Escherichia coli
atgaacggactaagccttttggatcaaatttcaattattcacgattatcgccagtcctggaaaaccagttacagcctggcggatatcctttttctgacgatcaccgccattatcggtggcgctgaaggatgggaagaaattgctgattttggtgaggagcatctggaatggttacgcctgtatggtgattttgaaaatggcaccccctcccatcacacgattgcccgagtgatgggaatgatttcagcaaaacaattacagcccctttttatccagtag

SEQ ID NO: 9898 - DNA, 840 bp, Escherichia coli
ttgtctgaaggctctgttgtggcgattgatggtaagtcattacggggtacttacgataaatcgaaacgtaatgccgtgatccatagggtcagtgcttttagcgcagaaaatcgtctggttttggggcaggtgaaaacaggggcaaaatcgaatgagataacggcgatcccggaacggctccagttgctggaattaaaagggtgtctggtcacgctggatgcaatgggttgccagcatataatcgcccgtgaaattctgaaaaagaaagccggttacctgctggcgctgaaaggaaatcagggaaaattagcggaggcgtttgataacgggtactcgccgacaatgtggctgggtgagaggtatgacagttacagcacgcaggaaaaagggcatggacgggaagatacacgatgctgcattgtgagccatgatttaaccgctctgggtgatttagcttatgaatggtcagagctgagcacgataggaatagtgctggcgagcagacaggaaggagaaacagcggtgaaatcagagaagtgtattcttcgctactacataagttcggtgacgcttacggcgaaagaactcctggaagcaacacgagcacactggtcggtagaaaatcaactgcactggcgacttgatatggggatgcgggaagatgaatgccagattgttcgtggagaagcgggagaaaatctggcagtttgtcgacatatcgcgatgaatttactgaccgcagagaatagctttaaagcgggtattaaacgcaagcaaaagcgggcaggacgtaagaatgaatacctttctctaatccttgctggctgcgggccttcatga

SEQ ID NO: 9899 - DNA, 1182 bp, Escherichia coli
atgaaagacgttgtgattgtcggggcgttacggacacctatcggctgctttcgtggtgcgttagcgggtcattccgccgtggaacttggcagcctggtcgtgaaagcattaatagaacgtaccggtgtttctgcatatgcggtggatgaagtgattcttggtcaggtgttgactgcaggggcagggcagaatccggcaaggcaatcggctattaaaggtggtcttcctaatagcgtttctgcaatcacgattaatgacgtttgcggttccgggcttaaagcactgcatctggctactcaggcgatacagtgtggcgaggctgatattgtcatcgccggtggtcaggaaaacatgagtcgcgcaccacatgttctgactgatagccgcaccggtgcacagcttggcaatagccagttggttgacagtcttgtgcacgatgggttgtgggatgccttcaatgattatcatattggtgtcaccgccgaaaatctggctcgcgaatatggcatcagccgtcagttgcaggatgcttacgcacttagctcgcaacaaaaagcgcgagcggcgattgacgccggacgatttaaagatgagatcgtcccggtaatgacccaaagtaacggtcagacgttggttgttgataccgatgaacagccacgcactgacgccagtgcagaaggcttagcccgtttaaatccttcatttgatagtctcggctctgtgacagcgggtaatgcatcatccataaacgatggcgcagctgcagtaatgatgatgagcgaagccaaagcacgagcgttgaatttacccgtgctggcccgcatccgcgcatttgccagtgttggtgtagatccggcattgatgggaattgcgccggtgtatgcgacccgccgttgcctggagcgtgttggctggcagttggctgatgtcgatcttatcgaggctaatgaagcgtttgctgcacaggcgctttcggttggcaagatgcttgaatgggatgagcgtcgggtcaatgtcaatggtggcgcgatcgcactcggtcacccaataggcgcttccggttgccgaatcctcgtttctctggttcatgaaatggtgaaacgtaatgcccgcaaaggactggctacgctttgtatcggcgggggccagggcgtggcattgaccattgaacgtgacgaatag

SEQ ID NO: 9900 - DNA, 633 bp, Escherichia coli
atggggctttgtagtcgttataaaagtcttacatgcaatagttgctcaatgcattgccaaataatgccagaagagtcaccgcgtttgcagtattgcgcaaactcgtgtttttgtatgtggcccgaagaaagttcatattttaatcgtggtgtggtggaaggtattttaacaaaaaaccacaatgcgagattaagcggatatatttttgtcgatttttcagtaagttttttacgtctattccttgaaaaagactggattgactatcttgcaagtactgacatggggattgttttagtcagcgaccgcaatatgcaatcgttagctaactactggcgaaaacacaactctgcaatatctgctgtcatatataatgatgatggtcttgatgttgccaatgaaaagatcagacaactatttattggtcgttatttatcatttaccagagggaacacattaactcagatggaattcaccataatgggatatatggtttctggttataatccatatcagattgctgaagttctggatatggatatccgtagcatctacgcgtacaagcaacgaatcgaaaagagaatgggtggtaaaataaacgagttatttattcgttcacattcggtccaacattga

SEQ ID NO: 9901 - DNA, 552 bp, Escherichia coli
atgagagccacgacgggtatccagcttctccttgacggctttgaaggaacggaacagcgcccagcctttcggatcgaacacgatgatattcaccacgccgctggcgttcagcgcgtaggcttcgatatcgtcggtcgggtcatacgtggacttgtcacgcttgctccactccgtgccgccggactgcgtgatgttattctcctcactgcggcccatatccacctcaaccggatcgaaggcttcaccggtcatggtgtatttgcccttaagcacggcagaaactgcctgcatctcttcgacctgagcaatggccagctcttcgtcacgcatgttctgcatgatgatgcgacggcggcggtaagccgggtccgccagattctgcggatcttcatccggcaggcgacgcagggtcatctgcggattcacttcatgcttcggcttgacatatcccggcgtaaattcagaggtggagccgccacgggaacggataacctcaccggaaacaatcggcgaaacgtacagcgccatgtttaccagtcccggaatttgtga

SEQ ID NO: 9902 - DNA, 333 bp, Escherichia coli
atgacgagcaaagaaacctttacccattaccagccgcagggcaacagtgacccggctcataccgcaaccgcgcccggcgtattgagtgcgaaagcgcctgcaatgaccccgctgatgctggacacctccagccgtaagctggttgcgtgggatggcaccaccgacggtgctgccgttggcattcttgcggttgctgctgaccagaccagcaccacgctgacgttctacaagtccggcacgttccgttatgaggatgtgctctggccggaggctgccagcgacgagacgaaaaaacggaccgcgtttgccggaacggcaatcagcatcgtttaa

SEQ ID NO: 9903 - DNA, 207 bp, Escherichia coli
atgacgcgacaggaagaacttgccgctgcccgtgcggcactgcatgacctgatgacaggtaaacgggtggcaacagtacagaaagacggacgaagggtggagtttacggccacttccgtgtctgacctgaaaaaatacattgctgagctggaagtgcagaccggcatgacacagcgacgcaggggacctgcaggattttatgtatga

SEQ ID NO: 9904 - DNA, 1926 bp, Escherichia coli
gtgaatatatcgaacagtcagattgatattctgcggcgtgatgtacgcgccgggctgcgagccctgttcaggccggagccacagactgccgttgaatgggcggatgccagttactatctcccgaaagaatccgcataccaggaagggcgctgggaaacactgccctttcagcgggccatcatgaatgcgatgggcagcgactacatccgtgaggtgaatgtggtgaagtctgcccgtgtcggttattccaaaatgctgctgggtgtttatgcctacttcatagagcataagcagcgtaacacccttatctggttgccgacggatggtgatgccgagaactttatgaaaacccacgttgagccgactattcgtgatattccgtcgctgctggcgctggccccgtggtatggcaaaaagcaccgggataacacgctcaccatgaagcgtttcaccaatgggcgtggtttctggtgcctgggcggtaaagcggcaaaaaactaccgtgaaaagtcagtggatgtggcgggttatgatgaacttgctgcctttgatgatgatattgaacaggaaggctctccgacgttcctgggtgacaagcgtattgaaggctcggtctggccaaagtccatccgtggctccacgcccaaagtgagaggcacctgtcagattgagcgtgcagccagtgaatccccgcattttatgcgttttcatgttgcctgcccgcactgtggggaggagcagtaccttaaatttggcgataaagagacgccgtttggcctcaaatggacgccggatgatccctccagcgtgttttatctctgcgagcataatgcctgcgtcatccgtcagcaggagctggactttactgatgcccgttatatctgcgaaaagaccgggatctggacccgtgatggcattctctggttttcgtcatccggtgaagagattgagccaccggacagtgtgacctttcacatctggacggcgtacagcccgttcaccacctgggttcagattgtcaaagactggatgaagacgaaaggggatacgggaaaacgtaaaaccttcgtgaacaccacgctcggtgagacatgggaagcgaaaatcggcgaacgtccggatgctgaagtgatggcagagcggaaagagcattattcagcgtccgttcctgaccgtgtggcttacctgaccgccggtatcgactcccagctggatcgctacgaaatgcgcgtatggggatgggggccgggtgaggaaagctggctgattgaccggcagattattatgggccgccacgacgatgaacagacgctgctgcgtgtggatgaggccatcaataaaacctatacccgccggaatggtgcagagatgtcggtatcccgtatctgctgggatactggcgggattgacccgaccattgtgtatgaacgctcgaaaaaacatgggctgttccgggtgatccctattaaaggggcatccgtctacggaaagccggtggccagcatgccacgtaagcgaaacaaaaacggggtttaccttaccgaaatcggtacggataccgcgaaagagcagatttataaccgcttcacactgacgccggaaggggatgaaccgcttcccggtgccgttcacttcccgaataacccggatatttttgatctgaccgaagcgcagcagctgacggctgaagagcaggtcgaaaaatgggtggatggcaggaaaaaaatactgtgggacagcaaaaagcgacgcaatgaggcactcgactgcttcgtttatgcgctggcggcgctgcgcatcagtatttcccgctggcagctggatctcagtgcgctgctggcgagcctgcaggaagaggatggtgcagcaaccaacaagaaaacactggcagattacgcccgtgccttatccggagaggatgaatga

SEQ ID NO: 9905 - DNA, 225 bp, Escherichia coli
gtggtggaaaccgcattctgtactttcgtgctgtcacggatcgcaggtgaaattgccagtattcttgacgggatccctctctcggtacagcggcgttttccggaactggaaaaccgacatgttgatttcctgaaacgggatatcatcaaagccatgaacaaagcagccgcgctggatgaactgataccggggttgctgagtgaatatatcgaacagtcagattga

SEQ ID NO: 9906 - DNA, 582 bp, Escherichia coli
atgaacaactcatggtggcaggaactaatgcattttttcctgcaaggaatgacacttaaacagttgattcatatgctaatcatcctgatcatattgattattgttatgccggtaagcgtaaaagaatggataaacctgcataatccagaaatccttcctcattactggatgtattacatcctgttgttttgcgttagctatgtgcttaacggcgttgttaattccgcttatcacgctgtgactgaaagaattgaggtattcgttgctcagaagcgcaaatctaaagaagaaaaatatgtgcaagatttgtttgattcgttaactcttggagaaagagcgtatttggcattcgctgtagccgctaataaccagctacaaacggaaaagggagctcatgaatcaatttcattgctcaaaaaaggactcctcgttcgaaggcctcctgctgttggatatcctgataccgaccgttttgttattcctgaaagctatagacatgagtgctacattcggtttgccgggaaggcagacagccttatggatgaacttatcgctcaggataagcatggcaaaaacaagtaa

SEQ ID NO: 9907 - DNA, 309 bp, Escherichia coli
atgacggtaatcgtgtacggaaaatcaacatttgcaggaaatgccaaaactcgccgtcatgagcggcgcagaaagctggccatcgagcgtgattccatctgcaacatcatcgattcgatcttcggcacagacagtgaggaacctgttcaggaagacccgagaaagcggttaagcctttctgaaaaagcaatatcactcggaagccttcgctgcaagaaagtagatgaatgcagtggaagtgtttgcctgccaaacgtagctatttacgcggcaggctaccggaaatcaaaacaactgacggcgagatga

SEQ ID NO: 9908 - DNA, 900 bp, Escherichia coli
atgtcccaagaattatctttaacctttaccgaaaacatatattattcaactaaagaacctgtaagcatcaaagatgtgattacctcccttcaagggtgggaggccatcgcaaaacaatcagaaggtgttttgcaggaactgacaggggctaatatccttgatatatcggtgcatgttgcgcgattagaagcaggaagcctttatgaagatattgttattaaactcctctttggtagccaagaagaaatggacaagtttcttgctggcgctcatgcaaagatcggaaatgggaaaatgagaaacgctctcgttggtgctgttgttattggtctggttggatatggcttagttctagcaactaaggctatggctccaagcaacacctcccactttgaagcaaataacaatacaatcatcaatattggtgccggtgaggctaatatttcacctgaccgtcttcaagcaatcatagaaagcacggtaaccaataagaagactcttgccaaaagttccattaagacgcttgccccagctagggcagacgaaggatctacgatggtcataggtacagggggtggtacagtgaccattcccgctgaaaccattaaaaaagccccaactgaagttgtcttcacaccagagtcatatactcaggatcattttgatgttgatgttgaaatccgtgcattagacctcgacaatccagagaaaggttgggctgctgttatccctggattaatagatcgaagagtaaatatggttcttggccccaacgtaaacccatcagattttgcaggtaaatttgctgtacgtgctgatataacaataacgtaccagctcaaatcatcagataaaaaataccaaccgaaagaagtctttataaaagaaataatcaaataa

SEQ ID NO: 9909 - DNA, 708 bp, Escherichia coli
atggttcagaatgaaaaagtgcgcaaagaattcgcccagcggctagcgcaagcctgtaaagaagctggtcttgatgaacatggtaggggaatggccatagcccgtgccctttctctttcgtccaaaggcgttagcaaatggtttaatgctgagtctttaccacgccaggaaaaaatgaatgcgcttgcgaaatttctaaacgttgatgttgtttggcttcagcacggcacttcgttaaatggagcgaatgatgaagatactttttcaattgttggcaaattaaaaaaagggttagtgcgcgtggttggtgaggcaattcttggtgttgatggtgccatcgagatgaccgaagagcgcgatgggtggctcaagatttatagcgatgatccagatgcctttggtcttcgtgtaaaaggagacagcatgtggcccagaataaaatcaggagaatatgtactcattgagcctaacaccaaagtattcccaggtgatgaggtgtttgtcagaaccattgaagggcacaacatgatcaaggttcttggctatgacagagacggagaataccaatttacaagcatcaaccaagaccacaggccaataacgttgccttatcatcaagtagcaaaggtggagtatgtagctggtattctgaagcaatctcgccacctagatgacatcgaggccagggaatggctgaaaagttcatga

SEQ ID NO: 9910 - DNA, 228 bp, Escherichia coli
atgcaaaatcttgatgagccgattaaaggtgtcggcatccctgaagttgcgaaggcttgtggagttagcgaaagggctgtctataagtggctcaaaaacggcttcctccctaagactgagttttttgggaaaacgaaatacgcatcaaaaatcgaagagatttctggtggcaaatatcaagcaagcgaaatgcttgaaataagcaaaaagaaccttctggcagcataa

SEQ ID NO: 9911 - DNA, 675 bp, Escherichia coli
atggcaggcctcaggtccggctggagtgagtgggaagagagtgccacggacagtatgtcgcaggtaaaaagtgctgccacgcagacctttgacggtattgcacagaatatggcagcgatgctgaccggcagcgaacagaactggcgtggtttcacccgttctgtgctgtccatgctgacagagatttttctgaagcaggcgatggtggggatagtcgggagtatcggcagcgccattggcggtgctttcggtggtggtgcgtctgcctccacggggacggccattcaggctgcggcggcgaacttccatttcgcgaccgggggatttacggggacggggggtaaatatgaacctgcggggattgttcatcgcggggagtttgtcttcacgaaggaggcgaccagccggattggtgtcggcaatctgtaccgcctgatgcggggctatgcggaaggtggttatgtcggcggtgccggaagtccggcgcagatgcggcgggcggaaggcattaattttaatcagaacaatcacgtggtgattcagaacgacggccccaacgggcgggcagggccgcagctgatgaaagcggtgtatgagatggcccgcaagggggcacaggatgaactccggctgcagttgcgtgatggcggtatgttatcagggagcggtggatga

SEQ ID NO: 9912 - DNA, 330 bp, Escherichia coli; identical to SEQ ID NO: 8147

SEQ ID NO: 9913 - DNA, 744 bp, Escherichia coli
atgacacagacagaatcagcgattctggcgcatgcccggcggtgtgtgcctgcggagtcgtgcggcttagtggtgagaacgccggagggggagcggtatatcccttgtgtgaatatctctgcagagccggaggcgtattttcgtattgcaccggaagactggctgcgggcagagatgcagggggagattgtggcactggtccacagtcatcccggtgggctgccctggctgagcgaggctgaccggcggctgcagataaaaagcgcactgccctggtggctggtctgccggggtgacattcacaaattccgctgtgtgccacatctgacgggacggcgctttgagcacggggtgacggactgttacacgctgttccgggatgcttatcatctggcggggactgagatgccggattttcatcgcgaggatgactggtggcgtcacggtcagaatctctatctggataatctggaggccacagggctgtatcaggtgccgttgtcagcggcgcagccgggcgatgtgctgctgtgctgttttggttcatcggtgccgaatcatgccgccatttactgtggtgacggcgagctgctgcaccatattcctgaacaactgagtaaacgggagaggtattccgaaaaatggcaacgacgaacgcattctgtctggcgtcaccgccactggcacgcatctgccttcacggggatttgcaacgatttggccgccgcctcagcctgtatgtga

SEQ ID NO: 9914 - DNA, 522 bp, Escherichia coli
atgaacttcagtaagctcctgactattacattttttctaatgtttgcatgtgggatggctaagtcagcaaaattggccgagactatgttgactattaatgccacttttattaatcctggatgtgatattaccgtaccttctttttatgatttgggtacgttaactcccggtagaaaggaacattcccccttatccatagtatggaattgcactgacactcctgtcagaacagcgcttaccgcctcagtaattagaggaaagcttgaggcatctgaagataaattacaattaattataaatggtaataataatagcgatagcaatggttccattctatattttcatggaggtggtaatggtggaagtattataaaaattaatgggagagatcctttctgtcccgatattgttgaaaccacagggattcgcaaatgtgttataacgcctgttactgaggtccatcatgatgatacatttggggtagtctctgcaatacttctttttgagattgtgtattcatag

SEQ ID NO: 9915 - DNA, 693 bp, Escherichia coli
gtgagtaatttgggtaaggcagcactggctgtcctcctttctctgtttttctgccgtcagtccatgggcgcgtttgtgttgaacgggacccgtttcatttatgaagaggggaaaaagaatatctcctttgaagtgacgaacaatacggagaaaacctacggtggccaggtctggattgacaacaccaaccaaagcgatggggtttatatggtgccgcaaccgccattctttaaggtgtctcccaaacagaaacagattatacgcatcatgaatatggacacagctctgccaaaggaccgtgagtccctgttctggcttaacgtccaggaagtgccaccaaaaccgaaagtgaaggatggcgaaggcagcgtattggccattgccatgaacactcgcgtgaaactgatttaccgcccagcatccgttaaggatggtcgtaagaatgcggaaaaactgctgaaactggaacagcgtggcagtgagacttggttgaagaacccaacgccatactacatggctgttgttaacgtaaagcatgacggtaaggatatagccctcagcgataaggtgatgaaagaagtcgcgcaacttaagccgttcagtgacgtgaatctggggaaaaaagtgagtggaataatcagtgtagatgccgtaaatgactggggaggggttcagagttatgaacttcagtaa

SEQ ID NO: 9916 - DNA, 2409 bp, Escherichia coli
atgaagcagcgtcgcctttttaaattatctctgttggcactgagcatgtattctcattttagtgtttcaacagagttgaatctagattttatccaggggaccagtgtaatcccttccattctgaagacagatacaactctgcccgcaggtcaatacgttgtcgatgtactcgtaaacaatgaacgaaccaagcgtgcgaatcttgtcattacagaagaagatgaaacaaatgatagtctatgtctcacccccgaatggctggataatgccggggtgatgatgaaaaaaaacgcttatgatggcgtatttgacaaggaaaaacagtgctatgtcctgactcgtaatccccacactaaagtggattttgattacggtgcacagacattaaagtttaaaattccccaagcgtatttactgagtaaaacagaccctgctcgttgggattatggtgtaaatggtggacgcctgaaatattacggtaactttaataagactgttcataacgattttaatgcgttcggcaacctagatgctgccattaacttgggccgctgggtgttatccagtaacatgaacatttcgcgctctgataacaaaacagagcttacttctagtgacctaacgctttcaacagccatcagtcaggtgcagggcgatttattactgggtaaatctcagacacgcactgaactgttttctgattttaatttttatggtgcagcattacgctccaacagcaatatgcgtccgtgggaatcaaggggatatgcgccggatatctctggtatcgcctccaccccttcacgtataactgtgaaacagaacggatatacagtctattcaagaatggtaccggcgggaccttatcgtctggatgacctgcgtccaatggggaatggagatctggtggtgacagttgaggatgaaagcggtaacaagatcgagcagatctatccggtcaccacactgccgacactgctgcgtcctggtgatttccagtacaacttggcagtgggtaagaagaataacagcaacgagttggacaaggcgtttcattcagacagtggtctgttctggctgggtagtctggactacggcttctctacgacaacgctgaattcggcattcattctgaacgttgactatcaggctggtggcttgggggttacccagatgttgggcggattgggggcattatcgctcagtgctaatgtgtcaaaggccagctatgacgatggcgaagtgaaaactggagaaagtttcagtgccaaatatgccaagagtttctctgccagaactgatctacagttactgacataccgttatcagagtaaagggtatgtggagtttgttgactttaaccctgtggatagctggcgcaggcgtggtggtaatcagaaatcccgctatgaggcacgtctgtcgcaccgttttgacgacacatatctgagcggctcatactggcgccaagattactggatacgtgaggggcatgacaccggcggtacactctcgttgagtacctcctttgacggtgtctccgtttttctgaacggaacacattcgaggtatgtctggtcggataaggcggattactcagtttcactgaatctgagtgtgccatttgatctgaaaggaacccgcaattacagcagtaacagtgtgggctatacccgtaccagtggtacgactttcaacagcagtgtttctgccatgccgactgaccgctttaattacagtctgagtgcaaatgctggttcgaaaggaaaccgtggtgcatcagcatcggccagttatgcctttgatgctattcagaccaacatgggggtgtcacgttcctacagtaagcatggaaacagtcagaccagcttctcaggcagtatttcgggttcggtgctgggtacagcagaaacaggcccgctctttaccaaagaatcgtctggcactgtgggaattattagcattccgggtgttaaaggggtttctgttaatagctccatgccgacgaacagcagaggtaatacagtagtgtggttatctgaatactcagagaacagtatcaatatcaacatggataacgtgccggacaacatggaattcgaaaccacatcctacaaagttgttccgacagaaggagcgatggtttaccgcaaattcggcttcgagaatgtgctgcgctacatcctgcgcgtaaaagatgcacaaggtaactacctaactggcggtgatgcaaaaacagaacaggggctgaatgccggatttatttcaaacaatggtgttctgctgatgaacatgctggctgagccgacatctgtcagcgtggatacgggagacggaaaacagtgtcgtttctccatggcaggactgaaggccaacacgaataaagttcaggaggttcgttgtgagtaa

SEQ ID NO: 9917 - DNA, 528 bp, Escherichia coli
atgaaaaaattaatgattgcttctgcaatggcaatgatcatggctacgggttcagcaatggctggtgtcaagcaagcttctcagggggaggtacagtttgttggtgctgtagctgcaacaacttgtgacgttattgtttctgccgatggcgctgtaaataatcaagttcagtttggcgttgtgaatgtaaacgagactaaaaataaagactttaaaatttctctcaaagatccgagctgtattaatggttccaataaagcaacgtttgagtggtattctccagctcttggcgataccggcattggcaaccagtcaggcaccgcaactggttcttatgtagaattgaaagccaaatctggtgtaactaacaatccttctcgtattgatgctattactgcactgaacaacagcgttgattttaccgttactcaggcagtgatgggctttgaatatacagctacgcttcatgctgacaatactccgggctcttttgaaactgctgcttcctacaccgttgtgtatgagtaa

SEQ ID NO: 9918 - DNA, 216 bp, Escherichia coli
atgaaatccatggataagttaacaacgggcattgcctacggcacctccgcaggcagtgctggctactggtttttacagctgctcgataaagtcacgccctcacagtgggcagcaataggtgtgctgggtagcttggtatttggcttgctgacgtacctgacaaacctttatttcaagattaaagaagataagcgcaaggctgcgagaggtgaataa

SEQ ID NO: 9919 - DNA, 726 bp, Escherichia coli
atgccatacatatgttctatcattttggtgttgaactcgtttgatgtccgaattggtaaagaagatattttgtttaaaaaaggaagtgctgttctcattgattacaatttaaaagattttttttcatcaaatatagatcatgcaatgatcgtagatgttgaagagaaaacagttaatgatttctttaaaagcaacacactctcacctttttctgtaagaaggttttatccggcatacttgatggtggaatgtgaagatttttcattgttaaagaacttgattgcatgcttgaattgtgatggcagaactgtggattttgttagaaatcaaatatcacttgcatgtcttgctatcttatcttcagagaaaatagtgcaaagttttttatttggatgtcttaatagtttaggaagtaaagttaaggctattattcacacggatatatctgcagcatggagactttgtgatatatcttcaagactgtatctgagtgaaagtctgttaaaaagaaaattaaagcacgaaggcttatcatttagtaagttaattcttgaagagcgaatggtgatggcggaaaggttattaagctacaatttatattctgttggaaaagttgctgagatatgcggttatgaaaacacgtcatattttgtaagtgttttcagaagatattttggtgttcctccccatcaatattcatcaagactttttttagaaaagacatga

SEQ ID NO: 9920 - DNA, 960 bp, Escherichia coli
atgataaaaaaacctgtgattggaatcagcggttgtctggccggttctgctgttcgttttgatggtggtcacaaaagagctgactttttaatggacaaattagtggaatgggtaacattcagaccagtatgtccggaaatggctatagggctgccagttccgcgtcctgctctacgtcttgtgcgctcgacgcaaggaaatatacggatgtgtttcagccacgaccagaatgaggatgtgacagagagaatgacagagtttagtcgttcttatatggacaaattaaaggatgtatcggggtttgtggtttgtgctaaatctcccagctgtggcatggagcgcgtgcgtgtctatgatgaaaatggtaatcgaggtcgtaaagatggagtgggactatttacgagcactttgatggaaaagttttcctggctaccggttgaagaggatgggcgattacatgatccagtgcttcgtgagaattttgttgaaagagtttttgctttgcatgagctcaatcacctttacaaggagaaattatcaagaagagagttattagcttttcatagtcgttataagcttcagttgttggcgcatagtcaggcaggctataaagatatgggaccatttgtggctgcaatacacgagtgggcggaccttgaatcatactttgaggtgtatcgtgataagctgatggcgattctcagaaaacctgcatcacgtaaaaatcacacgaatgtgatgatgcatatacaggggtattttagtaactacttaagtacacgccagcgtaaagagttgagcgaggttatacttaactatcgttctggcacattacctcttcttgcgccgttgactctgctgaagcattatctgggtgagtatcctaatgattacttgcttacacagaattacttcgatccctatccggacgaactggctctaagactgatggtaaattaa

SEQ ID NO: 9921 - DNA, 525 bp, Escherichia coli
atgaagttatggcctgtgttgactggcattgcactctctttcactcttatagcatgtaaggccccgacaccacctaaaggtgtgcagccgattacaaattttgacgccaaccgctacctcggaaagtggtatgaaatagctcgcctcgagaaccggttcgaacgtggtctggaacaggtcagcgctacttatggaaaacggaacgacggagggattcgtgtacttaaccgtggatacgatccaacgaaaaataaatggagcgagagcgaaggtaaagcatactttactggagatactaaaactgcagcgttgaaggtttcgttttttggccccttctatggtggctataatgtaatcaaactggatgatgagtataagtatgctcttgtcagtggtccgaacagagaatacctatggattctggcaaggaccccaactattccagataaagtaaaagcagactatgtgcgaaccgctcaaaagttgggattcaatgtcaatgaattattatgggttaaacaataa

SEQ ID NO: 9922 - DNA, 378 bp, Escherichia coli
atgcgtgatattcagatggttcttgagcgttggggagcgtgggcggctaataatcatgaagatgtgacctggtcgtccattgccgccggttttaagggattaattccttcaaaagtaaaatctcgcccacaatgttgtgacgatgacgcgatgatcatttgcgggtgcatggcccgtctgaaaaagaacaacagcgatttgcatgatttattggtggactattatgtcggcggcatgacttttatggcgcttgcacgtaagcatgggcgatctgattgttgggttggcaggatgctccagaaagctgagggcgtagtggagggtatgctgatggtgttggatctccgattggagatggatgctgattgttcgaaataa

SEQ ID NO: 9923 - DNA, 861 bp, Escherichia coli
atgaaaagaatagcatttattattttattgttgttttcattttctagcatcgcagaactatatatgactgttaatatcggagatgaaaataaaacaacagcatataattcaattgaagataattactatcttactttacattcagagcaagtcaccgcctcttcagaatcaagtggggggacagcctctccatcagcacaaggaaagctaactttatttgatccattaacaaataatatattaaacaatgacattgaggcaactttacaactaatttatcgagttaaaaatagagacacaggaactatagttgcagacagacgtccttttattgactccagaggatatctgtcttcatcagtatccccatggtcagaggaccagggcaattatgagacaattgcagaatgtacgttagatcttggtaaatatacacattatgttggcgaattccaggtgtctggaacaataaaacactttgtaagatatactgggcaaaatcaatcaggtttatctacgaaagatatttcatgccaagttgaaggtaccatctcatttaatcagccagcatcaatcactttgtcaaaaaatattattaatgttcaatgcatacgaggaggaaactgtgttacagaacctattcagcatataatatctggcacaggagctttaagcttaattattgatggagatggccctcttgttattcaatcaaacggcaattcatttcaagttacacctgggcaacgtatcgaactaggaatggcacagtcaggaactattacatacataattcaagaaaagccaagtttaactttaccacaacaatatcgaatagtatatcaactagagtcaatatga

SEQ ID NO: 9924 - DNA, 741 bp, Escherichia coli
atgaaaaagatttttgatgtttcagtaattgccattgtctgtgcatttgcagcaaatgcaggagcaaaggaaggtaaaagcggtttttatctgaccggtaaagccggtgcctctgtggtgtcactttcagaccagcgtttcctgtcaggagatgaggaagaaacgtcaaagtataaaggcggcgatgaccatgatacagtattcagtggcggtattgcggccggttatgatttttatccgcagttcagtattccggttcgtacggaactggagttttacgctcgtggaaaagctgattcgaagtataaccttgataaagaaagctggtcaggtggttactggcgtgatgacctgaagaatgaggtgtcagtcaacactctgatgctgaatgcgtactatgacttccggaacgacagcgcattcacaccatgggtatccgcagggattggctacgccagaattcatcagaaaacaaccggtatcagcacctgggattacgggtacggatacagtggtcgtgaatcattgtcacgctcaggctctgctgataacttcgcatggagccttggcgcaggtgtccgctatgacgtaaccccggatatcgctctggacctcagctatcgctatcttgatgcgggtgacagcagtgtgagttataaggacgagtggggcgataaatataaatcagaagttgatgttaaaagtcatgacatcatgcttggtgtgacttataacttctga

SEQ ID NO: 9925 - DNA, 546 bp, Escherichia coli
atgaatatcagaaaactgttttgtccgggcaacacaccccggattttattgtttttattcttttttgttgtttctgtaataaccacaattgcatgcggatatactgagaagaatgccacagggaatgtgttgcttctgtttctccttctgctccttgcacacagaaatactctcacatccactacagctctgttatttctgttctgttgtacactgtatgcgcctgccggtatgacgtacggtaaaatcaacaacagttttattgtcgcgttgctgcagaccacaactgatgaggctgcggagttttccgggatgattcctgtttatcattttctggtcagtgccgcgattctggtattcatggtgattttctggcgaacacaccaccgcggtcgccgtaactggctggcactgctgttattcgtattatgctctgtaaacagctggccgttacggatggttaaaggaacctttgtgggaacaactgacacattgcgtgaaatgcaacattataaacaactgagtcagcgtaagcgtacagcctga

SEQ ID NO: 9926 - DNA, 1539 bp, Escherichia coli
atgaacgacatctcttctgacgacatcttcctgctgaaacagcgcctggccgaacaggaagcgctgatccacgccctgcaggaaaagctgagcaaccgggagcgcgaaatagaccatctgcaggcgcagctggataaactccgccggatgaacttcggcagtcgttccgaaaaagtctcccgccgtatcgcacaaatggaagccgatctgaaccggcttcagaaagagagcgatacgctgactggtagggtgtatgacccggctgtacagcgtccgttgcgtcagacccgcacccgtaagccgttccctgaatcactaccccgtgacgaaaagcgactgttgcctgcggcgccgtgctgcccgaactgcggcggttcactgagctatctgggcgaggataccgccgaacagctggagttgatgcgtagcgccttccgggttatccggacggtacgggaaaaacatgcctgtactcagtgcgatgccatcgtgcaggcacctgcaccttcgcggcccatcgagcggggtatcgccggaccggggctgctggcccgcgtgctgacctcgaagtatgcagagcacaccccgctgtatcgccagtcagaaatatacggccggcaaggtgtggagctgagccgttcactgctgtcgggctgggtggatgcatgctgccggctgctgtctccgctggaagaggcgcttcatggctatgtcatgactgacggcaaactccatgccgatgataccccggtccaggtactgctgccgggtaataagaagacgaagaccgggcggttgtgggcgtatgttcgtgatgaccgcaatgccgggtcagcgttggcacctgcagtgtggttcgcttacagcccggacaggaaaggcatccatccgcagactcatcttgcttgcttcagcggtgtgctgcaagcggatgcgtacgccgggttcaacgagctgtatcgcaatggtcggataacggaagctgcctgctgggctcatgcccgccgaaagatccacgatgtgcacgtccgcatcccgtcagcactgacggaagaagccctggagcagatcggtcagttgtacgccatagaggcggatataaggggaatgtcggcagagcagcggcttgctgaacgtcagcgaaaaacgaaaccgctgttgaaatccctggaaagctggttgcgtgaaaagatgaagaccctgtcgcgacactcagagttggcgaaggcgttcgcgtacgcacttaaccagtggccggcactgacgtactatgcgaacgatggctgggtggaaatcgacaacaacatcgctgaaaatgccctgcgggcggtcagtctgggtcgtaaaaacttcctgttcttcggctctgaccatggtggtgagcggggagcgctactgtacagcctgatcgggacgtgcaaactgaatgacgtggatccagaaagctaccttcgccatgtgcttggcgtcatagcagactggccggtcaaccgggtcagcgaactgcttccgtggcgcatagcactgccagctgaataa

SEQ ID NO: 9927 - DNA, 195 bp, Escherichia coli
atggatgatcaattggaccaacttttggttacccgtgaaattcaagatgaaataaaaccaaagattcaagacaaaatagatgaactttctaaaaatttattcaacactataaaccaaaccattaaggataactttgatgatatttttcggcaacagtcagagaatatgagcaattattatgagttcgtcgactga

SEQ ID NO: 9928 - DNA, 888 bp, Escherichia coli
atgatggcgaaacgggaaaactataacgatctctatctgtttatgcaggtcgtgcgagaagggagttttaccgccgccgcgcagaggcttggcctggcgcagtcaggaattagccgtgcagtgcgcgagctggaagagcgactgggcgtgcagcttctggtacgcaccacgcgcaagttatcgctcacccatgccggcgagttactctatcgaaacgtcgaatctggatttgacgccttagatatggggcttgccacgctggcccattatcgccatacaccatcgggtacggtccgaattaatgcgagccagcacgccattgataaagtgctgctgccgaagctggcggtgtttaaacaacgatacccggatattcggctggagctcatcagcgaaagccggtttgtcgatattattactgagcgcttcgatgccggtatacgtctgggctcggaagtggatagcggtatggttgcggtgcgcatttcgcccgatatggagatggctgttgtcggcacgcccgggcactttcagcgctacggatttccacaaacccccaccgatttagtaggtcatccctgcatcgcttaccagttcggcgacggcagtctgtatgcctgggaactcaatcaggacggtaaaaagatcacccatcagcctcagggacaatgggcctttgctgacagttatatggaagccaaagccgcaaggctaggtctggggctggcttatgttccggaggaattagtgtctgatgatatagaacagggggcgctaatcagagttttgcaatgctacagccaacgcctggagggttcatatatctattatccgcaccgcaatgtgtcacccgccctacgagcggttatcgatacattgagaatttaa

SEQ ID NO: 9929 - DNA, 1059 bp, Escherichia coli
atgagttacgctgatacaaccaatccgaacgcgcccgtttcgcaggtcgagaaatgggataaaacttttgctgagagcacgaaagttgatcaccgtaaggtgacctttccgaaccggtacgggatcaccttagtcggggatctctatataccgaaggatcgtggcgatcgcaagctggcagcaattgctgttagtggccccttcggggcggtgaaagagcaatccagtggcctgtatgcgcagacgctggctgaacgggggtttgtcactctggcttttgacccttcatacacgggtgaaagcggcggctacccgcgaaacgtcgcatctccggatatcaacaccgaggatttcagcgcggcggttgatttcttaggcctgcaaaaagaggtggatcgcaaccgtatcgggttgctcggcatctgcggatggggtggcatggccttaaacgacgccgcgatggacacacgtgtcaaggcggtggcgagcagcgtgatgtatgacatgagccgtgcaatggggcatggcgtgggcgatggcaaagaccgctataccactgccgatcgtcgtgccgtattgcagtatttgaacatgcagcgctggaaggatgctgaaaatggcgctttcgcgccaggcgggcatgatatttacgttgatgagaagggcaacgtcaccgcttccgatcgtattttaccggaaactttgccagcgaattctaatccggtattgaaagagttctttgattattaccgcatgccgcgtggtttccatgcgcgttcggtcaactcaaccagtgcctggaatgcaaccatgccgctgtcatttatgaatatgccgctgctgagttacgctaatgaagttactatccctacactcatcgtgaccggtgaaaaagcccattcacgctattttgctgaagatgcctttaaggcaatcggcagcaaagagaaagagttagtgattgtccccgaggcaaaccatgttgatctgtacgacaacgttgcgggtaagatcccatttgccaaatttgagcaatttttcaaggcaaacttaagataa

SEQ ID NO: 9930 - DNA, 1194 bp, Escherichia coli
atgtccactgtaagtctcaaacaattatacggaaaaacgcatgcatactggagcggcgtattcgccatgacgctttgcgtgtttgtgctgatcgcttctgagtttatgccagtcagcctgcttacgctcattgcccatgatttgcacgttaccgaagggctggcagggcaaggaattgctgtctctggtgcgctggcggtgcttaccagtctgactatctcccgtattaccggagacctgaatcgaaaatatcttctgctggggctgacggccttaatggccatatcgggaatagttatcaccatagcacctgactatccggtttatatgctggggagggccctgattggtatcgtcattggagggttctggtcaatgtcggctgcaaccgccattcggctcgtgccgaagcagcatgtcccccgcgcactggcaatttttaacggcggaaacgcactggccaccgttgtggcagcgccacttggtagctatctggggacaaccatcggctggcgtggggcctttttatgtctggtcccccttgcgatagctgcgttcatctggcaatgggtcagtctgcctccgatggaaagtgataaaacacaaaagccacagagatctgtgcttcgcctgttcagcgttgccatcgtaccaacgggactgctggcctgcggactcttctttatgggacagtttgctttatttacctacgtgcgcccctttctggagagcgtcaccagagtgggaccttctgatctttctctgattttgctcgcaataggtgtagcaggttttgtcggcacaatgatcgtctcaacattcctgaacaccatattttataagaccttaataatgatcccgttgcttatggcagcgattaccggtgcgttactgctggtcggacaccatatctgggctgttgccgttttactcagcctgtgggggctacttgcgacagctgcgccaacggggtggtggacatggatagcacgcgcgttacccgaagatgcagagacggggggaggcctcatggttgcagtgattcagttatctattgcacttggttcaacggctggaggtctggtattcgacagtctgggatggagaagtgcttttggtttaagtggtttgttacttctgggagcggtagcgatgacatgtgccacatcccgtcaaaacaggaaggcgcagtag

SEQ ID NO: 9931 - DNA, 126 bp, Escherichia coli
atgaccaacaatttggtattgatacaacaagttgcggccccggttcgtgggggagatgaaacgacggtagctgaagttactgaaatgaagaattcagagagactgaatgatatgcctcacctttag

SEQ ID NO: 9932 - DNA, 492 bp, Escherichia coli
gtgtacgttgcagaattggtaaccggggaccctgcagtctttaactccgagtcttgtgctgctcatttgccacaaaatcctggtacgccagctcaatcatttcattcaacagtttttttggggggcaccacgacttcgggcaatactttcaggctgtttgtggatttttccggacagtttcagcggaacggaaccatcagcacgttcatcacgccttttttgttgctcccgggcacttttcagttcatccacaatatagctgctcttctcgcatttttgccgattttaaaaatgcgaacaaaacatccgtacatgatgtacagattaaactgccagggactggtgtcagaaagcctccggttagcctgctctttccggaatgtgccggttatgaaaaaccggaaattcagtctctgttgtaagatgtaccctctgatactacgttttcgttttctccgtgtatttaactcactgtatttattgtctttttaa

SEQ ID NO: 9933 - DNA, 798 bp, Escherichia coli
atgctggcaagaggtaagactaacttaaagatcgaagaaatacggatgcataaacatcatgagattcatagggttaagcctcttatgccagctttgtgtcgtatccgtcagggaaagaaagttatcaattgggagacgcatactttaactgttgataataatcaaataatattatttccttgtggttatgaattttatattgagaattatcctgaagcagggctttatcttgcagaaatgctttacttacccattgatttaattgagagtttccaaaaactttatacggtaactgatcaaatacgtaacaaaacaagtttctttttacctcagaatcctgagttaatatattgttgggagcaactaaaaacatctgtttcccgaggcttctcaactaaaattcaggagcacttagcaatgggcgttctactttcgttaggagtgaatcatgttaatcatttacttttatcatatagtaaacaatcattgataagtcgttgttataacctgctgctatccgaacccggcacaaaatggacagcaaacaaggttgctcgatatctctacatttctgtttctacattacatcgccgtctagcaagcgagggggtaagtttccaaagtatactggacgatgtgaggttaaataatgcgttgtctgctatacaaacgacggtaaaacctataagcgagattgccagagaaaatggttataagtgtccttctcgttttactgaaagatttcataatcgttttaatataacaccaagagagataagaaaagcttccagagagtaa

SEQ ID NO: 9934 - DNA, 552 bp, Escherichia coli
atgaaaacacttatcgtttcaactgtattggcattcataacattttctgcgcaggctgcagcatttcaggtcactagtaatgaaataaaaacaggagagcaacttacaacgtctcatgtcttttctggatttgggtgtgaaggtggtaatacatcgccctcattaacctggtctggtgttcctgaaggtaccaaaagctttgccgtaactgtatatgatccagatgcacctacaggcagtggttggtggcattggactgttgttaatattccagcaacaataacatatttgcccgttgatgcagggagacgtgatggaacaaaactgccgactggtgctgttcaaggccgaaatgattttggctatgctgggtttggtggcgcgtgtcctcctaaaggagataaaccacatcattaccagtttaaagtatgggctctaaaaactgaaaagattcctgtagattctaactccagcggagcgttagttggttatatgcttaatgctaataaaatcgcaaccgctgagataacaccagtttatgagataaagtag

SEQ ID NO: 9935 - DNA, 1527 bp, Escherichia coli
atgaaaaaagccatagcatatatgcgattttcatcaccaggtcagatgtctggtgactcattaaaccgacagagaagacttattgctgaatggttaaaggtaaatagtgattattatcttgataccataacatatgaagatttaggattaagtgcattcaaaggaaagcatgcacaatcaggagctttttcggaatttttagatgctatagagcatggttatatattgccaggaactacattgttagttgaaagtctggacagactttcaagagaaaaagtcggtgaagcgattgaacgtctgaaattgattttgaatcacggtattgatgttataactctttgcgacaatacagtctataatattgactctttgaatgagccatattcattaataaaagccatacttatagcacaaagggcaaatgaagaaagcgagataaagtcaagtcgggttaaattatcatggaagaaaaaacggcaggatgcactggaatcaggtacgattatgacggcgtcttgtccgagatggctctccttagatgacaaaagaacggcttttgttccagaccccgacagggtgaaaactattgagctaatttttaaactcaggatggaaaggcgctcattgaatgcaatagccaagtatttaaatgatcatgctgtaaagaatttctcaggaaaagaaagtgcatggggaccttctgtaattgaaaaattattagcgaataaagctctgataggtatatgcgtaccttcatatcgtgcaagagggaaagggataagtgaaatcgctggctattatcccagagtcatatcagatgatttgttttacgctgtacaggaaattcggttggcaccttttggtattagcaatagtagcaagaatcctatgctaataaatctacttcgaacagttatgaagtgtgaggcttgtggtaataccatgattgttcatgcggtatctggaagtttgcatggctattatgtttgtccgatgagaagattacatcgatgtgacaggccatcaataaaaagagatttggttgattataatatcattaatgaattgctttttaattgtagcaaaattcaaccagttgaaaacaagaaagatgctaatgaaactttagagttaaaaattattgagcttcagatgaaaattaataatttaatcgttgcattgtctgtcgcgcctgaagttaccgctatagcagagaaaataagactattagataaggaattacgaagggcttcggtatcattgaaaactttgaagagtaaaggtgtaaattcattcagtgatttttatactattgacttaaccagtaaaaatggacgagagttatgccgtacacttgcctataaaacattcgaaaaaatcataattaatacggataataaaacctgtgatatttattttatgaatggcattgtttttaaacactatcctttaatgaaagtaatatccgcccagcaggcgataagtgctctcaaatatatggttgatggtgagatttatttctaa

SEQ ID NO: 9936 - DNA, 303 bp, Escherichia coli
atgacgggcaaagaggcaattattcattacctggggacgcataagagcttctgtgcacaggacgttgccgcggtaacaggcgcaaccgtaaccagcataaatcaggctgcggctaaaatggcgcgggcaggaatcctggtcgttgatggtaaggtctggcgaacggtgtattaccggttcgctaccagagaagaacgggaaggaaaggtgagcacgaatctgatttttaaggagtgtcgccagagtgccgcgatgaaacgggtattgagggtatataaaagaacatcaatgggtacacaatga

SEQ ID NO: 9937 - DNA, 3909 bp, Escherichia coli
atgaccactgtgaataaaaagttaaaaaaaactgcatctggcgcgattacatggtcagtaattgttacccagatattatctccagtttctctttctttgattccggcaaacagttttgcatcgtctgataataaagatgttacgcaaatttatgctagcgatgagcgtgcaaataaagtggcctcatttgcagtaagtgcaggtcagagtctggcgaataataatgcaagtagttttgctgtaaatactttatcaactcaggcgacaaaagaggtcgtcgattggttgcaacaatatggcaatgcgcgcatcaagcttaatgtcgataattctttttccttgaaggattcatcattcgactttttatatccatggctggatactcaggattatgtgctattcagtcaaacatcactacatcgtactgatgaccgtaatcagaccaatattggtttggggattcgtcatttcactcctgataatgcaatgttgggtgcgaatgttttctacgattatgatttaagtcgcagccactctcgcgcaggttttggggttgagtactggagagattatttcaggcttggtgtaaatacctattttggtttatctgactggaaggacagtcgggatattgatgattatctggaaagacccgcaaatggctgggatttttctgctgaaggatggctacctgcttatccgcaattaggggcatctattcagtttgaaaaatattatggtaaaaatgtcggattatttggaagcgataatctgcaggaaaacccttacgcagttactgggggaatttcttatacaccagttcctctgattaagttttctgcacagcataagcaaggacagagcaacgttcacgatacaacctttggtgttgagtttaattaccgcccaggcgtttcccttgctgaacagcttagcagtgacaatgttgcagttatgcgagaagtccagaaccggcgttatgattttgttgaacgaaataacaacattgttctggagtacaagaagaagcatgcactgaaaatcagcttaccagagtctgttcagggggatggcgaatcaatcatccctgtaacactgacaatcaacaatgccagtggtggtatcaagtctgtacagtggaatgatagtgtattcactgcggctggcggtaagatcagtggaaatggcacatcatggcaggtcactttaccggcttataaaagcgaaggtgtaaattcgtggaatgttggagccacggtccaggataatagaggcaacgtttccaactatgcggtgatgaatattagcgttatcaatagtggtgtctcgacagcggattcttcttttatgttggatggagattcatctccgacgatctctgctgatggtcaatccactcatccaatagtattaagcctgaaagacagtaacggtaaggcattaaccggactggctgatgacattgaaatgtcagtggaatttactgcggatagcaatagtgctcgacagcgtgaaacggtaactgccccgtcattaggcgcggtagaggaaatctctgctggtgtatatcgctctgttctgactgctggttcgcaggctggcacagtacgtgtaacagcaaaagttcagggaaaaacctttactttgaatattaagcaggcagccgttattgatagtgatgtctcgacagcggattcttcttttacgttggatggtgattcgtctccgacgatctctgctgatggtcaatccactcatccaatagtattaagcctgaaagacagtaacggtaaggcattaaccggactggctgatgacattgaaatgtcagtggaatttactgcggatagcaatagtgctcgacagcgtgaaacggtaactgccccgtcattaggcgcggtagaggaaatctctgctggtgtatatcgctctgttctgactgctggttcgcaggctggtacggtacgtgtaactgcaaaagtaatggataaaacatttactctcagtattaagcaaacagcagcaacagaacctgattctgaggtcagtgctgttttaaccgctgcaccagcagaacaggtagttggttacaatatcaatctacaactggcagtgaaggattcacaaggaaatgcaatcactggtgataacactctgagcttttatgctcttaaccaggcagaaggagtcgagtttggggctgtaacggaaaaagacggtgtctatagcgcgacagtaacttcaaaacgagctggtaagattcggatcggtgttaaatcgggtagtcacaatttctcaggtattgagaaagaaatctcctttattgaagatcgaacacagttcgcattctctcgtattgaagccagtaaaaataatgcattggctgacggcaaacaacagaatacggtgactttaagccttgcagatcgtttcggcaatgttgtgcccggttatgctgttacgctgtccttacctgcgggggtaactcaagttggtggtgaacatgctgtgtcaactgacgaaaacggtaatgctgtttttgcgttaataagctccactccgggttcttacgtgattaaagctcatgctggttctcagatgtctactgagttaacagtaacctttgcatcaaatatgatcggagcttcactgtcactgacgcctggaaacagtagcttaatttccaatattcctgctaatggtaaggatgctgcggtattgaatgtgcaactgacaaatacgaatgcgtcggtcaatggacagaagattcagctcatcacctcatctgaaagattgtctgtaccgacaaatatcgtgactgattcaacagggcatgtttccgtaccacttacaacggtgagagctggtgagtatacggtggctgcacgagtgactgacggttcccatagtgtggagtctggcagcgttaagttaacttttgtaccagatgctgcttccgcagaacttactatgagtacatcaaaacagcagattgtggccgatggtagtgaaagtgcaacagtggacattcagttggttgatgccaataacaatgcgtttacaggcgatgtggatttaacggttacaccatcgacgggagcatcattgaccagtagtaaactgcagttggatgctcatggacaggcaacaacgcagttcacagcatcgaaatcaggccagtacacaattcaggctgagtatgttctagatgggaaacgtataaccgcaagcaaaaatattgatgccgtgacggatgtgaaggaggctgtgttggagatcacatcatctgcatcttcggctgtagtgagcgataccaacaatctgatatttacgttactgttgaaaagtacgtcaggcgaagtattaagtggtcgagtattgaatatcaaggcatctgggccgtccaaatatggtgcgttggtggttgataaaaccactgtaacgactgatgagtatggtctggctacggtaagcgtacatggtcgaacggctggttcgtataaattaacggcgaccttagatgaacttggcagtgatgttagtgaggtgaagtcattctctctgtatgctgatgaggcaaatggagtattgacactgcataaagatggaggctatgacacagatgatggtactccagtgggggtttatgcccgatttgttgaccatttcggcaatccgttatctggtacggttgagttttctgctggtagtgaagatagtccaaactctcaacgggttaaaatggagcctgctacagtaacgttacactggacaggtaatgcagcctcggagttcagcacctatgaaagcggttatcactggattaaggccaaaataacgaacagcaaaaatacatatgagaaaacaataaggacttatgttgtaaagctccctgaaaaggatagttaa

SEQ ID NO: 9938 - DNA, 258 bp, Escherichia coli
atgcttagcctcaccaccgtcctgaacctccagaacgccaccattattaagtctggtgctatctgttttagcctccttctggacaatcagcttaccgccagcatcaatggtagtatttttcgccgaggttttagccattaccgtcagttcgccggtattttccagcacaacataattagcctctcctccggtaatagtgaagtgagagagcttgttgtatccttcgatatcagtccctgcgcccgtgttggcaactaa

SEQ ID NO: 9939 - DNA, 294 bp, Escherichia coli
atgtgcaataccgccggtatagacaatcagcgagcctccggcgctaatattgctgccagttgccgtaccatctttctcaacaacctgccggctcccagaggatatatttgtcgtgtcagctttcccgccgctcttgatattttgcgttccactgttgatattggtgcccgtggcaataccatgattattaatattctgtgtgccaccattaattatggtatttgtcgcgtttccggcaacatccataacgccgccattatctattcgggtcgcatcagctttagcattcgttaa

SEQ ID NO: 9940 - DNA, 1278 bp, Escherichia coli
atgtctgaatgtaaatatcatgaaggcaatgcttttgtcattatgggagccggagaacaattaaaacgtattaaatatgatgctaatgaaaataaattaaaagtatacaacgtacactttgataataatcaagagttagttgctgatggtgagcctgacgtagtatttttaaaaaaaacggtgtgggaagaccttctcgttaaactaaagctggagaacaaagaaaatgcggtttctgaaattaacctgtcatctaataaaaataatgttgatcagtttattgaatgcgctaagagaaatgaacagaccctattcggcaatataagaaaaagtgattttcatgttgcttcacttcagccaggtagaacgcgtagtgttatttcagaaacgccgccaaatgactgtatggaatcacataatttatatgaaaaccacacagatacggtttcaactgtaactaaaaattctcagcaagttaaaggtcactatggagataagttgaaagaaatgcagttgttcctcaaccagatgagcaatgcacttcaacaggattcatctttgttagagtcaaaggaacacaccatagatattcaagaaaaaacgaataagtttgtgcagcattttcagcgggtattatttgataaaaatggaaggtcatcagagtttctacttaatttttatgagtgttgctataagtttttaccaagagcgcagcctcaagataaaatcgatagctataattcagcactgcaagctttttccatcttttgttcatctacgttgacacataataatgtagggtttaatttcaaattatttccagaagtcaagctgtctggaggagagcttgaaacggtattcaaatacaaaaatggtaattttgtctgggagatagccagaattaaaattactctcccaaaagaagagggtggtttatataatttacgtggattggattttaagggatgcttcttttctggacagaacttcagtaactatgatattcaatatgtgaactggggaacgtcattgtttgatcttgatactccatgtatttttaatgcgcctgcttacaacaagagtaatgaaaaatcattagaacgcgtcagcgaaaacggtttaagtggagtcttgtctgatcgtaataaaaaaataaaactaatcacgggtgtggcaccattcgatgatattttatttatggatgatgactttgatgataactcccctgatgatggtcccgttgagaatagtcctgttgtgaatagtccccttgtatga

SEQ ID NO: 9941 - DNA, 375 bp, Escherichia coli
atgaaaacattatccgacacacatgtacgggaggcatcgcgctgcccgtctcccgtcaccatctggcagatactgctgtcccgactgctggaccagcactacggcctcacgctgaatgacacaccgttcgctgatgaacgtgtgattgagcagcatattgaggcagggatttcactgtgtgacgcggtgaactttctcgttgaaaaatacgcgctggtacgtaccgaccagccgggattcagcgcctgtacccgctctcagttaatcaacagcattgatattctccgggcacgccgggcaacaggtctgatgacccgcagcaactacagaacggtaaataacattacccagggcaagcatccggaggcgaaatga

SEQ ID NO: 9942 - DNA, 195 bp, Escherichia coli
atgcgcattcaccgtcagcatccggcatcccgtctttttccgttctgtaccggtaagtaccgctggcacggcagggctgaggcgtataccggtcgtgaagtacaggatattcccggtgtgctggccgtgtttgccgaacgccgtaaggacagttttggcccgtatgtcaggctgatgagcgtcaccctgaactga

SEQ ID NO: 9943 - DNA, 3408 bp, Escherichia coli
gtggaaatcagtgtcaccagccagacggcgggagtcagtgcagtcactgcaaccatcaacagcagtagtcagagtcagaacgtgacatttatcgccgatgtcagcacggcgaagatcgctgatctggtggttattaaggatggttcagaggcggacggttcgacggcgaacacgctgcgggtgagggtgaccgatgcgttcgggaacacgctagccgggcagacggtcagcgtgttggcggacaacggcgcaacgactgccccgacggtcatcacagagccggacggtacggtggagatctcagtcaccagccagacggcgggagtcagtgcagtcactgccagcatcaacagcagcagccagagccggaacgtgacgtttgtcgccgatgtcaggacggcgcagatcgcggatctggtggttattaaggacggttcagaggcggacggtgcgacggcgaacacgctgcgggcgagggtgaccgatgcattcggtaatgcgcttgccgggcagacggtcagcgtgttggcggacaacggcgcaacggtcgccccgacggtcaccacgcagccggacggtacagtggagatctctgttaccagccagacggcggggatcagtgcggtcacagccagcatcaacaacagcagtctgagccggaacgtgacatttatcgccgatgtcagcacggcgaagatcgctgatctggtggtcattaaggatggttcagaggcagacggttcgacggcgaatacgctgcaggtgaaggtcaccgatgctaacggtaatacgcttgccggacagacggtcagcgtgttggcaggcaacagcgcaacggtcactccgacggtgaccaccaagccggacggcacggtggagatatctgtaaccagccagacggcgggaatcagtgcagtcactgccagcatcaacagcagcagtcagagccggaacgtgacgtttatcgccgatgtcaggacagcgaagatcgcggacctggtggtcattaaggacgactcagtggcagacggtgcaatggcgaatatgctgcgggcgagagtcaccgatgcgttcggtaatgcgcttgccgggcagacggtcagcgtgttggcgggcaacagcgcaacggttgctccgacgatgaccacaaagccggatggcacggtggagatcagtgtcaccagccagacggcgggcaccagtacagtcaccgccagcatcaacaacagcagccagagccagaacgtcacctttgtacctggtgatgcatcgcaactcacttcaatcgttgaaacaaataagtcgaactatacggttggagagacaatcaccatcacggtaacgctccgggatgcgttcgataatctggtaaccggtgcagcttcacagttagccgctgatggtgtgctgacggtggctggcactgacccgtcagaaatgggaagctgggttgaatcaggtggcgtgtataccacaacccgaatggcgacgattgccagtaccaatcagcacgccaacctgcaattgcagacgtggagtgatggcgtaacgtcagatcgctatgacatccagtccggttctccggcgcaagccacatcaactatcgctacggataaaaacgcctacaccgctggcgacactataaccgtcgccgtgacgctgaaagacgcgcacggtaacctggttgaagggggcgagtccttactgtctggtgataacgtaatagtggaaggagccgtacgttcaggaggatggtctgaaaacgccggtgtttatactgctacatggtcggcgcaaatggcgggagactctcaccacgcgacgctgaagttgtctgaatggggcagcagtaaacaatcagagagttattccatccacagcggtgctccggtgcaggcaaattctgctatcaggacagataaatcggcatatatcgccggggagccattaaccgtcacaataacgttgcgggatgagtttggtaaccctgctttagggctgacatcagaagtcatcgagtcttatattgatagtttcgcggtaggcggcgcaactcccgattctatgcggtgggtcgagcagaataatggtgaatataccattgtctggacagcatgggttgccgacgaaaatctggttgccagtctgaaattaaaaacatgggcaacggagattaagtcctcgctatacgggatacaaccaggtgcagcggcaaaaactcaatcaacgattgtcgcggacaaaacgatatatatcgctggggatagcataacggtgaccgttgttcttaaagatgcccagggtaactttattactgatggtgttgttcagcttaatgaggaaaacgtacaagtcaggaatgcggatcctatccagggcaataattgggtttacaacggcaatgggcaatatcaaagacagtatatggcgcattttgcggaagcgaatttgaatgcgcaactgaagatggctggttggagcgatgccaattattcaaacaattacactattaaaccaggtgaagtgagtccgcttggttcacagcttcgtatacgagaagttttagtagtggaaggggcggatttacctgtcagtgctttattagttgatgattttggaaatccggtggataacggtctggatttgctggatgatgcagtgtacttacaaaatgtagaaaaaaaagaaggggaaaaatggagatatgtgggtgatggaatatatgaacgtacatatatggcctaccaagaaggagaaaatttaacttcatttatggagattaaaggttggcgtatatacggacaaccatcctataccatccttccttttgtggaagtcgagttactgagtgttaatggtgtaaaattcagggcgacagatggttttccagaaacagggtttgatggtgcaaaattcacgctgttactaacccataatatgaaaaatacggattataattggacggctgggatttatggaattaatgttgacagtaatggagaagtaacattatctgtgctgataagaagtgaagttactattactgggaaacccaagaatggtaaagggaatgatgttgtatttaaattcaagattaaaaaatggtttactagtttaggtgctaccagtagtaatacctgggatatcataaatacttcatgtagttatggtcaaatgccgtcatctttagaattagcgcagcggccaagcggtggggtagtaccgcgaaaagtaggtacgttgtggggcgaatatggtaatttaaaaacttatgggaacgcttttagcggtacggattattggacaagcactcagctcatgggagtacacgagaaatttaatcctgaaactggtatatcagagcttgggacaggaaagtcttctggcttgtgcgtagagtattattaa

SEQ ID NO: 9944 - DNA, 921 bp, Escherichia coli
atgtatatgaatggcagaatggaaatgtatcgttatacaccagagagtttgaaacgagcattagtaatatttagagattgtgtgagtacgcaaccgcaaaataccttgccctactgttgcctggcggaatgccatatatcattagccctccttggactcagtgaacaaaaacaagcaataactacggcagtaacctccattgaaaaggctcttgaaattaacccttcaaattctcaggcattgggtttactgggtttaatcagtgggctaaaagatgaacattcagtgtctaatgtgctatttaagcaagcacatttactcaaacctaattcgccagacgtttattattatcagtctctgctatgttttttgaacggtgaccttgcaagagcatttaatctaatagaaaaaagtattgctcttgaacccaataaaatgggtataagcattcttaaattaattatactttattacacatcccccctcgataacgcgatatcttttgcattaaatcttaacagtcaaaacacctgtaataatccaattattacctctattctggctatgttcatggcactgaaaggacataatgacaaagccaaaagtttattgcttaaacttgagcctgaacatggtcttgattacacctgtgttaactcgctttatacgaaatttctgatctatggcgcatctataaaaaatgacattatgaagttactggcaaatattaacaccaacaaaatcaatggtgtgattttgccgttgatttacactgtgtatggtaaaaaagaatatgaaaagcgctggcaacaattaattaaagacaatgatttatggtcaaatgttttgcttcatgacccccgtttgctcagtgtaaaaaatgaatttaatactatcggtgtgatgcgtacttctgcgtaa

SEQ ID NO: 9945 - DNA, 930 bp, Escherichia coli
atggcaaacactgctgagatattcaattttccagtgccggatgcggcacaaaaggagccgcgcgtggcagatctcgatgatggttatacgcgcattgcaaatgagttgctggaagctgtgatgctggccggattaacacagcaccagcttctggtctttctggctgtcatgcgcaaaacatatggctttaataaaaaactggattgggttagcaacgagcaactttccgaattaaccgggatattgccgcacaagtgttctgctgcaaaaagtgttctggtaaagcgtgggatttttattcagagcgggcggaataccggcattaataatgtggtcagtgaatggtcaacattacccgaatcaggtaagaaaaataaagtttacctgaaagaggtaaatttacctgaatcaggtaaaaaaagtttacccaaatcaggtaaaggcgtttacccgaatcaggtaaacacaaaagacaaactaacaaaagacaatataaaacctttttcgtccgagaattctggcgaatcctctgaccaaccagaaaacgatcttcctgtggtgaaaccggatgctgcaattcagagcggcagcaagtgggggacagcagaagacctgaccgccgcagagtggatgtttgacatggtgaagaccatcgcgccatcagccagaaaaccgaattttgcagggtgggctaacgatatccgcctgatgcgtgaacgtgacggacgtaaccaccgcgacatgtgcgtgctgttccgctgggcatgccaggacaacttctggtccggtaacgtgctaagtccggccaaactccgcgacaagtggacccagctcgaaatcaaccgaaacaagcaacaggctggcgtgacagccggcaaaccaaaactcgacctgacgaacactgactggatttacggggtggagctatga

SEQ ID NO: 9946 - DNA, 939 bp, Escherichia coli
atgctcgaccggctggaaagtgaaatcctggctgaccgggtgagcgaggaaagccgccgctggctggcatcgtgcggcctgacggtggagcagatacaaaaccagatggacccggtgtacacgccggcgcgaaaaatccacctgtaccactgcgaccatcgcggcctgccgctggcgcttgtcagcacggaaggggcaacagaatggtgcgcagaatacgatgaatggggcaacctgctgaatgaagagaacccgcaccagctgcagcagctcatccgcctgccgggtcagcagtatgatgaggagtccggcctctattacaaccgccaccgctattatgacccgctgcaggggcggtatatcactcaggatccgattgggcttaaggggggatggaatttttatcagtatccgttggatccggtcataaatgtagatccgcaaggtttggttgatataaatttataccccgaaagtgatcttatccattctgtagctgatgagattaatatcccaggcgttttcacaatcggggggcatggtacccccacatctattgaatccgcaacgcgcagtatcatgacagctaaagatctagcatatctaattaaatttgatgggaattataaagatgggatgacagtttggttattttcttgtaatacaggtaaaggacaaaattcatttgctagccaattagctaaagagttacatacaaatgtaataggacctgacacgctatggacgtggtgggggcgaggaactaatggtaagttaaaaatggatacagtgctaacagcaccaacgaaccttaattcaaataaggatctaatggctataacaacaaaagaccttggtaattggataacatatgggccatctgggcaccccatttctaatatgcaaggtacgccagaaaaacccagtgatataagatag

SEQ ID NO: 9947 - DNA, 468 bp, Escherichia coli
atgaaagcatgcttgttactatttttttatttctcttttatttttcaattgcatggtgctgatgtgaaaataaaacaaaacgaaagtatgatggggtctacagcaatgacctatgatttaagtgaagaaaagttgatgaaactgaagtataaatcacaacatggtgattcagaggcatcatttcgactatatcaatattactgctttactaaaaataacatttacaaacaattgcgatacttagaaagatcagcatctcaggggagtgttacagcgcagtttaattatggggtttttttatcggatacaaatccaatattatcagaacattataatttgaataaagctatttattggatggaattcgctgtaaataacggtaatattgatgcaaagagcaaacttcaagatctcaaaaagctaaagctaaagcgaatggatagaaggaagaataaggagaatccgtaa

SEQ ID NO: 9948 - DNA, 552 bp, Escherichia coli
atgacaaggttattaacaattgtgcttttcttctctatttctgcgaatgcagttactgtaaaccaatttcagagagagttggatttggcagacaaggcaatattatgggcactaatatcagccagtacccaagagggacgaaaagcgtgttcacttagctatttttcatgtaaagccgcagaggctgaactcggactggcatatatggctgctaatgataacaaggcatttctcacatccttatctagaataatgatgtacaaaatagatgctggactttccgaatcctatacatgctatttattaagcaagggaaagatcataagaccatatctgaagaatctaaatccacaccaacttgtcgctgattgcattgaaactgtaaacaaaataaaagataaaaataaaaaaatcattgatatagattcagttaatatttgcaatgataataaaaatataaattggagagttaatagtactattgtagccattgatgattctataaaatgcctgtctcttatacacatctccgagcccacgagaccgtactag

SEQ ID NO: 9949 - DNA, 1524 bp, Escherichia coli
ttgataatcagcgaaatgcaacgcaagcttgccacatgggcagccaccgatccgtccctacggattcaacggctgctgcgtctgataacacaaccagaatggctggctgaagcggcgcggatcacgctttcatcaaagggggcccatacccccggcgttgatggcgtgaacaaaacaatgctacaggccagactggctgttgagctgcaaatcctcagggatgaattactctcaggccactaccagcccttgcccgccagacgggtttacatccctaaaagcaacggcaaactgcgaccactgggtatccccgcgttgcgggatcgtattgttcagcgggccatgctgatggcgatggagccgatatgggagagtgattttcatacgctctcatatggcttccggcctgagcgcagtgtccaccacgcgatccgcacggtgaaattacagctcacagactgtggtgaaacccggggacgctgggtgattgaaggcgacctgtccagttacttcgacaccgtacatcatcgactgctgatgaaggctgtacgccgcaggatcagtgacgcacgtttcatgactctgctgtggaaaaccatcaaggcgggacatatcgatgtcggtctctttcgggcggccagtgaaggtgtgccacagggcggtgttatatcgccgctattatcgaacatcatgctgaatgagttcgatcaatacctgcatgagcgctacctgagcgggaaagccagaaaagatcggtggtactggaataacagtatccaacggggccgaagtacggcggtcagagaaaactggcagtggaaacccgcggtggcgtactgccgctatgccgatgattttgtcctcatcgtcaaaggcaccaaagcacaggcggaagccatcagggaggagtgtcggggtgtgctcgaaggcagtctgaaactcaggctgaacatggataagactaaaatcacccatgttaatgacggctttatctttctggggcacaggatcattcgcaaacgcagtcgttatggcgagatgcgagtggtctcaacgatcccgcaggagaaagccagaaacttcgccgcatcgctgacagcactgttatcaggcaactacagtgaaagcaaagtcgatatggctgaacaactcaaccgaaaactgaaaggctgggccatgttctatcagttcgttgattttaaggccaaagtcttcagttatatcgaccgtgtcgtgttctggaagctggctcactggctggcccgcaaataccgtacaggtatcgcttccctgatgaggtggtggtgtaaatcaccgaaaccgggtcagagcaaaacgtgggttttatttggtaaaaccaatcacggcaagctcagcggcgaaatactgtaccggttggtggggcaaggcaagaagctgttccgctggcggctacccgaaggtaatccctatctgaggacggagaccagaaacacgtatacatcgcgctttacagaagtggcaatggcgttcgccagcatttaa

SEQ ID NO: 9950 - DNA, 918 bp, Escherichia coli
atggttcagaaaattttgtcggataaggttatgaatgaaagaacaaatgcgtattactcttattatcttggagagcgtaatatctccgtactgccccttaatgtttatgatcccccggaacgttttatcgcttacataaaaaaaaacagagaaaatctgaacatcacactttcagattttgaacttgaacaaatcatttctggtatgcgtctgaaggcactggcctccctggtgcccctggaaaaaatatcctggatcgcgggcagtgaacgtgcatgcttattttcctggtatctgttgatgcagtttatccagaataacaggacaaaaataagcgcagacttgcttcaaaagaataaactgtatcttaaagaagagtatttagaagggaatgccttcccgtcggactcatcgacacagttcagacaaatactcagagttctcgatattctttctgataagaatttgcgggatgagtggataatccagaccaaagacagatggatgcgggcatttaaatcaaagagtcctttcagttacctcctcccggagaacgaacatgaatgcatatggacatggaattatttgaagggaaaaaatattgcactggaaaaactggccagttttcctggttctgctgatatttaccacgcaattcacctttcatttgacatatgggttacctgtccactcacctcacctgacgatataaaaaatttcagaaacagtttcaataaggccaaggcgcagcgcaagtacaaaaaaatgcaggaagataaagtcaatgtacagttttttcttgacgcagaaaccagggcgcagctcaaagaattatcgagggtcagaagactcagtaccggcgaaatgctgcatgacctgattgttgaagagtataaaaggtaccgacattccagataa

SEQ ID NO: 9951 - DNA, 1422 bp, Escherichia coli
atgtttaattctattggtgcaagtgttagagaaaacattttatcaaaactggatggtatttttatattggatgatatagagagaatatccgaaaaatcattagttagtgaaattttgacatattgccattctctttatatgtccgagatgaactcaaatttagactttattattattaccaatacatcaactgagtctggtttaaaaatagaacacaaggaaaaactcattgcagaaacacttcattataatccgcatccagaggaaatattggatatagatataataaatggaaagctttcccaattcccacaggaagataaaattctctttgaggatatagtaaaaaataacaacatagttaacatccgtattttgatgcgtattttggacacagttacgccattatatgaatacgttaaatcatatcctcatctttcttggcgaataccatcaacaattcttttaaactcaatatgctctttcttcattttattatttttgcataatcactctcttgaggatcttctcaaggacaaagatccaacttttttattaaacaccgagaaatcaagtgatagtgagagagtgctatggttagcattgaataattacaaaataaaacctgagattaaaaggtattatagcggacaagcttcattaaatgacatattggatgttttattttatgaagcaaaacggcttactatgagagaaattgcaatatcagcacgtccagaattacatgagataaatgaaaaggaactttcaaatacacttgtcgacttaatttgccgtaagattgactgtaatttctatgaatggataaaagcgtttcagaattatgagtatttaaccacacataaatacctaccaaaatcaccaattataactctaaagtttgtcacttcgattctgaacggattcactgacaatgaagttgcagaatgctttgagctatactcacttgatagaaaaaatagcttaaatagtggttttgaagatagcaaattgctgtactcaatttcattttaccgttatgaaagcacgatcaaaatgcgtgaactcaacactattaagttgcaattagaattgaatggctgggcatcattcaatgctaaccaattaaccactttagatccattcggaaattataagccgcttgaagtacttggtgtatcatttgtaacaaaatgcgttttaaagaattgggcagttaatgatattgagcaatttagttctttcttgcgtagcaactatcaaatcagcaacataaaacaattcgccactaatgaaaaaaacaaacttatttatcttagtcaaaaacttgatattttttgcctttcctataaagaaagctttaaatttggagccatatacgatctaaacagaacagttaaaattgccattaacaaattatga

SEQ ID NO: 9952 - DNA, 273 bp, Escherichia coli
atgaatctgtccggcatggctgaggtcatccaccaccgactgcaccgtggcgttatcggggatattccaggtggcatcggaggcgagagtgacattcgtggggtcaatggcaccgttcagcacagtgctgccggtcagcttcagggctgtaccgcgctgagcaatgacatccgtggtgacggtactgtcgttcagcgtcagcgtgccttcattcaggttgacggctttctgggtgagtgtggtgttgctgacagtgagtgtgccacttcctga

SEQ ID NO: 9953 - DNA, 1314 bp, Escherichia coli
atggatggctggcgaaacaacgcagaagtggcgcgcggaacaagccgttcgccggagatatggccgggacggcgaattgcgctgacggggcatccgcaggcgaacctgaaccgggaatggcaggtggtggcaagtgaactgcacggcgagcagccgcaggcggtgccgggacgcaggggttcaggtaccacgctgaataaccactttgcggtaataccggcagacagaacatggcggccacagccgttgctgaaaccgctggtggacggcccgcagagcgccgtcgtgacgggaccggcaggagaagaaatcttctgtgatgaacatggccgcgtgcgggtgaaatttaactgggaccgctataacccgtcaaaccaggacagttcatgctggatccgtgtggcacaggcgtgggcaggcaccggctttggcaacctggcgataccgcgtgtgggtcaggaagtcattgtggacttcctcaacggcgatccggaccagccgattattatggggcgcacctaccaccaggaaaaccgcacccccggcagcctgccgggaacaaagacgcagatgaccattcgttcaaaaacctataagggcagcgggtttaatgaactgaagtttgacgatgcgacagggaaagaacaggtctacatccacgcgcagaagaacatgaacaccgaggtgctgaataaccgcaccactgatgtgataaacaaccatgccgaaaaaataggtaacaaccaggcgatcaccgttaccaataaccagatccagaacattggcgttaatcagatacagacggttggtgtcaaccaggtggaaacggtaggcagcaaccagattgtcaaagtgggttcaaaccaggttgaaaaggtggggatcattcgtgcgctgacggtgggcgtggcttaccagacgacggtaggcggcatcatgaatacctcggtggcgttgttgcagtcctcacaggtagggctgcataaatcactgatggtgggaatgggctacagcgtcaatgtagggaataacgtcaccttctcggtgggcaagacgatgaaggaaaacaccggacaaacagcagtttattctgccggtgagcatctggaactctgctgcggtaaggcaaggttggtgctgacgaaggacggaagcatatttctcaatggtacgcacattcatctggaaggagagtcggatgtgaacggtgatgcgccggtgattaactggaactgtggtgccacacaacctgtaccggatgcgcctgtgccgaaagatttaccccccggaatgccggatatgcggcaattttga

SEQ ID NO: 9954 - DNA, 861 bp, Escherichia coli
atgctcgaccggctggaaagtgaaatccttactgaccgggtgagcgaggaaagccgccgctggctggcatcgtgcggcctgacggtggagcagatgcaaaaccagatggacccggtgtacacgccggcgcgaaaaatccacctgtaccactgcgaccatcgcggcctgccgctggcgcttgtcagcacggaaggggcaacagaatggtgcgcagaatacgatgaatggggcaacctgctgaatgaagagaacccgcatcagctgcagcagctcatccgcctgccgggtcagcagtatgatgaggagtccggcctgtattacaaccgccaccgctattatgacccgctgcaggggcggtatatcactcaggatccgattgggcttaaggggggatggaatttttatcagtatccgttaaatccgatctcagagatagacccacaagggttaaatccgttaattcttagtgttgtagcactgatgagttgcggtttgttttcatcaggtggtgttatccaaagtgggcaacaacgcagagatcaatatggccgtaaagttaatccagaagccgacaaattaacagatgaacataagtcaggtgtaaatcctggtggtaactgtagtccccagaacctgagtgacttacaaaatgaaaaaaacagattatgtaaccagtctagagcttgcgctcctcagatgctgagaaaagaaatattgagacggtacgagataaatttggcgtgcgcttcggtcagaaagcagattaataatcagtgctttggtggtggagataaggcccatatggaagaagagaataaagcatataaaacagcagctgattgcagtggcttaataaaatga

SEQ ID NO: 9955 - DNA, 504 bp, Escherichia coli
atgaaaaaaataattttctctaacgagagtgcagtctatgatgaacttatgattcatttcccatgccagccattacctcatatttcaaatgatattacagggctggaggaactggatattgtatataattttttccaaaagaaacaatggaatgaaatagccaacaattttaaaataaaggatgactcttatgctttagagttaggaattacattcctccctgagaaagtattctgctattacatccctctgtatatttatgcctcgttgtttaataagaatgatttttgggtttttgaatccgattttattcaacaatatttatgtcctgagtatcgggatcacgatgattttttgaattttgtttttaatttttcagatatacaactatctattattgcacagtttatgtcttatgaatcagacgctggattcttttatgcaagtaaagcttgtatggatttttgggaagattattcacctctattacataagaaaatttaa

SEQ ID NO: 9956 - DNA, 486 bp, Escherichia coli
atgataagaatcgcgtttttaataaccaataaatttcttgatatagatagtaccactcttgctggatatgattttagcgggatggatctacatcgtgccatcctcaatggttattgtcttgatggggcgaaatttgaaaattcccatttaagaaatgtaatgattcaacatacatcaactagaaatgctgtctttcgcaatgcggctctgatgaacgctattcttaataactcagatttcactggaagtgactttagtaattcaaggtcaataggtgcaaactttgagggtgctatattaactaattcaaccttttgcaatgcagacgttaaagattcaaatttttctggtgctgacttatgtggcgctaatttattatgtgatagatatggcgatataaatataacaggtgcattattcgataaaaacacctcatggttagaaggttttgatcctatagctcatggggctatattaaaaatatga

SEQ ID NO: 9957 - DNA, 930 bp, Escherichia coli
gtgttgcaggaggacacgggggtgacgctaccggcggagctgtcggtgatgctggggaggctggagcgggaactgcgcgcgggtgcggtgagtgcggagagtgaggcatggcttcagcagtgcgggctgacggcggaacagatgaaaaaccagatggaggcggaatacatcccggagaggacacttcatctttaccactgcgaccaccgggggctgccgcaggcgctcatcagcccggaaggggaaacggcgtggcagggggagtatgacgagtggggaaacctgctgggcgaaaccagcgcgcagcaactgcaacagccgtaccgtctgccggggcagcagtatgatgaggagtcggggctgtactataaccgcaaccggtactatgacccgttgcaggggcggtatatcacccaggatcccattgggctaagaggtgcatggaacctgtatcagtatccattgaatccaactactaagatagatccgttgggtctctccggagaagattccatagagcagtcaggtccatcttggttgattgctgaccccatggataaatacagacaacaggcagtgatgggtttaacaaaattgtgggatgatacctttagtcaagagaagactaaatgtttacctacgacacctgaaaacatcaggatggttgtggccaacagtcccttgttgacagtacaacaaaaagtctcagtacccgtagtagctcactacgtacaaatgctggaagatggtagtggagcaccaccggttgatatggatgggaatgtgattgttaatggtaatcacaggatggttgcgggtctgttatgtgataaacttcctcctgagcggccaggtacgcgtccattatcggcaccactatatccgtttagccaaatttttccggagttagatgattgggggaatagatga

SEQ ID NO: 9958 - DNA, 384 bp, Escherichia coli
ttgttaagtaaagttaatcgacttatcagaagaacagcgcagagcctggctgcatgtgaagcatcattacaaaagttaaatgcagaaaaagaaaagttagccgaaaaggaacgcctgtatgatatgcaacttaaaaacctacagtcactgttagatgtgaaagagttactcggcgaagttgtatttcgacaggatatattttactcgttacgtaaagttgcggaaatagttcaacagcaagcacaaagaaaacactggtggctaaaaggagaaaagtacgatcgactaaagaagcgcatcaaaaaacaacttttaaatcagatgctttatcaagacgagcttgaacaggaggagaaatataatggacgaagtcaagaaaattga

SEQ ID NO: 9959 - DNA, 1293 bp, Escherichia coli
atgaaaaaattaaaactattaaataaatacagctacttacatagcataaacggctcgctgattgaagcagagcttgacgacgtttcagtgggcgaagtatgcgaaatttatgcgagctggcaagcaaatgaacgtatagccagggctcaggtcgttggctttcgcaatggaaagacattattaaaccttataggcagctctgtggggcttacacgtactgcagttttgaaaccaacgggagagcagttaaccatacagatcagtgatgcctttcttggttcagttttgaatgcttctggtcaaattatggaaaggtttgtcccggacactccaggcgaaaggggaaatttacgcctgattgatgaactgccaccgtcgtatcaggaacgtcgagttattaatacaccactagagacacggataagagtcattgatggcgtactgacatgtggcattggccaacgtgttgggattttcgcatcggctggctgtggcaaaacggttttaatgcatatgcttgtaaacaacactgaagctgatgtgtttgttattggcttgattggcgaacgtggtagggaagttacggaatgcgcggaatcgctgaaaaaatcagtaaatgcagcaaaatgtgttttggtttatgccacctctgatttttcgtcagtagatcggtgcaatgccgccctgatggcgacaaccgtggcagagtattttagagatcgaggaaagagagttgtactttttatcgactcaatgacgcgatatgcacgagcactacgcgatatgaagctggcagcgggtgaaccacctgccagacgtggttatcctgcttctgtttttgacagtttacctcgcttactggagaggccgggaccaacactaaaaggaagtattactgcgttttataccgtattactggagggggaggatgaatcagacccactgggtgatgaaattcgctcaatccttgatggccatatctatctaagtcgcaaactcgctgggcaaggtcattatccggcaatagatgtactaaaaagtgtgagtcgagtatttggtcaggtcactgatgaaaaacacagagataatgctgcgcgggtaaggaagatcctcacaactttggaagatctacaggtgtttattgatttaggggaatatcgcgctgggcaaaatgctgaaaatgattttgctatgaatgcacggcctaaactcacaaattggttgaaacagtcagttaatgaaaaaatgccaatgagtgaaacgctaaaagagcttgaacgaattgttaagtaa

SEQ ID NO: 9960 - DNA, 192 bp, Escherichia coli
atgattctggataattttaaactggcactttctggaatcaatattcctattaaagacattattttactgggatctgtggatattcgtcgttttatcaaaaaacttattgaatctagttatcgagacctcgaagtactttcgtacggggaactaacggaaaatgttcccgttaatattctgaaaactatttag

SEQ ID NO: 9961 - DNA, 216 bp, Escherichia coli
atgacacctcagcaggaaaacgcccttcgcagcattgcccgtcaggctaattctgaaatcaaaaaagccagacagcagtttccggataaaaacgtcgatgacatttgccgtagcgtactgaagaagcaccgcgaaacggtaacgctgatgggattcacaccgactcatttaagcctggcaatcggcatgttaaacggcgtctttaaggaacgatga

SEQ ID NO: 9962 - DNA, 183 bp, Escherichia coli
atgaaacatcctcacgataatatccgcgtaggcacgatcactttcgtctactccgttacgaagcgaggctgggtatttcccggcctttctgttatccgaaatcccctgaaagcacagcggctggctgaggagataaataataaacggggagctgtatgcacaaagcatctcccgttgagttaa

SEQ ID NO: 9963 - DNA, 1209 bp, Escherichia coli
gtgacgctaccggcggagctggcggtgatgctggggaggctggagcgggaactgcggcagggcagcgtgagtgaagaaagccagcagtggcttgcacagtgtgggttgacggcggaacagatggcggcgcaactggaggcggaatacatcccggagaggaaacttcatctttaccactgtgaccaccgtgggctgccgcaggcgcttatcagcccggaaggggaaacggcgtggcgcggggagtatgacgagtggggaaacctgctgggagaggaaagcacgcagcaccttcaacagtcactccgtctgccggggcagcagtatgatgaggagtcggggctgtactacaaccgtcaccggtactatgacccgctacaggggaggtatatcacccaggatccgattgggctgaaggggggatggaacctgtatgcgtatccactgaacccggtgcaacggctggatccgctgggattaagtgcggcgttgggcgcaggagcattaactgccatgggaactggttctgaagtaggtacagagatcggttcggtaggaggccctccggggatgttagtcggtgcggcagtcggtacggtggttattggtggtggtataataatatacaacaatcgcgaggctgttggggacgcgattgagaaaagtatggagatgcagggtgaagccgaattattaaatgcacaaagtcaaatggaattctggcgagatccctatggtgctttttccagcgtgtttggaaatgatgattcatcaaaagagaatccaaatgtcgggaaggatttgacggaggaagagaagaactgcctgggtggtggcagtacgggaagcccgggaggatggggaccagaagatgagaatagcgcaagagatcgtatgcagcatgaacggtataaagatgaattgcgacagaagatgggaaaacctgacgttacagattcaaatttgaaaaatattatagacgatctttatcggccaaatgcaaaagtaggaagtggaagcacagcagatgctgttcgttatgaattggccacaggtgaaaaagttggtggtagaggacatgtattgaaagcacaggattatacaagggctttacaggattggttggataagaatccaacagcatctccaggggatcgagcagcagcagaaaacgttcttcaggatttacagaatgctttgggaggcaagtaa

SEQ ID NO: 9964 - DNA, 378 bp, Escherichia coli
atgaaccaatatattgctaattatatagaaaaaatggcatcgttttccactgttttgtctgagacagtctcattagctaatgaatactggcatccagaaactccaccggtggttatgttgttctctcagattggaaaaacgattgtaaaaaatttttatgaaatgggtgatattgaaagagaaaaaatatttaaacatgtcgaagatggtatggtctcgattgatgatgaattggccacagttgtagctacagggcttatagaggcaatagtcactgcgaccgatagcaattctttactttggaaagatgtaagtaaatttttgggtgataaatcaaagtctcatgcattagtgtggaaagattttggtcaggagtga

SEQ ID NO: 9965 - DNA, 963 bp, Escherichia coli
atgttgaagaaaacgatatttatattaacgttattctctggcaacgtaattgctgcaactgtagaattaggttttgaaaatgagcaatataattatgcttatcgttctgcagatgtcttcatgccgtatattaagagtaatttcaaccctgttactgattctgctttgaatgtgtcactcacctatatgtatcaggatcaatatgggaaaaaacataaaaaaacatctgaggacagatttaaaaccaatcgtgatcgcatagagctctatcttaaaggttatactttaaataggggagcatattctttttctccttccgcaggtttccgttatgagtcatgggatgtaaactacgataatccgaaaaagcaggataagtggaaactggaactacgcttttatcctaatatgacttataaactcaatgaccagttaagcctatatatgaatggttttgttgcccctgtgttttttaaaacacaacaagagtcgagaaaagataacaattatgtaaagggtaagctaggggcgaaacattataacaacgattattatcaggaactccagattctgggtgtcagatataaatttaataatgataatacgctctgggcatcagtctataatgaaagaaaatataatcaacattcctcaaaatatgatcgctggcaattgcgtggaggctatgattttaaagttacagaggagtttattttgagtccattcataagatatgacctctcttatagagaaaaaaacctcgaaagcacaagtaataatggtttatcaaaaaataataaagaaattcgaactggagccagcttttcctataaaattatcccttctgtaaaactggtaggagaaatatacaggcaaacaaccaacgttgaaaactattatggagagcattctgaagacaaaaaccgcatgttctacaaacttggtataaacaaaacattttaa

SEQ ID NO: 9966 - DNA, 909 bp, Escherichia coli
atgctcgaccggctggaaagtgaaatcctggctgaccgggtgagtgaggaaagccgccgctggctggcatcgtgcggcctgacggtggagcagatacaaaaccagatggacccggtgtacacgccggcgcgaaaaatccacctgtaccactgcgaccatcgcggcctgccgctggcgcttgtcagcacggaaggggcaacagaatggtgcgcagaatacgatgaatggggcaacctgctgaatgaagagaacccgcaccagctgcagcagctcatccgcctgccgggtcagcagtatgatgaggagtccggcctgtattacaaccgccaccgctattatgacccgctgcaggggcggtatatcactcaggatccgattggactgaaggggggatggaatttttatcagtatccgttaaatccggttcagtatatagattcaatgggactggcatctaaatatggacacttaaataatggcggatatggagcgagacccaacaaaccgcctacgcccgatccaagtaagttgccagacatagcgaaacaattaagactgccatatcctattgaccaggccagtagtgcgcctaatgttttcaaaacattcttcagagcattaagtccttacgattacacactgtattgcaggaagtgggtaaaacccaatctgacttgtacgccgcaggatgatccccagtatccagggatggagacaaagacagcaagtgattacctgccacagacaacttggccaacaactcaattaccaccaggatatacttgtgcagaaccctatttattcccagacattaataaacccgatgggccagcaacagcagggatagatgatttgggtgaaattttagctaaaatgaaacagagaacatcgagaggaataagaaaatga

SEQ ID NO: 9967 - DNA, 570 bp, Escherichia coli
atgaaaagagctttgttctttttgctgatgatattcgttagttttggtgttatagctaattgcgaaacacaagctaaagatcaagattgctttaccattttcactaagggtactattttttccgcgtttcctgtcttaaataataaaaccatgtggagatggtatcagaatgaggacataggtgagtattattggcaaacagaacttggtatatgtaaaaataacaaattcacaccaagcggggcgagactcttaattcgcgtcggatcactacgccttaatgaaaatcatgcaaccaaaggaacgttgcaggagttgctaaatacagcagaaaaaacggcgtttctcggcgatcggtttagaagttatataagagcgggtatctatcaaaaaaagagcagtgatccagctcagttgttggcagtccttgataattcaatcatggttaaatattttaaagatgagaagccaacttatgctcgaatgacagcacatctcccgaacaaagatgagtcttacgaatgtttaacaaaagtacagcatgaactgcttcgtagtgaagaaaaataa

SEQ ID NO: 9968 - DNA, 411 bp, Escherichia coli
atgaaagtatgtctgtattttatttccgtatttttttcatcttgctgtatagctgatgttttccattataggatgccttttcgcatccaaacatattcccctgtcactaaaagtaaaattgaaaattttgcaataaaagatggtgcacaaaaattattacagataaatcgtgagaagttattaatgttactgaacaggtctagtaatgagtgttaccattttgatgataaaaatgttaggatttatattattgatggtaaagacagatattatattgataaaaacggggtggtgtcatatggcgttcaagataatgtcatatgctctaataataaaattaatgaagattccatagaaaaaattttattagaagggaatattgacttttggaaaaaactgaaaattaagtga

SEQ ID NO: 9969 - DNA, 129 bp, Escherichia coli
atgccacagggacatcgccaccacaaaagcgccggttctgatgacgtcttccacagtaaacttccggttgctgtcggattctgcctgctgtttcatcagagcgagatgctcaatacgctgcagggctga

SEQ ID NO: 9970 - DNA, 741 bp, Escherichia coli
atgccaacaccaaatcctctggcaccggtgaaaggggccgggaccacactgtgggtttataaggggaacggtgacccttatgcgaacccgctttcagacgttgactggtcgcgtctggcaaaagttaaagacctgacacccggcgaactgaccgctgagtcctatgacgacagctatctcgatgatgaagatgcggactggactgcgaccgggcaggggcagaaatctgccggagataccagcttcacgctggcgtggatgcccggagagcaggggcagcaggcgctgctggcgtggtttaatgaaggtgatacccgtgcctataaaatccgctttcctaacggcacggtcgatgtgttccgtggctgggtcagcagtatcggtaaagcggtgacggcgaaggaagtgatcacccgcacggtgaaggtcaccaatgtgggacgcccgtcgatggctgaagatcgcagtacggtgacggcggcaaccggcatgacggtaacgccagccagtgcgtccgtagtgaaaggacagagcaccacgctgaccgtggcattccagccggaaggcgtaaccgacaagagcttccgtgcggtgtcttcggataaaacaaaagccaccgtgtcggtcagtggtatgaccatcaccgtgaacggcgttgctgcaggcaaggtcaacattccggtcgtatccggtaatggtgagtttgctgcggttgcagaaatcaccgtcaccgccagttaa

SEQ ID NO: 9971 - DNA, 396 bp, Escherichia coli
atgaaacatactgaactccgtgcagccgtactggatgcactggagaagcatgacaccggggcgacgctttttgatggtcgccccgctgtttttgatgaggcggattttccggcagttgccgtttatctcaccggcgctgaatacacgggcgaagagctggacagcgatacctggcaggcggagctgcatatcgaagttttcctgcctgctcaggtgccggattcagagctggatgcgtggatggagtcccggatttatccggtgatgagcgatatcccggcactgtcagatttgatcaccagtatggtggccagtggctatgactaccggcgcgacgatgatgcgggcctgtggagttcagccgatctgacttatgtcattacctatgaaatgtga

SEQ ID NO: 9972 - DNA, 174 bp, Escherichia coli
atgcagcgtgtggccgggaaaaaccgttaccccattgatgtggtgaaaatcccgatggcggtgccgctgaccacggcgtttaaacagaatattgagcggatacggcgtgagcgtcttccgaaagagctgggctatgcgctgcagcatcaactgagaatggtaataaagcgatga

SEQ ID NO: 9973 - DNA, 600 bp, Escherichia coli
atgtcgccggaggactggctgcgggcagagatgcagggtgagattgtggcgctggtccacagccaccccggtggtatgccctggctgagtgagaccgaccggcggctgcaggtgcagagtgatttgccgtggtggctggtttgccggggagcgattcacaagttccgctgtgtgccacatctttccgggcggcgctttgagcacggggtgacggactgttacacgctgttccgggatgcttaccatctggcggggattgagatgccggattttcatcgcgaggatgactggtggcgtaacggtcagaatctctatctggataatctggaggccacagggctgtatcaggtgccgttgtcagcggcgcagccgggcgatgtgctgctgtgctgttttggttcatcggtgccgaatcatgccgccatttactgtggtgacagcgagctgctgcaccatattcctgaacaactgagtaaacgagagaggtacaccgacaaatggcagcgacgcacacactccctctggcgtcaccgggcatggcacgcatctgcctttacggggatttacaacgatttggccgccgcatcgaccttcgagtga

SEQ ID NO: 9974 - DNA, 288 bp, Escherichia coli
atgatactttggtctatgaaaaaagaaaccgatatccggcgtggaaagcattgtgttttcctgatgcatgttcacctggtctttgtcaccagataccgacgccagatttttgaccatgacgcgaaagaaaaactacgcacttacttttcaaaggtatgtgctgattttgaagctgaactggttgaaatggatggcgaaccagatcacgtccatttgttaattaactatcctcccaaactggcgatatccagtctggtaaacagcctcaaaggcgtattgggtaggtga

SEQ ID NO: 9975 - DNA, 327 bp, Escherichia coli
atgaaatatattatttttttattcagagctatatggctggctttatcgcttttaatactattcttttccatgcatagactttcactattagactccactcgtgatgtgagcgagttaattagtctcatgtcttatggaatgatggtaatctgttttccaacaggcatagtattctttattgctctaatatttatagggactgtttcagacattattggcgtaaggattgatagtaagtatattatggcgataataatatggctttattttctgtcaggagggtatattcaatggtttgtattaagtaagcgcattataaacaaataa

SEQ ID NO: 9976 - DNA, 330 bp, Escherichia coli
atgaaaaccttccgctggaaagtgaaacccggtatggatgtggcttcggccccttctgtaagaaaggtgcgctttggtgatggctattcccagcgcgcgcctgccgggctgaatgccaacctgaaaacgtacagcgtgacgatttctgtcccccgttgggaggccacggcgctggaatcgtttctggcagagcacggaggctggaaagcctttctgtggacgccgccttatgagtggcggcagataaaggtgacctgcgcaaaatggtcgtcgcgggtcagtatgttgcgtgttgagttcagcgcagagtttgaacaggtggtgaactga

SEQ ID NO: 9977 - DNA, 675 bp, Escherichia coli
atggcaggcctgaagtccggctggagtgagtgggaagagagcgccacggacagtatgtcgcaggttaaaagtgcagccacgcagacctttgatggtattgcacagaatatggcggcgatgctgaccggcagtgaacaaaactggcgcagcttcacccgatccgtgctgtccatgatgacagaaattctgcttaagcaggcaatggtggggattgtcgggagtatcggcagcgccattggcggggctgttggtggcggcgcatccgcgtcaggcggtacagccattcaggcagctgcggcgaaattccattttgcgacagggggatttacgggaaccggcggcaaatatgagccagcggggattgttcaccgtggtgaatttgtcttcacgaaggaggcaaccagccggattggcgtggggaatctctaccggctgatgcgcggctatgccaccggtggttatgtcggtacaccgggcagcctggcggacagccggtcgcaggcgtccgggaagtttgagcagaataaccatgtggtgattaataacgacggcacgaacgggcagataggtccggctgctctgaaggcggtgtatgacatggcccgcaagggtgcccgtgatgaaattcagacacagatgcgtgatggtggtctgttctccggaggtggacgatga

SEQ ID NO: 9978 - DNA, 1164 bp, Escherichia coli
atgacgctggtgaaaacagggggaggggatacttcgtttacgctgggtaataccggcggtttcgttgatcttgggacctatgagtatgtcctgaaaagcgacggcaacagcaactggaacctgaccaatgatgtcaaacccaacccggaccccaacccaaatccgaaaccggatccaaaaccagacccaaaaccggatccgaaaccagacccgactcccgctccaacgccgacacccgtcccggagaaacgcatcacgccttctacagcagccgtactcaatatggcagcaacattaccgttggtctttgatgctgagctaaacagtattcgcgagcggttgaacataatgaaagcgagtccacacaacaataatgtctgggggacgacgtataacacccgtaataatgtcaccaccgatgcgggtgccgggtttgagcagacgctgaccggaatgacggtggggatcgatagccgtaatgatattcctgaggggattgcgacgctgggcgcttttatgggttattcccattcacatattggttttgatcgtggaggacatggcagtgtgggcagttattctctggggggctatgccagctgggaacatgaaagtggtttctatctggacggtatcgtgaagctgaaccgctttgaaagtaacgtagccggtaaaatgagcagcggtggagccgccaacggcagttatcgcagcaacgggctgggcggtcacattgaaaccgggatgcgatttacggatggtaactggaacctgacgccgtatgcatcgttaacggggttcaccgctgataaccccgaatatcatttatccaatggcatggaatcgaaatcagtcgatacccgcagtatatatcgtgaactgggcgcaacgctgagttacaacatgcgtctggggaacggtatggaaattgagccgtggctgaaggcggctgtgcgcaaagaatttgtcgatgataaccgggtgaaggtgaataatgacggtaatttcgtcaatgatttgtcgggcagacgtggaatataccaggcaggtattaaagcctcattcagcagtacgttaagcgggcatctcggggtggggtatagccatggtgccggtgtggaatccccgtggaacgcggtggctggtgcgaactggtcgttctga

SEQ ID NO: 9979 - DNA, 174 bp, Escherichia coli
atgacccgttctgatgatacccatgaaaacgaggcaaacatgacgccggaagagatgaagaatgagctacgttatcttcgcgcagaaaatgcatatctgaaagccatgcaggagcatctcctggaaaaaaagcgccaggagctggagaaaaaacgaaagtcatccggagcctga

SEQ ID NO: 9980 - DNA, 711 bp, Escherichia coli
atgacaaaagttcttgagaatgaagagttcaattctatacatatagacgaaggtggggtttttaatagtttacgctttgaaaaatgtctttttcaaagctgtagcatacttagcagaaaactaaatgataatagtgatttacctcctcgctttgaaaacattctcattaaagattgcactgctcttaattgtgtaagtggcccagcttttttaaaagatgtaactgttgagaattttaggaccggtgatatttttcttatttattccactatgtttcatcatgtaacattaaaaggaaagcttggggcaataaaaataaataaaaaagattatgtgcgtgactatgatagccatcaaagacatattgagatgatgagaacgagattttattctcagatagattgggcgatggatatatcacaggcgaagtttttaagtttctcctgcaaaggtatcccagcaaaattaattagacgagatagtgagactcaatttgttgtaacgaggaaacgtttcaactctatggatgtactaaatgcagaatttaaaggacaatacccgtttgtttatttactgctggagctctttttagaatcagatgaagatgaccaggtattagttacaccattaggcaaagcaaaaaaatattatcagccaattctcgaaggatttagagagttaagacgagcaggaatactcgaacctaactaa

SEQ ID NO: 9981 - DNA, 510 bp, Escherichia coli
gtgagtgatccgctggggttgctggggggtgagcagacttaccggtatgtgccgaatccgtgtgggtatgttgatccgctgggattagcattttgccccagaatgcagaagacattgcaaaaattaactgacaaggctgttgctgatattatcgctaaccccagactcgctgaagatctgatgtcggcggggagctatgcacatttaaaaaatggaactaatttatatgcagccagttttggtaaggctgttgaacgtagggttgcacagttagttagtgacaattcccgattaagcaaacttgttgaacatactggtcaggccaagggggctaatggacagtttatatcgagccctgacttcaccactaaaggtaaaggcgtgttcgacgttacaacaaataaagcactccaagcgcatatagacagatatactaaagctggtgtgtatactccctataatgatattggttacttggtatatgatgtcgtatatggattatctttctaa

SEQ ID NO: 9982 - DNA, 510 bp, Escherichia coli
atgatcgagcttcatgccattttagctgccaccgccaatggttgcattgggaaggacaacgcacttccctggccaccactaaaaggcgatctggccagattcaaaaaattgaccatggggaaggtggtcattatggggcgcaagacctatgagagcttgcccgtcaaattagaaggtcgcacctgcatcgttatgacgcgccaagcgctggagcttccgggtgttcgtgacgctaacggcgctatcttcgtgaacaacgtcagcgacgccatgcggttcgctcaagaagagagcgtgggcgatgtggcctacgtcattggtggcgctgagatattcaagcgacttgccttgatgatcacgcagattgaattgacctttgttaagcgactgtacgaaggcgacacctacgttgatctggccgaaatggtcaaagactacgagcagaatggcatggaagaacatgaccttcacacttacttcacttaccgtaaaaaggagcttacagaatga

SEQ ID NO: 9983 - DNA, 657 bp, Escherichia coli
atgaccttcgttgccatttcagatacgcacctgcacaactggtcgcagttcgcgataccaacagagtcgggcattaactccaggctgttgcagattcttaaagccattgaagaagcggcttgcgccgccgattaccacgccccagcgggcgtggttccaaccgtctatcacggcggcgatctcttccatgtgcgaggttctttgaccccttctgtgctaaacgcggtgctcgacttttttaagaccatccaccgtgactacggcgttcgctttcgcatgatcgccggcaatcacgatctggaaaccaaagactcatgtcctatgggcaatgcagctgcggcgcttaattcgttgccgtttgtggaggttgtatccgaaaaaacgctgttcgaggaccacaaagtcgctctgctgccatggcgcgattccatggacgatctgcgtgcggatcttgcgcacgttaaagacgcgatcggcgctagtgttgcctctaagtggacagcaatcatccacgcaccggttaacggggttgttcttggcattccagaccatgggttcgacggaaaagagctcgcctcctatggcttcgggttagtgctcgccggtcactaccacaaccacaaaaaaatcggcactgttgcaaatagtcggtggtga

SEQ ID NO: 9984 - DNA, 819 bp, Escherichia coli
atgcgattagcaagtcgttttagttatgcgaaccagatacgccgtgaccgccccttaactcgcgaagaactgatgcaggtcgtccccagcttattcggggaagataagcacacatccagaagcgagaactatacctggatccccaccatcaccgtgctggaaagcctgcagcgggaaggctttcagcccttctttgcctgccagacccgcgtacgtgacccgggccgccgggggtataccaaacacatgctgcgtctgcgccgtgacggggagataaacggacaacatgtccctgaaatcatcctactgaactcccatgacggtacctccagctaccagatgctgccgggttacttcaggttcgtctgccagaacggctgcgtctgtggtcagtctctgggggaagtgcgtgttccacaccggggaaatgtggtggacagagtcattgaaggggcttacgaggtggtgggcgtgtttgaccggattgaggaaaagcgtgatgccatgcagtcgctggtcctgccgccaccggcacgccaggcgctggcacaggcggcgctgacttaccgttatggtgatgaacatcagcccgtcaccactaccgacattctgacgccacgacgccgggaggattacggtaaggacctgtggagtgcttatcagaccatccaggaaaatatgctgaaaggcgggatttccggtcgcagtgccagaggaaaacgtatccataccctggccattcacagcatcgataccgacattaagctcaaccgggcgttgtgggtgatggcagaaacgctgctggagagcatgcgctga

SEQ ID NO: 9985 - DNA, 1113 bp, Escherichia coli; identical to SEQ ID NO: 8414

SEQ ID NO: 9986 - DNA, 765 bp, Escherichia coli
atgagtgagattgtcgctggaaccattctccagttattacgtcagactcaggatagccaattttctacgttggggaaaaaaaatgggcacatggagtctattgacaacaaatcatctctccaggttgacaggaatccatctctttctttgcaaacaaatggaacagagaaattttctacaaagaaaattctcaatatgacttcacgagatcaggggaatgattctgaaccatctaataaaacgatacaatttaaggaaaaaatccataatggtatccatacagaatacatcacagatcaaaaacacagtaataataaagatcgtgaaaaaaaataccgcgatggagacaaaataaatggaccgcaggcccattcattagacattactaacgaaagaaggtttgctgataacagaaccatgtttactcaacatatcgaaaagcaaaggaatgttcatacgctcaatcagaatgatataaataattctgctaataatgccaatgcgcgcgaaaatgaattgacatatcagtttcagcgttggggacaaaatcatacagtccggattctggaaagtagtgaagggatacgactaaaaccatcagacacacttgtctccgacagactccatgaagcccaacacaatgatgttacagcacaacgctgggtattgactgagcaagatgaacgacaagggcaacgacatcagcctcatgatgagcaagaaaatgaaggtaaattcgaaaacgatcagaaggacgaaagttaa

SEQ ID NO: 9987 - DNA, 567 bp, Escherichia coli
atgctgccagagcagtgcttccgtctgcgggtgatgcaccgtctggcgctcaccggtcaggcggcctttctcatcatacccgtaatgcaccgtcacccggtggccttcgctgagatggctgatgcctgtcagccagccgcgttcgtcatactgccactgctctgccggttcaccattcaccgttcgctgtgtgatgcggtctgcttcgtcatagtgccagtgggtgaccagcccctcatcctcgctgcggataagtttgccggtcaggtcgtggtgataacgctgtgtgcggccgtcaaagccggtttcctgtatcagccggtcaagtacatcgtaacggaaggtggtgtggctgccgttttcactggtcaggcggatgacccgcccggcagcatcgtattccatactgcgcgtcagaccgccctgcgtggtacgaacgggctttccccacgcatcgtactgtgtcccgtttctgctgccgtccggggcaatgacggcggtcaggtcaccggcggcgttgtattcataccgcgtttcatggccctgcgtgtctttcaccgcaattaa

SEQ ID NO: 9988 - DNA, 291 bp, Escherichia coli
atggctgatttgagaaaagcagcgcgtggtcgggaatgccaggtaagaatccctggcgtatgtaatggcaatcctgaaacgtctgtactggcacatatccggctggctggattgtgcggtaccggtatcaaaccgccagacctgattgccaccattgcatgttctgcctgtcacgacgagatcgaccgtcgcacgcattttgttgacgctggatatgcaaaagaatgcgcgctggaaggtatggcgagaacgcaggttatctggctgaaagagggggtaattaaggcgtga

SEQ ID NO: 9989 - DNA, 744 bp, Escherichia coli
atgatttcagtaataatggctgtacaccgatatgataaatatgttgatatttcaattgatagtatcttaaatcagacatactctgactttgagttaataataattgcaaatggaggggattgtttcgagatagcaaaacagctgaagcattatacagagctggataacagagttaaaatttatacattagaaatagggcagttatcgtttgcattaaattacgcagtaactaagtgtaaatactctattattgccagaatggattccgacgatgtttcactgccgttacgtctagaaaaacaatatatgtatatgttgcagaatgatttagaaatggtggggactgggatcagacttatcaatgaaaacggtgagtttattaaagaattaaaatatccaaatcataataagataaataagatacttccttttaaaaattgttttgcgcatcctactttgatgttcaagaaagatgttatactaaagcagcgaggttattgtggtggttttaattcagaagattatgatctatggctcagaatcttaaatgaatgtccgaatatacgctgggataatctaagtgagtgtttgctaaattatcgaattcataacaaatctacgcaaaaatcagcactcgcatattatgaatgtgctagttattctctgcgagaattcttaaaaaaaagaactattacgaattttctttcttgcctctatcatttttgtaaagcactaataaaataa

SEQ ID NO: 9990 - DNA, 672 bp, Escherichia coli
atgctcccacagcatctcccccgtctcctggttctccaccgtctgccgttcgcccgtcaggcggcctttatcgtcatagccgtagtggaccgccacacggtggccttcgctcaggtggctgatttctgtcagccagccgtggtcgtcatactgccactgctccgccgggtcgccgttcaccgtccggtgcgtgatgcggtccgacgcatcgtaatgccagagggtgataagtccctcgtcttcactgtggacaagctgccctgtggcgctgtaccggtaacgctgtgtcctgccgtcaaagccgcgctgctccgtcagcctgtccaccgggtcataccggaacgtggactggctgccgttctcgttggtcagcacggtgatgcgcccggcggcgtcatactccatgctgcgcgtcagtccgccctgcgtggtgctgacggcctttccccacgcatcatactgtgtctcactccggctgccgttcggggcaatgatagcggtgaggtcgcctgcggcgctgtactcataacgggtttcacgtccctgcgcatccttctgactgaccagttgaccacgcgggttataactgctgtaagtgctgatgccttcctcccggtgaaccgccgtcctctgaccgtaccggtcgtattcataccgcgtcgtgtaccctga

SEQ ID NO: 9991 - DNA, 489 bp, Escherichia coli
atgctcccacagcatctcccccgtctccgggttctccaccgtctgccgttcgcccgtcaggcggcctttatcgtcgtggccgtagtggaccgccacacggtggccttcgctgatatggctgatttctgtcagccagccgtgctcatcatactgccactgctccgccgggtcgccgttcaccgtccggtgcgtgatgcggtccgacgcatcgtaatgccagagggtgataagtccctcgtcttcactgtggacaagctgccctgtggcgctgtaccggtaacgctgcgtcctgccgtcaaagccgcgctgctccgtcagcctgtccaccgggtcataccggaacgtggactggctgccgttctcgttggtcagcacggtgatgcgcccggcagcgtcataccccatgctgcgcgtcagaccgccttccgtcacactcaccggacgcccgcgtttatcatattcgatggtgctgcgtttaccgtccggtga

SEQ ID NO: 9992 - DNA, 756 bp, Escherichia coli; identical to SEQ ID NO: 8413

SEQ ID NO: 9993 - DNA, 222 bp, Escherichia coli
atgaaaatcatcacccgtggtgaagccatgcgtattcaccgtcagcatcctgcatcccgtctttttccgttctgtatcggtaaataccgctggcacggtagcacggatacatataccggccgtgaagtacaggatattcccggtgtgctggctgtgtttgcagaacgccggaaggacagttttggtccgtatgtccggctgatgagcgtcaccctgaactga

SEQ ID NO: 9994 - DNA, 477 bp, Escherichia coli
atgcaacaactttcctttctgcccggagagatgacgcccggcgagcgcagtctcattctgcgggccctgaaaaccctggaccgccatcttcatgaacccggcgtggccttcacctccacccgtgcggcacgggaatggctgattctgaacatggcgggactggagcgtgaagaattccgggtgctgtatctgaataaccagaatcaactgattgccggtgaaaccctcttcaccggcaccatcaaccgcacggaagtccatccccgggaagtgattaaacgcgccctgtaccacaatgccgctgccgtggtgctggcgcacaatcacccgtccggtgaagtcacacccagcaaggcagaccgccttatcacggaacgtctggtacaggcactggccctggtggatatccgggtgccggaccatctgataatcggtggcagccaggttttctcctttgcggaacacggtctgctttaa

SEQ ID NO: 9995 - DNA, 531 bp, Escherichia coli
atgattcgtccgcgtcacccactgcggggccacggacggatgcggctgccgtacccggctgcactgctggcttatcagctcaaagccgttaaacaccaggtgccgtacgctgtacagtttatcatcgcggtattcccggatttccgcaatactgtcgccgtcccacaggtacgtgatgcggattttcttccggtcgcagcgtttttccgtccgtctgccgctggcgtcgtggcggtattcccactgctcaccctgtgcgctgcaatacccggtcagctggtcacggctgtcccaccggaaccgctctgtttccgggcgatagccgtcacggtgtctggtgcggctgaccatccggcctgcggcgtcatagtcatactgcgtgtttccggcctgtttcagccggtggcctccggcatactggtcagtctcttcacttatccggtgccagcccgcagactgcgccttcaggtagccgcagctgtcatagccataggactcatcgccttcgccatagcccagcccggtgcctga

SEQ ID NO: 9996 - DNA, 213 bp, Escherichia coli
atggtgctggggaacactcaggcacgcggtctgcgcacctatggctgcattcaggatgcggacgcacagcgcgaaggcattaacgcctctgcccgttacccgaaaaactgggtgaccaccggcgatccggcgcgtgagttcaccatgattcagtcagcaccgctgatgctgctggctgatcctgatgagttcgtgtctgtacaactggcgtaa

SEQ ID NO: 9997 - DNA, 399 bp, Escherichia coli
atgacgaaagatgaactgattgcccgtcttcaggagctgggtgagcaactgaaccgcgatgtcagtttgacgggaacgaaagaagaactggcgcttcgtgtggcagagctggaagaagagcttgatgacacggatgaaactgccggtcaggacacccctctcagccgggaaaatgtgctgaccgggcatgaaaatgaggtggtatcagcgcagccggataccgtgattcaggatacggctgaactggtcacggtcgtggcactggtgacgctgcatactgatgcgcttcacgccacgcgggataaacctgtggcatttgtgctgccgggaacggcgtttcgtgtctctgccggtgtggcagccgaaatgacagaacgtggcctggccagaatgcaataa

SEQ ID NO: 9998 - DNA, 687 bp, Escherichia coli
atgcagctaacagcgcacaggcggcagcggcctcacagactgcatcggcaaactccgcgactgcagccaaaaaatcagaaaacaactcaaaagcgagtgagacagcttcaaagaccagcgaaactaatgcgaaaaatagcgaggtggctgcagaatcgagtcagagtgccgcagcaaactccgctaccgcagcaaaaaacagtcaggatgcagcagcccaaagcgagagagcggcagccagttctgcaagtgcggcggctacttctgccacggcatcagccaacagtcaaagagctgcaaaaaccagtgaaaccaacgcaaagacaagcgagactgcagcgaagaccagcgaaacgaatgccaaagccagcgaaactgcggcgaaaaacagtcaggatgcagcggcccaaagcgagagtgccgcagctggttctgcaagcgcggcggctgcttctgccacggcatcagccaacagtcaaagagctgcaaaaaccagtgaagacaacgcaaaggcgagcgagactacagcggcgaactcggcgcaagcatcggcagcaagccagacagcagctaaagcaagtgaagacgcagccagagagtatgcaagccaggcagcggagccgtataaacaagttttgcagccgttgcctgatgtgtggataccgtttaacgattcactggatatga

SEQ ID NO: 9999 - DNA, 702 bp, Escherichia coli
atgctctatttcaacagttgggaacgtccaactgatgatgtggttgatgaatcaacgcatggttttatggagggctttaataaactttttaccgatcttttctcaacctttaagctaaaaaccttcagaacccatcttggtatgtatctatttggtttcggcgctgaatggctatttacagcgacatttacctatttcattgttttcaaccttgaacaaccgagaacatttgtttctgagatgaactcattaagcagtatttgtcagttcttctctacagcattctttatgatgtggtgtgccaaacgaggatttaaacgcccatttatcattgctatcttaattgttgtatcttcagtgattggttatgttggtgtgtactatcttaatattccccatatgacctggctcattattggcatcactatctggtttggtctggggacggggggggtatattacattccgtggagtgtatatgtattccttgccgatgttgatgaggtcttaaccggtcgtcgtcgtgaaggtctttatgctggtgcaatggttatggccggtaagttaatgagagccactgtagtattttgtctgggggttgtcctcagtctgtttggttttgagtcaggcattcatcatcaaccagccagtgcagtaaatgcaattaatggcgtcatgatatttggtgcaggatgctcataa

SEQ ID NO: 10000 - DNA, 312 bp, Escherichia coli; identical to SEQ ID NO: 8810

SEQ ID NO: 10001 - DNA, 198 bp, Escherichia coli
atgcaggatgatattcttattgacgtgataggtaacgtgtacaaagaaaccggagaactgaatgaagatggcgaaccggtatgtgttaaggaagacggatattttgtaaacgtgcgcatcattaatgattcgcaaatatcgtcattattcgatgaatacgtggttgctgttgagcatcaacttcgtggctggatgtga

SEQ ID NO: 10002 - DNA, 510 bp, Escherichia coli
atggtcgggaagcgctgtcatgagcgcactgaccagcgtatccagttcccagccggtgcaggccgatacggccacaaccggatgtacgggccggaacagccggaataccgcatctgttttctcacgaatgttctgtgcctgtgcgggagaaggctgaatgccggccatatcccattcatggcagggctccgttttgtcggcctgcgtcaccacaaacagcacctgctgatgtccccggtgcaggatgtgtcgccagaaatactcatccacagacagggcacggtcatcggctttaatcagccacagtaccaggtcaagttcaggcagaatgtcacggtacagggcttcatactctgcatccctgtcccggctctcgcccaccccgggcaggtcagtgataaccatgctgtgaccatggccactcagacggaagcgctgcacttcccgggtgccggcgtgaacatcactgaccggggtgacctccccctgaaacagtgcattacagagtga

SEQ ID NO: 10003 - DNA, 327 bp, Escherichia coli
atgactaaaaatactcgtttttcccccgaagtccgtcaacgggcagtccgtatggttctggaaagtcagggcgaatatgactcacaatgggcgacaatttgttccattgctccaaagattggctgtacgccggagactctgcgtgtctgggttcgccagcatgagcgggataccgggggcggtgatggagggctcaccaccgctgaacgtcagcgtctgaaagagctggaacgtgaaaatcgtgaactgcgccgcagtaacgatatccttcgccaggcttccgcttattttgcgaaggcggagttcgaccgcctctggaaaaaatga

SEQ ID NO: 10004 - DNA, 327 bp, Escherichia coli
atggatgcagtgacaatactgatccccgccgtctggctggtgacactgatctccaccgtaccgtccggccctgtgatgacagtcgaagcgaccattgcactgttgtctgccgtcacgctgaccgtctgtccgccaagcgtattaccgaatgcatccgtgaccctcatccgcagcgtgttcgccattgcgccgtcagccactgagttatcctggataacgaccagatccgctatttttgccgtgctgacatcggcgacaaacgtcacgttccggctcaggctgctgctgttgatgctggcagtgactgtactggtgcctgccgtctga

SEQ ID NO: 10005 - DNA, 315 bp, Escherichia coli
atgagagttgagcagaataatttcagggacatgttctccgtttatctctccggcccgccgcagacgcagcatgtgtttggtgtatccccggcggcccgggtcgcgcacacgggtctggcaggcgaagaacggctgaaagccttcccgctgcaggctttccagtacggtgatggtggggatgtacgtatagttctggcttcgggacgtgtgtttctcttccccgaaaatccccggcacatggtgcatcagctcttcatgtgtcagtggacggtcacgacgtatctggtttgcagcataaccaaaacgacttactaa

SEQ ID NO: 10006 - DNA, 186 bp, Escherichia coli
atgccgggttgtacatcacgtttattgcccgaaggccctttctcacgcaaccaggctcttgccgtcacaacggcttaccttaatgtgcttattgaagatgaccagggtactcatttccggcgggttatccgcaacgcagagactgacgccggaaggttcgccagtgacggtcttctcagacaataa

SEQ ID NO: 10007 - DNA, 195 bp, Escherichia coli
atgaatgaagccgttaaacagattgagcaggaagtgcttaccacctggcccacagaggcaatttctcatgctgaaaacgtggtgtaccggctgtccggaatgtatgagtttgtggtgaataatgcccctgaacaggcagatgacgccgggcctgcagagcctgtttctgcgggaaagtgttcgacggtgagctga

SEQ ID NO: 10008 - DNA, 435 bp, Escherichia coli
gtgttcgacggtgagctgagttttgccctgaaactggcgcgagagatggggcgacccgactggcgcgccatgcttgccgggatgtcatccacggagtatgccgactggcaccgcttttacagtacccattattttcatgatgttctgctggatatgcatttttccgggctgacgtacaccgtgctcagcctgtttttcagcgatccggatatgcatccgctggatttcagtctgctgaaccggcgtgaggctggcgaagagcctgaagatgatgtgctgatgcagaaagcggcagggcttgccggaggcgttcgttttggcccggacgggaatgaagttatccccgcttccccgtatgtggcggacatgacggaggatgacgtaatgctgatgacagtatcagaagggatcgcaggaggagtccggtatggctga

SEQ ID NO: 10009 - DNA, 477 bp, Escherichia coli
atgcaacagctttcctttctgcccggagagatgacgcccggcgagcgcagtctcattctgcgggccctgaaaaccctggaccgccatcttcatgaacccggcgtggccttcacctccacccgagcggcacgggaatggctgattctgaacatggcaggactggagcgtgaagaattccgggtgctgtatctgaataaccagaatcagctgattgccggtgaaaccctcttcaccggcaccatcaaccgcacggaagtccatccccgggaagtgattaaacgcgccctgtatcacaatgccgcagccgtggtgctggcgcacaatcacccgtcaggtgaagtcacacccagtaaggctgaccgccttattacggaacgtctggtacaggcactggccctggtggatatccgggtgccggaccatctgataatcggtggcagccaggttttctcctttgccgaacatggtctgctttaa

SEQ ID NO: 10010 - DNA, 594 bp, Escherichia coli
gtgtttaccgattctgataggatttattttagtaaatatctgaatgttgaagtaattaatgttgaaaaaaattgctggccgcttaatacgttattacgtttttcatattttttgaaggttattgataagttacaaactaactcatatacttttttctttaatgcaaatgcagttattgtcaaagagattccttttagtacatttatggagagtgatttaatcggtgttattcatccagggtataagaatcgtatatcgattctttacccttgggaaagaagaaaaaatgcgacctgctatcttgggtatttaaagaaaggtatttattatcaaggttgtttcaatggaggtaaaacagcgtcatttaagagattaatacaaatttgtaatatgatgacaatggctgatttgaaaaaaaacctgattgctaaagtacatgatgagtcatatttgaattattattattactacaataagccactattactttctgaattgtactcatggcctgaaaaatatggtgaaaataaagacgccaagattattatgcgtgataaggaaagagaaagttggtatggtaatatcaagaagtaa

SEQ ID NO: 10011 - DNA, 450 bp, Escherichia coli
gtggcgaccgtcatcacttccggtcagcacgtcgtgcgttttccccttgttgtcagttacgcggagataatccccggagaaagtcgacacacggctgtaagccacacccgcgatcgcatacgcgctgaaccattcattcacgcgcacagacggccccgccatcacgctgaaccagcggttacgcacggaatcttcatgccagcgggtatcgctgtagtgcgttttttgctcatcctcagcattggcataactgaaggacgtaatcagccccagcgcgtccgtaaactcataacggtatttcacgttaatcccgttcagattatcgctgccgggagcgttcgtacgggcatgaagataccccgcgctcagtgtggactgatgttcagacgcccatgcaggcgcaccggatacggacagacagatggctgcggacaaaatggctgcacataa

SEQ ID NO: 10012 - DNA, 387 bp, Escherichia coli
atgcatggccacaccttcccgaatcatcatggtgaacgtgcgttttcgctcaacgtcaatgcagcaacagtcgtcctcggcaaactctttccatgccgcttcaacctcgcgggaaaaggcacgggcttcttcctccccgatgcccagatagcgccagcttgggcgatgactgagccggaaaaaagacccgacgatatgatcctgatgcagctggatggcgttggcagcatagccgttattgcgtaccagatcgtccgcgcgggcattgccacgggtaaagttgggcagcagggctgcatccacactttcactcggtggattccacgcccgcaactgcccaccaaatccgctgccaccgccgtgataactggcatattcacgcagtga

SEQ ID NO: 10013 - DNA, 327 bp, Escherichia coli; identical to SEQ ID NO: 10004

SEQ ID NO: 10014 - DNA, 156 bp, Escherichia coli
atggataatcttattggcacaccaccaaactacgtagttccccataagtatatagacacggagcaaatggaatatttatgtcatctcaatcgtttttctaaatcacctgacgattttttgataacactacgcgccctaacaagctgcgaacgttaa

SEQ ID NO: 10015 - DNA, 297 bp, Escherichia coli
atgaacgcttattacattcaggatcgtcttgaggctcagagctgggcgcgtcactaccagcagatcgcccgtgaagagaaagaggcagaactggcagacgacatggaaaaaggcctgccccagcacctgtttgaatcgctatgcatcgatcatttgcaacgccacggggccagcaaaaaagccattacccgtgcgtttgatgacgatgttgggtttcaggagcgcatggcagaacacatccggtacatggttgaaaccattgctcaccatcaggttgatattgattcagaggtataa

SEQ ID NO: 10016 - DNA, 396 bp, Escherichia coli
atgacgaaagatgaactgattgcccgtctccggtcgctgggtgagcaactgaaccgtgatgtcagcctgacggggacgaaagaagaactggcgctccgtgtggcagagctggaagaagagcttgatgacacggatgacgcagccggtcaggacacgtctgtcagcccggaaaatgcgctgaccggacatgaaaatgaggtggtatcagcacagacggataccgtgactgatacggctgctctggtcacggttgtggcactggtgacgctgcataccgatgcacttcacgccacgcgggatgaggctgtggcatttgtgctgccgggaacggcgtttcgtgtctctgccggtgtggcagccgaaatgacagaacgtggcctggccagaatgcaataa

SEQ ID NO: 10017 - DNA, 387 bp, Escherichia coli
gtgttccgtggctgggtcagcagtatcggtaaggcggtgacggcgaaggaagtgattacccgcacggtgaagatcaccaatgtgggacgtccgtcgatggcagaagatcgcagcacggtgacggcgacaaccggcatgacggtgacacccgccagtgcttccgtagtgaaagggcagagcaccacgctgaccgtggcattccagccggagggcgcaaccgacaagagcttccgtgcggtgtctgcggataaaacaaaagccaccgtgtcggtcagtggtatgaccatcaccgtgaaaggtgttgctgcaggcaaggtcaacattccggtcgtatctggtaatggtgagtttgctgcggttgcagaaatcaacgtcaccgccagttaa

SEQ ID NO: 10018 - DNA, 357 bp, Escherichia coli
gtggtgggcgtgtttgaccggattgaggaaaagcgtgatgccatgcagtcgctggtcctgccgccaccggcacgccaggcgctggcacaggcggcgctgacttaccgttatggtgatgaacatcagtccgtcaccactaccgacattctgacgccacgacgccgggaggattacggtaaggacctgtggagtacttatcagaccatccaggagaatatgctgaaaggcggaatttccggtcgcagtgccagaggaaaacgtatccacacccgtgccattcacagcatcgacaccgacattaagctcaatcgcgcattgtgggtgatggcagaaacgctactggagagcctgcgctga

SEQ ID NO: 10019 - DNA, 246 bp, Escherichia coli
gtgcagctccgggtcgggcaggcggttacctgccgggtccgtggcatacgggatgcggatatccaggttcgctgccgtggtgtggacgccggtcagcctgccggtgtcgctgtagctgtaactccgggtctggcgcgggctgctgatgcggatgagttcgccgttgtcgttccaggtgtaatcgcggtcatactgcaggctgttcaggtgctggtgcgtattaccgtgaaggagatcggtgagtaa

SEQ ID NO: 10020 - DNA, 222 bp, Escherichia coli
gtgcagctccgggtcgggcaggcggttgcccgccgggtccgtggcatacgggatgcggatatccaggttcgctgccgtggtgtggacgccggtcagcctgccggtgtcgctgtagctgtaactccgggtctggcgcgggctgctgatgcggatgagttcgccgttgtcgttccaggtgtaatcgcggtcatactgcaggctgttcaggtgctggctctgtaa

SEQ ID NO: 10021 - DNA, 186 bp, Escherichia coli
atgaatctatatgaaatagatgatctctgtgcaaaaagaattatatctttgcttcctgaagcggagaaaaatatagaaatacgtgtaaatggcgcgctaactggctatggcgaacttgttgaagtggatgataaattgggcgtagaaattcattcttggttatcagggaataataatgtcaaatag

SEQ ID NO: 10022 - DNA, 174 bp, Escherichia coli
atgcagcgtgtggccgggaaaaaccgttaccccattgatgtagtgaaaatcccgatggcggtgccgctgaccacggcgtttaaacaaaatattgagcggatacggcgtgaacgtcttccgaaagagctgggctatgcgctgcagcatcaactgaggatggtaataaagcgatga

SEQ ID NO: 10023 - DNA, 855 bp, Escherichia coli
atgggaaatggatggcatgaatggccactggttatctttaccgtattgggtcaatgcgtagtaggcgcgctgattgttagcggaattggctggttcgccgccaaaaataacgcagaccgtcagcacattattcgtggcatgtttttcctctggctgttgatgggcatcgggtttattgcctctgtcatgcacctgggatcgccactgcgggcgtttaactcgctgaatagaatcggagcttctggtctgagtaacgagattgctgccggttccatattttttgccgttggcggattatggtggctggtggcggtcatcggtaaaatgccgcaagcgttggggaaactctggttacttgtcagcatggcgctcggcatcattttcgtctggatgatgacctgcgtgtatcaaatcgacactgtgccaacctggcataacggttacactacgctggctttcttcctgacggtattgttgagcggtccaatacttgctgccacaattctacgtgcagcccgcgttacatttaataccacaccatttgccatcattagcattctggcgctgatcgcttgtgccgggttgattgtgctgcaaggtttgtctctggcgtctattcactcatccgtacaacaagccagcgcactggtaccagattacgcctccttacaggtctggcgtgtggtattgttatgcgcaggtctaggatgctggctttgtccgctcattcgtcgccgtgaacctcacgttgccggacttgttctggggttaatcctcattcttggcggtgagatgatcgggcgtgtgctcttttatggcctgcacatgacagtaggaatggctattgcaggttaa

SEQ ID NO: 10024 - DNA, 348 bp, Escherichia coli
atgacccatttttcacagcaagataatttttctgttgcggcgcgcgtgttgggcgcgctgttttattacgctccagagagtgcagaagccgcacctctggttgcggtactcacccgtgacggctgggaaactcagtggcctctaccagaagcgtcattagcgccgctggtgacggcttttcagacacagagtgaagagacgcctggcagcgtttgtttgtcggcccgtgggcactgccgtctccgccgtggggatcggtctggctggatcgcgaatctgtgctgtttggcgattcaacattggcacttcgtcagtggatgcgcgagaaaggcattcagttcgaaatga

SEQ ID NO: 10025 - DNA, 1221 bp, Escherichia coli
gtggttgctgaaaatcagcctgggcacattgatcaaataaagcagaccaacgcgggcgcggtttatcgcctgattgatcagcttggtccagtctcgcgtatcgatctttcccgtctggcgcaactggctcctgccagtatcactaaaattgtccgtgagatgctcgaagcacacctggtgcaagagctggaaatcaaagaagcggggaaccgtggccgtccggcagtggggctggtggttgaaactgaagcctggcactatctttctctgcgcattagtcgcggggagattttccttgctttgcgcgatctgagcagcaaactggtagtggaagagtcgcaggaactggcgttaaaagatgactcgccattgctggagcgtatcatttcccatatcgatcagttttttatccgccaccagaaaaaacttgagcgtctgacttcgattgccataaccttgccgggaattattgatacggaaaatggtattgtacatcgcatgccgttctacgaggatgtaaaagagatgccgctcggcgaggcgctggagcagcataccggcgtaccggtttatattcagcatgatatcagcgcatggacgatggctgaggccttgtttggtgcctcacgcggggcgcgcgatgtgattcaggtggttatcgatcacaacgtgggggctggcgtcattaccgatggtcatctgctacacgcaggcagcagtagcctcgtggaaataggccacacacaggtcgacccgtatgggaaacgctgttattgcgggaatcacggttgcctcgaaaccatcgccagtgtggacagtattcttgagctggcacagctgcgtctcaatcaatccatgagctcgatgttacatggacaaccgttaaccgtggactcattgtgtcaggcggcattgcgcggcgatctactggcaaaagacatcattaccggggtaggcgcgcatgtcggtcgcattcttgccatcatggtgaatttatttaacccacaaaaaatactgattggctcaccgttaagtaaagcggcagatatcctcttcccagtcatctcggacagcatccgtcagcaggcccttcctgcgtatagtcagcacattagcgttgagagtactcagttttctaaccagggcacgatggcaggcgctgcgctggtaaaagacgcgatgtataacggttctttgttgattcgtctgttgcagggttaa

SEQ ID NO: 10026 - DNA, 396 bp, Escherichia coli
atgttaacgaaagatctttcgattactttttgcggcgtgaagtttcccaacccgttctgcctttcttcttcgccggtaggcaactgctatgagatgtgcgccaaagcctacgacacaggttggggcggcgtggtgtttaaaacgatcggtttttttatcgccaacgaagtctcgccgcgttttgatcatctggtgaaagaagataccggttttatcggcttcaaaaatatggagcagattgctgaacatccgttggaagagaatctggccgccctgcgtcggctgaaagaagattatccggacaaagtattgatcgcttcaatcatgggcgaaaatgagcagcaatgggaagagctggcgcgtctggtgcaagaagctggcgcggatatgatctag

SEQ ID NO: 10027 - DNA, 1239 bp, Escherichia coli
atgccgcaacaaaattatctggatgaactcactccggcttttacgcctttactggcgattaaagaagcctctcgctgtttattatgtcatgacgctccctgtagtcaggcttgcccggcacagaccgatccggggaaatttattcgctcaatctactttcgtaattttaaaggcgctgccgagacaattcgcgaaaataatgccctcggtgccgtttgtgccagagtgtgcccgacggagaaattatgccaaagcggttgtacacgtgccggtgttgatgctcccattgatatcggtcgtttacagcgttttgttactgattttgaacaacaaactgggatggaaatttatcagcccggtactaaaacgctcggcaaagtcgccattattggcgcaggtcctgccggattgcaggccagtgtgacgctgacaaaccagggttatgacgtcacgatccatgagaaagaagcacaacccggtggctggttgcgtaacggcattccgcaattccggttaccgcaatcggtgctggatgcagaaatcgcccgtatagaaaaaatgggcgtgaccattaagtgcaataacgaaatcggtaaaacacttaccctggagcagctgaaagcggaaaaccgcgcggtactggtcaccgtagggttatcgagcggttccgggttatcgctgtttgagcatagcgacgttgagattgccgtcgacttcctgcaacgtgcacgacaggcgcaaggcgatatcagcattccacaaagcgcattaattatcggcggcggtgatgtcgcgatggacgtagccagcacgctgaaagttctcggctgtcaggcggtaacctgcgtagcgcgtgaagagttagatgagtttccggcaagcgaaaaagagtttaccagcgccagagagctgggcgtttcgatcatcgatggatttacaccagtagccgtggaaggcaataaagtcacctttaagcatgttcgtttaccaggtgaactaacgatagcggcggacaaaattattctcgctgtaggtcaacatgccgaacttgctgttttttccgcactggaaccgcagcgtaacaccatcgaaacgcaacattaccagacccgcgacccgcaagtctttgctgctggcgatattgttgagggtgacaaaaccgtggtctatgcagtgaaaaccgggaaagaagccgccggggcgattcatcactatttagagggagcttgctcatgttaa

SEQ ID NO: 10028 - DNA, 1701 bp, Escherichia coli
gtgattgttaaacgacccgtctcggccagtctggcccgggcctttttttacattgtgctgctgtcgattctttccacgggtatcgctctgctaacgctggcgagcagtttacgcgacgctgaggctatcaatattgccggatcgctgcgtatgcagagttaccgcctgggctacgacttgcaaagtggcagtccacaactcaatgcacatcgtcagttatttcagcaggcactgcattcaccggtattaaccaatctcaacgtctggtatgtgccagaggcagtaaaaacccgctatgcgcatctgaatgccaactggctggagatgaataatcggctcagcaagggcgacttgccgtggtatcaggccaatattaataattatgttaatcagatagacctgttcgtgctggctttacagcactacgctgaacgcaaaatgctgctggtggtggcaatttccctggctggcggcatcggtattttcacgctggtcttttttactttgcgccgcatacgccatcaggtggttgccccgctgaatcagctggttaccgccagtcagcgtattgaacacgggcagttcgactcgccgccgctggataccagcctgccgaatgagcttggcctgcttgcaaaaacctttaaccagatgtcgagcgagctgcataaattgtaccgttcgctggaggcgtcagtagaagaaaagacccgcgatctccacgaggccaagcgtcgtctggaggtgttgtatcagtgttcgcaggcgctaaacaccagccagattgatgtgcattgtttccgccatattttgcagattgttcgcgacaatgaagcggctgaatatctggagttaaatgtcggtgacaactggcggattagcgaagggcagccaaacccggaattgccgatgcagattttaccggtgacaatgcaagagacggtttacggcgaactgcactggcaaaatagtcacgtttcatcatcagaaccgctgcttaacagcgtttcgtcgatgctgggacgcggtttgtactttaatcaggcgcagaagcattttcagcagttattgttgatggaagaacgtgcgaccatcgcccgcgaattgcacgactcgctggctcaggtactttcttacttacgtatccagttgacgttactgaagcgttcgataccggaagataacgccaccgcacaaagtatcatggccgatttttcccaggcgttgaatgatgcttatcggcagttacgcgagctgttgactactttccgcctgacgctgcagcaggcggatctcccctccgcgttgagggaaatgctggatacgttacaaaatcaaaccagcgccaaactgaccctcgactgccgtctgccaaccctggcgctggatgcgcaaatgcaggtgcatttgttgcaaattattcgcgaagcggtgctgaatgcgatgaagcacgccaacgccagcgaaatcgccgttagctgcgtcaccgcgccggatggcaatcacacagtctatattcgcgacaacgggattggcatcggtgaaccgaaagaacccgaaggccattatggtctgaatatcatgcgcgaacgcgcggaaagattgggtgggacgctgactttttcacaaccttccggcggcggcacgttagtgagtattagctttcgctctgtggagggtgaggaaagtcagctgatgtaa

SEQ ID NO: 10029 - DNA, 1452 bp, Escherichia coli
atggcgaatttctttattgatcgccccatttttgcctgggtgctggcaatcctgttgtgtctgacaggtaccctggcgattttttcattgcccgttgaacaataccccgatctcgcgccaccgaatgtgcgagtgaccgctaactatcccggcgcatcggcccagacgctggaaaacaccgtgacccaggttatcgagcaaaatatgacgggcctcgataatctgatgtatatgtcatctcagagcagcggcaccggtcaggcatctgtcacgttaagttttaaagcaggcaccgatccggacgaagccgtgcagcaagtacaaaaccagctacaatcagccatgcgaaagttaccgcaggcggtgcaaaatcagggcgtgacggtgcgtaaaaccggcgatacaaacattctgaccattgccttcgtctctaccgatggttcgatggataaacaggatattgccgattatgttgccagtaatattcaggacccgttaagccgcgtgaatggcgtcggggatatcgatgcctatggttcgcaatattccatgcgtatctggctggacccggcgaaactcaacagtttccagatgacggctaaagatgtcaccgatgccattgaatcacagaacgcgcagattgcggttgggcaacttggtggtacgccttccgtcgataagcaggcgctcaacgccaccattaacgcccagtcactgctgcaaacaccagaacagttccgcgatatcaccttgcgggtgaatcaggacggctcagaggtaaggctgggcgatgtcgccaccgtcgaaatgggggcggagaaatacgattatcttagccgcttcaatggtaagccagcctccgggctgggggtaaaactggcctccggcgcgaacgaaatggcgacagcggagctggtgctcaatcgtctcgacgagctggcgcagtattttccacacggactggaatacaaggtggcgtatgaaaccacctcttttgtaaaagcctccattgaagacgtggtgaaaacgctgctggaagctatcgccctggttttcctcgttatgtatctgttcctgcaaaacttccgcgccacgctgatacccactatcgccgtgccggtggtgttgatgggaaccttctcggtgctttatgccttcggctatagcgtcaacaccttaaccatgttcgcgatggtgctggctatcggcctgttggtagatgacgccatcgtggtggtggaaaacgtcgaacgtattatgagtgaggaaggactcactcctcgcgaagccacacgtaaatcgatggggcaaatccagggcgcactggtcgggattgcgatggtgctttcggcggtatttgtgccaatgaccttcttcggcggcaccaccgggccatctatcgccagttctctattaccattgttgcggcgatggtgctgtcagtactggtag

SEQ ID NO: 10030 - DNA, 2757 bp, Escherichia coli
atgaccaactacagcctgcgcgcacgcatgatgattctgatcctggcaccgaccgtccttattggtttattgctgagtatctttttcgtcgtgcatcgctataacgacttgcagcgtcaactggaagatgccggtgccagcattattgagccgcttgcagtttctactgaatatggcatgagtctgcaaaatcgcgaatctatcggtcagttaataagcgtactgcatcgtcgccattctgatattgttcgcgcgatttcggtttatgatgaaaataaccgactctttgtcacctccaattttcatcttgatccctcatcaatgcagctcggcagcaacgtgccgtttcctcgccagctcactgtcactcgtgacggcgatataatgatcctccgcacgccgattatttctgaaagttactcccccgacgaatcgcccagtagcgatgccaaaaatagtcaaaatatgctgggatatattgcgctggagctggatcttaaatcggttcgcttgcagcaatataaagagatctttatttccagcgtgatgatgctgttttgtatcggtattgcgcttatttttggctggcgcttaatgcgcgatgtaaccggtccgattcgcaacatggtgaataccgtcgaccgcatccgtcgcgggcaactcgacagccgggtggaaggatttatgctcggcgagctggatatgctgaaaaacggtatcaactcgatggcaatgtcgctggcggcttatcacgaagagatgcaacacaatatcgaccaggcgacgtccgatctgcgtgagacgctggagcaaatggagattcagaacgttgagttggatctggcgaaaaagcgcgcccaggaagcggcgcgtattaaatccgagtttctggcaaatatgtcacacgagctgcgtacaccactgaatggtgttattggctttacccgcctgacgctgaaaacagaattaacaccaacgcagcgcgatcacctgaatacgattgaacgttcggcaaataatttgctggcaattattaatgatgttctcgacttctcgaaactggaagccggtaagctgattctggaaagtattccattcccactacgcagcacgctggatgaagtcgttaccctgctggcacattcttctcacgataaagggctggaactgacgctcaatattaaaagcgacgtgcctgataacgtgatcggcgacccactacgattacagcaaatcatcactaacctggtagggaatgcaattaaattcaccgagaatggcaacattgatattctggtagaaaaacgtgcgctgagtaataccaaagtgcaaattgaagtgcagattcgggataccggcattggtattcctgaacgcgatcaatcgcgcttattccaggccttcagacaggctgatgccagtatttcccgccgtcatggtggcaccgggctggggctggtgattacacaaaaactggttaatgaaatgggcggcgatatttcgttccatagccagccgaatcgcggttcaactttctggttccacattaatctcgatctgaacccgaacattattatcgaagggccatccacccagtgcctcgctggtaagcgcctggcctatgtcgaaccaaactccgcagcagcacaatgcacgctggatattttaagtgaaacgccgctggaagtggtttatagcccaacgttctccgcgctgcctcccgcgcattacgacatgatgttattaggcatagcggtgaccttccgcgagccgctaacaatgcaacatgagcgattagcgaaagcagtatcgatgaccgatttcctgatgctggcacttccttgccatgcacaagtcaatgctgaaaaacttaagcaagatggtatcggcgcgtgtctgctgaaaccattaacacctacgcgcctgttgcctgccctgacagaattttgtcatcacaaacaaaacacgcttttgcctgtaaccgatgaaagtaagctggcaatgacagtcatggcggttgatgacaaccccgctaacctgaaacttatcggcgcattgctggaagatatggtgcaacatgtggaactttgcgatagcgggcatcaggcggttgaacgggcgaaacagatgccgttcgatttaatcttaatggatattcaaatgccggacatggacggcattcgggcatgtgagctcatccaccagctcccgcatcagcagcaaacgccggttatcgcggtaacggcgcatgcgatggccgggcaaaaagagaaactgcttggcgcggggatgagtgattatctggccaaaccgatcgaagaagagcgattgcataatttgctgttgcgctacaagcctggcagcggtatttcctctcgcgtcgtgacgcccgaagtcaacgaaattgtggtcaacccgaatgcgaccctcgactggcaactggcactacgccaggcagcaggaaaaaccgatttagcgcgcgatatgctgcaaatgttactcgatttcctgcctgaagttcgcaacaaagttgaggaacagctggttggagaaaacccggaaggcctggttgatttgattcataaactgcatggcagttgcggctatagcggtgtaccgcgtatgaagaatctctgccaactgatcgaacaacagctacgtagcggtactaaagaagaagatttagagccggagctgctggaactgttggacgagatggataatgtagcgcgcgaagccagcaaaattctcgggtaa

SEQ ID NO: 10031 - DNA, 291 bp, Escherichia coli
gtgcgcgggatgtacgttcgcgggcgtaaaatggtggcgtttctggtctgttgtgtcgcgctggcgataagcgcgatgtatgagttaatcgagtggtgggcagcgctggcaatgggccagggcgcagatgattttctcggtactcaaggcgacccgtgggatacgcaatccgatatgttctgcgcactactgggcgcattaacgacggtgatattcctcgctcgctttcattgccgccagctacggcgctttggcttaatcaccagagcgccggaagcgattaccccttaa

SEQ ID NO: 10032 - DNA, 657 bp, Escherichia coli; identical to SEQ ID NO: 8826

SEQ ID NO: 10033 - DNA, 483 bp, Escherichia coli; identical to SEQ ID NO: 9132

SEQ ID NO: 10034 - DNA, 1821 bp, Escherichia coli
atgaattatatagatgaacatgatataaactactcacgatatggttttgaatcgcttgcattagctcatcccgaaatagatataaagggattatggcattgtgattcaaaatattatgtgttgattgaaaaggatggaatactcactgaggatgacttaaaggaatttgaaaagatacaagaagagcatcgtattattggtagccctaaattattactaacacaaacactccctaataatgcaataaaaatcgcaggaagagaaaactacgaagttgctctttcttttggcgcaccatacacagattctgagttagaaaacatactttatcaatatataaataaaaaatttcatccatttaaatacacacttaaattaccatctcttcatctggttttgtcattcccaagaaaattgagtgatgatgaaaagtcagaaataggaacaacattatacagcgtcggtattaaatatgtaattgattatttaatagatgattcattattaaactttgaactatctgaaaaaaggcactctgatgcattagcgttaatacctaataaagcattacctaaaagtgtcccaacaagagtaagaaacctgcatgaagaagatgaggatttctggcttgataacagaagtttaattctcacttcatatgacttcgaaaaaagtagtgcccttccaacaagttttaacaaaaaaaatagttgttgtttcgttgatgcgcaaatttttaaaccagataatataagaaactatttatcagtttatgaacgagtagtgatatcatatccactcatcggacaagacaatgacttcttagaccatttaaaaataccgaaacaacatttactagagttaatatcgagaggtagaattcaatttgcattaccacaaaacataataagatataacttatcatttcttgaagaatgcctaaacactaatcctgaatgcattattctgtccagacgattagcatcatcctcaattattgacatcagaaataaaacaggttttcttgctacaacattttctttcgaagaaaaattaaatgttctcaaaacattgagggcactggatggcaaaatattcaacttatttatcaaggccctatctcaaaattggcactcaatggagatgaatatccatgagcgtggagccatgggtgtttcaaacattggcatagcccccgtcatgtcagagttattcaataggcaaggacgagaccttcttcttgaactattattttctgctatgccattggagtgggcgatggcattaaatgctgatttttatccataccacagcaatgagcattcacaatataatgcttctgcatgttgtttatatggatataatggttttagaataaatgaagaggctattgtaaaatctaaaatcggtgaaatagcaacaagaatactatcaatcgataatgacatgtcagccttagaattagacgacgcaatacttaaaggtgatattccgaggataagggatttttcaagatcgttgtctaatttatcaagtgaagagcttgatataaaaatttacgaactaaacaaagaaataaaaaaaatagaaaataaagaaagtaaactttcttcattagacttatgcggacttatagcatcaacaataggtgtttacgatgacaatccatatatcccatttggatttgccttttttaaaataatctctagcgtgttaaattcaaatgatattagctcgaaaaacatcgataaaataaaatcaacacttttaggtacgcaaactgaaacattgttaataaaaagaacgaaatccagaatgtaa

SEQ ID NO: 10035 - DNA, 564 bp, Escherichia coli
atgaatttaatattctctaaatattctgtattttttatttttttcgctttttttgcttttccgctctcagggcaggccaatgattcagttgttgttacatttactgggattttgttggcaaaaagctgtgacattactaccggaagtaaagatcagtcggtaaaaatgggcacttatgatgctaatgaatttttaaatgtaggtgatgtttctccgagtcaaacgtttacgattaatgtacaaggatgcccgactgcaaaaagtactgtttatagttctggtgtgagcgccaatgtgcggtttactggtgatgcagatgccattaatagcgcattactgcgtctctccgccggtgcagatagtgcgactggactgggaatagaaatattggataacaatgatgtggcgattgccattaatggtgaatcaggttttcgtgatttagtgttaaatgaaaacggtgatgctaatttgacgtttaaacttcgctataaatcaactcaggaaaatgtacatgccgggcaagcaaatgctctgttgtattttgatatcgattatcagtga

SEQ ID NO: 10036 - DNA, 2595 bp, Escherichia coli
atgaacctaaagctcaaaagatgcgaatattggatggcggcacaaaagcagatgaaacgggttgtgccgcttcttctggttattatgcctgcatgttcaatcgcgggaatgcgctttaaccctgcttttctgtcgggtgatactgaagctgttgctgacttatcccgcttcgagaaagggatgacttatcttcctggtagctatgaagtcgaagtttgggtcaatgattcccctttactctctcgtactgtaacttttaaagcagacgatgagaatcaactgattccctgcctttcacttgctgacttattaagccttggaattaacaaaaatgcgctgccagagcaggctttggcttcatctgaaaatagttgccttgatttgcgtatctggtttcccgatgtgcattacatgccggagctggatgcacagagacttaaactgacctttccacaggcgataataaaacgtgacgctcgcggatatattccaccagaacagtgggataacggtattacagcttttttgctgaattatgacttttctggtaataacgatcgtggtgattactcttcaaataactattatttaaatcttcgcgctgggatcaatattggtgcatggcgttttcgcgattattcaacctggagtcgtgggagtaattcagcaggtaaactggagcatatcagtagtacgttgcagcgcgttattattcctttcagaagtgaattaacgctaggagatacatggtcatcatcagatgttttcgacagtgttagtattcgtggcataaaactggaatctgacgaaaatatgttgcccgatagtcaaagtggtttcgctcccacggtgcgcggaattgcgaaaagtcgcgctcaggtaacaatcaaacagaatggttatgtcatttatcaaacctatatgccgccgggaccgtttgagattagcgatcttaacccgacatcatctgcgggagatctggaagttaccatcaaagagtctgataattcagaaactgtctataccgtaccttatgccgctgtccccatcctgcaacgagaaggtcatttaaaatattctactacggttggccaatatcgaagcaatagctataaccagaaaagtccttatgtatttcagggggaattaatttggggtttaccctgggatattacggcttatggtggggcacaattctctgaggattaccgggcgttggcgctcggccttggcctgaatctgggtgtatttggtgcaacatcgtttgatgttactcaggctaacagttcgcttgtggatgggagcaaacatcaagggcaatcttatcgttttctttattccaaatcgttagttcagacaggaacagcattccatattattggctatcgttattcaacccagggcttttacactttaagtgatacgacataccaacaaatgtcagggactgttgttgatccaaaaacgttagatgataaagattacgtttataactggaatgatttttataacttgcgttatagcaaacgtggaaaatttcaggctagtgtatcgcaacctttcggtaactacgggtctatgtatttatcggctagtcagcaaacatactggaatactgataaaaaagattctttataccaagttggttataacaccagtattaagggtatctatctaaatgttgcgtggaattacagtaaatcaccagggacaaatgcggataaaattgtctcgctaaatgtctcattacctataagtaattggttatcttccacgaatgatgggcgctcatcatcgaatgccatgactgcaacgtatggttatagtcaggataaccacggacaggtaaaccaatatacgggggtatctggttctctgttggagcagcataatctcagttataacatacaacatggttttgctaatcaggataatagcagtagtggttctgttggtgttaattatcgtggggcatatggttccttgaattccgcctacagttacgataatgaaggtaatcaacaaataaactatggcatcagtggtgctcttgttgtacatgaaaatggtcttacgttgagtcaaccattaggtgaaactaatgttttgataaaagcgcctggagcgaataatgtggatgttcagcgggggacaggaatatccactgactggcgtggatatgcagttgttccttatgcaacagaatatagacgtaataatatttcattagatcctatgtcaatgaatatgcatactgaactggatatcacttccactgaagttattccgggaaaaggtgcgttagttcgtgcagagtttgctgctcatatcggtattcgtggtttgttcacagttcgttatcgtaataaatcagtcccattcggtgctacagccagcgctcagattaaaaacagtagtcaaattaccgggattgtcggcgataatggacaactttatctctcaggattgcctttagaaggtgttattaatatccagtggggagacggtgttcagcaaaaatgtcaggctaattacaagctccctgaaacagaactggataatcctgttagctatgcaactctggagtgccgctaa

SEQ ID NO: 10037 - DNA, 753 bp, Escherichia coli; identical to SEQ ID NO: 8854

SEQ ID NO: 10038 - DNA, 705 bp, Escherichia coli
atgaaattcaatttatctaatttatccgcagtattactggcatcaggtatgctgatgtctactgcggtaaccgcagcacccggcgatgcaacacaatttggtggggcggatactgactggagcaccgttgattatcccaggctcactgatatggatgacaacgttgattcaatgggggggaaaatccgctttactggccgtgtagtgaaagctacctgtaaggtcgcaaccgattcaaaacagattgaagttgtcctgccggttgtgccttccaaccttttcactggtatcgacgtagaagcacagggggcgagcaaccagaccgatttcaatattaatctgaccgaatgtagcaatacagatgatcagaaaattgagttccgttttaccggtactgcagatagcgctaataaaacgctcgctaacgaagtagaaggatcaacggatgctgacaacagcggcaatgcgggggcgactggtgtagggattcgaatttactccaaaggtacgacgaataatggtctgattaacctgaataccactgcggcagagggtagcgcctccaccgccgcttatacaattccaggaaatgctacgacccatgatttcagcgcggcctttactgcaggttatgctcaaaacggtagcactgttgcaccaggtgtagttaagtcaacagcaagttttgttgtgctgtacgagtaa

SEQ ID NO: 10039 - DNA, 828 bp, Escherichia coli; identical to SEQ ID NO: 9067

SEQ ID NO: 10040 - DNA, 198 bp, Escherichia coli
atgaaattattaaccacagaaacggcgctggatattctgattgcgtggctgcaggacaatattgactgcgaatcagggattatcttcgacaacgatgaggataaaacggattcggcagcactgttgccctgtattgaacaggctagggaggatatccgtatcctgcgccaactgcagtttctgcaacaaaaccggtga

SEQ ID NO: 10041 - DNA, 966 bp, Escherichia coli; identical to SEQ ID NO: 8922

SEQ ID NO: 10042 - DNA, 534 bp, Escherichia coli; identical to SEQ ID NO: 7078

SEQ ID NO: 10043 - DNA, 198 bp, Escherichia coli; identical to SEQ ID NO: 8970

SEQ ID NO: 10044 - DNA, 141 bp, Escherichia coli
atgcctcttgccttgtcgaatgctgcagaaattgaatccttgggtattggtgaggtaattaaagtttttttttgtttttattttgtttattataatttcattcattaccttgccttcaggggctctaaccgagcgtattaa

SEQ ID NO: 10045 - DNA, 279 bp, Escherichia coli
atgaaccgtcttcatgctgaaagtgctgtcgtggtcacctgcgcctgtggactccgcagccatgttcacatcccgtccggcgcggatatccatactgttttcagccgtaataccggcagcctggctgttcacatcacgaccggcggaaagcatcagactgttcccggcagtgaccgtgggggccacggcatgagtttcataccccccggacccgccatagcgacgacgttctccggcctgtatcgcgttcatgttcaggtcattaccggcggacagtaa

SEQ ID NO: 10046 - DNA, 255 bp, Escherichia coli
atgcgccgtattcatggtgatatcgccacgcatggtttcaatattaccggaacggttaatgatttcgctgtttgccgtcccgctgctgtccttctgtacccacagactgttgtcggccaggatatcaccatgctggttatgcagacggtctgtaaacagcttcaggttattccccgcataaatcagcgcactgttcagcagggtaccggccacccggagacagcatggctgccggagacgaaaatgcggggataa

SEQ ID NO: 10047 - DNA, 306 bp, Escherichia coli
atgcccggttcttacaacaatatcgccctgatgcgtctcaatattcccggaattattgataatctctgtgtttgcaccgccggaagcatccttctgtacccacagactgttgccggccaggatatcaccatgctggttatgcagacggtctgtaaacagcttcaggttattccccgcataaatcagcgcactgttcagcagggtaccggccacattcattgtcagactgcctgccgtgccggtaaaaccactgatggtgatatcactccggctgttcagactcacatcgccaccgccctgaagtga

SEQ ID NO: 10048 - DNA, 630 bp, Escherichia coli
atgcaaaacagaaaatttttaacgcatcatgaaattaatttactacttcaatctgtaaaacaaaagagttgctcttcacgcgatgtttgcatgattttattggcttattttcatggtctgcgtgttagtgagctcttatctctgcagttgtcggatttagaactaactacagaaaaaatatatattcaacggataaaaaatggattcagtacagtccatccacttcaaaaggaagaggtgattgcaataacaaactggctgaatgaaaggaattcattaaatgttaaacatttcaatgataacccgtggttatttgtttcccgaacaggaaaaccattatcgagacaacgattttataacatagtttctgctgcgggtaaaaatgcaggtttaaatattaaagttcatccacatatgttacgccatgcatgtggttattcactagcagataatggtgtggatacccgtcttattcaggactatctcgggcatcgtaatatcaggcatacggtaatttatactgcttctaattcaatgagatttgaaaaaatgtgggggataggtgacgcaaaaaagcaacattttgacccaaaatgtaaacccaatctttgtttagaaattctcgtatag

SEQ ID NO: 10049 - DNA, 285 bp, Escherichia coli
atgatgtggccagaagcctgttttatgctgttacagtcatcgttatattccttattggatggggagcaggtattgttttctttctgggaattaaacaaaaaacaatatgaaggatttgagttttatcagattttttctggcaatattgttgcttcttgttcctcctgctctggagtttccagtaattcatcggcacattacgccaggtgcactgactttatgcgtcattacagccttaataattacgctgcttgccagcttgggcggcaggcttgtctcagttaa

SEQ ID NO: 10050 - DNA, 168 bp, Escherichia coli
atggtggtggtcttcggggttgttttccatgactacgggtttacctttctggcagaccggctggggataaccatgaagacggtatgtgcgcatctttacaatgcgatggagaaaaatggtatgcgcggcgtcagtattaaatatctctgcaataccatagaccggtaa

SEQ ID NO: 10051 - DNA, 1146 bp, Escherichia coli
atgagtggttacagtgttcttacccaggacggagtgatacagatacagccgaagtatacggattactacaatctggcttacaacaagcggggaagggtgcaggtgagtatcagccagcagacgggggaatcgtcaacgttgtatctgagtggcagccaccagagttactggggaacggacaggacggaccgtcagcttaatgctggctttaactcatctgtgaatgacatcagctggtccctgaactacagcctgtcccggaatgcatggcaacatgaaactgaccggatactgtcatttgatgtcagcattccgttcagccactggatgcgttcggacagcacatctgcatggagaaacgccagtgcccgttacagtcagaccctggaggctcacggacaggctgccagtacagcagggctgtatggcacattgctgggggacaataatctgggatacagcatccagagtggttatacccggggagggtatgaggggagcagtaaaacaggatatgcctctctgaattacagagggggatacggtaatgccagtgcaggatacagtcacagtgggggctaccggcaactgtattatgggctgagtggcggtattctggcacatgccaatggtctgacactgagccagcctctgggagatacgctgattcttgtccgtgcaccaggtgcatctgatacgcgcattgaaaaccagacgggggtgtctacagactggagggggtatgctgtactgccttatgcaacagactatcgtgaaaaccgggtggcactggataccaacacccttgcagataatgttgatatagagaataccgtggtcagcgtcgtgcccacgcatggtgccgttgtgcgggctgactataaaacccgtgtgggtgtgaaagtgctgatgacgctgatgagaaacgggaaagcagttccttttggctctgtcgttacggccagaaacggggggagcagtatcgccggagagaatggtcaggtttatctgagcggaatgcctctgtcaggacaggttagtgtgaaatgggggagtcagaccacggaccagtgtactgcagattataaattaccgaaggaaagcgccggacagatattaagtcatgtcacggctagttgcaggtaa

SEQ ID NO: 10052 - DNA, 1962 bp, Escherichia coli; identical to SEQ ID NO: 9055

SEQ ID NO: 10053 - DNA, 216 bp, Escherichia coli
atgtaccagatggaaaaaatcacaacaggtgtgtcatacaccacgtcagcggtgggaacgggctactggttcctgcagttgctggacagggtttccccgtctcagtgggcggcaataggcgtgctggggagtctgctgtttgggctgctgacgtacctgactaacctgtatttcaaaatcaaagaggaccggcgtaaggcggcgcggggagagtaa

SEQ ID NO: 10054 - DNA, 891 bp, Escherichia coli
atgaataaaaaatatgaactggttgttaaggggataaataattacggggataaggttactgttactgtgaagtcggaaggtgacgggcaagcgtcgctgttgttgccagatgtggcgattagtcttgaccgtactgaaggtgccacgctggagttttacgaagctgaggcgaaaaagcaggcgaagcagtttttcatggatgttgctgccgggttatgtgaatggaacgaaccgttgccggaaaagcgccccgtaattttagaggcgcaggatgtgttgataacctacaaaggaaagctaccgggaagaattacttgttctctgaagatgccgccgtcaacactgcggtcagaaaaagatgatgttgaatcacgtattgaaaaactggagagctacgtcgttgagctgaataagaaatggtcgatattggtgccttctggcgatgaaaagcagtttgctgcgtttgacgattattgtcggaaagtgatgagcagaaatctcgcagagtgtttcagtattcataatgataatttcagtgacccggaatgggagtgtaaccggccatcctttgttgtatccggtgatgctgggaaaataaccatctcagaaaatgggaaagtaacacctccatcgcaccagcacagtgaggagctcattgaatttgccattgattacctgaagaacaataaaaagcaggggctgatgaagcgcgttggccgttgcatgggatatcttcaggtagccgctgagattgaagcgctggccagtggtgctgataaggatgcaattgtgcgggaggctcttcttcgtgattttaatactccaccctttaaaaaagtgccggcttactggcttcatccggggctgacttatcttaaagtgcgtatttag

SEQ ID NO: 10055 - DNA, 147 bp, Escherichia coli; identical to SEQ ID NO: 6018

SEQ ID NO: 10056 - DNA, 549 bp, Escherichia coli; identical to SEQ ID NO: 5861

SEQ ID NO: 10057 - DNA, 903 bp, Escherichia coli
atgatttcagacgcgcagaaggcagctaatgcagccggtgcgatagctacagggcttttatctctcattattcctgttccactgacgacagttcagtgggccaataaacattattaccttcctaaagagtcgtcttataccccggggcgatgggaaacactgccgtttcaggttggcatcatgaactgtatgggcaacgatctgattcgcacggttaacctgattaaatctgcccgtgttggttatacaaagatgttgctgggagtggaggcttattttattgagcataaatcacgcaacagccttctttttcagcccacggactcagctgctgaagattttatgaaatctcatgttgagccaacgataagggatgttcctgcattgctggagctggctccatggttcggaagaaaacaccgcgataatacgctcaccctgaagcgtttttcctccggtgtggggttctggtgtctgggtggtgcggcagcaaaaaactaccgtgaaaaatccgtggatgtggtctgttatgacgagctttcctcgttcgaaccggatgttgaaaaagagggttcgccaaccctgctgggggataaacgtattgagggctctgtatggccaaaatccattcgcggctcgacgcctaaaatcaaaggctcctgccagatcgaaaaagccgctaacgagtcggcacacttcatgcgtttttatgtgccctgtccgcactgtggggaggagcagtatctgaaatttggcgatgatgcctcgcctttcggtcttaagtgggagaagaataagccagaaagtgttttctacctttgtgagcatcatggctgtgtgatccatcagtctgagcttgaccagagtaacgggcggtggatctgtgaaaacacgggcatgtga

SEQ ID NO: 10058 - DNA, 216 bp, Escherichia coli
atggcatactttttgggaccccatcagtttagggatctgaatcgccacagctttggtaggcacctgctttatggtcacgtgcacccgaagatcctgctggtacgcatgggtcacgaaaagtacgagtctacagaagttaatttacggttttttgcgctcgatgtggctgccagctaccaagtccagtttacactggatacaactaacgcgctgtag

SEQ ID NO: 10059 - DNA, 2097 bp, Escherichia coli; identical to SEQ ID NO: 8978

SEQ ID NO: 10060 - DNA, 183 bp, Escherichia coli; identical to SEQ ID NO: 4130

SEQ ID NO: 10061 - DNA, 369 bp, Escherichia coli
atgtcagcacaagaaaaaacagtacagattgattcttttgatgcgaaatttttagatataaatacattaagcaggcttatttatgaacgtaagagttttgtgatcgaaaatgtttccgatgttagtgaaacggtaaaaagagtggagcatgaaatagagaaaacgaaattaagttgtcgtgtatatactgagtacaggagtacagctttagctggttctttatggtcaccaaccgtaattctgggagtggcgagtgcagtagcaataggtgttcataatttatctacatggaaccccgattatgaaatcggtaagaactatattaaacggagattatcggtaaaatataaaaaggcagaagtattgtga

SEQ ID NO: 10062 - DNA, 318 bp, Escherichia coli
atggctctgctctggaaccaggccgcaggaagtatcaatctggagtttatcagctactggaattccggtgtattggcagcccctgataatcacctgacccacgaagagcgctctgctttgcagaaaaaagtcaataaaactctggggcggtttggagacaggagatgccatttaacgattatagggcgttctgatgaagtccatgattttacctccgccttaattaactgttttctttctgaagaagagattgtctggtggcaatcaggtggcattttcgcggatccctggcccgttaatatatcccggctgaactga

SEQ ID NO: 10063 - DNA, 183 bp, Escherichia coli
atgttcttcggcaacgatcacggtggagagcgtagtgcgctgctgtacgggctgatcggcgcctgccgactgaacggtatcgatccggaatcgtatctgcgccatatcctcaacgtcctgccggaatggccttctaaccgtgttgatgaactcctgccatggaacgtcgtactcacccaataa

SEQ ID NO: 10064 - DNA, 474 bp, Escherichia coli
ttgtgctatctgcaccagactctgcttgatggtgataaaaaagcagatatcggtagcagtgcaaagcgcctcaaatccctgcaggaagataactatttggatcacgctcgttctgtagctatccgcatgtttcctgtcgccagcactctgggtatcgccgaaggcatcgaaacagcgctgtcagcgcaccagatttataacgtgaacacctgggcaaccattaacagcggctttatgaaaaagttccgtgtaccagctggtgttctgcatctgattatttttgctgaccgtgacgagaacagcgccaccgggctggctgcggcttgcgaatgtgctcatgccaatctgatggcaaagaatgacctgcagcgcgtgagcgtgtactggccggatcacgatgatttcaacaatatgctcatgaacggtgatcaggttcgagagctggttttccataagaaaaaggcggttgcgtaa

SEQ ID NO: 10065 - DNA, 366 bp, Escherichia coli
atgattgatgtcttagggccggagaaacgcagacggcgtaccacacaggaaaagatcgcaattgttcagcagagctttgaaccggggatgacggtctccctcgttgcccggcaacatggtgtagcagccagccagttatttctctggcgtaagcaataccaggaaggaagtcttactgctgtcgccgccggagaacaggttgttcctgcctctgaacttgctgccgccatgaagcagattaaagaactccagcgcctgctcggcaagaaaacgatggaaaatgaactcctcaaagaagccgttgaatatggacgggcaaaaaagtggatagcgcacgcgcccttattgcccggggatggggagtaa

SEQ ID NO: 10066 - DNA, 675 bp, Escherichia coli
gtgataagcacgccggagggggagtggtatatcccttgtgtgaatatttctgcagagccggaggcgtattttcgtatcgcaccggaagactggctgcgggcagagatgcagggggagattgtggcgctggtccacagtcatcccggtggtctgccctggctgagcgaggcggaccggcggctgcagataaagagcgcactgccctggtggctggtctgccggggtgacattcacaaattccgctgcgtgccgcacctgacgggacggcgctttgagcacggggtgacggactgttacaccctgttccgggatgcataccatctggcggggactgaaatgccggattttcatcgcgaggatgactggtggcgcaacggtcagaacctttacctggacaatatggcggtcaccggcttttaccgggtgcccctgtcctctgcacaggcgggcgatattctgctgtgctgctttggtgcttcggtaccgaaccatgccgccatttactgcggcaacggtgagctgcttcaccatctgcctgaacaactgagtaaacgggagaggtattccgaaaaatggcaacgacgaacgcattctgtctggcgtcaccgccactggcacgcatctgccttcacggggatttgcaacgatttggccgccgcctcagcctgtatgtga

SEQ ID NO: 10067 - DNA, 582 bp, Escherichia coli; identical to SEQ ID NO: 9095

SEQ ID NO: 10068 - DNA, 663 bp, Escherichia coli
gtgaccagcctgcaccgtgaggctgaagcacagttccggcctgagctggagaaaatcgtcagcgggattgaaacaggttttcgtggcacggccctgtacgccacagaaaacattgccggtcgcatcaatacccgcctggaggatgagggctttaccgtaaaaatcagttttccggcagtcagtcagttacaaacccggctcgcggtaaaaacaaatctgagtgcgcttatggaggaaagaacggagaccgtcacccgtcgccgtcggcagagtggtttatggggaaagatttgtggagcgtttggcaccagtgactggggctgggaaacctataaagaggatgtgagccgcagtgttatcaatatcaacaccgtcaggaaggaagttatgtcactgacccgggcatatttcggggagctgcaggcatccattgagcaggatattaaccagcccgtccgccaggaaatcgatgcctttttctgcgcattcagggagaaagttgaacaactgcgtaacacgctgattcagagctctgaagatcataaacgcgatcagcaggcacaggaacggcttaccaggcgacttcaggcattaaatgaaagggttcctgagctcattactgacagtaaggcgctgagggaagagctggagacaatgctgtga

SEQ ID NO: 10069 - DNA, 906 bp, Escherichia coli
gtgacttcaccatttattcaacaaattgctgataaccgggtatgtcaggtactcacctgtcttcctgaaaaatttgtggttgatttcgcaaacggaatcgatgttgcacaggagcatatccgcacggccggagagcgcacgttcttccggcgtttaaaagagggactgaccggcgaaggcgctgcacggcagaatgccatcaatgcttcgcttgcacagggcgttgaggcgtccctgcgctggctgacggagctgacaacgtcacttgccaccacaaactacgcgattacccgggtaaacgacagggtcagttcactggtcagtgatactgccaggctggcgcattattccgcagatacacgggagcagttactcatcctggccgatcaggttcaccataaactgaatcatcttgaagaaaaactccaccgtgttgaccaggttcagcgggcgcagttacatcttgagcagatattctcatggtggagcgccgggcgatatgcgtcattttcccctgccggacgttgttatgtggcgcttgaagagcttcgctggggcgcgtttggtgatgtgatacgtcagggcgaaacaggccaggttaaccagctactggatattctcagacataaagcattaacgcagatggcacaggagagtggcggtagtgcaaccgtgcgtctgaacactctggactggcttggtggtcagggccgggagcaggcagataacgagtggcatgacgcgattaactggctgggagactggtgcagtgaagagcagcatccggtgatctggtcaaccacgcaggctgcagaacacttaccggttcgcatgcctcgcctctgctctgcagaacgcctctctgaaagtatggtcgatgaaatatttcagaagggggctgcatga

SEQ ID NO: 10070 - DNA, 372 bp, Escherichia coli; identical to SEQ ID NO: 9063

SEQ ID NO: 10071 - DNA, 366 bp, Escherichia coli; identical to SEQ ID NO: 6960

SEQ ID NO: 10072 - DNA, 465 bp, Escherichia coli
gtgatttttgcagaacagcaaatttatatactgggaggggagagaaaaccggggcttcgttctgttagatcctggacgggggagctttcgcatgatcgaattaaatggtctgaacttccaccagtagcttcacccgagggggtgtcaggagcatatgcctctgttattgatggaaatatctttctggccggtggtgcatatttcccgggggcggcagaaaagtatagcaatggtgaatactggtctcataaaggactggataaagcctattcaaaagagatatatcagctaataaaaaatgactggaaaaaagttggttctttgccggaaggacttgcttatggtgtaagcctgccctggcagggggggatgctcattctggggggggagaaaaaagatggtaaagctgtttcagatgttatttatctgaaaaaaaatgacaaacaaataaagattgttaaataa

SEQ ID NO: 10073 - DNA, 486 bp, Escherichia coli
atgagcagtcttttagcgctggcgaaggacttggagcagcaatcgaaagcgcagcagcagagtaccggcgagatgctgaaagccgcattcagcgagcacgagaagtctgtaaaagcggaactgagcgcaagcgcgaagagaatcagcgacgccatcagcgcccacgagcagggtatgaccgcggcgatgcagtcgaaccggctgagcgtgctgcgtatggtcggccggacgtggctgaccatcaccctggtctcggtactgctgatcgccacgagcgggagcattctgtggtggcaggggcagcagatcaccgggaattaccagactatccgggcgcaggagcggacgcaggccatgctgtcggagaagaaccacggcgtgcagctgtcgctctgcggggagaagaaactgtcctgcgtcaaagtgaacccgaaagcgggagcttatggggaggaagggaactggatggtactggagaggaaatag

SEQ ID NO: 10074 - DNA, 213 bp, Escherichia coli
atgacggaactggaaaaacagttgctgaccgcattagagcagttacatcaggactactcgcaaaggctggacgagtgggagagcgccttcgcggaatggcagaagatgtctggtcttatgcaacgggagaacgcggcgctgaacgagcgcgtcacgcgcttgagtcagcaggtggcgaacttgagcaggcagttacagcgtttgagccagtag

SEQ ID NO: 10075 - DNA, 417 bp, Escherichia coli
atgatgaactcggcagcctacgacactctaggtctaaacacttcgaatatagaattgcttagcttcgccatttacagttatcacgccttccgacattaccaaccagacctagctaaagaaatttgcgatagcattgccaaatggatagtaaattctcatggagaacataacgctaatgagagaaaagccgctatcaaaaaatattaccctatcttagccagaggagtcgccgacgcttacgagaataaccaaacaatgactaccccacctcatattgctctcggttttgatatatgtgacatcattggtaacggctacacaccttctcgttgtaacgtgattgagttaggcctcatcgttaagcagtttctagataaaggacatgagaaatttaaggaacattatctgaaggaataa

SEQ ID NO: 10076 - DNA, 312 bp, Escherichia coli
atgtgggtgacggaagacgaacaccggcggctgctcgagcggtgcgacggcaggcagctggcggcgtggatgcgtcagacctgcctcgatgagaagccggcacgtgccggcagactgccgtcgatatcgccggcgctgctgcgccagcttgccggtatgggtaacaacctgaaccagatcgcccggaaagtgaatgccggtggtgccggtcatgatcgggtgcagatcgtggccgccctgatggcaatcgacgcgggactggagcggctgcggcatgcggtgctggaaacagggggggatgatgatcgttaa

SEQ ID NO: 10077 - DNA, 822 bp, Escherichia coli; identical to SEQ ID NO: 8994

SEQ ID NO: 10078 - DNA, 261 bp, Escherichia coli; identical to SEQ ID NO: 5351

SEQ ID NO: 10079 - DNA, 330 bp, Escherichia coli; identical to SEQ ID NO: 8750

SEQ ID NO: 10080 - DNA, 600 bp, Escherichia coli
atggctccggaggactggctgcaggcagagatgcagggtgagattgtggcgctggtccacagtcatcccggtggtctgccctggctgagtgaggccgaccggcggctgcaggtgcagagtgatttgccgtggtggctggtctgccggggggcgattcataagttccgctgtgtgccgcatctcaccgggcggcgctttgagcacggggtgacggactgttacacgctgttccgggacgcttaccatctggcggggattgagatgccggactttcatcgtgaggatgactggtggcgtaacggccagaatctctatcttgataatctggaggccacagggctgtatcaggtgccgttgtcagcggcgcagccgggcgatgtgctgctgtgctgctttggttcatcggtgccgaatcatgccgctatttactgtggtgacggcgagctgctgcaccatattcctgaacaactgagtaaacgagagaggtataccgacaaatggcagcgacgcacacactccctctggcgtcaccgggcatggcgcgcatctgcctttacggggatttacaacgatttggccgccgcatcgaccttcgtgtga

SEQ ID NO: 10081 - DNA, 846 bp, Escherichia coli
gtgctgtcggtaaaccgattggtttacttttcattgctgaaaaaattgttccaggcaatgaacctctgccagatccccggacgtgcaggagcactgcttacgacgcttcttcgccatatatcgatactcaacgggtttgacaatctgatggctcagccgttgttgtcagatgagcccctgacagcgctgttggatcattatcttgatactgatgctctggcagacgggctaccgctgtatgtgtcgctgtaccccacagaagggggcatgcaggatattattgactgcattcgtgctgaactgggtgccggaaccacgaaaaacgccgtttttcagcatatccagagcctgccccgcggacagcagaaagaggctctgcttgcgtcagccgcgctgcccctgctgttccgtccccgtgaggttcaggggacaatgttcggtgatggtggtatgggaggatggcgaaatatgcagggaaataccccagtgacgcctctggtcgatgccggatgcaatatggtgattgtgacgcatctgagtgacggttctttatgggatcgccaggcttttccggacaccacaatccttgagatccgtccccggaaaaggctgaaatatgcaggtgatggtgacaacagcggcggtctgctcagtttcacgttggcacataccgacgcctggcgtcagcagggctatgaagacacgatgctgacgatggagcatatccggaaaccgctggcagcacgtcaggtactgtcccggtcagaaacggtgttgcagaaaagtctggagataacggaagaggcagatttggcactgagaaacgcgatggcccggattaaataa

SEQ ID NO: 10082 - DNA, 180 bp, Escherichia coli
atgcctgagcatatttttaattgccttgtcgaccgtcttaatcccactctggctgctgatactatcagatgtgatactcacgaaattattgttcgcaatattaacgatttctgtatttgcaataagtacaccatcaacatccagatcgctcatatcattgacaatgacagatacagctaa

SEQ ID NO: 10083 - DNA, 792 bp, Escherichia coli
atgatgaaaaatacaggctatatcttagctctttgtctgacagcatcggggcatgtcctagcccatgatgtctggattacaggtaaacaggcagagaacaacgttaccgcagagattggttatggtcataatttcccctcaaaggggacaattcctgacagaagggatttctttgaaaatccccggctttataacgggaaagagacaataacactgaagccagcgtccacggattatgtctataaaactgagtctgcaagcaaagataatggttacgttctgtcaacgtatatgaaaccgggatactggtcgagaacctcgtcaggatggaaaccggtcagccgggagggcagaaatgatgtggcttactgtgagtttgtcactaaatatgcgaaatcttttattcctggtgaacagcagatgccagcacaactctatcagtctccaacagggcatgagcttgaaatcattccgttatccgatataagtcgtttcagtgaaaatgtgaagctgaaagttctgtataaaacgtccccgctcgccggagctatcatggagcttgactcggtcagttatctgacatcatcccgtcatactcatgcagttgagcacaaacatcctgttcataaagcagaactcacctttgtaactaatgaggatggtatcgtcacagtaccttctcttcatatcggacagtggctggcgaaagtccaaaataagaaaagttttcaggacaaaagcctgtgtgatgaaactgtcgatgtggcaactttaagtttctcccgaaattaa

SEQ ID NO: 10084 - DNA, 324 bp, Escherichia coli
atggatgccagcagcagggaatggctgggctccggcaatcctgacacacttatcagtgacatcagcatacctgttggtcatagaggcgtttatgccggatggcgtgctgaactttcagcatcagccacgcatgtgaaaaaaggcgatccccatcaggctggttataccatacattccttttcactgtcttataagcctgtaagtgttaaaggctttgaggcgtcagtaactctggataatgccttcaacaagcttgccatgaatggcaaaggtgtgccgctttcaggcagaactgtcagtctttatacccgttatcagtggtaa

SEQ ID NO: 10085 - DNA, 1494 bp, Escherichia coli
ttgaaaggaaatattgacctttctgacagcaaatcttctacgttattgaaatttgttacgccattgttaactcccggtgaggaaattcgtgaaaggaggcagtccggaaaatatgaatatattaccgagttattagtcaagggtgttgataaatggacggtgaagggggttcaggacaaggggtctgtatatgattactctaacctgattcagcatgcatcagtcggtaataaccagtatcgggaaattcgtattgagtcacacctgggagacggggatgataaggtctttttatctgccggctcagccaatatctacgcaggtaaaggacatgatgttgtttattatgataaaacagacaccggttatctgaccattgatggcacaaaagcaaccgaagcgggtaattacacggtaacacgtgtacttggtggtgatgttaaggttttacaggaagttgtgaaggagcaggaggtttcagttggaaaaagaactgaaaaaacgcaatatcggagttatgaattcactcatatcaatggtaaaaatttaacagagactgataacttatattccgtggaagaacttattgggaccacgcgtgccgacaagttttttggcagtaaatttactgatatcttccatggcgcggatggtgatgaccatatagaaggaaatgatgggaatgaccgcttatatggtgataaaggtaatgacacactgagtggtggaaacggagatgaccagctctatggcggtgatggcaacgataagttaattgggggagcaggtaataattacctgaacggcggagatggcgatgatgagcttcaggttcagggaaattctcttgcaaaaaatgtattatccggtggaaaaggtaatgacaagctgtacggcagtgagggagcagatctgcttgatggcggagaagggaatgatcttctgaaaggtggatatggtaatgatatttatcgttatctttcaggatatggccatcatattattgacgatgatggggggaaagacgataaactcagtttggctgatattgatttccgggatgtggccttcaggcgagaaggtaatgacctcatcatgtataaagctgaaggtaatgttctttccattggtcataaaaatggtattacattcaggaactggtttgaaaaagagtcaggtgatatctctaatcaccagatagagcagatttttgataaagacggcagggtaatcacaccagattcccttaaaaaggcacttgagtatcaacagagtaataataaggcaagttatgtgtatgggaatgatgcattagcctatggaagtcaggataatcttaatccattaattaatgaaatcagcaaaatcatttcagctgcaggtaattttgatgttaaagaggaaagagctgcagcttctttattgcagttgtccggtaatgccagtgatttttcatatggacggaactcaataactttgacagcatcagcataa

SEQ ID NO: 10086 - DNA, 1371 bp, Escherichia coli
ttgctgctgttccttcttctgctccttgcacacagaaataccctcacatccattacagcgctgttatttctgttctgttgtgcactgtatgcgcctgccggtatgacgtacggtaaaatcaacaacagttttattgtcgcgttgttgcagaccacaactgatgaggcagcggagtttaccgggatgattcctgtttatcattttctggtcagtgccgcgattcaggtattcatggtgattttctggcgaacacaccgccgtggtcaccgtaactggctggcactgctgctgttcgtattatgctcagtaaacagctggccgttgcggatggttaaaggaactgttgtgtggacaactgacacattgcgtgaaatgcagcgttataaacaactgaatcagcacggggctgacaactggaaaatcctgccgggtgtaccgttgtatgacacgattgttatcgtcactggtgagagtgtgcgcagggattatatgtcggtatatggctatcccgtgccaaccacgccgtggctgaatacagctcccggtttatttattgacggctatacatcggcagcagccagtaccgtaccttccctgagccggacactgatttatgactatgagcagaaccctgactccggcaacaacgtggtggcgctggcagcaaaagcaggatacagcacatggtggatatccaatcagggaaaactgggggagcatgatacacgcatctctgttattgcttctgatgcggagcataccgttttcctcaagaaaggcagcttcgcttcccgtaaaacggatgacatgttgttgttacaggaaacagaacgtgcactggcggataaatcctctccgaaggtgatattcctgcacatgatggggtctcatccgaacccgtgtgaccggcttcactcctggccgaatcattacctggagcagtatccccgaaaggttgcctgttacctcgccagcatcagtaaactggataactttctcggtcagcttgatggtatccttcgccggcattcccgtcatttcgccatgctttacttttctgaccatggactgtcggtcagcgacagcgctaatcctgttcatcatgatggtcatgtgcagggaggctacagcgttcccctgattattaccgccagtgacatcacgtctcatcagtccgtcagcagaaaaatcagtgcccgtcatttcgcaggtatttttcagtggctgaccggcattcgtactgaaaatataccgccattcaatccgctgacagacgaagataatgaacccgttatggtttttaacggggagaggaatgtaccggcagacagtctgaaaccgcagcctctgattcttccggacagaagataa

SEQ ID NO: 10087 - DNA, 1473 bp, Escherichia coli
atggtagagactaaacgtagcagcctgaaaggttttctttccttgcctcaaaagctaataaagattcgtgcggctaagcgtaaaggcaaatttgatcacccccctcttaactgtagtgtcaagaagcaattgcttgaaagtgttggtgtttataatgaggtaaaacatgataatgagattagttggcctgtctttgaatcacatgcacatttgcgaaatcagcatatcaatgttgtaacgatctgtgataagtttacttatgaatgctttcgctatgaggcaaactttattccgttaaccaagcaaaattggaaatcagagattgacgaatcacacccagtaatgttatttcttgaatcagcttggaatggtaataatggtgagtggacatataccatggtgagttataaaaaacatttgggtgatccacttcgcaaagttatcaaatactgtcaatccaagaatattcctgtagtattttggaataaggaggatccaaccaactacgaagtctttattgatgttgcagctgattgtgactatatattcacaactgatgggaatatcttagaaaaatacaagtctcgtgttggacataatagagtatacgcacttccttttgcggcacaaccagctatccacaacccaattcgtgataagaataaaaaacttccagtttacgaagtatgttttgccggtagttggtataataatggacatgatactcgtcgagcacaaacagaaattgtccttgatggaacagcacatcgtgaattgcatatatacgaccgaatgctgcatgcaaccaaacatagagaatcacgaatctttcctgaaaaatatcaaccatttatagttggttcacttgactatgaacagatgctcactgcttatagacaatacaagctattcctgaatatcaacactgttcaggactcaccaactatgttctcccgtcgggttttcgaaattttggcttgcggtacaccagttgtatcaactcattctgatggtatgaaagctatgcttggaaaccatgtacatattgtaaataataaagatgaggcaaaaaatatcgttcagcagttgcttaaatctgatctaaggcgtgaaattcttgggcatcaagctgcgcggcattgtcttctgtatcactcttatgaaaaacgatttaaacaaatccttaatactgtaggaattaatacttctccacttaaagatgataaaatctcgataattatatgtacaaatcgcctccagaatatagatatgctgattgataattatcagcgccaatctcatgagaacaaagaattactactaatccttaataatgatgacttcgatatagatttgattaaaaataagactcgaggtatatatatatcaactatcacaggaaacaactcttggcgactgcctgaactacggcgttgctcatgcttcaggacattacattgccaagatggatga

SEQ ID NO: 10088 - DNA, 699 bp, Escherichia coli
atgcaggatattcacgaagaaagtctgaacgagtcggttaaatcagagcagtcaccgcgggtggtactctgggaaatcgacctgacggtacagggcggtgagcggtattttttctgtaatgagctgaatgaaaaaggggagccggtcacctggcaggggcgtaagtatgaggcatacccgattgacggcagcggctttgagatgaacggccggggcagcagtgcccgcccgtcgctgacggtgtccaatctgtttggccttgtcaccggggtggcggaggacctgcagagtctggtgggggccacggtggtccgccgccgggtgtatgcccgttttctggatgcggtgaatttcgttgcgggcaatccggcggcggacccggagcaggagttgagtgaccgctgggtggtggagcagatgtcgcagctgacagccatgacggcctcgtttgtgctggccacaccgaccgagacggacggggcgctgtttcccggtcgtatcatgctggcgaacacctgtatgtggacctaccgctctgatgagtgtggttacacgggcgaggctgtggcggatgagttcgataaacccaccacggatatccgtaaggacagatgcagcaagtgcatgcgcgggtgtgaactgcgcaggaatgtcggcaattttggcggtttcctttccattaataaactttcgcagtaa

SEQ ID NO: 10089 - DNA, 330 bp, Escherichia coli; identical to SEQ ID NO: 9166

SEQ ID NO: 10090 - DNA, 240 bp, Escherichia coli
atgcggggctatgcggaaggggggtatgtgggtgctgccggaagtccggcgcagatgcggcgggccgaaggcattaattttaatcagaacaatcacgtggtgattcagaacgacggtatcaacggacaggcggggtcgcagctgatgaaggcggtgtatgacatggcccgcaagggggcacaggatgaactccggctgcagttgcgtgatggcggtctgttatcagggagcggtcgatga

SEQ ID NO: 10091 - DNA, 414 bp, Escherichia coli; identical to SEQ ID NO: 5302

SEQ ID NO: 10092 - DNA, 1134 bp, Escherichia coli; identical to SEQ ID NO: 8777

SEQ ID NO: 10093 - DNA, 303 bp, Escherichia coli; identical to SEQ ID NO: 5141

SEQ ID NO: 10094 - DNA, 603 bp, Escherichia coli
atgcaacagctcggcctgaagtctcctgtgcgcctgaagaaataccggtcttaccggggaaatatgggactcgctgcagaaaatatccttcagcgacagttcaaagcggaagctccctgtgagaaatgggtgacagatatcaccgaattcagggctggcggacaaaaactgtacctgtccccgatacttgatttgtttaacggggaaatcgtggcgtgggaaacggcctgcaggcctacagaagagctggtgaagcggatgttaaataagggtctggaaagccttgctgaaggggagaaaccgctgctccacagtgatcaaggatggcattaccggataaaaagttatcagtccgccctggcggacagagggttagtgcagagcatgtcgcgcaagggcaacagccttgataatgcggtaatggagaacttctttggtcacctgaaagaagaaatgtactatcgccgggactacagaaatgtagaagagctggaaaatgccgttaacgaatacataacttactggaatcaaaaaagaataaaactcagtcttgggggactcagcccggtagaataccggactgagtatcaaaaagccggttaa

SEQ ID NO: 10095 - DNA, 669 bp, Escherichia coli
atgctggatgattaccgcaacaagatcctcagcggtgaaatctttttcagtggtgataccgctactcttggacatgagcttgccagaacctacgcagtaaatcctacgacacgaagccacgcgcaattttatgcgaaaacgctggcattaaccgaagccacgcctgaactctctgggttaagccagtctgaatttctgtccgagtatctgaaagagacatcccttaataatctttcacgtattactgtcgatattcatctggaagaagcatcaaccgaagagatcattgaacatctgaaagtgttgatcccccgatggaagagacagcttaagatgaagtctccagcgccaagagagtatcgttttgggaaaagcacattcagaaaaattattgaatatcgtcttatcccgatgatggacctgatcttctggggagaagataacggcattaaaatcccgctttcactgatttcctcgctgcttcacgaggacagcgacaacgatcgtgatgaaggaatgctaaaggcaacggactacccgttagcaatggcttttctgacggatgcgagctatcggaaatcgcttgaagattacatgatggaaaacaatcacttgaaagactcccctgttgaaaagcatgtagaagacgacaggaataagaaaaaataa

SEQ ID NO: 10096 - DNA, 315 bp, Escherichia coli; identical to SEQ ID NO: 9107

SEQ ID NO: 10097 - DNA, 396 bp, Escherichia coli; identical to SEQ ID NO: 5305

SEQ ID NO: 10098 - DNA, 396 bp, Escherichia coli; identical to SEQ ID NO: 5305

SEQ ID NO: 10099 - DNA, 270 bp, Escherichia coli
atgctggggcgtcgcccgaacagcatacttaaagccggtcagcatcggtatcagcgggcatttattcagcgattaaaaaatggtcgctggcatgtcatgcagcgtgtggccgggaaaaaccgttaccccattgatgtggtgaaaatcccgatggcggccccactgaaacaggcatttgatgagaatgttgaccgtatccggcgtgaacgcctgcctaaagaactggcatccgcgctgaaacaacaactgaggattgcaataaaacgatga

SEQ ID NO: 10100 - DNA, 396 bp, Escherichia coli; identical to SEQ ID NO: 5305

SEQ ID NO: 10101 - DNA, 477 bp, Escherichia coli
atgcatcagtttttactgaatgaaggcgcagatccctcgcgttttctgtttgttctcagccatgccgatcgcgtgtttcctgctgaagaatggaatgccacagaaaaatgcccgtcccgtcagcaggcgctctcactggcaacagtaacagcccgggtggcaaccctgttcccttcatcacttccggtactccccgttgccgcacctgtcggctggaatcttccggcactggtgtcgctgatgatccacgcactgccaccacaggcaaccagcgcagtttattcacatatccggggggaaaaccgctctgaacaggcccggaaacacgcacaacaaacttttggtgacgccatcgggaaaagctttgacgctgccgttgcccgattcagttttccggcctggatgttacagcttctgcgtaaagcccgggaccgcattatccacctgctgatcacactgtgggagcgtctgttctga

SEQ ID NO: 10102 - DNA, 177 bp, Escherichia coli
atgcagcagaaaaaatattcttttaattatctgatttttaagcatgatttcataaaaagaagaatgctcgttaatccagcgacacatcctgtcggcgtgagtgtgtcagaacagacgctcccacagtgtgatcagcaggtggataatgcggtcccgggctttacgcagaagctgtaa

SEQ ID NO: 10103 - DNA, 408 bp, Escherichia coli
gtgccacaccggggaaatgtggtggacagggtcatagaaggtgcttacgaagtggtgggcgtgtttgaccggatagaggaaaagcgtgatgccatgcagtcgctggtcctgccgccaccggcacgccaggcgctggcacaggcggcgctgacttaccgttatggtgatgaacatcagcccgtcaccactaccgacattctgacgccacgacgccgggaggattacggtaaggacctgtggagtgcttatcagaccatccaggaaaatatgctgaaaggcgggatttccggtcgcagtgcaaaaggaaaacgtatccatacccgggccattcacagcatcgataccgacattaagctcaaccgtgcattgtgggtgatggcagaaacgatgctggagagcctgcgctga

SEQ ID NO: 10104 - DNA, 444 bp, Escherichia coli; identical to SEQ ID NO: 9157

SEQ ID NO: 10105 - DNA, 123 bp, Escherichia coli
atgatgttctacactcactttcaagatgtgggttggttatttatgatcgattttggaataaaaaaaataactgtagttatccaaatgatttacatgtatattgtcgaccatcaattcctttaa

SEQ ID NO: 10106 - DNA, 396 bp, Escherichia coli; identical to SEQ ID NO: 5305

SEQ ID NO: 10107 - DNA, 225 bp, Escherichia coli
atgacaaaaccagtatcaatcagcaagaagccccgtaaacaacatacgcctgaatttcgtaacgaagccctgaaactcgctgaacgcatcggtgtggccgccgcagcccgtgaactcagcctgtatgaatctcagctttatgcctggcgcagtaaacagcagcaacaaatgagttcgtcagagcgcgaaagcgaactggccgctgaaaatgtccgccttaaatga

SEQ ID NO: 10108 - DNA, 678 bp, Escherichia coli
atgaataccagagctctttttcccctgctttttactgttgcatcattctccgcctccgccggtaactgggccgtcaaaaacggctggtgtcagaccatgacggaagatggtcaggcgctggtaatgctgaaaaatggcacgattggtattaccggcctgatgcagggatgcccgaatggtgtacagacgctcctgggcagccgtatcagtattaacggtaacctgatccccacatcacaaatgtgtaatcagcagacgggattcagggctgttgaggtggaagtcggacaggcgccggaaatggtcaaaaaagccgttcactccatagcagagcgtgatgtgtccgttttacaggcatttggtgtacgaatggaattcacccgcggtgatatgctgaaggtctgtccgaaatttgtcacatcacttgctggtttttccccgaaacagacacccgccattaataaagattccgtcctgcaggctgcccggcaggcatacgcccgggaatatgacgaggaaacaacagaaaccgctgattttggctcttacgaagtaaaaggcaataaggttgagtttgaagtgttcaatcctgaagaccgtgcgtacgacaaagtgaccgtcacggttggtgctgacggtaatgccaccggtgccagcgttgaatttatcggaaaatag

SEQ ID NO: 10109 - DNA, 378 bp, Escherichia coli
atgaaaacattacctgacacacacgtacgggaggcatcgcgctgcccgtctcccgtcaccatctggcagacactgctcacccaactgttggaccagcattacggcctcacactgaatgacacaccgttcgctgatgaacgtgtgattgagcagcatattgaggcaggcatttcactgtgcgatgcggtgaactttctcgttgaaaaatacgcactggtacgtaccgaccagccaggattcagcgcttgtacccgttctcagttaataaacagtattgatatcctccgggcccgccgggcaaccggcctgatgacccgcagcaactacagaatggtgaacgacatcatccggggtgaacattcggaggcgaaacgatga

SEQ ID NO: 10110 - DNA, 759 bp, Escherichia coli; identical to SEQ ID NO: 6176

SEQ ID NO: 10111 - DNA, 276 bp, Escherichia coli; identical to SEQ ID NO: 6180

SEQ ID NO: 10112 - DNA, 378 bp, Escherichia coli
atgggcgaacagtggggctatgtcggggctaaatcgcgccagcgctggctgttttacgcgtatgacaggctccggaagacggttgttgcgcacgtattcggtgaacgcacgatggcgacgctggggcgtcttatgagcctgctgtcaccctttgacgtggtgatatggatgacggatggctggccgctgtatgaatcccgcctgaagggaaagctgcacgtaatcagcaagcgatatacgcagcgaattgagcggcataacctgaatctgaggcagcacctggtacggctgggacggaagtcgctgtcgttctcaaaatcggtggagctgcatgacaaagtcatcgggcattatctgaacataaaacactatcaataa

SEQ ID NO: 10113 - DNA, 501 bp, Escherichia coli
atggctcgtttatcattatttatatcgttgcttctgacatcggtcgctgtactggctgatgtgcagattaacatcaggggaaatgtttatatccccccatgcaccattaataacgggcagaatattgttgtcgattttgggaatattaatcctgagcacgtggacaactcacgtggtgaggtaacaaaaaccataagcatatcctgtacgtataagagtggctcaccctggataaaggtcacaggtaatgcaatggctgggcagactaatgtactggcaacaaatatagccaattttggtatagcgttgtatcagggaaaaggaatgtcaacacctcttacattaggtaatggttcaggaaatggttacagagtgacagcaggtctggacacagcgcgttcaacgttcacctttacttcagtgccctttcgtaatggcagcaggacactgaatggcggggatttccggaccacggccagtatgagcatgatttataactga

SEQ ID NO: 10114 - DNA, 378 bp, Escherichia coli
atgaaaacattacccgatacacacgtacgggaggcatcgagctgcccgtctcccgtcaccatctggcagactctgctctcccgactactgggccagcattacggccttaccctgaatgacacaccgttcgccgatgaacgtgtgattgagcagcatattgaggcaggcatttcactgtgtgacgcggtgaactttctcgttgaaaaatacgcactggtgcgtaccgaccagccggaattcagtgcctgtacccgttctcagttaataaacagtattgatatcctccgggcacgccgggcaaccggcctgatgacccgcgacaactacagaacggtaaatgacattaccctgggtaagcatccggaggcgaaacaatga

SEQ ID NO: 10115 - DNA, 378 bp, Escherichia coli
atgaacacattacccgatacacacatacgggaggcatcgcattgccagtctcccgtcaccatctggcagacactgctcacccgactgctggaccagcattacggcctcacactgaatgacacaccgttcgctgatgaacgtgtgattgagcagcatattgaggcaggcatttcactgtgtgatgcggtgaactttctcgttgaaaaatacgcactggtgcgtaccgaccagccgggattcagcgcctgtagtcgttctcagttaataaacagtattgatatcctccgggcccgccgggcaaccggcctgatggcccgcgacaattacagaacggtaaataacattaccctgggtaaacatccgggggcgaaacaatga

SEQ ID NO: 10116 - DNA, 432 bp, Escherichia coli; identical to SEQ ID NO: 8375

SEQ ID NO: 10117 - DNA, 234 bp, Escherichia coli
atgtcggactgccaccctgttttattgcccgaaggccctttctcacgcgaacaggcggttgccgtcacaacagcttaccgcaatgtgcttattgaagatgaccagggaacgcatttccggctggttatccgcaatgccgaagggcagctacgctggcggtgctggaattttgaacctgatgccggaaaacagctaaattcgtatctcgccagtgagggaattctcaggcaataa

SEQ ID NO: 10118 - DNA, 561 bp, Escherichia coli
atggctctggtttctgttatctccatgcctacagcattgatgtgtattagaaaaatattgattgctaaaactggttgggaggatgcagggcaatggcaggccgtatggaagatatctgaggtttatcttggtgttgtgacaattgctttgtcaacatatttcttaccaagattgacaattataaaaacaagtttccttataaaaaaagaagtaaatagtactatattatacataatatctattacttcattcatggcgttgagtatctatttattccgcgatttggtaataacagttttatttactgaacagtttcgctcagctcgtgaattatttttattacaacttataggggatgtaataaaaattgctgggtttctttatgcataccctcttcaaagtcaggggcatactaaactattcatcagttcagaagtgattttttctatgctctttatcattaccacctatatttttgttgtaaattatggagtacatggtgctaacataagttctgtctcttatacacatctgacgctgccgacgatactccttgtgtag

SEQ ID NO: 10119 - DNA, 222 bp, Escherichia coli; identical to SEQ ID NO: 9129

SEQ ID NO: 10120 - DNA, 249 bp, Escherichia coli; identical to SEQ ID NO: 5145

SEQ ID NO: 10121 - DNA, 384 bp, Escherichia coli
atggcaacaaaagaagaaaatctgaatcgtcttcgtcaactggctggcctgctggggcgcgaggcggatatgtcggggagtgctgcggatattgctcaacgtgtgtctgagtgggaagaggagcttgctgtttccccggagggcattatgcactctgatgagagcggggctgatcaaaatcacacagacgatggtgagcagttgaacaacacggatgctccggatgatgttaaagccgtccggggacggaagtgcctgcaagtaatggggtattgcccggagacaggtcgtcccgttgagctggcgttacggggtatgcgtgttctggtgccattatcactggcaacggccatgatacagcacggaacggctgaatatgcgtga

SEQ ID NO: 10122 - DNA, 384 bp, Escherichia coli
atggcaacaaaagaagaaaatctgaatcgtcttcgtcaactggctggcctgctggggcgcgaggcggatatgtcggggagtgctgcggatattgctcaacgtgtgtctgagtgggaagaggagcttgctgtttccccggagggcattatgcactctgatgagagcggggctgatcaaaatcacacagacgatggtgagcagttgcacaacactgatgctacggatgatgttaaagcggtccgtgtgcggaaatgcctgcatgtgatggggtattgcccggagacaggccgtcccgttgaactgacgtaccggggcatgcgtgttatggtgccatcaccactggcgacagccatgatacagcacggaacggctgagcatgcgtga

SEQ ID NO: 10123 - DNA, 306 bp, Escherichia coli
atggaccgtctgtgcgaagactactgcggtggtatctggaatctgtacaccctgaacaacggtggcgcatttatggcacccgaaccggatgacgatgatgacgagacatgggtactgttcaatgccatgaacggtaaccgtgctgaaatgagtccggaagctgccggcattgctgcctgtctgatgacgtacagtcatcatgcctgtcgtacggagtgttatgccatgacggtccattattaccggctgcgggattacgccctgcagcatccggaatgcaacgccattatgcgcatcattgactga

SEQ ID NO: 10124 - DNA, 408 bp, Escherichia coli
atgacgtcggcaaaggacggcctgttgaagaagaatgtatcaggggtgaagagttccaagcatggctgctttgtttatggcgatacctcgttttctttcagtgaggtaatggaagctatcttcatcagtgggctgttcttctatgcgccaatagacgccgccagtagtcttgatgaactgaaagtgagtttggctgggctggaagaagaactggccgaagtaccaaaagtggattcgaatggcaatgaaacagataaagaacctactatagtcgtagccgaaggtgcttttgattcggtcgctgctcacatggaaacagaagctgaggagtggcaatctattaagaacctgtgccaacgagaaggtgagcagcgaccgaatcaaaagcaccttcggctacgactatag

SEQ ID NO: 10125 - DNA, 318 bp, Escherichia coli; identical to SEQ ID NO: 9188

SEQ ID NO: 10126 - DNA, 324 bp, Escherichia coli
gtggaaaaagcccgcccgatcctggctgcttcaccgcaggcgaatgccgggccctcacttcgtgatcagatcatggcactggatgaggcaaaaggggctgaggcgcaggctgaacagctggctgcctgcccgggaatgactgtggagagcgcccgggctgtgctggctgcgggatcaggtaaggcagaaccggtctctgcatccacaaccgccctgtttgaacatttcatggcgaaccattcaccggctgcggtccaggggggcgtgtcacaggcgtcagaagacggtgatgcggacgtgaaaatgctcatggccatgccatga

SEQ ID NO: 10127 - DNA, 324 bp, Escherichia coli
gtggaaaaagcccgcccgatcctggcggctgcaccactggcggatgccggaccctcactccgtgatcagatcatggctctggatgaggcaaaaggggctgaggcgcaggctgaaaaactggcggcgtttcccggaatgacggtggaggctgcccgcgacattctgtcctcatcgccggataaagcagaaccggtctctgcatccacaaccgccctgtttgaacatttcatggcgaatcattcaccggcagcggtgcggggtggcgtgtcacagacgtcagcagacggtgatgcggacgtgaaaatgctcatggccatgccatga

SEQ ID NO: 10128 - DNA, 252 bp, Escherichia coli
atggctgagcgatggtatccgtcactggagccctgccggctcatttattacagcggtagctggtatctgatcgcgttacagaagggaaaactgcaggtctttcctctggcagatatcaaatcagtcagcctgacatcagaacggtttgaacggagaggccacatccacagtctggtcgctgaagagcgttttatctccgccctgccacatttctctttcatccataaacttatcaacacctttaacctgtga

SEQ ID NO: 10129 - DNA, 924 bp, Escherichia coli
gtgatagcatatgaaaacatagaattttttatatgcttggtgaatgttttgggcaacaatatgtataatatccttttcttcatctttctttcaatagcaattccattccttttattcctcgcatggaaacagcacctaaaaaccaaagagattcgttcatatctattgaaagagggatataatattattttcaacggagaaggtaactcatatctcgcgtttaatattagtaatgcgacatttcgcgcaggtaatttaacttccaatgattattttcaagcatcaatttcttatatccacgattatagatgggagtggaaggaggttgaggcaaagaaaataaataatatatttattatttacatttcgaatattgatttcccttcccaaaaactattttatcgcaataataaatctttagcagaaatagactgggcaaaattacaagcaatttttcatcaaccatatgaaatacagaatgacgtcatgcaagataacaataatacgcactatgattttttcatatcccatgcaaaagaggataaagatacttttgtcagaccactggtagacgagttaaatagacttggtgtaattatttggtatgatgaacagacacttgaagtcggcgatagcttaaggagaaatattgatttaggcctaagaaaagcaaattatggcatagtcatactttctcataactttctaaacaagaaatggacacaatacgaattagatagtttaattaatcgtgcagtgtatgatgataataagattatattgccaatctggcataatatcaatgctcaagaggtatctaaatacagccattatttggcggataaaatggcactgcaaacttctttatatagcgttaaggaaatagcaagagagttggctgaaatagcatacaggagaagataa

SEQ ID NO: 10130 - DNA, 1503 bp, Escherichia coli
atggcgatttttcatctggattttaaaattgtgaaacgaagcgaaggcatgacttccgttgcgaaagctgcctaccatgcccgtacacgtattacagatgatcgcattggcgaaacatttgatttcagccacagaacagatcttcatggtcatattttattagcccctgtttcagcacctgctcacattgttgaaagttcctcagcactctggaatgaagttgaaagagtggaacgccagaacaacggtcaaacagcccgttattttgatgttgctatacctgtagaactcaacaacgatgataagaaaaaattggttgccgaatactgtcagaagaactttgttgataaaggaatgattgctgatatcgcatttcatgacttggatagtaagaatccccatgctcacgtcatgttaaccctgaaaaccattggtccagacggcttcggtaaaaaagacagaagctggaatgataagaagataatgatccaatggcgtgaatcatgggccaccatgtcaaacagctaccttgaagccgcaggcagtgaagaacgtatcgatcaccgttctctcaggacacaatgtgctgatgcccttgctcaagcagaggaagcattcagcgctgaagagaaagcattctggcttgccaaagcaacagaaacaaaccgcccggcaatgcaacgtgttcatcgtgctaaatggaatgacaccgagtcacaggaacaacgagctgccgaacaagctcaacgtgatcagcaaatagaggaagcgaagaaggtctatacgacattcagtgagctaccactggagatcgtggttgatgtcagaagctttacgattacacatcttgctgaacccgaagagatcattatccctgactacccagcaacagtagaaccgcaaccggctatggcgacacctaccacaagcagaagaccagcagcaaaatcttaccgtaatcccaataaggtcagtaaagtaaatgtttcagggaagaaatcccctgttctggttgttcctgaaccaaaagcatccactaaattgaaaaccccatctcttcaaaacaccagagcggtgaaccgtgctcccctacatatcagaaagcagaccaagccacgacaaaatggtttgtttaaacgtttcacactactcatcgtagacttcctgaaagagagatttgtatgggcgagaaggaaaactgataccactgatgctgaccatgataagcgtatcgctgaaaattatgtgtttgatgaagtgctgggtgtcaatgttccacgctcggagtttgaaagacgcgctaagtttaacaataaccaaacatcacaagaagcaggagtctatggtaacgaatcaaatattaacaagactgttcgtttcccaaatcgttttgagcaagaacaaacggaggtcaataaacacatggaatttatactgtctattggtggaaaaccttctatgccaaagttaaaacaaactaacagaaaatctaacatcaaatag

SEQ ID NO: 10131 - DNA, 306 bp, Escherichia coli
atggataatgaaagtaaaaaaacaagaacagaaaaaacattaaagcaaaaggttgcttttgctcaactagaacttaatcgtcttaagtctctggagaaatcagaacgtaagaaagttgaaacaaggctaaagattattcttggtgcggaagtagctaaggctatgcattgcgatatcgaacaggtggataaagagcttgttatggggattttgctttcagtatctgacctgaatgatattgaaagaataacgtatataaaagcaggcaggaagtttctcgcgcaaatggatagaagacaaaaataa

SEQ ID NO: 10132 - DNA, 1464 bp, Escherichia coli; identical to SEQ ID NO: 9318

SEQ ID NO: 10133 - DNA, 1821 bp, Escherichia coli; identical to SEQ ID NO: 10034

SEQ ID NO: 10134 - DNA, 1095 bp, Escherichia coli
atgggcgcttatctgatccgccgtctgttgctggtgatcccaacgttatgggcgattatcactatcaactttttcatcgtgcaaattgcgcctggcggtccggtcgaccaggccatcgccgccattgagtttggtaatgccggagtattacccggcgcaggcggtgaaggtgttcgcgccagccatgcgcaaacgggcgtcggcaatatcagcgacagtaattaccgtggcggacgcggattagatccagaagtgatcgccgagatcactcatcgctacggtttcgataagccgatccacgaacgttacttcaaaatgctctgggactacatccgttttgattttggcgacagcctttttcgcagcgcctcggtgctgacgctgattaaagacagtctgccggtctccatcaccctcggattgtggagcacgctgattatctatctggtgtcgattccgttaggcattcgcaaagctgtttataatgggagccgttttgacgtctggagtagtgcatttatcatcatcggctacgccattccggcctttttgtttgccatcctgctgattgtcttcttcgcgggcggcagctatttcgatctgttccctctgcgcggcctggtttccgctaactttgattcgctgccgtggtatcagaaaatcaccgattatctgtggcatatcacgctgccggtgctggcgacagtgattggcggctttgcggctctgaccatgctgacaaaaaactcattccttgatgaagtgcgtaagcaatacgtggtgacggcacgtgcgaaaggggtaagtgaaaaaaatattctctggaaacatgtgttccgcaacgccatgctgctggtgattgccggttttccggcgacgtttatcagcatgttttttaccggctcgctgctgattgaggtgatgttttcactcaatggtcttggcttactgggctacgaagcgaccgtctcgcgcgattatcctgtaatgtttggtaccttgtatattttcaccctgattggcctgctgctgaatattgtcagtgatatcagctatacgctggtcgatccgcgtatagactttgagggacgttaa

SEQ ID NO: 10135 - DNA, 2949 bp, Escherichia coli
atgacagattcaataaatgccaatgttgtggtaagcatgccttcgcaactcttcactatggctcgttcttttaaagccgtagctaatggaaagatttatatcggtaaaattgacactgacccagtaaatcctgaaaaccagattcaggtttatgtggagaatgaagacggttctcacgttcctgtttcgcaaccaatcatcattaacgctgctggatatccggtatataacggacagattgccaaattcgttactgtacagggccattctatggctgtttatgatgcatatggtgtgcagcagttctattttccgaatgtgctgaagtatgatcctgatcagttacggcagcaattagaagacccagatggagcgaataaatacccaaaacttcagatagcaagatggagagacagttatgatgtaagaggttggggggctattggtgatggtgttcatgatgatacatcagctctatcagaattactttctgttgcaacaggtggtgaaaagatagatgggcgagggcttacttttaaagtatcaactcttccagatgtcagtcgatttaaaaatgctcgttttttatttgagagaataccgggtcagcctcttttttatgcttctgaagattttatccagggagagttatttaaaattacagatacaccgtggtacaacgcctggacgcaggataaaacgtttgtatatgacaatgtcatctatgcgccttttatggctggagaccgccatggtgtaaataacctccatgttgcatgggttcgctcaggagatgacgggaggacctggacaacgccggaatggcttacagatttacatgaaaactatcccacagttaactatcactgcatgagtatgggggttgtcagaaatcgcctttttgctgtaattgagacgcggaccgtgagcggaaataaactgcaggttgcagagttgtgggatcgcccaatgagtcgcagccttcgcgcttatggtggtataacgaaagcagcaaatcagcaagtcgcttatattcgcattactgatcacggattatttgctggtgattttgtcaacttctcaaactctggtgttacaggtgttaccgggaatatgacggtgactactgttattgataaaaatacttttacagttacgacgcaaaatacccaggatgtggatcagaataacgagggtagatactggagttttggtacatcatttcactcgtcaccatggagaaaaaccagtcttggaactattccttcttttgttgacggaagcactcctgttactgagattcacagttttgcgacgattagcgataacagttttgctgttggctaccataatggtgatattggtccacgcgagcttgggatactctatttctctgatgctttcggttctcctggtagctttgttcgcagacgcatacctgcagaatatgaggcgaatgcatctgagccatgtgtaaaatattatgatggcattctgtatctgacgaccagggggacattaagtactcaacccggtagttcattgcacagaagctctgatttaggtacatcatggaattctcttcgcttcccaaataatgttcatcactcaaaccttccttttgccaaagttggcgatgagctgattatttttggcagtgagcgcgcatttggtgagtgggaaggaggagaacctgataaccgttatgcaggaaactatccaagaacatttatgaccagagttaacgtcaatgagtggagtctggataatgtagagtgggttaatgttactgatcagatttatcagggcggaatagttaactctgcggttggtgttggttcagtttgtatcaaagacaactggctgtactacattttcggtggggaagactttctaaacccatggagcataggggataacaacagaaaatatccttatgttcacgatggtcacccggctgatttgtattgtttcagggtgaaaattaaacaggaagaatttgtttcaagggattttgtctacggagccactcctaacagaacgcttcctacttttatgtcgacgtcaggcgtgaggacggttcctgtacccgttgatttcacagatgatgttgccgtccagtcactgactgtccatgcaggtacatcaggacaagttcgcgcggaagtcaaacttgagggtaattacgccattattgcgaagaaagtaccgtctgatgatgttaccgctcagagattaatcgttagcggcggtgaaacaacgtcttcagcagatggtgcaatgataacgttgcatggttccggaagcagtactccacgtcgcgcggtatataacgcactcgaacatctttttgagaacggagatgttaaaccttatcttgataatgtaaatgctcttggtggtccgggaaacaggttctcgacagtttatcttggctccaatcctgtggttaccagtgacggaacattaaagacagagccggtctctcctgacgaagcattgctggatgcctggggtgacgtcaggtatatcgcttataaatggctgaacgctgtcgctataaagggggaagaaggggcgaggatacatcatggtgtaatcgcgcagcaacttcgtgatgttcttatttctcacggactcatggaagaagaaagcacaacatgccgctatgcgtttctttgctatgacgattatcccgcagtatatgatgacgtcattactggccaaagggaaatgccgctgactgataatgacgggagcatcattgttgatgaggatgataatccagtgatggtaatggaagacatcattgagcgcgttgaaataacgccagcaggatctagatggggggtcagacctgatctcttattctatatcgaggcggcatggcagcgcagagaaatagaaagaataaaagctaggttagacttaatagaagggaagcactaa

SEQ ID NO: 10136 - DNA, 930 bp, Escherichia coli
atgaaaagtatagcaacagcagtatctactatcaatgtaccattccacggcgcagagctttatgttgtcaatcacaacggcgaaccgtataccccaatgaaacctatcgttgaaggcatgggtatggattgggcttcacagtttacgaaaatgaagcagcggtttaaaacctccattgtgaaaatcacaatgcagcttcctagtgatgaacagcgccgtgagattatttgtttggcacttcgcaaacttgcaggttggctgcaaaccattagccctaacaaagtccgccctgaaatccgcgacaaggtaatccagtatcaggaagagtgtgacgatgtgctctacgaatactggactaaaggccatgtagttaacccacgcaaagctaaaaaggcgttgccgggtaaaatcaccactgaacagcaggaagccattaaacaactcgtcatgagtcgcggtcagtctctgccaaaggaaaaacaggctaaggcgatgatcaccatgtggtcgtcactgaaatcccattttggatgttcatacaaagaaatcagcgatgagcagtttaccgaagctctgtcacttgcagctcgcgttccgcttgaaggcgagttaatcggcaaacaagagaagaaagcaaacgagctttctgcaaaagaagcaaacagccttgtatggttatgggattatgccaaccgcgcacaggcattattccgcgaactgtatccggcgctaaaacaaattcaatcgaactattccggcagatgctacgactatggccatgagttctcgtatgttatcggaatggcaagagacgttttaataaaccacacacgagatgttgatatcaatgagccagacggaccaacgaatctttccgcatggatgagacttaagaataaagaattacctccttcagtacataactactga

SEQ ID NO: 10137 - DNA, 219 bp, Escherichia coli
atgtcatgggatgagatacgaaaatctgataaacacgggcttgggacggaaaaaattgccagaaacgcgataaaggctccgattcctaagcatgttactcaagatgtggatttcattgcgttcagattttgctctaaggcacctatggttggttataagataggagccactttttatgtcttatggctcgacagggagttcaagctatacaagcactaa

SEQ ID NO: 10138 - DNA, 444 bp, Escherichia coli
atgctcacttgttttgatgtcgccgactacttcttggcgcattgcgatgaagaaagtggcgacattatctctaacctaaaaattcagaagttgacgtattatgcccaagggttttctctggttcttctgggtaagccgctatttaatgagaaaattgaagcctggatgcatgggccagtagttcctgaattgtatcgtaaatatagggactgtggtaacggagctttacctgcgccagaaaactttgacgctaaaaaattcagtgaagatgaaattgaattgctggatgaggtgtataaagtttatggtcagttttctgcctggaaactgcgcaatatgactcacgaagagcagccatggaaagatgcttacattgagggtgcggttagccaagaaatcacacttgattctatgaaaggttttttcaaaacgttaattaactga

SEQ ID NO: 10139 - DNA, 390 bp, Escherichia coli
gtgaggcaatttcttgctgctatgttcttattcatatcttttggggctacagcagagtgctgggtagttggagatatgcgcggaataagctattcagaacgaaataatttccaaccagaagaagatggttttagtggaacattcatcattaagacaagcggtgaagatgccagcatcacatattctggggcagatgcgggcggcatggcttacaaagcattgtctaaaaactccatcataggaatcggcgcaaatggcgaaactcaacgcgttatcgactcatgggtaatacatcctactggaacagttttaatgtcaaaaaccatttccggttatggaaatatggattcaaccaaagcttttgttggaaaagtaaaaagaaaatgttaa

SEQ ID NO: 10140 - DNA, 1827 bp, Escherichia coli
atgaaagtaactgcaaacggtaagacatttacctttcctgatggtacgagcaccgaagatattggggccgccattgatgagtattttgctggtcaggctgttcagcaacaaacagttaatcaggccaataatgcaccaacacgggaagaaccatcattgatgcaacaagctggcgattggctcacaggtggtcaaagtgcagggcaaattgcagaacaggctggtcgtggtctggtaaacataccatttgacgtattgcagggtggcgcaagtctgattaatgcaatcagtcaggggcttggtggtccaaaagtattggatgatgtctatcgtccagtcgatcgaccgacagacccttatgcgcaaactggagaaacaattggcgggtatttagttccaggagttggaacggcaggaagcatggctattggatcactggcagaggccgcaaatcagaaaggcgatttcgcacaaaatgcagcaaaaaatgccggagttaaccttgccgctcagggggttctttccgcagcagcaaagggaatagggcgtggaataacggctataaaaggtgatattgcgccagaagtggcgaagaaaattgccacatcagaatcgatgggcgtgacaccaatgacatctgatgttatcccgccgaaaaatgctttcactcgcggccttactcaggatgccgagggggctttgctcgggacaggttcaaagcgtgcggagcaatatgcaaaaagaagtcagctagttaaaaaacagcttgagaaatatggtgaatatagcccatcagttgttgttgacgatctgtatggttctctgaagtcaaggaaggattcagctggaagcgttattgaagacattacaactaaaatgggagatacacctgttgacacatcaaaatccattaaggttatcgacaacgtgcttaccagggctaacaggcttgggaaagtggcaaataaggatttgattcgcgggctatccgatttgcgagaagagcttgctaaaccagatgtagattttggactattgagagagttgcggtcagcattaagggaaagtattcagggagatgccatggtttttcctaatagcgcgaaagccgcaactgatgccgtggagagggcaatgggttcagatttgaggaataacgcagcacggtatttgggggctggagaggctgccagatacgtcaaagcaaactctgactactccaacgtcttcaataaggttctcaataaaaggattgcgaacaatctcaacaaagctaaaaaagagtttactccagagctaataaacagcgttgtattcagcagaaaaccatcagatattaagaggatatggcctgctcttagtgaagatggaaagaacgctatgcgtgctgcttatattagcaagattgcagaaaaggcaggagactcgccaacaaaatttcttaccgagttaaataagttgaagtcgcaatctgacggtcagatatataacacgatattcagtgggagacacatgaaagagcttgatgctcttcatgaagttctacagcaaacagcaaggtcagacatcgcaaatgttgtaactcagacagggcaatcgcaagccaacaggataaggacgattggcgcaactgcgactcttggggcaacactggcgcttgaatctggtttcggtacaatgatgcgcctgtatgagtccaaagcaacaaggaatgcgctcttacgtctggcaaacactaaagctggaacgccagcttatgaaagagcgctgaataatgctgcgaatgccatcagaccgctgtttgctactgaggcaacacagcagtaa

SEQ ID NO: 10141 - DNA, 1416 bp, Escherichia coli
atggctacgtggcaacagggtattaattctggtggttttctggctggcatcggtacgcaaaatgagaatgcgccaaaggcaagcgacattaacgcaacgcttggtctgatccgcgaaaacaatgaactggctcgctcaggtgcaaataacattggtctgaccgcgttacgtggtctggctggagttgctgatatttacaatcaggaacagcaacagaaagctattagtgcgttcaataaggttcacgctgatgcatgggcttctggtgatccatctggactatttaagtttgcccaggaaaatccagcgtttgttgcacaggcacaacaggcgttttccggtcttaatgagcagcaacgcaacgatatgggcgatttagccatgagggctaacgtcgctctttcccagggaccggaagcctacagtaaattcattactgacaacaaggacaggttaaatcgcgtgggggcgaatgctgactggatgattcagacaggtatccagaatccagagcagctatcacacatgctgactactatgtctctcggtgcgcttggaccagaaaaggcgtttgctgttcaggacaagatggctggtcgtgaaattgaccgaggcaaactggcagagacaatccgcagcaatcaggctggagaagcacttcaggcgagagggcaaaacctttcctatcagtcagcaatgactgggcacaatatcgcagcacaacgcttggctctggatcagcaagagttcgggtttaagatgcagcaagcgcaggaaaaggctcagcagttgattagtgaagcacctaagctgtcagtaaacatggaaaaaggcatcgagacggctgtaaacaatgccacagcatcatcaaactcagccaattctatgagtgcgcttgctcaacagttcagagcagaaaaaccaacgacaggtttgttcggtaacgcacagaacatgttcgcaaaacttaccggaagcgatacgacattgcgtgatttgcgcatccgccaaaatgcccttgttaacagtcaggttcttaaattcctacctcccggcccagcaacggataaagacgttgagatcgttcgacagggtgcgccaactgacatggataaccctgagacggtcgcaagatggcttgatgcaatggcaaaccttgagcgacgaaacgcgcagtttaatgagtttaaagccgagtggatgagcgcgaatggcaaccctggacaatcgcgtaatggcggtcagatattggggttggatgttaaaaaaggtgaatcactggggagtgccgttaagcggtatatgtcaatgaatactgacgcagcgccagcacaagattcgacaccttcaggagaaccacggaatcaggttggatcatatacctcaaaatcaggcattcaatttacggtggaatga

SEQ ID NO: 10142 - DNA, 525 bp, Escherichia coli
atgaataatcattcagttattccagccttcgacttccgagaaatggtgcaagccaaaaacggagaggtcgttaccacatccagaaaaattgccaagtacttcggcaagcgacacggtgatgttctcaggaaaatcgagcaggttaaggctgattgctcgcgtgagtttagccaacgcaattttgcgtcggctgattatatcgatgagcagggcaaggttcgcccgatgtacagcctgacgaaagatggctggatcatggttgtgatggggttcaccgggaaagctgctgcggcaatcaaggagagctatatcgcagcattcaactggatggcagagcaactgagccgccgcatggcaattggcgaagaaatgcagcaccgctacgccatcaaagaaacacgctcaaagctgaaaggtacgatcggcagtcggttaatgaacgaacggaagaaagagaagcgtgtcctggctgtcgagcatgaatacatcttgcaggtgacacagcctgaactgctgattaattga

SEQ ID NO: 10143 - DNA, 468 bp, Escherichia coli
atgagcagagtcaccgcgattatctctgctctggttatctgcatcatcgtctgcctgtcatgggctgttaatcattaccgtgataacgccatcgcctacaaagaacagcgtgataaaaaagtcagtgagctgaagcaggcggccgccaccattactgacatgcagcgacgccagcgtgctgctgatgcactcgatgctaaatacacgaaggagttagctgatgcgaaagctgaaaatgatgctcttcggcgcaagcttgataatggtggcagggtgctcgtcaaaggaaaatgccctgtgccatcctcagccgaaacctccggcgcctccggcatgggcaatgatgccaccgtcgaactctctccagttgctggacgaaacgttctcggtgtccgggacggaattatccgcgaccaaacagcactgagaacgcttcaggaatacatcaggacgcaatgccttcgatga

SEQ ID NO: 10144 - DNA, 624 bp, Escherichia coli
atgagactcgaaagcgcagctaaatttcattcgccaaaaagcccgatgatgagcgactcaccacgggctacggcttctgactctctttccggtactgatgtgatggctgctatggggatggcgcaatcacaagccggattcggaatggctgcattctgtggtaagcacgaactcagccagaacgacaaacaaaaggctatcaactatctgatgcaatttgcacacaaggtatcggggaaataccgtggcgttgcaaagcttgaaggaaatactaaggcaaaggtactgcaagtgctcgcaacattcgcttatgcggattattgccgtagtgccgcgacgccgggcgcaagatgcagagattgccacggtacaggccgtgcggttgatatagccaaaacagagcagtgggggagagttgttgagaaagagtgcggaagatgcaaaggtgtcggctattcaagaatgccagcaagcgccgcatatcgcgctgtaacgatgctaatcccaaaccttactcaacccacctggtcacgcactgttaagccgctgtatgacgctctggtggtgcaatgccacaaagaagagtcaatcgcagacaacattttgaatgcggtcacacgttaa

SEQ ID NO: 10145 - DNA, 270 bp, Escherichia coli
atgagtgatttctctgagcttatttccttcaaaaaagacagagaagaaatgcggactgaatctgtctattacgttcaacaccggaataaacgctcggtgcttgatcaggagttggttattaccggagacctggcattcagaacatataaggccagcatggaaatgaaggatttccctaaatgtggttctgaaagagaagccgcgttaaagctggctgagtggatgcagagaatggctgctgcaattgagaattactggagcgaaccataa

SEQ ID NO: 10146 - DNA, 411 bp, Escherichia coli
atgaagcaaacaatattcctccgaactaagcaacaacagcaagccgcaatcaacgccatcctcgcaacaccactcgataaagacaagccagtcaccatccgcattactgactacaagcgcaaccttgaccagaacgcaaaatttcacgcgatgctggcggatatcgctcgtcaggttcaatggtgcgataaatggctaaaaccagaacaatggaaggttttgttgatcagcggtcatgcagtggcaacaaaacaggaagctgatgttttgcccgggcttgaaggcgaatacgtcaacattcgcgaaagtagcgcgcagatgagtgtgaagcgtatggcaagtctgattgagtacacgacagcatgggctattggtcagggtgtcagatttaccgacaggaggtacgaatga

SEQ ID NO: 10147 - DNA, 357 bp, Escherichia coli
atggacgaatcaagaaagaagtttgaggaatacgttgccaaaaaattgagattaccattcgagatgataaccgaggcaagaaatggtgataggtacttcgcattttcaagcatggatattcgtcactccttaaatgagtggtggactttatggcaggcatcgcgagcagctattgaactggatatcgactggccagaatcgaatgacgacttttggaaagatggtgaagaaggtgcttatgcgatgggttatgaggatgggcgtgacaaaacggtaattgcagtaatgaaagctatcagagccgctggaattaaagagaagaatttcgatgaagcaaacaatattcctccgaactaa

SEQ ID NO: 10148 - DNA, 201 bp, Escherichia coli
atgactacgactattgataaaaatcaatggtgtggacaattcaagcgatgcaatggatgcaagctgcaatcggaatgcatggttaagcctgaagaaatgtttcctgtaatggaggatgggaaatatgtcgataaatgggcaatacgaacgacggcaatgattgccagagaacttagtaaacagaataacaaggctgcctga

SEQ ID NO: 10149 - DNA, 423 bp, Escherichia coli
atggaagaacaagcaaacaagattctcgtagaacttctgcaaaaagccagtaatggaatagacgcggctgtttcatttagccaggcacagattcctgatgttgttcgtcagttgctaacatggagttttgtccatagcgcacttttccaagtggctgggttgttgcttttaattgcagcaatgaaacttcctagttttgcaagaacggcaagaaataatggcgagagatggacgtctttagatggatgtccaaacgatagatattttatatcttcgttttattacgatatatgcactgtatttgctcctatatttggctcaattattggcgttttaattattgccttcaatttcgaatggttgaagatttggcttgcacctaagttattcctaattgaatatgcagcatcattggttaagtaa

SEQ ID NO: 10150 - DNA, 375 bp, Escherichia coli
atgtcatttgtgcctgatatcacaacggcaaagggcagaaaggagatcgcttctctggcgtataaagttgcgcagacgaaaacatatctcgatggtcttggcaaagaccttgttgctgaactgaaggaaattccaaagctaattgatgccaaccgcaagacagtgcgcgatcgccttgatgaactgaaagccaaggcgcgccagcctcttactgattatgaggaagaacaggcgcggattaaagccgaagaagaagctaaggcagcagctgaagctctcgcaaagcaaattgagtctgaccatgaaatagcgattttgatggatcgcgaatttgaccgccaaagagaagaggcaagactcaaagcgagagcatga

SEQ ID NO: 10151 - DNA, 516 bp, Escherichia coli
ttgaccgccaaagagaagaggcaagactcaaagcgagagcatgaagaacgattaaaaagagaagctgaagagaaagccagagcagaagccgaagcaaaggcaaaagccgaaattgaagcagcagcaaggcgagaagcagaagctaaggccgcagcggaacgtgcagagcgtgaacgcattgaagccgagcaacgagcacagcgcgaagcaaaagaggcagcagaacgagctgaaagagaaaagcaggcagcaattgaagcagaacgcagaaaagcacaggaggaggctgaacgaatccgtcgcgaggctgaagcaaaagagcaagccagaatagcagaagaaaaaagaatcaaggacgaagaagagcgtagagcaaaggataaagctcaccggaaagaagtaaataacaaaatacttgctgaccttatcaaggttggcgcatcagaagatgttgctaaaaatatcataacagccatcgtaaaaggcgaagtattcgcaacaaaaataacctactaa

SEQ ID NO: 10152 - DNA, 132 bp, Escherichia coli
atgatttacgcaatcgcgggaggcgctcgcatgggtgccttccaactaaatgaatctttacttgaacgaatcacccgtaaattacgtgacggatggaaaagagttgaggtcttattatgcgcaatgaaatag

SEQ ID NO: 10153 - DNA, 300 bp, Escherichia coli; identical to SEQ ID NO: 4938

SEQ ID NO: 10154 - DNA, 1341 bp, Escherichia coli
atgagttctcaatttacgacgcctgttgttactgaaatgcaggtcatcccggtggcgggtcatgacagtatgctgatgaatctgagtggtgcacatgcaccgttcttcacgcgtaatattgtgattatcaaagataattccggtcacactggcgtaggggaaattcccggcggcgagaaaatccgtaaaacgctggaagatgcgattccgctggtggtgggtaaaacgctgggtgaatacaaaaacgttctgacgctggtgcgtaatacttttgccgatcgtgatgccggtgggcgcggtttgcagacatttgatttgcgtaccactattcatgtagttaccgggatagaagcggcaatgctggatctgctggggcagcatctgggggtaaacgtggcatcgctgctgggcgatggtcaacagcgtagcgaagtcgaaatgctcggttatctgttcttcgtcggcaatcgcaaagctacaccgctgccgtatcaaagccagccggatgactcatgcgactggtatcgcctgcgtcatgaagaagcgatgacgccggatgcggtggtgcgcctggcggaagcggcgtatgaaaaatatggcttcaacgatttcaaactgaaaggcggtgtactggccggggaagaagaagccgaatctattgtggcactggcgcaacgtttcccgcaggcgcgtattacgctcgatcctaacggtgcctggtcgctgaaagaagcgattaaaatcggtacatacctgaaaggttcgctggcttatgcagaagatccgtgtggtgcggagcaaggtttctccgggcgtgaagtgatggcagagttccgtcgcgcaactggcctgccgaccgcaaccaatatgatcgccaccgactggcggcagatgggccatacgctctcgttgcaatccgttgatatcccgcttgcggatccgcatttctggacgatgcaaggttcggtacgtgtggcgcaaatgtgtcatgaatttggcctgacctggggttcacactccaacaaccacttcgatatttccctggcgatgtttacccatgttgccgctgccgcaccgggtaaaatcaccgcgattgatacgcactggatctggcaggaaggtaatcagcgcctgaccaaagaaccgttagagatcaaaggcggtctggttcaggtgccagaaaaaccggggctgggtgtagaaatcgatatggatcaagtgatgaaagcgcacgagctgtatcagaaacacgggcttggcgcgcgtgacgatgcgatgggaatgcagtacctgatccccggctggacgttcgataacaagcgtccgtgcatggtgcgttaa

SEQ ID NO: 10155 - DNA, 378 bp, Escherichia coli
atgaaaacattacctgatacacacgtacggaaggtatcgcgctgcccgtctcccgtcaccatctggcagacactgctcacccgactgctggatcagcactacggccttacgctgaatgacacaccgttcgctgatgaacgtgtgattgagcagcatattgaggcaggcatttcactgtgcgatgcggtgaactttctcgttgaaaaatacgcactggtacgtaccgaccagccgggattcagcgcctgtacccgttctcagttaataaacagtattgatatcctccgggctcgcagggcgaccggcctgatgacccgcgacaattacagaacggtaaataatattatcctgggtaagcacccggaggtgaaacaatga

SEQ ID NO: 10156 - DNA, 2229 bp, Escherichia coli
atgtacacacagaccctgtatgagttaagtcaggaggctgaacgcctgttacagctttctcgccaacagttgcagttactggaaaaaatgcctctctctgtacccggagacgatgcgccacaactggctttaccctggagtcagcctaatatcgccgaacgtcacgcgatgctgaataatgagttgcgtaaaatttcccgactggaaatggtgctggcgattgccggtactatgaaagcagggaaatcaaccaccattaatgccattgttggtacggaggttctgcctaatcgcaatcgcccaatgactgcgctgccaacgcttattcgccatacgcccgggcaaaaagaaccggtactgcatttttcacatgtcgcgccaatcgaccatttaattcaacaattacaacagcgcctgcgtgattgcgatattaagcatctgaccgatgtgctggaaatagataaagatatgcgtgcgcttatgcagcggattgaaaatggcatcgctttcgaaaaatattatctgggtgctcaacctatttttcattgtctgaaaagtttgaatgatttggtgcgactggcgaaggcgctggacgtcgattttcctttttctgcttacgccgccattgagcatattcccgtgattgaagtggagtttgtccatctggcggggctggagagttatcccggtcagttgacgttactggatacccccgggccaaatgaagccgggcaaccgcatctgcaaaaaatgcttaaccagcagctggcacgcgcctcggcggtactggcggtgctggattatacgcaactgaaatcgatctccgatgaagaggtccgtgaggcaattttggcggtggggcaatcggtgccgttgtatgtgctggtcaataagttcgatcaacaggatcgtaacagtgacgacgccgaccaggtgcgggcactgatttccggaacgctgatgaaaggctgtattacgccacagcagatatttccggtgtcgtcgatgtggggctacctggcgaatcgggcgcgccatgagttagccaacaacggtaagttaccaccgccagagcaacaacgctgggtggaagattttgcccatgccgcgctcggcaggcgctggcgtcatgccgatctggcggacctcgaacatattcgccatgctgccgatcagttgtgggaagattcgctgttcgcccagccaattcaggcgttgcttcatgccgcttacgctaacgcctcgttgtatgctctgcgatctgccgcgcataaactgttgaattacgcgcagcaggcgcgggaatacctggattttcgtgcgcacgggttaaacgtcgcttgtgaacaattgcagcaaaatatccatcaggtcgaagaaagtttgcagctattgcaactcaatcaggcgcaggtgagcggcgagattaaacatgaaatcgagttggccctgacctccaccaaccactttctgcgtcaacagcaagatgcggtgaatgcgcagttagccgcgttgtttcaggatgattcggagtcgttaagtgagatgcgtacccgctgtgagacactgttacagacggcgcagaacaccatcagtcgcgactttacgctgcgctttgccgagcttgagtccaccctttgccgggtgttaaccgatgttattcgccccattgagcaacaagtcaaaatggaattgagtgagtctgggtttcgtcctgggtttcattttcctgtttttcacggcgtagttccccacttcaacacccgccagctgttcagcgatgcaatatcccgtcaggaagcaacggatgagcagatcacccgttttggcgttgtgcgtgagattttttcgcgctggttgaatcagcccgactggggacggggaaatgagaaattcccgacagagacggttgattacagtgtgttgcaacgagcattaagcgcagaagtcgatctttattgccaacaaatggctaaagttatggcagagcaggtcgatgaatctgttacggcaggcatgaatacttttttcgctgagttcgcttcatgtttgacggaattacagacgcgtttacgcgaaagtctggctctgcgtcaacaaaatgaatccgtggtcaggctgatgcaacagcaattgcagcagactgtgatgactcacggctggatttacaccgacgctcagctgttacgcgatgatattcaaacacttttcacggcagaacgatattga

SEQ ID NO: 10157 - DNA, 315 bp, Escherichia coli
atgaacgctaagataattgcctcgctggccttcaccagcatgttcagcctcagcaccctgttaaatccggcatacgccgaagagcaggaaaaggcgctgaatttcggcattatttcaacggaatcacagcaaaacctgaaaccgcaatggacgccgttcttacaggatatggagaagaagctgggcgtaaaggtcaacgccttctttgccccggactacgcgggcattatccaggggatgcgcttcaataaagtggatatcgcctggtacggcaacctgtcggcgatggaagcggtggatcgcgccaacggctag

SEQ ID NO: 10158 - DNA, 303 bp, Escherichia coli
atgaaaacctggatctttatatgtatggccgtagcaatattgctatggtttctgagtacgttaaggcgtaagcccagccaaaagaaaggctgtattgacgccattatacctgcttataacgaaggcccgtgtctggcgcagtcactggataatctgctgcgtaacccttatttttgccgggtaatttgcgttaacgacggctccatggacaataccgaagcggtcatggcggaagtcaaacgcaaatggggcgaccgctttgttgccgtcacgcaaaaaataccggtaaaggtggtgcgctga

SEQ ID NO: 10159 - DNA, 1755 bp, Escherichia coli
atgcttgataattctactttcgattacaaaccacatttaaaatctgcttatattgatccgattagaactgtgacagtcatcgatgatgaatacccaactattgatgatttaatttcaccgaccaaagacagtttttctcaagacaacatttctcgattaaaagatattattgatataagtcgaagtgaagaatataattggcttttagatgtctataatggaaaagagaagaaaattcaagagggaaccgtatctaaccgtctttatcacagtgatctactaatcttggactatcatttagatggagaggactctggatattgtaaaaaatctatagatattattaaaaatctatctgaaaatcgtcattttaatattgttgcagtgcatactaaaggttatgatggacaaaagggttcagttaatgaggtactaatagatgatgctttagatgaatgggaaatcgaagatccaagtatcagggaagatctaattaattcagtttctacattagatttacttttcttgattaataaattcgggtcaaatttaagttcaggatgtttcgactacgaagttcttgatgtttttcataatatatttgatcaaaaaccagacaatataaacatatccaaaatattgatttttaaatggatctcatcagaaaagttacatagatacgctgaccaatttaataataagacatcaaagttctttgattgggggacaaatgaaaaccacaattggataaaaacagaagacttatttattactgtccttggtaaaaaagacacaccaatcagtgacataccgaatcaacttttggaggctttgtcaaactctaaaccacatccgcacaaacttattttatcaaaactcagaagtgaaattgaaagtaatggtagctatgctgcaagtaatataattaacaaaaaattcttacaggcggcgtggctaaaggaattacttcaaaaagaggatgaatatgctatcaaaacagctgcatggcaagcagtaactaaattgtgggaagaattagcatacgaaataaaacagagtcttgatgattttacaattaatcttgtccgcgacttaaagaaaattaactcacctttaaactatttcatagagaaatctacacttgatgctgaacttgaacaaattaaacatgcaaattgtttcagttgttcaaaaaaaataactgctcatcatttggttacggggcatgttttggagttcaataataatcactggttgtgtctaactcctatgtgtgaccttgttcctggtcagaaaaacggaaatagtttactccctgttacgctcgtgaaaatgtatgatgcgaaagttgctttaaataatacacgtaaaaatatgcaaaacgagcttaaactacccaatttgccagaaatcaacgaagatgaatcaattagacaaatactaaattattccacacagaataatctattgttcgttcagtctgaacatgacgggaaaatacatattcttagtttcaccgttggactcgatggcaaggcaaatcctaaagcaatggattgctatgtggaaaatcaaggtattttctctgaagataaaataatagcactaaaatatgccaagcccactgaaaatgaaatgaacataatatccgtagaagcaaaaatagttgctgaattacgctacgaatatgctttgaatttattaggtagactcggtgtatcaaaatctcgagtcggattagattttatcaactaa

SEQ ID NO: 10160 - DNA, 1416 bp, Escherichia coli
ttgaaagcagacgaagatagaaaaaaattattacgtaaagagcaaagaagaatcaaaacatcgattcaaagagatcgtatttctttagaacatttaagaaatgaattttatgaaatatcacagcttctaagcgacaagaataattttaaacaactagaggagctattacagctcaaagaaaacatcgacgtattggatggtaccctaaaaaacctatctttaggttcagtaccaagaaatttagggagtatagagaaagactaccgtcagtatcgcgatttagagattgatgctaaaagtcttttaaagcagattaataactctgtatactcagcgcttgatcattttactgttaaagatgattattcaattgctgagaaagactttcgtagcaaagcagccatattacatgcgaaaataagaaaattttccaataaaggacgcaatatattaaaagaagagatgttgcgtttcgaaaagataacaaacaatacaaataaagctttccatgaaaaaacatctcaatatttatccgatctacaagaaaatagaacttcactcaaaaaaacacttgaaaatttagatcttgcttatcagattcaagacattgaaataggtcaaacctacgccccatatattaccgcattagaaagcttaagagaggaaattgatttagaaggcctcgcgatctcttcagtcaacgaaaatacacggttgaagaaacaggtagagcaagtgaatgcactcgctcaacttggaataactgtggagataattggtcatgaaatcgaaggtttcgatatgactattgagcgaggtataaatagactgtcatcaacaaacctcgatgaatatcagaaaaatgctttatcaagtattacccaagcacatcaatcattaagcgattcttggcgttttttaagcccattaaaattatcaggagataaggtaagagctttcttgagtggaaaagatatttttgattatgttaatcattttttcaacagtaaatttgaaaaagattcaattgaattttcttgctctactaatttcctagatatttcattatatgatcaaccagccagaatttatcctgtgtttattaatttagtaaacaactcacgatattgggttaaagaaactaaagaagagcgtcgaattattaggttagatgtacttgatggtttgatatatgttagtgataatgggccaggggttgatcctgatgacgtgtccgaacttttcactatatttttctccaagaaacaaagaggtggtcgcggggttggcctttatctctgcaaacaaaatttagcggtgagtggccatagtattttctacgaaacaagaacagagaaaaaaatactaaatggtgctaattttgtaattaatttcaaaggaattaaaaatgcttga

SEQ ID NO: 10161 - DNA, 1200 bp, Escherichia coli
atgcctgctcgccaagtatgtcagaattttttccgcggtgctttagcaccatttcacaaataccgacaaaatgctttgttggatgccactatcgcactaatcaatggcgcatctctgacgctgaccagcatcggacgttatttacccggtaatgctcaggtcaaaaataaaataaaacgtgttgatcgtctgctcggtaatgagtctcttcatcacgacatccccctgattttcagaaacattatttccatgctgacgagcaagctgtcactgtgtgtcatcgccgttgactggagtggatacccctctcaggagtatcacgtactccgcgccagcctgatttgctatggacattcgattccattgctgagttggatagttccttcggaaaaacagcaaaatgcaaagatacagcaagcctttcttaatactctttccgaagcggtaaacccaaaagcaagggtaatcatcgtcacggatgcagggttccagaatgcctggtttcggcacataaaatcactcggctgggattttattggccggatacgaggcaataaacaactgcatctggcgagaaaaggggaatgctggttcaggcgtcaggaattacaggccagtaacaaacctgaatatctggggccggggacgctttcccgggcggaatacgcccgttgcgatggtcatttttatttgcacaaaaaagagccgaaaggccggagaaataaacgttcgcgttgtggtatagccagaccatcacagataaaagatgccaggtcggcggcaaaagaaccatggttaatattcagcagcacagatgactttaaaccgcgagaaatcatgaagttatacagccgccgaatgcagattgagcaaaacttcagggatgaaaaaagtgagcgttttgggttcggtctgcgagccagttacagctgttcggcaggaagaatgctggtactgagcctgctggcaacactgagcacaatagtgctgtggcttattggctatcacgctgaaaatcaagggttacatcttagatatcaggccaacagcattaaaacgcggcgggtaatctcgtatctgacgttagcggagaatgtcttacgacactccccgctaattttaaaacgaacggtgctaagcaccattcttaatcacctcaccagaacctaccagaatatggtgttggtttattatcgctga

SEQ ID NO: 10162 - DNA, 303 bp, Escherichia coli
atgagtaaattcctggaccggtttcgctacttcaaacagaagggtgaaacctttgccgatgggcatggccagcttctcaataccaaccgtgactgggaggatggatatcgccagcgttggcagcatgacaaaatcgtccgctctacccacggggtaaactgcaccggctcctgcagctggaaaatctacgtcaaaaacggtctggtcacctgggaaacccagcagactgactatccgcgaactcgcccggacctgccaaaccatgaacctcgcggctgcccgcgcggtgccagctactcctag

SEQ ID NO: 10163 - DNA, 2718 bp, Escherichia coli
gtggtgaatcaggacggcgagctggatgtcagcggcggcggtcacggtattgatatcaccggcgacagcgcgacggtggacaacaaaggtggaatgactgtcaccgatccggattccatcggtattcagatagacggcgacaaggcggtcgtgaacaacgacggtgacagtgccatcagtaacggcggcaccggcacgcaggttaacggcgacgaagccaccgtgaacaataacggcaacaccaccgttgacggcaaggattccacgggcaccgagataaacggtgacaaagccatcgtcaacaacgacggtgacagcacgatccttgatggcggcaccggaacccgcattacgggtgatgatgcgacggccaacaacagcggcaataccaccgtagacggtcagggttcgaccggtaccgaaatcgcgggtaataacgcggtggtgaatcaggacggcttactggatgtgagcggcggcggtcacggcattgatatcactggtgatagcgccactgtaatcaataaaggcaatataactgtcacggataaagattcggttggtgtgctgattaacggtgatcgagcgacctttgccaatacgggtcatattgacgtcaataattcagctactggcatgagcatcacgaccagcgagggggccatctcccaggcaggtagcatgaatgttggtgacttttcaacaggcatggcgctcagtggtaataacaacagtgtgacgttggcggcgaaagatctgaacgttatcgggcagaaggcaacgggcgtcaacatctctggtgacaataatgccgttgatatcactggtaacattttggtagataaagatcaaaccgcgactaacgcggtagattatttttacgaaccgtctattggtgtgaacgttagcggcaacagtaacactgtatcgctagacggcaagttaactgtggtggctgacagtgaacttacctcacgtatttatgctgactttgatggaagccaggagaatatttccgggcttgtcgtatctggtgatgataataccgtgtatctgaatggtggtatccagctggttggtgaagaaaatcaattgactgatggttctaccgtcgcatcaaatcgcaatggctatggcaaaacaccagtaatcactgttgatgggaagtcgtctgtttacctgaacggggactccacgattaatggtgatttacctctagcctattcagggatgattcggttgaagaatagcgccatgattgagatcggggcggatgccacgattaacatgcaggtagatatttatgaccactatgcgagatctgaatcccaaatgatctttgtagagtctggtgctgagttagtcaataaaggtgatattgatactcgaaatatcggttttgccgctatttctggtgaaaattcaacgggaagtaacagtggcaatattacgctttctcagtacaactatggcttgttagcaaatgcaggagttggctatttcacgactaaaggcggtagtgcggttaataatggtacgattactgcgaaagtcatggaacaagaaagtgtcattaatttgggggcgtctctgggtctgaatgaggcgaacactttctactctgatgcgaacagtatgatggggcttgatgcctttgatcacggatacgtgtccaatgaaagcggtggcagcattgagatgtatggtcgcggcaacgttggtatgttggctattgatgagagtacagcagaaaacgctgggcaaattacactggatgccctgtgggttgatgcagatgataccaccactttgcgtagcaatattggtaatgatgccaggagctatggcgttggtatggccgtaggtacaaatacttacagtgggccaagaaaaaatgctacggccgttaataaacagggtggtgtaataacggtttataatgctggaataggtatggccgcctacggtgccagcaataccgtgattaacgagggtatcatcaatctggagaaaaacgctaactacgatagtagtctgggagcagattctctgatcggtatggccgcctataagagtggtactgccattaatgaacagtctggcgtaattaatatcaatgctgacaatgggcaggcgttttatagtgatggatccggtactattcttaactatggaacgatttgtgttaacactaattgcctgacgggcaatgactataatgagactgactcttatacctcgttactttacacgggtggcgatgtaatcactgcgcagaatgaaacacaaaatctgacccaaaaagcctcgattaacgacaaaaaagaaggcaatgttgttaacagtggttcgctttccggtgctgatattgcgattagtagcggtgaattagttaatacatcgacgggtactattaataatgccatcattatcaatgatggagagttaagtaacgaaggctctgtggcgaaggtgacgctaaacgcaggcacgttcgggaacaccggtacggttaactcgcgcatgttccagacaggaggaacatttaataaccagcaaggtggggtcgtgcaaaacggtgctaacctgagtaaaactgcaatcaccaataacgagggtacctggtatctcggtgccagcagtagtagtgatagcaataatgccagcatgatggagatttataatactgcggtgtttaacaacagcggtgacttctaa

SEQ ID NO: 10164 - DNA, 636 bp, Escherichia coli
gtggtggcgggcagcaccgtgctcgggctggccgtggcgatgtttttcaaccgcgagttccgcctgcgcaaaaccgcgcgttcgctggtgatcctttcctacgtaacgccgtctatttcgctggtgttcgcctggaaatacatgttcaacaacggttacggcattgtgaactacctcggcgtcgatcttctgcatctctatgagcaggcaccgctgtggttcgataacccgggcagtagttttgtgctggtggtgctgttcgctatctggcgctacttcccgtatgcctttatctcgtttctggcgattttgcagaccatcgacaaatcgctgtacgaagcggcagagatggatggcgcgaatgcctggcagcggtttcgcatcgtcacgctgcccgcgattatgccggtcctggcgacggtggtgaccctgcgcactatctggatgttctacatgttcgcggatgtttatctgctgacgaccaaggtcgatattctcggtgtctatctctacaaaaccgcctttgcctttaatgacttagggaaagcggcggcgatctcggtggtgcttttcatcattattttcgctgtcattctgctgaccaggaaacgggtgaacctcaatggcaacaaataa

SEQ ID NO: 10165 - DNA, 1971 bp, Escherichia coli; identical to SEQ ID NO: 9266

SEQ ID NO: 10166 - DNA, 1680 bp, Escherichia coli
atgaaacagaaaattacggattacctggacgaaatctacggtggaacatttaccgcgactcatttacagaaacttgtaacgcgtcttgagagtgcgaaacgattaattacacagcgacgtaaaaaacactgggatgaaagtgatgtcgtgttaattacctatgccgatcaatttcacagtaatgatttaaagccactacccacatttaatcagttttaccctcaatggctgcaaagaattttttcacatgttcatttattacctttttatccatggtcatctgatgatggattttcggtaattgattatcatcaggtcgccagtgaagcgggggagtggcaggatattcagcaactcggtgaatgcagccatttaatgtttgattttgtctgcaaccatatgtcggcaaaaagtgaatggtttaaaaactatttacaacagcagccaggttttgaagatttttttattgccgttgatccgaaaaccgatctcagcgccgtcactcgcccgcgtgcgttaccgttattaacgccattccagatgcgcgatcattcaatgcgccatttatggaccacctttagcgacgatcaaattgacctcaattaccgtagccctgaagtgttgctggcgatggtggatgtattgctgtgctacctggaaaagggcgcagagtatgtccgtctggatgccgttggctttatgtggaaagagccgggaacaaactgcatccatctggaaaaaacacatctgattatcaaactgttacggtcgattattgataacgtcgcgccaggcacagtgatcattaccgagaccaatgttccgcataaagacaacattgcttactttggcgaaggcgatgacgaagcgcatatggtgtaccagttctcgctgccgccgctggtgctgcatgcggtgcaaaaacagaacgttgaggcactttgtgcgtgggcgcaaaacctgacactaccttccagcaacaccacctggtttaacttccttgcctctcacgatggcatcgggcttaacccactgcgggggttgttgcccgaaaacgaaatattagcgctggtcgaggtgttacagcaggaaggagcattagtaaactggaaaaataatcccgacggtacgcgtagcccctatgaaatgaatgtcacctatatggatgcgttgagccgccgtgagtgtagcgacgaagaacggtgtgccaggtttattctcgcccatgcgattttgttaagtttccccggtgtgccagcgatatatattcaaagcattctggggtcgcgtaatgattacgcaggtgtcgaaaaacttggatataatcgtgcgattaaccgtaaaaaatactctagtaaagagataacgacagaactgaacaataaagcgacattaagttattcggtatattataagttgtcgcatttaattacacttcgtcgcagtcataaagagtttcatccggataataatttcaccattgatgcgattaattcatttgtaatgcgaattcaaagaagcaatgcggatggcgattgcctgacgggattgtttaatgtcagtgaaaatattcagcatataaatattactgacctgcacggtcgggatctgattagtgaagttgatatattgggtaatgaaataacactgcatccctggcaggttatgtggattaaataa

SEQ ID NO: 10167 - DNA, 180 bp, Escherichia coli
atgaaagaacttgctgacaagaaatttattgctgagaccatgatacagaactattattttattaatccagactatatgtttaatggtgatcgtttaactttcatgaaaacttattacttgaaggacaaaaaaactaaaactaaagagaacaaaattaattgccaaggcaaaacacagtag

SEQ ID NO: 10168 - DNA, 732 bp, Escherichia coli
atggtgtatcatcaggctcgggacgatgaaataaaactgaaggtaggaaagatggattctatagataaaaggtttcttgattttattcgatctaagaaaaataatatagtattggacgatatgaaggatgatttcaaaaaagacgatggctctagttcgaaaatggcagattatttgttatttaataacgatgttattttagagcaaaaattactcacaaatgacagaactgatttaataaatgaaaaaattaatgagctagctaagactgatgaatggcttaaaagaagttggttcggtagggttcatattgaggaattgattcaaaaacaccccgactcagatgctttcagaaaaaagataatggattatgcttatagaaatataaaagatcttgtagcaacctccaatagacagattagagcaacaaaggaatctttaaatattcctagagcagtcggtggacttgttattcttaatgaatcgataatgccttatgaatctgaatatgtaatggcagaacttaattttcttgttgaaaatccacattatgaacatgttgattttgttctctatatatcagaactacgtagatcaacacataatataattgatatgtcagcaatgataaaaagcagctctccaagatatgagtttgtaaactggtatataaaaaacgttttctcattcgatttcgcttcattttttaatcaccctatacaatttttatag

SEQ ID NO: 10169 - DNA, 582 bp, Escherichia coli; identical to SEQ ID NO: 9095

SEQ ID NO: 10170 - DNA, 744 bp, Escherichia coli; identical to SEQ ID NO: 9276

SEQ ID NO: 10171 - DNA, 699 bp, Escherichia coli
atgcaggatattcacgaagaaagtctgaacgagtcggttaaatcagagcagtcaccgcgggtggtactctgggaaatcgacctgacggtacagggcggtgagcggtattttttctgtaatgagctgaatgaaaaaggggagccggtcacctggcaggggcgtaagtatgaggcatacccgattgacggcagcggttttgagatgaacggccggggcagcagtgccagaccgtcgctgacggtgtccaatctgttcggtctggtcaccgggatggcggaagacttgcagagtctggtgggggccacggtggtccgccgccgggtgtatgcccgttttctggatgcggtgaatttcgttgcgggcaatccggaggcggacccggagcaggagctgagtgaccgctgggtggtggagcagatgtcgcagctgacagccatgacggcctcgtttgtgctggctacaccgaccgagacggacggggcgctgtttcccggtcgcatcatgctggcgaacacctgtatgtgggattaccggggagatgaatgcgggtataacggtcctgcggtggcggatgagttcgacaaccccaccacggatatccgtaaggacagatgcagcaagtgcatgcgcgggtgtgagatgcgcggcatggtggctaattttggcggtttcctttccattaacaaactttcgcagtaa

SEQ ID NO: 10172 - DNA, 564 bp, Escherichia coli
gtgctgacaacgcaaaaacgaaaatttgcgctggcgctcatgtccgggaaaaacaaaacagcgtcagccattgccgccggttattcggcgaagaccgccagggttaaaggctcgcagctggcaaaagatccggaggtgcttgcgtttatagcccgtaaacaatgcgagacggtggaggtggatgaggttcctgtttaccggcagaaaaaatcagagcaggaggataaaccccgtcgccgtgaggcggctgcaatacctcagccggacgaaaataatccggagatgccaccatccgcggtgatgtctcctggtattgaatatatggaggatggtcttcccgatccggtgaaagccatggggcggatcctggtggaaaacctctgcattgatccgaaactggcactggatgcggcctggcgtctggcgcagttcacgcaccataaaaaaggggataccgggaaaaaatcggcaaaaggtgatgccgcgaaaaaagcggctaaccgttttgcggtgccaccgccaccccgactggtggtgaataacgataatgagggcaacggatga

SEQ ID NO: 10173 - DNA, 351 bp, Escherichia coli; identical to SEQ ID NO: 9336

SEQ ID NO: 10174 - DNA, 279 bp, Escherichia coli; identical to SEQ ID NO: 4909

SEQ ID NO: 10175 - DNA, 495 bp, Escherichia coli
ttgacggacttcgggggaaaaagtgtttttttagtcatcctgtttacctctttctcagggaatttagtctccaggattcccggggcggttcaatccggccaagcattaaccggcaaggatgatatcctaacgccattaatcaaacagttaacagaaaccgctctggccgctgaactcgactcccatctggctcaggatgttgaagtcaatcgtaaaaatggttccggaaaaaagaccattaaagccccgactggcagctttgagctggcaactccacgtgatcgtaatggttattttgaaccccaactggtgaagaagcaccagaccacgttgtctgatgagctcgagcgcaagatcattcgcctgttcgcgctggggatgagctaccaggatatcagccgggagatcgaagatttatatgccttcagtgtttccacggctaccatcagtgcggttaccgataaagtcattcctgagttaaaacagtggcagtag

SEQ ID NO: 10176 - DNA, 513 bp, Escherichia coli; identical to SEQ ID NO: 9303

SEQ ID NO: 10177 - DNA, 807 bp, Escherichia coli; identical to SEQ ID NO: 9304

SEQ ID NO: 10178 - DNA, 624 bp, Escherichia coli
  misc_feature (565)..(574): n is a, c, g, or t
atgactaaaagtgaaacatttatgattcccaatcacaaggcagcaaagctaagtgaattggatatgatgattgttaactcagtaccgccaggtggcaactggaaaaatattcctttagatgtaccgtctaaaagaatagagcaaattagggatagttatgcacaaggaaaaggaagccgttcaacatactacggtagattacttccagatatgcctgcatatactatcaatacatattttaaccgacctgggaatggttgccatattcactatgagcaagatcgtgttctatcccagagagaagctgcaagactacaatcgttcccggatgattttattttcttcggaggtcaaacagcaattaatacccaaatcggtaatgcagtgcccccatttttagcttttctgattgcgaaagaaatagagaaggcgataggtaatactggttattatatcgatttattttccggagctggagggctgggactaggattcaaatgggctggatggactccattattggcgaatgatattgaagaaaaatatctacaaacatattcaaacnnnnnnnnnngaccttacctttttccatattcaacaaaccagcaacattttcaaaaatag

SEQ ID NO: 10179 - DNA, 237 bp, Escherichia coli
atgcttaacccacccgatggcatgcagcttaagctccggatacatggcgttaacttctggcattttcatcaacgcttcaacgatatgtccgtcgaatgttgccatgtcttcctgcaacaattcctgtgcgctaataaccatatcaacggtgatgttttcacatgtgtcgaacttaaccatgacagcgttctgtacttcaggggccaacttgtcaaaagtgacgttcatcggatctga

SEQ ID NO: 10180 - DNA, 321 bp, Escherichia coli; identical to SEQ ID NO: 9234

SEQ ID NO: 10181 - DNA, 312 bp, Escherichia coli
atgggagttgagcagaatgatttcagggacatgttctccgtttatctctccggcccgccgcagacgcagcatgtgttttgtgtatccccggcggcccgggtcgcgcacacgggtctggcaggcgaagaatggctgaaagccttcccgctgcaggctttccagtacggtgatggtgggaatgtacgcatatcgtttactgcgggaagtatgccggtcttcaccgaaaatactgggaacatagtgcatcagttcttcgtgtgtcagcggacggtcacggcgtatctggttcgtataaccaaaacgactggctag

SEQ ID NO: 10182 - DNA, 159 bp, Escherichia coli; identical to SEQ ID NO: 6188

SEQ ID NO: 10183 - DNA, 2847 bp, Escherichia coli
atgaaacgacatctgaacaccagctacaggctggtatggaatcacattacgggcaccctggtggtggcttccgaactggcgcgctcacggggaaaacgcaccggtgtggcagttgctctgtctcttgctgctgtcacgtcactcccggcactggctgctgacacggttgtccaggcgggagaaaccgtgaacggtggaacactggaaaatcatgacaaccagattgtcttcggtacggccaacggaatgaccatcagtaccggtctggagtatgggccggataacgaggccaataccggcggacaatggatacaaaatggcggtatcgccaacaacactactgtcaccggtggtggtcttcagagagtgaatgccggaggaagcgtttcagacacggttatcagtgccggaggcggacagagccttcaggggcaggcagtgaataccactctgaacggcggtgagcagtgggtacatgaaggcgggattgcaacgggtaccgtcattaatgagaagggctggcaggccgtcaaatccggcgcagtggcaaccgacacggttgtgaataccggcgcggaaggggggccggatgcagaaaatggtgataccgggcagtttgttcgcggaaatgccgcacgtaccaccatcaataaaaatggtcgtcagattgtggctgttgaaggaacagcaaataccactgtggtttatgccggcggcgaccagacggtacacgggcatgcgctggataccacactgaatggcggttaccagtatgtgcacaacggaggcacagcctctgacacggttgtaaacagtgacggctggcagattgtcaaggaaggtggtctggcggatttcaccaccgttaaccagaaaggcaaactgcaggtgaacgccggtggtacagccacgaatgtcaccctgaaacagggtggagcactggtcaccagtactgcggcaacggttcttggcagcaaccgtctgggcaatttcacggtggaaaacggtaaggctgacggcgttgttctggagtccggcggtcgcctggatgtactggaaggccattcagcgcagaaaacacgggtggatgacggcggaaccctggcagtgtctgccggtggtaaggcaacaggtgtcaccatgacatccggtggtgccctgattgcagacagtggtgccactgttgaggggaccaatgccagcggtaagttcagtattgatggcatatccggtcaggccagcggcctgctgctggaaaatggcggcagctttacggttaatgccgggggacaggccagcaacaccactgtcggacatcgtggaacactgatgctggctgccgggggaagtctgagtggcagaacacagctcagtaaaggcgccagcatggtactgaatggtgatgtggtcagtaccggcgatattgttaacgcaggggagatttactttgacaatcagacaacaccggatgccgtactgagccgtgctgttgcaaaaggcaacgccccggtaacgttccataaactgacaaccagtaacctcaccggtcagggtggcactatcaatatgcgtgttcgccttgatggcagcaatgcctctgaccagctggtgattaatggtggtcaggcaaccggcaaaacctggcttgcgtttacaaatgtcggaaacagtaacctcggggtggcaaccaccggacagggtatccgggttgtggatgcacagaatggcgctaccacagaagaaggtgcgtttgccctgagtcgcccgcttcaggccggcgcctttaactacaccctgaaccgtgacagcgatgaagactggtacctgcgcagtgaaaatgcttatcgtgctgaagtccccctgtatacatccatgctgacacaggcaatggactatgaccggattctggcaggctcccgcagccatcagaccggtgtaaacggtgaaaataacagcgtccgtctcagcattcagggcggtcatctcggtcacgataacaacggcggtattgcccgtggagccacgccggaaagcagcggcagctatggcttcgtccgtctggagggtgacctgctcagaacagaggttgccggtatgtctctgacgacaggggtgtatggtgccgcaggccattcttccgttgatgttaaggatgatgacggttcccgcgccggcacggtccgggatgatgccggcagcctgggcggatacctgaatctgacacacacgtcctccggcctgtgggctgacattgtggcacagggaacccgccacagcatgaaagcgtcatcggacaataacgacttccgcgcccggggctggggctggctgggctcactggaaaccggtctgcccttcagtatcactgacaacctgatgctggagccacaactgcagtatacctggcagggactttccctggatgacggccaggataacgccggttatgtgaagtttgggcatggcagtgcacaacatgtgcgtgccggtttccgtctgggcagccacaacgatatgagctttggtgaaggcacctcatcccgtgacaccctgcgcgacagtgcaaaacaccgtgtgcgtgaactgccggtgaactggtgggtacagccttctgttatccgcaccttcagctcccggggtgacatgagcatgggtacagccgccgccggcagtaacatgacgttctcaccgtcccggaatggcacgtcactggacctgcaggccggactggaagcccgtgtccgggaaaatatcaccctgggcgttcagggcggttatgcccacagcgtcagcggcagcagcgctgaaggttataacggtcaggccacgctgaatgtgactttctga

SEQ ID NO: 10184 - DNA, 510 bp, Escherichia coli
gtgtgtcatccgaatatctactacttccataatctgacgcccgggtgggtgtcattcaatggtgaaaaaccggagattgccatcgtaccccagagcctgcaccggctgatttatggccctgacaaacgggccacgccgcccctggatgatgatctgatagtgaatttatgcaccagtgaacatctgctggttcatcatccgatgctggaaggcattctcctgtctgaatgtgaacgtctgaggcagcgttctctggcaaataaactgattagcctcttccgtcagtttggtggcacggagttgcgcctcaaactggtctggctttgctggcttgatttaatgaccggaaacagccttgaagactggaaagagaacctgaaacggaaatcagaaaaagagctggaggaatggatcatcaaccgtcagaggcagagcgcagcactgacggatctgatggatcagtacgtgctcctggcataccgcacaacggttgacgataaccgcaactga

SEQ ID NO: 10185 - DNA, 645 bp, Escherichia coli
atgcaggcggtaaatgctgtgttgtatggcaaatacaccatggaaggagaccagttcgagaaaattgaggtcgattttggcaggtcgacgaagaataacatcactcagggtagtggtaaggagtggtcaaaacaggatcgtgacacgttcgatcctacacatgatattgacctctactgcgacctggccagcggtcttgtgaatattgccattatggacggtacggtctggcgtcttctgaatggttttaagctgttccgcgaaaaactggatacccgtcgcggttcaaattctcaactcgaaacggcagtgaaagatctgggcgcagtggtgtccttcaaggggtattacggcgatctggccattgtggtggcgaaaacgtcttatatagcagaagacggtatcgaaaaacgttatcttccagatggcatgctggttctggggaatactgctgcagatgggatccgttgttacggtgccattcaggatgctcaggcgttgtccgaaggtgtggtggcctcttcccgttatccgaaacactggctgacggtaggggatcccgcccgtgaatttaccatgacgcagtccgcgccgctgatggtgttgccggacccggatgagtttgtggtggtacaggtgaaataa

SEQ ID NO: 10186 - DNA, 234 bp, Escherichia coli
atgagcgaatatttcagaatacttcaggggctgcctgacggctcctttacccgcgaacaggctgaagccgttgccgcacagtaccggaatgtctttatcgaggatgatcagggaacgcattttcgcctggttgtccgcaataacagtggcctggtctggcgcacctggaattttgaggacggtgccgggtactggatgaaccatgtcatccggaatttcggcattcttaagtaa

SEQ ID NO: 10187 - DNA, 975 bp, Escherichia coli; identical to SEQ ID NO: 9308

SEQ ID NO: 10188 - DNA, 732 bp, Escherichia coli
atgaatcaaccaatacacaatgcttactggttatcccgttttgaaagtattctcaacagtgccctggcgcaacaccgtgccgtctcgttaatccgggtggatttacgtttccctgagtatatgcctgccaccatcatggataccgatttagattcagcggtgatttctcgtttttttgcatccctgaaagcaaaaattcaggcttaccagcgacataaacgacgtgccaacaagcgtgtgcgtgcaaccactctgcgttatttctggtgtcgggagtttggcaaggaaaaaggcaggaaacattatcacgtgatattactgctcaacaaagatacctggtgctcgccaggggatttcaccgttccttcttcgctggcgacgctgatccaactggcatggtgcagtgctctgcatctcgagccctggcagggtaatggactggttcatttttccaggcggacgcctttccgtaaaccgacatcatctgatgctcgcccttcttccgatgatacgcctttgtcgggtggatgttctgaaaccaggaaggcttcagacaaaaagtctggtggatccgctgtgctctgggtcaagcgtggtgatgtggaagcgatgcagaaagcccggaacagagccagttatctcgtgaaatatgagacgaagcagcatgacggttccgggcaacgtaattatggttgcagtcgtggggtagggcgtctactggatggcaggtga

SEQ ID NO: 10189 - DNA, 1440 bp, Escherichia coli; identical to SEQ ID NO: 4161

SEQ ID NO: 10190 - DNA, 1173 bp, Escherichia coli
atgccacacaagaaagtagcattacagctcattgaagaaacacttaaagaactcgagtcaccaaaaggttctttgttatcggctatacaaaaactacagcggacttcggatatcatcaatgatgatgataaaaagatatggtgtgctattcaattaggtgatactaaatatacaaagccaataactgaattgcttaagtttgttattgaggctgaaaatacaaaaaataaatctttccaagaaaatttagacaaacgaatacaagaacttgccaaattaggagttaaggctaatatacattattcagatgaagaactcacattaaaaaatattgaaagtggtggtggatataataacattgggtttattgaagagaaatatgccgatcttgtaagaaaaaaacaaggcaatgacggaacgtattataagaatagtttaaatcaacatatcaattatgttagaaaaaaagcacatgaattagcatcgcaaatatataatcaactaaaattttcaggtactgtcagcaactgttttgatgtattgaaaaatgctgttgatgataaattattagatctaaatccagtgatcgcagaacaactaatgttggcatttaaagctatttcttcagataaagaagaagaatggtctcaagctttaactacatgtcgtaggcttctagaagggttggctgatgaactttatccggcatcgaaggaaaaatttaatggtcgggccgttgggcaaggtcaatacgtaaaccgcctttgggcatttatggatggggctattcagtctgatagtaataaagaccttgccaaagcacatatagattttctcggatcatggttagataaagttaataagttaacaaataaaggtgttcatgccgagttagatcggattgaagctgtaaagtcagtatttcacacgtatttagtagtggcggatttgcttgagtatatgtcaaataccaaaacctctgtatctaagcctgatatcaataaagctactttagatgaactggaagcattgttaaatataaatagaacaatcgctaaagaaattgttaaagcacgagttcgtgaaggcaagcttgatctggatattttaaaaaacataaaaggtataggtgctaagacgcttagtaatatacaagaagtgtttgttatgtaa

SEQ ID NO: 10191 - DNA, 186 bp, Escherichia coli; identical to SEQ ID NO: 9349

SEQ ID NO: 10192 - DNA, 207 bp, Escherichia coli; identical to SEQ ID NO: 5080

SEQ ID NO: 10193 - DNA, 1182 bp, Escherichia coli; identical to SEQ ID NO: 8788

SEQ ID NO: 10194 - DNA, 822 bp, Escherichia coli
atggtaatttcagcagcttttcaaacaagagcaaggacaattgatcatctagggcgtgagcaaatagctgattgtccaaccgcaatttccgagctttggaaaaatgcatatgatgcttatgctcgtaatgtttctctaaatatatttgacggcaatacacctgtggcaactttagttgatgatgggcatggcatgtcgttagatgacattatcaataagtggcttacagtaggaactgaatccaaggctacaaaaaaagatattccatatgaagatagaaacggaatagatcatattcgagcaaagcaaggtcagaaaggcatcggtcgtctttcttgtgcggccttgggctcattaatgcttttagtttccaaaaagaaagatagccctcttgtagcttgcctgctcgattggcgtatatttgaaaacccatatttgatgcttaatgatataaagatacccattatggaatgcagtgataacaatgaattaatcactgttataccggaaatgtttgatgctttgatgggaaatctatggggtgatggtgatgatatattacgagataaccgtattgaacaagcttgggaaaattattctgaattagaaagaaatgaaaataattatattacaaaagaagctatcgagaatactgtaattaatgctttttttgaggaaaggcattttcaatcttggcctgtgtggaataataaaaccactcacggcacagccatgtttatagctggaattcatgacgatttaatagctcagctatcaacagatgctggttcagaagctcaaggtgcagaattgtgtgcgtaa

SEQ ID NO: 10195 - DNA, 1197 bp, Escherichia coli
atgaaggcaattgacttatttgcgggggctggagggtttagtttatccgcccacaatacaggcgctatagatgttgttgctgctatagaattcgatagcgcggctgcaaacacctacagaaaaaatatgttagaaaggcttgagcataagaccgaacttttacaggaagatattttactcgtaggcccaaaaaagttaagaaaaaaaataaagctcaagaaaggcgagcttgatatgatacttggtggacctccgtgccaaggtttttccagtcatcgaattaatgatgctggtgttgatgatcctagaaataaattacttttaaggtatttcgattttgtttgtgaatttaaaccaaaagcttttttggtagaaaatgtctccggtttgttatggaagagacatgaagcccatttgaaacgctttaagtttttggcttccaaaaatggttatactttaattcattgtgatgtattaaatgctcgtgattatggtgttccgcaaaatcgcaaacgagttttcattgcaggtgtcagaaatgacattttaaaaaaaagaaataatattgagtttccacctcaagctactcatttcaaccctaattctaatgaagtaaaaaacaattcaaaaaatacgtggagaaccgcatcctctgtttttgagaagatgaatgataacttaattcaaagatatatatctgaatactttcttaaacatacttcttactcaattgatgaagcacaagagctacttgaaaacctagaatatcaagacgcacccataagcgaaaaagatccatgcaacatacatatgataccaactgagcgtatggaagagcgtttcagagccacaaaactcaatggcagtagaagcgatgcaggaaaagaatttgagctaaaatgtcattccaatggatacgcaggccataaagatgtttatggccgcataatgattcacctcccagccaatacaattacaactgggtgtaacaatccatctaagggaagattcattcatccatgggaaaatcacggcatcactttaaggcatgcggcaaggttgcaaacgttccctgatgactatattttttggggtaatgcgacagagcaagcaagacagattggtaatgcagttccccctatgttaggcacaatattaataaatgcattacttaacataattgcacccaatagataa

SEQ ID NO: 10196 - DNA, 531 bp, Escherichia coli
atgaagaagattttactcgttgctggcgcagctctggcactggcgggatgtggtgagaaaggtgattttgagaaggcgatcaatgccaagatagggcaggacaaatattgcttctcgctggataacaataacaccagcttccccatccgtcttgccaagccacgacttgattcgactggtacagggacgaattcagtgatcctcgatggatttgtagagcagggaatgatggtctttgagcagggctatgattcgaacgtattagggataacagaggaaggcaaaaaagccaaagtctggagcacaacagatggtgcctgtgttggtcgtcgtgctgttgacgggattaaggaatggactgagccgggaaacggtaatcagaaagtagttcgcgtgacttatacgtggaagctggttgacgttccgggctggattgacaaaaaagcattcgccagcgttaaaggaatgaatgaacctgctgatggtgccatgaatctctttaagaccagcaatggctggaaagccaattaa

SEQ ID NO: 10197 - DNA, 330 bp, Escherichia coli; identical to SEQ ID NO: 8750

SEQ ID NO: 10198 - DNA, 693 bp, Escherichia coli
atggacttattgccttttttactggacgcgaacctcagcgcgacaaacccacccgctattccgcactggtggaagtgtcaaccgcttattcccacccttctgtcacaggaactgaaaaactatctgaagcttaatgttaaagagaaaaatattcagattgcagaccaggtgattattgatgaaagtgccggtgaggttgttatcggcgcgaatacccgtatttgccacggtgccgttattcaggggccggtagtgattggcgcaaactgcctgataggtaattatgcgtttattcgtcctggcacaataatcagcaatggcgtaaaaattggttttgccaccgaaattaaaaatgcggttattgaagcggaagcaacgattggtccgcaatgctttattgccgactcggtagttgcaaaccaggcatatttgggcgcacaagtacgaaccagtaatcatcgtctggatgaacagcccgtgtctgttcgaactccagatggaattatcgctaccggatgcgataaattaggttgttatatcgggaagcgttcacgccttggtgtacaagttattattttgcctgggcgaattatttctccgaacacacaacttggcccgcgcgtgattgtagaacgtaatttacctaccggaacttattcactccgacaagaacttatccgtacaggagattaa

SEQ ID NO: 10199 - DNA, 261 bp, Escherichia coli
ttgctttcatggcagaaaggtacactggtcggcggtcatgacgataacgattcttcgcttgatatctcgtacatgagtaacggaaataatattgactatggcggcgataaggtgtttgcggggaattaccgtagcgattatttgtggtacgtaattctgggaggaacaaacagtcgcgcaaaagccgaattaaacggagcattctttaacataacccgcccccgcaatatcgcgtttaactatatcgtgagggcggcgtga

SEQ ID NO: 10200 - DNA, 804 bp, Escherichia coli
gtgcctgcggcttcactgacggcaaaaggcaccgtacaactgagcagtgccatcaacagcacgtctgaaatactggccgccacaccgaaagcggtcaaggctgcatacgacctggcaaacggaaaacaaccggcagatgccacgctcactgctctggcaggacttgccactgcagcagatcggttgccttattttaccggagcagaccgcgcagcgctggcaacccttacagctattggtcgcgctattatcgctaagggcagtataaaagatgtcctcaattaccttggtttgggggaaggctctgcattgcctgttggtgtaccggttccatggcccaccgccacaccgccagcaggctggttaaagtgcgacgggcgcgcctttacaaaagaacaatatcctgttctggccagagtctacccgaccctccgtcttcccgatttacgcggtgagtttatccgtggatgggacgacgggcgcaaagttgatacaggacgtaagttgctgtccgcacaaggggcaacgctgttaagaacagcaatgctggattattataaccaggacactacgggaacctcggggatagtcggcatgggattcaacaatgaagattccattacagaccttcgtgaggacagctttaaaatgccggacgggacaacattcagcgatcctgtcgtggcaatgtcagacaatggtatgcaggctactattctgacctctatcagaagcgggtatgcgaagggtatcactgtcagaccccgtagcattgcacttaattacattgtgagggcagtttaa

SEQ ID NO: 10201 - DNA, 207 bp, Escherichia coli; identical to SEQ ID NO: 8329

SEQ ID NO: 10202 - DNA, 462 bp, Escherichia coli
gtgtcattcaatggcgaaaaaccggagattgccatcgttccccagagtctgcaccggctgatttatggtccggacaaacggagctccccgtccctggatgatgatctggtggtgaatttatgcaccagcgaacacctgctgattcatcatccgatgctggaagggatcctgctgtctgaatgtgagcgcctgaagcaacattctctggcaaacaaactgatcagcctcttccgtcagtttggcggcacggagttacgtctcaaactggtctggctctgctggcttgacttaatgaccggaaacagccttgacgactggacgaaaaacctgaaacacaaatcagaaaaagatctggagcaatggatcattgcacgtcagggtcagagtgaaccactgacaaatctgatggatcagtacgtgcttatggcataccgtacatcggttgatgccgctcacagttga

SEQ ID NO: 10203 - DNA, 261 bp, Escherichia coli
atgctgatggcggggattcagttcaccgctggtgagcatgagttccagttgtttcatcagcagcggaaaggcctggtccaggtggtacgcatccgcatcgctgaaccggcctctgataccggcacggtcggcaaggtaatgcaaccggttaccctcctgcaccagacgtgccccgaaacagggcgtcacggtgcagggcagcccccaccaggggcggtcgtgattgtcgtcgggatgcgttgtcccgggcagtgtgtctga

SEQ ID NO: 10204 - DNA, 477 bp, Escherichia coli
atgcaacagatttcctttctgcccggagaaatgacgcccggtgagcgcagcctcattcaacgggccctgaaaaccctggaccgccatcttcatgaacccggcgtggccttcacctccacccgtgcggcacgggaatggctgattctgaacatggcgggactggagcgtgaagaattccgggtgctgtatctgaacaaccagaatcagctgattgccggtgaaaccctcttcaccggcaccatcaaccgcacggaagtccatccccgggaagtgattaaacgcgccctgtatcacaatgccgctgccgtggtgctggcacacaatcacccgtccggtgaagtcacacccagcaaggcagaccgccttatcacggaacgtctggtacaggcactgggcctggtggatatccgggtgccggaccatctgatagtcggtggcagccaggttttctcctttgcggaacacggtctgctttaa

SEQ ID NO: 10205 - DNA, 234 bp, Escherichia coli; identical to SEQ ID NO: 8808

SEQ ID NO: 10206 - DNA, 759 bp, Escherichia coli; identical to SEQ ID NO: 6176

SEQ ID NO: 10207 - DNA, 477 bp, Escherichia coli
atgcaacagatttcctttctgcccggagagatgacgcccggcgagcgcagtctcattctgcgggccctgaaaaccctggaccgtcatcttcatgaacccggtgtggccttcacctccacccgtgcggcacgggaatggctgattctgaacatggcgggactggagcgtgaagaattccgggtgctgtatctgaacaaccagaatcagctgattgccggtgaaaccctcttcaccggcaccatcaaccgcacggaagtccatccccgggaagtgattaaacgcgccctgtatcacaatgccgctgccgtggtgctggcacacaatcacccgtccggtgaagtcacacccagcaaggcagaccgccttatcacggaacgtctggtacaggcactgggcctggtggatatccgggtgccggaccatctgatagtcggtggcagccaggttttctcctttgcggaacacggtctgctttaa

SEQ ID NO: 10208 - DNA, 759 bp, Escherichia coli; identical to SEQ ID NO: 6176

SEQ ID NO: 10209 - DNA, 261 bp, Escherichia coli
atgctgatggcggggattcagttcaccgctggtgagcatgagttccagttgtttcatcagcagcggaaaggcctggtccaggtggtatgcatccgcatcgctgaaccggcctctgataccggcacggtcggcaaggtaatgcaaccggttaccctcctgcaccagacgtgccccgaaacagggcgtcacggtgcagggcagcccccaccaggggcggtcgtgattgtcgtcgggatgcgttgtcccgggcagtgtgtctga

SEQ ID NO: 10210 - DNA, 222 bp, Escherichia coli; identical to SEQ ID NO: 9129

SEQ ID NO: 10211 - DNA, 222 bp, Escherichia coli; identical to SEQ ID NO: 9129

SEQ ID NO: 10212 - DNA, 141 bp, Escherichia coli; identical to SEQ ID NO: 5362

SEQ ID NO: 10213 - DNA, 222 bp, Escherichia coli; identical to SEQ ID NO: 9129

SEQ ID NO: 10214 - DNA, 405 bp, Escherichia coli
atgaccaccttcctttttgctccccacattcaccgtctggcccaaccccaccgttatcttctggtcgttaccaatggtttccgtgtggtcagccttcacatccgtcgtccgattattcagcacctccgtatccatgttcttctgcgcgtggatatagacctgttcaccgcccgtggcgtcttcaaaccgcagttcattaaagccgcttcctttataggtcttcgaccgtatcgtcatctgcgtcttcgtccccggcaggctccccggcgaacggttgtcctcatggtacgtccgccccatgattatcggctggtccgggtccccgttcaggaagtcaacaatcacctcctggcccacgcgcggtatcgccaggttaccaaaccccggccccgcccacgcctgtga

SEQ ID NO: 10215 - DNA, 234 bp, Escherichia coli
atggcacccgaaccggatgacgatgatgacgaaacatgggtactgttcaatgccatgaacggtaaccgtgctgaaatgagcccggaagccgccggcattgctgcctgtctgatgacgtacagtcatcatgcctgtcgcacggagtgttatgccatgacggttcattattaccgtctgcgggactacgccctgcagcatccggaatgcagcgccattatgcgcatcattgactga

SEQ ID NO: 10216 - DNA, 192 bp, Escherichia coli
atgagcctggcgggtgcagccgttcaggggatgcgtggcgcagatacgggactgaaaaatggcattacacaggctgcttttgccggtgccggatttacccataatgccaatcacgggctcgtaatgaataacactgtggagatgttcaaggattttctggcgaatttcttcaggaagaaacgtcagatatga

SEQ ID NO: 10217 - DNA, 177 bp, Escherichia coli; identical to SEQ ID NO: 4925

SEQ ID NO: 10218 - DNA, 279 bp, Escherichia coli; identical to SEQ ID NO: 8945

SEQ ID NO: 10219 - DNA, 1755 bp, Escherichia coli
atgaaactggcaccgaacgtaaaacagcagtcacgcggcataaaacacaaagaaacagaagtcattatttttgcgggtagtgatgcctggtcacacgcaaaacaatggcaggaacatgacgcgcgtatggccggagataatgagcctcctgtgtggcttggggagcagcagttatccgaactggataagctgcaaattgtgccggaaggcagaaaatccgtgcgcatattcagggccggatatcttgcgccagtaatgataaaggcgattggtcagaagctggcggcagcaggcgtacaggatgcaaatttttaccctgatggtatgcacggtcagaaggtggagaactggcgcgaatatctggcccgtgagcgccagaatctttctgatggtctggtcattgagcttccggtaaagcaaaaggcgcaactttcgcagatggcggacagtgagcgcgcgcagctgcttgccgatcgctttgatggcgtttgcgtacatcctgaaagtgaaatcgttcacgtatggcgcggcggggtatggtgtccggtcagcacaatggaacttagccgcgaaatggtggcgatctattcagagcacagggccactttcagcaagcgcgtaatcaataacgccgtggaagcgttaaaagttattgccgaaccaatgggcgagccgtccggcgatttgttgccgttcgccaatggtgcgcttgacctgaaaacgggggaattttccccgcacacgccggagaactggatcaccacgcacaacggcattgagtacacgccaccagcaccaggggagaacatccgcgataacgcgccaaactttcataaatggcttgagcacgcagccggaaaagacccgcgcaagatgatgcgtatatgtgccgcgctgtacatgattatggcgaaccggtacgactggcagatgtttattgaggccaccggagacggcgggagcggtaaaagtacattcacacacatagccagccttctggcagggaaacagaacacggtaagcgctgaaatgacatcgcttgatgatgctggtggacgtgcgcaggttgtcgggagtcgtcttatcgtcctggctgaccagccgaaatatacaggcgaaggaacgggcatcaagaaaatcacgggcggtgaccccgtggaaattaacccgaaatacgaaaagcgtttcacggcggtaatcagggcggtggtgctggcgaccaacaataacccgatgatattcaccgaacgggccggaggtgtggcacgtcgtcgcgtgattttccgtttcgacaatatcgtcagtgaggccgaaaaagacagggagctaccggaaaagatcgcggctgaaatccctgtcattatccgccgattgctggcgaactttaccgaccctgagaaggcacgggctttactactggaacagcgtgacggtgatgaagctctggcaataaagcaacagacggatccggttattgagttttgccagttcctgaattttctggaggaagcacgcggcctgatgatgggcggcggtggcgattcagtgaagtacacgaccagaaacagcctttaccgcgtctatctggcgtttatggcgtacgcaggcaggagcaaaccgctaaacgtaaatgactttggcaaggctatgaagccagccgcgaaagtttacggacatgaatatattacgcggaaagttaagggagtaacgcagactaacgcaataacaacagacgagtgcgacgcgtttttataa

SEQ ID NO: 10220 - DNA, 300 bp, Escherichia coli
atgaaacttaaatattctggcttaactgccagtggcaacactcaccctaaatttacgcgcggcgatatttaccgcgaccagtacggcggcacggtaatgattaagggcgtggaagaacggcgcgtaacctaccgccgtgaaggttacgaatatgattgcgtgatgcctgtttatcagttccggcgtgatttttctctggtacagaccgcgccgcataacgtgtccaccagcaacgccagggcacgggcaaacatccagaagctgaaaaccatgattaacggattcaggggtaaaaaatga

SEQ ID NO: 10221 - DNA, 234 bp, Escherichia coli
atgcgtgatgatcgttttaattccctgaaacaggaattttccggcgttcctgatgatgcggctgatgcgctttcgtcaatgccagaacttattagagcggcttttttcttactttccacgagagaatataaatcaacggggcttgatgtactgaatatcgccgccgattatgcggaatatgtggcagaggcgcgttatagaagaaaatttcctgaggatgtaagccatgcgtga

SEQ ID NO: 10222 - DNA, 366 bp, Escherichia coli
atgcataatctgtcaatttctgaccttaacagcattcagtttgatgagaaatttaccgggcagttgctggtcaatgtggagaacgggcgcatagtgcgtaattatcacctgccggatggtgcaattgccggaagcgttgaagcattgctggaactggcggaacgtgcgcgactgattaagccgtcaacgagccatcacgatgatgatctgcattttaccggatgtatggtgagtcactacgaaaacggcgtcgaggtatcctgtgaacggctgcgtgatgattgctgtttcggcacactgccggaatttatcgagttgctgaccagttgcggttatcaggtcattcaggggggtaaacatgcgtga

SEQ ID NO: 10223 - DNA, 222 bp, Escherichia coli
atgtgcaataaaaccacaccggacgcagccgccgccgcgctcactacgctgatgcacgcgcttattgatatttctgttattgctgacagggcgcataaacacgcagccagagaatcagaatgcatcttccatttagcatttgtgcagctaaaagccgatcaggcactggataaggccggaaaaattatcatggctgatgtgcaggaggtgcaccatgcataa

SEQ ID NO: 10224 - DNA, 201 bp, Escherichia coli
atgagaaatcataccacacacccgcaagggcgggactcgcacaacctgaataaatacatctggcgttttatcgccctgagcacggcacaaccgcgcgtgattaccattgaggccaccagcgaacaggaagcacgccagcaatctccggctggctgcgtgatggtatttgctgcccgtattcgtcagggggtaggcttatga

SEQ ID NO: 10225 - DNA, 501 bp, Escherichia coli
atgggcaaaaccgaccgcagcgccaacccttcgcggggcaacaaaaagggcggcctcgccaacgtggtaaagaaggcactcggctccattgctaaatcgggtaaaaccgcaattgctgaagtgctgtcgcccggtcaacacccgactaaacgcggattaatttacgccgcgacgccagccagcgattttatctgtggcacgcaacaggtggcttcgggtatcaccgtgcaagtgtttacgaccggccgtggtacgccgtacggcctgatggcggtacccgtcattaaaatggcgacccgcaccgggcaggcgaaccgctggtttgatttaatggatattaacgcgggcactatcgctaccggcgaagagaccattgaagaggtgggctggaagttgttccactttattctcgacgtcgccagcgggaagaagaaaaccttctcggatcaatggggattgcataaccagctggcagtgtttaacccggcaccggtggtctga

SEQ ID NO: 10226 - DNA, 342 bp, Escherichia coli; identical to SEQ ID NO: 982

SEQ ID NO: 10227 - DNA, 1362 bp, Escherichia coli
atgaaactaaagaccacattgttcggcaatgtatatcagtttaaggatgtaaaagaggtgctggctaaagccaacgaactgcgttcgggggatgtgctggcgggcgttgctgcggcaagttcacaggagcgcgtggcggcaaagcaggtgttgtcggaaatgaccgtagcggacatccgcaataatccggtgattgcctatgaagatgactgcgtgacgcggctgattcaggacgacgttaacgaaacggcctataaccagattaaaaactggagcatcagcgaactgcgtgagtatgtgctgagcgatgaaatcagcgtggacgacattgcctttacccgcaaagggctgacctcggaagtggtggcggcggtagcgaagatttgctccaacgcggacctgatctacggcgcgaagaaaatgccggtgatcaaaaaggccaataccaccatcggtattccgggcacctttagcgcccgtttgcagccgaacgatacccgtgacgacgtgcaaagtatcgccgcgcaaatctacgaagggctttcctttggggtgggcgatgcggtgattggcgttaacccggtgactgacgacgtggaaaacttaagccgcgtgttggataccatctatggcgtgatcgacaaattcaacatcccaactcagggctgcgtactggcgcacgtcaccacccagatcgaagcgatccgtcgtggcgcaccaggcgggctgattttccagagtatctgcggcagcgaaaaagggctgaaagagtttggcgtagagctggcgatgctcgatgaagcacgcgcagtgggcgcggagttcaaccgtatcgccggggaaaactgtctctacttcgaaaccggacaaggctcggcgctatccgctggcgctaacttcggcgcagaccaggtgacgatggaagcgcgtaactatgggctggcgcgtcattacgatccgtttatcgtcaacaccgtggtcggttttattgggccggagtatctctacaacgaccgccagattatccgtgcgggcttagaagatcactttatgggcaagctgagcggcatctctatgggctgtgactgctgctacaccaaccacgctgacgctgaccagaacctcaacgaaaacctgatgatcctgctcgccaccgcaggctgcaactacatcatggggatgccgctgggtgatgacatcatgctcaactatcagaccaccgcattccacgacactgccactgtgcgtcagttactgaatctgcgtccgtcaccggagtttgaacgctggctggaaagcatgggcattatggcaaacggtcgcctgaccaaacgggcgggcgatccgtcactgttcttctga

SEQ ID NO: 10228 - DNA, 471 bp, Escherichia coli
atgattggcaaatcactgccgaaagcggtgggctacggccatgaccttgccgcgcgcgagagcatgttgctggcttcatgtatggcgggaatggcgttttccagcgccgggcttgggttatgccacgcgatggcgcatcagccaggggcggcgctgcatattccgcacggtctggcgaacgccatgttgttgccaacggtgatggaatttaaccggatggtttgtcgtgatcggtttagtcagattggtcgggcgctgcgaactaaaaaatccgacgatcgtgacgctattaacgcggtaagtgagctgattgctgaagttgggattggtaaacgactgggcgatgttggtgcgacatctgcgcattacggcgcatgggcgcaggccgcgctggaagatatttgtctgcgcagtaacccgcgtaccgccagcctggagcagattgtcggcctgtacgcagcggcgcaataa

SEQ ID NO: 10229 - DNA, 789 bp, Escherichia coli
atgcgaaattttatcttccttatagctttcttctgttcatctgtgtttgctacacaaattccagtacctgaatcacccaggtatgtgaatgacttaaccggcacattaacaaacagcgaagtaaacaccctgaccaaccagattaaagccctgacgcaaaaaaaccacgcacagttggtcgtgttagtggttgatacaacaggcgatgaaaccatcgagcagtacgcaacgcgggtattcgatagctggaaaccgggtgataaagaccgtgatgatggcgttctactgttagtcgcctggcaggatcataccgtgcgtattgaaatcggttacgggctggaaggtattattacggatgcacagtccgggaaaattattcgcaacagtattattccggcatttaaaaaaggcgacctggctggtggtttacaaaaggggatcaacgatattgaaagtcgcctgacggggaataattcagcaacgataacaccgaccgatcaccctttgccctttagcggttggtgggctttattagtctgggcgataatactgacgtttatttctgccagaggatatatcaaaacgttgggagtaatttgcttcgcagccattgtactggcctttgttttacctatagcaggtttcagcggaagctggggagtactcacaacattactctgcttcgccacaccgtttctggcagttgccatcgcttttacccccttcggcaaaaaggttcgggattcgatgcgtgatgccaaccagccatcacgccatacaagaagatga

SEQ ID NO: 10230 - DNA, 1251 bp, Escherichia coli
atggctctcaccgatatcaaagttaggactaccaagccctccgacaaacctttcaaactcacagatgggcagggtatgcacctgctgatcaaccccaatggttcaaaatactggcgactccaataccgtttcgatggcaaacagaaagttttagcattgggtgtttatccaatggtctctcttggtgaagctcgcaggaaacgagatgaggctaaaaagttggtatctgatggtatcgacccttccgagaagaaaaaggcagacaagatcgagcagagcgaagctcttacttttgaatctgttgccagggactggcataaggcttgtaaaaggaaatggtcagattcccatagcgagagagttctaaaaagcatggaagatggtctctttactgctattggtaaaagaaaaatatccgagcttaataccagagatcttcttgcccctatcaaggctgttgaagcttctgggcgactggaagttgcttcccgcctacagcaaagaacaacggcagtgatgcgatatgctgtccagaacgggctgatagattacaaccctgctcaagagatggcaggagctattgcggtagctaaaagagtccacaggccagctttgccattcgaacgattctcagaacttttagaacgaatagatagcttcaagggtagaaaactcactaagttagccgtaaagcttacattgctcattttcattcgttccagtgaactcagattcgcaagatggtcggagatcgactttgaaaatgcgatgtggactatccccggagaacgcgaaccattgccaggggtcaaacattcgcaccgtggttcgaaaatgcgaactccacatcttgttcctttgagttgtcaggcattggctgtgctgacgaaaatcaaagagatcagtggtgaccatgaactcgtatttattggcgatcataatttccgcaaacctatgagcgagaacacagttaataaagctttgcgagctatgggctatgacacaaccgtggaggtctgtggacatggattcagggctatggcttgtagtgccttgattgaatccggcttgtggtcgaaagatgctgttgaacggcaaatgagccatcaggagcggaactcagttcgtgctgcctacatacataaagcagagcaccttgatgagagaaagcttatgttgcagtggtgggccgattaccttgacctccttagaatacgacaagtttcaccatttgattttaaaaagacttaa

SEQ ID NO: 10231 - DNA, 810 bp, Escherichia coli
atgaaagtagtaagcccttatgaagaattaaaaagctggtttagtctcgaaaactatgagcagttaaaatcacttacaatcaaagaactgcatactgagcttgcctttagagaagcgattttcgacagtgtaaattttggatgggaggatgataatcaaaatttaaggtctatccttgaaggtaatcctattttaagcagacaagataataatcacggtcattttggtaagggccaaagacatgttgcgcaggttagctttggtgatataaaaaaattagagaacaagttaataatgtttagcatggatttttttgaagaaaatggcgatttcaaaaaagagttgaaaaagaaaccaataacaaaaactatgagagacttttttctaaaccaaaatagcagcaagatgtatgtttcatttgatttaggaatgtccagcgatgaagaaattataacaaccttacaaacgatgctacccgttctcaggaaagaatatgaaattgagccggtaaaaacagaaaaaattggactggcaaaaataagaaaacttgtcgattacaatattatcccaatgatggatctattgatttgggcaaaatttaaaaaagtaaaaatctcaaatatggtgttgtctcgtgtcttgtatcccgactttacaaatgagatcagaggagaagatcacattaaagatacagacaggcctgttgcagagaagtcattgaatggagaaacaacccgtagtctggaatactttattagcaaaaacagccatctcctcaacataccgatttctgaactcggctctttctag

SEQ ID NO: 10232 - DNA, 207 bp, Escherichia coli
atgactacaactaatcaaagcttaattcgtttaccagaagtcttgaaacgaactggtttcggcaaggcatggatctatcgtttgatcagtgaaggtcggtttccggcaccagtgaagatcggagttcgtgccgtagcttttgtcgagagtgaagttgacgagtggattcaatcagttatcgaaacaagccgaagtaatgttgcttaa

SEQ ID NO: 10233 - DNA, 315 bp, Escherichia coli
atgaatatcgaagaatttgtgagtgaagaaaaccatatgtgcaatttgggcgatgatcttttttacaagatcttcgaacccggagcgatttatgatttacctgataatgaatttaacagaaagattgtttactggttaagccagtatttagtagggaatctaagagaaccgttagatgcgatctctaagcttgatatcttcgatcagttttatgtttatgagacatggttctcgctaattaaatgtcctattgagatgaaaagtctttcaaagcgaataatccaataccacattggactgagaactcttttgtaa

SEQ ID NO: 10234 - DNA, 249 bp, Escherichia coli
atgatttttccgggcagcgatgagtgtggactggcggcactatcacccgctgctccggaacatattctggttaatgatacggataaaatgtgtaagacaataagtctacttaacataagcacatgcgaacgcatgtgtattaagaaccatgatgtcctggacgacttagaagatgaaaaacggcctgtggatgaaaagccgtatcagcgtttgctgatacggcctggttctttacaagattattcataa

SEQ ID NO: 10235 - DNA, 669 bp, Escherichia coli
atgacgcaatccatttttcaggctcaaccctttgaattaccttttgatccgcgcacaactgcactggtcatgatcgacatgcagcgtgactttgtcgaagcagggggcttcggtgaggcactgggcaatgatgtttcactggtacgcacggctatcgcaccatgtacagaggtgctggcagccgcacgtcaaaaaggaattatggttattcatactcgtgaaggccatcgtgcagacttaagcgactgcccgccagccaaactgacgcgcggcggaaaaacctttattggtgaaccaggaccgatgggacgcattctggtcagaggtgaagcaggtcatgacatcattcctgaactgtacccggtggcaggcgaaccggtgattgataagcctggcaaaggcgcgttttatcaaaccgacttacatctgattttgcaaaaccacggtatcaagacgctgatagtttgtggtgttacaaccgaagtttgcgtaaccaccaccgtgcgcgaagcaaatgatcgtggctatgaatgcattatcccggaagattgtgtcggctcctatttcccggaattccagaaatacgcccttgagatgatcaaagcacaaggtgccattttcggttgggttactgattccaaagccattattgcaggtctggaaggctaa

SEQ ID NO: 10236 - DNA, 810 bp, Escherichia coli
atggcaacaacacaacaatctggatttgcacctgctgcatcgcctctcgcttcgaccatcgttcagactccggacgacgcgattgtggcgggcttcacctctatcccttcacaaggggataacatgcctgcttaccatgccagaccaaagcaaagcgatggcccactgccagtggtcattgtagtgcaggaaatttttggcgtgcatgaacatatccgcgacatttgtcgccgtctggcgctggaggggtatctggctatcgcacctgaactttacttccgcgaaggcgatccgaatgattttgccgatatccccacgttgcttagcggtctggtagcaaaagtgcctgactcgcaggtgctggccgatctcgatcatgtcgccagttgggcttcccgcaacggcggcgatgttcatcgtttaatgatcaccggattctgctggggtggacgtatcacctggctgtatgccgcgcataatccacagctaaaagccgcagtggcgtggtacggcaaactgacgggcgataagtcgctgaattcaccgaaacaacctgttgatatcgcaaccgatcttaacgcgccggttctcggcttatatggcggccaggataacagcattccgcaagagagcgtggaaacgatgcgccaggcgctgcgggcagcaaacgcgaaagcagagattatcgtgtacccggatgcagggcatgcgttcaacgccgattatcgcccgagctatcatgccgaatctgcgaaagacggctggcagcgaatgttggaatggtttacacagtatggtgttaaaaagtaa

SEQ ID NO: 10237 - DNA, 564 bp, Escherichia coli
atgtttgaaagtgaacttttaactcagggtttttcgacattactcaataatcctcaggcgctgctgtttgccacttttggggtgatgctgggtattgtgattggcgctttgcctggtctgacagcgaccatgggtgtggcgattttgctgcctttcacctacggcatggagcctgtttctggattgttgatgatttgcggcgtcttttttggtggcgtctacggtggttctatcaccgcaattttgctcaaaattcccggaacgcctgccgccgcagccaccgctattgatggttatgagctgacgaaacagggaaaagcagggctggcattgagtgccgccacgttctcttcctttagtggcggaacgctcagcattatcgtgctgatgtttctctctccggtacttgccagttgggcgctgaaatttagtgcctcggagtccttcgccctggcaaccttcggactgagcattattgccagtatttccggtgagtcgctgattaaggggctgattgccggggttggcggattgctgatcgctgatcgcaacgataggccttga

SEQ ID NO: 10238 - DNA, 975 bp, Escherichia coli
atgataaaacatcttaccttaccgaaaaaaatggctgcaatggtacttcttgcaggcgctgccctcagcattgcgcctgtacaggcagcctcctacccaaccaaacagatcgagttagtcgttccctacgctgccggaggcggtacggatctggttgcccgtgcctttgctgatgccgccaaaaaccatttacccgtcagcatcggggttatcaataaacctggcggaggcggtgctatcggcctgagtgaaatcgccgctgcccgccctaacggttacaaaattggtttaggcacggttgaactgaccacccttcccagcctcggaatggtgcgttttaaaaccagcgactttaaacccattgcccgtctgaatgcggatccggctgctatcacagtccgtgccgatgcgccgtggaatagctatgaagaatttatggcttactccaaagcgaatcccggaaaagtacgcattggtaactcaggcaccggagctatctggcatctggcggcagctgcactggaagacaaaacgggcacaaagttttctcatgtcccgtatgacggcgcagcccctgccattacaggcctgttaggcgggcatattgaagcggtttccgtaagcccaggagaagttatcaaccatgtgaatggcggcaagctgaagacactggtagtgatggcggatgagcgaatgaaaaccatgcctgacgtcccgacgttaaaagagaaaggcgttgatctctccatcggcacctggcgcggcctgattgtgtcgcaaaaaacgccgcaggatgtggtggatgttctggcaaaggcagcaaaagagacggctgaagagcctgcattccaggatgcactgcaaaagttgaatctcaactatgcatggcttgacgctgccagcttccagacccaaatcagcgaacaggaaaagtactttgacgagttgctgactcgcctgggcctgaaaaaataa

SEQ ID NO: 10239 - DNA, 630 bp, Escherichia coli
atgccatttaatacgcttttgcaaaaaaccgggttagtcgccattttacgcggcgtgaaaccggatgagattgtcgccatcggtgaaaaactgtacgccgccggattccgcctgattgagattcctatgaactcgccggaggcgttgcaaagtatcagtatactgcgcgacgccctgcctaaggactgcctggtcggagccggaactgtgctttcggtagagcaggtggttgcggttaaagaggctgggggccagattatcgtgatgccgcattgcgatactgcggtgatccgtcgcgcccgtgcgctgggtatgtattgtgcgcctggcgtcgccacgcccaccgaagcctttgctgccattgaacatggtgctaatgccatcaagctgttcccggctgaacaaattacgccagaagttaccaaagcctggcgtgcggttattccacaatccgttccgatgttaccggttggcggtatcacaccggaaaccatggcgcgttatctgagccacggcgcaaacggctttggcctcggttctgcgctatatcgccccggcatgacgccagagcaagtctatgaaaatgcagtactgtttatgaacgcatggaacaatttaaatagcaactaa

SEQ ID NO: 10240 - DNA, 1005 bp, Escherichia coli
atgccgggagcaccctcatttattgccctggactggggaacgtcatcgcttcgggcatggcgttttggcgaatcaccaaatccacaagaaaaacgtgaattcccctgggggatcatgaaattaccctcccaggcagcaacacgtgaggacgctttccacgatacgtttttacgtgtctgcggcgactggctggcacaaaccccatgcccggtactggcttgcggcatgctcggcagtgcgcaagggtggcaatcagcagcttatttaccttgcccggtcactctcgagggtctggcgaagcagttgacgcctgttatccaccagcagcagacaatgctgcatatcattcctggcgtgattaaagaaggtgaaatgcccgaagtgatgcgtggcgaagaaacacaaatcttcggtgctatctcgatggaaccggccctgcaaaacgcgatccatcagggtatgccagtgctgataggcttacccggcacacatgcgaaatgggcagtagttgaaaacaacaccattaccgatttccgaacctttatgacgggcgagttatttgatgttttatcccgccattcgattctcggtgccaccatgcatcctggagatgaaccgcactgggatgccttcacccacgggctgacagcagcacaagagcatcatcagaccggattattatcgacgctgttttcgacccgttcgcgcctgctgaccagtaatcttacgtcgtcctcgcagggggattacctttccggattactgataggccatgaattatgtggtctggcatccagtttgctacgtgatttacccgccacaacaccgatcgccttaatcggtagcgcaaatctgaacagccgctattcacaagcattcagccacgtttttcccggcagacagatacacgccattcctaatgccactgaacagggattatggcgaatcgcccacgctgccgggttactgtccaccaacgccagggaatgtacccatgccatttaa

SEQ ID NO: 10241 - DNA, 1461 bp, Escherichia coli
atgggaaatcatttgttatcagcaaaagcgacgctccctgtttatgatcgtaataacctggccccaagaattgttcatttaggctttggtgcatttcaccgtgcgcatcagggcgtgtatgccgatattcttgctacggaacatttcagtgactggggatattatgaggtcaacttaatcggcggcgaacagcaaattgccgatttacaacagcaagataatctttataccgttgcggaaatgtcggctgatgcgtggacggctcgcgtcgttggcgtcgttaaaaaagccttgcacgtacaaatagatggcttagaaaccgtgttggctgcgatgtgtgaaccgcaaatcgcgattgtctctctgacaatcaccgaaaaagggtatttccactctccggcgaccggacagttaatgcttgatcacccgatggtcgttgccgacgtgcaaaatccccaccagccgaaaactgcaacaggggtgattgttgaggcgctggctcgccgtaaagcggcaggacttcccgcatttaccgtcatgtcatgtgacaacatgccagaaaacggtcatgttatgcgtgacgttgtcacttcctatgcgcaagccattgatgtaaaactggcacaatggatcgaagataacgtgactttcccatcaacaatggtggaccgtattgtgcccgcagtgacagaggatacgctggcgaaaatcgaacaacttaccggtgtgcgcgatgcggcaggcgttgcctgtgaacctttccgccagtgggtaatagaagataactttgttgccggacgtccggaatgggaaaaagcgggagctgaactggttagcgatgtgctgccttatgaagaaatgaaactgcgtatgcttaacggcagtcattcattcctggcgtatctgggctatcttgccggatatcagcacattaatgactgcatggaggatgaacattatcgtcatgcggcgtataccttaatgttgcaggaacaagcgccgacgctgaaagtgcagggcgttgatttgcaagattacgctaaccgattaattgaacgctatagcaacccggcgttacgtcatcgaacctggcagattgcgatggatggcagccagaaattgccacagcggatgttggattctgttcgctggcatctggcgcatgacagcaagttcgatctgctggcgctgggcgtcgcaggttggatgcgttatgtcggtggtgttgatgaacagggaaatccgatagaaatcagtgatccactgttacctgttattcagaaggcagtacaaagtagtgctgaagggacagcgcgcgtccagtcactgctggcaattaaggcgatctttggtgatgatttaccaggcaatagtttgtttacgacaaaagtaacggaagcgtacttgtctttattagcgcatggcgcgaaagcgaccgtggcgaaatattccgtgaagtaa

SEQ ID NO: 10242 - DNA, 1020 bp, Escherichia coli
atgaaaagcattttaattgaaaaaccgaatcaactgtcgattatcgaacgtgaaatacccaccccgtcagcgggtgaagtacgagtaaaagtgaaacttgccggaatttgtggttcagatagccatatttaccgtgggcataatccttttgcgaaatatccgcgcgtcattggtcatgaattctttggcgtcattgatgcagtgggtgaaggcgtggaaagcgccagagtcggtgaacgcgttgctgtcgatccggtggtcagctgtgggcattgctatccgtgctctataggtaagccgaacgtttgtacgacacttgctgtattaggtgtgcacgctgacggtggtttcagtgaatatgctgtggttccggcaaaaaatgcgtggaaaattcctgaagctgtggccgatcaatatgcggtgatgatcgaaccttttaccattgcggctaacgttaccggtcatggtcaaccgactgaaaatgataccgttctggtttacggtgccggcccaatcggcctgacgatcgttcaggtattaaaaggcgtctataacgttaaaaatgtgattgttgccgatcgcattgatgaacgactggaaaaagcgaaagagagcggggcagactgggcgattaataacagccagacaccgcttggcgagagtttcgctgaaaaaggcatcaagccgactttaattatcgatgccgcttgtcatccttcaatcttgaaagaggccgtaacgctggcttctccagcggcacgtattgtattgatgggcttctccagtgaaccgtctgaagtgattcagcaaggaattaccggaaaagaactctctattttctcttcacgcttaaatgcaaataaattcccggtcgttatcgactggttaagtaaagggttaattaaaccagaaaaactaattacccatacatttgatttccagcatgttgcggatgccattagtttatttgaactggatcaaaaacattgctgcaaagtcttactcactttttctgaataa

SEQ ID NO: 10243 - DNA, 147 bp, Escherichia coli
atggcaaagccgatcatcacgctcaatggcctaaaaatcgtcattatgttgggaatgctggtcattattctctgcggtatccgttttgccgccgagatcatcgtgccgtttattctcgcattatttattgctgttatatataactaa

SEQ ID NO: 10244 - DNA, 1056 bp, Escherichia coli
atggcagtcaaagcaatggcacttaacacacaccagcttttcgcgtacctgaatcgcgaggatattgcggaatttaaatttagtccgctgtttaccgcgctgtttttcccgaacgtggcgacattcaacacacaggacatcatgttagataacctggatattgaagaagtcactatgtcggcgttttgttcgcctatggttggtagccaggttcagcgcgataaagggtacgaaaccagcattattcgccctggctacatgaagccaaaacacgaaatcgatccattaaaaacaataatgcgcatggctggagaagatccggcacagcttaacgaccctacctaccgccgtatgcgcctgattactggcaacatgcgccgccagataaacgccattaaagcgcgcgtggaatggctggcggtgaatgcgataacgaccggaaaaaacatcattgagggcgaaggcatagagcgctatgaaatcgactggaagataccggaaaaaaacatcatagagcaggccgacggtaaaaaatggtcagagcaggacaaagacatacacgacccaatctatgacattgagctatacgcagatcaggcaggttgccccgcaaacgtcatgattatgggcgttgatgtatggcgcatgttacgcagctttaaaaaattccgtgaactgtacgatctctcccgtggttcagaatccgccgcagagctggcatgtaaaaacctgggcgaagtggtgagctttaaaggctatcttggtgatctggcccttatcgtctattccggcaaatacactgacagcgacggcacagaaaaatatttccttgatcctgatttgctggtcctgggcaacaccaacaacaaagggctggtggcctatggtgcgattatggatcaggaagcggtaagaacaggcgcaacgcaaaacatgtactacccgaaaaactggattgaggacggcgatccggcgattgagtacgtgcagacgcacagcgcaccgcagccggttccggcagatattcgcaaatttgttaccgtcaaaattgcttaa

SEQ ID NO: 10245 - DNA, 207 bp, Escherichia coli
atggctgaagagaaaaaaggcggtgtttcggtgtacataagccccgacatcgtgaaggcgctcaaggaacgccaccagcagaacgtaaaagcaggcattgcggcaggacttgatccgctggcgatggttgagccgtcaacaggctggcaggtacgctcctatttacgcgcggcgctgggcataaatcagactcatgggggtgaataa

SEQ ID NO: 10246 - DNA, 1257 bp, Escherichia coli
gtggttgccattctgctatggctgaacgtacttaccctggcgggaccaagtttctccttgtggccagccggtcaaccgacgaccactgtaacaacgacgggtggtaacgcagcggcaaccgttgcggcgacgggtggcgcaccggtagtgggtgatatacccgcacaaactgcaccgccaacaacagcaaaccttaacgcctggctgaataatttctataacgcggaggcgaaacgtaaatcgatcttcccgtcttcgctgcccgctgatgctcagccatttgaactactggtgattaatatctgttcgctttcctggtcggatattgaagccgccggattgatgtcgcatccactgtggtcgcatttcgatattgagttcaagaactttaactccgccacctcctacagtggcccggcggcgatccgtttactgcgcgccagctgcgggcagacttcgcacactaatctgtatcaaccggcaaataacgactgctatctgtttgataacctgtcgaaactgggctttacccagcacctgatgatgggacataacggccagttcggcggttttttgaaagaagttcgcgaaaatggcggcatgcagagcgaattgatggatcaaacaaatctgccggttattttgctgggctttgatggttcgccggtttatgacgataccgccgtgcttaaccgttggctggacgttaccgaaaaagataaaaacagccgtagtgccacgttctacaacacgcttccactgcatgacggcaaccattatccgggcgtcagcaaaacagcggattacaaagcgcgggcgcaaaaattctttgatgaactggacgccttctttactgaactggagaaatcgggtcgtaaagtgatggtggtcgtggtgccggaacacggcggcgcgctgaagggcgacagaatgcaggtatctggtctacgtgatatccctagcccgtctatcacagacgtccccgttggggtgaaattcttcggcatgaaggcaccacatcagggggcaccgattgtcatcgaccaaccgagcagcttcctggctatctccgatctggtggttcgcgttcttgatggcaagattttctccgaagacaatgttgactggaaaaaactcaccagtgggttgccacaaacagcaccggtctccgagaactcaaatgcagtagttattcaataccaggataaaccgtacgttcgcctgaacggcggcgactgggtgccttacccgcagtaa

SEQ ID NO: 10247 - DNA, 144 bp, Escherichia coli
atggccgtactgggattgcagggggttcggggaggcgtggggacaacaaccatcaccgccgcattagcctggtcattacaaatgttgggagaaaatgtcctggtggtcggcctgcccggacaacttgttgcgcctgtcatttaa

SEQ ID NO: 10248 - DNA, 2619 bp, Escherichia coli
atgagtatcctgacccggtggttgcttatcccgccggtcaacgcacggcttatcgggcgttatcgcgattatcgtcgtcacggcgcgtcggctttcagcgcgacgctcggctgtttctggatgatcctggcctggatttttattccgctggagcacccgcgctggcagcgtattcgcgcagaacataaaaacctgtatccgcatatcaacgcctcgcgtccgcgtccgctggacccggtccgttatcttattcaaacatgctggttactgatcggtgcatcgcgcaaagaaacgccgaaaccgcgcaggcgggcattttcaggtctacaaaatattcgtggacgttaccatcaatggatgaacgagctgcctgagcgcgttagccataaaacacagcatcttgatgagaaaaaagagctcggtcatttgagtgccggggcgcggcggttgatccttggtatcatcgtcaccttctcgctgattctggcgttaatctgcgttactcagccgtttaacccgctagcgcagtttatcttcctgatgctgctgtggggggtagcgctgatcgtacggcggatgccggggcgcttctcggcgctgatgctgattgtgctgtcgctgaccgtttcttgccgttatatctggtggcgttacacctcgacgttaaactgggacgatccggtcagcctggtgtgcgggcttattctactcttcgctgaaacgtacgcgtggattgtgctggtgctcggctatttccaggtcgtatggcctctgaatcgtcagccggtgccattgccgaaagatatgtcgctgtggccgtcggtggatatctttgtcccgacttacaacgaagatctcaacgtggtgaaaaataccatttacgcttcgctgggtatcgactggccgaaagacaagctgaacatctggatcctcgatgacggcggcagggaagagtttcgccagtttgcgcaaaacgtgggggtgaaatatatcgcccgtaccactcatgaacatgcgaaagcgggcaacatcaacaatgcgctgaaatatgccaaaggcgagttcgtgtcgatattcgactgcgaccacgtaccaacgcgatcgttcctgcaaatgaccatgggctggttcctgaaagagaaacagctggcgatgatgcagacgccgcaccacttcttctcgccggatccgtttgaacgcaacctggggcgtttccgtaaaacaccgaacgaaggcacgctgttctatggtctggtgcaggacggcaatgatatgtgggatgccactttcttctgcggctcatgtgcggtgattcgccgtaagccgctggatgagattggcggtattgctgtcgaaacggtaaccgaagatgcgcacacttctctgcgtctgcaccgtcgtggctacacctccgcgtatatgcgtattccgcaggcagcggggctggcgaccgaaagtctctcggcgcatatcggtcagcgtattcgctgggcgcgcgggatggtgcaaatcttccgtctcgataacccgctcaccggtaaagggctgaagtttgctcagcgactgtgctatgtcaacgccatgttccacttcttgtcgggcattccacggctgatcttcctgactgcgccgctggcgttcctgctgtttcatgcctacatcatctacgcgccagcgttgatgatcgccctgtttgtgctaccgcatatgatccatgccagcctgactaactcgaagatccagggcaaatatcgccactctttctggagtgaaatctacgaaacggtgctggcgtggtatatcgcaccaccgacgctggtggcgctgattaacccgcacaaaggcaaatttaacgtcaccgccaaaggtggactggtggaagaagagtacgtcgactgggtgatctcgcggccctacatcttccttgttctgctcaacctggtgggcgtagcggttgggatctggcgctacttctatggtccgccaaccgagatgctcaccgtggtcgtcagtatggtgtgggtattctacaacctgattattctcggcggcgcagtcgcagtatcggtagaaagcaaacaggtacgccgatcgcaccgcgtggagatgacgatgcccgcagcaattgcccgcgaagatggtcacctcttctcgtgtaccgttcaggatttctccgacggtggtttggggatcaagatcaacggtcaggcgcagattctggaagggcagaaagtgaatctgttgcttaaacgcggtcagcaggaatacgtcttcccggctcaggtggcgcgcgtgatgggtaatgaagttgggctgaaattaatgccgctcactacccagcaacatatcgattttgtgcagtgtacgtttgcccgtgcggatacatgggcgctctggcaggacagctacccggaagataagccgctggaaagtctgctggatattctgaagctcggcttccgtggctaccgccatctggcggaatttgcgccttcttcggtgaagggcatattccgtgtgctgacttctctggtttcctgggttgtatcgtttattccgcgccgcccggagcggagcgaaacggcacaaccatcggatcaggctttggctcaacaatga

SEQ ID NO: 10249 - DNA, 3474 bp, Escherichia coli
atgcgcaaattcacactaaacatattcacgctttccctcggtctggccgtcatgccgatggtcgaggcagcaccaaccgctcagcaacagttgctggagcaagttcggttaggcgaagcgacccatcgtgaagacctggtgcaacagtcgttgtatcggctggaacttattgatccgaataacccggatgtgattgctgcccgttttcgttctctgttacgtcagggcgatattgatggcgcacaaaaacagctcgatcggctgtcgcagttagcgccgagttcaaatgcgtataaatcgtcacggactacgatgctgctttccacgtcggatggtcgtcaggcactgcaacaggcaagattgcaggcgacgactggtcatgcggaagaagctgtggcgagttacaacaaactgttcaacggtgcgccgccggaaggtgacattgctgtcgagtactggagtacggtggcgaaaattccggcccgccgtggcgaagcgattaatcagctaaaacgcattaatgcggatacgccgggcaacacgggcctgcaaaacaatctggcgctattactgtttagtagcgatcgccgtgatgaaggttttgccgtcctggaacagatggcgaaatcgaacgccgggcgcgaaggggcctctaaaatctggtacgggcagattaaagacatgcctatcagcgatgccagcgttcaggcactgaaaaaatatctctcgatctttagcgatggcgatagcgtagctgctgcacaatcgcaactggcagaacagcaaaaacagctggccgaccctgctttccgcgctcgtgcgcaaggtttagcggcggtggactctggcatggcgggtaaagccattcccgaactacaacaggcggtgcgggcgaacccgaaagacagtgaggctctgggggcgctgggccaggcgtattctcagaaaggcgatcgcgctaatgcggtggcgaatctggaaaaagccctcgcgctggatccgcacaacagcaataacgacaaatggaacagtctgctgaaagtaaaccgctactggctggcgatccagcagggcgatgccgcgctgaaagccaataatcctgacccggcagaacggctgttccagcaggcacgtaatgtcgataacaccgacagctatgcagtgcttgggctgggcgatgtggcgatggcgcgcaaagattatcccgccgccgaacgctattaccagcagaccttgcgtatggacagcggcaacactaacgccgtgcgcgggctggcgaatatttaccgccagcagtcgccagaaaaagccgaagcgtatatcgcctcgctctctgccagccagcggcgcagcattgatgatatcgaacgcagcctgcaaaacgaccgtctggcacagcaggcagaggcactggaaaaccaggggaaatgggcgcaggcggcagcacttcagcggcaacgactggcgctggaccccggcagtgtatggattacttaccgactttcgcaggatctctggcaggccggacaacgcagccaggccgatacgttaatgcgcaatctggcgcagcagaagccgaacgacccggagcaggtttacgcttacgggctgtacctctccggtcacgaccaggacagagcggcgttggcgcatatcaacagcctgccgcgcgggcagtggaacagcaatattcaggagctggttaatcgactgcaaaacgatcaggtgctggaaaccgctaatcgcctgcgagaaaacggtaaagaggcagaagcggaagcgatgctgcgccagcaaccgccttcctcgcgtattgacctcacgctggctgactgggcgcagcagcgacgtgattacaccgccgcccgcgctgcatatcagaatgtcctgacgcgggagccaactaacgccgatgccattcttggtctgacggaagtggatattgctgccggtgacaaagcggcggcacgtagccagctggcgaaactgcctgccattgataacgcctcgctgaacacacagcggcgcgtggcgctggcacaggcgcagcttggcgataccgcagcggcgcagcagacatttaataagttgatcccgcaggcaaaatctcagccaccgtcgatggaaagcgcgatggtactgcgtgatggtgcgaagtttgaagcgctggcgggcgatccaacgcaggcgctggaaacctacaaagacgctatggttgcatccggtgtgaccacgacgcgtccgcaggataacgacacctttacccggctgacccgtaacgacgagaaagatgactggctgaaacgcggcgtgcgcagcgatacggcggacctctatcgccagcaggatcttaacgtcactctcgagcacgattactggggttcgagcggtaccggtggttactccgatctgaaagcgcacaccactatgttgcaggtggacgcgccctattctgacgggcggatgttctttcgcagtgatttcgtcaatatgaacgtcggcagtttctccactaatgccgatggcaaatgggatgacaactggggcacctgtacattacaggactgtagcggcaaccgcagccagtcggattccggtgccagcgtggcggtcggctggcgaaatgacgtctggagctgggatatcggtaccacgccgatgggcttcaacgtggtggatgtggtcggcggcatcagttacagcgatgatatcgggccgctgggttacaccgttaacgcccaccgtcggcccatctccagttctttgctggcctttggtgggcaaaaagactctccgagcaataccgggaaaaaatggggcggcgtgcgtgccgacggcgtggggctaagtctgagttacgataaaggtgaagcaaacggcgtctgggcatcgcttagcggtgatcagttaaccggtaaaaatgtcgaagataactggcgtgtgcgctggatgacgggctattactataaggtcatcaaccagaacaatcgccgcgtcacaatcggcctgaacaacatgatctggcattatgacaaagacctgagtggctactcactcggtcagggcggttactacagtccgcaggaatacctgtcgtttgccataccggtgatgtggcgggagcgcacggaaaactggtcgtgggagctgggggcgtctggctcgtggtcgcattcacgcaccaaaaccatgccgcgttatccgctgatgaatctgatcccgaccgactggcaggaagaagctgcgcggcaatccaacgatggcggcagcagtcagggctttggctacacggcgcgggcattacttgaacgacgtgttacttccaactggtttgtcggcacggcaattgatatccagcaggcaaaagattacgcacccagccatttcctgctctacgtacgttattccgccgccggatggcagggtgacatggatttaccgccgcagccgctgataccttacgccgactggtaa

SEQ ID NO: 10250 - DNA, 171 bp, Escherichia coli
atgacaaccgatgcggaagccgcagtcagcgaagccctgcgcgacctggccttctggctgtaccgtcaactggaaaacgagtacgactggctgacctcagatgccgctgtggatgaggccctgctcatcaacgaatacacctttaccgaagccggtctacgcgccggctga

SEQ ID NO: 10251 - DNA, 303 bp, Escherichia coli
gtggggctaccctacaccgtgacgccctgttctggcacccgtctggtgcaggagggcaaccgactgtactatttggctgaccgggcaagtatcaccggtaagtttagtgatgccgaaagcctgaagctggatgtcgtatttccacattttatcagtcagatggaatcgatgctgaccactggtgaaatgaatccccgccatgcccactgtttcaccctgtaccacaacggtttcacctgcgaagccgatacccttggtagttgcggctatgtatacatcgccatttatcccactcagctctaa

SEQ ID NO: 10252 - DNA, 369 bp, Escherichia coli
atgaacactctacctgctacaatttctccggcggcgaagccctgtccgtcgcccgttgcagtctggcaaatgttacttactcgtttgcttgagcagcactatggcctaatgctaagcgacacaccttttagcgatgaaaccgttataaaggagcatattgatgccggtatcactctggctaatgccgttaactttctggtagagaaatatgagttagttcgtattgatcgcaatggatttaactctcaggtacaagcaccatatttgactgcgacagacattcttcaagccaggaaagcgtgcgggttgatgagccggtgttcttacagagatgtaagtaatattgttcttagccgatcacggttgtga

SEQ ID NO: 10253 - DNA, 2148 bp, Escherichia coli
gtgaagagtatttttgaaggattatcacagataacggcgttactgggtacacctgtatctgctgagactctggctgccggtactgtccgtacagatgtatccgggattgattttcgttctgttggcgagtttcttcgtagtgaaggatttgataatcatctttcccggcgatctccggaagatatcccgtcacttgcggttccggcgcttcttttattgaacgctcaggaagctattgtggtagtgcgtattgagggggccggtctggcaagacagtatcatgtgcttcagcctggaggtctccgtaagacactttctcacgatgcattaatggccgtttattctggttattgttggtttgttcagccacaggcaaagcaggatcgtcgctcggagctgccagagtatgacatgagcggggcatggttctggcgggtactgtggcgattcagggcatattacggacaggttattgttgcgagttttatcattaactttcttgctctggtcagttccctgtatgtaatgaacgtctatgaccgggttatacctaatcgttcctgggaaacgttatggatgctgagtatcggggtgattacagcaattctgtttgagtgtgctgcaaagttaatccggagttatctgacggatgttgcgggtaagaaggcagacctgattatcagctctgctctgctacgtcgggtgatggcggtaaaaatgtctgacaggccggcatcctctggttcatacgccagcaatttgcgggaatatgagtctgtcagggagtttatgaccagcgctacgttactggcttttgttgatctgccttttattctgcttttcatcagtgttatcgggctcgtgggaggctggcttgcggttgtacctcttacgctggtcccgctggttattctggcaggaatattactgcagcgaccgctttcccgtcatattaatgcctccatgcgggaatcatcgcagcgtcagggattacttgtggaggctctggacggaatagaaaccctgaagctgaataatgctgttaactgggttcagcgacgctgggatggatatactgcaagtgtcgcccgttcgtccattcgggtaaaaaataccagtaatgtcataatcagcttttccacagcaattcagcaaattaatactgttctgctggtcattctgggaacgtaccttattcacagtgatgacccacataaccgtatcaccatgggggcactgattgcagccgttattctttccggccgcgcgcttgcaccgcttggccagatagcatcactggccacccgtttccagcaggcccgtctggctatgcagggggtgaatgaaatagttcgccgcccggtggaacgggaaagtcagacacattatctgaccgtgaaggatatccagggggaattccatttcagcgcagtcacgtttttctataagcctgaattacctgcagccttgaaaggtatgtctgtctgtatccggcccggagaaaaggtgggcattattggcactatcggatgtggtaaatcgacgctactgaaaatgatggtagggctataccgtcaaaataaaggacaaattacccttgacggggttgctatgcagcaactggatccctgttttgttcgggataaggttttcctgcttgagcagaatccccggctttttctgggaactctgcgtgaaaatctgcagctttcgcgtcttccgggaagcctgtcggatgtggatatgattaatgcagccggacgtttcgggtttgaccgttttattcgtcatcacccatgcgggcttgatatgcagataggggaaggaggtcaggggctgtcaggaggacagcgtcagatggtcgctctgacgagaatggtactgggttctccccgggtagttctgcttgatgaacccacgacgggtcttgatctgcagacagagaacattgttctgaaagggctgaatcactggagccgtggacgcacaatggtggtggtgacgcatcgtctgcaggtgctgaatattgttgaccgtattatcgtgatgaatgaaggccgggtaatgatggatggtccccgcgatgaaatactgaaaaaactgtcagggaaacagcagagtggggagagcagagcgataacttcatga

SEQ ID NO: 10254 - DNA, 1209 bp, Escherichia coli
atgaaacttaatgcgcgacaggtagacgcagctaaacccagagagaaagcctataagctggcagatggtgctggtttgtatcttgaggttgttccctctggttccagatactggcggatgaaatatcgcttcaatggaaaagagaagcgtatggcctttggtgtctatccggcagtgtcccttgcacaagcgagggcactgcgtgacgacgccaagaaaaagcttgccgaaggtatcgatccatcgcttgccaagaaagaagaaaagctggttcgagatgtgcagctaaataatacgtttcaggctgtggcacttgaatggcatggaacgaaggtgagccgatggtcagaaggttatgcctcggacattatcgaagcctttaataaagatatttttccctatattggccaacaaccggtgaatgaaatcaaaccgctggttctgcttaatgtgctgcgtcgaattgaaagccgtggcgcgacagagaaggccaagaaggttcgccagcgttgcagcgaagtctttcgttacgccatcgtaaccggtcgtgcggaatacaatcctgcagcggatcttaccagcgcgatgtcagggcatgaatcgaagcattatcccttccttactgttgaggagttaccagacttttttaaagctctcgcaggctacacaggaagcccgttagttgttcttgcggcacgtctgctgatcctcacgggagttcgcactggcgaactccgaggtgctttctggagtgagtttgatcttgaaaaagcggtgtgggagatacctgccgagcgtatgaagatgaaacggcctcaccttgtccccctctctacccaagcgctggaaatcgtacagcaactcaaagtgatgtcagggcaatatccactggtgttcccgggacgtaatgatccccgcaagacgatgagtgaagcgagtattaatcaggtttttaagcggattggatatacggggagggtaacggggcatggtttccgtcacacgatgagtacgattttgcatgaggaaggtttcaatacagcgtggattgaaacccagctggctcacgttgataaaaatgcgattcgtgggacgtataaccatgcgttgtatttggaaggacgtagggagatgatgcagtggtatgcggactatataaacgctaatcataattcatgtatttctttgctggtgaacgctacaaagtag

SEQ ID NO: 10255 - DNA, 1209 bp, Escherichia coli
atgaacagtaactatatgccattcacacaacgagatagtctcggaagatactatacaaaagaatccataagtgcattattggtttctcagatgaaagctgaaaaagtcaataatattattgatttagcttctggtgaggggagcttaacctatgctgctttagaccgatggaagaatgcagaagcatattctttggatatagaatctcggatgtcaaaaaaagtatgtgataatcttactcatattgtaacagatgcccttgttcattcatttcctgaaatgcttgcccgacatcaaggaaattttgatgttgcagtatgtaatcctccattcactctccctgaatggagggatgattattttaaaatcattagtgagattggcgcagataaatatatatctgtctcaaaatatgtcccagcagagataatatttatatctcaagtcatcaggtttcttaaaaagggcggtgaggctggaataattttacctgatggtatatttacagcaagaaagtttataggtttaagacgatatttattgaatgaacattcaattacaaaagtcattgaattgcctaggaatatcttcaaaaggacagaggctaaaacacatattttaatttttaataaaaaaattatgcctcatcataaaatacaattacattgtataactaaagatggggaattgtcgccttctgttttaattagaaaagaagatgcggttgagagaatggactactcttatcattataataaaaatgaaggtaaagggtttagcacaatagggatgcttaaaaatatttcaatttttagaggtaggtttaattcaaaggaaattacggaacatgtttttcatacgacaaaatttagtggtgatgaaaagtacattaaattccactgcaactctgtagaagaattgaagccatcaaaattagatgtcattgctaagcctggtgatatattaatagcaagagttgggcgaaattttcataaaaaaatattgtttgttgagagcggctattcttatatcagtgactgtatttttctgatacgagcctctggtggagataagaaaaaactatttgattttctttgttctcaagatgggcaagaggaattatctcgagcgagtagtggtgtagccgcacaacatattacaatggatgcattaaaaaaaatacatcttgtaaggattaaacatgactga

SEQ ID NO: 10256 - DNA, 1707 bp, Escherichia coli
atgactgatgtggaattagatagtaattttcttatcgaggaacgagctgattatattgatgaggatacgataaaaaataatactatcagaactggagagtttttcgatattatacataatgctcttatatccccaggcatcaaacttatagttggtcctaggggatgtggtaaaacacatttgatgcgttatgcttgggttgaatgtaaaaacgatgataacgcaccattaccactctatgtttcttttaataaatattttaagttagagccgcttttaaaaaataaaccaaatgcaattgatctctttcataaatgggtattagcaaagatactactctctgcttatgaaattgcttgcgatattgaagattctgaatatcttgatttgtcaacgatactcatagcggataaagagttcctaattaatttaatcgtaaggcttgagcagggtctttcgccatcattagaacaagaaaacattgttcaattgatcagtgtttcttctgttatatcctcgttgagttcactatgtgattggcttgaacgtaaaagagtcattattttattagacgatgcagcaataagcttaactcctgaatatctttacgagttttttgatattgtacgtagtctaaaaacctcaaaaatagctttaaaggcatcggtttatcctggaacaaccgaatatggcccaaggtttcatgttgctcatgatgctgaaacaattgatgcttggatttcggtacagcaccctaattattcctcagtgatggatgctatagcgcaggcaaggtttcctgggtatgatggcattccggatgacttgaaagagttatttaaattctcagcatttggtattccacgttcttttttgatgatgttaagagattatcaaacaactttaagtcagacaactcagcaaaaatttaataaaataattgaaaggtatgttgagcttagactcagcgaatacagttcactaaaagataagctacctcgattgtttgacattgtttcattaggtgaatcacttttattaaaagtagtcgaattactcaaggaaagtaactcccaatataaagaagagaaacaagtcataatcggtatagagaaaaatgataatgtttatttttctcgactcactaagctattaattgaaacagggcttttttataatcttcctgatatttctcatggtgatgggcgtacttatgaaagatatatacctcattatgctttattaataaaggaaagagtgtttaacgaaggaagtagaggtttttctccttctcagattattcaaaaaatactaagaaagaatgctaagcatcctgtcagaagaaacatttcatcattattcaatgctgagcaacttgcgagacttaaactaactttacctccatgcaataactgcaagactccgcgattgactgacaatcaaaaattttgccatcattgtgggaatcaattgattgatgagtcggcctataatcagtgcatgtctattccactgtcaaaagtaccacatctaacatcttggcaaatgcaaaaactatctgggctggaaaaagtaaaaactataggagatgtattgtctttacaagaccctgggagtgagttaagaaaaattcacagaataggacccaaaattgccaataaaattatggacaaagtgttattacatgttgaagagtttttgtcttaa

SEQ ID NO: 10257 - DNA, 978 bp, Escherichia coli
atggaactagaatcaaaagaggattatgaagagaccactcatcataatgtggcgtcctcagttgtcactgcaacccatgataacttagatggaagagagttttttgaactatgtagtaatccagctctagttttttcgtttgagacacacaaaaaatttaatgagttacctgttgatagcaaggaatccccgttagatctttttatagctaatacaaagcaacttcacttgttaagatctggtgatatttcaaacacattaagccatctgttgttattaggttatgtgtctgcagccgaaagttatttgcgagctcttatcagaaatctaattaatcatgatgaatatatacagtctatagtttctgataaggccgttagttatgcagcggcacaacaccataaaaaggagttattaccagaagctttacttgaggacttttcattggcaagcccttataatgtttttgaaacattaaaggacattattggaatgaaaggacaacgaccaatcgaaatgatgaaatgctcaagcgaattcatgaaagtttgcgagttaaggcattgttgtgttcatcgatttggtaagttgggttcgaaaaatgcaatccgactaggattggctgaacatatgaagcacttagaaaaaccgataatactcaataatgatgatctcgagcaaatcgcatttattgttgagaattttattagaactttgaataataccgttttcaaatttataattaatcgtacagttgagaacaaaaataaggaaaaaggaggggaaagactatatgattctgaatggacatgggtgtttgaaaaagatataagtcgatacgaaaagtattatgcaatatttagtgccaaaaacgatacccttcccggattatcattacaggattcatatcaactttttgttaatgcatataagcctaaacttcctgcaagaaaaaataaaaaaactgaagaaaattaa

SEQ ID NO: 10258 - DNA, 630 bp, Escherichia coli
gtgaaaacgttcgaagagtatgacttcacattcgccaccggccctcccctggtgatggctgcgttagcagcatttattatcagctgtgttatttttgtttaccaaggcggcgcttatctggtaccatacatctccgatgcctatggaatgactcccgatcaaactgctgttatcgggatgattagagcatattttctcgcttttattatttctccttttgctggcctggttgcagataagattggttcttccctgaaagttatggccagtttctttactctaggcgcattgataactgcatcttttatatttatccctcatgactcacactttcttatactgcttattactctggttttattgctgggagcccttacgtttggtatgcgcggtataatgtatgcacaggtaaatgaaattcgtataccaaaagagtttaccggaaccgcaatggggatattaatttgcatcggattcagcccggaagcttatgtccaccttatcttcggataccttcttgatacgtataaagaatttgcatatacactgatgtttgccaccattgcagctgtactttttgctggagcactgtgcagtggtctactttacaggataaataagaaaatatga

SEQ ID NO: 10259 - DNA, 960 bp, Escherichia coli
atggggtttagaaaaacaataatcacttcggtaggtttgatatttatttcattctcttttgtggcaaagtgctctcaactcaaaaatttgaataattactcagtgatgctttgtggaaaagtgtcaaataatatcctggatgatattggtggttataaagaaagaaatatattaatgctgcgagctataaaaaaaatcataataatgacaatcgtaaatattatatttttctattcctttcaatcgactgcggatgaaatggttttaataaaaaaatacgggtttgggcttgagagagatatcaaaggaaggccattaatttatcctatcgaaaattatgatgagtgtaagaaaaaatgcaatcatatgaattatatagcggatgtcaatgctcaattagctatgagtaaaaaaaataacaggatttttgctaacataacctttactaacaatagctctaccacgtattttttttctaaatattatctacctatgaaagtaaaagatggaaaaggagatgaatatgatgcgatatgcaaaaaaccattcagaatcaactctgggaatatcacgttggactacttaggtggttcatgtccttttgaaattaatacgaatcctgaacggtggaatactattaaaccaggtcgtagttttttgttgagtataaccttaaatgatatgtatgcctttataccaggagataattattattttataaaatcatctggctataaatttgttaatgacaagtggtttacactcaaatcaatcaataatatttttctttattttttaaatttaaaaattaattgtgctgatgatttttttgatattaataattttactacatgtaataatttgttattggatgaaaaaaacacttttttattaatcagttatgggcaattgaggatgaaaaaaattctatttacgtcacccctgatgaaatttctataa

SEQ ID NO: 10260 - DNA, 945 bp, Escherichia coli
atgctaacattttttattggcgatttattgcctattatcgtaatcatgctgttgggttattttagcggcagacgagaaactttttcagaggatcaagctcgggcatttaataaactggtattaaactacgctcttcctgcggctctatttgtttctattacccgggcaaacagggaaatgatttttgcggacactcgcctgacccttgtatcacttgtggttattgtcggatgtttctttttctcctggttcggttgctacaaattttttaaacgtacccatgcagaagcagcagtatgtgcattaattgcaggttcacctaccattggattcctggggtttgcagttctcgatcctatttatggtgattccgtatcaacaggtttagtggtagcaattatttctattattgttaacgcaattactattcctattggtctgtatttgctgaatccttcctcaggagcggatggtaagaagaatagtaatctgagcgcattaatttctgcggcaaaggagccagtagtatgggcacctgttctggcaacgatcctggtgttggttggggtaaaaattccggcagcatgggacccaacctttaatctgattgcgaaggctaactcaggggtggcggtattcgctgcggggttgactctggctgcacataaattcgagttcagtgccgaaattgcttataacaccttcctgaagctgattctgatgccactggcgctgcttctcgtaggtatggcatgtcatttgaatagcgaacatttgcagatgatggtactggcaggcgcattaccgccggcattctccggaatcattattgccagccggtttaatgtctacacccgcactggtacagcgtcattggctgtgagcgtactgggttttgtcgtcacggctcctttgtggatttatgtcagtcgactggtttcataa

SEQ ID NO: 10261 - DNA, 1329 bp, Escherichia coli
atggaaaacgctaaaatgaattcgctcatcgcccagtatccgttggtagaggatctggttgctcttaaagaaaccacctggtttaatcctggcacgacctcattggcagaaggtttaccttatgttggcctgaccgaacaggatgttcaggacgcccatgcgcgcctgtctcgttttgcgccgtatctggcaaaagcatttcctgaaacggctgccgcgggggggattattgaatcagaactggttgctattcctgctatgcaaaaacggctggaaaaggaatatcaacaaccgatcgccgggcaattgctactaaaaaaagacagccatttgccgatttccggctccataaaagcacgtggcgggatttatgaagtcctggcccatgctgaaaaactggctctggaagcgggtttgctgacacttgaggatgattacagcaaactgctttccccggagtttaaacagttctttagccaatacagtattgctgtgggatcaaccggaaatctggggttatcaattggtattatgagcgcccgcatcggctttaaagtaacggtgcatatgtctgctgatgcccgcgcctggaaaaaagcgaaactgcgcagtcatggcgttactgtcgtggaatacgagcaagattatggtgttgccgtcgaggaaggacgtaaagccgcgcagtctgacccgaactgtttctttattgatgacgaaaattcccgcacgttgttccttggatattccgtcgcaggccagcgtcttaaggcgcaatttgctcagcaaggtcgcatcgtcgatgctgataaccctctgtttgtctatctgccgtgtggtgttggcggtggtcctggtggcgtcgcattcggacttaaactggcgtttggcgatcatgttcactgcttttttgccgaaccaacacactccccgtgtatgttattaggcgtccataccggattacacgatcagatttctgttcaggatattggcatcgacaaccttaccgctgccgatggccttgcagttggtcgcgcatcgggctttgtcgggcgggcaatggagcgtctgctggatggtttctatacccttagcgatcaaaccatgtatgacatgcttggctggctggcgcaggaagaaggtattcgtcttgaaccatcggcactggcgggtatggccgggtctcagcgcgtgtgcgcatcagtaagttaccaacagatgcacggtttcagcgccgaacaactgcgtaatgccactcatctggtgtgggcgacgggaggtggaatggtgccggaagaagagatgaatcaatatctggcaaaaggccgttaa

SEQ ID NO: 10262 - DNA, 1164 bp, Escherichia coli
gtggaacagattaattcaaataaaaaacattctgacagaagaaaatattttgctttgttagcggtagttttatttattgcgttttcaggtgcctatgcctattggtcaatggaattaaaagacatgattagtacagatgacgcctatgtcacgggaaatgcagatccaatttctgcacaagtctcaggcagtgtcactgtcgttaatcataaagatacgaactacgttcgacaaggtgacattttagtttcactggataaaactgatgccactatcgcactcaataaagctaaaaataatctggcaaatattgttcggcaaacgaataaactatacttacaggataaacaatacagtgccgaagtcgcttcagcacgtattcagtatcaacaatctttagaagattataaccgtcgtgtgcctttagcgaagcaaggggttatttcaaaagaagcgctggagcataccaaagatacgttaataagtagcaaagcggcattgaatgctgctatccaggcttataaagcgaataaagctttagtaatgaacacaccattaaaccgtcagccacaagtcattgaagctgcagatgcaaccaaagaagcctggttggcgcttaaacgtacggatattaagagtccggttaccggttatattgcccagagaagtgttcaggtcggcgaaacagtgagtcccggacaatcgttaatggctgtcgtaccggcgcgtcaaatgtgggttaatgccaactttaaagaaacacaactcacggatgtacggattggtcaatcggtcaatattatcagcgatctttatggtgaaaatgttgtgtttcatggtcgggtgacagggatcaatatgggaaccggcaatgcgttctccttattacctgcacaaaatgcgacagggaactggatcaaaatcgttcagcgtgtaccggttgaagtttctctggatccaaaagaactcatggaacaccctttgcgcattggtttatcgatgactgcaactattgatacgaagaatgaagacattgccgagatgcccgatctggcttcaaccgtgacgtccatgcctgcttataccagtaaggctttagttatcgataccagtccgatagaaaaagaaattagcaacattatttcgcataatggacaactttaa

SEQ ID NO: 10263 - DNA, 612 bp, Escherichia coli
atgcctgtcaccatcatggatcccgatccggattcagcggtgatttctcgtttttttgcatccctgaaagccaaaattcaggcttaccagcggaaaaaaagatgtgccaatcagcgtgtgcatgcaaccagcctgcgttatttctggtgccgggagttcggcaagatgtatggcaggaaacattatcacgtgatattactgctcaacaaagatacctggtgctcgatcggggatttcagcgaatcgtcttcgctggcgacgatgatccaggaggcatggtgcagcgccctgcatcttgagccctggcaaggcgatggcctggtccatttttccaggtggacgccttcccgtaaaccagcatcgtctgatgctcgcccttcttccgatgacacgcctttgtcgggtggatgtcctgatacctggaaggcttcagacaaaaagccgggtgaagccgctgttctctggatcaagcgtggtgatgtgggagcgctgcagaaagccctggagagagcccgttatctcgtgaaaaatgaaacgaagctgcatgacggttcaggtcaacgtaattatggttgcagtcgttggtcgggacatcttctggatggcaggtga

SEQ ID NO: 10264 - DNA, 528 bp, Escherichia coli
atgacaccgccaaccaaaattgatacatcaagtctacttaccatattgggcgttattgctgctgtatgggcccttattacgccaaacgctcgactacgtttaaggttctgcctagcgtggtgggattgggtaattgttgggtttgcattcttactaagcaattatttggtgtttgcaccggctttaaaatcactagacttatattttagctttggcccctggaaatggggattagatagttcaagtgccgtatacctgatatcactcgcagttgctatttacattttatttcgcttaaaaaaccctaaactctcaattggaagaacagggatatttctagagttagtggaaaatttgcaccttactaaacgatacgacgatctggcacaattgttggcacctcaactagaaaaattaatatcaataattgatagacctgtgaagaatcgactttgtgataagatagctaacaatctccgctctctaatcgcgagacagctgctgaacatgcacatgaagcattgttaa

SEQ ID NO: 10265 - DNA, 792 bp, Escherichia coli
ttgattccaaaaaacaaccgtatattacattttttcttttccaatgctaagtttgcagctgatttagcaatataccgtgatatcggtgactatctctactggaggttagatgaagatgaaaaaattattgctgcacttaataagtctttaggttcctattacgatgcttcaaaatataaatgtcctatttactcaggtgtcacgctgtttgaaattatggttcatgaaggtattcaccagggtctggtgtatcatttatggttgcattactattcatattttgcaaggaaaattataaagaatatgaataggcaatcggatgaatatagtggtgaatgggaaacaccttttcacttccttctctgtcatttatttagcgtcgctacagattgggcagaacaatgcgaatggatagatgaaaaggagattcctcaagaaaataaagaaatagataatttcgatcttcattatatttcaaaagaggctaccaaattacttggtgctatgctgcagttggttatgcctaataaaaaactcaccttgaaatctagaaaacatattcttgatatagttgtatcttgttatattagattgaaaaggaataaaaaattaaaagacgtcgctgactcattattaattttcaccactagaggcgaaggtaattcagcaccgccgcattatcgtagagaacttctagaaatattcaatacccttgatgattatcgattaagaactgatgccccggaattccgagcagctatagagtctgctattcaagcaaggccgaattag

SEQ ID NO: 10266 - DNA, 822 bp, Escherichia coli
atgaatagatcaaacgaagaagatattgaaaaagccaaatcgctgatttcgataggtgcagagatagctggcgctgcagttggcggtgcaattggcttttttgcaactggccctgtgggggctgccggggctggttcgttaggggtgattgtcgcgaaagctggtgcaaaacttctcggtgatgtggctgatcgtacgatgtctgcacgcgaaaaagtccgcgttggtgctgctgcagttgcattcaataaaattgaaaaggtcgctctgtcaggtaatgaacccagaaaagatgatttctttaactctgaagaaggaaaacgcagtgatgcagaagaaattctggaggggacgttaagaagggcgcgtgaagagtatgaggaaaagaagattcttcttctagggaatttttatgcaaatatggtctactctccgggagtgagtacagaagaagcgaattactatctccggttgttcgattcactgacgtatcggcagctctgtgttatgagtttgatcatgatgaaaccacaatattctgactttcaaaatctgagaagccatgactatcgaacccaaaatgccaatatgcaagcaagtactgtagcactcctccaagaaatttatgctctgtataatttgggattagtctgcgttaggagtgctggcggaaatggttatgtatctttgctggcatggcatgatatcatccctttaggattagaatttacagggttaggtgaaaggttttacaaactttttatggggggaggaagcttttcacttcccgatattactactatcgcagaagctttgcgttaa

SEQ ID NO: 10267 - DNA, 126 bp, Escherichia coli
atgcaaaagtttgctatgagcgaggagcggatgtttatgattgttatcaacgaggccccgtgtctaacaatctcctgtgttaataagcaggggctggaaactttgaatcaaaatgttcattcttaa

SEQ ID NO: 10268 - DNA, 567 bp, Escherichia coli
atgcctaaatcttacacaccaaactggttttttaccgctttacttgacaatcacatcaatcaaatgatggcacgctattcctgcctgcgggccttacgcatggatttcttctacaggaaagatacgcctgatttcttacaacctgatcatcgctggcttgaattgcagttgcgtatgctgctggagcaggtggaacaatttgaaaatatcgttggtttcttctgggtgattgaatggacggctgatcatggttttcatgcgcatgtcgttttctggatcgatcgtcagagggttaaaaaaatatatccctttgcggagcggattacggaatgctggcggtctattacacataacagcggttcggcacaccgctgtacatatcagccgcattatacatacaacatcaacattcctgtgcgccacaacgatcctgaaagcatcgataatattcgcggtgccctgcattatctggcgaaagaagagcaaaaagacgggctgtgtgcctacggctgcaatgaagttcctgaacgtcctgctgcagggcgtcctcgtaagcctcacttctga

SEQ ID NO: 10269 - DNA, 576 bp, Escherichia coli
atgaatgctattccttatttcgactatagcatggcacccttctggccgtcttatcagaacaaaatcgtcggtgtccttgagcgtgcgctgcgtgagcagtccggctcccgggtacggcggatcctgcttcgtctgccgtgggaacatgacaacacctttagttgcagcagaacctggttagggatggactttattgaaacggtcagcgcgctgatgaatgcaacacccgggcgtgacctctgctggctcctgacccgccatccggaaaagccggaatatcatgtggtgctgtgcgtcagacaggagtatttcgacggccccgaactggaccggctgattctggatgcctggagcaacgtactgggcttcgcgtcaccgggggaagcggcaccgtaccagaaacagataacccgggatgtggtgctggacagtcgttcaccggactgcgaagacatcctcaaagatttgatctgggcgttcagtgatttcgcccgcgatcgtcgtggtgtgtgcgatccggaagcccgttgcctcgccggtaatcccggctatcccggatctgcaggaccgttctga

SEQ ID NO: 10270 - DNA, 237 bp, Escherichia coli
atgttgacctcaatgacaggccacgactgcgtgttgctgcgtgccgacgatcccctgatcgacatgaactacatcaccagtttcaccggtatgacagataaatggttttacaagctgatcagtgaaggccatttcccgaaacccatcaagctgggccgcagcagccgctggtacaaaagtgaagtggagcagtggatgcagcagcgaattgaggaatcacgaggagcagcagcatga

SEQ ID NO: 10271 - DNA, 159 bp, Escherichia coli; identical to SEQ ID NO: 8964

SEQ ID NO: 10272 - DNA, 1107 bp, Escherichia coli; identical to SEQ ID NO: 9004

SEQ ID NO: 10273 - DNA, 273 bp, Escherichia coli
atgaagcgcggcattcacttccgttgcacgggcaataatggatacggcatcgctccgggtgccgtccaggcccgcgccattgatggtgatactgccttcagtcacctccagcgcctgcaggctgccgtcggcattcatcacaggtttgcccgtggtgagcgtcgcgtgcggcgtgttgataaagccacagccgtcacaggtgataccatacgggttggcaaccatcacattcgccgctttgccggccacttccgtatagccctgcagcagtga

SEQ ID NO: 10274 - DNA, 132 bp, Escherichia coli
atgaatacgcctggcgtacattccaccgagagcgccggtatcaacggcaactttcggcacatcaccttcgcccttcagggctctgacacgaccatctgcagttacacggttagcgcctgcagtgacagttaa

SEQ ID NO: 10275 - DNA, 894 bp, Escherichia coli
gtgggtgagcttttcactggcgttcaccaccatggtctgttgtgctgcctgcgtacctgcaagacgtgcatctctggcgttgatgctgagatttttgccgctctgaagttgtgcgcccgctgcggtactcagtttgtctgcctgaacccggagggtgtcaccggcactggtttccccgtccagcgccactgttgtcacattcagcgtcatcgcagcatcgctgtgggtgaccgattttttaccggagctcagcgtctgcgcactgaccgtcagccctttgccgccggacagcacaccgttctgtgtcacatcctgcgccttcagcaccagtgcatcatcgctcaccagcaaacctgtactggtcagtttcccactggccatgatatccactttgcccttcgcgccagtgcggccgctctgggtaaagtcgcgggtattcatggtcaggggaccgccactgagcagggagccactgttgctgagcgttgtactgccgagcgtcagggtagctccctgaacggcgccactgttattcagcgtaccggcattgagtcccgcatgacttttcgccagcaatattccgtcctgcgtcagcgtggtggcgctggccgtgagattctgcccggcggttatctgtccctgtgttgtcagcgtgtcactggcgacagtcacgatatcgcgggccgcgttaatctggctggcggtatcctgtgtgatgtttttcgcggcaagcgttacatcccggccggcagtcagtttttcattctgttgagtgattctgccgccggcggtcaggctgaggtccttgtcgctgttaagcgttccattgctgagaacgatatctctccggctgctgacgctcaggttacctcccgctttatggtcgccggttaa

SEQ ID NO: 10276 - DNA, 807 bp, Escherichia coli; identical to SEQ ID NO: 7671

SEQ ID NO: 10277 - DNA, 198 bp, Escherichia coli
atgactgtatttctcatggccgttttctatggcctcttaaaaactggctctctcattgccctacttgttgatgcctataaaggctggaccttgttctggaagaactatgatcgactcccccatatctaccgttcgcaatggcgatatcagcgacgcttcattctcaaaagaatctggaaacgcatcagaaccggctaa

SEQ ID NO: 10278 - DNA, 285 bp, Escherichia coli
atgaaggcagaaaatgcccgtcaggttcaggggctgatagaactagagaaatttaaccctgaaacactgtgctcgggcgagagctggatggcaccttcagccagtgaagtcagcgtggtccgggcgctgatcccgctcacagatatccagctggccaaccggctagatgtggacgagcgcaccatccgtaagtggaaatccggcgagaccagaatggtgttcaccacctggtgctgtctgtgctggctggccgggttggggatgctgctggaagaaccggcttag

SEQ ID NO: 10279 - DNA, 1134 bp, Escherichia coli
atgcacttttatgtggatgaaacaggccagactggccgaaacctttttgacaaaacccagccaatcctctcctacggagtactgtcctcagaggctgacctagataaggttgctgaagcggatcttgccgcattacgcaaaactctgggcgtggagcgcctgcacgctgcggaactgggcgtgcaccgcctttcagaagttgtggatacgctgctggtcctgcagaaaaatcaccggatacggtttgatatctggcaggtggttaagcgcgatcacgccattatttcgttcttcgaccaggtgtttgatcagggactgaatccggttgtgccctggagtgcctactggacccctctgcgctatcccctgctgctgaatctgtctaatctgtttgatgatgagctggctgaaaaagcgtggcgtgcccgtcttgaggctcatgatgaacgttcttgctcattattcagtgaggtttgtggagtgctgcttcagcgcgttcactctctgggtgatgcccgttcagttgaactcattaccgatgccctatcttgggcgatggtcaactttgatgagctggggtacaactgcaaaaccaataaggaaaagttgcagatcatgcccaatatgattggttttcagtccgttttgcacgggatctgctctcgtctgggggcaccgaaccggaaagcagatatcattgttgaccagcagtcacagttcaacaccacccagcgggagttgaacgagttttactaccagatccgcgaacagccgtgggcactggggccgggtttgcctgtcatggatatgaagaacatgccagcaaaaccgcttgtcttccagtcgggaacgatgagtgccgggctggaactggttgatatttatctctggatcttcaaacgatacatggaacggaaggaactgaccaaacccctttcccgcctcgtctacaccaatcttaaaacagcgagaactgacagtgtttctctgcagtcagttgcaaagaggtttaaggagttttttgaaaaactttctgaaccaaccgcagaaatgatagaaaaagcaaatgaactcagggccgtggaagaaacgcgccgtcttgcccatcgtgtacaaagtgtgtcgcaatcctga

SEQ ID NO: 10280 - DNA, 3120 bp, Escherichia coli
atgtttggaaaacttctgaaaagtgtctcatggcaggtgagagctgaactccgacggagcctgaagtcgaaccgggattacaaaaaacttcgctggaacccggtggagagaatacttgtttcctgctccacccattacgtccgggctatgctggttctatggtccgcagccttcggggctgttggcgtggtcgaatattttcgccctgtattgctacctttcgctgtgcagcattttaagggcattaccaagctttcagattggatgtctaatttactgggtagccagttgactataatcggtattgtatttccgctggttgtggggcttataagtgttttatttcaaaagaaatcagcaaggatccatattcagtccgcgtatcaacttcattccggatatatgtttgcgggcctgagtggtctttcactggctgcatttgtcgtgctgggcggtatgacgttatctataggtgacggatatcttaatacttcttttgccgtaacagcttttgtgtggatgcttttcaatattattctgtctatctggttcttcgtctccagtctgaatgtcctggatgagagcaaacgcgatcgactaatgaataagttttttttatctcagatagtggatgactacattcaaaaagcatatattcaggcgtggctgcgttacccggggggtcatgtaggtcaaaattacctcggtaatattaaaatactgccttactcaatttctgagaaagacgatatgcttcatgttaaatctaatatcagtaaaggtgatgttgttactgatatttatataaggccttttttattcctactgagaaggctagaggcggtagatgggcaggatgcggaaattatcattctgccctcctttggtgttcgttctggtgaactgactttattgtcatcgagaaatgtcaagcctgtttcaggattgtggcggtggttattgcgtcgttgtattgtaacagggcgccctgagaacaaaagggatctggatgatattacttttgatttctttggtgaggcttacgatgcgcttaacgataaaaatattagcgtcttcagaacagggattgaacgattaacagatacctatacctctatcaaaagaagttacaattacgaggtcgataaaaattatctggatgaagtaaaagaatcaggttttagccatactttcagcgattcattccattatgaattgagaaagttttttcgtgaatccgtaaaatcaacggaatattcaggcgaatatttccgtgaatcgatgctcattccattgcgtgtgtacagaaaaacacagagcacgtgttttaccgatttcagacagtttttactctcgcttttcagggtgtggcatgtgttaaacgagtggaaagcgggactggggggccccctctcggccagccaggagctgactcaccaggcccttatccgcgggtatatcggactgtgggaaggctggagtatgaccacgatcactggcaaacccgggagtgaagattctactggccgcctgatgtatcatctgcataataccgccaggcttcttattccgtcagtggttgccgataatgcctcttccgtgcgatatgctcacgacgttctctgcctctggtttaatcagagccggtttacacgttactgggaggaagagtaccgctggcacagtttcttcctgactccggattatctgtccctgaaggagacagaaccgcagtggaatatgttactcaggggcagcaagtataaaaaagatgccgctttgtccattatgtttgcaaatgccttatccgatttgcggttgttaatggcagggtatcttattgctcattttgaatcgcaaaaaaatatagacttagccgatcttgtgaatcatctcattatgtctgaattatatgaagatagagatacacatgacacgctgacgcctgcattcagacgttctgtcgatatcattgacatgatactgagaattgagcactgcaatctgcatacgaatacaagctggtacagcgggttatcagaaaccattgaggttatgaactcatataatgaaaggccttacattcccgggcgtatgtatacaggggaatatgaagatttagggagtctctacgggtcgtttgccttgctggctataaagctcgcaaggcctgcggagcaggttacacagcgtgttaatgaagccctggctggaggggtgttttcctattccagtaaagacagaataatttctattcttaaacgactgaaacgagacccttcagttccctatgaaggttatatcatttcagaagcggattatgcaacgaatgtggtgttctttaatgatgttctggataaatacatagatgtattcagtcgtagtaaaacggcagatatcgttgctgctgaagtagaccaggctcgactgagaaacactgatgctcgtcttacaaatgaacttcctggggcattgtctgaagatgttctgcttaaatacttcacgtttactcaaaattcagaatgtgatcgcaactggctggcgatatatattcctgttggtgtttccaaagagtatgttgccagagagcttaatcagactgactacggagatttcccttcggtatcagaagtgaacagaaatattctccgcagactgcattatgtactgtggcagtcacaggctaaattaacgattgaggtcaataacctcgaaacgctgttaatggaagtcgcgcaacggtccgctgatcagaataactacattctggtgatctatggttcccgcttcagcgaggaactgagggaactggtctatcagccggaaaggcatgacgcgtttagcatacatgttgatgtatcggccaggggtagccgctctctgcccttcaggatcaataactgtcttatttaccttgtcctcaattccgaacaggagttttcgcttatggtcagtgctgaatcctttggtgaactcaggctgttcaggtatccggatggaacccttttcaataccttctaccgcagcagcgacgatccacttgaaggtgtgatgaaaacgctctgggaaatagagatggaaatcactgatactccagtggcgcggtttgaacatcgctga

SEQ ID NO: 10281 - DNA, 2139 bp, Escherichia coli
atggacattgaaatacgccactgcaataacatcgtacgagcacatatcaccctcactgccgataaactgaacattaagtttgcgccaaatggtactggaaaaagtacgctgtcacgggccataagctgtgcggcgcgggacgacattcagggactacaggcactgatgcccttccggctgcgcggagaaaaccccgatagcaccgggcccattgtcatcggtgctgacgggattggggacgtgatgtgcttcaacgaggagtacgtcagtcagtttacgttccaaccggacgagctcatcagtgacagctttaatattcttatccgcaatcaagcccatgcggaaagagagcgtgaaatagaagaaatgacgcaaaagatccgggctgttttcacggatcacactgagctgaactctctgatagaccatctacaggaactcagtaatgctttcaaatcaaccagttccgggatttcacgttcttcaaccggcatgagaggtctgtcaggcggaaataaaatacaccacattccggctggtcttgagaactatcaaccctacatccgcagtgaacgccgcgtggaatggattgactggcagacaaagggactcgagttttcgcccctttcggatggctgctgtccgttctgtaccggtgatatcacgggaaaggaagcacaaattcgccaagtcagagaggaatacgataaatccaccattaaaaacctgaccgctatcatcagactggtggaaaacctcggtaattacctgacggagagcgccagagaacgccttctggccattactatgcttcagaacggtccggaagccgaacatatcgagtacctagtggcgttgaaacgccagaccgatacgctgacagagaaactcactgcgctgagaggcctgaatgttttcagcctgcaggaacagcagaacgttcgggaggtgctcactgccaggttgattgacctgcagttcttccctgatctgcaatccgaactcatgcaggggatcaccgacagactgaacgcggcccttatggacctgataaaccttgccggaccgctgcagggaaaaattaaccggcaccgggacagcatgatccggctgatcgcacagcacaaaacaaacatcaataatttcctcacttatgcaggctataaatacagggtggatatagccggcgagggagagcagagaaaactcaggctacgacacatagattttgacgggtacgtcagcggcggtagccagcatctcagctatggagaacggaacgcctttgcgattgtgttattcatgtatgaatgcctgtcaaaaaacccgggactgattatccttgatgatcccatatcttcttttgataaaaacaagaagtttgccattcttgaaatgctgttcagacgtgcaagtggtgaatgcctgaagaaccggactgtacttatgctgacgcatgacgtggagcctgtgattgacacgctgaagtcagtcagaaggttgttcagtaatcaggtgaccgcctcctgcctgcgcctgtctgctggagtcatagaagaattacctgttaacgacggcgatatcatgacattcatgcagatctgcaaatccatcaccgcgtcagcagactgtgaggagatcattaagctcatctatcttcgtcgctactttgaaatcgttgacgaacgtggtgatgcttatcagcttctatccaatctattccatcgacgcgtcgccccgctggattatcgcgagcctgccgctgcgggctcgggctatcccaaaatggctcctgagaaaattcagcaggccttgcgggatatccgggagtatgtggacagttttgattacccgcgacttcaggctctcgtcagcagcccagatgaaataaaaaacttgtaccgtcgctgtcgtaacggctatgaaaaactgcaggtattccgtttactggaactggatcaggaccatccggtaatacgaaaattcgttaacgaaacgtaccacattgaaaatgagttcatctgtcaactagatccgtccagattcgatctcatcccggagtacgtgattatggaatgtgacaagctcatcgccctgccaccggcagcaaaccagagctcggttgcccgtatcgcttga

SEQ ID NO: 10282 - DNA, 456 bp, Escherichia coli
atgtattcggaaaatattgcggcttacgtcgggctggatgtgcataaagaaacgttggcggttgctattgctgcacctgaacggcttggcgaagttcgttattatggtacgattaacaacgaagcccagtctgtacgtcgattatttcagaaattgcagggactttacggaaacattctttcctgctatgaagctggcccctgtggttttgggctatatcatcaactcacagcgatgaatataaaatgccaggttattgccccttcccagatagtaaaatcaccgatagacaggatcaaaaatgatcatcgggatgcaaccgctaccgtttgcctcgttctggaaataaccttgctgatgggggtatggtttggtacgttgtggggatttgtatgtggttttcttcatggaaagacagtggtatgcaaccgggcgttgcatttgtctcaagcatag

SEQ ID NO: 10283 - DNA, 843 bp, Escherichia coli
atgtcagatatcacagcctcccgtccggaagtggtcaccgggcatacggacgttatttgctcaaccagtatccgccacattctggctgtacgaaagagtacactgctgcaaatcgacacacttatccggcaactggctgaaatctcagcaatgacagaaagtattggcggtaaaaccgcactggactgggcgatgaaacaggattttcgctgtggctgctggctcatggaaaaacctgaaacggcaatgaaagccatcacacgcaatctcgatcgcgaaatctggcgtgacctgatgcaacgttccgggatgctgagtctgatggatgcgcatgcccgggacacatggtaccggtcactggaatacgataactttccggaaatcagcaaggcgaatatcctgagtacattcgaacaactgcaccggagtaaggatgaggtgtttgagcgcggggtgatcaacgtcttcagagggctgaactggaattacaaaaccaattccccctgtaaatttggcagtaaaattatcgtcaacaacctggtgagatgggacagatggggatttcatcttatcagtggaatgcaggcagatcgcctggctgacctggaaagaatgttgcatctgctcagcggtaaaccgatccccgacaaccgggggaatatcaccattaatctggatgaccacatacggtccgttcagggtaaagaacgctatgaagatgagatgttcatcattaaatactttaagaagggatctgcacacatcactttcaaaaggctggagctgattgacagaattaacgatataatagccaggcactttccttctgtgctctcagcctga

SEQ ID NO: 10284 - DNA, 126 bp, Escherichia coli
atgaatctggaagtgaaagtggtgccggactcggaatcgaagattgcttctatcatgttgatattagtttattttgtttggtttggtgaaagatgtaccctcttttgtacccgcagtcccttttga

SEQ ID NO: 10285 - DNA, 1191 bp, Escherichia coli
atggcacttacagccagacaggtcgaaacagccagacctaaagaaaaagactataaactctctgacgaacgtggtttatatctgctggtaaaaaccacgggtgcccgctactggcggcttaaataccggatagcaggaaaagagaaaaaactggccctcggcgtctatcccgacgtctcccttgctgaagccagaatcaaacgcgacgatgcccgaaaaattatctccgaaggtggtgaaccgggcgaaaagaaacgaaaggaaaaactcactcagaaaatctctgccaccaatacgttccatgccctcgctacggaatggcaccagcataaatctttgtcatggtctgaaagttacgccagaagcgtactggaggctctggataaagatattttcccgtatctgggcaaacgaagcgttactgatatcctcccgctggaaatgctggaaattctgcgccgcatagaaaaacgtggctcgctggaaaaacttcgtaaggtgcgtcaatactgtaatcagatttttcgttatgccatcgccaccggacgagccactgtcaatccggcatctgaactgaccagtacgctggcggcgccaaaagctgcacatttcccccacctgagagcagatgagctccctgtttttctccggaagctcgctgagtatcatggcagtcctgttacccgcatggcgacaaatctgctgcttctgacaggcctcagaacgattgaactacggtccgctgaatggtcagaaattgattttgataatgccctgtggacaatccctgaaagccgcatgaaaatgcgacgtaaacatgtcgtaccactgtcacgacaggccactgacattctgctgcagctcaaaactttctccggacaataccggctggttttcccgggacgttgtgatatcaacaagccaatgagcgaagccagcatcaatatggtgctcaaacgtatcggttacgatggcagggcaaccggtcatggttttcgtcacaccatgagtaccattctgcacgaacagggctttaattctgcctggattgaaatgcagttagctcatgtggataaaaacgccatcaggggtacctataatcatgcccagtatctcgatggtcgccgtgaaatgatgcaatggtacgcagattacattgattcgctttccaggcaagagagtcagggttaa

SEQ ID NO: 10286 - DNA, 1044 bp, Escherichia coli
atgaacgacagattacgctttgaagtgaacgataaccaggggcgtttcgtatttccggatacctggtttggcccattactgggggagtttgaagaagtgctcgatgcatacgacactgatgaaatcagcgagacgagttacatcaacaaactcagacgccttgctcaacgggagcctgactttattgatatacacgctcatctggcatatgcatttctggagcagaatgccccgcgtaaggccctgaacgccgcgcttaaaggactggcggcaggtaatcgtctcatcccggaaagtttcagtggtgaaatcatctggatgcatcccgaaaaccggccttatttgcgcgcgctttatgcagcaattctcgcaaatgtgcacttacagcgtcatcaggatgcggttatgctcactgataaaatactggcatacaatcctgaagataatcagggtgcccgctggttgttgggttcagagctgttacgaacaggtgatcatgagcgagccttcagtgtactgaaaaaacatgctgatgaattttcaccttactggtatgaacttggtcttctgcattttcttaatggggaactggtaaaagctgcaactgcatttcgtcgcggatttgcggcaaatacttacatcgcggaaattctgtgcggaaatctgcatccatttcctcttgctgtatggcataactattctgccgggccggatactgccgaagattattatgcaacatactcaccattatggggacaatatccggaagcattgctgtttgtaaactggctctataaccattcctctgtgctgcatgaacgggcagaaatcattaaatgcgccgaaatgctgatgcaggaagatgatttcgaaatatgcgaaagcattttaagacagcagaagttgttgtgggaaagaattgatgagacactttctgaggaaattgtacagaaatgcagaaatattaacggtgaatatgtctggccctggatattgccgttttcagcggcaggaatgaaacacacaagcatccagcatcagtag

SEQ ID NO: 10287 - DNA, 1605 bp, Escherichia coli
atgaaaattaatcttccgttcatacactggtcacggattagcaatgataagcgcctcgtgttatcagtggttgtctttaccctttctaatatccttgtatcctcaggagcgcatctgatttaccggatattattctttaccctggtgattcttattattaaggcaatgaaatcgattacgttgcgtttgattcttgccttcccgttcacattactgaccgctgcagatatcagtatcagcctgtattcatggtgtacatttggcacaacatttaatgatggttttgcaatcagtatccttcagacagatcctgatgaagtaataaaaatgttcaggatgtatgtcgtttatgttatcgcatttattatcctctttttattgttcttctgttcagcaataaataaaacgtcctcattgccatcggaaaaggtcacggtaattacatttttattgttaattacagtaacgttatattcttccttacagtttgcgttgaagaaacagtatcaaataaatgaagttgatccttacatagtcgcttcccggtttgccacatatacccctttctttaatctgaactattttgcactggccgcaaaggagcatcagagattaatgacgattgctgataccatacctcactacgatctggtgattacggataacaacactgacgtatttgttctggtgattggtgaatctgcaaggactgataacatgtccatttacgggtattcgcgcccaaccactccagagcttcagaaacagaaatcacgactgaaactgttcactcaggcaatcagcggggcaccttataccgcccttgcggtaccgctggcattatctgctgataccgtgctgcatcatgatgttcgccattaccccgataatattatcaacatggcgaatcaggcggggttcgatacctggtggctcagtgcgcagtcagctttccgacagaacggaacggctgtggccagtatcgccatgcgggccagaaacaaaatttatgtcagaggctatgatgagttactgctcccacacctggctgaagcactgaacagtaatccggggagcaggaaactgattgttctgcatctgacaggcagccatgagccagtctgcagtaactggcccagagataaagccgtgtttaaaccgctggatacagaagaagtctgttacgataattccattcattataccgacagtttgttgggacaggttttcgccatgctggaaacgcgtcgggcatccgtcatgtatttttcagatcatggcctggagtatgacccgacaaaagagcatgcctattttcatggcggaataaaacccagccagcaggcttatcatgttccgatgtgtatctggtacagcccggctctgggagagcatgtcgatcgccagacggtgaacagtgttttttctactgcgtataatgattatctgattaatgcatggatgggcgtaaccagaccagctaaaccgaaaacgccggaggaggtgattacccgttggcaggggaaatcagatgtttttgatgcaaaccataacgtgtttgactataacgtattacgaaagaactttaataagcccctggaataa

SEQ ID NO: 10288 - DNA, 198 bp, Escherichia coli
gtgagattgctgttaaaagggctcgtcggaatggcactggcctggcttgttattggtttcgggatggagttactttttctcgccgatcgggttcatccggcattaagagtaatcgttggcctggggatgttattcctgctgataatgattgcgggcggtatgtgccgttctcttctgtcacgaaagaaaacatcatga

SEQ ID NO: 10289 - DNA, 267 bp, Escherichia coli
atgaaattacaccctccatttccctgtaaccagtgtggggcctgttgtcgtcatgtcaacagggcgggtgaaacgcaatgtctggatcgtggtgacggtatttgccgtcactatcagactgattctcatctgtgtgcaatttatgataaacgcccacagatttgccgggttgaagaccagtatttactgaattatcagtctcagtacagctggcaggagtttattgcattaaaccaggccgcctgccttattctgaataaactgtaa

SEQ ID NO: 10290 - DNA, 1572 bp, Escherichia coli
atgaatgtggaaaaatttgactggacagaagagttacatcagaccatggtgaagagcctggctacatcattcgggctggattttctgttgttaaatgatcgtaagggtggtgatgttgacactatccataatgtgcgtaatggcatttatgccacggaggctgagcgacagcggtatgaaggtcgtggcgactatgattctcatcattaccacagccatgagaactacattgcgacgaaccggaaaggaaagcgtgcacatcaggcagggactcttactgatgcatatacaggcgaagtgtttgcttcagacgataaaaaaaatctggatcatattatttccgctaaagaaattcatgatgatccggggagaattcttgctgaacgggatggtgcagaactggcaaatgacgcttcaaatctggcattcactcatgagtcgctcaataaatcaaagaaagcagactcaatggatgcgtttatttgcacgctgcagaaaaacagagaagatacgttaaggcagatagcagagcttgaatctcaggcaacactgacagaaaaagaaaagaaacgtctgataagtctgagaaaaaaagctgatgcagatactgagcgtatggaaagggctgataaatatgcccgggaaaaatacgaggccacgattaatcagagctattacctgagtagtaagtttgctactgctgtcgccagtgcttcacttaattccggttttcgtatggggacgcgacagatgctggggcttattcttgccgagatctggttcgaactgagggaacgaatcccgcatattatcagacagcaacggaactcattctgcgccggcaaatgcctgtccgaaataacgtcagcattacgtgcctgccaggaacgagtacaggaaaaattcagttcttttttaattgcctttaaagatggtgtcatcggagggatactgtcaggtattaccacaacgctgttaaatatattcctgacaacggaaagaatgattgtccggcttatcagggaaatgtggaacaacctcgttcaggcctttaaagtcctggtatttaacccggagggattatcgccggggcagttagccaaagcggtcactaaactgatagcagcaggtgtggctgttgccggaggggtgatgataaatgaggcgatggcgcagatccttatttttccatttggttcagagcttgctgccttttgtggtgcgctgacgacaggtattctcgggctggtgatgaattattatctcgaatacagcgaggttatgcagcgggtgtgggcatttctggacaaatttaaggataagttccggcggtcactggaatactttcaggcagtcaatgctgaacttgatcgctatcttgtagaacttactgcgctggaattttctgttgatgctgccgcgttaaatcacttttcgcttcatctggatagcgtaaacagtgagatagagcgcgtacttctgctgagagaagaagtcagccgacgagggattgcgttgccgtttgagtcaggaaatgtggcttctgttcgcgactggttaaataagcgatga

SEQ ID NO: 10291 - DNA, 1080 bp, Escherichia coli
atggcgttaccttttattattttgggtgtggctgccggcgctgcggcattcggcggaaaaaaagcttacgatggatatcaaaaaaagtcagaagcagaggatatcctcgaaaaagcaaaagagcgttacgaggagcataaaggaaaatttgagcaggctgaagctcagacatcatcaaaattaacaacgctcggaaataaagagcttgagattggtaaagatttcagtgagttcgacaggattgctgctgagcttctggcgcgtctggaaaaagagggcaataaagacctgaaactgagtgtcccgcaacataacatcaataagattcagaatctggccatttcagcgacagaatatctcagtacggtcgttgctgccggagtttccggggctgctgcgggttttgctgtgtatagcggagtgatggcatttgctgcggcttccacaggtacacccattgcagcgctttctggtgccgcggcttataacgcgacgatggcggcaattggtgggggctcactggctgcagggggcatgggaatggctggtggcgcaatggtattaggcaccgcagtggctgcaccgttgattgccattgcgggctgggcttacgacagacatgcgacgaaagctcttgaaaatgcccatcagtgtgccagcaaagttgaacgggcagttaagaaaatgaatctggcccgggagcattttgcaaaagttaatcaatacgttgatgaaattctcactgcactgaacagaatgcatgctgtatttattaaacactattttgatccgcttaaatccatgcattctgttattacagaacaacaggatatcaatgtatcagatgaaatcattatgcttattgaccatggatattcactggccgctattatgacggatattattacaacgccactgtttaaaccgcggaaacaggaaaatggtgaggctgtgataaaagataacgttattgaaatggaaaaggatgataatggaatgaatgttattaataaggaagagctggatgatgtactggccagttcggttgtgaaatttgatgatttttcatcccggagttaa

SEQ ID NO: 10292 - DNA, 897 bp, Escherichia coli
atggctgactcaacgagaaatcgctcagcggagcgtttgattgatatccttgttgaattacagaattatggcgtggtcagtcgccataatttgatgaaaaaatacaacatcactgagcgaacagcatatcgtgatctgaacatgctttctccctttattgaagcctgtggtgatggaaaataccggcttatttcagcaagaacagataaccagaacaaagaatcactgcacaaatctctggccaggttactggatactgatgcgatttttcctgaaagggatgaaaatttctggcagaaattagaaaacagggcaaccgaagagcatattcgtgttcagtttcataaccctgagcacaccatcagggatgatttaaggaaatatcttggtgttcttgaaaaagcgatccgcaacagtaatgtttgtcagattacatatgccggtaagaccagaatcgttcatccttataaattaactaatcagagaagtatatggtatttgctggctactgaaaagaacaagttaaagtcgttttcattagctaaaataaaatggctggatataaaaaaagaaaagtttgcaaagagtgagaaaatacagtcactgataagtgagtcatgtgacccgtgggtgagcgacaaaacatttgatgtagtgttgttcattcacagtaatatcgcccattattttttgcgacgggatttacttccttaccagcaattgctacacaaacatgacaatggcattacgctgtcatgcaaggctgcacataaaaatcaaattatcccgttgattttatactggctaccgaatgttgaaattattgaaccagtatggctgaaagaagccgtgttaacaatgttaggaaaataccttactgctgggaatgtttcctga

SEQ ID NO: 10293 - DNA, 738 bp, Escherichia coli
atgaaaaaggttattgctgtttcaacacttgcaatggcaggcatgttttcggcccagactctggctgatgagaacaaaactggcttttatgtgaccggtaaagccggtgtttctgttatgtcactttcagagcaacgtttcgttgatggtgaaggggcatgggcggataaatacaaaggcagtgacaaaagtgatacggtttttggcgcaggccttgcggtgggatacgatttttatcagcactacaatgtgccggtgcgtactgaagtggagttttatggccgcggtaacgctgaatcaaaatatcgtctgagttattgggaaagtgccggtggtgccgagtttgatgatgcacagaacaagctcagtgtaaacacgctgatgctgaatgcgtattatgatttcagaaacagcagtgcattcacaccatggatatctgctggtctgggttatgcacgggttcatcataaaacttcgtacatatataccgataacagcccggcaggcagtgaagtttattcagcttcagcgtcaaaatacgaaaacaacctggcatggagcctgggtgccggtgttaaatacgatgtgacgcaggatttcagccttgacctcagctaccggtatctggatgcaggggattccactctgacttataaagatgaggatggtgctaaatataaatcctctgttgatgtcagaagtaacgagtttatgttaggtgcaacatataacttctga

SEQ ID NO: 10294 - DNA, 216 bp, Escherichia coli
atggcggaaaatcgtgttgaggccaacgcccataatgcgggcggttgcccggcatccaacgccattcatggccatatcaatgattttctggtgcgtaccgggttgagaagcggtgtaagtgaactgcagttgccatgttttacggcagtgagagcagagatagcgctgatgtccggcagtgcttttgccgttacgcaccaccccgtcagtagctga

SEQ ID NO: 10295 - DNA, 447 bp, Escherichia coli
gtggcgttcatcattgatgtatttgccggatatatcgtgggatggtgggtatcatcgtccatggaaacgacattcgtgctggatgcactggagcaggcgttgtgggcccgtcgtccgtccggcaccatccatcacagcgataaaggctctcagtatgtgtcactggcctatacggagcgactaaaagaagcaaaactgctggcatcaacagggagtacaggcgactcgtatgacaacgcgatggcggagagcattaatggtctttacaaagcggaggtaatacaccgtaagagctggaaaaaacgtgcagaagtggaactggccacactcacgtgggtggactggtataacaatcgacgattgctgggaaggctgaggcatactcctccggcagaagcagaaaaagcgtattatgcttccatcggaaatgatgagctggcaacctga

SEQ ID NO: 10296 - DNA, 219 bp, Escherichia coli
gtggccagatgtacagtggcgcgcctcatggcggttatgggacttgccggtgttctccggggtaaaaaggtccgcactaccgtcagccggaaaaccgttgccgcaggtgaccgcgtaaaccgtcagttcgtggcagaacgtcctgaccagctgtgggtggctgattttacttacgtcagcacatggcagggcttcgtctatagtggcgttcatcattga

SEQ ID NO: 10297 - DNA, 582 bp, Escherichia coli
gtggctgacgcgagtattcgtactcctgataataagatcatattagagaacctgaactttcatgtttcgccaggcaaatggctattgctgaaaggttactctggtgcgggaaaaaccacactgcttaaaacattatcccactgctggccgtggtttaaaggtgatatttcttctcctgctgacagttggtatgtgtcacaaacaccgttaatcaaaaccggcttactgaaagagattatttgtaaagcacttcccctgtccgtagacgataaatcgttgagcgaagtactgcatcaggttggtctggggaaattggctgcgcgtattcatgatcacgatcgctggggagatattctttccagcggcgaaaaacaacgtatcgccctggctcgattaattttacgacgtccgaaatggatatttcttgacgaaactacctctcatcttgaggaacaagaggcaatccgcttactgcgtttagtgcgagaaaaactccccacaagcggcgtcattatggttacacatcaacccggtgtctggaacctggtcgatgatatttgtgacattagcgcggttatataa

SEQ ID NO: 10298 - DNA, 2373 bp, Escherichia coli
atgaagcgagttcttattcctggcgtcattttatgtggcgctgatgtggcgcaggccgtcgatgacaaaaatatgtacatgcatgtttttgaagagatgacggtctatgctcctgtccctgtacccgtaaacggcaacacgcattacaccagtgaaagcatcgagcgtttaccgaccgggaatggcaatatcagcgatctgctgagaaccaaccctgcggtacgcatggattcaacgcaaagtacctcattgaaccagggagatattcgcccggagaaaatctctattcacggtgcgtcgccctaccagaatgcctatttgattgacggtattagtgcaacgaataacctgaacccagcgaatgagtccgatgccagtagtgcaaccaatattagcgggatgtcacaggggtattatcttgatgtcagcttactggacaatgtgacgctttatgacagttttgtgccggttgaattcggtcgcttcaatggcggggtaattgatgcaaagatcaaacgcttcaacgctgatgatagcagcgtgaaactgggttatcgcactacgcgttcggactggttaacatcgcatatcgatgagaataacaagagcgcatttaatcaaggttcttcaggaagtacttattactctccagattttaaaaagaacttttataccttgtcgtttaatcaggaactcgctgataactttggcgttaccgccggtttatcgcgccgccagtctgatatcacccgcgcggattatgtttcgaatgacggcattgtcgccggcagggcacagtataaaaacgttatcgatactgcattgagcaaatttacctggtttgccagcgaccgctttacccacgatttaaccttaaaatataccggctccagccgtgattataataccagcacctttccggagtctgatcgcgaaatgggtaataaatcctatggtctggcatgggatatggatacccagctcgcatgggccaaactgcgtaccaccgttggttgggatcatattagtgattatacccgtcacgatcatgacatctggtacaccgaactttcatgtacatatggtgatatttcagggcgttgcacccgtggcggattaggacacatttcccaggctgtagataattacaccttcaaaacacgcctggactggcaaaaattcaccgtgggtaatgtttcgcatcaaccctacttcggcgcggaatacatctattccgatgcatggactgaacgccataaccagtctgaatcctatgtgattaatgctgccggaaagaaaactaaccataccatttaccataaaggtaaaggcagcctgggaattgacaactacacgctgtatatggcggatcgcattagctggcggaatgtgtcgttaatgcccggtgtgcggtatgactatgacaactatctgtcaaaccacaatatctccccgcgatttatgacggaatgggatatttttgctgatcaaacctcaatgattaccgccggttataaccgttactatggcgggaatattcttgatatgggattacgtgatatccgcaatagctggacggaatcggtatcaggcaataaaaccctgacgcgttatcaggatttgaaaacgccttataacgatgaactggcaatgggattgcagcagaaaatcggtaagaacgttattgcgcgtgcaaactatgtttaccgtgaagcgcatgatcaaatcagcaaaagcagccgtaccgacagcgcgactaaaaccaccattactgaatataacaacgatggcaaaaccaaaacacattcgtttaacctcagttttgaactggccgaacccctgcatatcagccaggtagatattaacccgcaaattgtctttagctatatcaagagcaagggcaacttgtcgttaaacaatggttatgaggagagcaataccggtgataaccgggtggtttataacggtaatctggtctcttacgatagcgttccagtggcggattttaataatccactaaagatctccttaaacatggatttcacgcatcaaccgagcgggttggtgtgggcgaatacgctgacctggcaagaagcgcgtaaagctcgcattatcctgggtaagacgaatgcgcaatacatcagcgaatattcagattacaagcagtatgttgacgagaaactggatagcagcctgacctgggacacccgcttgtcctggacgccacaatttctgaaacaacaaaacctgacgatcagtgccgatattctcaatgtactggatagcaaaaccgctgttgatacaacgaataccggcgtggcgacctacgccagtggccgtactttctggcttgatgtcagcatgaaattttaa

SEQ ID NO: 10299 - DNA, 1872 bp, Escherichia coli
atgttttttagtcaaaatgcagtgctgaatgcgattgtggaccttaagaaggtccacccttttttcggaattactttccttgtatgcaaaaaaaacaatcttcctatcggaactagcacacaatttgctttagatgcaaaaaataagtgttttcttgaagaagtacataagattgatcctgattcagaatatttttatcaaccctttacataccagacatcccacgagtggctcaataataattatgcgtcatctggattacaagcgataaatacacaaactttttctgcagcatttattcatcctaaacgtactcagcaatggggatgggctgataattacctacatattctaaaagaccatccttcagtcaagaaaaataaaatctcattgatatcattatgtatttggttatataaatttaatgagtttcctcaaaacacatccttcgaaagtataatctccacttttacacaagaatgtaacatatcagacaaagagcttgaagaattatttttattagaagaatgcaacataaatgaattattcgatgatgaatgcataacttgggataaaataaagggtaagttatcattaccccccgattccaagcctgaaaatggcgggactctatccttgctctctatcgaaaatattgggcctgctaaaaaactagtcatcgaaccaaagacacggcttaatattattacaggtgataacgggcttgggaaatcctttattctcgaatcagcttggtgggcattaactaatacttggacagatcgggtcgcctatcctgacccaagactaagaggaaaaaaaatcaacctgacttattcaatcaaaggtaatggtgaatttaagtcaggtaattgtgtgaactttgattgggacaattttaattggccgatacaaacggacagacctacaattcctggtcttattgtttatgccaaagtagatggttctttcgctgtatgggacccagccagaaaatattctactcaatctacgtttaatgaaaaagaaaaattcgtttttaaaagcaaggaagtatgggacgggcaagatgggattggtgttctcgaaggtttgatcagagactggatgacttggaagaatgatagtaagaaccagcatttcaaacattttgaaaaagtattagaaaaactatctcctccagacttgggggttttgaaaccgggtgaaccagttagaattcctgacgatccgagagtcattccaaccttagttcatccgtatggagagatcccgataacaaatgcctcagcaggtgttagaagaatagttgctttggcatatatgatcgtgtgggcatggaatgaacatgtcgttatttctgagatgatgaatattcctcctcaaaataatatggttgtgcttgttgacgaattagaagctcatttacatccaaaatggcaaagagcatttttaccatctttaatagcacttgataaggtattttcaagtgagttgaagatccaatttatcatcgctactcactcccctttagtaatggcatcctctgaggaagtattcgatatcgagacagatagcttatatcacttacaattggataacaaaggtcatataacacttgatgaattagacttcgtcaaatatggagatgtttcctcttggttaatgtccccaatttttgaattacgacaagcaagatcgcaagaaggcgaagcagctatcgaggatgcaaagaaaatacaggcacttgaaaatcctgatatagaaatgatagaagatataacagttagattgcgtaaatatctttcagccacagacaaattttggcctcgttggattatatttgctgaaaggaatggggttaagttatga

SEQ ID NO: 10300 - DNA, 909 bp, Escherichia coli
atgactaaaaatatagagttgaacttcgaccatcctgattctgaatcagcggaaaatacagaaaatctaaaaaaatattgggaaggattgacttcaactggagctaaatgggagatatacaatggagattcagcccagataataaaagatcttccaagcggtagcattgattgtgcaataacatcgccaccctatttttggcttagagactatggtgttgatggtcaaattggcctggaagattcagtacaagagtatgtggatgctattgctgatgttatggacactgttaaagaagcccttaatccagaagggactctgtttatgaacattggtgatacatattattcaggaaaaggtcaatctcagggtaaggacagaaaaagtaataaacgccgttttggtcttagagctgtagataaaagcggtggaatgggcataggattacaaagaaaatccatgattggaattccatggcgagtagccattgaaatggctactcgtggatgggttatccgcagttcaatcatttggcatcgagaaaaatgtctgccggaatctgtgaaagacagaccaagccgaagctatgaatatgtattcatgtttgttaaaagcagaaaatattattttaacaaacaagaattaatagagcaaaaagtcgaagaggatatgtggactataccggcaagaccaaaaagcggaggtggccttgatacagcaccataccctgatgctttggtcgagagatgtctaaaaattggatgcaaacctaatggcaccgtactggacccatttttaggtagcggaacaacttgccgtgtagcagcacaaatgggatattcatcgattggtatagatctcaatcatgaattttgcgaatattctgcattaaacatggagaacatttaa

SEQ ID NO: 10301 - DNA, 714 bp, Escherichia coli
atgtatagagtaaatcaaatcatcaaaactataagcaacatgaactcttatgctccctataatcagataaataaaaaaagtaacttacttagaaagattcaagtatattcattccttacatctctcttttctcttattttaatggtcataatggccgttatctacaaagtctttgaccttcccaaacaaccatttattttacctgcattcgtcctgtatgccctcaattcaattgccggtataatatacttatttacccctataattcctggcgtgaagttcatgctcaacttcaaaaaggaaattttcaatgacctgatttgtgaaattgataatgatgaacaaaacatagaaaaactgatgccttactcgttgactgaattaaactattcaatagattggttaaatataaagatacaaagagttaaatcaaggataaatgatttctttggagaaaaaactgctgttttatcaataattggattagcatactctgcagttcaaggttttggtgggttagacaaattaggtgataccataacaaaagggctcttcaattcaggcacagcaaatacattaatcgtatttggactggcttttcttttagggttatcacttggagcattagcacttaaaaatgtagcaaatcatttgcaatatctgaaagagatgattgaattagctaaaaaaataaaagaaaaagaaaatatttga

SEQ ID NO: 10302 - DNA, 174 bp, Escherichia coli; identical to SEQ ID NO: 5951

SEQ ID NO: 10303 - DNA, 195 bp, Escherichia coli
atgttctacatgttcttcggcaacgatcatggaggcgagcgcggagctctgctgtacggactaatcgggagctgtcggttgaacggtatcgatccagaagcgtatctgcgccatatcctgagcgtactgccggaatggccctccaaccgtgttgacgaactgctgccatggaacgtagttttcaccgataaataa

SEQ ID NO: 10304 - DNA, 276 bp, Escherichia coli
gtggcttctgtttctatcagctgtccctcctgttcagctactgacggggtggtgcgtaacggcaaaagcactgccggacatcagcgctatctctgctctcactgccgtaaaacatggcaactgcagttcacttacaccgcttctcaacccggtacgcaccagaaaatcattgatatggccatgaatggcgttggatgccgggcaacagcccgcattatgggcgttggcctcaacacgattttacgtcacttaaaaaactcaggctgcagtcggtaa

SEQ ID NO: 10305 - DNA, 1344 bp, Escherichia coli
atgaaagtgaaggcggttcctgctattacattctatttaagtttaatgctgacaattttagtgttactgtttggtaatgaaccaaataaatcacaatatatccttgttatagcaacgataacagttttttatatcgcatatatcactaataaaataacttctccggccagccttctcgttatatcatcttttgtgtttttaggttgtcgccctttattatctttgtttgcaaactatgattataggattgccgattggtttattgaaggatatatggatgacgatgtgattttggctaactatgctataacactaatgtattatggttatacattgggactaattctatgcaaaaatactgaaaaattttatccgcatggtccttatcctgaaaaacaattgctaaaaataaagtttcttttgactttattttttctgggttcgataggtatggttgtaaaagggatattcttttttaactttatagaatctaatagttatgttgatatttatcaatcaaatataacaacgccaataggttatgattttctatcttatttattttattgttcttttttccttatatgtgcgtttcatatacagttcagaacaaataaaaaatttctttttattgcgatatgcattgctgcatttagcaccttgaagggtagtcgtagtgaagctataacgtttcttttaacggttacatgtatatattttaatgaagtaaagacaagaaacttacgtctgctgattacaatgatttttgtttttagcgtcatttttgtgattagtgaatttatctcaatgtggcgcactggagggagtttttttcaattaatgcagggtaataatcctgttataaactttgtatacggcatgggagtatcatatctttccatttatcaatcagtaaaactacaactattgtcagggggatataatgttacctatctattcagccagttaataataacttgctcgtcaatatttaatgttaaattgagcttgccggaaataagctatagccatttggcctcatacacagcaaacccagaactatataatcttgggttcggacttggggggagttatttagcagaatcgtttttagcatttggtctgattggatgtttcattataccctttttacttttacttaatttaaatgtattggaaaaatatacaaaaaacaaaccaattatatattttgtttattatagtgtgttgccacctatattattcacaccaagagagactttgttctatttcttcccctatcttgtcaaaagtatatttgttgcttttttagttacattatacatccagtataaaaaggattga

SEQ ID NO: 10306 - DNA, 1239 bp, Escherichia coli
gtgcacaattatttaaggcttaaagataaaataaaaaacgtatttttagggttgtatatattgcagttatttaattatatcgcgccattggtaattatccctatcctgataaaatatattgggttgggggaatatggggaattggtctatattacatctatttatcaaatagtggctttgattattgattttggctttacttacacaggacctgtggttgctgcgagacatagatgtgagacccaaaatttacagcgctattactcaatagttgttcttttaaaatcattgctttttataattgcattaacatgtgtatttttattgtgcagattaaatatagtccacttgtcattttttgggtttttgtcaatttttctatgcactattggtaatatattatcgcccaattggtttttgcaggggattggtgattttaaaaaactttcatactcacaagtaatagtgagaataacattgtttatcatacttcttgtttatgtctgtagtggcggagataatgtttttatcctaagttttttgcaaaatgcaacattactcatatgctgtatatacttatggccaaatattcatattagccatgttgttcatcttaaacctaatgaatgcattgtggaatttaagaaggcaggaaatgtttttattggcgtaataggtacgattggttacaatggtctaattcctgtgttaattggaaacctttgcggtaatacgagtcttggtgttttttcaatcgttcaaaaaatgacaacagcatgtcaaagtctaattaatccaatatcacagtatatgttatctcaagtttcagaaattaaacctcaagataaactgttttattatagaattaaaaaaagtttttttgtgcatttaacaattagcataattgcatgtttatgttatatgggattagggcaatatgtggcgacttttataggtaaagttgacgtttcatttgttattattttatttgcgtcaataattaccattttttcatctttaaataatgtccttggtatacagtttcttataccgacagataatgtaaaaatactacgaagtataaatgttatggcgggaattattgttgttagtttgtcctggctgttaatatcacgctttgacattctggggggggttttattaaacctaattggtgagtttcttgtattcagtatgctagcttttattgcccatcgaaagtggggagcgagagtataa

SEQ ID NO: 10307 - DNA, 1221 bp, Escherichia coli
atgaaggtcggcttctttttactgaaatttccgctgtcgtcggaaaccttcgtcctcaatcaaattaccgcgtttattgatatgggatttgaggtggagattgtcgcgctgcaaaaaggcgacacacaaaacacccacgcggcatggacgaaatacaaccttgctgccagaacccgctggttacaggacgaacctgcgggcaaagtggcgaaactgcgccaccgcgccagccagaccttacgcggcattcatcgtaaaaatacctggcaggcgctcaacctcaaacgctatggtgctgagtcgcggaacctgattttgtctgccatttgtggtcaggtcgcaacaccgtttcatgccgatgtgtttatcgctcattttggccctgctggggtaaccgcggcaaaactacgcgaactgggtgtcattcgcggcaaaattgccactatcttccacggtattgatatctccaggcgggaagtgctcaaccactacactcccgaatatcagcaactgttccgccgtggcgatctgatgctaccgataagcgatctgtgggccggaaggctgcaaaaaatgggctgcccgagggaaaaaatcgccgtatcgcgcatgggcgtggacatgacgcgctttagcccgcgtccggtgaaagcacctgcaacgccgctggaaatcatttccgtcgcacgcttaaccgagaaaaaaggcctgcatgtggcgattgaagcctgccgtcagttgaaagagcagggcgtggcatttcgctatcgcatcctcggcattggcccgtgggaacgacgcctgcgcaccctcatcgaacaatatcaactggaagatgtgatagagatgccgggctttaaaccgagccatgaagtgaaagcgatgctcgatgacgcggatgtcttcctgttgccatcggttacaggtgcggatggcgatatggaaggtattccggtggcgctaatggaagcgatggcggttggcattccggttgtttctactctgcacagcggaataccggaactggtggaggccgataaatccggttggctggtgcctgagaacgatgcctgtgcactggcgcaacgactggcggcgtttagccaactggacaccgacgaacttactacggttgtcaaacgtgcgcgcgaaaaagtcgaacacgattttaaccagcaggtgatcaatcgagaactcgccagcttgctgcaggctttatag

SEQ ID NO: 10308 - DNA, 1281 bp, Escherichia coli
atgaaattacttattctgggcaaccacacttgcggcaaccgcggcgacagcgccatcttgcgcggcttacttgatgccatcaatatcctcagtccacatgccgaagtggacgtaatgagccgctatccggtcagttcttcctggctgctcaaccgcccggtaatgggcgacccgctgttcctgcaaatgaaaaaacacaacagcgcggcgggcgttgtcgggcgcgttaaaaaagtcctccgtcaccgctaccagcaccaggtactgctctcacgcgtcaccgacactggcaagctgcgtaatatcgccatcgcccagggattcactgacttcgtgcgactgctgtcaggttacgacgccattattcaggtcggcggatcgttttttgtcgatctctacggcgtgccgcagtttgaacatgcgctttgcactttcatggcgaaaaagccgctgtttatgattggtcacagcgtcggcccgttccaggataagcaatttaaccaactggcgaactacgtttttggtcactgcgacgcgctgatcctgcgcgaatcggtcagccttgatttgatgaaacgcagcaatatcactaccgcaaaagttgaacatggcgtcgataccgcgtggctggtcgatcaccacacagaagacttcaccgccagctatgctgttcaacactggctggacgttgccgcacaacagaaagcggtggccattaccctgcgtgaactggcaccgttcgacaaacgcctcggcaccactcaacaagcgtatgaaaaagcctttgccggggtggtcaatcgcattctcgacgaaggctatcaggtgattgcgctctccacctgtacgggcatcgacagctataacaaagacgaccgcatggtggcgctcaatctgcgccagcacatcagcgatcctgcccgttaccacgtggtgatggatgaactcaacgatctggaaatgggcaaaattctgggggcctgtgaactcaccgtcggtacgcgcctgcactccgccattatctcaatgaactttgccaccccggcgattgccatcaactatgaacataaatccgctgggattatgcaacaactggggctaccagagatggcaattgatatccgtcatttattagacggcagcctgcaagcgatggttgcggataccttaggccagcttccggcgctgaacgcacgacttaacgaagctgtcagtcgcgaacgtcagacgggaatgcagatggtgcaatctgtgcttgaacgcatcggggaggtgaaatga

SEQ ID NO: 10309 - DNA, 384 bp, Escherichia coli
atggcgcgactgtcgcaactggcggggaacctgaggatcgtcttcccgcccactgtaacgatcgctgtcctgttcgcgttgtttcagcagggcctcagcctgttcaacttcacgacgcagtttttcagaacaggtaccgaacagcatccggcgcagtttttctatctgagcccgcagatgttctatttcccgttcatcttcttcgatcttttcttcggcacgtgccagtgcagagcgcaggaaggtcttcgtctcttcaaccagactcagttgctggtctttctgacggagctggctttccagttctgcaatgcgaatgaggtatttctgactcatggccgtttttataatgcggccaggcattttttacaacattgtcagtga

SEQ ID NO: 10310 - DNA, 258 bp, Escherichia coli
gtgaatttatcccgtcagggacagcgcaccttacatgtgctcgcaaaaagtggacgtattgtgcacgtccgcgatgcatctggtcgcgttacctctgttgaatgctacagccgcgaagggctgttgctcgccgactgtactctcaccgttttcaaaaagctcaaaacccaaaaactgatcaagtccgtcaacggtcagccttaccgcatcaacaccaccgggctgaacaacgttcgctcacagcccgataaccgttaa

SEQ ID NO: 10311 - DNA, 744 bp, Escherichia coli
atgaaccgtcccttttccgggttgaatcgcgcagagtgcgtctcgttaatgaagcgttacccgttaagcatcggtattcttgccggccagtggctcaaactcggtgagtacctgcaaacgcttcgcgcgcttgaacaacccgttcttcacctggatctgatggacgggcatttttgccctcagttcaccgtcggaccctgggctatcacgcaattaccagcgcagataattaaggatgttcacctgatggtggataatccctggcccgtcgtgcaggcaagcgtaaaggcgggcgcgcactgcgttacgttgcaggtagaaaactcgccgcatctgcaccatatgctccactggctaggtgagcaaaatacggaagtttccggcgccacaatgccggtgttgcgagggattagcctgtgcccagcgacaccgctagaacacattctgccggtcattgaagacgttgaaatcgtacaaattctggcggtcaatccgggttacggtagcaaactcagcaagcccgccttactgaggcgcatcgctcaggttgtcgcattactcaatgcgtccgggaagcgggattccattctgctggccgttgacggttcgctaacactggaagaactgccggagataatcgccagcggcgttgatcgtgttgtatccggcagcgctctcttcaggaacgatgctctggcggaaaatatctcccgctggcttactataattcaatcagcgaaatga

SEQ ID NO: 10312 - DNA, 291 bp, Escherichia coli
atgcatgtcactctggtagaaattaacgtccacgacgataaagtcgatgaatttatcgacgtctttcgcctcaatcatctgggatcggtgcgtgaagaggggaatctccgcttcgacgtattgcaggatccggaagtgaagagccgcttttatatttatgaagcctataaagatgaagccgccgttgcgttccataaaacaacgcctcactacctcgcttgcgtggaaaaacttgaatcgctgatgagctgcccccgaaaaaaacgcatcttcaatggattgatgccataa

SEQ ID NO: 10313 - DNA, 876 bp, Escherichia coli
atggctgatttagatgacatcaaagatggcaaggatttccataccgatacgccgcagcgcaacaccccgttcacgcttaagggatgcggcgcgcttgactgggggatgcagtcccgactgtcgcgcatttttaatcctgagactggaagaacggtcatgctcgcgtttgaccacggctattttcaggggccgacaacgggactggagcgtatcgatattaatatcgcccccctgttcccgctcgccgatgtgctgatgtgtacacgcggtattctgcgcagcgtggtgccgcctgccactaacaagccggtggtactgcgcgcctcgggggccaactctattctcaccgagttaagcaatgaagcggtcgcactttccattgatgatgccgttcgtctcaacagttgcgccgtggcggcgcaggtgtatatcggcagtgagtatgagcaccagtcgatcaaaaatatcattcagttgatcgatgccggtatcaaagtcggcatgccgacgatggcagtaaccggcgtggggaaagacatggtgcgcgatcagcgctacttctcactcgccacgcgtatcgccgcagagatgggggcgcagatcatcaagacctactatgtcgataaaggttttgagcgcatcgccgcaggctgcccggttccgattgttatcgccggtggtaaaaaattaccggaacgcgaagcgcttgagatgtgctggcaggccatcgaccagggcgcatccggtgtcgatatgggacgtaacatcttccagtccgaacaccctgtcgccatgatgaaggccgtccacgcggtggtacatcgtaatgaaaccgcagaccgcgcgtatgaactctatctgagcgagaaaaactaa

SEQ ID NO: 10314 - DNA, 1023 bp, Escherichia coli
atgactattcagagcattaaaaaaattgccgtaatcagtacccttagcctggcggcgttcactctcaacgcttatgccgcagagcgaatcgcatttatcccgaaactggtcggcgtgggattctttaccagcggcggtaacggcgccctagaggcaggcaaagagctgggcgtcgatgtcacctacgatggcccgacggagcccagcgtgtccggccaggttcagctcatcaataacttcgtcaaccaagggtataacgccattgtggtttccgccgtgtcgcctgatggtttatgcccggcgttaaagcgtgccatgcagcgcggcgtgaaggtgctgacctgggattccgacaccaagccggaatgccggtcgtactacatcaaccagggcactcctgcccagttaggcggcatgctggtcgatatggccgcaaatcaggtcaaaaaagagaaagccaaagtggccttcttctactccagtccgaccgtgaccgatcagaaccagtgggtgaaagaagcgaaagacaagatcgccaaagatcatccgggctgggaagtcgtcaccacgcagtttggttataacgacgccaccaaatcgctgcaaaccgcagaaggcatcattaaagcgtatgccgatcttgacgccatcatcgcaccggatgccaacgctcttcccgctgctgcccaggccgctgaaaacctgaaaaacaccagcgtggcaattgtcggattcagcacgccaaacgtgatgcgtccttatgttgaacgcggcacggtgaaagagtttggcctctgggacgtggtccagcagggcaagatctccgtgtacgtggctgatgcgttgctgaaaaaaggcgacatgaataccggcgacaagctggatattccgggcgtgggccaggtcgaggtctcgccgaacagcgtacagggctacagctacgaggcgaagggcaatggcattgtgctgctgcctgaacgcgtggtgttcactaaagagaacatcgacaaatacgatttctga

SEQ ID NO: 10315 - DNA, 999 bp, Escherichia coli
atgactcgtttacatcgttacggctgggaactggcgctcgccgcgctactgatgattgaaattctgggattcggcgccctgaacccacgcctgttggatctgaacgtcctgctgttcagcaccagcgactttatctgcattggcattgtcgccctgcctttaaccatggtgatcgtcagcggcgggatcgacatctcctttggctcgacgatggggttgtgcgccatcgcgctgggcgtgatgttccagggcggcgtaccgctgccgctggccattattctgacgctcgcgctgggcgcgctgtgcggactgatcaacgccggattgattatctacaccggtgtgaacccgctgatcatcaccctgggaacgttatacctgttcggcggcagcgcactgctgttgtcggggatggcgggagcgaccggttatgaaggtatcggcggcttcccgcagggcttcaccgattttgccaatctcgatgtgctggatctgcccgtccccctgatcttctttctcgtcagcgtgatctttttctggttgctgatgcaccggacccacgccggacgcaatgtcttcctgattgggcagagcccccgcgtggcgctgtatagcgctatcccggtgaaccggacgttgtacgcgctgtatgcaatgaccggctttgcgtcagcggtcgcggcggtgctgctggtctcttactttggctctgcacgttccgatctgggtgcctctttcctgatgccagctattacagcggtcgtcctgggcggcgccaatatctacggcggctccgggtcaattctcggtactgccatcgccgcgctgttggtgggctatctgcagcagggattgcagatggctggcgtgcccaatcaggtatccagcgccctctccggcgcattgctaattgtcgttgtcgtaggtcgttctgtcagcctgcatcgtcagcaaatcaaagactggctggcgcgtcgtcgcgctatccggcaggcctga

SEQ ID NO: 10316 - DNA, 1047 bp, Escherichia coli
atgctgaaatttatccagaataaccgcgaggccaccgccctgttagccgtgctgctgctgttcgtgctgccagggatgctggacagccagtacctcagcgttcagacgctgacaatgattttcagcagctcccaaatcctcatgctgctggcgatgggctccacgctggtgatgctgacccgcaacatcgacgtgtcggtcggatcgatcaccgggatgtgcgccgtgctgttgggactgctgttaaacgctggatatcccttgcctgtggcctgcgtcgcgacgctgctgctgggactgctggcggggtttatcaacggcgtgctggttgcctggctgaagatcccggcgattgtcgccacgctgggcacgcttggcttatatcgcggcgtcatgctgctgtggacgggcggtaaatggattgaaggattaccggcacaacttaagcaactctccgccccggttttcctcggtatctccgccattggctggctgaccctgctgctgatgttgctgatggcctggctgctggcaaaaaccgcttttggtcgctgtttttatgccactggggataatttacaaggcgcgcggcaactgggcgtgcgtaccgaagccattcggattctggccttttcgctcaatggctgcatggcagcgctggccgggatcgtctttgcctcacagattggctttatcccgaatcagacgggaaccgggctggaaatgaaagccattgccgcctgcgtgctgggaggcatcagcctgctgggcggttccgggacgatcattggtgccgtgctcggtgcctatttcctgacgcaaatcgacagcgtgctcgtcctgctgcgcattccagcgtggtggaatgactttattgccggtctggtcctgctggcggtgctggtatttgacggccggttgcgctgcgcgctggaacgcaatatccgtcggcaaaaatatgcccgcttcacgccgacgccccaaccgcgtccgtcggcaaaaaacgccgactctgtgcgtactgccaaaaaacgtgaggttgcctga

SEQ ID NO: 10317 - DNA, 1554 bp, Escherichia coli
atgcaaatgagtcaagaaaagatcgccccactactcagcgcgcagtctgtctgcaagcagtattccggtgtcaacgtcctgaaaggaattgatttttttttatgcaaaggcgaagttcatgcgctccttggtgggaatggcgccgggaaatccacgctgatgaaaatcatcgccggcattacccctgcggatagcggaatcattgagattgagggagcccgctgtacaaaactgacgcccatcctggcgcatcagttaggcatctaccttgtcccgcaagagccgctgctcttccccagcctgacggtaaaggagaatattctctttggtctgcccaaacaccagagctcggcgcaaaaaatggcggcgatgctgaccgcgctgggctgccagtttgatatcaacagcccggcgggttcactggatgtggccgaccggcaaatggtcgaaatcatgcgcgggctgatgcgcgattcacgaattttgatcctcgatgaacccaccgcctcactgacgcctgcggaaaccgatcgtttattcagccgcctgcgtgaattgctgagcactggcgtagggatcgtctttatctcccacaagctgccagagatacgccagatagcggattacattagcgtgatgcgggacggcatcattgcgctatccggaaaaacagcggacctgaccacggacgagattatccaggccatcacgcctgcctcacgcaccaacgcgctgagcgcgacgcaaaaactgtggctggaattgcccggcaaccgtccgcagcacgaggcgggcacgccggtgttgagtcttgagaatgtgactggcgaagggtttatgaacgtcagtttcgaggtccgcgccggggaaattttaggcctggccggtctggtcggtgccggacgtaccgaacttgccgaaacgctttacgggctacgaccgctacaggccggaagcatcgtactcggcggcaaggatatctcctcactttccacccgcgaacgtctacagcacggtctggtgtatttgccggaggaccggcaatcgtcaggactgaatctggatgcctcgctggcgtggaatgtttgcgcattaacccacaatcacagcggtttctgggctaatccggccaaagacagcgccacgctcgaacgctatcgccgcgcgcttaatatcaagctcaacgatccagaacagcctgcccgcactctttctggcggtaatcagcaaaaaatcctgatcgccaaatgccttgaagcctcgccgcaggtgctgattgtggatgagccaacgcgtggtgtggacgtctcggcgcgtaacgacatctatcagttgctccgcagtattgccgcccagaatgtcgcggttctgttcatctcttctgatctggaggagatagaacagatggccgatcgcgtttacgtcatgcaccagggagaaacggacaacgatgctctgcagggcgacgagattaatgtcgacaccatcatgcacgtggcgtttggcgaccgcacgtcaggggctacaccacattccggggaggcgccatgctga

SEQ ID NO: 10318 - DNA, 1011 bp, Escherichia coli
atgaatgaacaattgcgttcagaaattcgatatgttcaaagtgaagacaggatgatgacgattaacgacccgattatttccgagcaagggatgtgtgaagaagagcttgtggcgcgcattgcgtggttctattaccacgacggtatgacgcaaagcgacatcagcaacagactggggttgacgcggcttaaggtatcgcgcctgctggaaaaggggcatcagtctgggattattcgcgtacagattaattctcgctttgaaggctgtctggaatatgaaaccgaattacgtcgtcgctttgacctgaacaatgtgcgggtcatcccgggacttcccggcgcggatgtctgcatccgcttggggatcggcgccgcgcatatgctgatggagtcactcaagccgcagcagattctggcggcgggcttcggcgaagcgaccatgaataccttaaaacggctcagcgggtttatctcggctcagcaaattcgcctggtgacgctgtcgggtggtgtgggaccttacatgaccgggattggacaactcaacgcggcctgtccggtcagtattattccggcgccgcttcgtgcctcttctgcggagattgcacagacgttaaaaaatgaaaatagcgtccatgatgtcctgctggccgcccaggctgcagatgcggccattgtcggtatcggcgccatcaaccagaaagatgaggccaccattattcgctcaggctatatcacgaagggtgaacaactgatgattgggcgcaaaggcgcggtgggcgacattctgggttacttcttcgatggtgaaggagaagtgatcccggagatgaagattcacgatgaactgattgggttaacgctcagtaccctgaagacgatcccgactgtcattggcgtcgccgggggggtgaataaagcggaagcgatcgccgccgcgatgaaaggaggttatatcaacgcactggtcaccgaccaggaaactgccgccgccattgtcagcgggcagtaa

SEQ ID NO: 10319 - DNA, 1596 bp, Escherichia coli
atgatggcccaactctgtaccctctctgactcagaacattacctgatggcactggacgccggaactggcagcgtccgcgccgtgattttcgacctggaaggcaaacaaattgcagtagggcaagcggaatggcagcactttgccgtaccggatgtgcccggctcgatggaatttgatctgggaaaaaactggcaactgacctgtgaatgcattcgccaggcactgcataacgccgggattgcaccgggagcgattgctgccgtttccgcctgttcgatgcgtgaaggcattgtggtttatgacgcagagggaacgccggtctgggcctgtgccaacgtggatgccagagcagcacgggaagtcagcgagctgaaagagatacacgactacaccttcgaaagcgaagtctatcgcagcaccggccagactctggcgttgagcgcaataccacgtctgctctggctggctcatcatcgttcgggcatctatcgtcgcgcctcgacggtcacgatgatcagcgactggatggcctatatgctcagcggcgagctggcggtcgatccttccaatgccggcaccacgggtctgctggatctcaaaacgcgcgactggaagccgtcactactgcaaatggccggactgcggtcggatattctctcgcctgtcaaagagaccggcacgctgctgggtagggtgacggcacaggctgctgccctgtgtgggctgaaggccggcacgccggtggtggtgggaggtggtgatgtgcagttgggctgtctcggccttggggttgttcgtccggcgcaaaccgccgtacttggaggaacattctggcaacaggtcgtgaatttacccacaccgattgttgatccggaaatgaacgtacgcgttaatccgcatgtcatttcgggaatggtccagaccgaatccatcagcttttttaccggcctgacgatgcgctggttccgtgatgctttctgtgccgaagaaaagctaattgccgagcgtctgggtgtcgatgcctacacgctactggaagagatggcttcacgggtccccgcaggtgcctggggagtgatgccgatcttttctgaccggatgcgcttcaagagctggtatcacgccgccccttctttcatcaacctgtccatcgacccggaaaaatgtaataaggctacccttttccgcgcgctggaagagaatgcggccattgtgtcgacctgcaatttacagcaaatcgctgattttaccggtatccatcccacgtcactggtgtttgccgggggaggctcgaagggcaaactctggagccagattctggcggacgtgtcagggctgacggtcaacgttccggtcgtcaaagaggcaacggcgctgggctgtgcgattgccgctggcgtgggggccgggatttggtcatccatggacgaaacgggcgaacggctggtgcgctgggagcgtgagcatgttccggacagagagaaacatgcgctttatcgggaatcgcgcgagaaatggcaggcggtataccaggaacagttaggtctggtcgatcacgggttgacgacctctttgtggaaagcgccaggtttataa

SEQ ID NO: 10320 - DNA, 351 bp, Escherichia coli
atgattaaatcgaatgaagcgcagcatgactaccgttttggcgacagcggtccgaaatacctcattcgcggcccgatgtgtgatatgggcgtcgtcatgctccagcccggtcagtcttttcccaaccatcggcacatcgaagcgtgcgaaattttttataccctggcaggcgaagtgacgctgtatctgaacggtgagccttacacgctaggctcgggggatgtgatgcactgcgatcccggagaagcacattttctggtgaacaaaggggaagtgccgtggaaaggagtctttgtgaaatcgcctcatataccgggtgacagtcatccggttgagccaacgatgtattag

SEQ ID NO: 10321 - DNA, 2004 bp, Escherichia coli
atgtggactggcctgcctggcaatatatgcggtcattttggtaagaatattgacctgatatctcttcgtcgtaagtttaatctctcggcccgtggagcaaaccttgcaggaatcaatggaatagcggagcagctggggatgatcacccgggctctttcactggagctggatgaacttggtgccctcaaaatgccgtgtattctccactgggatttcagtcacttcgtcgtgctggtcagcgtaaagcgtaaccgttatgtactgcatgatccggccagaggaagaagatatctcggtcgggaggaaatgagccggtattttacgggcattgcacttgaggtctggcccggaggtgaattccggacggaaacccagcaaacccgcataagtctccgttcactgattaacagtatttacggtattaaaagaacactggcgaaaattttctgtctgtcagctgtaattgaagcaatcaatctggtaatgccggtgggaactcagctggttatggatcatgcgattccggcgggggaccgagggctgctgacgcttatttctgctggcctgatgttctttatattgctcagggccgcggtgagtatgctgcgtgcatggtcctcactggttatgagcacgctcatcaatatacagtggcagtcgggtctgtttaaccaccttctcagactgccgctggcattttttgaacgccgtaaattaggtgatatccagtcgcgttttggctcccttgacactttgagggccacctttaccacctgtgtggttggggcaatcatggacagtattatggttgtgggtgtttttgtgatgatgctgttatatggaggatatcttacctggatagttctcggttttaccatggtttacgttcttattcgtctggtgacatacggctattaccggcaaatatcggaagaaactcttgtcaggggggcccgggccagctcctattttatggaaagcctgtatggtattgccacggtaaaaatccagggtatggtcgggatccggggaacacactggcttaacctgaaaatagatgcgatcaattcaggtattaagttaaccaggatggatttgctcttcgggggaataaatacttttgttgccgcctgtgatcaggtggcgattttatggctgggtgcaagccttgtgatcgataatcagatgacaatagggatgtttgtggcatttggttcttttcgtgggcagttttcggatcgggttgcttcgctgaccagttttcttcttcaactgagaataatgagtctgcataatgagcgcattgcagatattgcactacatgaaaaggaagaaaagaaaccggaaattgaaatcgttgctgacatgagcccggtttcactggaaaccactgatttaagctaccggtatgacagccagtcagcacaggtattcagtggtctgaatttgtctgtggctccgggagaaagtgtggctataactggtgcctccggtgccggaaaaaccacattaatgaaagtattatgtggactgtttgaaccagatagtggaaaagtactggttaatggcacggatatacgtcaacttggaataaataattatcaccgtatgatagcctgtgttatgcaggacgaccggctattttcaggatcaattcgtgaaaatatctgtgggtttgcagaagaaacagacgacgaatggatgacagaatgtgccagagcaagtcatattcatgatgtgataatgaaaatgccaatggggtatgaaacgttaataggtgaactgggggaaggtctttccggcggtcaaaaacagcgtatattcattgcccgagctttataccggaaacctggaatattatttatggatgaggctacaagttctcttgatacagaaagtgaacgtttcgttaatgctgccataaaaaaaatgaatatcacccgggtgattattgcacacagagaaactacgttgagaactgttgacaggattatttctatttaa

SEQ ID NO: 10322 - DNA, 912 bp, Escherichia coli
gtggacaagattatttcccgtctggaagaaagtaaaaaaataacgctggataccctggaaaaacaacgcctgcaatacacagatgcgtttcgtcgctcatcagatattatacagcgtgcagaggaagggataaaaataatgaaaaacaacatggagaattacagaaactatcagacaaaagggctgattaataaagatcagttaactaaccaggtggcattatattatcagcaacaaaacaatcttcttagcctgagcggacagaacgaacagaatgccctgcagataaccactctggagagtcagattcagactcaggcagcagattttgataaccgtatctaccagatggaactgcaacggtacgagttacagaaagaactggttaacactgatgtggagggcgaaatcattatccgggcgttgactgacgggaaagttgactccctgagtgtcactgtcgggcaaatggtcaatcccggagacaaccttctgcaggttattcctgagaacattgaaaattattatcttattctctgggtcccgaatgatgctgttccttatatttcggctggtgacaaagtgaatattcgttatgaagcctttccggcagaaaaatttgggcagttttctgctacggttaaaactatatccaggactcctgcatcaacacaggaaatgttgacctataagggagcaccacagaatacgccgggcgcctctgttccctggtataaagtcattgcgatgcctgaaaagcagattatcagatatgacgaaaaaaacctccctctggaaaatggaatgaaagccgaaagtacactatttctggaaaaaaggcgtatttaccagtggatgctttctcctttctatgacatgaaacacagtgcaacaggaccgctcaatgactaa

SEQ ID NO: 10323 - DNA, 285 bp, Escherichia coli
ttgtttcgtcaggatgctttagaaaacagaaaaatgaagtggcagggacgggcaatattacttcccggaataccactatggttaatcatgctgggaagcatagtgtttattacggcatttctgatgttcattattgttggtacctatagccgccgtgttaatgtcagtggtgaggtcacaacctggccaagagctgtcaatatatattcaggtgtacagggatttgttgtcaggcagtttgttcatgaaggacagttgataaaaaaaggggatctgtttatctga

SEQ ID NO: 10324 - DNA, 435 bp, Escherichia coli
atggaaaataatttggaaaacctgaccattggcgtttttgccaaggcggccggggtcaacgtggagacaatccgcttctatcagcgcaagggcctgttgcgggaaccggacaagccttacggcagcatccgccgctatggggaggcggacgtggttcgggtgaaattcgtgaaatcggcacagcggctggggttcagtctggacgagattgccgagctgttgcggctcgacgatggcacccactgcgaggaggccagcagcctggccgaacacaagctcaaggacgtgcgcgagaagatggccgacttggcgcgcatggaaaccgtgctgtctgaactcgtgtgcgcctgccatgcacgaaaggggaatgtttcctgcccgttgatcgcgtcactacagggcgaagcaggcctggcaaggtcagctatgccttag

SEQ ID NO: 10325 - DNA, 351 bp, Escherichia coli
atgtctgaaccacaaaacgggcgcggtgcgctcttcgccggcgggctggccgccattcttgcatcgacctgctgcctggggccgctagtactggtcgccctgggcttctccggtgcttggatcggcaacctgacggtgctggaaccctatcgaccgttgttcatcggcgcggcgctagtggcgctgttcttcgcctggaagcggatttaccggcccgtgcaggcatgcaagccaggtgaggtctgcgcgattccgcaggtgcgcgccacctacaagctgattttctggatcgtggccgtgctggtcctggtcgcgcttggatttccctatgtcgttccatttttctattaa

SEQ ID NO: 10326 - DNA, 276 bp, Escherichia coli
atgaagaaactgtttgcctcccttgccctcgccgccgctgttgccccggtgtgggccgctacccagaccgtcacgctagcggttcccggcatgacttgcgccgcctgcccgatcacagtcaagaaagcgctctccaaggtcgaaggcgtgagcaaggtcgatgtgggcttcgagaagcgcgaggccgtcgtcacttttgacgacaccaaggccagcgtacagaagctgaccaaggccaccgcagacgccggctatccgtccagcgtcaagcagtga

SEQ ID NO: 10327 - DNA, 423 bp, Escherichia coli
atgggactgatgacacgcattgccgataaaaccggcgcgctcggcagcgtcgtttccgcgatgggctgcgccgcctgctttccagccctcgccagcttcggcgcggccatcgggctgggcttcttgagccagtacgagggactgttcatcagccgcctgctgccgctgtttgccgcgctggccttcctggcgaacgcgctgggttggttcagtcatcggcaatggctgcgcagtctgctcggcatgatcggcccggccatcgtgtttgcggccacggtctggctgctcggcaactggtggacggcgaacctgatgtacgtcggcctggccttgatgattggggtgtcgatctgggacttcgtgtcgccggcgcatcgccgttgcggaccggacggctgcgaactccccgccaagcgcttgtga

SEQ ID NO: 10328 - DNA, 1695 bp, Escherichia coli
atgagcactctcaaaatcaccggcatgacttgcgactcgtgcgcagtgcatgtcaaggacgccctggagaaagtgcccggcgtgcaatcagcggatgtctcctacgccaagggcagcgccaagctcgccattgaggtcggcacgtcacccgacgcgctgacggccgctgtagctggactcggttatcgggccacgctggccgatgccccctcagtttcgacgccgggcggattgctcgacaagatgcgcgatctgctgggcagaaacgacaagacgggtagcagcggcgcattgcatatcgccgtcatcggcagcggcggggccgcgatggcagcggcgctgaaggccgtcgagcaaggcgcacgtgtcacgctgatcgagcgcggcaccatcggcggcacctgcgtcaatgtcggttgtgtgccgtccaagatcatgatccgcgccgcccatatcgcccatctgcgccgggaaagcccgttcgatggcggcatcgccgctaccacgccgaccatccagcgcacggcgctgctggcccagcagcaggcccgcgtcgatgaactgcgccacgccaagtacgaaggcatcttggagggcaatccggcgatcactgtgctgcacggctccgcccgctttaaggacaatcgcaacctgatcgtgcaactcaacgacggcggcgagcgcgtggtggcattcgaccgctgcctgatcgccaccggcgcgagcccggccgtgccgccgattcccggcctgaaagacactccgtactggacttccactgaagcgctggtcagcgagacgattcctaagcgcctggccgtgattggctcatcagtggtggcgctggagctggcgcaggcgttcgcccgactcggagcgaaggtgacgatcctggctcgcagcacgctgttcttccgcgaagacccagctataggcgaagccgtcacggccgcattccgcatggagggcatcgaggtgagggaacacacccaggccagccaggtcgcgtatatcaatggtgaaggggacggcgaattcgtgctcaccacggcgcacggcgaactgcgcgccgacaagctgctggtcgccaccggccgcgcgcccaacacacgcaagctggcactggatgcgacgggcgtcacgctcaccccgcaaggcgctatcgtcatcgaccccggcatgcgtacaagcgtggaacacatctacgccgcaggcgactgcaccgaccagccgcagttcgtctatgtggcggcagcggccggcactcgcgccgcgatcaacatgaccggcggtgacgcggccctgaacctgaccgcgatgccggccgtggtgttcaccgatccgcaagtggcgaccgtaggctacagcgaggcggaagcgcaccatgacggcatcaaaactgatagtcgcacgctaacgctggacaacgtgccgcgcgcgctcgccaacttcgacacgcgcggcttcatcaaactggtggttgaagaaggcagcggacgactgatcggcgtgcaggcagtggccccggaagcgggcgaactgatccagacggccgcactggcgattcgcaaccggatgacggtgcaggaactggccgaccagttgttcccctacctgacgatggtcgaagggttgaagctcgcggcgcagaccttcaacaaggatgtgaagcagctttcctgctgcgccgggtga

SEQ ID NO: 10329 - DNA, 363 bp, Escherichia coli
atgagcgcctacacggtatcgcaactggcccataacgttggggtgagcgtacatatcgtgcgcgactacctggtgcgcggcttgttacggccggtggcctgcaccacgggcggctacggcgtgttcgacgatgcggccttgcaacggctgtgcttcgtgcgcgcggccttcgaggcgggtatcggcctggatgccctggcgcggctgtgccgtgcgctcgacgcagcggacggcgcacaagccgcagcgcagcttgccgtgctgcgccagttggtcgagcggcggcgcgcggcgttggcccatctggacgcgcaactggcctccatgccagccgagcgggcgcacgaggaggcattgccgtga

SEQ ID NO: 10330 - DNA, 237 bp, Escherichia coli
gtgaacgcccctgacaaactgccgcccgagacgcgccaacccgtttccggctacctgtggggtgcgctggccgtgttgacctgcccctgccatctgccgattctcgccgccgtgctggccgggacgaccgccggtgccttccttggcgagcattggggtgttgccgcgctcgcgctgaccggcttgttcgttctggccgtaacgcggctgctgcgcgccttccggggcggatcatga

SEQ ID NO: 10331 - DNA, 708 bp, Escherichia coli
atgacgagttcgcagcccgccggatggacggcggccgagttggcgcaggcggcggcgcgcggacagcttgacctgcattaccagccgctggtcgatctgcgcgatcaccggatcgctggcgcggaagcgttgatgcgctggcggcatccgaggcttggcctgttgccgcccggccagttcctgccgctggccgagtcgttcggcctgatgccggaaataggcgcgtgggtgctgggcgaggcctgtcgccagatgcacaagtggcaaggaccggcatggcaaccgttccgtcttgccatcaatgtgtccgccagccaggttgggccaacgttcgacgacgaggtaaagcgggtgctggccgatatggccctgcccgccgagcttctggagatcgaactgaccgaatcggtcgcattcggcaatccagccctgttcgccagtttcgacgccttgcgcgccatcggcgtgcgcttcgccgccgacgacttcggcaccggctattcctgcctgcaacatctgaaatgctgccccatcaccacattgaaaatcgaccaatcctttgtcgccaggctcccggatgatgcccgtgaccaaactatcgtgcgggcggtgatccagctcgcgcacgggctgggcatggatgtcattttcagaagacgactgcaccagttgattgggcgtaatggctgttgtgcagccagctcctga

SEQ ID NO: 10332 - DNA, 1680 bp, Escherichia coli
atggcgacggacaccccacggattccagaacaaggcgtggccactctgcctgatgaggcttgggagcgtgcgcgccgtcgtgcggagatcatcagtccgttggcgcagtcggagacggtcgggcacgaagcggccgatatggcggctcaggcgctgggcttgtctcggcgccaggtatacgttctgatccggcgtgcccggcaaggcagcggcctcgtgacggatctggtgcccggccagtccggtggaggtaaaggtaaggggcgcttgccggaaccggtcgagcgcgtcatccacgagctactgcaaaagcggttcctgaccaagcagaagcgcagcctagcggcctttcaccgcgaagtcactcaggtgtgcaaggctcaaaaactgcgagtgccggcgcgcaataccgtggccttacggatcgctagccttgacccgcgcaaggtcatccgccggcgggaaggccaggatgccgctcgtgacctacaaggtgtgggcggcgagcctcctgccgtgaccgcgccgctggagcaggtgcagatagaccatacggtcatcgacctgatcgtggtcgatgaccgcgaccggcaacctattggccgcccgtacctgaccctcgccatcgacgtgttcacccgctgcgtgctcggcatggtcgtcacgctggaagcgccgtctgccgtttcggttggcctgtgcctcgtgcatgtcgcctgcgacaagcgcccttggctggaaggactgaacgtggaaatggattggcagatgagcggcaagcccttgctgctctacctagacaacgcggccgagttcaagagcgaggccctgcgccggggttgcgagcagcatggcatccggctggactatcgcccgctgggacagccgcactatggcggcatcgtggaacggatcatcggcacggcgatgcagatgattcacgacgaactgccgggaacgaccttctccaaccctgaccagcgcggcgactacgattccgaaaacaaggccgccctgacgctgcgcgagctagagcgctggctcacattggcggtcggcacctaccacggttcggtgcacaacggcctgctccaaccgccggccgcgcgctgggccgaggccgtggcgcgtgtcggcgtaccggccgtcgtcacacgcgctacttcgttcctggtcgattttctgccgatcctccggcgcacgctgacccgcaccggctttgtcatcgaccacatccactactacgccgatgcgctcaagccgtggattgcgcggcgtgaacgctggccgtcctttctgatccggcgcgatccgcgcgacatcagccgtatctgggtcctggaaccggagggacagcattacctggaaattccctaccgtaccttgtcgcatccggctgtcaccctctgggaacaacggcaggcgctggcgaaactgcggcagcaagggcgcgaacaggtggatgagtcggcgctgttccgcatgatcggccagatgcgtgagattgtgaccagcgcgcagaaggccacacgcaaggcgcggcgtgacgcggatcgccgccagcacctcaagacatcagctcggccggacaagcccgttccgccggatacggatattgccgacccgcaggcagacaacttgccacccgccaaaccgttcgaccagattgaggagtggtag

SEQ ID NO: 10333 - DNA, 576 bp, Escherichia coli
gtggacgaatatcccatcatcgacctgtcccacctgctgccggcggcccagggcttggcccgtcttccggcggacgagcgcatccagcgccttcgcgccgaccgctggatcggctatccgcgcgcagtcgaggcgctgaaccggctggaagccctttatgcgtggccaaacaagcaacgcatgcccaacctgctgctggttggcccgaccaacaatggcaagtcgatgatcgtcgagaagttccgccgcacccacccggccagctccgacgccgaccaggagcacatcccggtgttggtcgtgcagatgccgtccgagccgtccgtgatccgcttctacgtcgcgctgctcgccgcgatgggcgcgccgctgcgcccacgcccacggttgccggaaatggagcaactggctctggcactgctgcgcaaggtcggcgtgcgcatgctggtgattgtcgacaacctctcgcgcaaccaagacatcgcggtcggactgcaagtgatcttgaagccacgggcccgtcccaccccgacatggacctcgatgcccgaacggacgttagatttcgagttctag

SEQ ID NO: 10334 - DNA, 780 bp, Escherichia coli
gtgatcgccgaagtatcgactcaactatcagaggtagttggcgtcatcgagcgccatctcgaaccgacgttgctggccgtacatttgtacggctccgcagtggatggcggcctgaagccacacagtgatattgatttgctggttacggtgaccgtaaggcttgatgaaacaacgcggcgagctttgatcaacgaccttttggaaacttcggcttcccctggagagagcgagattctccgcgctgtagaagtcaccattgttgtgcacgacgacatcattccgtggcgttatccagctaagcgcgaactgcaatttggagaatggcagcgcaatgacattcttgcaggtatcttcgagccagccacgatcgacattgatctggctatcttgctgacaaaagcaagagaacatagcgttgccttggtaggtccagcggcggaggaactctttgatccggttcctgaacaggatctatttgaggcgctaaatgaaaccttaacgctatggaactcgccgcccgactgggctggcgatgagcgaaatgtagtgcttacgttgtcccgcatttggtacagcgcagtaaccggcagaatcgcgccgaaggatgtcgctgccgactgggcaatggagcgcctgccggcccagtatcagcccgtcatacttgaagctagacaggcttatcttggacaagaagaagatcgcttggcctcgcgcgcagatcagttggaagaatttgttcactacgtgaaaggcgagatcaccaaggtagtcggcaaataa

SEQ ID NO: 10335 - DNA, 474 bp, Escherichia coli
gtgaaactatcactaatggtagctatatcgaagaatggagttatcgggaatggccctgatattccatggagtgccaaaggtgaacagctcctgtttaaagctattacctataaccaatggctgttggttggacgcaagacttttgaatcaatgggagcattacccaaccgaaagtatgcggtcgtaacacgttcaagttttacatctgacaatgagaacgtagtgatctttccatcaattaaagatgctttaaccaacctaaagaaaataacggatcatgtcattgtttcaggtggtggggagatatacaaaagcctgatcgatcaagtagatacactacatatatctacaatagacatcgagccggaaggtgatgtttactttcctgaaatccccagcaattttaggccagtttttacccaagacttcgcctctaacataaattatagttaccaaatctggcaaaagggttaa

SEQ ID NO: 10336 - DNA, 294 bp, Escherichia coli; identical to SEQ ID NO: 9168

SEQ ID NO: 10337 - DNA, 2064 bp, Escherichia coli
atgacagtaaaaatttctggcgtgcttaaagatggcacaggaaaaccagtacagaactgcaccattgtgctgaaggccagacggaccagcagcacggtggtggtgaacacggtggcctctgaaaatccggatgaagccgggcgttacagcatggatgttgagtatggccagtacagcgtcaccctgctggttgaagattttccgccttcacatgccgggaccattaccgtctatgaaggttccagaccaggtacgctgaatgattttctcggcgccatgacggaggatgatgttcgtccggaggcactgcgccgttttgagctgatggtgaatgaagtggcacgtcatgccggagcgtcatcacagagtgcagcggcggcaaagaaatccgaaacggcagcagcctcatcgaagaatgcggcgaaaacctcagaaacgaatgcagctaacagcgcacaggcggcagcggcctcgcagactgcatcggcaaactccgcgacagcagccaaaaaatcagaaaccagcgcgaaaaatagcgagacagccacaaaggccagcgaaaaaaacgcaaaatccagccagacggcagcgaaaaccagtgagacgaatgccaaagacagtgaagccaacgcaaaggtgagcgaaacagcggcggcgaactcggcgaaagcatcggcagcaagccagacggcagcaaaagcaagtgaagatgctgccagagaatacgcaaaccagacagcagagccgtacagatatgttttacagccgctgccggatgtgtggataccctttaatgattcgctggatatgattacgggctattctccgggttataaaaaagtgaagattggtgataatgtggttcaggttgccagtgataaacaggttaatttcagtcgcgcatcaacggcaacatatatcaacaaatctggcgaactgaaaacggcggaaattaatgagccgcgatttgagtgtgatggcctgcttattgagggacaaagaacgaacttcttccagaacagtacagacccttcgaagtggaataagtcaacttcactggacgttacagaaacaggcacagatagtttcgggtttaattatggtcggtttgtcgtacaggattcgattgttggtacaagtaaagcgcataccattatcggactgtattcgagtaccggaggggttgatacttcaggggacgaaaagcatgtaactatatcctgtcgggtaaaaagtgaagttgataatatcgccgttcgtattttatttgaacattatgatggggaggtaaggacatcaataggagcagcaaacctgaaccttaccacccgcataattagcaagacaggtcagacaagccgtgttacagcaaggtctgttaaggatgatgcaactggctggatattttttgaggctacattaaaagcagatacaacagaaaatacggttggtggttttgtccagtattctccggatacagggcagatggttacatcaggggattatctcgatgtaaccactccacagattgaggctggtacaggcgcatcatcttttattgttacggggacggcaccggcaacgcgggcaagcgatatggtgacagtcccaatcaagaataacctttataatcttccttttacggttctttgtgaggtacataagaactggtataaaacgccaaatgtagcgccgcgtgtttttgataccggcggtcatcaaaccggagcggggatcgtaatggggtttggttcatcaggtgggtacgacggttttccgtattgcgatataggtggttcagaccgacgaataaatgaaaatgccgggctggaaaaaatgcttattggtatgcgggtaaagtccgaacggtccacatgtgtagtcagtaacggtaagttaagcagcgaaactaaaaccaaatgggaatatatccggagtacagcaaccattcgcattggtggacaaactacagcaggattacgccatttatttgggcatgtgaggaattttcgtctctggcataaagagctaacagatgcgcagcttggggaggttgtggagtga

SEQ ID NO: 10338 - DNA, 600 bp, Escherichia coli
atgcgtaaattatgtgctgttattctgtccgcagtagtctggctggttgccgctggtacgccagcgagcgcagcagagcatcagtccacactaagcgccgggtatcttcagacccacactgatatgccaggcagcgataatctgaacgggattaacgtgaaataccgttatgagtttacggacgcgctggggctgattacgtccttcagttatgccaatgctgaggatgagcaaaaaacgcactacagcgatacccgctggcatgaagattccgtgcgtaaccgctggttcagcgtgatggcggggccatctgtacgcgtgaatgaatggttcagtgcttatgcgatggcaggtgtggcttacagccgtgtgtcgacgttctccggggattatctccgcgtaactgacaacaaggggaaaacgcacgatgtgctgaccggaagtgatgacgatcgccacagcaacacgtctctggcgtggggagctggcgtgcagtttaacccgaccgaatccgtgaccattgatattgcttatgaaggttccggtagtggcgactggcgaacggatgcatttattgttggtatcggataccgtttctga

SEQ ID NO: 10339 - DNA, 3693 bp, Escherichia coli
atgggaaaaggtggcggtaaggcacacacgcctcgtgaggcgaaggataatctcaaatccacgcagatgatgagtgtgattgatgcgattggtgagggaccgatagaaggtccggtgaagggactgcagagtattctggtgaacaaaaccccgctgacggacacggacggtaatcccgtgatacacggtgtgactgcggtctggcgtgccggggagcaggagcagacaccaccggaaggctttgagtcctccggagctgaaaccggactgggcgtggaagtgacgaaggcaaaaccggtgacgcgcaccattacgtccgcgaacattgaccgcctgcgggttaccttcggggtgcagtcactggtgcagaccacgtcaaagggcgaccgtaatccttcctctgtccggattctgattcagttacagcgtaatggccgctgggtgacggaaaaggatgtcaccattaacggcaagaccacctcgcagttcctggcctcggtgattctggataatctgcctccccggccctttaacatccggatggtcagggagacggcggacagcaccacggaccagctgcagaataagacgctgtggtcgtcatacaccgaaatcatcgatgtgaaacagtgctacccgaacacggccattgtggggctgcaggtggatgcggagcagttcggcggccagcagatgacggtgaactaccatatccgcggtcgcatcatccaggtgccgtcaaactatgacccggaaaaacgcacgtacagtggtatctgggacggcagcctgaaaccggcatacagcaacaacccggcctggtgtctgtgggacatgctgactcacccgcgctacggcatgggaaaacgtctgggggcggcggatgtggacaagtgggcgctgtatgccatcgggcagtactgcgaccagacggtcccggatggtttcggggggaccgagccgcggatgacctttaatgcgtacctggcacaacagcgtaaggcgtgggacgttctcagtgatttctgctctgcgatgcgctgtatgccggtatggaacggccagacgctgacgttcgttcaggaccgtccgtcggatgtggtgtggccgtacaccaacagcgatgtggtggtggatgataacggcgtgggtttccgctacagcttcagtgccctgaaggaccggcacacggcagtggaggtgaattacaccgacccgcagaacggctggcagacctccacggaactggtggaagacccggaagccatactgcgctacggacgcaacctgctgaagatggacgcgttcggctgtaccagccgcggtcaggcccaccgtgccgggctgtgggtgataaagaccgaactgctggaaacgcagacggtggatttcacgctcgggtcacaggggctgcgtcacacacccggtgacatcattgaaatctgtgataacgactatgccgggaccatgaccggcggacgtgtcctgtccatcgatgccgccagccgtaccctgacgctggaccgggaggtgacactgccggagaccggcacggccactgttaatctgattaacggcagcggtaagccggcgagcgtggccatcaccgcacaccccgcgcctgaccggatacaggtcagcaccctgccggatggtgtggagacatacggtgtgtggggactctccctgccgtcactgcgtcgtcgcctgttccgctgtgtctccattcgggaaaacacggacggctcgttcgccatcacggcggtgcagcacgtaccggaaaaagaagccattgtggataacggggccagctttgagccgcagtcaggcagcctgaacagcgttatcccaccggcagtgcagcacctgacggtggaggtgagtgcagctgacggtcagtatctggcacaggcgaaatgggacacgccgcgggtggtgaagggtgtgcgcttcagtctgcgtctgaccagcggaagcggagaagacagccgtctggtgagcaccgccatcaccgcagacacggagcaccgtttcagtggtctgccgctgggggaatacaccctgacggtgcgggccattaacagctacggccagcagggcgaacctgcgaccaccaccttccggattaacgcgcctgcaaaacccgccaccattgagctgacgccggggtattttcagataacggcggtcccgcgtcttgcggtgtatgacccgacggtacagtttgaattctggttctcagaaaaacgcatcacgaacacggcacaggtggaaaaatctgcccgttatctggggaccggcagtcagtggactgtccaggggagccggattaagccggggacggatttctggttttacgtgcgaagcgtcaacctggtgggaaaatctgcttttgtggaagccagcgggcagcccagcaatgatggtgaagggtatctggaaattttccgggggctgatagatgagacgcttctgggccaggcactgaaagagcgcattgatgcttcagcgctgcgtacggaggtcacgcaactggaagaagacatccgtcagcggatggacacggatatcgcagaagtgacccggaaaatcggggaggcggaaaacagcctcacgcagctggttgcgaaaaagaatgaggaccagacactggccatcgcgcaggtgagccagaaagtggaccgggtgagcagtgaaatctcacagactgtcagccaggggcagtcagaaaatgcccgacagatagcacaggtccgccagtacgtggataaaaaagggagtgaaattacctcgaccacggataaaaaactgggtgaccaggccgtgaccatacagcaaatccagcgggttcagtcagacacgcgcaatgagctgaatgccatgtatatgctgaaggtgcagaaaacaaaaaacggtattccctatgtggccgggattggtgcggggattgaggatgttgatggtcagacgctgagcagtattctgctgcaggctgaccgtatcgcgatgattaccccggagaatggcaacaccacgccgctgtttgtggcgcaggggaatcagctgttcatgaacgacgtgttcctgaagcgactgtttgcggtgagcatcacgtcatccggcaatcctcctacgttttccctgacgccggatggcaggctggcagcccgcaatgcggatatcagtggagccatcacggcgaataccggcacgctcaataatgtcaccattaacgagaactgtgtcatcagagggaaactgtctgcaaaccagattgaaggcgatctcgttaaaacagtgggtaaggctttcccccgtgactcccgtgcaccggagaggtggccatcagggaccattaccgtcagggtttatgacgatcagccgtttgaccggcaaattgttattccggcggtggcattcagcggtgccagacatgagcgggagaataacgatatttattcgtcatgccgcctgatagtacggaaaaacggtgctgaaatttataaccgtaccgcgctggataatacgctggtttacagtggtgttattgatatgcctgctggtcgcggccacatgacgctggagttttctgtatcagcatggtgggtaaatggctggtatcccacagcaagtatcagcgatttgctggttgttgtgatgaagaaagccactgcaggcatcacgattagctga

SEQ ID NO: 10340 - DNA, 582 bp, Escherichia coli
gtgaacacggcagcggaagccatccgtgccctgtcgttacaggtgccgggctttcgccgtcagatgaacgaaggctggtaccagatacgtattgccggtgatgacacggcaccggaggcggtgtacgcccgtcttcacgaacagctgggtgagggaacggtcatccacattgtgccgcgactggccggagccggaaagggcggactgcagattgtgctgggggcggcagccatcgtgggctctttcttcacggccggtgcctcgatggtgttatggggtacagccctgagtgccggcggtttttctgccaccacgatgctgttttcactgggggccagcatgatactgggcggtgtggcccagatgctggccccgaaggcaaaaacaccggattaccgcgcaacggataacggcagacagaacacgtacttttcctcgctggataacatgattgcccaggggaacccgatgccggtgccttacggggaaatgctggttggctcccgccgtatatcccaggacatcagcacccgtgatgaaggcgggggcggaaaggtcgtggttatcgggcggcaggggtaa

SEQ ID NO: 10341 - DNA, 699 bp, Escherichia coli
atgcaggatattcgcgaagaaagtctgaacgagtcggttaagtcagagcagtcaccgcgggtggtactctgggaaatcgacctgacggtacagggtggtgagcggtattttttctgtaatgagctgaatgaaaaaggggagccggtcacctggcaggggcgtaagtatgaggcatacccgattgacggcagcggctttgagatgaacggccggggcagcagtgccagaccgtcgctgacggtgtccaatctgttcggtctggtcaccgggatggcggaagacctgcagagtctggtgggggccacggtggtccgccgccgggtgtatgcccgttttctggatgcggtgaatttcgttgcgggcaatccggaggcggacccggagcaggagctgagtgaccgctgggtggtggagcagatgtcgcagctgacagccatgacggcctcgtttgtgctggctacaccgaccgagacggacggggcgctgtttcccggtcgcatcatgctggcgaacacctgtatgtgggattaccggggagatgaatgcgggtataacggtcctgcggtggcggatgagttcgacaaccccaccacggatatccgtaaggacagatgcagcaagtgcatgcgcgggtgtgagatgcgcggcatggtggctaattttggcggtttcctttccattaacaaactttcgcagtaa

SEQ ID NO: 10342 - DNA, 426 bp, Escherichia coli
atggaacagaaaatattatccgcagaaccccgcagaacattttcaaatgagtttaaacttcaaatggttaaactggcttcacaaccaggagcctctgttgcccgtattgccagggaacacgatatcaatgataacctccagttcaaatggctcaggctctggcagaacgaagggcgtatatcgcggcgtcttccggtaacaacctcttctgacgctggcgttgaattattacctgttgagataacgcctgatgagcagaaagagcctatggcggctcttactccgcttttatccactccttcacaaagcacagtcagtgccagttcctgtaaagttgagttccgccacggtaacatgacgctggaaaatccttcaccagagctgctcacggtgttgatccgtgaactgaccgggagaggacgatga

SEQ ID NO: 10343 - DNA, 810 bp, Escherichia coli; identical to SEQ ID NO: 6004

SEQ ID NO: 10344 - DNA, 4116 bp, Escherichia coli
gtgaataaagtttattctcttaaatattgccctgtcaccgggggacttattgttgtctctgaacttgccagcagggtaataaaaaagacatgccgaagattaacgcatattcttctggctggcattccagcagtctatctgtattaccctcagatatcccaggcgggcattgtccgttccgatattgcctatcagatttatcgtgatttcgctgaaaacaaagggctttttgtacctggtgccacagatattccggtatatgataaggacggaaaacttgtggggagactggataaagccccaatggccgatttcagcagtgtgagctcaaatggcgttgctacgcttgtatcacctcagtatatcgtcagcgtaaagcataacggaggatatcagagtgtgagctttggtaatgggaaaaatacatattcccttgttgaccgtaataaccactcttctgttgacttccatgctccacgtctgaataaactggttacagaagttattccctcagcgataacatcagaaggaaccaaagccaatgcttataaagacactgaacgttacaccgctttttatcgggtgggtagtggtacgcagtacactaaggacaaggacggaaatttagttaaggttgccggcggatatgcttttaaaacaggaggaaccacaggagttcctctgatatctgatgcaacaatagtctctaatcccgggcaaacctataatcctgtaaacggacctttacctgactatggtgcccctggggacagtggttctcctttgtttgcttatgatgaacaacaaaaaaaatgggttattgttgctgtattaagagcatatgcaggtattaatggtgctacgaactggtggaatgtcataccaacagattatctgaaccaggttatgcaggacgatttcgatgcccccgtggactttgtttccggactgccccccctgaactggacatacgacaaaacatcaggcacaggcaccctgagccagggcagtaaaaactggaccatgcacgggcagaaagacaatgatctcaatgccggtaaaaatctggtattcagcgggcagaacggtgcaattgtcctgaaagacagtgtgactcagggggccggttatctcgaatttaaagacagttacaccgtatctgctgaatccggaaaaacctggacgggtgccggcattattactgacaaggggacgaatgtgacctggaaggtcaacggggttgccggtgacaacctgcataaattgggggaaggaaccctgaccataaacggaacaggtgtaaacccgggaggactgaaaacgggagacggtaccgttgtacttaaccagcaggcagacactgcaggtaatgttcaggccttcagttccgtgaacctcgccagcggacgaccgaccgtggtgctcggagatgcccgtcaggtcaatccggataacatttcatggggataccggggaggtaagcttgaccttaatggtaatgccgttaccttcacccgactgcaggctgccgattacggggcggtgattacaaataatgcacagcaaaaatcccggcttttactggatcttaaggctcaggatacaaatgtcagtgttccgattggcagtatatccccctttggcggtaccggcacaccgggaaacctatacagcatgatactcaacggccagacccgcttctatattctgaaatctgccagctatggtaacaccctgtgggggaacagcctgaatgacccggctcagtgggaatttgttggcacggacaaaaacaaagcagttcagacagtaaaagaccggatcctggccgggcgggcaaaacaacccgttatctttcatggtcagctgaccgggaatatggatgtcaccattccacagctgccggggggaagaaaggtcatccttgatggtagcgtgaacctgccggaaggtaccctgagtgaggacagtggcaccctgatattccaggggcatccggttatccacgcctccgtcagtggcagtgcgccggtcagcctgaaccagaaagactgggaaaaccgccagttcataatgaaaacactgtcgctgaaagatgctgacttccatctttcacgtaacgcctcgctgaacagtgacattaagtcggataacagccatatcacactgggaagtgacagggtatttgtggataaaaatgacggaacaggaaattatgtcattctggaggaaggtacctctgtcccggacaccgtgaatgacaggagccagtatgaagggaatattacgctggaccataactcaaccctggatatcggcagccggttcaccggagggattgaagcttatgacagtgccgtcagtatcacctctccggacgtcctgttaacagccccgggtgcttttgccggcagttcactgacagtgcatgatggcggtcatcttacagcactgaacggtcttttcagcgacgggcatattcaggccggtaagaacagcaaaatcaccctgagcggtacaccggttaaagatacggctaaccagtatgcccctgctgtatatctgacggacggatatgacctgaccggcgataacgcaacactggaaattacccgtggagcacatgcttccggtgatattcatgcctctgcggcatcaacagttaccatcgggtctgacacgccggcagaactggcttctgcggaaacgactgcatcggcgtttgccggcagtcttcttgagggctataacgcagcattcaatggtgccataaccggtggcagggctgatgtcagtatgcataatgcactgtggactctgggtggggactccgccatccacactcttaccgtcagaaacagccgtatcagttctgaaggagaccgtactttccgtaccctgacggtgaataaactggatgcaacaggcagtgattttgttctgcgtacggacctgaaaaatgccgataaaattaatgtgactgaaaaagccacgggttcagataacagcctgaacgtcagctttatgaaggatccggctcagggacagtccctgaatattcctctggtcacggcaccggcgggaacttcagcagagatgtttaaggccggcacccggatgataggtttcagtcgggtgactccaaccctgcatgttgacaccagtggtggcaatacgaagtggatactggacggttttaaagcggaggctgataaagccgctgccgcgaaggctgacagtttcatgaatgccgggtataaaaacttcatgacggaagtcaacaatctgaacaaacgtatgggtgacctgcgtgacacaaacggtgatgccggagcctgggcgcgcatcatgagtggtgccggttctgcagacggtggttacagtgataattacacccatgttcaggtcggctttgacaaaaaacatgaactggacggagtggacctgtttaccggtgtcacgatgacctataccgacagcagtgcagacagccatgcgttcagcggcaagacgaaatcggtggggggcggtctgtatgcttcagcattgtttgagtccggtgcctatatcgatttgattggtaaatatattcaccatgacaatgattacacaggtaactttgccggtctgggaacgaaacactacaacacccattcctggtatgccggtgctgaaacgggttaccgctatcacctgacagaggaaacgttcattgagccgcaggctgaactggtttacggcgccgtgtccgggaaaacattccgctggaaagacggtgatatggacctgagcatgaagaacagggacttcagtccgctgattggaagaacagggattgaactgggcaagaccttcagtggtaaggactggagtgtgacggcccgtgccgggaccagctggcagtttgacctactgaataatggtgagacggtactgcgtgatgcgtccggggagaaacggataaaaggcgagaaagacagccggatgctgtttaatgttggtatgaatgcgcagataaaggacaatatgcgctttggtctggagtttgagaagtcagcctttggtaaatataacgtggataatgcggtaaacgcaaatttccggtatatgttctga

SEQ ID NO: 10345 - DNA, 2049 bp, Escherichia coli
atgaagaacaaatatatcattgctccgggcattgccgtgatgtgttctgcagttatatcatcaggttatgccagttctgataaaaaagaagatacgcttgttgttactgcctccgggttcactcagcagctcagaaatgccccggccagtgtctcagtcattacttcagaacaactgcaaaaaaaaccggtttcagatctggtcgatgcagtaaaagatgttgaagggattagtatcactggtgggaatgaaaaaccggatatcagtatacgtggtctaagtggcgattacacgctgattctggtcgatggacgacgtcagagcggtcgggaatccagaccaaacggcagcggcggttttgaagccggatttatccctcctgtggaagcaattgaacgcattgaagtgatccgtggccctatgtcttccctgtatggttctgatgccatcggaggggtcattaatatcataaccaaaccagttaataaccaaacatgggatggcgtacttggacttggggggattattcaggaacatgggaaatttggtaactcaaccacaaatgacttctatctgtcaggcccattgattaaggataaacttggtcttcagctatatggaggaatgaactatcgcaaggaagatagtatctctcagggaacaccggcaaaagataataagaatataacggcaacgctccagtttactccgactgaaagccagaagtttgtttttgaatatggaaaaaataaccaggtgcatacattaacacctggtgagtctctcgatgcctggactatgcggggaaatcttaaacaaccaaacagtaaaagagaaacgcataattcacgtagtcactgggtagcagcatggaatgcccagggcgaaatactgcatcctgaaattgctgtttatcaggagaaagttattcgtgaggttaaatcaggtaaaaaagataaatataatcattgggatcttaattacgagtcaagaaaaccggaaataaccaacacaatcatagatgcaaaagtgacggcatttctgccggaaaatgtactgaccatcggaggtcaatttcagcatgcagagctccgtgatgactcagccacgggtaaaaaaacgacagaaacacagtctgtttcaattaaacagaaagctgtttttatagaaaatgaatatgcagcaacggattctctcgccctgactggaggactgcgtctcgataatcatgaaatctatggcagttactggaatccaagattgtacgctgtttataacctgaccgataatctcacactcaaaggggggatcgcaaaagcatttcgggctccttcaattcgtgaggtgagtcctggatttggaacactgacgcagggtggtgcctctattatgtatggaaacagggacctgaaaccggagaccagtgtaaccgaagagatcggtattatttatagtaatgatagtggtttttcggcgagcgcgacgctgtttaatactgattttaaaaataagttgaccagttacgatataggtacaaaagatccagtcaccgggttaaacacttttatttatgataatgtaggtgaggcaaatatcagaggggtggagcttgcaactcagattcctgtgtatgataaatggcatgtatctgcaaactatacatttactgactctcgtcgaaaaagtgatgacgaaagtctcaatggcaagtcgctgaaaggggaacctctggaaagaactcccagacatgcagccaatgcaaaactggaatgggattacactcaggatattacattttattcatctctgaattatacgggaaaacaaatctgggcagcacaaagaaatggtgctaaggttccccgcgttcgtaatggattcacatctatggatattggtctaaattaccagattctgccagacacgctgattaattttgccgttcttaacgtcacagacagaaagagcgaggatatcgataccattgatggtaactggcaggtcgatgaaggacgccgttattgggctaatgtaagagtatccttctga

SEQ ID NO: 10346 - DNA, 762 bp, Escherichia coli
ttgtctgatgagctcgagcgcaagatcattcgcctgttcgcgctggggataagctaccaggatatcagccgggagatcgaagatttatatgccttcagtgtttccacggctaccatcagtgcggttaccgataaagtcattcctgagttaaaacagtggcagcagcgcccgctggaaaaggtttatcccttcgtctggctggacgccattcactataaaatccgcgaagatgggtgttatcagagcaaggcagtttataccgtactggcgctgaatctggaaggcaaaaaagaagtcctgggcctgtatttgtcggaaagcgaaggcgctaacttctggctgtcagtattaagtgatctgcaaaaccgtggcgttgaagacattctgattgcctgcgtggatgggctgaccggcttccctgaagcgataaacagcatttatccgcagacagaggtacagttgtgcgtcattcaccagatacgtaactcgattaaatatgtggcgtcaaaacaccataaagcgttcatggccgacctgaagccagtgtatcgtgcggtgtcaaaagaagcagcggaaacggcgctggatgagctggaagcgaaacgggggcagcaatatccggtggtgctccagtcctggcgccgcaagagggaaaatctgtcagcgtacttccgctatccggcgaatatccgcaaggtgatctacacaaccaacgcgatagaatcagtccaccgccagttcaggaaactgaccaaaacctaa

SEQ ID NO: 10347 - DNA, 798 bp, Escherichia coli
atgcatgagctggaagtcctgctgagtcgcctgaaaatggagcatctgagttatcacgttgaaagcctgctggaacaggcagctaaaaaagagctgaactaccgggagttcctgtgcatggcgctacagcaggaatggaacggcaggcatcagcgcggtatggagtccaggctgaagcaggctcgtctgccgtgggtcaaaacgctggagcagttcgactttaccttccagccaggcatcgaccgtaaggttgtccgggaactggctggtctggcgttcgtggagcgcagcgaaaacgtgatcctgctgggacctcctggtgtcggaaaaactcatctggccatagctcttggcgtgaaagcgctggatgcgggacatcgggtactgtttatgccactggacagactgatcgcgacactgatgaaagcgaaacaggaaaaccggctggagcgtcagctgcagcaactgagttatgcccgggtgttgatcctggatgaaataggctatctgccgatgaacagagaggaagccagcctgttcttccggctactgaaccgtcgatatgaaaaagcgagcatcatactgacgtcaaacaaagggttcgcagactggggagaaatgttcggagatcacgtgctggcaacagcgatactggatcggttgctacatcactcaaccacgctgaatatcaaaggagagagttaccggttaaaagagaaacgtaaagctggagtgctgaccaaaaacacaacgccaatcagtgatgatgaaatggtgaaaagcggacagcatcagtaa

SEQ ID NO: 10348 - DNA, 888 bp, Escherichia coli
atggtattgcgagcttcagtcgcactacacggtcgttctgttactctttatgagaaagcgttcccgctttcagagcaatgttcaaagaaagctcatgaccaatttctagccgaccttgcgagcattctaccgagtaacaccacaccgctcattgtcagtgatgctggctttaaagtgccatggtataaatccgttgagaagctgggttggtactggttaagtcgagtaagaggaaaagtacaatatgcagacctaggagcggaaaactggaaacctatcagcaacttacatgatatgtcatctagtcactcaaagactttaggctataagaggctgactaaaagcaatccaatctcatgccaaattctattgtataaatctcgctctaaaggccgaaaaaatcagcgctcgacacggactcattgtcaccacccgtcacctaaaatctactcagcgtcggcaaaggagccatgggttctagcaactaacttacctgttgaaattcgaacacccaaacaacttgttaatatctattcgaagcgaatgcagattgaagaaaccttccgagacttgaaaagtcctgcctacggactaggcctacgccatagccgaacgagcagctcagagcgttttgatatcatgctgctaatcgccctgatgcttcaactaacatgttggcttgcgggcgttcatgctcagaaacaaggttgggacaagcacttccaggctaacacagtcagaaatcgaaacgtactctcaacagttcgcttaggcatggaagttttgcggcattctggctacacaataacaagggaagacttactcgtggctgcaaccctactagctcaaaatttattcacacatggttacgctttggggaaattatga

SEQ ID NO: 10349 - DNA, 417 bp, Escherichia coli
atgtatattgaacagcattctcgctatcaaaataaagctaataacatccaattaagatatgatgataagcagtttcatacaacggttatcaaagatgttctattatggattgaacataatttagatcagtctttactgcttgatgatgtggcgaataaagcgggttataccaagtggtattttcagcggctgttcaaaaaagtaacaggggtcacactggctagctatattcgtgctcgtcgtttgacgaaagcggctgttgagttgaggttgacgaaaaaaactatccttgagatcgcattaaaatatcaatttgattcccaacaatcttttacacgtcgatttaagtacatttttaaggttacaccaagttattatcggcgtaataaattatgggaattggaggcaatgcactga

SEQ ID NO: 10350 - DNA, 594 bp, Escherichia coli
atggaaaataaaaatcatcaacaagaaaattttaagagtacctatcaatcactggttaactcagcacgaatattgtttgttgaaaaaggctatcaagctgtttcaatagatgagatctcgggaaaagcgttggtgaccaaaggtgccttttatcatcactttaaaaataaaaaacaattactcagtgcctgttataagcagcaattaattatgattgatgcctacatcacaacaaaaactgatttaacaaatggttggtctgccttagaaagtatatttgaacattatcttgattatattattgataataataaaaaccttatccctatccaagaagtgatgcctatcattggttggaatgaacttgaaaaaattagccttgaatacattactggtaaggtaaacgccattgtcagcaaattgatccaagagaaccaacttaaagcttatgatgatgatgtgcttaaaaacttactcaatggctggtttatgcatatcgcaatacatgcgaaaaacctaaaagagcttgccgataaaaaaggccaatttattgctatttaccgcggctttttattgagcttgaaagataaataa

SEQ ID NO: 10351 - DNA, 1206 bp, Escherichia coli
atgaatagttcgacaaagatcgcattggtaattacgttactcgatgccatggggattggccttatcatgccagtcttgccaacgttattacgtgaatttattgcttcggaagatatcgctaaccactttggcgtattgcttgcactttatgcgttaatgcaggttatctttgctccttggcttggaaaaatgtctgaccgatttggtcggcgcccagtgctgttgttgtcattaataggcgcatcgctggattacttattgctggctttttcaagtgcgctttggatgctgtatttaggccgtttgctttcagggatcacaggagctactggggctgtcgcggcatcggtcattgccgataccacctcagcttctcaacgcgtgaagtggttcggttggttaggggcaagttttgggcttggtttaatagcggggcctattattggtggttttgcaggagagatttcaccgcatagtcccttttttatcgctgcgttgctaaatattgtcgctttccttgtggttatgttttggttccgtgaaaccaaaaatacacgtgataatacagataccgaagtaggggttgagacgcaatcgaattcggtatacatcactttatttaaaacgatgcccattttgttgattatttatttttcagcgcaattgataggccaaattcccgcaacggtgtgggtgctatttaccgaaaatcgttttggatggaatagcatgatggttggcttttcattagcgggtcttggtcttttacactcagtattccaagcctttgtggcaggaagaatagccactaaatggggcgaaaaaacggcagtactgctcggatttattgcagatagtagtgcatttgcctttttagcgtttatatctgaaggttggttagttttccctgttttaattttattggctggtggtgggatcgctttacctgcattacagggagtgatgtctatccaaacaaagagtcatcagcaaggtgctttacagggattattggtgagccttaccaatgcaaccggtgttattggcccattactgtttgctgttatttataatcattcactaccaatttgggatggctggatttggattattggtttagcgttttactgtattattatcctgctatcgatgaccttcatgttaacccctcaagctcaggggagtaaacaggagacaagtgcttag

SEQ ID NO: 10352 - DNA, 624 bp, Escherichia coli
atgtctagattagataaaagtaaagtgattaacagcgcattagagctgcttaatgaggtcggaatcgaaggtttaacaacccgtaaactcgcccagaagctaggtgtagagcagcctacattgtattggcatgtaaaaaataagcgggctttgctcgacgccttagccattgagatgttagataggcaccatactcacttttgccctttagaaggggaaagctggcaagattttttacgtaataacgctaaaagttttagatgtgctttactaagtcatcgcgatggagcaaaagtacatttaggtacacggcctacagaaaaacagtatgaaactctcgaaaatcaattagcctttttatgccaacaaggtttttcactagagaatgcattatatgcactcagcgctgtggggcattttactttaggttgcgtattggaagatcaagagcatcaagtcgctaaagaagaaagggaaacacctactactgatagtatgccgccattattacgacaagctatcgaattatttgatcaccaaggtgcagagccagccttcttattcggccttgaattgatcatatgcggattagaaaaacaacttaaatgtgaaagtgggtcttaa

SEQ ID NO: 10353 - DNA, 624 bp, Escherichia coli
atgtctgacatttcacgagttaaaatactcagtgctttgatggatgggcgagcttggacggccactgagctaagttctgtggcgaatatatcagcttcaacggcgagcagtcatttatctaaattattagattgccagctaatcacagtagtagctcaaggcaagcatcgttattttcggctagcaggaaaagatattgctgaattgatggaaagtatgatggggatctccttaaaccatggcgtacatgccaaagtttccacgccagtgcatttacgaaaagcacgtacttgctatgatcatttagctggcgaagttgccgttaagatctatgattccctttgtcaacagcaatggatcactgaaaatggttcaatgatcacattaagtggtattcaatattttcatgaaatgggaattgacgttccttccaaacattcacgtaaaatctgttgtgcgtgtttagattggagtgaacgccgtttccatttaggtgggtacgttggagccgcattattttcgctttatgaatctaaagggtggttaactcgacatcttggttaccgtgaagttaccatcacggaaaaaggttatgctgcttttaagacccactttcacatttaa

SEQ ID NO: 10354 - DNA, 387 bp, Escherichia coli
atgtttgatgttcacgttgttttagataatcaaataggacaattagcattactaggaaaaacattaggtaataaaggtattggattggaagggggagggatatttacggttggtgatgaatgccatgctcattttcttgttgaacaaggaaaggaagctaaaatagcgctagagcaagctggactgttagtacttgcgatccggacaccattaattcgtaagttaaaacaggaaaaaccgggggaacttggcgaaatagcacgagtattggcggagaataacattaatattttagtgcaatacagtgaccatgctaaccaactgatattaataacggacaatgatagtatggctgcatctgttacgctcccttgggcaataaagtga

SEQ ID NO: 10355 - DNA, 174 bp, Escherichia coli
atgttatcgctatcttggtgggaaaacgaatacgcagttctgcaatggaaaaatcatgttttacatgcgaaagctcaacaagaagggcgagagtcaatatttgatttttacaaaattagtattgctcatattactcgcgaatattcatttaaaaaggacaaggataatgtttga

SEQ ID NO: 10356 - DNA, 981 bp, Escherichia coli
atggctagaaatgcaacaaacaagttactgcacaaagctaaaaaatcgaaaagcgacgaattttacactcagtattgtgatattgagaacgaactgcaatactacagagagcacttctctgataaggttgtttattgcaattgtgatgatcctagagtaagcaatttctttaaatattttgcagtgaattttgataatcttggcttgaaaaagttaatagcatcttgctatgtagagaataaagaaggtttttctagtagcgaagccgcgaagaacggattttactatgaatatcataaagaaaatggaaagaaattagtttttgatgatattagtgtttcttctttctgtggcgatggcgattttcgcagttcggagagcattgatctgctaaaaaaatcagatattgttgttacgaatcctccattctcgttatttagagagtatcttgatcaactaattaagtatgataagaaattccttataattgcaaatgttaattcaataacatataaagaggtgtttaatctaattaaggaaaataagatttggcttggggttcatctcgggagaggtgtttctggatttattgttccagagcattatgaattatatggtactgaggcgagaattgattctaatggtaatagaattatctcgccaaacaactgcttatggctaactaacctagatgtctttattaggcataaagacttgcctcttacaagaaaatattttgggaatgaaagttcatatccaaaatatgataattatgatgctataaatgtaaacaaaacaaaggatattccattagattacaatggggttatgggggttcctatcacattcttgcataagtttaaccctgagcaatttgagttaataaaatttagaaagggtgttgatgaaaaagatttgtctataaatggtaaatgcccttatttcagaattttgataaaaaacaaacgattacaaaagtaa

SEQ ID NO: 10357 - DNA, 834 bp, Escherichia coli
atgtctaataaaaaacagtcaaataggctaactgaacaacataagttatctcaaggtgtaattgggatttttggggattatgcaaaagctcatgatctcgctgttggtgaggtttcaaaattagtaaagaaagctcttagcaacgaataccctcaattatcatttcgatatagagatagtataaagaaaacagaaataaatgaagctttaaaaaaaattgaccctgatcttggcggtactttatttgtttcaaattccagcatcaaacctgatggtggaattgtagaggtcaaagatgattatggtgaatggagagttgtacttgttgctgaagccaaacaccaaggtaaagatattataaatataaggaatggtttgttagttgggaaaagaggagatcaagatttaatggctgctggtaatgctatcgaaagatctcataagaatatatcagagatagcgaattttatgctctctgagagccactttccttacgtccttttcttagaggggtctaactttttaacagaaaatatctcaataacaagaccagatggaagggttgttaatcttgagtataattctggtatattaaataggttagatcgactaactgcagctaattatggaatgcctataaatagtaatctatgtattaacaaatttgtaaatcataaagacaaaagcattatgctacaagcagcatctatatatactcaaggagatgggagggagtgggattcgaaaattatgtttgaaataatgtttgatatatcaacgacttcgctcagagtgttggggcgtgacttgtttgaacagcttacatctaagtga

SEQ ID NO: 10358 - DNA, 576 bp, Escherichia coli
atgaattataaaaatatattttcccgatatggatattatgatgatgaaggtaaaccactacttattcgctcacaccagccacggcaccttttaaacacaatagcccattatggtgaaatgtctgaactggatatagctaaatggtctggtcgtatcaatgcgaatcagaacagagtttataaccatgtgtcggaagaagatatgttagataaaatcaaagctattaaattgaataggagtaattactgtcaaagggagtcaatacccacaaatgaattgacaattgattttgataaccttaatcaaggtgcaatacacttaactgaatttggttactgtgtacataactatttaatcaagccttgtgcaaaaattaatcatcttattgaatgtgataatgaaacaccggacattaactcagtagatagaattagactgcaatctgtccgagagaaagtaatgcaattaaagagaataactcagatcgcttatgaaaatggtgattatggtgcagacaaatggttgcaacaccatgaaaaaaatttggaaagaattaataagcttttgaataattaa

SEQ ID NO: 10359 - DNA, 387 bp, Escherichia coli
atggcaaaacatttgaacaggagtgaaataaaagcaattaaacacattatactgacttgggacggtaaaatcacatggagtgatttatgtgaatcagtgtataagaatctaaacagaactatcacaaggcaatctttaagtgctcatgatgaagttgttgaagcatatagaataaagaaaagtttgtccaatttgaaaaaatctggtctaaagaaaccagctaacttaactattgcggcacaacaaataataaaccttaaagccgaaaacgaaatgttgaaaaaacagaacaatagatacaaagagcaatttagctattggcagtataatgcttatagacacggtcttactatggaacagttgaataggccatttaataaaaaataa

SEQ ID NO: 10360 - DNA, 426 bp, Escherichia coli
atggacaaaaacattatctatccagagtttactctggaagagcaacttatcattatcgtcgataaatatatctcaaaacgataccaaccaggtgataaaagtttctcatatcaactttacctaatttttgtgggataccatttaaaatatttctaccctaaaaggatttattccaaatccaatcaaaatattgataacataatgactatgtttagctcggtatacaaaaatctgacaagcaatcttctacaacgattaaataacaaagaaggagttattagggaactaaactcgcttgttaattacatagataacaatcaagaaaaagcagaggaaatctatgctactgtcagagcacaatatgaaatgaaagtaattgagaaagagttaacccatgaagttcgcgtaagaaccgtcaggttatag

SEQ ID NO: 10361 - DNA, 315 bp, Escherichia coli
atgaaaatatactcaatcctcacagttattcttacctcatttcttctaaccgcatgtaacagtgaaccatcgcaagacgatatatacaatgctttcaaaagtgttgtagataaatcaaatgccagtatgaaagcttttgattcaagagtttcagaaaaagatcttttaagaattgattatgtgaagaaagttagctgcacagaagaagcaaataatgtttataactgcattgtcgatgcctctattagtaatatgaaacagacaaaacctgttaagcttgtgaaagcagatggtatctggaaagaagttcagtag

SEQ ID NO: 10362 - DNA, 387 bp, Escherichia coli
atgaaccgatttataacgtcctctttttttattattgtcttcctgctttctggctgttcaacatcagggaaccagaaccttaaaaacgaaacaccacaaagcctccagtcaaagatcattaaaaacaaaacaactaagactgaattactcactaagttaggtgagcctgatacaagaaccacactcgatgacggaaatgagcaatggaaatatttcatgtctaacaatcagttcaatgcaacgactttcattcctgttgtggggctgtttactggcggttctcagactcagtctaaaactcttgagatcgacttcaagggagagaccgtaagtaaatggactttctcctctgataacaacaacaccaaaactggtattcttaattaa

SEQ ID NO: 10363 - DNA, 273 bp, Escherichia coli
atggaaaacgaaacaataaagtgcccgttctgctttacacaaagtcctcatggtgtgcggatttgcaaaggctgtcatgcaaaggtcgcttatggtgaaagcccgctcagtgtggcattcctgtttcaattcgtggcatttggtctcgcgtggttagcattttcgtggaccggcagcactcttgtatcagtcattacgtttttcgtaagcatcattattcttatctataaaatcaaaagaatgtatgcagacagagttgtttttatacggtga

SEQ ID NO: 10364 - DNA, 1170 bp, Escherichia coli
gtgaagggtatgcggaacattcgcaggggtaagaactttgctggtgtagtccagtatgcattgaagcccggagtacaccataaaagcgatccagttgtcattggtgggaacatgttaagtgattcagcctttgaactgatcgctgaatttgatggcactaaaccacttcgcccagatgttcagaaggccgtttggcacaactcgcttcgattacccgatggtgaatcactaacggctaaaaaatggtcaagcatcgcagatgaatatatgaggagaatgggattcagtgatacccacctccgttgctatgtcttacatgacgacgaaggccagcacatacatatcattgcaagcaggattgacatggccggtggtaagctttacttgggcaagaatgaaaacctcatcagcacccggatcattagtgaactcgaaatcactcacggtctgacagtgacaaagacagcaccatccatctcaaataaacaaccgaagcggaaacgaatctctcgcaacgaacagatgctatcagaacggactggggttccctgcccgaagaaatctcttcaacggaccattgatagaagtttggctgataagcctgaccttttgacttttatcaagaggctggaacaagcagaagtatcctggaaggttaatgttgcctctaccggtaagatgaacggcttttcattcgaatatgcaggaatcgctttcaaagcttcgcaattaggtaaaagctactcttgggcaaatctcagtaatcggcttaactacaaccccgaccacatagaagctctgcgagcgacaaaggaagttatccctgctcctgctcctgctcctgctcctgctcctgctcctgctcctgctcctgctcctgcaacagttttgaaaaacactgagagaaaggaaagtatcagtgaaaaaattgctgaactcgaactacgactcaaagaagacagaagaaacgaaatcgtagaaaagattcttcaaaaaaactcagtacaacagcaaaagcatctcaggcttatcggctggattccatttctcagaaggctcgcagagcttctcagaagctatgggaagagcattcttcacaaaacccatatgaccttctcaaatatctccgcaatgaaacctttaaacaaggcgagaaaaattcgtttatag

SEQ ID NO: 10365 - DNA, 441 bp, Escherichia coli
atggataatcagccatcagcgtccaaaatacccagcagcatacaacctataataaaaacaaattcaaatctcactaacctaattagcaatcatctcagaatacattgtataagtgttcgactcaacaacgatgaattacaacttctgaatataaaacgaggtgataaaagtaaaggcgaatggctccgtatggctttccttcatacatccccttccatcattccagagatcaatgtcgaagcatggaaagctttatctgacatttcccaaaagctaaatcgtattgctatacatatcgatggtaagagcaaagatagccaacttactcatacagagcttttcgctgtgaagcgacaacttgaagagcttcgtcacaacttgttaagaacagatttttggagtatccctcgtgaagggtatgcggaacattcgcaggggtaa

SEQ ID NO: 10366 - DNA, 753 bp, Escherichia coli
atgcgttatgccgtacagtctggcatcatcagatataatcctgctctggatatggctggcgcattgactacggtaaaacgccagcatcgccccgctcttgatctttcacgtctgcctgaacttctgtcgcgtattaacagttataaaggtcagcctgtcacccggcttgccgttatgctgaatttactggtttttattcgttccagtgaactcagatacgcccgctggtctgaaattgatattgacaatgccatgtggactattccagccgaacgcaaacctctgccaggggtaaaattctcacaccggggctccaagatgcgaacaccacatcttgtgccactcagcaaacaggctgtagccatactgacagaacttcagacatgggctggtgaaaatggtctgatctttacgggagcacatgacccgcgtaaaccaatcagtgaaaataccgtaaataaggccctcagagtgatggggtatgacacaaccaaggaagtctgtggccatggattccgggcgatggcgtgcagtgcattgattgaatccggcttatggtcaagagatgcggttgaacgtcagatgagtcatcaggagcgcaacggagtacgtgccgcgtatattcataaagcagaacatctggaagaacgtcggcttatgctgcaatggtgggcagattttctggatgcaaacagggaggagtgtatcagtccgtttgaatatgcaaaagttaacaatccactgaaaaggtga

SEQ ID NO: 10367 - DNA, 369 bp, Escherichia coli
atggtcatcgttccggaagatgacacgctggaggttactgctctggtacaaaataaagatattggttttattaacgtcgggcagaatgccatcattaaagtggaggcctttccttacacccgatatggttatctggtgggtaaggtgaaaaatataaatttagatgcaatagaagaccagaaactgggactcgtttttaatgtcattgtttctgttgaagagaatgaattgtcaaccgggaataagcacattccattaagctcgggtatggctgttactgcagaaataaagacaggaatgcgaagcgtaatcagctatcttcttagtcctctggaagagtctgtaacagaaagtttacatgagcgttaa

SEQ ID NO: 10368 - DNA, 690 bp, Escherichia coli
atgtgggacagcatgcttgttcctctgttgaaagagaggccggctctgacaccaacaactctgctggagatgctacaggataaatatcccggccagtatcccaacagccttcgaagaacaatgcaacggcgggttcgcgaatggaagctacagtatagtgcagagcaggaggtcatgttccgccagcgacatcagcccggtctgcgaggcctgtcggactttactgaactgaaaggtgtagttgtcaccatcgtcggtaagttgtatcacttccgtctggaatggagccactggagctggatgcgggttgtgctgggtggtaagagcttctctgctctggctgaaggtctgcaggaagccctcggacaactgggcggagatggacgccgcgagctgactgagcgttatactgctatctgtcagcactacggaatgcagggcgtacataataattccggtcggggccacgaaaatggctcggttgaaagtgcccacgggcatctgaaaaggcgtatctgtcaggcgctgatactgcggggcagtaacgacttcagcaccatagaagaatatcaggccttcatcactcagcaggttatgcggcacaaccgtaacaatcatgatctgatcaaggaagaacgtcttcatctgaaaccgctgccgcttcgtcgcagtgctgactgtgagggttag

SEQ ID NO: 10369 - DNA, 231 bp, Escherichia coli
atggcaggaaggctgatggtacatgccctgaaactggctgcaggatacgacgatatctcagtcgtggcaaaaggtatggagcagatgttgaatcccccgggaaacgtggatctgcaccggctgatgcgcttcctgggtataaaggaaaaggcgttgccagtagtcaatgtgatacagcataacctgagcagttatgagcaactactgcgtggcaagggaggttcgcagtga

SEQ ID NO: 10370 - DNA, 354 bp, Escherichia coli; identical to SEQ ID NO: 5336

SEQ ID NO: 10371 - DNA, 708 bp, Escherichia coli
atgctggccctgcaactggccgcacagattgcaggcgggccggatctgctggaggtgggcgaactgcccaccggcccggtgatctacctgcccgccgaagacccgcccaccgccattcatcaccgcctgcacgcccttggggcgcacctcagcgccgaggaacggcaagccgtggctgacggcctgctgatccagccgctgatcggcagcctgcccaacatcatggccccggagtggttcgacggcctcaagcgcgccgccgagggccgccgcctgatggtgctggacacgctgcgccggttccacatcgaggaagaaaacgccagcggccccatggcccaggtcatcggtcgcatggaggccatcgccgccgataccgggtgctctatcgtgttcctgcaccatgccagcaagggcgcggccatgatgggcgcaggcgaccagcagcaggccagccggggcagctcggtactggtcgataacatccgctggcagtcctacctgtcgagcatgaccagcgccgaggccgaggaatggggtgtggacgacgaccagcgccggttcttcgtccgcttcggtgtgagcaaggccaactatggcgcaccgttcgctgatcggtggttcaggcggcatgacggcggggtgctcaagcccgccgtgctggagaggcagcgcaagagcaagggggtgccccgtggtgaagcctaa

SEQ ID NO: 10372 - DNA, 852 bp, Escherichia coli
gtggtgaagcctaagaacaagcacagcctcagccacgtccggcacgacccggcgcactgtctggcccccggcctgttccgtgccctcaagcggggcgagcgcaagcgcagcaagctggacgtgacgtatgactacggcgacggcaagcggatcgagttcagcggcccggagccgctgggcgctgatgatctgcgcatcctgcaagggctggtggccatggctgggcctaatggcctagtgcttggcccggaacccaagaccgaaggcggacggcagctccggctgttcctggaacccaagtgggaggccgtcaccgctgatgccatggtggtcaaaggtagctatcgggcgctggcaaaggaaatcggggcagaggtcgatagtggtggggcgctcaagcacatacaggactgcatcgagcgcctttggaaggtatccatcatcgcccagaatggccgcaagcggcaggggtttcggctgctgtcggagtacgccagcgacgaggcggacgggcgcctgtacgtggccctgaaccccttgatcgcgcaggccgtcatgggtggcggccagcatgtgcgcatcagcatggacgaggtgcgggcgctggacagcgaaaccgcccgcctgctgcaccagcggctgtgtggctggatcgaccccggcaaaaccggcaaggcttccatagataccttgtgcggctatgtctggccgtcagaggccagtggttcgaccatgcgcaagcgccgccagcgggtgcgcgaggcgttgccggagctggtcgcgctgggctggacggtaaccgagttcgcggcgggcaagtacgacatcacccggcccaaggcggcaggctga

SEQ ID NO: 10373 - DNA, 1440 bp, Escherichia coli
atgaacaataataaaattattacacctatcattatggctggtggttcaggcagtcggttgtggccactatcaagaattctctatccgaaacaatttcttagcctaatcggtagtcataccatgcttcaaacaacggctaatcgtctggatggtttggattgtaccaacccttatgtcatttgtaatgaacaataccgctttatagttgctgaacagcttagaaaaatcgatagattgacttcaaagaatatcatccttgagcctgttgggcgtaacactgcccctgcaattgcattagcggcgttgctgatgtctaagtctgataaaagtgcagatgatcttatgctcgtactggctgcagatcacgttatacacgatgaagaaaaattttgtaacgctgttagatcggcaattccatacgctgctgatgggaaattggtaacatttggtataattccagacaaagcagaaactggttatggttatatacatcgaggacaatatattaatcaggaagattcggatgcatttatagtgtcatcatttgttgaaaagccaaatcatgagacagccactaaatatcttgcttccggtgagtattattggaatagcggtatgtttttgtttagtgcaaatcgttatatagaggaacttaaacaatttcggcctgatattttatccgcttgtgaaaaagcaattgcttcagcgaactttgaccttgattttgtgcgtttagatgaaagttctttctctaagtgtcctgaagagtcaattgattacgctgtaatggaaaaaacaaaagacgcaattgttattccaatggatgctggctggagtgatgtcggttcatggtcttctctttgggaaattaatgataaagactcagacggcaacgtaatagttggggatattttctctcatgaaacaaagaattctttcatatatgccgaatcgggaattgttgctacagttggagtggaaaatttagttgttgtccaaacaaaggatgctgttcttgtctcagagagaaataaagttcaggatgtaaagaaaatagtcgaacaaattaaaaattcaggtcgtagcgagcattatgttcatcgcgaagtatatcgtccttggggtaaatatgattccattgacacaggggagcgttatcaggtcaaacgtataacagtaaatcctggtgaaggactttctttacaaatgcaccatcatagggcagaacattggatcatagtttctggaactgcaagggtgactataggttctgaaactaagattcttagcgaaaatgaatctgtttacatacctcttggtgtaatacactgcttggaaaatccagggaaaattcctcttgatttaattgaagttcgttctggatcttatttagaagaagacgatgttatccgttttcaggaccgatatggtcgtagctaa

SEQ ID NO: 10374 - DNA, 1206 bp, Escherichia coli
atgaatcaatcagagcagagaaaaaaaatactggttcttacacctcgctttccctaccctgtcattggaggggatagattaagagtctatatgttatgtaaagaactttccaaaaaatatgatcttattcttctgagcttatgtgatcaaccactagaacttgaaataaatataaatgactcggtcttcaaagaaattcatcgtgtctatctaccaaaatataaatcatattataatgtattaaaagctttggttacgcaaaaaccgttgcaaattgcttattatcaatcggacacatttaagaataaatacaataaattaattaaacaatgcgatgcagtattttgtcatctgataagagttgctgattatgttaaggatacagacaagttcaaaattcttgatatgacagatgcaatatctttgaattacagtcgcgttaaaaaattagcaagtaaaaaaagtttgcgtgcaattatttattctctggaacaaaaaagattagaatcatatgaacgttctgtggcgaatctttttgatttgaccacttttatttcatccgtagaccgtgactatctctaccctaatccgggcagtaatatccatatagtcaataatggggttgatacatcagccttgagatatataaaaagagaaataaaaatcgataagcctgtggaacttatatttatcggaaatatgtattctttacaaaatatggatgctgcaaaacattttgctaagaatattttaccttgcttgtatgatgagtttaatattatttttaaagtgattggtaagatctcagaaactaataaaaatatattaaattcatttaaaaatacaattgctttaggtactgttgatgatatcaattcttccgcttctacagggcatataggtatatgtcctgttcgtcttggagcaggcgtacaaaataaaattcttgaatacatggctttaggtttaccatgtattacatctagcattggttatgaaggtattaatgcaaaatcaggtagcgaaatttttgttgcagatacagtagagcaatataaaaacgtactaagagaaataatttacgattataatcgttatactgaagtggctgaaaatgcccgtagttttgtagaaaataatttttcttgggaatcaaaagttgccaatttaatgaatacattagatgagaaattatatgaacaataa

SEQ ID NO: 10375 - DNA, 1008 bp, Escherichia coli
atgaacatattagtaactggtggtgctggatatatcggatctcatacggctattgaattactgaatgcaggtcatgagattatcgttctggacaatttcagtaatgcttcatacaagtgtatcgaaaaaataaaagaaattactcgacgtgattttataacaattactggagatgctgggtgtaggaagacactctccgctattttcgagaaacacgccatagatatagttattcattttgctggctttaaatctgtttcagagtctaaaagtgaacccttaaagtattaccagaataatgttggagtgaccattactttattacaggtaatggaagagtacagaattaaaaaatttatctttagctcatctgcgacagtctatggtgaaccagagataattccaattccagaaacagctaaaattggaggaactacgaatccatatggcacatcgaagtattttgttgaaaaaattctagaggatgttagttccacgggaaaactggatataatttgcttgagatattttaatcctgtcggtgctcattctagtggtaaaataggtgaggctccatctggtatccctaataatcttgttccttatttattggatgttgcgagtggtaaacgtgataaattatttatttatggcaatgattaccctactaatgatggaacaggtgtaagggattttattcatgttgttgacttagcgaaaggtcatttggctgcaatgaattatttaagtatcaattcgggatataatatctttaatcttggtacaggaaaaggttattcggtgcttgaattaatcactacatttgaaaaattaacaaacattaaggtcaataaatcttttatagagagaagggcaggggatgttgcgtcttgttgggctgatgcagataaagctaattctttattggactggcaagccgaacaaactctagaacagatgttattggactcgtggcgttggaaaaaaaattatccagacggattctga

SEQ ID NO: 10376 - DNA, 255 bp, Escherichia coli
atgaaaacaaaaattgcagaagcactatcatatggattatatatttatgcgacagagcattccttaatcggctatgatgaaattataaacaataaggagtgtgttaaaaaaatctcacatttggatgaggaatttcctaaagatttcaagatgaaaagtatcaataaacagctaataatgtcttatcagcaaaaatattattcacattatcggtttaatggccatgaacttgatataataaattttgacgattag

SEQ ID NO: 10377 - DNA, 885 bp, Escherichia coli
atgtcattcagccatttttccctctccgcacaagtgaaatcatatctgacgtttcttcctgaagaaattcgccagaaaatccttgaacatctccacggtgttattcattacgagcccgtgattggcattatgggtaaatccggcaccggcaaaagcagcctgtgtaatgccatttttcagtcccgtatctgcgccacgcatcccctgaacggctgcacccgccaggctcatcgtcttaccctgcagctcggtgaacgcagaatgacgctggtcgatctgcccggcattggtgaaacaccgcagcatgatcaggaataccaggcgctttatcgtcagttactgccggaactggatctgattatctggatcctgcggagtgatgaacgtgcgtatgctgccgatattgccatgcatcagtttttactgaatgagggcgcagatccctcgcgctttttgtttgttctcagccatgccgatcgcatgtttcctgctgaagaatggaatgccacagaaaaatgcccgtcccgtcaccaggaactctcactggcgacagtaacagcccgggtggccaccctgttcccttcatcatttccggtactccctgtagccgcgcctgcaggctggaaccttccagcgctggtgtcactgatgatccacgcgctgccaccacaggcaaccagcgcagtttattcacatatccggggggaaaaccgctctgaacaggcccggaaacacgcacaacagacttttggtgatgccatcgggaaaagttttgacgacgccgttgcccggttcagttttccggcctggatgttacagcttctgcgtaaagcccgggaccgcattatccacctgctgatcacactgtgggagcgtctgttctga

SEQ ID NO: 10378 - DNA, 300 bp, Escherichia coli
atggaattacagaactggcgaaaagaacctcgtaaaaactattcgaatgaattcaaacttcgtatggtggaactggcatcacaacctggagcttgtgttgcacagattgcacgtgaaaatggcgtcaatgataatgttattttcaaatggctcaggctctggcagaacgaagggcgtgtttcgcggcgtcttccggtaacgacctcttctgacactggcgttgaattattacctgtagaaataacgccggatgagcagaatgaaccgccccgggtttcctggagagtgttttatctgtga

SEQ ID NO: 10379 - DNA, 372 bp, Escherichia coli
gtgctggatgcactggagcaggcgttatgggcccgtcgaccgtccggcacggtccatcacagtgataaaggttctcagtatgtatcgctggcctacacacagcggcttaaggaagccggattactggcatcaacaggaagtacaggcgactcgtatgacaacgcgatggcggagagcatcaatggtctttacaaagcggaggtaatacaccgtaagagctggaaaaaccgtgcagaagtggaactggccacactcacgtgggtggactggtataacaatcgacgattgctgggaaggctgggccatactcctccggcagaagcagaaaaagcttattatgcttccatcggaaacgatgatctggcagcctga

SEQ ID NO: 10380 - DNA, 906 bp, Escherichia coli
  misc_feature (828)..(837): n is a, c, g, or t
atgttcgaaaatggtgagagatattgtcatatcgtaaataaaaatactggtgaaccattgtattatcctaacttgtatataacaacacaggtcaggaatcggtcagagtctatatcaacaatgaaggttattgccggtagcatttcattgttatatcgattctttatgaggaaagagatcaatattgatgaaagaattcagaaaaggatatttctggctcctcatgaaattgaagatttgatcgaattcacttcattcaattttcgagatggcgagaatgataattttagaagttcaaatgtcaaaaaaccaactaagtactttcggataacaaccatagctaactatctggaatggctgtgcaaaatacatctttctcatacaggacagaaggatactctcaaatatattttagatttcattaacaacataaaacgaaagaaaccgagaaataatgataaatataatatggatatagaaaaaagtttaaataatgaacaattggattctttgtttagcattcttgcaccgggtagcaaattaaatcctttttcagaaaaagtgcaaaaaagaaacaatctaatattcctgctattacactgctttggcctgagagcaggtgaacttttgaatctgcgaattggtgatatagattttgcagaatcgacaattgcaataagaagaagagcaaatgataaaacagatccgcgagtgtatcagcctttagttaaaacttgtgagaggaaattaattgctgataaaaagctcatgtttgaaatttcagattatattctgaatgatcgaagaaacataaaaaattctaacaannnnnnnnnnttattacttataaggaaggaaaaacccaagggccacctatttcattttcttcatatcacaaagtggtga

SEQ ID NO: 10381 - DNA, 1305 bp, Escherichia coli
atgaataatttaattaaaaataaatctgataaaatgtctttgcaggaacataaaatcgtcagttcgattgaaaataacggaatcaatcttacaaacttaatatatgctatgaacgaaaatttggtttgtgggtttgtatatacagtacaatattattttaatagcaacagctatttgtatgtgaaaaatattgttagaaatatggagagtcttatccgtaaactatctcctactcatattgatgataaggttctaattgaatatcaaaataagaaattatcaaaagcctcagcatcatttcgcgttttacgaccatttttgattaaatggtttgagttaggatatccgggaatagatgaaagtgcggtagaactgttaaagcatttggacctaaaaataaaaaaatctggtcagtctgtgcttcaagatgatccaacagagggaccattaaataaagaagaacatacttctttgattaaggctatgaatcatgcatatagaaaaggtgaactgtcactgccacattatgcaatatcactattgatcagtcttacaggtagaagacctcagcagttagttatgttgaaatataaagaccttcttcaaaagaacttagataatggcaaagtagaatatgtaatttcagtgccacgagtaaaacaacggggtaaagaactacgatatcgagaacttgcaataatatcagaggttgcatcaattgttcaattgcaagctaatcaatcagtgaaacttgttgagcaagctcttggaaaaactcttgatgattattctaaacgagaagttcctattttcttaaatgaggaaaaactctcagatttatccataacaggttcaattcttctggaatataataaattatatgcgaagcctacaattgctaatgtagcattgaaaagtattgttaataatgggaatgtaatatccaaccgtaccggttcgatactaaatattactcctcgtaggcttcgttatacaatagcaactatgctggctaagaatgggcataatgttaatactatagctgaattattggatcattcatctacttcaagtgcggggatttatattaaaaatcatgctgacagtgttgaaaggattgattccgctgtttcagaacaattgtcatttgtcgctgatatttttatgaacggaatcaaatcgaaaaagagtagtcatttcaaatttttttcttcaagtagatgccagagtcagaattcaggattcccttgcaatcaatgtatgttttttattccgattgatcgcagtgaggtgaatcaactatga

SEQ ID NO: 10382 - DNA, 1536 bp, Escherichia coli
atgcggtgctggaaacagggggggatgatgatcgttaaattccatccccgggggcgtggtggtggtgccggtccggtggattacctgctgggaaaagaccggcagcgcgagggggcgaccgtgctgcagggaaagccggaggaagtccgggagcttatcgatgcctcgccgtatgcgaaaaagtacacctccggtgtgctgtcgttcgcggaggctgaactgccgcccgggcagcgggagcagatcatggccagctttgagcgggttctgatgcccgggctcgataaagaccagtacagcattctgtgggtggagcacaccgacaaggggcggctggagctgaatttcctgatccccaacactgaactgctgaccgggaaacgcctgcagccgtactacgatcgcgccgaccggccgcgcatcgatgcctggcagaccgtggtgaacggcagactggggctgcatgatccaaacgccccggagaaccggcggttactggtcacgccgtccgcactgccggaaacgaagctggaagccgctcaggcgattacacgggggttgctggccttagcctcatccggggagctaaaaacgcgcgaggacgtcacaggggcgctcacagcggcaggttttgaggtggtccgcaccacaaaaaacagtatcagcattgccgacccggacggggggcgaaacatccgactgaagggagccatttatgagcagtcttttagcgctggcgaaggacttggagcagcaatcgaaagcgcagcagcagagtaccggcgagatgctgaaagccgcattcagcgagcacgagaagtctgtaaaagcggaactgagcgcaagcgcgaagagaatcagcgacgccatcagcgcccacgagcagggtatgaccgcggcgatgcagtcgaaccggctgagcgtgctgcgtatggtcggccggacgtggctgaccatcaccctggtctcggtactgctgatcgccacgagcgggagcattctgtggtggcaggggcagcagatcaccgggaattaccagactatccgggcgcaggagcggacgcaggccatgctgtcggagaagaaccacggcgtgcagctgtcgctctgcggggagaagaaactgtcctgcgtcaaagtgaacccgaaagcgggagcttatggggaggaagggaactggatggtactggagaggaaatagcccatgacggaactggaaaaacagttgctgaccgcattagagcagttacatcaggactactcgcaaaggctggacgagtgggagagcgccttcgcggaatggcagaagatgtctggtcttatgcaacgggagaacgcggcgctgaacgagcgcgtcacgcgcttgagtcagcaggtggcgaacttgagcaggcagttacagcgtttgagccagtagtgcagcggcatgaaatggcggtggccgccgaacgggcatacgagcagaaacagcatgaaaaagagctggctgaaacccgttcccggcagcggagctataacggtccgacgctgggctga

SEQ ID NO: 10383 - DNA, 792 bp, Escherichia coli
atgacaacacgtataactttcaatatgaccagtgatgagacgctgcgaattgtggatgagtactgtcatacccacaaactttcgcgctctaaggtaatcgacgcattactcagcgccacagcacctgtccttaacgatattaactgttattatcaacttgcaggcaaactgcagtcacgcttattaaatggagtgtatcaacgggatcttcctcacaaacgcaatgtcgtcagtgcagagaagtactgtctggagatctgggaaaacaaacttttcaccaaaagaatcctggagtttgacagttcaaatggtgttctgtacgcgctgaaacataaaagacactatcgccgggataagatgattggacgggttgaaagccggcgtatcaaagacatttgcgaataccagatgcaactgtccggggagaaggcaaaatatgcctgttttatttatattgaaagaacaatatacaatcacgataatccatccggtgggacacctgtaaaagcggctgttggtaatgcagtcatcctgctggcaaaagacgtgatatatgacgagtacttttttgatctgcggcagtcatttttcgtgagcgttaaagatctgatggcctctggcgcaaaaggtattccggagacacagaaatatccggacgtttattgctggatcccgcttttctccataaattccggcgtggtcattaccccggtctataaaattgatccccggaaacccttaacggtaaaaaaaccggatcagatcactgttgtttgtaattacagagaataa

SEQ ID NO: 10384 - DNA, 207 bp, Escherichia coli
atgacccccccagtttcgctgatggatgaccagatggtcgatatggcgtttatcactcagctgaccggcctgaccgataagtggttttacaagctcatcaaggatggggcctttcctgcgcccatcaaaatggggcgcagctcccgctggctgaaaagtgaagtggaagcctggctgcaggcgcgtattgcacagtcccgtccgtaa

SEQ ID NO: 10385 - DNA, 450 bp, Escherichia coli
gtggataggttgtacgaactgggaaagagatttgatagattattatacatgagtattgttgttgttatttttagtttcctcacctgctctttattaattacattaagcagccaaaacctatttgctttaataacctcatacaaagatataaaacaacaaattgaaacaaaaagaagaaaaatagaatttatcgaaacacaaatttcagctgttaatgaaagcgtatctgatattctagactttcgaaaaagaataaataaatcagagatggacacagtaagatataaatcggaaatagaaaatgaattcttttccattagaaaaaaaatgataaatgagggattgcgtgaaatagaccttgatgaggtgagttcaattaatgagttaaaatactttatgtacgatgtgttgaaaaaagagattgaaaaatcaagtgtggctatattgtaa

SEQ ID NO: 10386 - DNA, 609 bp, Escherichia coli
atgaactggttggatggaaaaataaaagatgagagtaattcaaagatagagatagtcaacatagaatcaaccttaattatcccatttaaaataggtgacatggcatctagtgtatcattgataagtatagccaaaatagctagttatgctatgcctgtattcatggttttttggttgggttcactgttcgtcacgcggagaatagagatgatgaatcttatgaaaacaaaggatatatcattgatatacccacatattcttaatatcttctcagtggacacaacaaaatctcaagatttcaacctttatctcttaggcgatgaaaagataagaaaacaaataaacgcctctatatttttaattaaagcaataaaaggttttttatttatatcattagcactcgcaatgtgtgggccattgtattatggcgaatttatttacctggtaaactacaacacatcctcgctgccactattcattgtttcattttcttgcatgctaataaatatattccaagcagttgggtatgtttactttgagtcaatttcatctaatgttatttacagaataaaaaatggtgtaattgataggtatgaacttaatttttaa

SEQ ID NO: 10387 - DNA, 735 bp, Escherichia coli
gtgataaagcctgaaattacatctctattcaaatactgccctatcggtaagaatcaattaagtgctcttgcacagcggaaaatctggtactcaaaaccggcaggatttaacgatccttttgacacccaattttatgtgagaggacaaaggcatgtgtacgaacgggaaatggactctgaaaaattatcagccatttttggtgaagatatgtcagatgtaatggtttccaaaaaacgttctcttgatgaacttttggacagatttaaaagcggtttagaaaagttaggtattctttcactagcaagcagtaacaaaaatttgctgatgtggtcgcattatgcttctgaacataaaggtatgtgcttagagtttaaacgcatcgccggcacagccttagcagatgataaaataactaggccgatgaattacaatgataattatccatcgatacaggcaagttcaattttaaatgaagtcgatacattatctaataaaattagaatattacatacaaaatctaaacattgggaatacgagcaggagtggaggcatgtagttgagcaaggtaatgagttacatccttggcccgcagaattaatttctgtttatttcggctgcaagacagatatgtcagatatacatttggtaagaagtataattacggacccaaatgttaattactataaaggaaatttgtacagtgataaatttgacatttattttcaaccgatataa

SEQ ID NO: 10388 - DNA, 615 bp, Escherichia coli
atgaacgcaataattattgatgaccatcctcttgctatcgcagcaattcgtaatttattgatcaaaaacgatattgaaatcttagcggagttgactgaagggggaagtgccgttcagcgggtggaaacacttaagcctgatatcgtcatcattgatgtcgatatccccggagttaacggtatccaggtgttagaaacgctgaggaagcgccaatatagcggaattattattattgtctccgctaaaaatgaccatttttacgggaaacattgtgctgatgctggcgctaatggattcgtgagtaaaaaagaaggcatgaacaatatcattgcggctattgaagctgcaaaaaatggctactgctatttccccttctctctcaaccggtttgttggaagtttaacgtccgaccagcaaaaactcgattccttatcgaaacaagaaattagtgtcatgcggtatattcttgatggcaaggataataatgacattgctgaaaaaatgttcatcagcaacaaaactgtcagcacttataaaagtcgcttgatggaaaaattagaatgcaaatcattgatggatctttacacattcgcacaacgtaacaaaatcggctaa

SEQ ID NO: 10389 - DNA, 279 bp, Escherichia coli; identical to SEQ ID NO: 9194

SEQ ID NO: 10390 - DNA, 186 bp, Escherichia coli; identical to SEQ ID NO: 9133

SEQ ID NO: 10391 - DNA, 315 bp, Escherichia coli; identical to SEQ ID NO: 5096

SEQ ID NO: 10392 - DNA, 333 bp, Escherichia coli; identical to SEQ ID NO: 9116

SEQ ID NO: 10393 - DNA, 198 bp, Escherichia coli
atggaaatctatccaatccgagcacataggatacacatcgttataacgctggatctgcgtgaattccagcagcagcaagagaaagactttctacaaaccagcttacagcaggctaaatttaaccagaaaaaagccgctgaattactgggtctgacttatcatcagctacgtgccttgctgaagaaacaccagatctaa

SEQ ID NO: 10394 - DNA, 681 bp, Escherichia coli
atggcgtcattactgtataaaaacacaggcatagatatgactctggcattagttggcgaaaaaattgacagaaatcgcttcaccggtgagaaagttgaaaatagtacattttttaactgcgatttttcaggtgccgacctgagcggcactgaatttatcggctgccagttctatgatcgcgaaagtcagaaagggtgcaattttagtcgcgcaatgctgaaagatgccattttcaaaagctgtgatttatcaatggcagatttccgcaacgtcagtgccttgggcattgaaattcgccactgccgcgcacaaggcgcagatttccgcggtgcaagctttatgaatatgatcaccacgcgcacctggttttgcagcgcatatatcactaatactaatctaagctacgccaatttttcgaaagtcgtgttggaaaagtgtgagctgtgggaaaaccgctggatggggactcaggtactgggtgcgacgttcagtggttcagatctctccggcggcgagttttcgactttcgactggcgagcagcaaacttcacacattgcgatctgaccaattcggagttaggtgacttagatattcggggtgttgatttacaaggcgttaagttagacagctaccaggcatcgttgctcatggagcggcttggcatcgctgtgattggttag

SEQ ID NO: 10395 - DNA, 966 bp, Escherichia coli; identical to SEQ ID NO: 8922

SEQ ID NO: 10396 - DNA, 162 bp, Escherichia coli; identical to SEQ ID NO: 6944

SEQ ID NO: 10397 - DNA, 213 bp, Escherichia coli
atgaatgttggtttctctactctggaggcatgggtacgtcagctcagacgggaacgtcaggagatcacgccttctgctgcagcaccactcacatcagagcagcaacgtattcgtgagctggaaaagcaggtgtgtcgtctggaggaacaaaatacgatattaaaaaaggctaccgcgctcttgatatcagacttcctgaatagttaccgataa

SEQ ID NO: 10398 - DNA, 228 bp, Escherichia coli
ttgaaaaagatttttgtttcagtgttcgcagcggcagttgcgctttcagccctcaccggctgcacgcgcacaagctatgccatacacaccaatgacggtcgcactattgtcagcgacggcaaacctaaagaatcagactcaggcctgcttggctatacagacgcgaatggtgtcaaacagcagatcaataaaaccgacgttaaagaagtctccgaaattccgcactga

SEQ ID NO: 10399 - DNA, 186 bp, Escherichia coli
gtgaccagacaggaatccgccgccctcaatatggccaaatttatccgcgcacagacacttctcctccttgagcggctcgagcagatggatctggatgaggctgccggctgctgtgagcacctgcacgatcaggccgaagcgctttacgccatgctgaacgcacagataggcgaggaaaatgcgtga

SEQ ID NO: 10400 - DNA, 192 bp, Escherichia coli
atgactcttagtgatgatgagcgacacctgcttgtgtccgttgtttcggtctggctacggcgtgccggaggggatgccggagccatgatgctggatgcataccggcagattttgtctgaaaccgaaccggccgtaaggactgtcatgctcgaatttcttgaatccgttcgcattcattacatttcgtcctga

SEQ ID NO: 10401 - DNA, 819 bp, Escherichia coli
atgtgtcaggtatttggtgtatccaggagcggttattacaactgggtacagcatgaaccctcagacagaaaacaaagtgatgagcggctaaaactggagattaaggtggcacatatccgcactcgcgaaacatatggaacccggcggctccagacggagctggcagagaatggcatcatcgttggtcgtgaccgactggcacgtcttcgtaaggagctaaggccacgctgtaagcagaaacgcaagttcagagcgactacgaacccgaaccacaatctgccagttgcgccaaatctgctgaaccagacgttcgctcctacagcaccaaatcaggtctgggtggcggacctgacgtatgttgccacacaggagggatggttgtacctcgctggcatcaaagatgtttatacgtgcgaaattgtcggctacgccatgggagagcgcatgacaaaagagctgacaggtaaagccctgtttatggcgctcaggagccagcgcccacctgcagggctaatccaccactctgatcgaggttcacagtactgcgcatacgattaccgggtcatacaggagcagtttggtctgaaaacatcaatgtcgcgtaaaggtaactgttacgacaacgctccgatggaaagcttctggggaacgctgaaaaatgagagcctgagccactatcgttttaataaccgggatgaagccatctcagtaatacgggaatacattgagattttctacaatcgtcagcgtcgtcactctcgtctggggaatatctccccggcagccttcagggaaaaatatcatcagatggctgcttaa

SEQ ID NO: 10402 - DNA, 417 bp, Escherichia coli
atgcaactctgtattcgcgcaaataaaaggatgcaggataatatatctgaatttctgggggcgtatggaataaatcactcagtgtacatggttctcaccacattattcacagcggagagtcattgtctgtcaccttcagagataagccagaaactgcagtttaccagaactaatattacccgcattacagattttttagaaaaagccgggtatgtaaaaaggatggatagcagggaggatcgccgtgctaaaaaaatcagtctgacatctgaaggtatgttttttattcagaggctcactcttgcacaaagcatgtatctgaaagaaatctggggttatctgacccatgatgaacaggaactgtttgaagtcattaataaaaaattactggcgcatcttgatgatgtcagctcataa

SEQ ID NO: 10403 - DNA, 387 bp, Escherichia coli
atgacatctccatcttcgacagccggaaagccttgtgtggaatgcggcatacctgatccatgtatttttgatgttattagtgattttccagaggccggcgagaaacatttctggtcaaaagaaggaatggcgcgttttaagctactggacgatggttttggatgtgatggtataattaccattacctaccagtgcgacaacagtgggacacatgaggcatggttagaggaagaatcagaaaacagtcgtaagatactgcaaccttttggaaaacccaataatgttacattatattatgaaggtttcaagggtggaatgaatatcattgatgcgtttcattctccgtgggagtatctgagttcaattaccatgccacatgatgtttag

SEQ ID NO: 10404 - DNA, 840 bp, Escherichia coli; identical to SEQ ID NO: 8924

SEQ ID NO: 10405 - DNA, 735 bp, Escherichia coli
gtgcgtgtgtcgcaggcgtgggcggggccggggttcggtaacctggcgataccgcgtgtgggtcaggaagtgatagtggacttcctgaacggggacccggaccagccgataatcatggggcggacgtaccatgaggacaaccgttcgccggggagtctgccggggacgaagacgcagatgacgatacggtcgaagacctataaaggaagcgggtttaacgagctgcgctttgaggacgccacggacaaggaagaaatctacctgcacgcccagaaaaatatgcaggtcgtggtgctgaacagcaaggataagcgggtcaactatgaccgggcggtcagcatcgggcatgatgaattcctggtggtggcaaatgaccggaaagtgacggttgaaggtaaacaggaccataaaaccaccaaagaccacgtcagcctgacagagggtaatcagggactggaggtgaaaggcgatctggcacagaaaataagcggcgcgctgggtatcagcgtacagggcgatattgttttacagagcgacagcaaaatcagtctgcgggtgggaggttcatttgtggtgatccattccggcggcgtggatattaagggcgcgaaaatcaatcttaacggcggaggcagtccgggagacgtgatcctgccgatgcgcccggtgatcctgaaagccgcagccgggagtggttcgatgtttgtggcgcattgcccgaaggaggataagtga

SEQ ID NO: 10406 - DNA, 405 bp, Escherichia coli
atggcgcgactgtcgcaactggcggggaacctgaggatcgtcttcccgcccactgtaacgatcgctgtcctgttcgcgttgcttcagcagggcctcagccagttcaacttcacgacgcagtttttcagaacgggtaccgaacagcatccggcgcagtttttctatctgagcccgcagatgttctatttcccgttcatcttcttcgatcttttcttcggcacgtgtcagtgcagagcgcaggaaggcttccgtctcttcaaccagactcagttgctggtctttctgacggagggcttcagcctgctcagagagcaacctttccagctctgcgatgcgaatgaggtatttctgactcatgaccgtttttataatgcggtcaggagttttttacaacattgtcagtga

SEQ ID NO: 10407 - DNA, 621 bp, Escherichia coli
atgtcgcaggttaaaagtgctgccacgcagacctttgatggtattgcgcagaatatggcggcgatgctgaccggcagtgaacagaactggcgcagcttcacccgttccgtgctgtccatgatgacagaaattctgcttaagcaggcaatggtggggattgtcgggagtatcggcagcgctattggcggggctgttggtggcggcgcatccgcgtcaggcggtacagccattcaggccgctgcggcgaaactccattttgcaaccggaggatttacgggaaccggcggcaaatatgagccagcggggattgttcaccgtggtgaatttgtcttcacgaaggaggcaaccagccggattggcgtgggaaatctctaccggctgatgcgcggctatgccaccggcggttatgtcggtggcaccggaagtccggcgcaaatgcggcgttcagagggtatcaggtttgagcagaacaacaacgtggtgattcagaacgacggtacgaatggtctgccaggtccacagatgatgaaggcggtgtatgacatggcccgcaagggtgcccgtgatgaaatccaggcacagatgcgcgatggtggtctgttctccggaggtggacgatga

SEQ ID NO: 10408 - DNA, 603 bp, Escherichia coli; identical to SEQ ID NO: 9019

SEQ ID NO: 10409 - DNA, 309 bp, Escherichia coli
atgaacggtataaaaacggggctggggatcacgccgggtgagcacattatcagtgccgactctgcgctcagcagaaatatccggcattgtttctgcctttcctgtcatggccggttgattctgcagacagatgctcagggggcgtggtttgagcatgatttacatgccctgagtgagcaacagaagggtaagcgtgcagcaaaaaccgtattgacggggatgtgttattcagtcggcagtgctacgcgccaggggagcagttcgccgacccggtttatcggccagtcggctatgacgtcaaggacatag

SEQ ID NO: 10410 - DNA, 783 bp, Escherichia coli
gtgctgttgccaggcaataagaaaacgaagaccgggcggttatggacctgcgttcgtgacgaccgtaacgccgggtcaacgctggcgccggcggtgtggttcgcttacagcccggacagaaaaggcatccatccgcagacccatcttgcggggttcagtggtgtactgcaggcggatgcatacgccgggttcaacgagctgtaccgggatggccggataacggaagccgcctgttgggctcacgcccgccgtaaaatccacgatgtgcacgttcgcaccccgtcagccctgacggaggaagcgctgaaacggatcggcgaactgtacgccatcgaggcagagataaggggaatgacggcggagcagcgccttgccgaacgtcagttgaaaacgaaaccgctgctgaaatccctggaaagctggctgcgtgaaaagatgaaaaccctgtcgcgacactcagaactggcgaaagcgttcgcatacgccctgaaccagtggccggcgctgacgtactatgcagatgatggctgggctgaggcggacaataacatcgctgaaaatgcgttgcggatggtcagtctgggccgcaaaaactacctgttcttcggttcggatcatggaggagagcggggagcgctgctgtacagcctgatcgggacgtgcaaactgaacggagtggagccagaaagctacctccgctatgtccttgacgtcatagccgactggccgataaaccgggtcggcgaactgctcccctggcgcgtagcactgccgactgaataa

SEQ ID NO: 10411 - DNA, 141 bp, Escherichia coli
atgagcctccagtgcgatatgtttaccatcaagtccccacatgaagctgatgatcattccggcaatcgtcagaaatacgcctgccagccagcgaatatggaacaaccgggttatgcgttcggtgatatagccagccagtaa

SEQ ID NO: 10412 - DNA, 333 bp, Escherichia coli
atgtacagtggcgcgcctcatggcggttatggctctcagtatgtgtcactggcctatatggagcgattaaaagaagcaaaactgctggcatcaacagggagtacaggcgactcgtatgacaacgcgatggcggagagcatcaatggtctttacaaagcggaggtaatacaccgtaagagctggaaaaaccgtgcagaagtggaactggccacactcacgtgggtggactggtataacaatcgacgattgctgggaaggctgggccatactcctccggcagaagcagaaaaagcttattatgcttccatcggaaacgatgatctggcagcctga

SEQ ID NO: 10413 - DNA, 369 bp, Escherichia coli; identical to SEQ ID NO: 6535

SEQ ID NO: 10414 - DNA, 222 bp, Escherichia coli
atgaaaattatcccccgtggtgaagccatgcgtattcaccaacagcatcctgcatcccgtctttttccgttctgtaccggcaaataccgctggcacggcagcactgaaacgtataccggtcgtgaagtgcaggatattcccggtgtgctggccgtgtttgctgaacgccgtaaggacagttttggcccgtatgtccggctgatgagcgtcactctgaactga

SEQ ID NO: 10415 - DNA, 168 bp, Escherichia coli
atgaattgtgaagataaggagtttaatcccgttgatattgtcaatgaagatggaaagaaaattatgtttgtcgttagcaacaatgaaaaaatacaaaaaccaaaaaaaagtgcgaagaaaaaaattcctgctcctgtaattgagttagataaatatcgaaaaaagtga

SEQ ID NO: 10416 - DNA, 1026 bp, Escherichia coli
atgataaagaaaaaaggatttaccttactggaagtgacgattgtgttaggtattggaacgcttatcgcttttatgaagtttcaggatatgagaaacgatcaggaagcggtattggctgataatgtcggaacacagattaaacagcttggtgaagcggttaaccgctatatcagtattcgttatgacaagatttccacactgtcatcatccaacaatcaaagtagcgatccggggccaagaacctgttcggctgctggttgtgaaatcacttaccagacattaattaatgaaggtctgttacctgtaggctatacaggaacgaacgcgcaaaaagcatcctacaagattgtgttaaagcgttcaggaacagcgcctgattatgtcattaatggccttataacaaccgccagcccgtgggaggaaggtggtcgtattcgttatgacctgttaggaaaagcggttcaggcggcaggtgttgatggtgggatgagcagaaacaccaagatagcgtccggctatggtggtcagtggagtgagaactctaatagctacagcaatatcacggggggtgggttactggcttaccgcgtggggtataactcttcaatgtattctgtttatctgcgtcgtgatgggacgttgccgatgacgggcgatctgaatcttggtgggaagagcatcaaaaacatcaaagatatgacggcatcagggacaacaacaaccggagcacttaagacaacgggtaatgcgtctgttgcatcagatctgagtgtgggtggaacatctacccttaatggtcctgtaaatatcaacaacaacctgaaagtaaaatccgacacctatctgaacacgctatcaacaacaggtctggcgaagtttggtagtcgtatcgcgacgaatggacttaatccaaacgatctgcctgctgggtgggctggtggtgttcgcacctatgatttgtatgcgtcagggactgttggtgtaggaacaggtaaaacagttaaagcttacatgaacatgcgttag

SEQ ID NO: 10417 - DNA, 537 bp, Escherichia coli
atgaaccctcagctcgccgttctgatttatggtggtgttaccggcagtaccaccggccttaacaacctgccagcccccctcgttaattaccgtgttcagtgcaagtccatacttgtgcacatactggttccctccctccagtcgggtgttatgtgcctctccgtgtaccgtctggtcacctcctgtgtaaatgagagtgtcccgggctatccccgaagaccagataacctgccggccatttttgtttatggtggtggattcagcaatccccccgaccatctgaccggtggacacattttcagaatccggaccaccttctgcaccggtgttgacgatggttccggttaccagtccgccatgtttaatggtctggtaaccatcctggttaatcaccgttccggatgccctgccgcctgcatgtatccattgatcaccgccgttaaggacagtaccggaagccttcccacgcaaattctgccctcccccggtactgataaccgtatccgaggtactgccacctgccatgacatcctgtag

SEQ ID NO: 10418 - DNA, 561 bp, Escherichia coli
gtggccagatgtacagtggcgcgcctcatggcggttatgggacttgccggtgttctccggggtaaaaaggtccgcactaccgtcagccggaaaaccgttgctgcaggtgaccgcgtaaaccgtcagttcgtggcagaacgtcctgaccagctgtgggtggctgattttacttacgtcagcacatggcagggcttcgtctatgtggcgttcatcattgatgtgtttgccggatacatcgtggggtggtgggtctcatcgtctatggaaacgacattcgtgctggatgcgctggagcaggcgttgtgggcccgccgtccgtccggcaccatccatcacagcgataaaggctctcagtatgtgtcactggcctatatggagcgattaaaagaagcaaaactgctggcatcaacagggagtacaggcgactcgtatgacaacgcgatggcggagagcatcaatggtctttacaaagcggaggtaatacaccgtaagagctggaaaaaccgtgcagaagtggaactggccacactcacgtgggtggactggtataacaatcgatga

SEQ ID NO: 10419 - DNA, 276 bp, Escherichia coli
atgactttccagcatgaaacacataaagatttacccgctgcgtttcatgcactagaagctggcgataacagaactttccatcagtgtattcatcgcatccacggtgcggctaacatcctgaatttgcaaaagttgattaatattagccatcagttagaaataacacctgtttcagatgacagtaagcctgaaattcttcagctcctgaactctgtaaaagaacacattgcagagctggaccaggagattgctgttttctgtcagcagaatgactaa

SEQ ID NO: 10420 - DNA, 465 bp, Escherichia coli
atgaaaactgtggttctgcaacgtgacgcatatcagaccggtcagcaccggttccatccttcgctgtggcagttcggcaaggagatgggcttctctccccgactgtgtcgccccttcagggcacagactaaaggtaaggtggaacggatggtgcagtacacccgtaacagtttttacatcccactaatgacccgcctgcgcccgatggggatcactgtcgatgttgaaacagccaaccgccacggtctgcgctggctgcacgatgtcgctaaccaacgaaagcatgaaacaatccaggcccgtccctgcgatcgctggctcgaagagcagcagtccatgctggcactgcctccggagaaaaaagagtatgacgtgcatcctagtgaaaatctggtgaacttcgacaaccaccccctgcatcatccactctccatctacgactcattctgcagaagagtggcgtga

SEQ ID NO: 10421 - DNA, 354 bp, Escherichia coli
gtggtgaatttatgcaccagcgaacacctgctgattcatcatccgatgctggaagggatcctgctgtctgaatgtgagcgcctgaagcaacattctctggcaaacaaactgatcagcctcttccgtcagtttggcggcacggagttacgtctcaaactggtctggctctgctggcttgacttaatgaccggaaacagccttgacgactggacgaaaaacctgaaacacaaatcagaaaaagatctggagcaatggatcattgcacgtcagggtcagagtgaaccactgacaaatctgatggatcagtacgtgcttatggcataccgtacatcggttgatgccgctcacagttga

SEQ ID NO: 10422 - DNA, 528 bp, Escherichia coli
atgctgttccacgcggttaatcgcctcaacgggttgcgccagtttgctgttgatctcaccgcttgccggaaacgctgccatccggtcgcgcaccagttcgcccagcgtttttcctttcaggcacaccagttcggcgaccagcagccacgggatcatgccgctgtcgcagtaagcgaaatcacggaagtaatggtgggcgctcatttcgccaccgtagatagcgtcttccttgcgcatacgttctttaataaaggcgtgtccggttttcgacattaccggggtgccgcctgcggcagtcaccacatcaacggtgttccaggagagacgtggatcgtggatgatcttcgcgccgggatttttttcgaggaacgcttctgccagcaggccgacaatgtagtagccctcaataaactgccctttttcgtcaaacaggaaacagcggtcaaaatcgccatcaaaggcaatgcccatatccgcgccgtgtttgatgaccgcattgcgggtgtcgtcgcgacattccggcagtag

SEQ ID NO: 10423 - DNA, 474 bp, Escherichia coli
atgaaaacattgtctcagaacaccacctcttcggcctgtgcaccggagactggcctgcaacaactggttgccaccatagtccctgatgaacagcgcatcagcttctggccgcagcattttggcctcattccacagtgggtgaccctggagccccgggtcttcggctggatggaccgtctgtatgaagactactgcggtggtatctggaatctgtacaccctgaacaacggtggcgcatttatggcacccgaaccggatgacgatgatgacgaaacatgggtgctgtttaacgtcatgaacggtaaccgcgctgaaatgagcccggaagccgccggcattgccgcctgtctgatgacgtacagtcatcacgcctgccgtacggagtgttatgccatgacggtccattattaccggctgcgggattacgccctgcagcatccggaatgcagcgccattatgcgcattatcgactga

SEQ ID NO: 10424 - DNA, 147 bp, Escherichia coli; identical to SEQ ID NO: 8534

SEQ ID NO: 10425 - DNA, 369 bp, Escherichia coli
atgtcggacacactccccggaacaacgcttcccgacgacaacaaagacctcccctggtgggggctgccctgcaccgtgacgccctgtttcggggcctgtctggtgcaggagggtaaccggttgcattaccttgccgaccgcgccggtatcagaggccggttcagcgatgcggatgcgtaccatccggaccaggcctttccgctgctgatgaaacaaccggaactcatgctcaccagcggtgaactgaatccccgccatcagcataccgtcacactgtatgcgaaagggctgacctgcgaagccgacaccctcggcagctgtggctacgtttatatggctgtttatccgacgcccgaaacgaaaaagtaa

SEQ ID NO: 10426 - DNA, 645 bp, Escherichia coli
atgagcagcattatcaccaccaccgtgtatacactgcatgagctatcctccaccgcacaggaaaaagcccgcgactggtaccgtcagcatcatgctgacagcaactggtatgaaaacgtgtatgaagacttcagggaggtctgtggcattttcgggattgacctccgccagcgcgttttccggctcagcaatggcaggtttatggaagagccgtgcatctggttcagcggattctgcagccagggggacggagcctgttttgaagggcgctggcactggcagccagcgacaccccggaaaatcagggaatatgcccctcaggaccgtgagcttcatcgtatcgcggataccctgcaggcggtgcagaaacgtaacttctggcagcttcaggctgaaatcagtcaccggggacgttactgccatccgtacagcatggatatcaccgtcacccggaacagtccgactggtcaggcaatgacaaccgatgcggaagccgctgtcagcgaagccctgcgcgacctggccttctggctgtaccgccagctggaaaacaagtacgactggctgacctcagacaccgctgtggatgaggcccttctcatcaacgaatataccttcaccgaagccggtctgcgcgccggctga

SEQ ID NO: 10427 - DNA, 258 bp, Escherichia coli
atgatttccgtgcgtctgaaggacccgcgcggtgctggttatacgcaactatggctaagccgcggaacaggtgcttacacctacgactggacgccagaaacacgctacggcagcatgaagagcatcagtttgcaacgaattcaaccgctgactgagcaacttaatctcgggttgacggcaggtaaagtgtggttcaacaccccaaccgatgattataacggtctgcaacttgcagcccacctgatctggaaattctag

SEQ ID NO: 10428 - DNA, 378 bp, Escherichia coli
atgaaaacattacccgacacacacgtacgggcggcatcgcgctgcccgtctcccgtcaccatctggcagacactgctcacccgactgctggaccagcactatggcctcacgctgaatgacacaccgttcgctgatgaacgtgtgattgagcagcatattgaggcaggcatttcactgtgcgatgcggtgaactttctcgtggaaaaatacgcgctggtacgaaccgaccagccgggattcagcgcaggaacttcgtcgcagttaatcaacagcattgatattctccgggctcgcagggcgaccggcctgatgacccggaacaattacagaatggtaaataacattacccagggcaagcatccggaggcaaaacgatga

SEQ ID NO: 10429 - DNA, 489 bp, Escherichia coli
atgaaactggccctgacgctggaagctgacagcgttaacgtacaggcactgaacatggggcgaattgtcgttgacgtcgatggtgttgagcttgccgaactgattaacgtggtctgcgataatggctactcccttcgtgttgttgatgaatctgaccggacctcaacagacagcatacccccctctgctgccctgagcggtatacgctgtagtaccgcgcatatcacggaaacagacaacgcctggctgtactcgctgtcgcatcagacgaatgacaccggcgaatcagaatggattcattttacaggtagcggatatctgttacgtaccgatgcgtggtcatacccggttctgcggcttaaacgcctggggctgtcaaaaacgttccgccgtctggttgtcacacttacccgacgttatggcgtcagtctcattcatctggatgccagcactgaatgcctgccggatttacccactttcgactggtaa

SEQ ID NO: 10430 - DNA, 198 bp, Escherichia coli
atgaaatcattaaccacggaaacagcgctgtatattctgattgcgtggctgcaggacaatattgactgcgaatcagggattatcttcgacaacgatgaggataaaacggattcagcagcactgctgccctgcattaaacaggccagggaagatatccgtaccctgcgccaactgcagcttctgcaacagaaccggtga

SEQ ID NO: 10431 - DNA, 1026 bp, Escherichia coli
atgaaaatattcattactgagcaacaaaaagctgaacttgaacgccttcatgattccagtcgtgacgggcgagtcagagatcgtattaaagccattcttctggcttccgaaggctggagttctgccatgattgctcaggctttacgcttgcatcagacaacgatttatcaccatatcagcgaattcctgaataaaggaaaactgaagcccgaaaacggcggctcagacagcaaactcagtgctgaacaaacggcctttttcatcagccagttatccgataatttatttcaccatacccgcgatgttattgcgtttgtcacccggacatggaacatcattttcagcattccggggatgaataagtggctgcatcgtaatggtgtcacctacaaaaaaccgtcaggcgtcccccataaattcagtgaagagaaacaaaggcaattcattgaatactataaggaactgaaaacaactgtgggtgatgagccgattctttttattgatggagtccatccgactcaggccactaaaatcagctatggctggatacgcaaaggccagaaaaaagcagtaaaaacaacaggcagccgcacacgcctgaatatcatgggggcgctgaatctgaaagcactgacgtcaccgctaatctgcgaatataaaaccattaatgaatataatgtatcccgttttttcaatgagatacgaaaggtttatcctgattataaccagaaaatccacgttattctggatggagcaggttaccaccgttcacagttagtgaaagactgggcggaagtggtaaatatcaggctgcattaccttcccccttacagtccaaacctgaatccgatagaaagaatgtggaaattaatgaacgaacatgcccggaataatcgctacttcagcagtacgcgagagttcagggaagcaatatctgtcttttttaaccagacactgccggatatagcggactcactgacatcccgaattaacgatcactttcaggtgctcacacccgcatcttga

SEQ ID NO: 10432 - DNA, 381 bp, Escherichia coli
atgcagaaaaatgtgactcccggcaggcgaaaaggctgccctaattatcctcccgaatttaaacagcagctcgttgctgcctcctgtgaacccgggatatccatctcaaaacttgctcttgaaaatggcattaacgccaatctgttgttcaaatggcgacaacaatggcgcgagggaaagctgctattaccttcttcagagagcccccagctacttcctgtgactctcgatgcagctgccgaacagccagaatcgctcgcagaggacccggaaaccctcagtatcagctgtgaggtaacgttccggcacgggacgctccgcttcaatggcaatgtcagcgaaaagctcctgactctgctgatacaggaactgaagcgatga

SEQ ID NO: 10433 - DNA, 312 bp, Escherichia coli
atgccccgggtcaaccaccacactgtcaccggtaatgctgatatcccggttcgcaatcacatccgaaccgctgatatgagcctgtttgcccgcggtaatactgacattaccggcagtggagccgatggtactggcactctgactctgcgttgtcccggcctcgcgccggtcgtgcgttgtcttactgctgccaatggtgaaaccaataccgccggtacccgtcagaccggatttcttcgtttccttaaagcgccaggacgtatctgtactggtggcagcaagaacatcaacatgattacccgccgccagtga

SEQ ID NO: 10434 - DNA, 513 bp, Escherichia coli
atgaatatgaacaatccattagaggttcttgggcatgtatcttggctctgggccagttccccattacacagaaactggccagtctctttgtttgcaataaatgtattacctgcaatacgggctaaccaatatgctttattaacccgggataattaccctgttgcatattgtagttgggctaatttaagtttagaaaatgaaattaaatatcttaatgatgttacctcattagtcgcagaagactggacttcaggtgatcgtaaatggttcattgactggattgctcctttcggggataacggtgccctgtacaaatatatgcgaaaaaaattccctgatgaactattccgagccatcagggtggatcccaaaactcatgttggtaaagtatcagaatttcacggaggtaaaattgataaacagttagcgaataaaatttttaaacaatatcaccacgagttaataactgaagtaaaaaacaagatagatttcaatttttcattaacaggttaa

SEQ ID NO: 10435 - DNA, 426 bp, Escherichia coli
atggctaaggcggtattgccttcaatgattaaaaaaggacatggcaagatcattaatatctgttccatgatgagcgaattgggtcgcgaaaccgttgtaggctacgcttcggcaaaaggcggcttaaaaatgctgactaaaaatatctgttctgagtttggtgaaaaaaatattcagtgtaatggtattggtccaggctacattgctacacctcaaacagcaccgttacgtgaaattcaaccagatggcagccgccatccatttgatcagtttattatatcaaaaacgccagctggacgctggggtaaaccagatgatcttgctggtgcagctatatttttagcatcggatgcttcaaactttatcaatggtcatattttatatgtcgatggtggcattctggcctacattggcaaacagccttag

SEQ ID NO: 10436 - DNA, 426 bp, Escherichia coli
atgacgtcggcaaaggacggcctgttgaagaagaatgtatcaggggtgaagagttccaagcatggctgctttgtttatggcgatacctcgttttctttcagtgaggtaatggaagctatcttcatcagtgggctgttcttctatgcgccaatagacgccgccagtagtcttgatgaactgaaagtgagtttggctgggctggaagaagaactggccgaagtaccaaaagtggattcgaatggcaatgaaacagataaagaacctactatagtcgtagccgaaggtgcttttgattcggtcgctgctcacatggaaacagaagctgaggagtggcaatctattaagaacctgtgccaacgagaaggtgagctgcccatacgtattggtggtattaaaatggctgagccaccagagtttcatttttag

SEQ ID NO: 10437 - DNA, 705 bp, Escherichia coli
atgaacccattcaaaggccggcattttcagcgtgacatcattctgtgggccgtacgctggtactgcaaatacggcatcagttaccgtgagctgcaggagatgctggctgaacgcggagtgaatgtcgatcactccacgatttaccgctgggttcagcgttatgcgcctgaaatggaaaaacggctgcgctggtactggcgtaacccttccgatctttgcccgtggcacatggatgaaacctacgtgaaggtcaatggccgctgggcgtatctgtaccgggccgtcgacagccggggccgcactgtcgatttttatatctcctcccgtcgtaacagcaaagctgcataccggtttctgggtaaaatcctcaacaacgtgaagaagtggcagatcccgcgattcatcaacacggataaagcgcccgcctatggtcgcgcgcttgctctgctcaaacgcgaaggccggtgcccgtctgacgttgaacaccgacagattaagtaccggaacaacgtgattgaatgcgatcatggcaaactgaaacggataatcggcgccacgctgggatttaaatccatgaagacggcttacgccaccatcaaaggtattgaggtgatgcgtgcactacgcaaaggccaggcctcagcattttattatggtgatcccctgggcgaaatgcgcctggtaagcagagtttttgaaatgtaa

SEQ ID NO: 10438 - DNA, 570 bp, Escherichia coli
gtgaaaacgttcgaagagtatgacttcacattcgccaccggagcaccgcagaagcaactccagtcgttacgctcactcagcttcatagaacgtaatgaaaatatcgtattactggggccatcaggtgtggggaaaacccatctggcaatagcgatgggctatgaagccgtccgtgcaggtatcaaagttcgcttcacaacagcagcagatctgttacttcagttatctacggaacaacgtcagggccgttataaaacgacgcttcagcgtggagtaatggccccccgcctgctcatcattgatgaaataggctatctgccgttcagtcaggaagaagcaaaactgttcttccaggtcattgctaaacgttacgaaaagagcgcaatgatcctgacatccaatctgccgttcgggcagtgggatcaaacgttcgccggtgatgcagcactgacctcagcgatgctggaccgtatcttacaccactcacatgtcgttcaaatcaaaggagaaagctatcgactcagacagaaacgaaaagccggggttatagcagaagctaatcctgagtaa

SEQ ID NO: 10439 - DNA, 213 bp, Escherichia coli; identical to SEQ ID NO: 5358

SEQ ID NO: 10440 - DNA, 477 bp, Escherichia coli
atgcaacagatttcctttctgcccggagaaatgacgcccggcgagcgcagtctcattctgcgggctctgaaaaccctggaccgccatcttcatgaacccggcgtggccttcacctccacccgtgcggcacgggaatggctgattctgaacatggcgggactggagcgtgaagagttccgggtgctgtatctgaataaccagaatcagctgattgccggtgaaaccctcttcaccggcaccatcaaccgcacggaagtccatccccgggaagtgattaaacgcgccctgtatcacaatgccgctgccgtggtgctggcgcacaatcacccgtccggtgaagtcacacccagtaaggcagaccgccttatcacggaacgtctggtacaggcactgggcctggtggatatccgggtgccggaccatctgatagtcggtggcaaccaggttttctcctttgccgaacatggtctgctttaa

SEQ ID NO: 10441 - DNA, 249 bp, Escherichia coli
ttgcattaccttgccgaccgcgccggtatcagaggccggttcagcgatgcggatgcgtaccatctggaccaggcctttccgctgctgatgaaacaaccggaactcatgctcaccagcggtgaactgaatccccgccatcagcataccgtcacactgtatgcgaaaggactgacctgcgaagccgacaccctcggcagttgtggctacgtttatatggctgtttatccgacgcccgaaacgaaaaagtaa

SEQ ID NO: 10442 - DNA, 312 bp, Escherichia coli
atgggagttgagcagaataatttcagggacatgttgtccgtttatctctccggcccgccgcagacgcaacatgtgtttggtgtattcccggcggcccgggtcacgtacgcgggtctgacaggcgaagaatggctggaagccttcccgctgcagactttccagcacggtgatggtggggatatacgtatagcgttcactgcgggaggtatgccggtcttccccaaaaataccgggtacataatgcatcagctcttcatgtgtcagcggacggtcacggcgtatctggttcgcataaccaaaacgacttgctaa

SEQ ID NO: 10443 - DNA, 375 bp, Escherichia coli
atggttatggccggtaagttaatgagagccactgtagtattttgtctgggggttgtcctcagtctgtttggttttgagtcaggcattcatcatcaatcagccagtgcagtaaatgcaattaatggcgtcatgatatttggtgtggctggtatggcgttaataggtatctatttctctgtaaaaatgaaattagataaagcatctcacgccgaaataactaaagaattagagcgtctgaaaaaaggtggcagaaaagaagatgctacaccggaaattcgtaagcttgttaagcaactgactggttatgaatatgaccagtgcttcggtaataacaatgttggctttaaatttgaaaacaaagcaggggcattctag

SEQ ID NO: 10444 - DNA, 312 bp, Escherichia coli
atgggagttgagcagaataatttcaggtacatgctgaccggttatctctccggcccgccgcagacgcagcatatgtttggtatattcccggcggctctggtcgcgcacacgtgtctggcaggcgaagaacggctgaaagccttcccgctgcagattttccaggacggtgatggtgggaatgtacgcataccgttcactgcgggaggtgtgccggtcttctccaaaaatactcgggacgtggtacatcagttcttcgcgtgtcagtgggcgctcccgacggatctgatttacatgaccaaaacgactggctaa

SEQ ID NO: 10445 - DNA, 264 bp, Escherichia coli
gtgaacaaccctaaaatactcatttttgatgaagcaaccagtgctctggattatgagtcggagcatgtcatcatgcgcaatatgcacaaaatatgtaagggcagaacggttataatcattgctcatcgtctgtctacagtaaaaaatgcagaccgcattattgtcatggaaaaagggaaaattgttgaacagggtaaacataaggaactgctttctgaaccagaaagtttatacagttacttatatcagttacagtcagactaa

SEQ ID NO: 10446 - DNA, 315 bp, Escherichia coli
atgagagttgagcagaataatttcagggacatgttctccgtttatctctccggcccgccgcagacgcagcatgtgttttgtgtatccccgacggcccgggtcgcgcacacgggtctggcaggcgaagaatggctggaagccttcccgctgcagactttccagcacggtgatggtggggatgtacgtatagttctggcttcgggacgtgtgtttatcttccccgaaaatccccggcacatggtgcatcagctcttcatgtgtcagtggacggtcacggcgtatctggtttgcagcataaccaaaacgactggctaa

SEQ ID NO: 10447 - DNA, 399 bp, Escherichia coli
gtgaagttcgggcatggcagtgcacaacatgtgcgtgccggtttccgtctgggcagccacaacgatatgacctttggtgaaggcacctcatcccgtgacaccctgcgcgacagtacaaaacacggtgtgagtgaactgcctgtgaactggtgggtacagccttctgttatccgcaccttcagctcccggggagacatgagcatgggtacagccgcagccggcagtaacatgacgttctcaccgtcccggaatggcacgtcactggacctgcaggccggactggaagcccgtgtccgggaaaatatcaccctgggcgttcaggccggttatgcccacagtgtcagcggcaacagcgctgaaggctataacggtcaggccacgctgaatgtgaccttctga

SEQ ID NO: 10448 - DNA, 441 bp, Escherichia coli
atgagctatcctccaccgcacaggaaaaagcccgcgactggtaccgtcagcatcatgctgacagcaactggtatgaaaacgtgtatgaagacttcagggaggtctgtggcattttcggaattgacctccgccagcgcgttttccggctcagcaacggcaggtttatggaagagccgtgcatctggttcagcggattctgcagccagggggacggagcctgttttgaagggcgctggcactggcagccagcgacaccccggaaaatcagggaatatgcccctcaggaccgtgagcttcatcgtatcgcggataccctgcaggcggtgcagaaacgtaacttctggcagcttcaggctgaaatcagtcaccggggacgttactgccatccgtacagcatggatatcaccgtcacccggaacagtccgactggtcaggcaatga

SEQ ID NO: 10449 - DNA, 246 bp, Escherichia coli
atgcagcatgtccctgaaggcgtgattcaggcaccagaatcacccgacgccccggaggcgctgccggggtgtcgttccatttctgatgatgacctgtgcgcctggtgtacccgtctgctttaccgtcccggagaaatcagtctgtgcagactgagtacaggcaatggcatctggccatccgtctgtgaccggaacggttacgcgtacgactgtccggaatttcagccgaatatcattcatccctga

SEQ ID NO: 10450 - DNA, 510 bp, Escherichia coli
atgaaactgaaagctattatattggccaccggtcttattaactgtattgcgttttcagcacaggcagttgattctacgattacagtaacgggtaatgttttacaaagaagttgtactattggtggtgcaggtggtccaaatcaaacagtatctctgggggatttatatacatcagatttaataactaatggtagtacttctgcatggaaaatatttaaaatagaaatgacaaactgccagaatatgagtacggttagagctacgttttccggttcggctgataatacagactattacgcaaatgcaggtacggcttcgaatattatgattgagttacaagaccagtcagggcagaatattcgatataagccaggctctgtaaaaaccgtgaatgttgacacaaacacccgccgggcctcatttgatttaaaagttagagccgtaagtaaaggtaatgccggtgcgggaagtattaattcacaaattactgtcacctatacctatgcgtaa

SEQ ID NO: 10451 - DNA, 366 bp, Escherichia coli
atgaaacttgttgaaactgtaaatgaattttttgctatctatgcaaaactcgatcccacaacaaaaaaaaccattgaatttcagttagtaaatcgtaaaaacaacaatactgtcgttgcagggttatcatcaattgaagaagccagaaacaaagcaataacgctcactgaaaaattggagcaagccaccatccttgaaaaccaaaaagaagaaattgcaaatgatgatatttctgatgaaaatacagaagaaaatacaaaccataactcacaagtagataaaaatttaactgacaatactattcctgatattaaaaaagatgaaaaaacatattctccgccacgtcgaagtcgatacggaaaataa

SEQ ID NO: 10452 - DNA, 342 bp, Escherichia coli
atgatcaatccctcctccattatcttgccaatcataaaaaatctaaggtttgatgttaaagatgatggaagagatagcgattttgtgaaggcaaacaaatatcttgatgaactcgattctataattgatgaatttgataagaataatagtttggatatgcgcgttattttgaatcaaacagtatttttaccattggaattattaatagataagtccaatgatgatgatttcattaaaattttaaaacagttagttgcagtaaaaatgaatacggacaatgttatgaatgtatatgactactgtaagtatttaattgatgtaaagacttctgctatcaattaa

SEQ ID NO: 10453 - DNA, 153 bp, Escherichia coli
atggacgacgagaaaagcctgaagggaaaaggagccacagaacattcgaacaaaacaccagaaatgcaaccagaacgcttcctggcaatgcaaatcaacaacaacgccaaaacctacagcttaatcacacaactcaatcacggatgcgaatga

SEQ ID NO: 10454 - DNA, 129 bp, Escherichia coli
atgatgagcttcaggttcagggaaattctcttgcaaaaaatgtattatccggtggaaaaggtaatgacaagctgtacggcagtgagggagcagatctgcttgatggcggagaagggaatgatcttctga

SEQ ID NO: 10455 - DNA, 3066 bp, Escherichia coli
atggaccagatagctaacctggtcattgatttggggattgatgcggcagagtttaaaaatgaaattccccgtatcaaaaaccttctgaatggtgcagccagcgatgcagaacggtcttctgcccgtatgcagcgttttatggagcgtcagactcaggccgcccggcagacaacgcaggcggcgtcttcggctgcaacagccgcatccgtccatgcgcagacggtggagaagaacgcacaggctcatgaacgcatggcccgcgaggtggagaaaacccgccagcgtatggaggcactgagccagaaaatacgcgaggaacaggcgcaggccatggctctggcggaggctcaggataaagcggctgccgcgttttatcgtcagattgacagtgtgaaacaggccagtgcggggctgcaggaattacagcgtattcagcagcagatccgacaggccagaaacagtggcgggattggtcagcaggattatctggcgctgatttctgaggttacggcgaaaacccgtgttcttacacaggctgaggaagaggctacccgacagaaagtggcgtttatccgtcagcttaaagagcaggcaacccgccagaatctttcttcttctgagttgcttcgtgccagggctgcccagctgggggtaagcagtgctgcagaagtgtatatccgcaaaatggagcaggcaggaaaagccacgcattcgctgggtctgaaaagtgcagcggcccgtcaggagataggcgttctgataggtgaactggcccgcggaaatttaggtgcgctgaggggatccggaataacgctggctaaccgtgccgggtggatagacacactgatgtcaccgaaaggcatgatgcttggcggggttattggtggtattgccgcggctgtctatggtctgggtaaagcctggtatgacggtcagaaggagggggaagaatttaaccgccagctgtcgctgacggggcattatgccggagtcactgccgggcagctgtggacgctcagtcgtgctatttccgggaatggtatcacgcaacatgctgcagtcggtgcgctggctcaggtggtggggagtggtgcatttcgtggaaacgatatcagtatggtggcgagagctgccgcacagatggagcgatcggttggccagtcggtcagcgataccataagtcagtttaagcggctgaaggatgatcctgtaaatgccgcgaaggctctggacaatgagctgcattttcttactgccactcagcttgagcagatacgcgtccttggggaacaggggcggtccagtgatgcggcacggatagccatgtctgcactggcagaggaaaccggtcgacgtactgcggatattgataataacctcaatgcgctgggcagtacgctgaagtatctgtctgatttatggagtcgtttctgggatgcggccatgaatattggtcgtgaagattcgctggatgcgcagattgccactttgcaggagaaagtgtcgcgggcgaaaagactcccctggacggcatcatcttctcaggttgaatacgatcagcagcgtcttaacgatcttcaggagaaaaaacgccagaaggatttgcaggatgcaaaagagcaggcagagcggaattatcaggagcaacagaaacgccgtaatgctgaaaatgctgcactgaatcggatgaatgaaacggaagctgcacgacatcagcgtgaaattgcgcgtattaatgccatgcagtacgccgatcaggctgtcagggatgcggcgatacaacgtgaaaatgaacgttacgagaaagccctggcatccggtaagaaaaaaacacgcgaaacccgtaatgatgaggccacccggttattgctgcagtacagccagcaacaggcacaggtggaaggacagattgctgctgcaagacagtcagcaggcattgccactgacaggatgacagaagcgcataaacagcttctggctctgcagcagcgcatcagcgatctggacgggaaaaaactgacggcagatgaaaagagtgtgctggcccgtaaagatgaactgattcaggcactgacgctgctggatgtaaaacagcaggagcttcagaaacagacggcactcaacgatctgaagaaaaaaacaattcagctgaccagtcaactggctgaagaagagcgcgctcagcgtcagcaacatgaccaggatatcgccacggtgggtatgggtgatcagcagcggcagcgatatcaggtacaactgagtcttcgccagaaataccagcaacagctggagcagttgaggcgggatagtgagcagaaagggacatataacacggatgactacagaaaggccgagcaggcgctgacggagagcctgaaccgacaactgaatgagaatcgccgttactggcaacagcttgaaattgctcagggtaactggaaaaacggagtcctgcgtgcatttcaggattttaccgtggatgcagataatacggcaggaacagcagaacaggtgttctcgtcagccttcagcaacatgggaaatggcctggcaacttttgtcactaccggcaaactcaatttcaaatccttcacctcttctgtgctgtcagatatggcgaaaatcctggcgcaggcaaccatgatgaaatcgataaaagggattggcagtgtactgggatttgatctcagcagcctttccctgaatgccaatggggggatttatcagtctgctgatttgagtcgttacagtggcacggtggttaaccgtccgacgttttttgcttttgcaaaaggcgcgggtgtgatgggggaagctggacctgaagccattctgccactgcgtcgtggtgctgacggtaagctgggggttgtggcggatattggtggttcaggtatggcgatgtttgccccgcagtacaacatcgagatcaataacgatggcacgaacgggcagataggtccggctgccctgaaggtggtttatgaccttgggaaaaaagcggcagcggactttatgcaacagcaggcccgtgatggtggtcggttaagtggagcatatcggtaa

SEQ ID NO: 10456 - DNA, 591 bp, Escherichia coli
atgaaggggcttgagaatgccatccgcaatctgaacagccttgatacccgtatggtgccacaggccagcgcatgggcgataaaccgtgtggcacagaaagcggtctcggttgccacccggcaggttgccgggaataccgttgcgggagataaccaggtgaaagggatccccctgaaactggtacgtcagcgtgtccgggtgtttaaagccagtccgtcaggaaaaatgacggccaggatccgcgttaaccggggcaatctgcccgccatcaaactgaacacaacacggcggcgtgctggtgaaggactgagagtgggaaaatactttttccggggggcatttgttcagcaactggcgaatggccgctggcatgttcttaggcgtcttcctgaagcgcgttttgcaacagggcatgaccatcagggcaggccaagaaaaaatcgtcttcctgtggaggtagtgaaaatcccgctgtccggaccgctgacacaggcatttgaagatgcccgcgaccgcatcattgctgcggaaatgccgaaacagctggggtatgcactgaaacaacaactgagattatggctgacccgatga

SEQ ID NO: 10457 - DNA, 396 bp, Escherichia coli
gtgggattaaagaaaatcgttatgttgactttttgggtcggttttgttgcgggatgcacacctttacacccttcagattgccacaaaactactgctacaggtagttgcagttcaggacgctgggatgatcaggatgaatggggggcgcaagcgcggggaatcagagctgcaattaatgccaaacttgatgagccgcataactggaaagggaaaaaatgcaggttgcatatggaattctctcaggatggcacggcgttaaaaatatctaccagtaacggtgataaagcctattgcgaagcgataaagtccgcagctcataaagccaaatttccggccttcaacaatccggaagtctacagagattttcagaaatctggctttgacatgcgaggttag

SEQ ID NO: 10458 - DNA, 429 bp, Escherichia coli
atgggttttcgtagcgcatcaattcttacgttgattattagtgggattattatcgggtgcactgatgctgtatcgacaaattatcatgaccgtacatcatattactccgataaagcaatagagacacagtatgtgagttcatctgaacgtacttctgatgttagtgaggatatccgtctgtatgcccatcaaatcaagagcgccatcgaaaaacagttcggggatgcgagtaagtattcaggaaaagagtgtacactgagaatgcatatggccccgaatggccttctactggaggttaaaagagaaagtggagacctcgatttatgtcgtgaagcgatgaatgcgataaagaatgttgatatacctgcccccccttcgccggaagtatataaagtatttcaaaatggggtgctggattttaaaccctga

SEQ ID NO: 10459 - DNA, 252 bp, Escherichia coli
atgatgaacatcgaagaactgcgtaaaattttttgtgaagatggcctctatgcggtgtgcgttgaaaatggaaatcttgttagtcattaccgcattatgtgtttgcgaaagaatggggctgcgttaattaattttgtggatggtcgagtgacagacggatttatcttgcgcgaaggtgagtttgtcacttcattacaggcactgaaagagatcggaataaaagcaggcttttcagcttttgcagaagaataa

SEQ ID NO: 10460 - DNA, 1023 bp, Escherichia coli
atgagcaggatgataattgatacaaatattctttactcactagttggtctgtcgacaaaccaaaaaataattaactcccctatagatcaattcaaattatccattacgacaccatcactcatagaagtgatctctaaatattgcaatgacttaggggctgtaaaaaaatgcattagcccaatcataaacggaaatattgaactaattagcattggtcatactccaatctcaaatgaatttctttataggttgcatttttcagacaaaatagacgaagtaaaagatattattgataatgttagagcactaaaaatatctagagaggctgagttttataggttcatactcatactggttgtctctggtttgtttgaggttattagagaagatggatacaagtttgataacgatgtacaaaatcaaagtcaacttagtcttgtgcagactctacttgaatctaatatggaattaattttagacttctttaaagatgagttgcggaatggatatattaatggaaatgagcagcaatcagctttgaaagcttttgaaaccatgcttatcggactcctacatgcttttcatgtcaactatcatatgattaaaactgacacagttaacatttccggaagccaagacagactcaaaaatctgtatgatagtataaaaaatgataattttgataaaaagtttaaaaaatatatggagaatccaatatcccttgcctgcaaaaaaaaacacgaatcagtagttgataactacctgaaagaaatggaggaggggatttctggcgctcgtgggcttactaagaattcgttgagctttctaatgagcaaggttgaggatgcatataaaaatggtcgtaaattacgaaaaaatgacatatttgactttctaatagttatttctctaaatatgccagacactttgattttaacacttgataaaggttttttaaaagaccttaaagatcttcaccctaacagctataaaaagtgtctggatttcggttttgtaaattaa

SEQ ID NO: 10461 - DNA, 402 bp, Escherichia coli
gtggcaaaagtttttacacaagaagagcgggaaaaaattaaagggcaggtggtggaactcgtgcgccagagcggtcgtgagacgttacggcaactggaagctaaaacaggtgcgactagatatctgatgagcgttcttgccagagagctggtagccagtggcgatgtatacaactccggctacgggttattcccgtctgaacaggcgcgtaaggactggcaaaacgcccgcaaaaaactatcgagggcaaaggtgaagaaaacagctgtggttgatccggaccttatctggtcgttacctgatggagaaatacgtcgctacgacagtcgcctaaacataatctgtcgcgagtgccggatgagtgaagttatgcagcgcatactggcattttatcagggataa

SEQ ID NO: 10462 - DNA, 522 bp, Escherichia coli
atgaaaatcactcctgaacaggctcgtgaggctctggatgcctggatatgtcgaccaggaatgacacaggagcaggcgacgatattaatcactgaagcattctgggctttgaaagagcgcccgaacatcgatgttcagcgtgtcacagatgaaggtggcgcggttgatcagcgagcgcttggcgttaatcgagtgaagatattcgaacgctggaaggctatcgacactagggataagcgtgaaaagttcacggcgctagtgcctgcaattatggaggctatccggattaatgatttcaggttgtatcgtgaaattagtgacggaaaaagcatcacgtacatgatcgccgggttaaacaaagaatatggcgatgtggtggagtccggactgctttttgctgatcctgccgtagtggatcgtgaaactgacgaacttatagaaaaagcaattgctttcaaacttgcgtatcgacagcaataccaacaaaaagctggatggaattatgagccttctttttgctga

SEQ ID NO: 10463 - DNA, 228 bp, Escherichia coli
atgtttaaatcagacgtaattaatttttacggtacgaaagccaaagtagcgaaagctgctggcgttgacccatctgctgtttctcaatggcaagagctggttcctgaaggtcgcgcgatgcgtctacaggaggcatctggcggcgagcttctgtatgatcccaaggtttatgacgaatatcgtaagacgaagcgggcggggcggttgaacaatgaaaatcactcctga

SEQ ID NO: 10464 - DNA, 459 bp, Escherichia coli
atgctaatcactcaaggaatctcaagtcaagggttattaagatatctaaatatgaacgagaaaactttaggtcaacgcattagagaaagacgtaagcaggtaggcttaagtcaaaacggtttaagcaaagctgctggcgtatctggctcatcaatttcattatgggaaagtgaccatacagccccgcgcgggcaaaatttgcatcgcctcgccgaggtattgcaatgttcaccaacctggatactgtttggcgacgaggacaaaacaccagctccccctgtttcactcgatagtgccttagacttatcggaagatgagttagagatgctgcgtttgtatcgcgcacttcctaaatcagagcaacaagcacaactcagcgaactccgcgcccgcgttgagaattttaatcgcctgttcaccgagctattagaggctcgcaaacgcaacaagcatcaataa

SEQ ID NO: 10465 - DNA, 153 bp, Escherichia coli
atggatactatcgatcttggcaacagcgaatctctggtatgtggcgtgttccccaaccaggacggtacgttcaccgcgatgacatataccaaaagcaaaacgtttaaaaccgaatctggcgcgcgttgctggttagccagaaacactgactga

SEQ ID NO: 10466 - DNA, 366 bp, Escherichia coli
atggaatttaaagatttaccgtctgatgtacagaaaacagcagctcatacattgcattctgtgctgcgagaaatcgggaaagatattgcaagcgagccagcaaaagatctggcccggaaaatcaagaccgctttcgttgagctttataatgttggcactgactctgaaactgtcgagaccaagaccgtaagttcaccaatattctcacttgagccaggcgtattatcaggtgaaatatgcaccgagatttccagcgaactgcttccggtaatacgagaagcaatttgccgtcgcggtttggatggaagttacgatcatgacgtcctgcaagttctcaggacaatggtgacttcactggggatttga

SEQ ID NO: 10467 - DNA, 201 bp, Escherichia coli
atgactaaagaagaatttgtctcttatatttttgataaaacggttgaaatgtatgccgctacttacgggtcctgtaatcctctgaataaaccagaggggaaagatgatttcgacaaaatttaccgcttcttggaggaccgctatatcaaaaggttagaggacgcagggatcaaatccccagtgaagtcaccattgtcctga

SEQ ID NO: 10468 - DNA, 189 bp, Escherichia coli
atggaaacgttattaccaaacgttaatacgtctgaaggttgttttgaaattggtgtcactatcagtaaccctgtatttactgaagatgccattaacaagagaaaacacgaacggaagctattaaataaaatatgcattctttcaatgttggcccgtttacgtccgatacaaaaaggatgctggcaatga

SEQ ID NO: 10469 - DNA, 192 bp, Escherichia coli; identical to SEQ ID NO: 8188

SEQ ID NO: 10470 - DNA, 2472 bp, Escherichia coli
atgagtaaagtctttatttgcgccgccattccggacgaacaggcaataaaggaagaaggtgccgtcgctgtagccactgccattgaagccggtgatgaacgtcgcgcccgcgcaaaatttcactggcaattcctggaacattatccggctgctcaggactgcgcttataaatttcttgtttgcgaggataaacccggtataccccgccctgccctcgattcctgggatgctgaatatatgcaggaaaaccgctgggatgaggcgtctgcttcctttgtcccggtcgagactgaatccgatccgatgaacgtcacttttgacaacctagcccctgaagtacagaacgctgtcatggttaagttcgacacatgtgaaaacatcactgttgatatggtgattagcgcacaggaattgttgcaggaagacatggcaacattcgacggccatatcgttgaagcgttgatgaaaatgccagaagttaacgctatgtatccggagcttaagctgcatgccatcgggtgggttaagcataaatgtaagcctggtgccaaatggcccgaaattcaggcagagatgcgcatctggaaaaaacgtcgcgaaggtgaacgcaaggaagccggaaaatacacgtctgttgttgatctcgcccgcgccagagccaatcaacagcacactgaaaattcaacaggaaaaatcaacccggtcattgctgccattcatcgcgaatacaagcagacatggaaaacactggatgacgaactggcctacgctctctggcctggtgatgtggatgccggaaacattgacggcagcatccatcgctgggcaaaaaatgaagttatcgacaacgaccgcgaagactggaagcgtatctcggcatcaatgcgcaaacagcctgatgcccttcgctacgaccgccagactatttttggccttgtccgtgaacgtccgatcgacattcacaaagaccctgtggcactgaacaaatacattactgaatacctgactacaaagggcgtgtttgaagatgaaggaacaaatcagagcgcaactgatactctctcgtcgccagtaccagaaactgatgcagtggaaacggcaattccagacaacgaaaaaaccgaatgcaaagtggaagtcgaaccatctgtagaacgtgaggggccgttctacttcctcttcaccgacaaggatggcgaaaaatacggtcgcgcaaataaactttctggtctggataaggcgctgtctgctggggctactgaaatcacgaaagaagaatatttcgcccgcaaaaacggtacatactcaggttcacaacaaaatactggtgcatctgacacgaccgcacaaccagggtcagtaaaagttaccgctgacgaagtaaacaaaattatgcaggcagccaatatcagccagcctgacgccgatgaactgcttgcagtatcacgtggtgaatttgttgaagggattagcgacccgaatgatccgaaatggattaaggggatccagacccgcgattctgtgaaccagaaccagcaagaaacggaacagaacgaccagaaagcggaacaaaacagcccaaatacgcaacaaaacgagccagaaacgaaacaacctgaaccagtagtgcaacaggaaccggaaaagatctgcaccgcctgcggtcagagcggtggcggcaactgccctgattgtggtgcggtgatgggtgacgcaacataccaggaaatattcgatggagagaatcagcctgaagttcagaaaaatgatctggaggaaatggaaggcactgcgcatcagcacaaggagaacactggcagcaatcagcatcatgccagcgatagtgaaactggcgaggcgtcagatcccttaattaaggtgaacggtcatcataatctcacatccaccagcagagcggggattcatctgatgatcgaccttgaaaccatgggaaaaaatcccgatgccccgattatctcaataggtgcaatatttttcgatccgcaaaccggagatatgggaccggaatttagtaagactatcgatctggaaactgctggcggagtcattgatcgggacaccattaaatggtggcttaaacaatcacgcgaagcgcaatctgccattatgaccgatgaaatcccgttagatgatgcactgttacaattgcgggaatttatcgacgaaaactccggtgaattttttgttcatgtctggggaaatggagccaacttcgacaacacgattttgcgccgttcatacgaacggcaggggatcccctgcccgtggcgttactacaacgatcgcgatgtacgcacaatcgttgagctggggaaagccatagacttcgatgccagaacggctattccattcgaaggtgagcgccataatgcacttgatgacgcccgttaccaggcaaaatacgtttcagctatctggcaaaaactgatcccgagtcaggctgattcttaa

SEQ ID NO: 10471 - DNA, 129 bp, Escherichia coli
atgacaatagaaaaacacgaaagaagcactaaggatttggtgaaagcagcagtatcgggatggctgggcactgcgcttgaatttatggatttcaagagtcatacgtgtcaactatttgataaatattaa

SEQ ID NO: 10472 - DNA, 1593 bp, Escherichia coli
atgacggcgaaaacagcaccgaaagtcacgctgtgggaattcttccagcagttaggcaaaaccttcatgttacccgtggcattattgtcgttctgcggcattatgctcggcattggtagttctcttagcagccatgatgtcatcaccctgatcccggtcctgggcaaccccgtgttgcaggctatctttacctggatgagtaagattggctcgtttgcttttagtttcctgccagtcatgttctgtatcgccatcccgctgggtctggcacgcgaaaacaaaggcgtagcggcattcgctggcttcgtcggttatgcggtaatgaacctcgcggtaaacttctggttgaccaataaaggcattctgccaaccacggacgccgcggttctgaaagccaataacattcagagcattcttgggatccagtcgatcgacaccgggatcctcggtgcggtgatcgccggtattatcgtctggatgctgcatgagcgtttccataatatccgcctgccagatgcgctggcattcttcggcggtacgcgcttcgtaccaatcatctcctcgctggtgatgggtcttgtcggcctggtgattccattagtctggccaattttcgccatgggtattagcggattaggccatatgatcaacagcgcgggtgatttcggaccgatgctgtttggtaccggtgaacgtctgctgttgccgtttggtctgcatcacattctggtggcattaattcgctttaccgacgcaggcggcacgcaggaagtctgcggtcaaaccgtcagcggtgcactgaccatcttccaggcgcaattgagttgcccgaccactcacggtttttctgaaagcgccacgcgtttcctttcgcaaggtaaaatgcctgcgtttctcggcggtctgccaggtgcagcgttagctatgtatcactgtgcgcgcccggaaaatcgccataaaattaaaggtctgctgatttctggcctgatcgcctgtgtcgttggcggcacgaccgaaccgctggaattcctgttcctgttcgtagcgccagttctgtatgtcatccacgcgctgttaaccggcctcggcttcactgtcatgtctgtgctcggcgtcaccatcggtaataccgacggcaatatcatcgactttgtggtgttcggtattttgcatggtctgtcaaccaagtggtacatggtgccagtagtggcggcaatatggtttgtcgtttactacgtcatcttccgtttcgctatcacccgcttcaatctgaaaaccccggggcgcgatagtgaagttgccagttcaatcgaaaaagccgttgccggtgcgccgggtaaatcaggttacaacgttccggcaatcctcgaagccttaggcggagccgacaatattgtcagtctcgataactgcattacccgtctgcgtttgtctgtaaaagatatgtcgcttgttaatgtgcaggcactgaaggacaatcgggcaattggcgtagtacaacttaatcaacataacctgcaggttgttatcgggccacaagttcagtcagtaaaagatgaaatggccggtctgatgcatactgtccaggcataa

SEQ ID NO: 10473 - DNA, 1005 bp, Escherichia coli
atgaaacgcgcgtctttgcttacactcacgcttatcggcgcttttagcgccatccaggcagcctgggcggttgattatccgctacctccaaccggaagccgactggttgggcaaaatcaaacgtatacggtgcaagaaggggataaaaaccttcaggccatcgcccgacgttttgatactgcggcaatgttgatccttgaagctaataacactatcgctccggtgccaaaacccggtacgacgataactattccttcgcaactgttattacctgatgcgccgcgtcaggggattatcgttaaccttgcagagctgcgcctttattattatccgccgggagaaaatatcgtgcaggtttatccgattggtattggtttgcaggggctggaaacgccggtgatggaaacgcgtgtggggcagaaaatccctaacccaacctggacgcctacggcgggcattcgtcagcgttcgctggagcgtggcattaaattaccgccagtcgttcctgccgggccaaataacccactaggacgttacgcactgcgcctcgcgcatggtaatggcgaatacctcattcatggcaccagtgcgccggacagcgtcggtttgcgcgtcagttcgggctgtattcgcatgaatgcgccggatattaaagccttattctccagcgtgcggacgggaacgccggtgaaagtgatcaacgaaccggtgaaatattccgtggaaccgaacgggatgcgttatgttgaagtacatcgaccactatcagcagaagaacagcagaacgttcagacaatgccatacacgctgccagcaggctttacgcaatttaaagacaataaggctgtagatcagaagttagtcgataaagcgttgtatcgtcgggcagggtatccggttgcggtgagcagtggagcaactcccgcagccagcaatacgccttcagtagagtcagcgcagaatggtgaaccagagcaagggaatatgttacgcgcgacgcagtag

SEQ ID NO: 10474 - DNA, 1221 bp, Escherichia coli
atgactttttccgttgataaggtgcgggccgatttcccggtgctttcgcgtgaggtgaacagtttgccgctagcttatctcgacagcgccgccagtgcgcagaaaccgagccaggtgattgatgccgaggctgagttttatcgtcatggctacgcggcggtgcatcgcggtattcataccttaagcgcccaggcgaccgagaaaatggagaacgtgcgcaagcgtgcttcgctgtttatcaatgcccgttccgcggaagaattggtgtttgtccgcggcaccacggaaggcattaacctggtcgccaatagctggggaaacagcaacgtgcggtcaggcgataacatcatcatcagtcagatggagcaccacgctaacattgtcccctggcagatgctttgtgcacgcgttggcgcagagctgcgtgtgatccctctcaaccccgacggtacgctgcaactggagatgctacctaatctgttcgatgagaaaactcgcctgctggcaattactcatgtctccaacgtgctgggaacggaaaatccgctggcggaaatgatcacacttgcgcatcaacatggcgcaaaagtgctggtggatggcgctcaggcggtgatgcatcatccggtggatgttcaggcgctggattgcgatttttacgtgttttccgggcataaactgtatggccctaccggaattggcattctttatgtcaaagaagccttgttgcaggagatgccgccgtgggaagggggcggttctatgatcgccaccgtcagcctgagtgaaggcactacctggaccaaagcaccatggcggtttgaagccggtacacccaataccgggggcatcattggtcttggcgcggcgctggagtatgtgtcggcgctggggcttaataacatagccgagtatgaacagaatctgatgcactacgcgctagcacagctggagtctgtaccggatctcactctctatggcccacagaacaggcttggcgttattgcttttaatctcggtaaacaccacgcctatgatgttggcagttttctcgataactacggcattgctgtgcgtaccggacatcactgcgcaatgccattgatggcctattacaacgttcctgctatgtgtcgggcgtcgctggccatgtataacacccatgaagaagtggatcgtctggtgaccggcctgcaacgtattcaccgtttgctgggataa

SEQ ID NO: 10475 - DNA, 1065 bp, Escherichia coli
atggctggcttaccgaacagcagtaacgcgctgcaacagtggcatcatttgtttgaagctgaaggggcgaaacgctccccgcaagcacagcagcatttacaacaattgctgcgtaccggactgccgacacgtaaacatgaaaactggaaatatacgccgctggaagggctgaccaatagccggtttgtcagcattgcgggagagatatccccacagcagcgagatgccttagcgttaacgttagacgccgtgcggctggtgtttgtcgatggacgttacgtgcctgcgctgagcgatgcaactgaaggcagcggatatgaagtgagcattaacgacgaccgtcaggggttacccgacgctattcaggcggaagtgtttctgcatttgacggaaagcctggcgcaaagcgtgacgcatatcgccgtgaagcgcggtcaacgaccggcaaagccattgctgttaatgcatatcacccagggcgtggcaggtgaagaggtgaatactgcccattaccgacatcatctggatctggcggaaggtgccgaagcaacggtgatcgaacattttgtcagccttaatgatgctcgtcacttcaccggcgcacggttcactatcaacgtcgcagcgaacgcccacttgcagcatatcaagctggcgtttgaaaacccggtcagtcaccactttgcccataacgatttgttgctggctgacgatgccaccgcatttagccacagtttcctgctgggtggcgcagtgttacgacacaacaccagtacgcaactcaatggcgaaaacagcacgctgcggatcaatagcctggcgatgccggtgaaaaacgaggtgtgtgatacccgtacctggctggaacacaataaaggtttttgtaacagtcgacagttgcataaaactatcgtcagcgacaaaggccgcgcggtatttaacggtttgatcaacgtcgcgcagcacgccatcaaaacggatggtcagatgaccaacaataatctgctgatgggaaaactggcggaagtggatactaaaccgcagattggaaatctatgcagatga

SEQ ID NO: 10476 - DNA, 747 bp, Escherichia coli
atgttaagtattaaagatttacacgtcagcgtggaagataaagctatcctgcgtggattaagcctcgacgttcgtcccggcgaagttcacgccattatggggccaaacggttctggcaaaagtaccttatcggcaacgcttgccggacgagaagattatgaggtgacgggcggcacggttgagttcaaaggcaaagatttgcttgcgctgtcgccggaagatcgtgcaggtgaaggcatctttatggccttccagtatccggtggaaattcccggcgtcagtaaccagtttttcctgcaaacggcacttaatgcggtgcgcagctatcgcggccaggaaacgctcgaccgctttgattttcaggatttgatggaagagaaaatcgctctcctgaagatgccggaggatttattaacccgttcggtaaacgttggtttttccggcggcgagaaaaagcgcaacgatattttgcaaatggcggtgctggaaccggagttatgcattcttgatgagtcggactccgggctggatattgacgcattaaaagtggttgccgatggcgtgaactcgctgcgtgacggcaagcgttcattcatcattgttacgcactaccaacgcattctcgactacatcaagcctgattacgtccatgtgctgtatcagggacgaattgtgaaatccggtgatttaacgttggtcaaacaactggaggagcagggttatggctggcttaccgaacagcagtaa

SEQ ID NO: 10477 - DNA, 948 bp, Escherichia coli
atggataatctcgacgttatttgtataggtgccgctattgttgatattccattgcaaccggtcagtaaaaatatctttgatgtggattcttatcctcttgaaagaatcgcaatgaccaccgggggtgatgcaataaatgaagcaacaattatttctcgtctgggccatcgcacagcattaatgagtcgtattggtaaagatgccgccgggcaatttattctcgaccattgccgcaaagagaatattgatattcaaagcctgaagcaggacgtcagcatagatacctcaattaacgttggactggtgacggaggatggcgagcggacgtttgtcacaaaccgtaacggcagtctgtggaaattgaatattgacgatgttgatttttcgcggttttctcaggcgaaattattatctctggccagtattttcaacagtcctctattggatggtaaagcgctaacagaaatttttacgcaagctaaagcccggcagatgattatctgtgccgatatgatcaaaccgcggttgaatgaaacgctggatgatatttgcgaagcattgagttatgtcgattatctgtttcctaattttgccgaggcaaaattactcaccgggaaagagacactggatgaaattgctgactgctttcttgcgtgcggcgtaaaaacggtggtgattaaaacgggtaaagacggctgctttatcaagcgtggtgacatgacgatgaaggtgccggcggtcgcaggaataaccgccatcgacactattggcgcaggcgataactttgcttctggctttatagcggctctgttagaaggcaaaaatctgcgtgaatgcgcacgctttgccaatgcaacggcggctatctctgttttgagcgtcggtgccaccaccggtgtaaaaaacagaaaactggtcgaacaattgctggaagaatacgaaggataa

SEQ ID NO: 10478 - DNA, 837 bp, Escherichia coli
atgctcgcagatatcagatattgggaaaacgatgccacaaataaacattatgcaattgcccattttaacgtatggaatgcagaaatgttgatgggcgttatcgacgcagccgaagaagcgaaatcaccggttattatttcttttggtacaggttttgtcgggaacacctcatttgaagatttctctcacatgatggtatcaatggcaaaaaaagcaacggtgccggtaataactcattgggatcatggtcggagtatggaaattattcataacgcctggactcatggtatgaattcattaatgcgtgatgcttccgcatttgatttcgaagaaaatattcgtttaaccaaagaggctgttgatttcttccatccgctgggtattccggtagaggcggaattagggcatgtcggtaatgaaaccgtttatgaggaagcgctggcgggctatcactataccgatcctgaccaggcggctgaatttgttgaacgtacgggctgtgactcattggctgtcgccatcggcaaccagcatggggtttatacgtcagagccacaattgaactttgaggtcgtcaaacgcgtacgcgatgctgtttctgttccgctggttttgcacggcgcatcggggatcagtgatgccgacattaaaactgcaatttcgttgggtattgcgaaaatcaacattcatacggagctctgtcaggccgcaatggtagcagtgaaagaaaaccaggatcagcctttcctgcatttagaacgtgaagtacgtaaagctgtaaaagaacgggcattggaaaaaattaaactgttcggttctgatggcaaagcggaataa

SEQ ID NO: 10479 - DNA, 1020 bp, Escherichia coli
atgggcgttgggctgggagctttactggtgacgctgtttgctggtttcaccgaatatatgcccggtagaaatcgcggaacgtggtccagtcgggtttcttttattggcaactggtcatatccgctctgttcattgattgcgatgggactcacgccgctgattagtgcagagtggaactggcgagtacaactgcttatccctgcaatattgtcgcttatcgctacggcgctggcctggcgctactttcctgaatccccgcgctggctggaatcgcgcggacggtatcaggaagccgagaaagtcatgcggagtatagaagaaggcgtcatacgccagacgggaaaacctttgccgcccgtggttattgctgatgacggtaaagcgccacaagcggtgccgtattcagccttactaacaggagtattactgaaacgcgtgatattaggttcttgtgtgctgattgccatgaacgttgtgcagtacacactaattaactggttgccaacgatattcatgacccagggaattaatttaaaagactcgattgttttaaataccatgagtatgtttggcgcgccatttggtatttttattgccatgctggtgatggataaaattccgcgtaaaacaatgggggtggggctattaatcctgattgcggtgctcggatatatctattcactgcaaaccagtatgttgctcataacgctgattggtttcttcctgattactttcgtctatatgtacgtttgctatgcctcggcagtgtatgtccctgagatctggccgacagaggccaaattacgtggctccggtctggcgaatgcagtagggcgaatcagtggtattgccgcaccttatgccgttgcagtgctgctcagtagttatggcgtaacgggagtctttattcttctgggggcggtttcaattattgtcgcaattgctatcgccaccattggaattgaaaccaaaggtgtctccgttgaaagtttaagtattgatgcagtagtcaataaataa

SEQ ID NO: 10480 - DNA, 123 bp, Escherichia coli
atgcacatcaatcgctatgcctgcatgaacgcgaaaacccatcgcggcttgttgttcatgtatgcatgtttgctgggggcgatgatgtgttttatggataccccggtcaggacgttgtcatga

SEQ ID NO: 10481 - DNA, 1509 bp, Escherichia coli
atggaatggcaacaattgcttaactgcaaccgtcggaaagataatctaaaaaaaaccagcatagaatttttacatccccttgctagcggaagacaagagatcgagcgggattacgaccgattactttttgctgcgccaactcgtcggcttgcggataaaacacaagttttcccgttagatcaaaatgacagtatacggacgaggctgactcattctcacgaagtagcaaacttttctcgcggaataggaatgagactcgctttcgagatgaaggaacacatctttggcgaaatacccacgaggattgtcgttgaacgcgacgttcctgctctgttagcagcgatcggactggcacacgatctcggtaatccaccatttgggcatcaaggtgaagcagcgatgcgcgcatggtttaataaaaatcttcctggccttcttgataaagaagtaaacagcgaaatatataacgactttctgcaatttgatggaaactcacaaaccctgcgcctggttaccaaattacaaattattaacgataactttggtctgaatctgacctatgccacgctggctgcactgatcaaatatccccgagcttcatattcatcggacaaacattggaaaaagcacggttttttctattctgagcatgaggttgtcatggatgtctggcagcaaacgggccttggcgtaccaggtaatgatgccggttgccgccacccatttacctggataatggaagcttgcgacgatattgcctactctgtgcttgacgcagaagataccatcaagaaaggatttgcctcataccaggatttgcgtgattttttgatgtcacaatccgagccgaacgatgtaattcaacatgttattgaagctgtagaggccaaaaatgacgcctggaaagagcaaagaaatgcactttcaccggcggaaattaatgaactcagtatgcaaatgttcagagtttatgccaccagtgcattgattaatgccgtagtagaagcctttcgcgaacaattacccacgctgatgcagcgtgactgcccgttcaaagatttaatctcgcaaagcaaaggtcacgctctctgcactgccctgaaaatgttcgaccgaacacgaggctaccttcatcgttcagtcttgcaactggaacttaggggatctaattacattactaacttgatggatatgctctggattggcatccatggacacaaaacaaagaaagaacgagacggagaacgcgagtccgcgtctacagataacctttttgtttctcgtgaagaatacctgtcggatactccctttggtcgctatgcttacgggacaatctctgaaaattatcgccgtgtgtttgaagatcccgccaatacactccctattctttataaagaagcgcagctgcttaccgacgcaatctcaggcatgacggatagttatttaatgcgccttcacgatgagctaaaatcactgtatgaatgtggtctcaaacacccaacagcttga

SEQ ID NO: 10482 - DNA, 753 bp, Escherichia coli
atgaatgtggtctcaaacacccaacagcttgaacagcgtatcgccgatttttttacgcttagtgatgagcataagaaagccagagtattacttgatactctggcctgttcctgtccggcctggatttttggcgggatggtgcgtgacttaggcttgtttggcgtcgaaggattttcttcagaccttgatatcgtcatcggtcgctcccgtgaggaactcttccggacattggctgaattgcccgttaaacaactgcgttttaataagttcggtgggatccgttttcgttatcacgacttcgaatttgatatctggaacctcaatgagacatgggcatttcgggaaaaacttatattttgtgaggatgaatcaagtctgttaaacactacgctgatgagttgggatgccgtgctctatgatctacgtagtgaaaaaattatcagtaaagataattacttgaccgacttaaatcgcagacatcttgaacttgttcttcatactaaccccaatccaagcggttcggtaacgaagattttacgcactatttttactaagcaggtaaagagtttaggtccggaactctgtcatttcttgcaccatgaactgacgaaaaaacgttatgaagtttggcatcattacgatgtactgcactaccagtcatcgtcattttctcgttcacaatttaatgcgttgataaatttactggcgcaacaatcacgcttcgctgatctaaaattatcaaattacaaataa

SEQ ID NO: 10483 - DNA, 1872 bp, Escherichia coli
atgaaaatagaagccgatgtaaaaaatatatcaaaattaagcgattattattttttagttcccgattatcaacgtgagtatgtatggaaggttgatgatcaggttgaacagtttatcatggatttagacaatgaataccaaccagagcagaaagaccaaaatggttattttctcggttctgttattatcgtaaagaatggggaaaagcatgatgttattgacggacagcagcggttgaccactattgtcatcactatgtgtgccttacgggatctattaaaagatagattggatatacttgacaaaaaagggctggaatatctgaaaactattgaggaatggctctctagttatgatattaatagtgaggaaaatctaattagactagatcttcaatatgaagaaagtcgaggatttatttcgcggttaattgaagggcaaaccaatacctttgcggaaacagcttcagtaaaaaaaatggctgacgcgtatgatcacattcgtgattatcttaaataccaattgcaagatagcttgaatggattaatctccttcgctcgcttttttttaacaaaagttgagctggttgtcattgaatcagagaacttaagtagcgcattaaagatcttcgaaacgatcaatcagcgtggtgccagccttaatgctatggatcttgttaaaaatttgattttcagtcagataaaagaagaacagttttcggcaataaagacaacatggaaatccatcactaataaccttgagtcttgcggcgaaagtgataacccgcttcgttttttacgttactttctgatggcacgatatcatcacgggattttgcgtgaagatgatatatataaatggatcatttcagctgagggggaactgtcgttgcagtataagacacgccctatggtcctcgtcgaagaattggaaaaattatcagaacgatacgctaacctggtcaatgcaacaaatgaagcagcctactggcgtgaaaatatccgtttcccaaacgtaagtaacattggatatattaataaatatcgctcacgtcagcatttggttttactaatggcattggacattagttgttctgatgatgtaatggatttcttaggtgctcaacttgagagttttttattctttacaaatacaatggctattcaatcgaagacatatgagcaacgctttactcaatgggctgtaaagcttcgggatgtgaaaacgaaagcagaggttgcaaatgttgtttcagcaacacttataccttttgttgtggagcgtttagatgaatttaaagaacgattttcaattattaatgactataattttacgcctcagtatcgccaacgttatgtattgggtagattagagaatcatatccgccatctttgcggttttccggaaaagagtcagcaggctattcagcagatgcaaattgagcatattcttcctcagacggtacgaaacgcccctgaaaacggggagttctctgatgcaaatcgaacaagttatctctacaagattggtaatgtaacattattagagggtacaattaaccagtccgtcaataactgcaatgatttgagtgaagactggtttttgaaaaaacaaacagaatatttaaactctgaaatcatcatgactcgattactccactcccagtactcaattggtgataacactgcattaaatcgctttaagctgaaatatggatatgaatatcaagactggtccgcggaaaacatcacatcaaggcaacgcctgctgatggatcttgccattgactgctggcgatttaatgatcagagaatagatgcttatatagtaaataacctgggcactggacccggaaacgaatttacgctgtaa

SEQ ID NO: 10484 - DNA, 510 bp, Escherichia coli
atgtttttcaaaattgttagaaactttaaagccaagattggaccgttcttattaaccctgtttttggctccaggttatgttcatgccaatacgtgggaaataaatgtcacaagaaaagatagtaatttatatcaaattactgggaaggattcttttgttaatactaaatattgttatgtttatgctttttctgaagacgcatatctcagggttgatggctatgataaaaaaataatttttacagatagcaaggattcatgtgatgtagataatgtatttagcatggttaatattgactcaggaaagtatgaggtagaggtttctaaaaaagaagataactggtatgaggtttatggtacagataatatgataaaaacatcaatgtgccttagtctggctctcaatgaaaaggctattttatccatggatggttatagtgcaggagagttgatttttgatgacggagatagctgtaatgtagaaggggtctactctcctgttcgtttgtga

SEQ ID NO: 10485 - DNA, 756 bp, Escherichia coli
atgagtgaaaaagaatcgccatcaatgaaagcgttacgcattgtctatggtgatgaggtcatcgtcgtacagtgtgttccgcgtcaggtcgtaaagggcagggtgctcatcaaggtttatccggactgccgggttgtggcctctgtaccgcctgaaacaccggagcacgaggtattgtctgcgctgaaaaaacgtgggcgctggatataccagcaactgcgtgatttcagggagcaacagacacacattgttccgcgtcagtatgtcagcggagaaagccattattatctcggtaagcaatatcagttgaaagtgacagaagacgctactgtgccgcaacgagtgaaaatgttgcgtgggcgtctggaagtgactgtcagacacaaatcggcagaaaagattaaagccttgctggctgaatggtatcgggaacgtgccagagatgtttttcagcgcaggcttgatttactgattccgcagacactttgggtcagtgagcgtcctccgatacgtctgcgggcgatgcaaacgcaatggggcaactgttcagcaaaaggctgtctgaccctgaatccatggctggttaaggcatcctcagaatgcatcgattatgtcttgctacatgagttatgccatgtggctgagcacaaccacagcgaagagttttaccgtctgatgggacaggttatgccgggctgggaaaaggtcaagaaacggctggatggcatggctgggatgttgttggctgatatgtag

SEQ ID NO: 10486 - DNA, 3285 bp, Escherichia coli
gtggataagcactaccaacctaaattccaggaagaatacagcgccaaaatcccggcgctgacgctactgtccagccttggctggtcgtttttatctccgaaacagattatggattaccgggattataaacaggatgaggtggtgctgcgtccggttcttcgtgaggagttgtcgaagcgttcctttatggcgggtggcaaaacctgccagttatcggaaaaagcactggataaccttatttctcaggtttgctctccggcgctgaacgaagggctgctgaaagccaatgagcggatgtataaccatctgctctacggtatcgccgtcaccgaatttgtcaatggcaagaaggtcaaccctacgattgcgctgatcgactgggaacatccggaaaataaccagttccactttactgaagaatttacagtattgcggtcgggcggtgttgaaacccgcaggccggatattgtctgttttgtgaatggtatcccgctggcagtaattgaagcgaaaagcccggcaggccacggcaagaaaggaccaaccattgacgaagggatatcccagagtatccgcaaccagctcaacgatgaaatcccgcagctgtttgcttacagccagatattactatcgattaacgggcatgacgggcgctacggtacctgtcatacaccaatgaaattctgggcggcatggcgcgaagaagatattactgacgcgcagatgtatgcgctgcgcaaccataagttatcgactgaacaaattcatgcgttgtttgatcatcgtccttcagccgatctcgactggtaccaacagttaatagccgctggtgaactggctgtcagcgggcaggataagctgcttatcagtctactttcgccggaacgtctgctggagatgacccgcttcttcaccctgtttgataaaaagaccggaaaaattgttgcccgctatcagcaggtgttcgggataaaaagactgctggaacgcatcagtacccgcagacccgatgggggtagggaaggtggggtgatctggcataccacgggttctggtaaatcatacaccatggtgttcctcagcaaagcgctgattcttcatgacagcctgaagctgtgtcgtattgtggtggtgacggaccgtgtggaccttgaagggcagctcagcggcacttttgcctcaggtggcgaactggcaggaaaggatgataaggccaaagcgatggcgacctcaggtcagaaactggcgcagcagattggctctggtaaagaacgtataatctttacccttatccagaaatttaactcagcgacaaaacttcctgaatgcgtcaataccagccccgacatcatcgttctgattgatgaaggacaccgcagccagggtggcgagaaccatgtgcgaatgaaactggcgctgccgaatgccgcctttgtggcatttaccggtacgccattgctgaaagaagataagaccaccaataaattcgggccgattgtccacgcttataccatgcaacgagcggtagaagatcgggccgtgacgcctctgctctatgaggaacgtattcctgatcttgaggtaaacgaccgggcaatagatgcatggtttgatcgtattaccgatgggttaagcgaagcgcaaaaatccgaccttaagcgtaaatatgcccgtaagggtgaggtctatagtgcagatgaccgcatccggctgatcgcactcgatatcgccacacacttctcgaagaatattgatgaggggctgaaaggccagcttgcctgcgacagcaagatttccgccatcaaatataaaaagtatcttgatgaagccgggttgtttgagtcagcagtagttatcagcccgccggatacccgggaagggaataccgaagtggatgaaagcaaactgccggaagtgacgaaatggtggaaggataatgtcggcacgcaggatgagtctgtgtatacccgtaatgtcatcagtcgtttcgataccgatgagaagctcaaattgctgatagtcgttgataaactgctcaccgggtttgatgagccgaagaataccgtgctgtatatcgacaagccgcttaagtcccacaaccttatccaggcgattgcgcgggtgaaccgactgcatccactgaaaaagttcggtctgctgattgattatcgcggtattctggctgagttggacacgactatcggcaaatatcaggacctcgcctcccgaactcagggcggatacgacatcaaagatattgacgggctgtacagcgccatgagctctgaatacaagcgcctgccgcatctgtataaccagctgtgggccatatttgctggtgtcaaaaacaaaaatgatactgagcagttacgtgcggtactggtgcctaaaatggaagaacgtgacggagagatggtcgatatccatcagaaaacccgtgatgatttcttcgaggcgttaacggcctttgccggatgcctgaaagtggcactgcagtccgccaccttcttcaccgacaagagctttacggaacaagaccgaaacctctataaagaaaccgtaaaacagatgtccagcctgcgccagtgggcgatgcaggtcagtggagagcaggtcaattatgacgactacgccgagcaggtgaaaaaactgctggataagcatgtcactggcgttgaggttcgtgaaccggatggcgtgtatgaagtcggtaaaatgggtaagagcgaaaagcccgaagagtgggacaacaataaaacccgcaatgaaaccgacatcattaaaacccgtgtgacgaagatgattgagcaggagctgcgtgatgatccgtatgctcaggaggccttttccagactcctgcgtatggcaatcgaagaggctgaaaaactgttcgaccatccacttaagcagtacctcttattccgtgagtttgaagaacaggttgaagcccgtaagctcagtgatatcccggatgctttggcggtaaacaagcatgctcaggcatattacggtgtatttaaaaaagagctacctgaggtttttgtggtaaaagacgttcaggtgcaggataagtggacgaagctggcttttgaagtggacaacattatcgtcaaagcggtggcagaaaactccctgaacccccaggacattgagaaagtcgttaagacaagtctgctaccactgctgtttacggcctgccgggaaattggtgccggaatgaatcaggttaaccgtattgtggaaaccatcatccagatactgcgcgttggtttgatgaaatcatga

SEQ ID NO: 10487 - DNA, 1863 bp, Escherichia coli
atgacccgtgtcagtgtggcagtggtaaaaaatttaaaaagtgctgcctgcactgacaaagcggaagggggcttgctcatggcagtgaacaatctggatcgttcccggtggtacatgggaaatgttctctggttcggaggctacaacagcaaaacggatcgggagaataactttggctttctcttatcagagaatggtaatgagctgttttttcataagaatgagataagccggaactatacacccgctgacaatgcaccggtgctgttcagggaaggtacaggtaaaaatggtaagcctacggcttttaatgttcacattcttgataaaacagatgaggagacggctgagctccttattgaatatctccgggctattattgaggagggcgttgatttcgctcgttggcgttatcgtgactgcgttattaattttctcactcagtcctttggcgaaagggctataattcggttagttaccagagatatagctgctacaaaagtcttgccgctatttttaaaatcacgtaactacgataaccagtttgcacttttcgcctctgataagaattttgatgatttgaccgcacaacaaatatctcctgcggtcatgccttcgtcatttatcgataataacattgatcagttcgctgtttgggtgaaaaggtgttctgcggctacggattgccagggggcttcaacatcggacatcatcaatgaattactcagccatatatctataagtgctattctctacctggcattttacgattgtataagcagcgagcggattcttgaacatcggcatgatgatatagagaattttgttcgacgtagtttcacgaaaaataaaatggatatacaaccatttgtccgtgatgcctatcagcagaaattcccatcgagagagcaattttataaacattccgtgattagtccttttgtcaataagtatttgattaaacagaagatgtttaggaaagatttcagttttgttaatgatattgagtcgaatactgagatttcttctgaccctgaatactttattctgagtaaattgttaccgctgattgggcgtaacgatgaacagtccgttctgagtattattctgcatgagatatggcagggagtgttgtcgggtaaaatcccggtaagccatccttctgttttcaaattgttcccacagtgtagctcattgaaaattcgttcccggaatttaaaattatcctgtgaggcatttcactggaatgcaaaacaacctgacggaacgatagagaaaaaattcctttgtcgttcgaaaatctgccatgatccgcaggtactacccgacctcagtcgggattacatcgacttcactatttatgactggcttgcccactatggcatgacctatctgattgcaggcgaaccttctaagcgggatttcccaattaaactggctgggtatttcaatcgtatcagagaattacattcccgcttgcattgccgaagttgtggggtgctgatggttccagttatgaaatatgctcgtgtggaagtcagcgtctgggatacaaagtcgaaaggatttgtgaaaaaacctttccaggccgcgtatcgcctgaccgtctttaaatgtgccagtcattcgtgcgaacagtttggtatcgggcattacattaatcactgtattggttacaaatgcagcgaaataattgacgccagggatttgcatgaaaaatgttcagaaggacgatttatttgtgcatcctgtggttcctgctgtacgacgcatcaggagaaatttggtaatgtaaacaagggcgaaacagaacaggtcaagtacaatcgcctttatcgggactcgccgttcttttcatcataa

SEQ ID NO: 10488 - DNA, 684 bp, Escherichia coli
atgaaactgacgaaaagcgggccgctgattgaccgggaaatcgactggctggaagaggtgttgatgaaatacgtcaatgatgactctgtgctctgtttctctgagctggatggcttcctgacggcgattgtctctggcccgaatacgatttcccctaatacctggctcagtgctatctgggggcgaggtgattaccaccctcgctggaccactgaaaaagagatgacgcgttttgtggggctgtgttttcagcatatgaacgatatcgctggctgcctgtatgaggcccctgaacagtttgaaccgattttcaatggacgtgaggtgaaggggaagacatataccatcgtcgaagagtggtgtttcgggtatatgaaaggccggtctctggatgactggtcagccttgccagaggccttacgtccctcgctggaggcgatagcccttcatggtattgaaaagaacttcccagtggttgagaaaatgtcacctgttcaatttgaacagagtattactctcattcagcctgcggcactggcgctttaccagcactggttgtcggtgagaatgtcagaggaatcatcccggcctgttcccgtgaagggggcagaaaaactgcccggtcgtaatgacccgtgtcagtgtggcagtggtaaaaaatttaaaaagtgctgcctgcactga

SEQ ID NO: 10489 - DNA, 1215 bp, Escherichia coli
atggctcgtgattcgctttacccagtgagcgttaaagctggaaaaccgatccttggaatgctacctacaggatggcaaaagttatcattagaaaagtgcttaaatatagaggcaagaaaggcatatatacaagataatcaagagtatgacttagttacagtaaagcgctccagaggtggcgtaataagacgtgagcatcttaaaggaaaagatatctccgtaaaaagtcaattctatattaaagaaggcgactttctcatatcaaaacgacaaattgtgcacggtgcttgcggtcttgtacctaaagaactttctggctcaattgtatcgaatgaatattgtgtgcttacagggaagtccggtttttatcttccttatatggaatttctatcggagtctctatatttccagcaaacctgcttccactctagcattggtgtgcacatagagaaaatgatttttaagttagatagttggtttaagtggccatttaatatccccccactgtctgaacaaaagagaatcgttaaaattctgtcaacctgggatgaggcgatttcggtgacggaaaagcttctcaccaacagccagcagcagaaaaaagccctgatgcagcaattgcttaccgggaagaaacgcctgctggatgagaatggggtgaggtttagtggggagtgggtatatttaacgtttgataatgctttcattgttgcaaataaaaaatcgacgcaagtcaaatcttccgattatttacagtcaggttccatccctataatcgatcaagggcaaagtcgaattgctgggtactgtaataatttagaggtttattcggacgtgcctgtgattgtttttggcgatcatacaagatgcgtcaaatggattgagtttgtgttttgtcccggtgctgatggaacgcaagtaataaaaactagcaaaatacttgaaccaaaacttggatactatcttctttcaaatacagatattccgaatttaggttacagcagacatatgcgagaacttaaagagaaagactttaggttgccattagatatcaaagaacaacaaaaaatcgccgccgtcctttccgctgccgacgctgaaatctccacgctggagaaaaaactcgcctgcctgaaagacgagaaaaaagccctgatgcaacagctactgactggcaaacgtcgtgttaaggtcgatgaggcggttgccgaatga

SEQ ID NO: 10490 - DNA, 1524 bp, Escherichia coli
atgaacgacaaaatcagtcaggacacgatcaacaaagccctgtgggccgcgtgtgatacgttccgtggcaccatcagtgctgatacctataaagactttatccttaccatgctgttcctcaagtacatttcagatgtctggcaggatcactatgatgattataaagaacagtatggtgatgcgccggagctgattgaagccatgatggcgaatgagcgcttcgtgttgccgaaaagcgccagtttttacgcactttatgagcgccgtcatgagccgggtaacggtgagcgtatcgatcaggcattgcatgccatcgaagaagccaatggcaccaaactgaaagacgccgggaaaagcgtgttccaggatatttcgtttaacaccgatcgcctgggtgaagaaaaacagaagaacaccatcctgcgtcagctgctggaagactttgcgggtgaagatcttaacctgaagccgagtcgtgtaggtacgctggacgttatcggtaatgcttacgaatatctgattaaaaactttgccgccagcggtgggcagaaagccggggaattctataccccaccggaagtctcggacctgattgcagaactgctcgatccgcaaccgggtgataccatttgtgatcctgcctgtggttccggttcgttgttaatgaagtgcgggcgtaagattgtctccgggcatgacagccgtaactatgctttgttcggtcaggaagcgattggctccacgtggtcgctggcgaaaatgaacatgttcctgcatggcgaagacaaccacaaaatcgagtggggcgataccattcgtaacccgaagctgctcgataagaatggcgacctgatgctgtttgatatcgtgaccgctaacccacctttcagcctggataagtggggccatgacgaggccgagaacgataagtttggtcgtttccgtcggggtgtgccaccgaaaaccaaaggcgattacgcctttattcttcatatgatcgaaaccctgaaaccgggaactggccgtatgggcgtagttgtgccacacggtgtgcttttccgtggctccagcgaaggtaaaattcgccagaaactgatcgacgaaaatttgctggatgcggtaattggtctgccggaaaaactgttctacggtacggggattccggctgcgattctgattttcaaaaagcagaaagttgatgacaaggtgctgtttatcgatgccagccgtgaattcaaggcaggtaaaaaccagaaccagctcagtgaagaaaacatcgaaaaaatcgttaagacttaccgtgatggcgataatgtcgagaaatacgcctatctcgccagcctgaaggagattcaggacaacgactataacctcaatatccctcgctatgtcgatacctttgaggaagaggatgagattgacctgctggcagtgcgagtagagcgtgagcaattgaaggtggaactaacgaaactggaagtggagatggcagggtatttgaaggagttgggttatggctcgtga

SEQ ID NO: 10491 - DNA, 753 bp, Escherichia coli
atgtcttataaattatccagttcaatggtcgtcagcacggcgctggcggcactgctttccaccgtcagcctggcggcgcacgcctcggtcaccccggaccgcacccgtctggtgtttaacgaaagcgataaatcgatcagcgtgacgttgcgtaacaacaacgaaaagctgccttacctggcgcaaagctggctggaagacgagaagggcaacaaaatcacctcgccgctggcggtactgccgccggtgcagcgtattgacgctatgatgaacggccaggtgaagattcaggcgctgccggacattcacacgctgccgtccgatcgcgaaagcctgttctattacaacgtgcgtgagatcccgccaaagaccgggaaagccaacactctgcaaattgccctgcaaacgcgcatcaagctgttctggcgaccaaaggcgctggagaagatcgacatgagaaaaccgtggcagtttaaggtgacgctcacgcgcagcggccaggactataccgtcaataacccgacgccataccacgtcatcatcagcgatgccagcacacagaagaaagggccgaccgctgccgggtttaaaccgctggtgatgtcgccgaaaacgtcacagccgttaaaggcaaaaatggacagcgccccggtgctgacctacatcaacgactacggcgcgcgcctgccgctgatcttccgctgtgaaggggacacctgcaaggtggatgaagatcaaagcagcaaaggctga

SEQ ID NO: 10492 - DNA, 492 bp, Escherichia coli
atgaaaggatcgtgggcgtggttgctggtgggctgcatcggtagttgctccgtgacggcagggagcaaatcggtggatatgattttacgggtgcttgttgatgctccgcctccttgtacggtaacgggcgcggaggtggagttcggtaatgttgtcattaccagaattggtggcgtgaattataagcgccccattgattacaagcttgtctgtaacaacctggccatggatgacctgcgtctacagatgcaggcggcaacggtcgtgattaacggtgaaacggtgatcagcacggggattcctgggtttggtattcggattcagaaggccagcgatagttcgatactcgacttaacgtctggcgcatggctgccgtttaatttctcctcgggcgcaccagcgctggaagcggttccggtgaaacagagcggcacgtcgttaacggcggcggaatttagcgccagcgccaccattgtggtggattaccaatga

SEQ ID NO: 10493 - DNA, 471 bp, Escherichia coli
atgaaacggatctcacttcttatgctgtggggcttttgctccatggcgctctcaaatgtcacttttcacggttatttagtgcagccgcctaactgcaccattagcgacggtgaaaccattgaattaacctttcaggacgtgaatatcgacgacattaacggcagtaattatgagcaaatcgtgccgtatcgcattacttgcgatacaccggttcgtgaccctttactggaaatgaccttgagctggagcggcacgcagagcgactttgacgatgcggcggtaagcacggacatcgcaggcctggggattcggcttaaacaggcagggcagagctttaagctgaatacgccactggtggtggatgaaacggctttgccggcgttaacggcggtaccggtcaaaaagagcggcgtcgatttgcctgaggccaactttgaagcctgggctacgttacaggtggattaccaatga

SEQ ID NO: 10494 - DNA, 525 bp, Escherichia coli
atgacgaaaaaacatgcgttggtttttatcagcagtctgctgttactgtgcagcagtactgctccggcggtcgacaacctgcacttcaccggcaatctgctcggtaaatcctgtacaccggtgatcaacggtagtctgctggcggaggtgcaatttcctaccattgccgccagcgatttaatgcatcttgggcagtcagatcgagtgccgctggtctttcagttgaaggattgcaaaagctctacgctgtttagcgtcagagtgacgctggcgggaacggaagacagcgaactgcccggattgctggctatcgacgcctcatcgtcagcgtccggggtcgggattggtattgaaacggcggcgggcgcagcggtgcctatcaacgacacgacgggcgtgacgttcccgctgaatcagggcagtaacactctcaacttcaatgcctggttacagacaaaaagtgggcgggatgtgacgcccggtgatttcagcgccacggcgacggcaacctttgagtatttttaa

SEQ ID NO: 10495 - DNA, 840 bp, Escherichia coli
atgaaaaaatggatgatgtttttcgcgagcctgatattgctcgtaatgagtgtaggtacgccaaagagttatgccagggataaactcaccagcgcaacttttgatagtgtgaaaatttactatgggatggggagagcaggtttcaccacaggagccttacatgtcactgtgttaaccccaggcgaggttgcctatggggtatacaatactaccgggtatataggcactgacgcgagggtcgtttcatggacggggtctggccctgcgccaacgttgactcttgttgactatagtagcactgataactcgttttgccctgggataaatacgacgctgtttcgatgcgcatatgagacatttaaagttaccgttcaatctgacaattatggctgtccgtggatcgcctctttttatgaggtatcagatcaacatgcatatggaatatatactggcccaacggatcatgctacggcatgcccaacgattccggtgacttcatttgatatttcgtggaatgagaattatgtcagccatagtaaagcgttgcagttacagtccaatggctcgaccatcaccaccacgctttcgacctacctgatgcaagacggcaaactctgtgatggcagcgtttttgataacagaggagcatactgccgcgtggtctcggaactgttaacctttacctcttacggttgcgataaatcgacagtaacggtttcccctacacgtcatccagtaacggataaacaactgcacgatattgtggtgaaggtgaataccagtagccgacaaccgattgattctacgtgtcgttttcagtatgtattgaatgaattgtag

SEQ ID NO: 10496 - DNA, 975 bp, Escherichia coli
atgaaaaaaataaaattttcttttattatattaattctgttttcactccctctgattattttttaccaaccctgggtcaatgcattaccgccaacgccccgacacgcaagtcctgagcaattagaaaaaacagttcgttatcttacacaaactgtgcatccccgtagtgccgacaatattgataatctgaaaaggtccgcagagtatataaaagaggtctttatcagtagcggtgccagagttaccgcgcaggacgtccccattacgggaggtccctacaaaaacattgttgctgattatggtcctgccgatggaccgctgattattattggtgcgcactatgactctgtcagcagttatgaaaacgatcaattgacctatacgccgggcgcggatgataacgccagcggcgtggcaggattactcgaactggcacgtttgttacagcagcaagcaccgaaaactggcgtgcagctggtcgcctatgcgtcggaagaaccgcccttctttcgtagcgatgaaatggggagcgcggtacatgcagcttcgcttgagcgtccagtgagattaatgatagcgctggagatgattggctattacgactctgcgcctggtagtcaggattacccttacccggcaatgtcctggctttatcccgatcggggagactttattgccgtggtcggcagaatgcaggatatcaacgccgttcgtcagctaaaagcggcattgttgtcatctcaggatttatctgtttattctatgaatgccccagggtttattcccggtattgatttctctgaccaccttaattattggcaacacgatattcccgccgtaatgattaccgacaccgctttttatcgtaataaacaataccacttgcccggtgataccgcagacagattgaattatcagaaaatggcccaggtcgtggatggcgttatcaccttgttatacaacagtaaacaataa

SEQ ID NO: 10497 - DNA, 1890 bp, Escherichia coli
gtgcgactggaagcgccggggcgtgattatcgacgctatcagatggaagagtacggtggcgtggacgttcgcctgtatcgtattcctgacccgatggcatttttgcgccagcagaaaaacctgcatcgcattgtggtgcaaccgcaatatctgggcgacgggctaaacaatacgctgacctggctgtgggataactggtacggcaaatctcgccgtgtaatgcagcgtactttctcttctcagtcacggcagaatgtgactcaggcgttacccgaattacagctcggtaatgccattgttaaaccttcccgttatgtacagaacagccagttttcaccgctgaaaaaatatccactggtggaacaattccgttacccattatggcaggctaaaccggtcgagccgcagcaaggggtaaaactggaaggcgcatccaacaatttcatctcgccgcagccgggtaacatttatattcctctcggcaaacaagagccgggattgtacctcgtcgaggcgatgataggtgggtatcgggcgacgacggtggtgtttgtttccgataccgtggcgcttagcaaagtgtcaggtaacgagcttctggtgtggaccgcaggtaaaatacagggtgaagcgaagccgggatcagagatcctgtggactgacggtcttggcgtgatgacacgcggggtgaccgatgacagcggtaccttgcagttacaacatatatcgccggaacgctcatacattctgggtaaagatgcggaaggcggcgtttttgtctccgagaacttcttctacgaaagtgaaatctacaacacccgcttgtatatctttaccgatcgcccgctatatcgcgcaggcgatcgtgtcgatgttaaagtgatgggccgcgagttccacgatccgttgcattcatcccccatcgtcagcgccccggcgaagctttcagtgctggacgctaacggcagtctgttgcaaaccatcaatgtcacgctggatgcgcgcaatggcgggcaggggagtttccgcctgccagaaaatgccgttgccggaggttatgagttacgtcttgcttaccgcaatcaggtctatagcagtagttttcgcgtggcaaactacatcaagccacatttcgagattggcttagctctcgacaaaaaagagttcaaaactggcgaagcggtcagcggcaaactgcaactgctctacccggatggtgagccggtaaaagatgcccgtgtgcagttaagtttgcgcgctcagcaattatcaatggtcggtaacgatttgcgttatgccggacgttttcccgtgtcgctggaaggcagtgaaacggtatccgacgatagcggttatgtggcgttaaatctccccgccgctgataaaccaagccgctatttgttaaccgtctccgccagtgacggtgcggcgtatcgtgtcaccaccaccaaagagatcctcattgaacgtggactggcacattactcattaagtactgccgcacaatacagtaatagcggtgaatcggttgtgttccgttatgccgcgctggaatcttcaaaacaggttcctgttacgtatgaatggttgcgtctcgaagaccgcacgagccatagcggagagctaccgtcaggcggcaaatcctttaccgtcaatttcgctaaacctggcaactacaatctgacattacgcgataaagacggcttaattctcgctgggttaagtcatgccgtcagcggtaagggcagcacggcgcatactggtacggtagatatcgtggcggataaaacgctgtaccagccaggcgaaactgcgaagatgctgattacctttccggagccaattgatgaagcattattgacgctggaacgcgatcgcgtggaacagtag

SEQ ID NO: 10498 - DNA, 3645 bp, Escherichia coli
atggacaaggaattaccgtggctggcggataacgcccaactggaactgaaatataaaaaaggcaaaacaccactcagccatcgcaattggccgggcgaaccggtgcctgttatcactgaaaacctcatccagacactgggtgataaattgctacacattgctgagaagaaaaaaaacattgtctggcgttatgaaaatttttcactggaatggcagtccgccatcacgcaggccatcaacttgatcggcgagcacaaaccctcaattccggcccggacaatggcggcgctagcctgtatcgcgcaaaatgatagccaacagttactcgacgaaatcgtccaacaagagggactggaatatgcgactgaagtggtgattgcacgccagtttattgtacggtgttatgagagtgatcctctggtagtaacattgcagtatcagaaggaggactatggctatggctatggctatggttatcgctcagaaacctataacgaattcgatctccgactgcgtaagcatctctctctggcagaggaaagctgctggcagcgttgcgccgacaaactcattgccgcactgccaggactaccccaagttcgccgtccttttattgcactcatcctcccggaaaaaccagaaatcgccaatgagttggtaggccttgaatgcccgtggactcattttcattctaaggagtggttaaaagttgttgctactgaccacagggcagtgggaaaactcgaacgctactggagccaggatatatttagcgatcgcgaagccagctacatgtcgcatgaaaaccacttcggctacgcggcctgcgccgcccttttgcgcgaacaaggaattgcagccgttccacgcctcgcgatgtatgcccataaagaagattgcggtagcctgctggtaaaaattaaccatccgcaggtcatccgcaccctgctgttagttgctgataaaaacaaacccagcctgcaacgtgtggctaaatacagtaaaaacttcccccatgcgacgcttgccgcactggcagagcttctggcgttaaaagaaccgcctgcacgccctggttatccaatcatcgaagacaaaaagctgcctgcacagcaaaaagctcgagatgaatactggcgtacgctgttacaaacgctgatggcatcgcagccacaactggcagaagaggtgatgccgtggttaagtactcaagcccaggcagtgctggatagttatttatcggcaccgcccaaaacggttattgatagcaccgataacatccaaatgcctgaaatcctcgtttcaccaccgtggcgtagtaagaaaaaaatgacagttccacgtcttgatttggcaccgttcgaattaacgccgcaagtttactggcaaccaggcgaacgagagaggcttgccgccactgagtctgcccgttatttcagcacggaatctcttgcggaacgcatggaacaaaaaagtggacgagttgtattacaggagctgggttttggagatgatgtatggctgtttttgaattatatactccccggaaaactggatgctgcacgcaattcactcattgttcagtggcattactacccagggcgggttgaagagatcatgaatggctggagctccccggaagctcaattagcagaacaggcgcttcgcaacggtcacgtagaagtgttaattaacatatgggaaaatgacagctactcacgctatcgtcgggaaaagagtatctggaacctgtatttattggcgcagttgccgcgtgagatggctttgactttctggctacgtatcaatgagaaaaagcatctgtctgcgggagaggactattttctcagtatcttcggattggatgctctaccaggtctgctgttggctttttcacatcgtccaaaagaaacatttccattaattttaaatttcggcgcaacagaactggccctgcccgttgcccgcgtctggcgacgtttcgcggcgcagcgtgatctggctcgccagtggattttacattggtcggaacatacagctactgcacttatccctcttgtcttcaccaaatccagcgataatagcgaagctgcattacttgccctgcgtttactttacgaacagggacatggcgagttactgcaaaccgtggcaaaccgctggcagcgtacagatgtatggcctgccctggagcaattacttaaacagagtccaatagagatttacccgacacgcattccaaaagcccctgatttctggcagccggcaatgtggtccagaccgagacttatcacgaataatcaacctgttactgatgatgctctggaaattatcggcgaaatgctgcgctttacccagggcggacgtttttattgtgggctggaacaactgaaaacgttctgccagccacaaacgctggccgcttttgcctgggatctctttaccgcgtggcaacaagttggcgcccccgcaaaagacaactgggcatttctggcgttaagtctcttcggtgacgaaagcacggctcgggatctgacaacacagatcctcgcctggccacaggaaggcaaatctgcccgtgccgtcagtggcctgaacatacttaccctgatgaataatgatatggcgctgatacagctgcatcatatatcgcaacgggcgaaatcccgtcccttacgtgataacgcggcggaatttcttcaggtggtcgcagaaaatcgtggactaagccaggaagagttagcggacagattagtcccaacactgggcctggatgatccgcaggcgttgatatttgattttggtccccggcagtttaccgttcgcttcgatgaaaacctcaacccggttatctttgatcagcaaaacgttcgccagaaaagcattccccggttgcgcgccgatgacgatcagctgaaagcgcccgaggctctggcccgacttaaagggctaaaaaaagatgccactcaggtgagcaaaaacctgctcccgcgtcttgaaacagccctacgcaccacccgacgctggtcgctggcagattttcattctctgtttgttaatcatccctttacccgtctggttacccagcgattaatatgggcggtttatccagcaaatgaaccgcgtcgtttactcaacgcctttcgtgtggccgcagagggggaattctgcaacgcacaagatgagccaattgacctgcctgccgatgccctgattggcattgcccacccgttagaaatgacagcagaaatgcgcagtgaatttgcacagctttttgccgattacgaaattatgccgccttttcgccagttgacgcggcgcacagtgctgctcacgcctgacgagtcagccagtaatagtttgaatcgctgggaaggtaaatctgctaccgttgggcaacttatgggaatgcgatacaaaggctgggagtcaggctatgagaacgcatttgtctatgacctgggcgagtaccggctggtccttaagttttcatccggttttaaccactacaatgttgatagcaaagcgctaatgagcttccgttctcttcatgtataccgtgacaataaatctgtcacttttgccgaacttgatgtgtttgatttgagtgaagcgttaagcgcacccgacgtcattttccattaa

SEQ ID NO: 10499 - DNA, 276 bp, Escherichia coli; identical to SEQ ID NO: 8395

SEQ ID NO: 10500 - DNA, 3057 bp, Escherichia coli
gtgaaacagcccattgttgatgaaggcagtaacgccgcttttgacatcgtttatagcgatgcgcaaggcgtaaaaaaagccgtgtcgggcttgcaggtgcgcctgattcgcgaacgccgcgattactactggaactggtcagaagatgaaggctggcagtcacagtttgatcaaaaagatctgatcgaaaatgaacaaactctggatctgaaagcggacgaaaccggcaaggtcagtttcccggtagagtggggcgcttatcgtctggaagtcaaagcgccgaatgaagcggtcagtagtgtgcgtttctgggctggctatagctggcaggacaacagcgacgggagcggtgccgtgcgacccgaccgtgtcacgctgaaactggataaagccagttatcgccctggcgataccattaagttgcatattgctgcgccaacggcgggtaaaggttatgcgatggtcgagtccagtgaagggccgctgtggtggcaagagattgatgttccggctcaagggctggatctgacgattccggtcaataaaacctggaatcgtcatgatctttatttgagtacgctggtggtgcgtcctggcgataaatctcgctccgcgacgccaaaacgcgcggttggtgtgttgcatctgccgcttggtgatgaaaaccgtcgcctcgatctggcgctggaaacaccagcaaaaatgcgtcccaatcaaccattaaccgtgaaaattaaagccagcactaaaaatggcgagaagcctaaacaggtgaatgtgctggtgtctgccgttgatagtggtgtgctgaatattactggctacgttacgccagatccgtggcaggcgttctttggtcagaaacgctatggcgcagacatttacgatatttacggtcaggttattgaaggtcaggggcgtctggcagctctgcgtttcggtggcgatggtgatgagctgaaacgtggtggtaaaccgccggtcaatcacgtcaatattgtcgcgcagcaggcgctgccggtaacgctcaacgaacagggcgaaggctcggttgcactgccgattggcgattttaacggtgaattgcgcgtcatggcgcaagcctggacggcagatgacttcggtagcaacgaaagcaaagtgatagttgccgcaccggtgattgctgaactgaacatgccgcgctttatggcgagtggcgatacctcgcgtctgacgctggatatcactaatcttaccgataaaccgcaaaaactgaacgttgccctgaccgccagtggtttgcttgaactggtcagcgattcacccgcagccgttgaattagcgccaggggtgcgtactacgctgtttatcccggtgcgtgctctgacggggtttggcgatggtgacattcaggccaccattagcgggttagcgttaccgggggaaaccgttgccgatcagcataaacagtggaaaatcggcgtccgtccggcattcccggcacaaacggtcaattacggtacggcgttgcagcctggtgagacatgggcgattccagctgatggattgcaaaacttctcgcctgttacgctggaagggcaattgttgttgagcggcaaaccaccgttgaatattgcacgttatatcaaagagttaaaagcgtatccgtacggttgtctggagcaaaccgccagcggcctgttcccgtcactttacaccaacgcagcccaactgcaggcgttgggcatcaaaggcgacagtgatgagaagcgccgtgcggcagtcgatatcggcatttctcgtttactgcaaatgcaacgtgataacggtggctttgcgctgtgggataaaaacggtgatgaagagtactggctgacggcttacgtgatggatttcctggtccgcgcaggtgagcagggttacagcgtgccgacagacgccattaaccgggggaatgagcgtctactgcgctatttacaagatccgggcatgatgtcgattccgtatgcggataatctcaaagccagtaaattcgccgtacagtcttacgctgcgctggtgctggcccgtcagcaaaaagctccactgggtgcgctgcgtgaaatctgggagcatcgtgcagatgccgcttctggtttaccgctgctgcaacttggcgttgcgctgaaaaccatgggtgatgcgacgcgtggtgaagaagcaattgcgctggcgctgaaaacgccgcgtaatgatgagcggaaatggctgggtgattacggtagcccactgcgcgacaacgcgttaatgctctccttgctggaagaaaataaactgctacccgatgagcagaacactttgctgaatacgctttcgcagcaggcgtttggtgaacgctggctatcgacgcaggaaagtaacgcgttgttcctggctgcccgtacggttcaggatttaccgggtaaatggcaggcgcaaacctctttctcagctgagccgctgacaggcgagaaaacgctaaacagcaatctgaatagtgatcaacttgccaccttgcaggtgaccaacagtggcgatcagccgttatggctgcgtgtggatgccagcggttatccgcaatccgcacctttaccggcgaacaatgtgctgcaaatcgagcgtcatattcttggtactgatggtaagagcaaatcgctggactcgttacgtagcggcgatctggtgctggtctggttgcaggtaaaagccagtaacagcgtgccggatgcgttagtcgtggatctgctgcctgcgggtctggaactggaaaaccagaatctggcgaacggtagcgccagcctggagcaaagtggtggcgaagtgcaaaacttactgaaccagatgcagcaggcgagcattaagcacattgagttccgtgacgatcgctttgtggcggcggttgccgttgatgaataccaaccggtaacgctggtgtatctggcgcgggcggtgacgccgggaacgtatcaggtaccgcaaccgatggtggaatcaatgtatgttccccaatggcgggcgaccggcgcggctgaagatttgctgattgtcagaccgtaa

SEQ ID NO: 10501 - DNA, 8076 bp, Escherichia coli
atgtcggtatgtctgaaaccaggaaaaatcattgtgcttctgggcatgttggcagcctttatgctgtctgactttgcacgggcaggagtggaatggcagacatatcctggttctacaggcgagtttaacggtacagttcctattgccgatagcgctagcgtacccgtttatcagggaagcgttcagcttgatcctgctgcatctcatgatgtggcgttttctgctaaaccgaatgaatttagcgttgacgatgacgctgctaacctgatagtcgctaatcctcaggacagtgaaggcgaccagttttccacaccacctgcgctgcgctgggaaaaccagacgccgccgaccgtcagtctggtgtgggcggatgccgccacgccggatacgccgctcaacccgcagcccatcgccaaccgcagcttttgcgcgcaaggtctggccgggcgttcgctggtggcctggccgcagatagatacacaacaatccattccactgctttacctgctgacctcgaccggttatccctatgaggggacggtggcgctggctgaccagaaagtgacgctgaacatcgcgcccgcacagggcgatttaatttcggtgagcgccagtggttataacgaaacgatcgcggcggcaaaaaccaccgttggtggcactatcacgctgaccgtcaccaccaaagattgtcagggcaacgtcgcgggtaatattccgtttattatcaaacgtaaagatgcccaaaaccgtcagggcgcggtgaataataccgcgccggtggtgctggggagtaccgagttaacgacgacggcaaccgagtatcgtggcacatcggatgccaacggtacggcaaccatcacggtgacccaacctaacggccccggcgtcaaaacgccgctggtggcgagtatttccggcattgcgcaaaccagcgaaacggcggtgatttttaccgtacttaccagcccggacgtggcgcaggccacgatgtggggccatatggcggaaacggttgaggcacacggctacacgttcagcaggccaaaactggcggcggaagtcagcaatgaaaatgccacggtcgtcgatcacaacgaaacctggtccactttcacctggagcggggcagacagccattgcaccgtgctgccgggcatgcgccatttcggcgcactggcgacggtgattccctccacggtacagactgtccttggctggccgatgcaggatgattattactggacatcgctggcgggcactaccgggcagcaccatgcagcggatgtctctaaccgtgctgaagcgcaaaagccggatagcaccacgtttctggtaagctgcgtggacaaacccgcgcctgacgtcgaaccgaaaatcgtccttacgccagaaaactatgatgatacggcacaggcgatgaaagcgaaggtgggtgaggatgccacgatgcgtctgacgatcaccgacaataaaaacaacgatcaaccgctggcgtattactacttctcgctgcatctggatgacggcgttaaccgcaaaaatcaaaccgatcctgcctgggaaacccatccggtacagattgctggtggctcgaatttacaacaggttgatgctcacacctatgaaggcataactgatgtcaacggtcaggcttcgctaaccctgagccagcccggcggcgcgggcgttaaaactcacatcacggcgagaatgcgcagcgattttacggccacagatgccaaagacgtgatttttaccgtgatcactagcccggacagcgacaaagcgcggatgtggggccatatgcgcggcattattgagtccggcagtctgtataaacgcccattactggcggatgaaaccgagcatgaactgggatcggtgcgggaaaataacgaagactgggcgctgtacgatcaaaacaccagtatgcaggcggaatgcggggtgggtcatataccgcgtcagagctcactggaaagcctgttttcagcccatcccggtaacgcgattggcactgagtatggctggcctaccgcacaacagagctacctaagcgcggtggagcaagaaacgcattcatcggtgaatctggcgaacgggagcgtcgacagctactccggctttaagcagaattacctctcctgctcgggcaatgagatggtggcgaatgtcgaagtcagcaccgatcatgatgtcaccgttggcagcaaggcgcaggccaaagtgggtgacaccatcgtaatgaccgtgcgtacggttaacgggttgaataacacgccggtgccgtttaccgcattcaccattaccaaaggcatggggtataaccggttggggcaggtgagcgggtttgatgacccgagcagcggcgcaatcacgatgaatgacacacaatacggcacatcccagccatcgatggtttatgcgggaacgaccgatgcccagggcgtggcgacggtcgagattaaacaaccgcagggcgtcgggctaagaacggcgctgagcgtaacgccggtaaattcctacctgccgaataccgttaactacaacgttatttttaccaccccaaccagcccggacgtttccggtgcgcaaatgtggggccatatggatgaaacgataactgtcgattcatcaacctttacccggcctaagctggcggcggaaatcgccagcccggacggaaccctgaccgaaaataacgaaatctgggcgcgcgtgagccaggccaatacgtccagtaccagcaaaggcggctgcgctaccaatatgttgccgcgtcgctcccagctaagcgcgctctatagcgccaacagtggtaatgcagtgcaaacgacgcacggctggccaacgcagcgtcagccctactggagcagctctccggcggatgtgacgccgcactttttcacgatagcgctgaacgatggcgcacaagctatcggcggcaatacgccggtttacgtcagttgcctgacgacggcgaacaagcctgccagcagcattacgctggaggtggttgataaagcgcaatggaatgccgggaataacgcggcaacgctgaaaaaaggcgaaacgctacaggttaaggtgacggtaaaagatgcacagggcaacgcgttagcggatatgccatttaccctcagtcgcggtgatggctatacccgtagcggcgaaaaacatattgccggtagcggcgatgcgctggtggcgccggtggtggtcaatggcgggctggccgatgaaacaacgttgaatgacaccgcaacggtgtataccgccatgaccggcagtgacggcagcaaaattcttaatattacccgtccggatacccacggcaccaaaacggcgctgacggcaacgctttactccgatgcgacgaaaaaagacagcctggacacgatctttacggtggttaccagcccggatagcagccaggcgaaaatgtgggggcatatgccggaaacggtgacggctgaggacggtacggtctttaaacgcccgcggttactgaaggaactgagcagtcagactgggcgaacatcaacgcttgaagacaacgaaaactgggcgttgtttaacattaattatgcgagctcttccacgacgtatagtggctgtggaaccaactatattccgactcaggccggtctgacgtcactgtttgctaataatgcgggcaacaccatgaaaaccgtgcagggctggccggtggcaacgcgctatttgtccaacacgtccgacaatggcagcatggagcagcgtaactacaaggcggtcgatctcagcaatggcacgagtgcggcagtgtcatcaacggcgctgcaactgctgacctgtcagactacaccggtaaccacggtgagccaaatcctgctggaagcggcagatccggcgacgctggataccacctataacgtggtaaaagcgaaaaaaggcgaagaatccgtggtgcgcgtcaccaccaaagatgcacaaggcaacctggtgggcaatacggcatttatcctgacgcgtgccaacagcgtgagtcgggctaatgcatcagcgacgatgagcgtgggctcgttgacggtgacggatgcctggggcaatacgcgaaataatttccagtcgacaagtgaaaccatttacggcgtgaccggtgccgacgggtcaacgacattgaccctgaaacaggataacagtaccgggttaagaaccgatctcacggcaaaactggatacgtccagcagcgtcaaggcaacgctaccggtggtctttaccgtcgtgaccagcccggattcgccaaaagcgaatttttggggacatatggccgaaacggtggcggcctccgatggttcagtctataaacgcccactgttgctggcagagctggccaacactggcgggcgacaaatcagttcagagaacggggaaagctgggtacgattcacctggaatcagtcgacagatccttctgtaagcggctgcggcgttgcgtatatgccaacgttggcaggcctgcaagcgttgtatgacgctaatagtggtaatgcaatgagtacggtacagggatggccggtaaaagcgacctatctcaccaataccccaagtgacacgcaaacggggagccgttactacaatgtggtgcaactggattctggcgcagcctcgcaaatcacgacgaacacgggtgtactgcaaacctgccgtacaacgccgttgacggctgccagccagattacgctggaggccgcggatcctgcgcaatttgtcagtattgacagcacgcttagcgctgtcaaagtgcagaaaggcgatagcgtgccgatccgcatttcgactaaagatgcgcagggcaatttcgtcggcaatacgccgtttgccctgaaacacgcgaactcgatcaatcgtcaaaatgtgtcgtcatcgcagaaagtgtcggtcacgacggaggtgggtacgacggtggataccagtgcaacaaccaccctgtatggcgtaaccgggccagacggaaccaccacgatgacgctccgacaggatgcgtccaccgggttaagaaccgacttttatgccctgttgaacgataccggcgtgtcgtcggacaccttgccggtgatctttaccgtcatcaccagcccggatacgccgctggcggccaactggggccatatggcggaaacctttaccagtagcgaaggcgtcaccttcaagcggccttccctcaaagctgaactctctggcggtacggccataacggtcaataatgaagtctggtcgcgcctgacagcggcggagaaagtggatgccagcaaggccgggtgtgatgagacgtatcaaccgctggtgaatgacatgcaggggttgtatgcggattaccctaacggccagttaggatcggtgctcggcttgccgacgtctgccgggtattggtgggcctacgacatgatgatggtttctggcaactggactaatcaggcattttcacctgttaatggtcagttgatgcaggcatcgtccagctatacggcgatcgtgatgtgtctggtagaaccacatacggaagcagccacaatagagcttacttcaacggcgcaggacgcagcaaaatcggccagtaatggtggacgaccgagcgccgtagcgaagaaaggcgagacgattccgttgacggtgaccgtgcgtgatagcgccgggaacccgatgccatatgctgagtttaccctcacgcgtgaaacgacgctggatcgctcgaaagcaaccgttaacacgagtgcggacgaccttaccgtaacggcattggtacccgcgaatacaaatagtgtgttggcagcaagtggagcaaaactgatcggcacgacgggcagcgatggcaaagcgacctttgaggtgagtcagaatgcgacgaccgggctggcgacgccgttaaccgtgacgctggcgcgtgatacgacgaaagccgccacgctggatgttatctatacggtgatcaccagcccggattcgccgagtgcgaaattctgggggcatatgccggacacctttaccagctcgacgggcgtcaccttcaaacgaccgctgctgaaagcagaaaccagctcaggctcatcgattagctctaacggcgaagtttggtcatatatgagcaacgcgcaaaatttaacatcgacagattgcccgctcgaaaatcaaccgcgcagtaatgagctgttggatttgtatagcgatcacccgaacggcacgctaatgaccgacctggggttacccgtatatgcaggtaactggtgggcctatgatatggtcatgctgagtggaacgtcgtggacttatcaactcatcagcctgaaagacggaaccattacgcagaaggggacaaccagtgcgttgatgctttgcctggcacagccgcatccggccggcgtcagcgtaacattgacgtcatccgcacaggatgacgccagaaccaccagcaatggcggccgtcccagcgcgtcagcgaaaaaaggtaactcaataccgattgtggtaacggtaaaagatcgtgatggcaacccgttggcgggcgaagcggtgacgctcaaacgtgattcagcgttgagccgttcaggaacaatcgtggggacgccagcgaatgaaataaagttgacggaactgacgcccgtgtcggcgacattcccgctggtttcaaatggtacacaatggcttggtttcaccggtagcgatggtacggcgacattcaatgttgaacagcctgatactgtcggcctggcaatcccctttaacgccatcctggcccgtgacacggccagggtatctactctggatctgatttttaccgtcctcaccagcccggatgccgcattagcaacttactggggccatatgccggataccgtcacggcggaaaacggtgctgtctttgagcgccctaaactgtggaaagagctgccgtcgacatccggggtaagtcagataacgaatagcaatgaagcctggccagtgtttaacgcaacgcagagggctgacagcaatctcagcccttgtgaagcggcgcgtcgaccattgagcgatgatttagaagcgctctatacacgttatccaggaaacacgattaccgcgcaaattggctggcctacgcagtatgcatggtgggcggtggataactgggaagggggcagtaatccgcaggccgtcagcctggtaaatggttcgagaggccaatataatcccgctcatcaggcctgcctggttaacccgcgtgcgagcgtttccagcgtcacgctgacatcaacggcgctggatgacgccacacaggcggcgacggtgaaaaaaggcgacgccgcgcccattgtcgttaccgtaaaagacagcgccgggaagccggtgccgaatatcgcttttatcctaaaacgcggtgaggccgtgccgcgtaacagcggggcgacgctgtatggcgatgtggatgcgatggacgatttgactgtgcaaccttcatccggtgcggcagtcacgttggctgacagtggaaataccatcgacggagtcacgggagcggacggtacggcaagctttaccgttcgtcaggataatacgccaggatataaaacgccgttgacggtgacgctaacggataacgccaccataacggcgacgctggacacgattttcaccgtgccgaccagcccgaatgtcgccacggcgtatttctggggtcatatggcggataccgccacggtaagtggcaagacgctgcatcgcccgctattaaaatcggagttgccgtcaggcgctaccgcagcagcaacgcctgatgtaaataatgaaacctgggcactggcgcatgttatggattcctctaaatgggatgtcgcgcagcagtgtggcagtatgaataacgtgccgagcagtgccgaattacaaacattacactccggctttagcacattgggatggccgtcctcgataagcttcccgtatttatctactgataaggctgggtcgttctattgtggtgttgatgaaggctctggcagtctcaactgtggcattcagcctgcgaaaacgccggggtttgcaacctgtttccaataa

SEQ ID NO: 10502 - DNA, 942 bp, Escherichia coli
atgagcaacgacatcgcaaacatcaacgcaccagtagacacagcaatcgctggaactgctgcaactattttcagcccagacggcttgaaccaactgatgaaattcgccgaggtaatggcgcaaagccgcgtaacggtaccggcgcacctcgccgggaaaccagctgattgcatggccgtggcaatgcaggctgcgcagtggggaatgaacccgtttgccgtggctcagaaaacccatgttgtgaacggcacgctaggttatgaagcccaattagtaaacgcagttatctcaacgatgtcgccaacaaaagatcgcatcaactacgagtggttcgggccgtgggaacgcgtgatcggtaagtttgttgagaaaacatccaaaaacggcaatccatatatcgcaccaggctggactctaaaagacgaagaaggctgcggtgttcgcgtatgggcaaccatgaagggcgaggatcaacctcgagtgcttgagttaatgctgtctcaagcacaggtaagaaactccacactttgggccagtgatccgaaacaacaactcgcataccttgcgacaaaacgctggtctcgcctgcactgtcctgacgtaatcatgggcgtctacaccccagacgaattacaggaaacggcaccgcgcgttgagcgagacattactccgcaaacgaccactgctgcgggaatgaacagtctgatcaacgctaaaccagcgaaaaagcctgatgagcaaacgcgtaaatcggacagccgtgatccagaagaaatgctgatggcctttaccagcgcagcgatgaattacagcactgtctccgaactggataaggcttacaaatacattgcacaaaaactttcagatgatgacgaactgctggcaaaagccaccgacgtttacagcgttcgtcgggaagaattaaacgaaacatctatgtaa

SEQ ID NO: 10503 - DNA, 480 bp, Escherichia coli
atggaaagtaatatcaaagggttagttgccgccgggcatgagatggcttcggaactgaaagcagaatgtggtgccgttgatatgcgcagtgtggcaaagctgatcagcgatttggcaacgcaactggaagtgcaactggtgcgtgctaatgcgctggcggcggagagtgcggcaatgcatgaaactattgaagccgttcggagtgttgcggataactccagtggaattgccggatggcatttgaatggcgatatcgctacatgggaagagattcttcctgaaattaacgatatcgaaactccagccaccgatgctttcctggctgaagtacgtgcgcaggcgtttaatgacctttgctcggcgttcgttaaacacgcgaatctcgcgggaatggatgatggtgagctagtgaggcttaaatatgcgacggacgccctgctgcattgtgcggaacagcttcgcaaaggaggcaaccagtga

SEQ ID NO: 10504 - DNA, 546 bp, Escherichia coli
gtgagtgtaacggttgaaaagattgatgtgttgtcattcgttataaccggtgcagagagactagatccggttcgagtgatgattgaaaactatgaacctggaaagggaagaatcaccatcacctgctacggaaaagcgtggactgcggcttggtttgctatgggcggtgatgatgtgcagacgttcattaagcgagtcagcaacgactatctaatcgacaatttcgaccctcaactgcgaagcacggtcgacgatgacaacgatgcaaatctgcttttcgtgaagtcagaaatcataaagttacgaagagagagagaaatcgacgccgtactggctcgcgaaatgtggtacgaggcggaaaacgccgatgacgtaaaagaaagctgctgctgtttcggcgtcggtaacaaactactgaatctctttggtgatgagccgtggtatgccaactggccaacgataccaaacccgaaataccagtatctggaacgcgtacttaatgcagtgagagacggtcttaagcaaatagagaaggtggaaccatga

SEQ ID NO: 10505 - DNA, 300 bp, Escherichia coli
atgactgtatgtcttattgataaacgtcgacgtgggcaacaaataccatctgttgaaatgccgaatcacacatggttttgcgtacttgatatcgatggcatggataagtttgttgacactcgtcattactgcgataccgcaacagctactccggcgaaagcaaagaaaatggctgctctgatagaaaactggactccacctgatggttggtgcaatgggaatgatcgggattggcatgaaaaaatgaagggctatatctgcgattttttacgtaaatgcaacggattcagggtgatgtga

SEQ ID NO: 10506 - DNA, 765 bp, Escherichia coli
atgagcaagattgactatcaggcactgcgtgccaaggcagaaaaagcaacgtgtggtgtatggtcgctcgaatatggagagagccgatttgatggtgatgatgcgctaattcatcgtgaagttgctggatatattcctatttgcagaattgaaggagcgcatccagaaagcggtttcgatgaagatttccaaatggaacagcaggccaatgctgaattcatcgccgcagccagtccatctaccgtgctggcactgctggatgaacgggaaagaaaccagcaatacatcaaacaccgtgaccaggagaacgaggatattgcgctaacggtagggaagctgcgtgttgagcttgaggaagcaaaatcaaaactcaacgagcaacgcgagtattacgaaggtgttatctcggatggaagtaagcgtattgctgaactggagaaaagcgaagagcaactcattaacgagcgtgaccatgctgagtctgctttagctgatatgtattttgcagcaaccggggataggcctgagtggagtaactggttcggtttttcagatgcagtagatgccgtagttgacagaattgctgatttagaagctaaacagccatcgccagtagtacctgaaggactgattaaagcggtgcgtttttatgagcaggtaaaacgtgagaacccgccagtcgaaaccggagcatggaaagacgctgttgactgggtgctcaaagaggcttgccaggctgtaaacattggcatcaaaggagagtga

SEQ ID NO: 10507 - DNA, 516 bp, Escherichia coli
atggcgttaacacaccgcgaactctgtcagattgcgtacaagttccttaagcgcaacgggttcaaggtttgttttcatgaccgctttatagctgtaaccagtaccggagaacagccagatgctatgggattcagaaattcagcatcatgcctgatagaggcgaagtgttctcgtgctgacttgttggcagatagaaaaaagcgttttcgtaaaaatccgtctcttggaatgggcgactggcgattctttattagtgagccaggaattatttcaattgaggatttaccacctggctggggattacttcacgttgttaacggaagagtacggaaagtacatgggtggcccaagggtaattgctgttggggtaatcctgacgataagccatttactggaaataagcaggttgaatgcgattacatgttatctgcattaaggcgcatggagttgagagggcaccttaatgaaatatatgacggtgtaattgttaataagaaagaaggaaacgcagcatga

SEQ ID NO: 10508 - DNA, 930 bp, Escherichia coli
atgatcactattaccaaagaacgcctgctgacaatccagcagtggcgcgaaacatacggacctggtagcaacgttgtactgccagcagaagaagcggaagaactggcacgaattgctctggcatcgctggagcagaatgcactatctggcaactctcggcttattcctggtgaagtgttgtccgcaatccgggaggttgccaagattcgtgccgatttcgatgattttgacggtgacaggcgaggtatcggtgattgtctggatgaggccgagcaagagcttatcgttaccattaacaaatatgccagtcagttggcagcagaaccgatagcgactaatgacgttcgagagcagcagacagccgttccgccagttccggaaatacaggatgatgtcgcgcaagcaattgaaaatctcaagcagaagttagtggaatgcaatcgctataactactgcgcagatgcagttaaaggcgtagaggatgcctgccacgctgccatgcttcatagtgccgaacctgcaagtaatcatgaagagttgccgcttgattatctccaaggtcaaaaagatggtcttgaatgggctgcgcagcttgcagaagcaaatcacccacaaactggcgactggctttacgatgacccgctggaggtggctaaagctatcagaaaaggtcctgacatgcccgaattcgatggaccaactccggcaactccggatggttggataagctgtagtgagcgaatgccgaacgataaacagtatgtttggtgttggggtaagtcttacggctggactgagtgcgataccttcgaagggtattacgattggtcgagaaacaaatggtgggcagttactgacgatggggaagaaccggcatcgaaagtaacccactggatgccgctaccagaaccgccgcaggaggtgaagtga

SEQ ID NO: 10509 - DNA, 303 bp, Escherichia coli
gtggctaaatcccccgcagaacgcaaagccgcgcagcgcgctcggcagtccgccgccggtgagcgcaaaattgaactggtgctggataagcaggagcaggaaatgctggcgcggaactgcgccgcccggcgccctggtcgcgatccctatgaaatggccgagtacatcgcgctgctgatccgccaggatgatgcacgtgtgcgcgggcgtataaaatcgatcagcagaaactttgcggtaagtgcggcgagagagttcccgttaattcatgcccgtgtaatggtgactcgcaatgctgggtga

SEQ ID NO: 10510 - DNA, 606 bp, Escherichia coli
atgttcgagcaatttaaagagatcgcatcatcggctattagcacagcgtcagagagagtccgcaacccagcacttggggcatttgtgttttcgtggtgttcttttaactggaatccactattatttttattcttcagtaagtcaggaattgaagaaaaaataaattatatatcttcccatagtgatgcgtaccactcactcttatatccagctttatgtgcattcgcgctgtgtgtaatagttccatggtttaacaatatagtggtgatgtttcaaaaaattccactacagaacatcgataacttcaaacacaacaaaagcctcagggatgttaaaaacgccatagaattgcgtaagcttgaggcacaaagggacattacatacgacagagttaaggttgagtttgagtctgagattcaattctataaaaatgatttaatcaagcaccaagagtctttgaattcttttttgcaggaaagagattcccttattgaaaaaataatggcgcttgaaaaagaacttgcagaagaaaaaataaaatccaataccagaattgcaaataagtttaactcaaggaacaatcgcaacacagacaatgctgcttaa

SEQ ID NO: 10511 - DNA, 2472 bp, Escherichia coli
atggctatcagttggatccagcccagctttgccggtggtgagattggaccgtcgttgtacggacgtatcgacatggcgaagtaccaggtggcattgcgcaagtgcgataactttatcgtgcggcagtatggcggcgttgagaatcgaccaggtacgcgttttgtcggtgccgcaaaatacccaaatcggaaatgccgcctgatcccgttccagttctcgacggttcagacctatgctctggagttcggacaccagtacatgcgcgttatcaaagatggtgcgttggtgctgaacagcagcaatgttatttatgaaattgccacgccatatactgaagccgatctgttccgaattaaattcacgcaaagcgccgacgtgcttacgctggttcacccggcatacccgccgaaagagttgcgccgctacgcgcatgacaactggcaactggttgatgtggtaacgaagaacgggccatttgaagatatcaatattgacgagtcagtgacggtttatgccagcgccagcaccgggacaattacgttaacggcaagcgcctctatttttggcgcggagcaggtaggcaaattgttctatctggaacagcctgcagtggattcagtgccggtatgggaaaccagtaagagtacgtcgattggcgatattcgccgtgcagacagtaattactatcgcgccgttacagcaggcaaaacaggcactttgcgcccttcgcatacagaaggcacatcatgggatggctggggcggctccggtgatgatgatactggcattgagtgggagtatctgcacagtggttttggcattgcccgtatcactgctgtaaacggcactactgcaactgccgaggtgatttcctatatcccttcgcaggtcgttggcgaggataatgccagctataaatgggctaaatatgcctggaacagtgttaatggttatcctggcactgttgtttattatcaacaacgtctttacttcgccgcatcgactgcgttccctcagactatctgggccagccgtaccggggattataaggattttggcaaaagcaatcctacgcaggatgacgacagaattatctacacctatgccgggcgtcaggttaatgagatccgccacctgattgatgttggttcgctggtggcgctgacttccggaggtgagtacgtcatcaccggcgaccagaacaaagtgttaaccccatcatcatttgcattcagctctcagggatcaaatggctcaagcaacgtcccaccaattgctgtggcgaatattgctctgttcgtccaggagaaaggcagtgttgtccgtgatctggcctactcattcgatgttgacggctatcaggggaacgaccttactatccttgccaatcatctttttcagaagcacagcattgttgactggtgcttctctattgtcccttactccagcgccttctgcattcgtgatgacggtaaattactggtgatgacctatttgcgtgatcaacaggtttttgcatgggcaccacagtccagtaccggaaaatatgaaagcacatgcagtatcagcgaaggcaatgaagatgcggtgtatttcgtcattaaccgaaccgttaacgggcaaacagtgagatacatcgagcgactgtccagccgtttatttaccagcgatgaagatgctttctttgttgattctggccttagctatgatggaagaaatacgtctgacagaacgatgaccatcactggtggttctggtgaatgggattaccgtgcggaatatacaatcagtgtttctggtggtgcgtacttcaccagtagtgatgtcggcgcgcaactacagttcccttataccggaactgatcctgatactggcgatgaagtgtcaaaagaattacgttgcgacattatttctgtaaccagcaataccgcagtagtggttcgtgctaacaggaacgtcccgccatccctcaggaatgtggccaccacgaactggcagatggcgcgccggacatttggcggcttgtctcatcttgaaggccagaccgtaaacatcctctctgatgcgaacgtggaaccacaaaaagtggtttccggaggtgccgtcacgctggaatcaccgggggctgttgtgcacatcggcctgccaataactgctgaattcgaaacactggatatcaacattaacggacaggaaacgctgctggacaaaaaacaggtgatcccgtccgttactctggttgtgaatgccagtcgcggcatctgggcgactacgcccggcggtaaatggtacgaatatccacagcgtgaattcgagttctacgatgatcctgttgatgatgctaccggaaaagtagaagtgaagctggacagtaactggggcaaaaacgggcgtgtaaaaatccgtcagcttgacccgttgccgctgtctgttcttgccgttattcctcgccttactgttgggggattctga

SEQ ID NO: 10512 - DNA, 2748 bp, Escherichia coli
atgcctgttgttcctactacatccggacgtcaggtgcaaagtcgtggtgtgcaaaccggtggttttcagatcttcgatgttcctcaagcagatcaggtgctggcgaatgtcgcagatcagtatgcggtggcatatggtgaagccaggcagaaagcgaatgttgctatggcccaggaggcgttactgcaatttaaccaatttgcagatgaccagattaacaaccctgaaagtgggctgatttctaaacagggtaaaaacgctcttggtcagagtgacgctgttatgaaaaatatgcaggaaagggctcaggcattattaggctcaattcctgaaagtgaggaaaggaataaattatcctttcaactccagcagtctatgcagtcttattacaatcaggcacgtcgatatgaagttgggcagtttcagcaattccaagatcaaacgtatttgtcaggaaatgcattggctgtcactcagtctgcggggctatatagcgataaccaagcatttgtcgatttagccaagcagcgatttgaatctattgatcaatacgctgatgcgcatgggcttcctgatgagtggcgtgttcagcagaaaactcagctcaaggaacaaatggggcagcaagcatggataggaaatatcgctcaaaaatacaacgagtttcttcaggttaatggagagccaggggatcttgatggtgtgagtcgtgcaatatcacatggtaattcattggatgctcgtggtttacgtaataataaccctggtaatattgaagcgagcaaatctaacccgtgggaaggtcagatcggtagcgatggacgttttgcaacgtttgctacccctgagcatggaatccgcgcgttgggtaaaaatatgttgtcttaccagcgtcaaggctatgacaccgttagcgagattgttaatcgctatgctccggctagtgatggtaataatactgatgcttatattagggcattgtgtggtgagcttggtgttggggagaatgatcagcttgatatctctaacccaaagacactagctgctttatgtgctgggattattaaacacgaaaatggcagtatgccttatagcaccgaacagcttgaaactggtatctcggcagcccttggtctaactaaccttgattcacctaagcgttatacaggcaatgcggcatttgatgctatgagccctcaaatgcaaatacaggcattgaggcaggctaatgagctgagaaatcagtaccgccagcagtatgcggaccagcttagcaccgtagttaaagatgcatattcagcccttgatgaaggattgaaacctgagaagttaccttctgaggacgattttatccgggccaatggtccgcgcattggcgctatgaagtggaaggatatgcaggcgcagatacaatatggaggtgtcattggtgccgctaaagacctcactccagaaggacgacaagacattcttgaacgtttacgtccacaggatccaaacgctcctggatttgcagctaaccagcaacgctgggagaaaatgcaggccaaatttaaagagatggatagggagtgggagattcagcagggaagaaacaggttcgtgtcttcaatgcaaaataacttcccgctggacccgaacgacaaaaacaatcaggcagcggtagaccgttatttcgcgcaggatatcgcgccttcgttttccatatctgatccgcagagcatcaatacactggtcaccgtcacaactaaaagcggcatgataccaactcaggttaaaacaatgcttaacagtggagcaacatcaagagatcctgcgctggttgtcccgatggcaaaattctacggtcagttattcgataataatccggcggcagcggcaacacttgataaaagtacgatggcattttacggcaaggtttacgattattcccgcgctggcgtgccggaggataaggctgttgatatggcttacagccaggtgttccaacaggatgaccgaatgaaacagatgctttccactgccatgcgagacaaaaaatatgtcgcggcgagggcaactgctgcacaaaataacgccagcagtctgacttcctttggttcgtggtctccggatattaccgatccaggaaaatcaaatgcggcctatcagcgagattaccagacaatttacgatgctaactttgtacagacaggtggcgatgcagaacaggctgagaaaatgaccaatgccatgatcagaaccacctggggagtttctacggttaatggcaaagcagaggttatgaagtatgcacctgaggcattgtacggagtaaataatggtgctggtaactggatacaggggcagtgggagcaggaaaaacgcgagcttaaatcaaaatcctttggcggtcctcgcagtgatacggacttaatacttgtttctgatggccttacggcaagggataggagttatgctgttatggttttacagcctgacgcaaacggagcgatagaaccgagaaattatattggagaaaatggtctccctgttcgtttcaagccggatcagctgacatctccaatgtacaggcaaaccattaagttccagcaacagcgtgttgatgaggctagagtgcggagagaaggcaatccgctgccgcagttcagcaataaagatggatatactcctccagatctgaccaaaccattcggttatggttcagccaattaccttccgagcaatatatacgcagggggcaaataa

SEQ ID NO: 10513 - DNA, 3390 bp, Escherichia coli
atgccgatatatgaacaggatcctaaagagttgcttggcgaggatattcagcaaatagcagcacctgatgacagtaatttctatatggaaacaccttctttgctttctgctgtgaacccatttaccagtgatcaacgcgttcaaaggtctagacaagcagcatttcgtatagataacacgctgggtagctttattgccagtgctcctttcagtcagtttgacagggttgaaggatataacccatttgataacgatgcagcagatattaaaggctatgaagattttgcagattcgtttatcaactccggttcgcatgaagaaacaatggcaattaaacatcgaatcgatcagcagagagctgacatggaatacaattcaggcttgggatttgctggtacagtctcttctgtagcaatgagattagcagatccattcaatgcgatttctatgtttattccgttcggcgctgtcgttcgtggcggtcgtattgcagaaacagccggacgttttgctttagccaatgctgctggcagtgttgcttcagaggccgcattgcaggccactcaggaagctcgctcaccgatggagagcgtatcgaacgttgttgttgatgctctcgttggtgggatccttggtgctggtgcacagctacttgctggacctagcgcgcgcgaggcagtggttaactcagtaggtaatcatttgcgaggtatggattctcctcaaagcattggtgcagctcaggttttcaataccacactcgatcaggaacagcttgctggacttggacttgctaacaaaacgttgagtgtcactcctgctggccgcttggcgcaatcaccatctcttgtttcccgtcagattaaccagcagcttgccgaaaataactatttcttcgccaaaaatgatgaggggttggctacgtttacggcagtcgagactaagattaagcaatacgacgccatgctttataagcagatggaagctactcgtgatgcttaccagcagtacagcaaatctgtcagcgcccgcggcgtgaagaggatgaactttattgatttcaatgaagctgttggcatggctatgcgccgtggtgatcagagtgatattcctgaggtttcacaagcagccgccagaatccgccccatttttgagaccacaaaagcccgtatgcaggaattggggatccttcctgaggatatcgatgtcgtgacggcgaagagttatcttccccgcatttataagttcgataagatactttccgaccgcactgaattcagagggcgaattgccaactggatacaagggattagtgccaaaggtgctgacaaagcaggtcagcgaattgaaaagataaattcattgctaaaaactgcagaggaatcagcaccgcgcgctgatgctctcgctagtgaaatcgctgaagcggagaaatggtctggtaaaaaaattctactcatggaagaactggataaacgaaataagcttatatctcaggagactgacacacaggcgcgtcttacaagaatagaaaaagagttggccgagacttcatcagaaaaacttcaggcaagaatgatgaaagaaagctctgaccttaaaacacgccttgatgatatagcgcaggcaaagagtgagcttcctgtctatcagcgccatatggagttgctggataatccacggaaatatcgttctgagcttcgccgactgcaaaaacgggcaaattcaaccacaaggctgaatgcaagccgcgagcgagcactgaagcagatggagcctctatcccgagaggaagcagaggacgctgctgacgagatcgtgaataaaataataggcgcaccttccgggcttgtaccagccgatattatcccagagagactcgttggtcgggctggtttcactaaaagccgaacgctgcttattcctgatgagcgtatagaagattttcttgaatcagatgttaactacatcatggaaagttatctccggcaggtggcaccagaaattgagctgactgcgcagtttggccgtaaagatatgggggagcaaatccgtcaggttagtgaggaatatacccggctaataaaagaggctaaaacacctaaacgacgtgcagctcttgagaagcaacgggaggctgatattagggatattacggctatgcgtgaccgactgcttggtacttacggcgcacctcaagatccacgcagtttctttgttcgtgccgggcgagttgctaggaatattaacttcctccgtttgcttggtggaatgaccgtctccgctgcaactgatctgatgcgaccgatgatgcagcatggcctgagaaaatctctcggaccaatggtaagcatgcttaaaaatatggactcagtgaaaattgcaaccagggatttgcgagaaatggcagttgggcttgattatgtcctgtctacgcgcacaaaggctatagcggatcttactgacccctatagccggagaagcgccgctgagcgaggtctgaactggatgacgcagaaattcggtaactggacgctgatgaatcagtggaacagcgcacttaaatcatggtctgggatgatagtgcagtcgaggatacttgacgcggctcgccaagtttctgctggtggcacgctctccaaaagtgaaatgcggaagatggcacaggtcggcatcaatgaagatgttctgcgccgaatcggggagcaattcgggaagcacggagaggatatggacgggctgttaaccgggcatagtcatctgtgggatgaccgtttcgctagagagattttccagtctgcagtgctgaaagatgtagactcagtgattgtaacgcctggcgtaggtgatacaccgctgttttttagtaaagaaggctggaagatgatcacgcagttcaaaacgtttatcttcgcacagcataacagggtgctagtatctggtatccagcagggcgatgctgcattctatcttggtgcgcttggcacgattgcgcttggctcaatggtctatatgatgaaacagaagttaagcggtcgcgatatcgactacagctggaataaccttgtgaaagaggggatcgaccggggcggaatgcttggctggctctctgagccgctgaataccgttgagaacataagcggcggtaggtttggtcttggcgcgatgtttggtgcgcctccggtatcaaggtttcagagtcgtaatgctattggtgctttacttggtcctacctttgatcttggcggtgatgccgcgacggttgcaaatggtgtacttaacggagaatttgacagccagcaaacccacgctgtccgtaaaatgctaccttttcagaatctgtgggcgatatcaccattactaaataaagttgaagagcagatgaaatag

SEQ ID NO: 10514 - DNA, 852 bp, Escherichia coli
atgaaaaaaataaatttgttttttggcatagtgctttcaatagtctctgtaaatcctacagctgccagttcattgcaatgcaataaggataactttgatgcatgcaaaacgtgcgaacaattatcaaaggctatcgacttaaaagaacctaatcgtggcgattactatagaggggctttatggaatgggctttacgcctcttatgtaattaattgccctgtggttgcagagaagttactgagccatggtgctataccatcatatggcggatatatggggtctatgggggcggttctgacaggaaaatggcctcataacaatgaatcaataaatctttcatgggcagatttgcttataaaacatggatttgatgttaataggcatacggggaattataaatcagctactgaagtatgggctatagataaaaaacagattgaatataagtcagtttttgacaagttaattcaatccagcgaagtaaaaccactcgatccttcaagaaatttagaatggtgtgcgtctgaagggtatcgctcagttgtcgtttattcccttaactcatgtatagaaaatgctataaaacgtttggatgacggtgtttcttcagcgtctgatatttcatcagcagccgtaaattcctgtactagcgatgtagaaaatttcaataagcatttggcatgcaaagcagctgttaaagaaaactctgataaagagagaagcaacgtttaccagttattaaccagtgatagtcaaatgaataaaaatgttattgatatgctgaaggaaagaaatattgaaacggttcttgaatttagagctgaaaatcgatcagcgaaaactgcacagtga

SEQ ID NO: 10515 - DNA, 504 bp, Escherichia coli
atgcaaaaatctattgggcaaccaagtgataacgaagaaactgagttcgaggaagttgaggaagggctaagtaacgagatcattcaacacccagatgccttcacaagagttcttgatcgccctgaaattcaggagatagttgtcgctcaccatgcgtttcagggtccgcttcctcccccctatctgcttcgcgggtatcaggatattttacctgatgcccccgaacgcatcttccagctgacggagaaggagtttgctcaccgccagaaaatggaggaaaaggcacttgacggggctattaatagagataaacgtgggcagtggtttggcctgagtgcaactatttttacagtagcttgtgcaacattattaggtttaacaggtcatgaagttctagctggcacagtgatcggtacagttgttgcagtggctggtattttcgttcttagacaaaaaccaagcatcaagaagaaatctgaagacaacaaacctgaagaaaagtaa

SEQ ID NO: 10516 - DNA, 327 bp, Escherichia coli
atgagcagaagatatgtcaaggagctggctatagagtctggcacccctttgggtatcgttcctggctccaactatgccaaggctttaaaccgagactctgtcgtcaaagttatatcaagagacatgaatatggtcggagacgatctcagacggtcagaaaatcgtgtttatgctgaatatatagtaaagaacggaaaaaaaattgcagcgcctgctggcggaaaatgggcaatagtgacagggaaaaactcaaatgcaagaggaaaaccagaagctaaaggaatgtccttcgacaaatatgcaaaaatctattgggcaaccaagtga

SEQ ID NO: 10517 - DNA, 420 bp, Escherichia coli
atgcagcatttgaggaaatcagaaaaaaataaagaccatgaaatattgagtaaggccattgttcgggcttccaataatactgttatacctcatgctgaagagtctggacagaaatttcttattcggtatttcactgaaaatagtgcagttgaggagattttaaaacatcagggaggggaatttaaatgtggaaaactggcagattatgttcgtcgtgaaacgtctgaacaagaagtatattatgctgatattaatcataagtcaggtgtgaaaattgtaataggctattacacaactcccaaaaatgttatgcatgaggtcccaaagatgtccgtcgagaaatctcatgcaatctcgcgcaggatgtttgcacgcactgccgaagatatggctcaggagctctacgacgatgctgaataa

SEQ ID NO: 10518 - DNA, 507 bp, Escherichia coli
atgctgaataaattccaggggttggttcaccctggaatttttgggaaggaccctgagctaatacctatcaaaaacgcgttcatagatcactggcgctacggtcatcataaggatttcggaaaggacactctgtttcgggatccaccgaaagaaatgctggaatatcacatacgccacgttcacgtaaacatcggaaactatactgacaagtttggtgagagcggtacggaacaatgctggaaaaactgggcgtctgggaagaaagacaagaccactaacaagcataaaaagatcccaaccagtgacgtgtatgtgatttatctggtcacatctgaacgccatgccttccttctggattattgggatgaaccagcacataagacagtagaaattgacgagcagaagcaaaaattagttgtcgagtgtgacagaattttgcggctgaaaaagttagaatccatgccgcgcgatgctagtttgtgggacccagaattttacgactgttaa

SEQ ID NO: 10519 - DNA, 1875 bp, Escherichia coli
atgacggtctcaaccgaagttgaccacaacgaatacaccggtaacggcgttacgacatcgtttccgtatacttttcgaattttcagaaaatcagacctggttgttcaggtgtctgatctgaacggaaacgtaacagaattggtcctggataccggttatacggtaactggggcgggcacttatagtggcggttctgtggttcttccgtctccgcttgctactggatggcgaattacgatagatcgtgtgcttgatgtagtgcaggagacagaccttcgcaatcagggaaaatttttccccgaagtgcatgaagatgcctttgactacctgacgatgctgatccagcaatgttttgggtggttcagacgtgcattgatgaagccctctctgcttgcaaaatattacgatgcaaagcaaaacagaatttctaaccttgcagatccatcacttgagcaggatgctgtaaataatcgctcaatgcgtaattatgtcgatgctgcaatcgccggggttgttggtggttttggttggtttattcagtatggttctggggctgtgtaccgaacgttccaggataagatgagagacaccattagtgttcgtgattttggtgcaaaaggagacggcataacagatgatactgtagcaattcaaaatgctattaatgcagtaccagaaggggctatacttggattttatggtggtgaatttgtttttgataaggttgaattgtttaagccaataacattagttggtgatgcaacgttaattcacaacggatttagaataaaatctagcagaatccgatcacttttatctggcgttcagaaatgcaaggattactccgagtcttcaagagcattttattgctatgcaaatgaagaccaaagagattatgacgatattcagattttatttaatagatttgaaggtttcttttactctacggcatttgttgcaaaaaactattatttggagaatgaccctaattcaagaattgtcaaaaacacaaaagtaatagggtgtacatcagttgctcctgattctgtaaatgccggtcattttcaacatataggcgttacaaatgctgaaacatcacataactcaacttatggcggacaaaatgcaacatcatacaacttcattaaccagaatggatttgtaaggattataggaaattatgaccataacaatagctatggttcatgtgagcttgagaactcaatggtgagtaactcagtcatatcaggtaatacgttttcgtcatatttatgggtggatgatacaagtaatgttactatttctggaaatacagtttcatcaaggatcaaagtaacatcgcaaactgacgatgttcataatataaccatatcagcaaataccacaaaacggattactatagagcaatttggagaatctccaacaggtctggtatatggtgcattaatttcctgcaacactattactggcgacagtgatggaagttcagacattttatgtacgtcacttgttacaggtgaaatttcatcaaattattgtcatggatcagaaaaaaatatatcaattgtccgcctggattcttctgatataactgttagaaataataaaggaaacaaaggattacttacaataagtaacgatggtggaaggataattgaatatggcaatgattctatggttctgtctggaagcatagatagcagacatatacataatttattacatccagacacatcgtatttagacctaccggggaaatatctgcacggaactaaatatactggcagtatccccccggttccacaggaattgtatcacttcaaataccatcaggggcaagccttgttttcaggggtgtttctatatgggttctaa

SEQ ID NO: 10520 - DNA, 300 bp, Escherichia coli
atgatgaatatagatgttgatataacaccaattcttcacgcactttgcgctgttgtcgcacaagttctggtcggtctttttaccggaaactgggcttacggtgcgatagccggttgtacgttcttcattgcgcgtgaacacacccaggcagaatatcgctggatagaaaagtttgggaaagggaaacgtatcaacatgccgtggtggggaggttttgatccgcgcgtatgggatgttggaagcctgtttgactttgttgttcctgttactgtttgtttttgtgtttatttctctatttga

SEQ ID NO: 10521 - DNA, 903 bp, Escherichia coli
atgaattgctataccaccgatctttggcagataggcattgttcaggcccccatacagcacattgttgcttctggcagtttggatggcttcaggattaaatggattaccccggataaatcactcacttttcttgccgatcctttcggtctgtggaaaaaaggggttctctatcttttcgcggaatcctacgattatcggactcgtcgtggcgatattatcgcttataagctcaatgctgacctggacgtcattgagcaacgaactgtgctacaagaaccctggcatctttcttatccttttgtgtttgaagccgataacgaaatctggatgttacctgaaggatataaatcaggtacgctaacgttgtaccgcgctatagagtttccctggcgatgggaaaaggtgccagatttttcattcccttgcgctgccattgatgccacccccttttacgcacaaggaaaatggtggatgttttatactcccccactaccaaaggcagccaggacggatacgttaatgctcgctcatgccccccattttatggggccatgggaaaacgtcctgcaaactgccgcgcacaggaataaaagcggcgcgcgtatgggcggaacaccatttgatcatgatgggcaaattttcttaccaacacaagattgcagccgaacctacggtggcgcattgcagatgctgacactagacccacaacgtttattaactccagaatttgctgcctctgtgcgcctggaagtgcctgcaagtgccgcgccttttattgctggcatgcatacgctttctggcgttggcgacgtaacattcattgatgccaagcgacaccttaaaggttcgcctcagcgattatgggtggatttgcagcggcggatacagaagtggatcagctaa

SEQ ID NO: 10522 - DNA, 702 bp, Escherichia coli
gtgaaaaaactcatcacagcgaatgatattcgtgaagcacacgcgcgcggcgaactggcaatgtccgtggttctgcgcgccagcattattaccccggaagctcgtgaagtggctgatctgttgggttttaccatcaccgaatgtgatgaatcgactgcggtaacgacgtccgttcccgccagcgtgccagccgataaaaccgaaagccagcgcatccgcgaaaccatcatcgcccagctaccggaaggccagtttaccgaaagcctggtcgcgcagctgatggaaaaagtgatgaaggaaaaacagtcactggagcagggtgcaatgcagccgagtttcaaatcggtgaccggcaaaggcggcatcaaagtgattgatggcagcagcgtcaagtttggtcgtttcgatggcgcggaaccgcactgcgtaggcttgactgatctcgtgaccggagacgacggcagcagtatggccgctggttttatgcagtgggagaacgccttctttccgtggaccctgaactacgacgaaatcgacatggtgctggaaggggagctgcatgttcgccacgaaggcgaaactatgatcgccaaagcgggcgatgtgatgtttatcccgaaaggctccagtatcgaatttggtacgacatccagcgtgaaattcctgtatgtcgcctggccggctaactggcaatccctatga

SEQ ID NO: 10523 - DNA, 1017 bp, Escherichia coli
atgattattaaacgttgtcgtgaactggcgttgcgagcgcccgccagagtagtttttccggatgcgttagatcaacgtgtgctgaaagctgcgcaatatttacatcaacaaggtctggcaacgcccattctggtcgccaatccgtttgaacttcgtcagtttgcgctcagtcatggcgtggcgatggacgggctacaggtgattgatccgcatggcaacctcgcaatgcgggaagaatttgctcatcgctggctggcccgcgcgggcgaaaaaacgccgccggatgcgctggaaaaacttaccgatccgctgatgttcgccgccgcaatggtcagcgccggcaaagcggatgtctgtatcgcgggcaacctctcttccacggcgaatgtgctgcgtgccggattacgcattatcggcttgcagccaggctgtaaaacgctctcatccattttcctgatgctgccacagtacagcggtccggcgttgggctttgccgattgcagcgtggtgccgcagccgacggcggcacaactggcggatatcgcgcttgccagcgccgaaacctggcgcgccatcaccggagaagaaccgcgcgtggcgatgctgtcgttttccagcaacggtagtgcccgtcacccctgcgttgccaacgtccagcaggcgacagaaatcgtccgtgagtgcgcaccaaagctggttgtcgatggcgagttgcagtttgacgccgccttcgtgccggaagtggcggcgcaaaaagcgccagccagcccgttacagggcaaagccaatgtgatggtttttccgtcgctggaggcaggaaatattggctacaaaatcgcacaacgacttggcggatatcgtgccgtcgggccattgatacaaggacttgccgcgccgatgcacgatctctctcgtggttgtagcgtgcaggaaattatcgaactggcgctggtggcagctgtgccgcgtcagacagaagtgaaccgcgaaagcagtttacaaacactggttgaatga

SEQ ID NO: 10524 - DNA, 813 bp, Escherichia coli
atgatttcacgccgccgatttttgcaggctactgccgcgacgatagccacgggctcaggtttcagttatatgcattacagggagccaggctggtttgaattaatccgtcaccgcctcgccttttttaaagacaacgcagcaccattcaaaattctttttctggccgatctccattactctcgttttgttcctttaagcctgatttctgacgcgattgctcttggcatagaacaaaagcccgatttgatattactgggcggcgattacgtattatttgatatgccgctgaatttttcggcgtttagtgacgtactctccccccttgccgaatgtgcgccgacgtttgcctgcttcggcaaccacgatcgccctgttggtacagaaaaaaatcacttaattggcgagacgttgaaatcagtgggcatcacggtgttgtttaaccaggctacggtgatcgccacgccgaacaggcaattcgaactggtaggcaccggtgacttatgggccggacaatgcaaaccgcctcccgccagcgaagccaatctgccaagactggtgctggcgcataatcctgacagcaaagaagtcatgcgtgatgatccctgggatctgatgctgtgcggccatactcacggcgggcaactgcgcgtaccgttggttggtgaaccttttgcccctgtcgaagataaacgttacgtcgccggattaaatgcctttggcgaacgacacatctacacaacccgtggcgtgggcagtttgtatggtttgcgtctgaacagccgcccggaagtaacgatgctggaactggtgtag

SEQ ID NO: 10525 - DNA, 1158 bp, Escherichia coli
atggctggctggcatcttgataccaaaatggcgcaggatatcgtggcacgtaccatgcgcatcatcgataccaatatcaacgtaatggatgcccgcgggcgaattatcggcagcggcgatcgtgagcgtattggtgaattgcacgaaggagcattgctggtactttcacagggacgagtcgtcgatatcgatgacgcggtggcacgtcatctgcacggtgtgcggcaggggattaatctaccgttacggctggaaggtgaaattgtcggcgtaattggcctgacaggtgaaccagagaatctgcgtaaatatggcgaactggtctgcatgacggctgaaatgatgctggaacagtcgcggttgatgcacttgttggcgcaggatagccgtttgcgggaggaactggtgatgaacctgattcaggcagaggagaatactcccgcacttactgaatgggcgcaacggctggggatcgatctcaatcaaccgcgagtggtggctattgttgaggtcgacagcggtcagcttggtgtggacagcgcaatggcggagttacaacaactgcaaaacgcgctgactacgcccgagcgtaataatctggtggcgattgtctcgctaaccgaaatggtggtgttgaaaccggcgttgaactcttttgggcgctgggatgcagaagatcatcgtaagcgagttgaacaactgattacccgcatgaaagagtacggccagctgcgttttcgcgtttcactgggcaactattttaccggtcctggcagtattgcccgatcctatcgtacggcgaaaacgacgatggtggtgggtaaacagcgaatgccagaaagtcgctgctatttttatcaggatctgatgttgcctgtgttactcgacagtttgcgtggcgactggcaggccaacgaactggcgcgaccgctggcgcggctgaaagcgatggacaataacggcttgctgcggcgaacgctggcggcgtggtttcgccacaatgtgcaaccgctggcaacgtcaaaggcgttgtttattcatcgtaatactctggaatatcggcttaatcgtatatcggaactgaccgggcttgatttgggcaattttgatgacaggttgctgctgtatgtggcgttacaactggatgaagagcggtag

SEQ ID NO: 10526 - DNA, 741 bp, Escherichia coli
atgtttttaaacgctaaacatactgcagctgtatgcttcgccacttgtatgagcttaagcgcatcggcaatagcagatatcgtaatttcaggaactcgcgtaatttataaaagtaatgaaaaaagcgttaatgttcggctggaaaataaggggaataatccgttactcgttcagagctggctggatactggcgacgatagtgctgaaccagggagtattactgtcccatttaccgccacccctcctgtttcgcgaattgatgccaaacgtggtcaaactattaaattgatgtacacggcttcctcaccgctgccaaaagaccgagaaagtgttttctggtttaacgtactcgaggttccacccaaacctgacgcagataaagtcgccaaccagagtcttctgcaattggcattccgtacgcgtatcaaattattttatcgcccggaaggtttaaacggactgccatcagatgcacccgcagcactgaaatggtcatgggcaacctctgctggaaaaactgcattgcgcgtcgcaaatccgacaccgtatcacgtctcattcagtagtggtgatttagtcgccaatggcaaaacctaccccctggatgtaaaaatggtagccccgctgagtgaagaaaccttctacataaaaggcatgagtggtaaagcaagttctgccaaagtgcatttcttcgccataaatgactttggtggtgcaattgaaggcaatgccagcctgtaa

SEQ ID NO: 10527 - DNA, 567 bp, Escherichia coli
atgagaataacactgcataaattggcaatactgactggattatttttatcatcctctgtacttgcaacagacattaatgttgattttacagcaaccgtaaaagcatcaacttgtaacattacgttatcaggcgacaatgtcacccctgatgggagtgacacctacacattaactttcccaggaactattggtctggacaaaattgcaaataaaacgactcaagcacaggcgaattttaatctggttgccagcggttgtaccacaggcgtcagcaaaatcaataccaggctcagtgggaatgcttccggaactactcccgcattaattgttccactctcttctgacactacatcaacaactaattatattggtatgggtataaaagcacttggtgaagatgattcgacattcttaatcccaaacagtgcgccgagttttattccatgggaaattagtgatacagacaaaactcttgaactgaccgttgcactgcgcgaaaccacggctggcagtggtgttcctggcgatttccgcgcccaggcaactttcaacttcatttatgaataa

SEQ ID NO: 10528 - DNA, 606 bp, Escherichia coli
atgaaatctaaaacattatgttatggactacccgctggtgttttttttgcggcatccctattcaccagccaattgtttgcagctaccgatagcgttaagctgaatgttaaagcaaccgtagagacgggaacctgtaccgccagcctggtggatgacaatgatcagcctatttctgttattgcatttggggatgcttacattcctgaaattgatgccaaaacaaaaattaaaatatttaagttacagtttaaggattgtgctggtattcctaataaaaaagcactcgtaaaattaactaaacgcgcaacttgtgaaggagcagccaacgatgggcctggttttgcaaacggctccgccgctgctgataaagcaaatgctgttgcggttgaagtatggaataccacgacacctggtacagacggcaagactcaatttagctgcgtaacaccagtcgctcaggaagtgaatatctccactgcaacaggaactacgtcagtatatcatcctatgagtgcacgcctggtggtagagaaaaataaaagcaaaaccgacatcactgccggtccgttttccgcacctgcaacattttctatcacctataactaa

SEQ ID NO: 10529 - DNA, 597 bp, Escherichia coli
atgctttcctctcaactaaaaattaagataaaaacaagtctgttcctggcattattgtttgccacatccagtcctgtatatgcagggctggatgtggatatggttgccaatatcaagaacagtacatgtaaaagtggcctcagtaaccttggtaatatcgatcttggtgtggttggtgtggattatttttctggtaacgtcgcacctgaagatgattatccgggtgggagagagttcactatcactgtgactgactgcgccatccagggttctggaaatgtgttaaatcagttacatattaactttaaaccgcttaatggcgtgatggcgacaggctctcagcaaatttttgcaaatgaaaatgtcgccggcgctcaaaacgtaggtgtagtaatattttccactcaggacccggctaatatatttaatgttcttaccccagcgggcagttctcgttcaatttatccggtgatgactgctgatttaaacaattcatcctggaaattctatacacggatgcaaaaaatcaaccctgtattaaatgtcatgcccggccaaatcataagccatgtattaattgatatttactacgagtaa

SEQ ID NO: 10530 - DNA, 1272 bp, Escherichia coli
atgaagacattcttcagatattttctttttttaattctgtgcttgagttgttataccgcgagtgctggcactgatgatttcgtaggatatgttgttgggaataactacggcgttggtccgtcagatcaaaaatggagagaaaccgggccaaatggagatgtgacagtcgtgttcaggtatggtaccagtacaaataatttagtattttataaaccaacacaactgggtccaacaggggtgaaattacattggagtcagttagatactgcttctggcggaggctttctttattgtaacagaagcaataacaccagtggcggggcaatgcgtatcgaaaatgcaatggttgactctggaaaaagatatggtaaccataaactattcaatacatctgttcccggtttgtattatacaatattaatttcaaatatgtggtcagcttacggcaccgtaactaacgttagttcaccaggaatatatattggtgattctgcagaacaatatttttcatggtacaacccaagcgaaagcatattataccaaagttgtaacaatgccaacacatccagcaaatattgggctgtaggcggtatttatcaaaatcttaccatcgaattttatacagataccaactttgatccaacagtaactcaacaagtttcattatcgcgctcatcaaactatttatattcatttaaagcttatggtgctggtatcggcattaacgaacacagctattttcttagagttgattttgacctactaaatattaaattaagtaatcccacttgttttacagctatattaagtggaacatctgttactggttctacggtaaaaatgggcgagtatagtgaagcacaaataagaaacggtgccacaccggttccttttgatatttcacttcaaaactgcgttcgtgtgactaatatcgagacaaaattagtttcaacaaaggttggtactgaaaacaggcaactccttggtaacactctcacaggaagtggtgcagcaaaaggcgttggggtattgattgaaggattagcaaacagtaaaagtgccctaatgatactgaaacctaatgattcaacttctgtttataaagataatacgggccagacgcagaataacgattcagatgcgatttacccggaagatgacggtataacgtatccacttcatttccaggctacattaaaacaagacggtaatattgctatagaaccgggggattttaaagccaccagcacttttcaggttacctacccctga

SEQ ID NO: 10531 - DNA, 570 bp, Escherichia coli
atgaaagtaagaaacccagaacagattagtatctctgctagtaataccactaaagatccaggccttactcattctcagattatgaggatgtttaacctggtcaaaaagaccgagaatatgaatctctttgaagcgctatgggagacgttacgcaatctcttccggtcagataaacattcccaggctgcggcaaggcaaattctgaaggatgcattttatttccataatagtgatgactactcaaaatactttaccggggctgtcgacggggatgcgcgtgataagtttacccactggctgataaattttaataaactcaaagaacatgcaatagatccggaaaatatggccgcgaaggcctcactctcgccaaaagatacgttaagagtcagtttttttattggcgatgaggcgatatttactctggagttgcagatgaaagagaacaccaggaccgggtgcattgatctgagtcatgcttactttaacggggttgtcatttgtggtattgaccgtctcgaggttgacctgagcaatgctgaaatgaacaatagcagatggtatgactga

SEQ ID NO: 10532 - DNA, 960 bp, Escherichia coli
atgaagtggcttttattaatcaccttgagtctatattcttttattgtgcaaagtgctccctgtgcagtgaccaatgtcggtgaacaacgtggaacatatatactcaagccactgagtatgaaaggtaatctcaccgccgaaagaattgaaaacaccgggaatatcattgagtgtgcagacttgcaagagacgaccaacgccattaaagttcatttcttaacacagaacgctttaaggtttaaagtcggaagtcgtcattatattattaatttaccctttgaatctgacggtaaaaaaatagagcttccagggaaggcatcttataatttagaagaaatgctatctgcgataaatttcaccattccatattctatcgcatctgtatcagatagttctaacaccgcagacatttttccaggaactccttttcctttgttgttcgaaattgaagtgagttcatgtacagggaataatactaattgtaatagcgtccgctttaattctaatttaaatactattttacaggtaaatttaatgacctgtggttttgaagatcaatctatcgacactggacgatttgtactgtctcgtatcaataatgaaaattatcagtttcatcatataagatttgactgtatccagggtgagcaaggtgaattagtttttgaacccagtgatgttgaatattactttgagccagtgacgatacaggattcaggaaccagcatattaaaaaatgagttagaaaacagtgaggacggtgcgggtcaaataggctttcaactctccaatgatggtacgaatgaaatgcagtatggtaaaagcaattactactcttttcagcatccccatgaaggaagtaatcagattcctctatttattcgcccgcgtacatatggaaataatgtctcaagcgggcaaataatgagccgagtcaaaatcgtggtaatgtacaactaa

SEQ ID NO: 10533 - DNA, 450 bp, Escherichia coli
atgcaagacaccatcataaatttctacagcaccggcgatgactacggtgatttttctaactttgccgcctggcccatcaaggttgacgggaaaacctggcccacctcagaacactattttcaggcacaaaaattccttgatgaaaaataccgcgaagagatccgtcgggtttcttcccctatggtcgccgcacgcatggggcgcgatcgttctaagcctctgcgtaaaaactgggagtcggtcaaagaacaggtgatgcgaaaagcacttcgcgctaaattcgaacagcatgcagaactgcgtgcgctcttgctggcaaccgcgcccgcaaaactggttgagcatacggaaaatgatgcttactggggagacggtggtaatggtaagggcaagaatcgactgggctaccttttaatggagttgcgcgaacaattggctatagagaagtaa

SEQ ID NO: 10534 - DNA, 1203 bp, Escherichia coli
atgacgcaatactcctctctccttcgtggtcttgcagcgggttctgcatttttattcctttttgccccaacggcattcgcggccgaacaaaccgttgaagcgccgagcgtggatgcgcgtgcatggattttaatggattacgccagcggtaaagtgctggcagaaggcaatgcggatgagaaactggatcccgcgagcctgactaaaatcatgaccagctatgtggttgggcaggcgcttaaggccgataagattaaactcaccgatatggtgacggtcggtaaagatgcctgggcgacgggaaatccggcactgcgtggttcatcggtaatgttcctcaaaccgggcgatcaggtttcggtggcagacttgaacaaaggtgtgattatccagtccggtaatgacgcctgtattgcgctggccgattacgttgccgggagccaggagtcatttattggtttgatgaatggttatgccaaaaaactgggtctgaccaacactaccttccagacggtgcacggtctggatgcgccggggcagttcagtaccgcgcgcgatatggcattgctgggtaaagcattaatccacgatgtgccggaagagtatgccattcataaagagaaagagttcaccttcaacaaaattcgtcagcctaaccgtaaccgtctgctgtggagcagcaatctgaatgttgatggcatgaagacaggaaccactgcaggcgcgggatataatctggttgcttcggctacccagggtgatatgcgtttaatctccgtagtgctgggggcgaaaactgaccgtatccgttttaatgagtctgagaaattattgacctggggtttccgcttctttgaaaccgtgacgccaattaaacctgatgccacctttgtgactcagcgcgtctggtttggtgataagagcgaagtgaatctcggggcaggcgaagcgggctcagtgaccataccgcgtgggcagctgaaaaacctgaaagcgagctacacgttaacggaaccgcagcttaccgcaccgctgaaaaaaggtcaggttgtcgggaccattgatttccagcttaacggtaaatccattgagcagcgtccgctgatcgtgatggaaaatgtggaagagggcggattctttggtcggatgtgggatttcgtgatgatgaaattccatcagtggttcggcagctggttctcttaa

SEQ ID NO: 10535 - DNA, 816 bp, Escherichia coli
atgagcattaaattaattgcggtagacatggatggtactttcttaagcgatcaaaaaacctataaccgtgagcggtttatggctcagtatcagcaaatgaaagcacaaggcattcgctttgtggtcgccagcgggaatcaatattatcagttgatctctttcttccctgaaattgctaatgaaattgcctttgtggctgaaaacggcggctgggtagtgagcgaaggcaaagatgtttttaatggcgagctgtcgaaagatgcgtttgctactgtcgtggaacatttgctgacgcgcccggaagtggaaattattgcctgcggaaaaaatagcgcctataccctcaaaaaatatgacgatgccatgaaaacggtggcggaaatgtattatcaccgtctggaatacgtcgataactttgacaacttagaagatatcttctttaagtttggcctgaatctttctgatgaactgattccacaagtacaaaaagcattacatgaggccatcggcgatattatggtgccggtccacaccggcaacggcagcatcgatctgattatccccggcgtacataaagccaatggccttcgccaactgcagaaattatggggaatagacgacagcgaagtggtggtctttggcgatggcggtaacgatattgagatgctgcgtcaggcaggctttagttttgcaatggaaaatgccggcagcgcggtcgtcgcagcagcaaaataccgggcaggctccaataaccgtgaaggcgtactggatgtgatcgataaagttcttaaacacgaagcgccatttaaccaataa

SEQ ID NO: 10536 - DNA, 537 bp, Escherichia coli
atgcgtcgcgctaacgatccgcaacggcgagaaaaaattatccaggccacgctggaggcggtgaaactttatggaatacatgctgttacacaccgcaaaattgctacccttgccggggtaccgttgggatcgatgacttactatttttcaggaattgatgagttgttgctggaggcgttcagccgttttactgagatcatgtcccggcaatatcaggcattttttagcgatgttagtgatgctccgggcgcatgccaggctatcaccgatatgatctacagctcacaggttgcaacgccggataacatggagctgatgtaccagctctacgcgctggctagccgaaaaccgctattaaaaacggtaatgcaaaactggatgcagcgcagtcagcaaacgctcgaacaatggtttgaacccggaaccgcccgcgcgcttgatgcgtttattgaggggatgacgctgcattttgtcaccgaccgtaagccgctatcgcgcgaggagattttgaggatggttgagagggttgcagggtag

SEQ ID NO: 10537 - DNA, 1053 bp, Escherichia coli
atggcagtacgaaaactaaccacagggaaatggctttgcgaatgttaccccgccggacgtagcggacgccgtgtgcgtaaacaattcgccaccaaaggcgaagcactggccttcgagcgatacaccatgggggaaatagaagcaaagccctggctgggcgaatcagtggatcgtcggacactgaaagatatggttgagctatggttcaaattacatggcaaatctcttactgccggacagcatgtctacaacaagctgctgttgatggttgacgccttgggaaatccccttgcaactgatctcacctcaaaaatgtttgctcactatcgcgataaacgccttactggtgaaatctacttcagtgaaaaatggaagaaaggagcaagcccagttactgttaacctggagcaaagccatctaagcagcgttttcagagaactttcccgcctgggtgaatggacacttccaaacccattagagaagatgcgcaaattcactatcgcagaaaaggaaatggcatggcttacacatgagcagattatcgaattactgtctgactgcaaacgtcagaacccaattctggcactggtggtaaaaatatgtctaagtaccggcgcacgttggcgagaagcaatcaatcttacccgctcacaggtcaccaagtaccgaatcacctttgtgagaacgaaggggaagaaaaacagaagcatccctatcagtaaagagctttatgaagagatcatggcgctcgatgggttcaatttcttcacagactgctattttcaatttttatccgtgatggaaaaaacgtctatcgttctccctcgcggtcaactgacacacgttctgcgccatacgtttgcggcgcacttcatgatgtcgggtggaaacatcttggccttacaaaaaattctcggacaccacgatataaaaatgactatgcgttatgcgcatctggcaccggatcatttggaaacggcgctccgtttcaatccactggcaacgttaccaaatggcgacaaagtggcggcagcggttggcattaccccgtaa

SEQ ID NO: 10538 - DNA, 1677 bp, Escherichia coli
atgaattcatttgccatcgttatagtcttattagcatttctcgcccctgttctagctgtaatattatttaaacaaagtaaaaaacacaaagcggctatagataacctgacagctaacaacatagccctttctaaccaactgattgaaaatcaagaaaaactagcacagaccgtacgagaattatcagagcttgaagggcgagcagcaccattgtggcaatacgaagaattgcacagcgcagtaatggatgcagagaataagataaaaaatgcggactcaatagccaagcaaaaaatagatgaagcccaaattaaggcggctaaaacagtaaacgaagcaaattatcaagctcagataacaataagcaacgctaatagcgaagctatagcaatcaccaaagacgctcgcgatgcacgcctgaaagccaaagaacgtcttgataatgctaataataaagcaaatgagctaatctcaaatgctaatgacaatgcagtaaaaattatttctgatgcagaagaaagagcaaaggagattgctggttcagcatatgaagctaaagagtttgcagaaaaatatgaagcagttgcaaaatcaatgaaaaataaaattgaaggttatggtgatgaatggatcatccctaaccgtagtgtacttgatgagctggcagaaaattatgaatttacagatgcaggcaaggaattacaaaaagccagagagttaaccaaatcattaataaaaactaataaagctgcttcgtgtgattatgttgagcaaaacaggcgtaatactgccataaactttgttttggatgccttcaatggaagagttgacagtattttatcaaaagtcaaacacaacaattttggaaaactttcccaagaaataaaagatgcatttcaactagtaaattacaatggctctgcctttaggtccgcaaaaataagtgacatctatcttcaggcaagactcaacgagctaaaatggggtgtagcagttaatgaaattatgctcgaagaaaaagaagagcaaagaaggattaaagaacagcttcgtgaagaggaaagagctcgtagagaatatgaaaaagcgataaaagaagctgaaaaagaagaaaaagctattcagcaagctataaataaagcaacgaaagaacttatgcttgcaaatgaagaacaacgcttagctttagagcaaaaaatagctgaactacagttaaaatatgaagaagctgaagctaaaaatcaacgagctatttctatggcccaacaaaccagatcaggccacgtctatatcattagtaatattggttcatttggcgaagatgtatataaaattggaatgacacgccgccttgaaccacttgatcgtgttcgtgaactcggagatgctagtgttcctttttcgttcgatgttcatgcgatgatttatagtgatgatgcaccatcattagaaaaccatctgcataaagttttcaatgaaaagcaggtcaataaaattaactcacgaaaagagttttttaacgtaaatttaaaagaaatcaaatcagttattgaagacatgaacatcaacgcccactggacaatgtttgcagaggcgaaagaatatagagagtctctagctattgagcaggagcgcaaagcagccacttccgccaacgatgaactacatgttgcttag

SEQ ID NO: 10539 - DNA, 597 bp, Escherichia coli
atgtcaacatcaaagtacccaagtgagatcaaaataaatcccaataaaggtggtaaggctgcgattgagcgattagtcgaagcctatggctttacgacacgacaggctttagctgatcacttggaagtatcaaaaagcacactagcgaacaggtatttgcgggatacatttcctgctgactggataatccaatgtgctcttgaaacaggaacctccctcaaatggttaactaccggacaaggccttaagcaaagctcgctgacagcagctacagaagagcttgttaagtttcgccttgccgcaggcaaaatgattgaagacggttcatatgtcttcgattcatcatttcttcctgcaaacctttcatcaccaattgttattcaggatggactcgtcacatacatttgtgatcaaaaattttctgaagtacttgatggaaactggttaatcaatatcgacggaacctattccattcgaaaaatcacaaggcttcctaaaggaatgattaaaattacaacagcagagaatagctttgaatgtgcattttctgatattgaagtggttgcttgtataagaagtacaatagtctcgaattaa

SEQ ID NO: 10540 - DNA, 222 bp, Escherichia coli
atgacccctaacatttcaataactctgaatacgccacacgtcacaatcgagcgttatagcgaacttactggtctttcaatcgacacaatcaacgatatgttggcggatggtcgcattcctcggcatcgtcttcgtaaagacaagaaaagagaaaaggtaatgatcaaccttgctgctcttaccgttgatgcacttactgattgcaatgttgtattcaactag

SEQ ID NO: 10541 - DNA, 510 bp, Escherichia coli
atgtttgattaccaagtttccaaacatccacattttgatgaagcctgtcgtgcattcgcactgcgccacaatctggtgcaactggcagaacgtgcaggtatgaatgtgcagattctgcggaacaaactgaacccagctcaacctcatttattaaccgcaccagaaatttggttgcttaccgatctgactgaagattcaacgctggtagatggttttctggcacagattcactgcctgccatgtgtaccgattaatgaggtagcaaaagagaaactgccgcattacgtcatgagtgcaaccgcagagatcggacgtgttgctgcaggtgcggtatctggcgatgtaaaaaccagtgcaggtcgtcgtgatgctatcagcagcattaactcagtaacacgactgatggcgctggctgctgtttcattgcaggcccgtttacaggctaaccctgcgatggcgagtgcagttgataccgtgactggcttcggtgcttcattcggtttgctgtga

SEQ ID NO: 10542 - DNA, 201 bp, Escherichia coli
atgcttacgaaagaaccatcatttgcatcgctgcttgttaaacaaagcccggcaatgcactacggtcacggctggatcatgggtgaggatggtaaacgctggcatccgtgccgttcacaagatgaattgctggcagaactatctacgaaaaaacgggggaacaaatggctattgaaggcgctgcggcgactgttccattaa

SEQ ID NO: 10543 - DNA, 342 bp, Escherichia coli
atggctattgaaggcgctgcggcgactgttccattaagccccggtgaacgcctgaatggacttaatcacattgcggagttaagggcgaaagtttttggtctgaatattgagtcagagcttgaacggtttattaaagatatgcgtgatccacgggatattaatagcgaacaaaataaacgggcactggctgccatattctttatggcaaaaattccagctgaacgtcatagcatcagcattaatgagctgaccactgacgaaaagcgggagttgattaaagcaatgaatcattttcgtgcagtggtgagcttatttcccagacggctaaccatgccgaattaa

SEQ ID NO: 10544 - DNA, 234 bp, Escherichia coli
atgcgtaatattgaaaccctcacgaccaaaaccggaccggatgacgcagggcttaatattttactgacagaggctcgtctggaagaacgccgggcaagggctgaagcaatggcagctcgccttgatagcctggcgtgtcatatcacatcccgccagctaaaccacgtcgaagcggcagaactgcttcgtgtgactgctgaagcaatccagaacgaagcgcaggagatccactaa

SEQ ID NO: 10545 - DNA, 228 bp, Escherichia coli
atggctgatgcaatggatctcgtacagcagcgcgttgaagaagaacgccagcgtcatatccatgctgcccgtgccaaaacgccgggcgtgtcccgcgtgctttgcattgagtgtgaagcgccaattccgccagcacgccgccgtgccattccgggtgtgcagctttgcattacctgtcaggaaatcgcagagctgaaaggcaaacattacaacggaggtgctgtatga

SEQ ID NO: 10546 - DNA, 858 bp, Escherichia coli
atgagcaccatcctgaaatgggcgggaaataaaactgccataatgtccgaactgaaaaaacatcttcctgctggcccgcgactggttgaacctttcgcgggttcctgtgctgtgatgatggagacggattatcccagctatctggttgcggatattaatcctgatttaatcaacctctataaaaaggttgccgctgattgtgaatcgtttatatctcgcgccagagttttatttgagatcgcaaacagggaggtggcttattacaacataaggcaggagtttaattactcaactgaaattactgatttcatgaaagcggtatatttcctgtatctcaatcgtcacggttaccgtggtttatgtcgctataacaagagcgggcatttcaacattccctacggtaattataaaaatccgtatttccctgaaaaagaaattcgcgcatttgcagaaaaggcccagcgagcaacgtttatctgcgccagctttgatgaaacgctggcgatgttgaaggcgggggatgtggtgtattgcgatccgccgtatgacggtacgttttccggctatcacactgacggcttcactgaagatgaccagtatcacctggcatctgttcttgaacatcggtcatcagaaggacatccggtcattgtttctaacagtgacacatccctgatccgttcgctgtatcgcaattttactcaccactacatcaaggcaaaacgcagcatcggtgtggcagctggcgagggtaaatcagcaacagaaatcattgctgtttctgggccgcgctgctgggtgggatttgattattcgcgtggcgtggatagttctgccgtgtacggagtacgtgcatga

SEQ ID NO: 10547 - DNA, 2415 bp, Escherichia coli
atgagtcatgccgatatgaacaactgctgcggctttaacgaagctgccgcatcgttctcatggaacagcccgaaaaaggccattaacccttatctggacccggcggaagttgcgccggtttctacgctttcaaacctgatcactctgtacgctgccgataacgagcaggaacagctgcgccgtgaggcgctgagtgatcaggtctgggagcgttatttctttaatgaatcccgtgatcctgtccagcgcgaaatggagcaggataagctcattagccgggcaaagttggcgcatgagcagcagcgttttaacccggacatggtcattctggcagacgtcagcgcccagccctcccatatcagcaagccgctgatgcaacgtattgaatacttcagcagcctgggcaggccaaaggcttattcccgctatttacgtgagacgattaagccatgtctggaacgactggagcatgtacgcgacagccagctatctgcatcttttcgttttatggcaagccatgtagggctggacggcctgctgattctgcctgaaatgagtcaggatcaggtgaaacgcctgtctacccttgtcgctgcgcatatgagcatgtgccttgatgcagcttgtggtgatttgtatgccaccgatgacgttaagccagaagaaatccgcaagacatgggaaaaggtggcagcggaaaccctgcgtctggatgtcatcccgcctgcgtttgagcaactccgtcggaaaagaaaccgccgtaaacccgtgccctatgaactcattccgggttcgctggcgcgtatgttgtgcgccgactggtggtaccggaaattatggaaaatgcgttgcgaatggtgggaagagcagttgcgtgctgtctgcctggtcagcaaaaaagcatctccctatgtcagctatgaagccgtgatgcataaacgtgagcagcgccgcaagtcactggagtttttccgttctcatgaactggtgaacgaagagggcgacacgctggatatggaagacgtggtaaacgccagcagcagcaacccggcgcaccgccgcaatgagatgatggcctgtgttaaaggtctggagcttatcgcggaaatgcgcggtgactgcgccgttttctacaccatcacctgtccgtcacgtttccattccacgctaaataacggcaggccaaacccgacctggaccaatgcgacagtaagacaaagcagcgattatctggtcggcatgtttgctgcatttcgtaaggctatgcacaaagccgggttgcgctggtatggcgtgcgggtggctgagccgcatcatgacggcacagttcactggcacctgttgtgtttcatgcgcaaaaaagaccgccgcgccattactgcattgttgcgtaagtttgccatccgtgaagaccgcgaggagctgggcaataacacggggccacgctttaagtctgagctgataaacccgcgcaaaggaacgccgacaagctacattgcgaaatatatcagtaagaatattgacgggcgtggtctggctggcgagatcagtaaggaaacgggtaaatccctgcgtgataacgctgaatacgttaatgcctgggcgtctctgcatcgtgttcagcaattccgcttctttggcattccggggcgtcaggcttaccgtgaactgcgattgctggctggtcaggcggcaaggcaacagggtgacaaaaaagcaggtgcgccggtactggataacccgcgtcttgatgccattctggctgctgctgatgctggttgttttgccacctacatcatgaagcagggcggcgtactggttccccgcaaatatcacctcatcagaaccgcttatgaaatcaacgaagagccaaccgcctatggcgatcacggtattcgtatttatggcatctggtcacccattgcagagggcaagatctgcactcatgcagtgaagtggaaaatggttcgtaaggccgttgacgttcaggaggcggcagccgaccagggcgcttgcgccccttggactcgtggcaataactgtccccttgctgaaaatttgaaccaacaagggaaagacaaatcagctgatggggataccagaacggacattacccgcatgaatgacaaggagttgcacgattatctgcacagtatgaacaaaaaagagcgccgggaactggctgcaaggttacgcctggtgaaaccgaaacggcgtagagactacaaacagcgaattacagaccatcaacgacagcagctcgtctatgaactgaagtccagaggatttgatggcagcgagaaagaggtcgatttactccttcgcggcggcagcattccgtcaggagcaggcctgcgaatcttctatcggaaccagcgtttgcaggaagatgataagtggcggaacctgtattaa

SEQ ID NO: 10548 - DNA, 189 bp, Escherichia coli
atgcaggactattttttggagtctttgaagctccagcgcattgatttttttcttaagcttgtagcggctagtgagtgtagtgatgaagagaaggggctggctttgcagtgggtttctgaactaacagatgaactcatggcaaaaatcagaacccacgaatacaaccgctcaatggatgtcatcagttga

SEQ ID NO: 10549 - DNA, 234 bp, Escherichia coli
atgcgcattgaaataatgatcgataaagagcagaagattagccagtctatcctggacgcccttgaatccgagctttaccgcaatctgcgccccctgtatccaaaaacggtaattcgtatccgcaaaggtagctctaacggtgtggaactgaccggactgcaactggacgaagaaaggaagcaagtgatgaaaattatgcagaaggtgtgggaagacgatagctggctgcattaa

SEQ ID NO: 10550 - DNA, 1059 bp, Escherichia coli
atgttggacgcacgaaaaaatattgatctaatcaaagatattgacgaaatttcagagaagggaattcaagcatttgggttattatatgatgaatccgggcactcaaatcttcacgatcctctactgaggtggtgtgattttcttttacgctacattgctccacaaaaacgaataattttaaaatcagatcgatttcctgaaaatattcacgatggcgcaagggttggattgcagagaatcgagatgttgtttactactggtggtgatgtaaatccttatcagagtaaaacattaacattattcaatgacacaagcggtaaaaaggcgacgaaaagaacggataacctatgggctgattgggggattcatcacctccatctgccattaaatccagtaagttcaagtaaaaaatactcagatcgtgctgagtgggtattattcctgaaggtgtactcaaacgctgtgctttttattgatataaaacatcatgataaaaacatagaaccaaatcttttttctcaaagagatttggtagaaacattcatacgcaactggccagaagcagcagaaatatttgaaatgaaaggtatttcaggcttagcttgtattcatccaactacagattcagatattgcaaacttaagaaaaaatggaataaatctgcccgtagtgatggatggaaaagcatatgccccattaggaatgggaataacaacagcgcgtaccgctgtgagcgtatcaacttatcgaaataaaatatatcattgtgctaagcacatagagaaaatatttatggatgaagatagtccatacataaaagaaataaaatctctaggtgtaaacaatcctgaattcaagatgcatatgtttaatgatggtgggttaggtattgttgagataaatactagaaaaggctggaaattccttagaaaaaatgctgatgcgtctcatgatgttttcagttttttaaataacgcactgatgccagagtgggctagtcctgttgtattacagttctgggaaaaaactcattgtaaaatggagggaattgaaaattaa

SEQ ID NO: 10551 - DNA, 1782 bp, Escherichia coli
atgaattttgatgcaacaccactaaatataaaaaacattctatctgtaaaacaaagatatgttattcctcgtaatcaacgtgagtttagttgggaaaagcttcagcttgaagagttatggcaagatattgtcagaaacataaggttgaatgaagatggacagaacttggagtgttcagaatattttatagggactattgttctttctggagcagatagtgatgatgtattagaagtggttgatggacaacaacgattttcagttattactatattgctttcattaatatcgcgtaaattgcgttccttagggcaagattcattagcggatgatatatttaaaacatatatcgttactgtgagtcctacatttagcagaagccaattagcttcaaatggtgagacatttattgaaaaattagcaaaaaatagcgatagaacatattttaagttaaaatatcaagatcgcgaagagcatcaagttgatgaatcttgtgaagaggatgtacgtataagttatgcaggaatttttctttctagaaaactagggaggaaatcactctgttctgcattgttgcgagatggtgcaaaacattataataaccaagattatatattttgtttgactgctgtatatagaatgattaccaattatttgaagttggtaaaaatatctgtaggtaaggaggatgatgcttatgatatttttgaagtgttgaatgctcgagggataaacttaagttcaattgatttgataaagaataaagtattccaaacttgcactcaaacatatccggtagatattgcaaaaacaaaatgggattatatcgttactcaaattgagtctagggatagtaatagcactattgctgattatattagaacgtggtggctttctaagtataattatattggagaagatcaactttatcgtgcttttaaacgtgagattcaagatgagaatactttattgtcatcagcatcatttctgaacgaattatatgatgatgttgaattatactgtaaaataatagcgccaaatacagatgactggcctcaacctgatcagcgtgaaatttacaactcgttaaaagcattcgagatttttaatgtgagtattcctcgaccatttgtactctcattacttagaaaacgtaaagagaaaccgagagcccttacacaatcaatgctgatagaatgtttgaagtccttagagtcatttcactttaagtttaatgcagtatgtcgtctaagaccatctggaatcgatgcaaaatattctgtattagcagtaagaatgaataaggcattaaataaaagagatgttgagggtgttattaatgacgcgttagattattttacacagaaaggaccttcagaaaatatattcaaacaagcattttcaaagaatattgtttatacaaataaaaagtctgggcaaaggaagttgattgtttatatttttgacaaattggaacgtatcagacgagggacgcgagagttaaaaatggatatagtttctttggaacacatatcatctcaaagcaaaactaacgagtcagtcgtgggtatgattggtaatttactaccactctgtttttcacttaatgaagattgcaaaaattatgagttgcacaaaaaaatagaatcttataaaaaatctgatttaaaattagttacagagtttgttagtgagtcagaagcaagagaacataaatgggatgattcattaataaaagaaagaacagatggcttggcgttagaaacgtttgctaaaatataa

SEQ ID NO: 10552 - DNA, 1035 bp, Escherichia coli
atgggaaagagtaagaaaaaccgcgctgcggcgacgaatcagatccagcataaaaaccagacttcagccgaagcattcagcttcggtgatcccgttccagtacttgaccgccgcgaactgctggactatgtggaatgtgttcagacagatcgctggtatgagcctcccgtcagctttgacggactggcgcgcaccttccgcgctgccgtgcatcacagttccccgattgcagtaaagtgcaacattctgaccagtacctatatccctcatccgctgctcagccaacaggctttttcgcgttttgtgcaggactatctggtatttggtaacgcctacctggagaaacgcacgaaccgattcggtgaagttatcgcccttgagcctgcgctggcaaaatacacccgacgcgggttagacctggatacctactggtttgtgcaatacggtatgacaacccagcagtatcagttcacgaaaggcagcatttttcatctgatggaaccggacatcaaccaggagatctacggcctgcccggctatctttctgccattccatccgccctgctcaacgaatccgccacgctgttccgccgtaagtattacatcaacggtagtcatgcaggcttcatcatgtacatgaccgacgccgcgcagaatcaggaggatgtgaacaacctccgcaacgcgatgaaaagcgccaaaggtccaggcaacttccgcaatctgtttatgtactcgcctaacggcaaaaaggacggacttcagattatcccgttgtcagaagtcgcagcgaaggatgagtttctgaatatcaagaacgtgagccgcgatgacatgatggcagcacaccgagtgccgccgcaaatgatggggattatgccaaataatgttggggggtttggggatgtggaaaaggccgcgaaagtatttgttatgaatgagttactaccaattcaaaaacatattctgcaacttaatgaatgggctaaaaaaaacatcatctcattcagtgaatactcagtggagtgtatgtaa

SEQ ID NO: 10553 - DNA, 1767 bp, Escherichia coli
atgaacaccacactgacacccgcagatctcgatccccgtcggcaggccatgctgctgtactttcagggataccgtgtagcccgcattgctgaaatgctgggcgagaaagttgcaaccgttcacagctggaagaaacgcgacaagtggggtgactatgggccgctggatcagatgcagctcaccaccgccgcacgctactgccagctcattatgaaggagcacaaagaagggaaagatttcaaagagattgacctgctggcgcgccagtcggaacgccacgcgcggatcggcaagtttaacaatggcggcaacgaagccgacttaaaccctaacgtcgccaaccgcaacaaaggcccgcgccgtcagccggaaaagaatgttttcaccgatgagcagattgagaagctggtagaaatcttccattcctctatgttcaactaccagcgccactggtgggaagccggaaaaaccaaccgcatccgcaacctgctgaagtcacgccagatcggcgcgaccttttactttgcccgtgaagccctgattgacgctctgcttaccggacgtaaccagattttcctttccgccagcaaggcacaggcccacgtctttaagcagtacatcatcgacttcgccaaagaagtggaagtggagctgaaaggcgatccgatggtgcttcccaacggggccacactgtatttcctcggcaccaatgcccgcacggcccagagttaccacggcaacctgtatctggatgaatatttctggataccgaaattccaggagctgcgcaaagtggcttccggtatggctattcacaaaaaatggcgacaaacctatttttccacgccatccagcctgacacacagtgcttatccgttctggtccggtgcgctattcaaccgtgggcgcaataaagccgacaaggtggacatcgacctgtcccacagcaatctggctccaggcctgctgtgtgcagacgggcaataccgccagatagtcaccgtggaagatgcggtgcgcggcggctgtaacctgttcgaccttgaccagttgcgcatggaatacagcccggacgaataccagaacctgctgatgtgtgaattcgtggacgatctcgcgtccgtatttccgctcagcgagctgcaggcatgcatggtggacagttgggaagtctggaccgactttcatgcactggccctgcgcccgtttggctggcgagaagtgtggatcggttatgacccggcaaaaggtacgcagaacggcgacagcgccggatgcgtggtggtggcaccgccagccgtgccaggcggtaagtttcgcattcttgagcgtcaccagtggcgcgggatggacttccgcgcccaagctgacgccatcaaaaaactgaccgaacagtacaacgtgacctatatcggtatcgactcgacaggtgtcggtcacggagtttacgagaacgtgaaagcgttctttcctgccgtccgggagtttgtctacaaccccaacgttaaaaatgccctggtactcaaggcctacgacattatcagccaccgccgtctggagtttgacgccgggcacaccgacattgcgcagtcattcatggcaatccgtcgtgccaccaccgccagtggcaaccgcccgacctatgaagccagccgcagcgaagaagccagccacgccgatctggcctgggcaacaatgcacgcactgtttaacgaaccgctgcagggcgagtccgccaataccagcaatattgtggagattttttga

SEQ ID NO: 10554 - DNA, 834 bp, Escherichia coli
atgacagtgaaagcaaagcgttttcgcatcggggtggaaggtgccaccaccgacggacgcgaaatccagcgtgaatggctggaacagatggcagccagctacaacccggcggtgtataccgcgctgattaaccttgagcacatcaagtcttatctgccggacagcacctttaaccgctacggcaaggtgacggcgctgtttgctgaagaaatcacggaaggtccgctggcaggaaagatggcgctgtatgccgacgttgagccaacggagtccctggtggagctggtgaaaaaaggccagaaattattcacatctatggaagtcagtccgaagttcgctgatacgggcaaagcctacctggttggcctggctgccactgatgaccctgccagtctgggtacggaaatgctgacattcagcgccagtgcagcccataacccgctggcaaaccgcaagcagaatcccgccaatctttttaccgctgcagaggaaacggtgatcgaactggaagaaatccaggatgacaaaccgtccctgtttgcccgtgtcacggcgctgttcaccaaaaaagagcagtccgatgacgcccggttctctgatgtgcataaggccgtggaactggtcgccactgagcagcagaacctgagtgcgcgcaccgaaaaatccctgtctgagcaggaagaacgcctgtctgagctggagactgccctgcaggcacagcagaccgcctttaacgaactggtggacaagctgagccaagaagacagccgccaggactaccgccagcgtgcaacaggcggtaacgcccccgctgacactctgaccaattgctga

SEQ ID NO: 10555 - DNA, 1059 bp, Escherichia coli
atgaagaagaatacccgctttgcttttaacgcttacctgcagcaactggcgcgtctgaacggtgtggcagttgaagaactgtccagcaaattcaccgtagagccgtctgtacagcagactctggaagaccagatccagcagtccgccgctttcctgacgctgattaacgtcacgccagtgactgagcaatccggtcagctgctggggttgggtgttggcagcaccattgctggaaccactgataccaccgcgaaagagcgtgagcctgtcgatccgacgctgatggtcgatgtggaatataaatgcgagcagaccaactttgacacggtgctgacctacgcgaagctggatctgtgggcgaagtttcaggatttccaggtgcgtatccgtgacgccatcgtgaaacgtcaggcactggaccgcatcatgatcggctttaacggcgtgaagcgtgcgaaaacctccaaccgtagcgaaaacccgctgctgcaggatgtgaacaaaggctggttacagaaaatccgtgaggatgcaccggatcatgtcatgggcagcagcaccacgggcggtgaaaccacaccgggtgcggtgaaagtcgggaaagggggcgaatatgccaacctggacgccgtggtgatggatgcggtcaatgagcttatcgacgttgtctaccaggacgatgacgatctggtggtgatttgcgggcgtgaactgctgtctgacaagtatttcccgctggtcaacaaagagcaggaaaacagtgaaaaactggctgccgatatgatcatcagtcagaaacgcatggggggcctgcaggcggtgcgtgcgccgttcttcccgccgaatgcgctgctgatcacccgtctggataacctgtccatctactggcaggaagatacccgccgccgttcagttatcgacaacccgaaacgtgaccggattgaaaattttgaatccgttaacgaagcctatgtggttgaggactatcgctgcgctgcactggtggaaaacatccagattggtgacttcagcgccgccgcagcagaaaccggagcgtaa

SEQ ID NO: 10556 - DNA, 651 bp, Escherichia coli
atgagcctgagtcccgcacggcagcatcgcctgcgcgttcaggctgaacaggccgctcgcgagggtggcagtgttcgccacgcgtcgggctatgacctgatgctgctgcaactggcggaagaccgtcgccgtctcaagggcgttcagtccacggtaaaaaaagcggaaatcaaggtggagctgctgccgaaatatgctgcctgggcggagggcgttctggctgccggaggcgctcaacaggatgacgtgctgatgtacgtgatgctgtggcgcattgatgccggagattatgccggggcgctggagatcgggcgtcatgccctgcgtcatggctgggtgatgccgctgggtaaccgcaacgtgcagaccgtgctggcagaggaaatggcagacgcggcgcagagcgcaatgcttgccgccaccggctttgatgccgctctgttgctgcagacgctggagctgacagatggtctggatatgccggaccagtcacgggcgcgtctgcataaagcgattggcgctgtcctgagtgaaagtaatccggcttccgcccttaatcatctcaaccatgcgttacagctcgatccccgctgtggcgtgaaaaaagacaaacagcagctggagcgcagactgcgcaatgacagccgctga

SEQ ID NO: 10557 - DNA, 465 bp, Escherichia coli
atgaagtttgttgcgccagaacaggcaccggaacaggcggaaatcatcaggaatacgccgttctggcctgatgtggacttgtcggagtttcgcagtgtcatgcgcactgacggcacggtgacgcagccgcgtttaaagcaggttgcgctgtcggcaatttcggaggtcaacgcagagctgtatgagtttcgcagacgccagcagatgctggggtatgcctcgctggcagaggttccggcagaacagctggacggcaaaagtgagcgcattcagcactatttcaacgcggtttactgctgggcacgcgccatgctcaacgaacgataccaggactatgacgccacggcatccggtgtgaagcgaggcgaggaactggcggaagccagcggtgatttatggcgtgacgcccgctgggccatcagccgggtacaggacgcgccgcactgcacagtggagcttatctga

SEQ ID NO: 10558 - DNA, 204 bp, Escherichia coli
atgaaagtgcgagcgcatcagtatgacacggtggatgcactttgctggcgtcattacgggcgcacgcagggtgtcacggagcaggtactgaaggcaaatccggggcttgccgaatacggcccctttttacctcacgggctgcaggtggagctgccggacattccgaccaccaccaccgtgcagaccgtccagctatgggactga

SEQ ID NO: 10559 - DNA, 216 bp, Escherichia coli
atgacgcttgagcgaatcagcgcctttatcacgtactgcatcgccgttgtgctggcctggctgggcgatttgtccatcaaggatgcctcaacgctgggcggtctgatgattggtgtgctgatgctggctatcaactggtactacaaacataaagcctaccagcttctgcgcgacgggcagatctcgcgggaggactatgaatccatcaatcgttaa

SEQ ID NO: 10560 - DNA, 513 bp, Escherichia coli
atgaatccatcaatcgttaaacgctgccttgtcgggaccgtgctggctattgctgccacgctgccgggttttcagcagcttcacacctccgtggaggggctgaaactgattgccgattacgaaggttgtcgtctgcagccgtatcagtgcagcgcgggtgtctggaccgacggcattggtaatacgtcgggcgtcattcccggcaaaaccattacggagcgacaggcagcagaagggctgatctccaacgtgctgcgtgtggagcgggcgctggaaaggtgtatgaagcaacagccgccgcagaaggtgtatgacgctgcggtgtcgtttgccttcaacgtgggtacgggcaatgcctgcagttccacgctggtgaaattgctcaatcagcggcgctgggcggatgcgtgccgacagttgccgcgctgggtgtatgtaaaaggtgtgtttaatcaggggctggataaccgccgtgcgcgggagatggcctggtgcttacagggagcaaactga

SEQ ID NO: 10561 - DNA, 378 bp, Escherichia coli
atgaaaaagaaattaatcagcgggctgtttctgatgttatggatagcgctgttaatcgccgcaatggtgtatccgcaggggatttttccggtactggcagcatctggtgtctgggtagcctgtctgctgacatggggggcaattccggtagcactggctgcgttaattaagaacggcccgctctggcaggagttgagggcatctttgctgaagaccattacccgaaaagaaaacgtatttatcagctggatgatgcgattgctgattgtcgtcagtctcgcctggacggggtgggctattaccctggtcttttatctactgaccgttattgccttctggatcacccgtaatcagatggcgcaacaggtagcagcatga

SEQ ID NO: 10562 - DNA, 429 bp, Escherichia coli
atgaaccggttgctgctggttgtgctggcgttattactggcggcgctgggctggaagacgtggcggctggctgatgccagccagaccatcagcacgcaggcagatgagcttcggagcaaaagccaggcactggcaaagagcaacagccagcttatcagcctgtccattctgacagaaaccaacaaccgggagcaggcgcgactttatgccgacgcagaacagaccagcgcactactgagacaacgacaacaccggattgaggaactgaaacgtgagaacgaggatttacgccgctgggctgatactcctttgcctgctgacattatccggctgcgggaacgcccgacactcaccggaggtgcagcttaccgtcagtggttgtccgcgagtgacgccgtgtcggctggggcaggcagcgccgcgcactaa

SEQ ID NO: 10563 - DNA, 432 bp, Escherichia coli
gtgaacaaaccacaatccctgcgccacgcccttaataaagcagtgccttatgtccgtaataacccggacaaactgcatctgtttgtggataacggttcgctggttgccacgggggccagctccatgtcatgggagtaccgctacaccctgaacgtggtgatagaggatttcagtggtgaccagaatctgttgatggccccggttttgctgtggctgcgtgataaccagcccgatgccatcaataatcccgctttacgggaaaagttattcacctttgaggtggatattctgcgcaacgatgtctgtgatatcagccttaacctgcaactgacggaacgtgtgctggtcagcactgacggcacagtgtccagcgttgaagctgtagcggaacccgatgaacctgaagaaatgtggacggtgaaacgtggctga

SEQ ID NO: 10564 - DNA, 447 bp, Escherichia coli
gtggctgaattgcagaaggtggacgactggctgagtgccttgctggcgaatctggagccagccgcaagaagccgtatgatgcgccagctggcgcaggaactgcgccggacacagcagcagaatatcaggatgcagcgcaatcctgatggcagcagttatgaaccgcgcagggtaacagcacgcagcaaaaaaggccgcatcaaacgtcagatgtttgcaaagctgcgcaccacaaaatacctgaaaactgccgccagcgccgactctgccagcgtacagtttgaaggcaaggtgcagcgtattgcccgtgttcaccattacggcctgcgtgatcgcgtcagtcgcaaaggaccggaggtccgttacgcagagcgccgcctgctgggtcttaatggtgagtcttatgttctaactcttgatatattgaatagattccttctgtcttga

SEQ ID NO: 10565 - DNA, 807 bp, Escherichia coli
atgagtgttatgaatccaataagttctaatatatttaatgctgaatttttaaacaccccagcagcggcacttgccgcatggatttccattattggagctgttataactttggtgacgatagttataagagcactattcaaatatagaaaatctcatgatgtaattttgaaaaaatcaggaatacctgcgtttatattaaatttttttcttataaaaatatcattaaaaaggctgcctactatcacatgggctgaaaaatcattcacggttctattttcgcttctttttttgtgtgcaatttatctttttggtccagttttcatccaagccattagaaccccaccaaatagcacattgctttattggataaagtccggtgaatcattttatatgtcaaaaaaaatggcgactgcagctacaatattaaccactcctgattgggaaatatcaaaggatgattgcgaagagtcatcctctgccagtacagagaagtacaaatcattaactatcgaacataaagaaattctttgtaaactactaaccactgatgaagggaatgcttacattgatgaagaagtcaagaatttcgttaaagacaaattttttatctattcctttgccccaacaactatatttattctattatggatttctttgggttttatactgaccattcactattctaaaaaagttaggaaatatattctaactgaacaaaaaaatgcaattcattgggcatatggtgaattcaagacagaaggaatctattcaatatatcaagagttagaacataagactcaccattaa

SEQ ID NO: 10566 - DNA, 579 bp, Escherichia coli
atgaacgcacaattaaccgaaatcatgcgccttatcaccaacctgatccgcacaggtgtagttaccgaagtggaccgggagaactggctttgccgggtgaaaacgggcgaccttgaaactaactggatcagttggctgacgctgcgtgccgggaatgcccgcacatggtggcgaccatcggaaggtgagcaggtggtgctgctgagtctgggcggcaatctggagactgcctttgcgctgcccgctgtctattcgaatcagttcgcaccaccgtcgacgtcggcggacgcctgcgtgacagaacatcctgacggtggctggtttgaatatgaacccgccaccgggcgctggtatgtcaggggcatcaaatcaatggtcattgaggccgctgataacatcaccatgaaaaccagtgagtttgtactggaggctgaccgcacgcgcattaacagcgaagtggtgatcaatggtggcgttacccagggcggcggagcgatgagttctaacgggattgtggttgatgcacatcagcatactggcgtcctgaaaggcggcgatacaaccggaggcccggtatga

SEQ ID NO: 10567 - DNA, 360 bp, Escherichia coli
atgacgctttatagcgggatgaacaataccagcggcaaagtcattactgatattgatcatctgcgccagtcggtgcgggacattctgctgacaccgcagggtagccgcattgcccgccgggaatatggttccctcctgtcggttttaatagatcagccacaaaatccggcattacgcctgcaggtcatgtcggcagtgtatgtggcgctgagtcgctgggagccacggctgacgctggattccatcaccatcaacagcaactttgacggttctatggtggtggagctgaccgggcggcggaataacggtgtgcctgtgtccctttccgtatcaacaggagcagagaatggcagtgattga

SEQ ID NO: 10568 - DNA, 909 bp, Escherichia coli
atggcagtgattgacctttcgcagttatctgcgccgcagattgtggatgtgccggactttgagacgctgcttgccgaacgcaaggcagaatttgtggcgcttcatccgaaagatgagcaggaagcagtgatccgcacgctggaactggaatctgaacccgtcaccaaattattgcaggagaacgcttatcgtgagttgcttctgcgccagcgtattaacgaagccgcgcaggcggtgatggtggcttatgcgatgggcggcgatctggaccagctcgctgccaactacaacgtgaaacgcctgacggtgacgcctgctgataatgacgctgtgccgcccgttgcggctgtgatggaaagcgatgaagcgttacgcctgcgtgtgcctgcagcctttgaaggactttcagttgcggggccaactgccgcttatgaatttcatgcacgaagcgccgacggtcgggtggcggatgccagtgcaaccagtccggcacctgcagaggtggtgctgactgtccttagccgcgaaggcgatggaacagcagaaaaagacctgctggatgtggtggagaaagccctgaacagtgagaacgtccgcccggtggctgaccgtctgacggttcgcagcgcagaaatcatcccgtaccgcgtggaagctaccatttttctctatccggggccggaagcagagccggtaatggcagcggcaaaagccagcctgcagaagtacatcgccagtcagacgcggcttggtcgggatattcgccgtagtgccatctttgccgccctgcatgttgagggtgtgcagcgtgtggagctggcttcaccgctggcggatgtggtcctgaacaaaacacaggcggcatcatgtacgcagtggagcgtaaccaacggaggaacggatgaatag

SEQ ID NO: 10569 - DNA, 606 bp, Escherichia coli
atgaatagtctgctgccaccgggttcaacaccactggagcgccgactggcgcaaacctgcagcgggatttctgatctgcaggtgccgcttcgtgacttgtggaatccggcaacctgtccggtcagtttcctgccttatctcgcctgggcgttctctgtggatcgatgggacgagggctggacggaaagcgtcaaacgccaggtggtaaaggatgctttttatatacatcagcataaaggaaccaccagtgccgtgcggcgggtggtggagccgttcggcttcctgaaccgcattattgagtggtggcagaccggagaaacaccgggcacgtttcgcctggacattggtgtgcaggaccagggcatcactgaagatacctatctggaacttgagcgactgataagcgatgccaaaccatgtagccgtcacatgatcggcatgtccatcaacctgcagaccagcggcccgcattgggtgggagccgccagctatcttggcgaagaaatcacgatctatccgtatatcaacgaaacaattatttccggcggcaccgcgcatgaaggcggggcggtccatgttattgacacaatgagagtgaatccatga

SEQ ID NO: 10570 - DNA, 1542 bp, Escherichia coli
atgagcacaaaattttataccctgctgacggatattggcgcggcgaaacttgccagcgccgccgcgctcggtgtgcctttaaaaattacccatatggcggtgggcgatggcggcggagtattgccgacgccggacgcaaagcagactgcactggtaaatgagaaacgccgggctgcgctgaatatgctctatatcgacccgcagaacagcagccagattattgctgaacaggtgatccctgaaaacgagggcggttggtggatacgtgaagtgggcctgtttgatgagtcaggggcattgattgccgtggggaactgcccggaaagctataaaccgcgactggctgaaggcagcgggcgcacccagaccgtgcgcatggtgctgataaccagcagcacggacaatatcaccctgaaaatcgaccctgccgttgtgctggcaacccgcaagtatgtggatgacaaggcactggagctgaaggtgtacgtggatgatctgatggcaaaacatcttgccgcactggacccgcattcacagtacgcgccaaaagccagcccgacgtttaccggaacccccaaagcaccaacgccagcggcggggaataataccacgcaacttgcgaccaccgcgtttgttcaggcggcactgaaggcccttattaatggtgcgccagccacgctggacacgctgaaagaaatagccgcagccataaacaatgacccgaaattcagcaccaccattaacaatgcgctggaactaaaagcgtcactgtcaagtccggcacttaccgggacgccaacagcgccgactgcggcacagtcggtcaacaatacacagattgccactacggcttttgtgaaatcggcgattgcagcaatggtgggttctgcacctgctgcactggatacattgaatgaactggcggcggcactggggaatgatccgaactttgccacaacaatgcttaatgcgctgtcaggcaaacaaccgctggacaatacgctgactaatttgagtggaaaagatgttgctggtcttctcgcataccttggtttgggagaaggttcggcattacccgttggtgtgcctgttccgtggccttcagccacaccgcctactggctggctgaaatgcaacggtgcggctttttctgccgttgaatatccaaaactggcgaaggcttacccgacaaataaattgcctgatttacgtggtgagtttattcgtggctgggatgatgggcgcggggtagattctggtcgttccctactttcggcacaaaatagtctttctttcgatcaccgtcatttcttaccaactgcttacggaagtggtggtgatggattgatgtctgctgttttcaaagatgacaatagtgcaatgtcatactatccagcaggaacaaatgaatataatgcgaatccatcatcagggacaatcctccaaacatattcagcgagaaatactgatggttcagataaattcggtaacgaatcacgtccacgaaatatttcatttaattatatcgtgagggctgcataa

SEQ ID NO: 10571 - DNA, 603 bp, Escherichia coli
atgggtggagctgtattaaatgatgcgctgatcgcggtaaaggcaggggatattaccgtttataactatgataatgggacacaggaatatatctcaacatcaaccgaatatcttgctgtcggtgtcggtatcccggcatgttcttgtttagatgcacctggtacacataaaacgggttatgcaatttgccgctcaacggatttgaactcgtggaaatatgtgccagaccatcgcggtgaaattgtttatagcaccgaaacgggagaaccaaaagaaatcacagcgccaggggattaccctgaaaatatgaccactatcgctccgttaacaccatacgataaatgggatggtgagaaatgggtaaccgataccgaggcacaatacggtgccgcaatagaagcggcagaagcacagcgccagtcactgattgatactgcaatggcttcaattagtctgattcaactgaaattgcaggccgggaggaagctgacgcagacagaaaacacccgacttaacgccgtgctggattacattgacgcggtgatggcaacggataccagcactgtacctgatatttactggcccgaattacctcaattttaa

SEQ ID NO: 10572 - DNA, 1173 bp, Escherichia coli
atggctcaggattaccaccacggggtgcgcgttgttgaagtcaacgaaggtacccgatccattaccacggtgagcaccgccatcgtgggcatggtctgcacgggcgatgatgccgatgcaaaaatgtttcctcttaataaacccgtgctgatcactgatgtgctgactgccagcggtaaagcgggtgagtccggcacgctggcccgttcgctggatgccatcgctgaccaggcaaaacccgtgaccgttgttgtgcgtgtgccgcagggtgaaacggaagaagaaaccacgaccaatatcatcggcgcagtgactgctgaaggtaaaaaaacaggcatgaaagccctgttatctgcccagacacagctcggcgttaaaccgcgcattctcggcgtgccaggtcacgataacaaagccgttgcgactgagttgctgagtgtggcgcaaagcctgcgtgggtttgcctacctgtcagcgtatggctgcaagacggtacaggaggcgatcacttaccgtgaaaacttcagccagcgcgaaggaatgctgatctggcccgactttactggctgggacacggtgctgaatgccgaagcaacggcatatgccaccgcccgtgcgcttggtctgcgtgccaaaattgatgagcagactgggtggcacaaaagcctgtccaacgtgggcgtgaacggtgtcaccggaatttctgcagatgtgttctgggatctgcaggacccggcaaccgatgcaggtctgctgaaccagaacgacgtcaccacgcttgtgcgtaaagacggtttccgcttctggggttcccgctgcctgagtgatgacccgctctttgctttcgaaaactacacccgcacggcgcaggtgctgacggacacaatggcagaagcgcacatgtgggcagtggacaaaccgctgaacccgtcgctggcgcgcgacattatcgagggcatccgcgccaaaatgcgcagcctggtcagtcaggggtatctcattggtggtgattgctggctggacgagtcggtgaacgacaaagacactctgaaagccggaaaactcaccatcgactacgactacacgccagtgccgccacttgaaaatctgatgttgcgtcagcgcatcaccgatcagtacctggtgaatttcgccagccaggtcagcgcgtaa

SEQ ID NO: 10573 - DNA, 516 bp, Escherichia coli
atggctttaccacgcaaattaaaacacctgaacctgtttaacgacgggaacaactggcaggggatcgttgagtcgctgacgctgccgaaattcacccgcaaatatgagaagtatcgcggcggcggaatgccgggggcagtggatgtggatctggggcttgatgacagtgcgctggacacagaattttccattggtggtactgaactgctgctgtttaagcagatgggcaaagccacggtggatggcatccagttgcgctttaccggctctatccagcgtgacgataccggggaagtgcaggccgtggagcttgtggtgcgtggacgtcacaaagaagtggattccggtgagtggaagacgggcgaaagtaacaccaccaaagtgaccagtaccaacagctacgcgaagctgaccatcaatggtgaggtgctctatgaagtggaccttatcaacatggtggaaattgtggacggtgtggacctgatggaagcgcaccgcaacgccctcggcctctga

SEQ ID NO: 10574 - DNA, 303 bp, Escherichia coli
atgagcgataagcagactgaaaagaccattcaactggatacccctatcaagcgcggtaaaacagaaattaccgaaattgtgctgcgtaaaccgcagtccggagcgctgcgcggtacacgcctgcaggccattatggatatggatgtgaacgcgatgatgaccgtgatcccccgcatctccagtccggcactgactgcacaggaaattgcagagatggacccggcagatctcactgccatgtcggttgaggttgtcacttttttgttgaagaagtcggtgcttgccggtttaccgatagcctga

SEQ ID NO: 10575 - DNA, 3078 bp, Escherichia coli
atgagtgataataacctgcgcctgcaggtcattcttaatgcggttgacaaactcacccgcccattccgtgctgcacaggccagttcgaaagagctggctggcgcaattcagaatacccgaaacagcctcaaagaactgaataagcaggctggcagaattgatgaatttcgcaagacgcgctcgcaactagccataacagccaacaacctgaacgcagcccgcgaagaggcggcaaaactcgccacacaatttgctgccactaacaggccaaccgccgcgcaggcaaagttattcagtcaggccaaaacacgagtacaggaacttcagcagacctataacggcttgttgggggcggtccagagacaacgtcaggcacttaaagaatcagggattgataccagacaactcagtagtgcccagcgagaacttaagaaaaatgctgaagaaacaaggcaggcactggagggccagcaaaaagcacttaaacgtctgggtgaacaacaggcacggatgaacgctgccagagaacaatactcaagacggcttgaagtgcgcgatcgcatcgcaggagccggagccactaccacggctgcagggctggcaatgggtgcgccagtgatggcggcagtaaaaagctataccagcatggaagatgccatgaaaggtgtggcaaagcaggtcaatggtctgcgtgacgataatggcaaccgcactgcacgtttttatgaaatgcaggatgccatcaaggctgccagcgaacagttgccgatggaaaacggtgcggtggacttcgctgcactggttgaaggtggtgcgcgcatgaacgtcgcaaaccctgacgacagctgggaagaccagaaacgtgacctgctggccttcgccagtacggcagcaaaggcggcaacagcctttgagctgccagcggatgaactgtcagaaagtctggggaaaatcgcccagctctacaaaatacctacccgcaatattgaacagctcggcgatgcgctgaactatctggatgataacgccatgtcgaaaggggcggacatcattgatgttatgcaacgtctgggcggtgtggctgaccgtctggattatcgtaaagcggcggcactggggtccacctttctgacactgggcgctgcgccggaggttgcagccagtgcagcaaacgcgatggtgcgtgaattgtccattgccaccatgcaaagcaagagtttctttgaagggatgaatctgctgaaactcaatcctgaagtgattgaaaagcagatgacgaaggatgcgatgggaactatccagcgtgtgctggagaaggtgaacgcactgccgcaggacaagcgtctgtctgccatgaccatgttgtttggtaaagagtttggtgatgatgcagcgaaactggcaaacaaccttccggaactgcagcgccagctaaaactgacagcgggcaatgatgcgctcggttccatgcagaaagaatccgacatcaacaaggactcactttccgctcagtggttgctggtcaaaaccggagcgcagaacaccttcagcagcctgggcgaaacgctgcgccagccgctgatggatattctgtacacggtaaaaagcatcacgggggcgttgcgccgctgggtggaagctaacccggaactgacaggcacactgatgaaagtagcggctgttgtggctgcggttaccgtaggcctcggcaccttagcggtggcgctggctgcagtgctggggccgctggcagtcatccgtctgggattctctgtgctgggtatcaaaacgttaccttccgttacggcagcagtaacacgaaccagcagcgcgttgtcctggttagctggcgctccactggcactgctgcgacgcgggcttgcttcatcgggcaacgcagcgggtttacttactgcgccgttgtcgtctttgcgccgcaccgcatcactgacggggaatgtcctgaaaactgtagcaggtgtgccggttgcactgttgcggtctggattatccggtttacgtgctgttgctatgatgtttatgaatccactggcagcactacgcggtggactggctgccgcaggcgcggtgctgcgagtactggcatccggtccgctggcgatgctgcgcgttgccctgtatgccatatctggtctgttaggtgctctgctcagtccgataggtcttgtggttactgcactggcgggcgtggcgctggttgtctggaaatactggcaacccatcaccgcatttctcgctggtgtggtggaaggattcaaagcggcggcaggtcctatcagtgctgcattcgaaccacttaagcctgtgtttcagtggattggcgacaaagtgcaggcgctgtggggctggtttactgatctgctgacgcccgttaagtcgacctctgccgaactgcagagcgcagcggcaatggggcgacgattcggggaggcactggcggaagggctgaatatggtcatgcatccgctggactccctgaaatccggcgtttcctggttgctggagaaactcggcattgtcagtaaagaggctgcaaaggcgaaactgccggaaagcgtgacgcgtcagcaacctgcgacggtgaatgcagacggtaaagtgatgatgccatcgggtggttttccgtcatggggatatggctttgcggggatgtatgacagcggcggctatatcccgcgcgggcagtttggcatcgtcggtgaaaacgggccggaaattgttaacggcccggcaaatgtgaccagccggagaaatacagctgcactggctgccgttgttgccggaatgatgggcgttgctgccgcgccagcagagcttccaccgttgcaccctttggcacttcccgcgaaaggtggagaagcaattgtgagtcgcgcagccactgtgccgcccgtttacaggattgaggcaccgacgcagatcatcatccagacgcagccaggacaaagtgcgcaggatattgcgcgggaggtggcccgccagcttgatgaacgtgaacgcaggctgaaggcaaaagccaggagtaactacagcgatcaggggggatacgacgcatga

SEQ ID NO: 10576 - DNA, 486 bp, Escherichia coli
atgatgatggtgctgggattgtacgtgtttatgctgcgcaccgttccgtatcaggaactgcagtatcaacgcagctggcgacatgcggcaaacagccgggtaaaccgtcgtccgtccacgcagtttctgggaccggacaacgacatgctgacgctttctggtgttcttatgccggagataacgggcggcaggctgtcgttgctggctctggagcagatggcagaacagggaaaagcatggcccctgattgaaggcagcggcacgatttacggcatgtatgtgattgagggactgaatctgactgaaacggagtttttccgcgacggtatgccgcgccggattgagttctccctgtcgctcaaacgggtggatgaatccctgtccgatatgttcggtgatctcagtacgcagctgaataatctgcaggacacggcaacatctgccttaagtgatatcagtaaaacggtgggagggctgctgtcgtga

SEQ ID NO: 10577 - DNA, 1101 bp, Escherichia coli
gtgaatttcagctctgaactgcttaacaaaggcaacaaaactcccgcattcagcatcagtattgagggcagggatatcaccactgtgctggataaccgcctgatgagtttgactctgacggacaatcggggctttgaagcggaccagcttgatctggagctggacgacgccgacggaaaaatcgtgctgccgcgccgtggtgcggtcattacgctggcgctgggctggaaggggcagccgcttttccctaaaggggcattcacggtggacgagattgaacacactggcgcaccggaccgcctgactatccgggcgcgaagtgctgattttcgggaaacgctgaatacccgtcgtgaaaagtcgtggcacaagaccaccgtcggggaagtggtgaaggaaatagccgcgcggcacaagctgaagatggcactgggtaaagacctgtcggataagcccgtggtacatatagaccagaccaatgagagtgacggcagttttctgatgcggctggcgcgccagtacggtgctattgcgtcggtgaaaaatggcaatctgttattcgtccggcagggacagggcaaaagcgccagcggtaaacctctgccggtgatcactatcacacgcaaggacggcgacagtcaccgctttaccctggcagatcgcggagcctatacgggcgtaattgccagttggttgcatacccgcgaacccgcgaagaaagaaagcaccacggtgaagcgtaagcgcaggaccgcaaagcagaagaaagagccggaagcgaagcagggcgattacctggtgggtacggatgaaaacgtgctggtacttaatcgcacctatgctaatcggagtaacgccgaacgggcagcgaaaatgcagtgggaacgcctgcaacgcggcgttgcgtcattctcgctacaactggcggaagggcgggcagatctctacacggaaatgccagtgaaagtcagtggctttaaacagccgatagatgatgcggaatggagcattacgactctgacgcataccgtcagcccggataacggttttacgaccagtctggagcttgaagtgaggattgatgatttcgaaatggaatga

SEQ ID NO: 10578 - DNA, 219 bp, Escherichia coli
atgatgatttgcccactgtgtggaagtgccgcccatactcgcagcagttttcaggtatcttcattgaccaaagagcgttacaaccagtgccagaacattaactgcagccatacttttgttacccatgaaacttttgttcgttcgattgcaacgccaaaagagtcaaatccggttcagccgcatccaatgaaatcaggacaggtggcgctctctctttga

SEQ ID NO: 10579 - DNA, 225 bp, Escherichia coli
atgcatcagagggggatttttaattctatattagtgtttagcattgttgcgctcctttcatgtgcaatgccatataaagccactggcgcagggagcgcgcagggggcggccagtcgccgccgccccctgcacccccgggctctggcgaacaaaatcgccgctgcgcggtaccttcagcttatccccttcggctaccgggtcgggcgcgaggtaacgtccctgtaa

SEQ ID NO: 10580 - DNA, 909 bp, Escherichia coli
atgcggatgaatatgtctgactttgccactttctttgctgtggcccgtaatcaaagctttcgtgcagcgggcgatgagttaggcttatcctcgtccgccattagccatagtattaaaacactggaacaacgtcttaaaattcgcttattcaatcggacaacccgaagcgtatcgttaacggaagcgggttctaatctctatgaacgattgcgcccagctttcgacgaaattcagatcatgttagatgagatgaatgattttcgtctgacaccgacaggtacgctcaaaatcaatgccgcccgggtagctgcacgtatatttttaatgcctttactggttggtttcacacgtgaatatcctgatattaaagtcgagctcacaactgacgactctcttgttgatatcgtccagcagggctttgacgctggcgttcgacttagtggcatcgtcgaaaaagatatgatcagcgtggcgatcggcccaccagtgaaattatgtgtagcagcaacgccagagtactttgcaagatatggcaaaccccgccatcctcatgatctgcttaatcatcaatgtgtcgtttttcgttatcccagcggcaaacctttccactggcaatttgcaaaggagctggaaattgctgtcgcaggaaatatcattctggatgatgttgatgctgaactggatgccgttttgatgggtgctggtatcgggtatttgctctatgaacagatcaaggagtaccttgataccggtcgtttagaatgtgtactggaagactggatcacagagcgtccaggcttccagatctattatccaaaccgccagtatatgtcctgcggcttgcgcgcatttctcgattatgtaaaaacgggtcagatctgccagagtcagcgtcaccgaccacaataa

SEQ ID NO: 10581 - DNA, 591 bp, Escherichia coli
atgcagtctgaacgtatttatttggtatgggcccatcctcgtcatgattcattgaccgcacatattgctgatgcgatccatcagcgggcaatggagcggaaaatacaggtgacggaactcgatttatatcggcgtaatttcaacccggtgatgacgccggaagatgaaccagactggaagaatatggataaacgttattctccagaggttcatcagctttattcagagctgcttgaacatgacacgttagtggtggtttttcctctctggtggtacagcttcccggcaatgctaaaaggatatattgacagagtatggaataatggtctggcttatggagaggggcataaattaccattcaataaagttcgttgggtggcgttggtagggggagacaaagagtcatttgtccagatgggctggggaaaaaatataagcgattatttgaaaaatatgtgcagttatcttggtattgaagatgccgatgtcactttcttgtgtaatacagtggtattcgatggggaagaacttcacgcgagctattatcagtcgttattatctcaggtacgggatatggtagatgcactataa

SEQ ID NO: 10582 - DNA, 1671 bp, Escherichia coli
atgaaaggattgatacgaagagtcactgtcaccgttgtgctctggagcgtttgctccattgcgatggcgaaatcaaccattactctggatggcgaacatctttccattgaccaggcctggtcaattgcattaggtgataacgacgtcaaaatcgcgccgaaagctctgggcagaatggaaaaaagttatgatctggtgatgaccgccgcacattctggaacacccgtttatggtttaaccgtaggcgtggggctaaataaagaccagccgatatttgatgccaaaggaaatttaacgcctgaggtgattgacgcgtcgaaaaaatttaatgctgccgcgctgcgcgcccattctgcgggcgtcggtccgatgttgccggattatcttgcccgtctctcaatggtgttacgtttaaatactatgttgcatgggcaaaccggcgcgcagccttatattgccgagttgtatgccgagtttattaatcgaggcgttacgccgttaattccggcgcggggaagtatcggcgcagcggatattatgctcgcttcacacgttggtctggtgatgatgggcgagtggaaagcgcgggttaatggcgtggaaatgagtggtggcgatgcgcttgtgaaagtggggcttaaaccactggtcccgcagggtaaagatatgctggcgattttgtcgaacaacagtgtcggaacagcatatgcaattgaagcggtacggtcggcacgccaggtgctgaacgtcagtccggtggtttttgccatgagcctcgaagcgttgaatggcaatgtcgcgccggtactgccgcagtcgatcgccgtgcgtcctttcccgcagttggctgattccgctaaagagattcgcgatgcgttaagtggttcttatttatggcataagcatgacaaacgtgcattgcaggatccgttatcgttcagaacgacggtgtataccatttctgaggcaatgcgcgcgttgcgcgatgctgaagataccattaccgtgcagatcaacagttccgatgacaacccggcaaccgtgctgaatgcagacaaagcgtatcaggactccagtcaggtcgcgcaatattttgttaaagatggggcaatcagcggtgggatcttcccgacggcgaatttcgaatcgttaccggttgcgcttgccacccagcgtctgaccgtggcgttggtacatgtttcgcataacagcatgcgtcgctcgctgcacctggaagatgagcactttaccggtttaacgcgcttcctgtcggcacccggtaataaaggtcacggcttcggttcgctgcatattccgtttgtcgcgctgcatgcggaaaacgtcgatctcgccaatcctgtttctttcgatattcaaccggttgccggaggtatagaagataccggtgccaataatgaccacgcggccagaagattgaaacaggttgtcgataatctgaacgtgatttatggcattgaactgatgcattccgcacaggctctcgatttacggttgcaggccgatccacaactggcattagggaaatccaccaaagcaatgtttaccgaatacagaaaagtcgtgccgtttgtcgaccaggatcgggtctttaccccagatattgcagcttcgcaaaaattcttagaaggatatgctataaatcaaaaataa

SEQ ID NO: 10583 - DNA, 951 bp, Escherichia coli
atgaagcaaacatttttgccgtggagtgggcgtgttgactcgcaggaaaccggcatcagcactcgctggcatcagcatgtgcaaccgtttagtgaacaaagccacggcggttgtacgctgattggttttgccgttgatgacggagtgcaacgtaatggtgggcgagcgggtgcagcaggcggaccgggcgcgttgcgcagcatgttgggaaatatgccagtgctctgtgaaggcgctattttcgatatgggcgatgtacaaagcgaggaccacgcgctggaatccgcacaaaatcgtctggcggctaacgtatctacagccattgcgcgcggcagtttaccggtggttctggggggcggtcatgaagtggcgtggggaacatttcaggggattatgcagtcgcgtccggatattcagcggttactgattgtgaaccttgacgcgcattttgatttacggatggcggaacaagccaattcaggtacgccgtttcgtcagatgcaagagtggaacgcgcagtatggcaaaccgtttcattatcgcgtgctgggaataagtcgttttgccaatactcaggcgttatttgatcgcgctgattgtctcggtgtgcgttattggctggacgaatctctgcaatttgaacgtggtttgcatgagatcgctaatgcgctctcggcagatattcaggcttgtgacgccatttatttaacgatttgtctcgatgttttaccaggttatcaggcgcccggtgtttctgctccatcaccgttaggcgtgccgttaaatattactgaagccattgtgaatttaatcgccggtagcgagaagttgattgctgcggatattgccgaactgaacccggacctggaccgcgataatttaactgcgaaagttgccgctcgcctggctgccactattgtccggcgggggaaaacagatagaacaaattaa

SEQ ID NO: 10584 - DNA, 1212 bp, Escherichia coli
atgagtgcattaacgctctggcgaaataccacgctggcgacgctttccgctaacgattggggagtgattgaaaagggggcattaatcagccgtggcgacactattgtctggcttggcaaggccacgcagatccctcgcgaactgacggctgacattacagaggaacacgacctgcagggtaagttgctgacacccggtctggtggattgtcatacacatctggtgtatggcggccagagggcgaacgagtttgagatgcggttgcaaggcgtagcttatgaagatatcgccagagcgggcggcgggatcttatctaccgtcaatgctacgcgggcggccagcgaaacacaactgtttgaactggcggtgcagcgactacaaaactggttgcgtgaaggcgtcagtacgctggaaatcaaatcgggttatggcttaacgctggaagatgaagcgcgttgtttacgcgtgatccgccgcttgcagcaatctaccgggttacatattcagtctacgtttctcggggcgcacagcctgccgccagagtttgccgggcgcagtgatgattacattacggcgctttgcgactggatgtgcgtgttgcatgaacaggggctgattgatgcagttgatgctttttgtgaaaacatcgcctttactccagagcaggtacggcgcgttttcagtaaagcgcaaagctatggattacctgtaaaactgcatgccgaacagctttctgaccagcaaggcgcggcgctggcagcggcgttttctgcactctcctgcgatcatctggagtacctgagcgagtcggggatcgccgccatgaaagcggctggaacagtggcggttttgcttcccggtgcttattacttcctgcgcgaaacccatctgccgccgattgtcgctctgcgggccgcaggtgtgccgattgctatctccacggaccataatcccggaacgtctcccaatatgtcattgccattgatgatcaatatggcctgtacgctgtttcgcatgacgccgctggaagccgttcagggcgttacgcgtaatgcggcaaaggcacttggacttattgaccggggtgaacttgcaccgggattacgggcggatatggcggtctgggatcttaatcatccacgtgaactggcttactggtttgggcatcagccttgccaggggcttattgtcggcggaaaaaggagttggtaa

SEQ ID NO: 10585 - DNA, 591 bp, Escherichia coli
atggaaccgatgctgatttctgcaatggataagccgctgcaaccgtggcgcaacggcgggggggttacccgacagctgcttgcctggcccgatgatgaaaactggttgttgcgcatcagtatggcgaatgtcagtcaggatggccctttttcagcgtggcctggcgtggttcgtggcctcgcgatcctcgacggggaaggggtgaagctaacgtttgccgattcgatcatcaacctgcaacgtcacgatcccgccttaattttccctggagaagctatgcctgattgcaagctgctgggcggcggggttcgcgatctgaatgttatggcgcgggaaggcgatacggggatgttgcgggtgcaaagtgccgttgactggcttcctccgtcacttgcgcaagcgggcctgttcacgctgtgtgaaggggagtggataagcggcaagaaaagggtgtttgtcgcggcaaatatgttgttatggctggttgcacctgatggcaggccctggcgtttcgtaccacggaagaaagtctccgtcggtgagctggcgggctggtggctttattatctacgaggggaaaaatccttatga

SEQ ID NO: 10586 - DNA, 1410 bp, Escherichia coli
atggaatcaagcagccctatccgcagtaaaaagccagtattagaatcaaatacgattaacgccgttcctgagtctgctcgccacggctcgccatccagtcagtttactttatggctaagtgctaacttacaaattaccgctgtggtggacggcgcgttagcgattatttttggctccgaagccatgtcagcaataattggtttattaatcggtaatattattggtggtgcagtaatggcattgcactcgtcgcagggggcaaagctgggattaccccagatgatctccagtcgtatccgctttggcgttaaaggagcggcgctaccgttactgatggtgattattatgtaccttggatttgccgcgacgggtacagtattatccggtcaggcgattaaccggatatttggtttcgaatcggcatcgaccggaattattattttcggcatgctgaccgcgatgatcgcattggtcggttataaacttattcacgtcgttggccgtgttgcagggatattaagtattctggggtttatttacctggccactcaacttagcggtcactacgatgtggctgcggcatttggtcaaaagccatttagtctgtcggtctttttattaacgattgctctctctgccggatggcaattaacgtttgccccttacgcctctgattattcccgctatttaccctctgatacgccagcaaaatcaatcttctttgccacctttctgggaaccacgcttggtgcgcaatgtgccatgacgtttggcgtacttgttgcggcctgtggtgctaacttcctgaaggatcaggttggttttatgggtgagttagccggacccaccttcgctattctgatttatatggtgattgtttgcggcaaactgacggtgaactgtttgaatgcctacggtggctttatgtcgattctggcgaccgtcagcgcctttaataatcgcagtcaggtttcacagcgtgttcgtgctgcctacgttgtagggttcgtgctgttgtcgatggtcgtcgcgctggcggcaagcgcagattttttgaataatttcaaaaacttcgttctgctgctgttgacggtatttgtgccgtggagcgccattaatctcatcgactactacttcatctcacaaggtaaaaccggtattccggcactttataccccggaagggcgttatggcgcgtataacaaaaccgctttgacgtgctatggcgtaggcgtgttggtgcagatccccttcctgaatcaaaaactgtatcagggacccatttctgtcctgatggatggggcggatatctcctggattgtcggcttgttaattaccgccgttatctattacccgtgggccaaacgcaccacctgcgttcctgcttatacgatttatcccgagtcttaa

SEQ ID NO: 10587 - DNA, 1698 bp, Escherichia coli
atgagtaagccttcagacccgcgtattgataccagccgtgtaatccatgcgccacacggtacgcagctgcactgcaaaaactggcaaattgaagcagcctaccggatgttgcagaacaaccttgatcccgacgttgccgaaaatccacagcatctggtggtgtatggtggtattggtcgtgcggcacgtaactgggagtgttttgacaaaatccttgaatcactgaaaaatctggaagctgatgagtcactgctggttcagtccggtaaacccgtaggcgtgtttaaaacgcataccgatgcgccgcgcgtattgattgccaactctaacctggtaccgcaatgggccaactgggatcatttcaatgaactggatcgtaaaggtctgttcatgtacggccagatgaccgctggctcgtggatctacatcggtagtcagggcattgtgcagggaacgttcgaaacctttgttgaagcgggtcgtcagcactacaacaattcgctgagtggaaaatggatcctgaccgcggggctcggtggtatggggggcgcacaaccgctggcggcgactctggcgggggcgtgctcattaaatatcgagtgccagcaaagtagcatcgacttccgtctgcgtacccgttatgtcgataaacaagcgaaagatcttgatgatgcactggcgctgattaaataccacaccgaacgcaaagaagccgtttctatcgcgctgctgggcaatgcggcggaaattgttcctgagctggtgaaacgtgcgcatcagggatcgatcaaaccggatctggtgaccgaccagacctccgctcacgatctggtctatggttacctgccaatgggctggagcgtagaacaatggcgtgctgcacagcaggatccacaacagcacgccagactgcaaaaagaagcggcgcagagttgcgtggcgcatgttcaggggatgctggacttccaggcgatggggatcccggttgtcgattatggcaacaacatccgccaggtggccttcaacgaaggtctgcaaaatgcctttgatttcccgggctttgttccggcttatattcgtccaatgttttgtgaaggcaaaggtccattccgttgggtggcgctgtctggcgacccggaagatatctataaaactgatgccaaaattaaagagttgttccccaataacgtactgacgcatcgctggctggatatggcgcgcgagcgcattgccttccagggacttccttcacgtatttgctggctggggcttggtgagcgtcacctggcggggctggcattcaacgaaatggtgcgcaacggtgaactaaaagcaccgattgtgattgggcgcgatcatcttgataccggttctgtcgccagcccgaaccgcgaaaccgaaagcatgcttgatggcagtgatgcggtttctgactggccgttgctcaacggtttgctcaacactgcagggggagcaacgtgggtatccctgcatcatggcggcggcgtcgggatggggtattcacaacacgccgggatggttattgttgccgatggtagcgaagaagccgaaaaacgtctggcgcgtgtgctggtgaatgactgtgcgtccggggttatgcgtcatgcggatgcgggttatgaagcggcaattgaatgtgccaaaaactatggtctgaaattaccgatgattcgctaa

SEQ ID NO: 10588 - DNA, 132 bp, Escherichia coli
atgataataaaacatgtctttatgacgaataatgaagatcttattttaaatatcattgtgttatgcgcactgtgtggtgtcggaacacctgttgttacgctaatatctggtcgttatcaacgcatttcttaa

SEQ ID NO: 10589 - DNA, 2685 bp, Escherichia coli
atgaataacgaacccttacgtcccgaccccgatcgtctgctggaacaagctgccgcgccgcatcgggggaagctgaaagtattcttcggtgcctgcgcaggcgtcgggaagacctgggcgatgctggcggaagcccagcgactgcgggcgcaagggctggatattgtggttggcgtggtagaaacccacggtcggaaagataccgccgccatgctgaaaggtctggctgttctgccgttaaaacgccaggcgtaccgtgggcggcacatcagcgagtttgatctcgatgccgccctcgcccgccgtccggcactgatcttaatggacgaactggcgcacagtaatgcgccaggttcacgtcatcctaaacgctggcaggacatcgaagagctgctggaagctggcattgatgttttcactaccgtcaacgttcagcatctggaaagtctgaatgatgtggtcagcggcgtcaccggaattcaggtacgggagaccgtgcccgatcctttttttgatgccgccgacgacgtagtactggtggacttgcccccggacgatctgcgccagcggctgaaagaaggcaaagtctatattgccgggcaggcggagcgcgccattgaacattttttccgcaaaggcaatctgatcgccctgcgcgaactggcactgcgccgtactgccgatcgcgttgatgagcaaatgcgcgcctggcgggggcatcctggcgaagagaaagtctggcacacacgcgacgcgatccttttatgcatcgggcataacaccggcagtgagaaactggtccgcgcggcggcgcggttggcctcgcgcctgggtagtgtctggcacgcggtgtatgttgaaacccctgccctgcatcgcttaccggagaaaaaacgtcgggcaattctcagcgccttacgtctggcgcaggagctgggcgcggagacggcaacactttctgatccagcggaagagaaagcggtagtgcgttatgcccgtgaacataatctcggcaagattattctcggtcgcccggcctcgcgccgctggtggcgtcgggaaacgtttgctgaccgactggcgcgaatcgcccccgatctcgatcaggtgctggtcgcgcttgatgaaccacccgcccgcacgattaacaacgcgccggatagccgctcttttaaagacaagtggcgggtacagattcagggatgcgtggttgccgccgcgttatgcgccgttatcaccttaattgccatgcagtggctgatggcgtttgatgccgccaacctggtgatgctgtatctgcttggcgtcgtggtggtggcactattttacggacgctggccttcggtggttgccaccgtcattaatgtggtgagtttcgatctcttttttatcgccccacgcggcacgctcgccgtctctgatgtgcaatatctgctgaccttcgcggtgatgttaaccgtcgggctggtgatcgggaaccttactgctggcgtgcgttatcaggcgcgggtagcccgttaccgcgaacaacgcacacggcacttatatgaaatgtccaaagctctggctgtgggccgtagttcgcaggatatcgccgccaccagcgaacagtttattgcctccacgtttcatgcccgtagccaggtgttgctgcctgatgacaacggtaaattgcagccgttaacacatccgcaaggaatgacgccgtgggacgatgccatcgcgcagtggagttttgataaaggcctgcctgcgggcgcgggcaccgacacgttacccggtgtaccgtaccagattttgccgctaaaaagcggcgagaaaacctacgggctggtggtggtggaaccggggaatctgcgccagttgatgatcccggaacagcaacgcctgctggagacgtttacgctgttagtcgccaatgcgcttgagcggctgacactgaccgccagcgaagaacaggcgcggatggcaagcgaacgtgaacagatccgcaacgccctgctggcggcactttcgcatgatttacgcacgccgcttacggtgctgttcggtcaggccgaaatcttaacgctcgatctggcaagcgaaggatcgccccacgcccgccaggccagcgagattcgccagcatgtgctgaacacgacccgactggtgaataatctactggatatggcgcgaattcagtccggcggctttaatttgaagaaagagtggttaacgctggaagaagtggtcggcagcgcgctgcaaatgctggaaccgggattatcatcgcccatcaacctgtctttgccagaaccgctgaccttaatccacgttgatgggccactctttgaacgggtgctgattaatctgctggaaaacgcggtgaaatacgcgggtgcgcaggccgaaattggtatcgatgcccacgttgagggcgaaaatctacaactggatgtctgggataacggccccggtcttccgccaggccaggagcagacgatattcgataagtttgcccgcgggaataaagagtcggcagtgccgggcgtcgggcttgggctggcaatttgtcgggcgattgtggatgtacacggcggcaccattaccgcgttcaaccgaccggaaggcggtgcctgttttcgtgttacacttccccagcaaaccgctcctgaacttgaagaatttcatgaggatatgtga

SEQ ID NO: 10590 - DNA, 651 bp, Escherichia coli
atgcgtgaagtgagtcagttagtaaatactgaagattcagcctggccaataatccagaattggttaaaagaagccacaaaccatgccgaactcttaccggttaataaagatttagccgaaaccgcactttatcaattacaggttacaacaaaatcaccgatgggtgcgcttgtctatggctccggaggtctgctgattgataacggttggttacgcatagcaggctctggtcacccccggttaccacgagatccagcaagttggacacaacgccctgaattcgcaagcgtgcgggctttacccatcgccgatgatgtcgcagggggaatttttgctcttaatggtggcgatcttggggaagatactggctgcgtttattattttgcgccagatacgctgaattgggaaagtctggaggttggatattctgagtttcttcagtgggcattatccggtgatttagataccttctatgaaaatgtacgctggccgcaatggcaagaagacgtaataaaattatcggcaacggaagccttcactttctaccctttcttatgggtacaatgtgaagaagcaagaacaagaaaagttatttcgcttactgaactctgggaaatgcagtatcaaatgaaagaaacaatcacgcaataa

SEQ ID NO: 10591 - DNA, 495 bp, Escherichia coli
atgaagaccaaaaggagtctggtcgtcagagtggcattaattaccgccacactactgctgacagcatgcgcccaacctgaacaatcatcattagctggtgactggttactgacccctaaagataaaaccagaggattaacggggagcattgcggtaaatattgcgccttcccggtgtaagacaaattgccgtggcgataacttacctgataatacccgccgctggcagttgtcaggcgggaacgaaaaagaacttacttatcttcatgatatgtcagcacaagaaaagaccggtttaaatcctgaatggcaatgctacacctcattttttatggggatttgccagggtaagcccggcactcgaccgatagttaatgaggattatgtcagcgaaagcggattttttggctcgatgatgcatgtcgggattattgagttgcgacgctgtcagtcagaaaattgccagcaagaattgaaagcgataaacacacattaa

SEQ ID NO: 10592 - DNA, 1671 bp, Escherichia coli
atggataatgcagaactcgccattggtatcgatctcggtactaccaatagtttaattgccgtctggaaagacggtgccgcgcaattaattccaaataagttcggtgaatatttaacaccatccataattagcatggatgaaaataatcatattttagtcggaaaaccggctgtatcacggcgtacttcgcatccggataaaacggcagcgttatttaaacgtgcaatgggcagtaataccaactggcggttaggcagcgacacatttaacgcgccagaactgtcctctttggtattacgctcattaaaagaagatgccgaagaatttctgcaacgtccgattaaagatgtggtgatctccgttccggcttatttcagcgatgaacaacgcaagcatacccgtttagcagcggagttagccgggttaaatgcggtacgcttaattaatgaacccacagcagctgcgatggcatatggcctgcatacgcaacaaaatacccgctcgctggtttttgatctcggtggcggcacgtttgacgtcacggtgctcgaatacgccacgccggtgattgaagttcacgcctccgctggcgacaactttcttggcggcgaagattttactcatatgctggtggatgaagttttaaaacgcgccgcagtggctaaaaacatgctcaacgaaagtgagctggcagccctgtacaccagcgtggaagcggcaaaatgcagcaatcaattaccgctgcaaattagctggcagtgtcaggaagaaacgcgtgagtgcgaattttacgagaacgaactggaagatttgtggttgccgctgctcaatcgcttgcgagtaccgattgaacaggcgttgcgcgatgcacgtctgaagccaagtcaaatcgacagtctggtgctggttggcggcgcatcacaaatgccgctggtgcagcgaatcgccgtgcgtctgtttggcaaattaccgtatcaaagttacgatccgagcaccattgtcgcgctgggcgcagcaatccaggccgcctgccgcttacgcagtgaagatattgaagaggtgatcctcactgatatttgcccttactcgttgggtgttgaagttaaccgccagggcgtttccggcattttctcgccgattattgaacgaaacaccactgtaccggtgtcgcgtgtagaaacttactcgaccatgcaccgggaacaggattcaattacggttaacgtctatcagggagaaaaccacaaagttaaaaataacattctggtggaatccttcgatgtgccgttgaagaaaaccggggcttatcagtcgattgatattcgctttagttatgatatcaacgggttgcttgaagttgacgtgcttctggaagacggcagcgttaagtccagagtcattaatcacagtcctgtaacattgagcgcacagcagattgaagagagtcggacgcggttatccgcattgaaaatttatccgcgcgatatgctcatcaaccgcacctttaaggccaaactggaagagttgtgggcgcgggcgctgggtgacgagcgagaagagatcggccgggtgatcaccgattttgatgcggcgttgcagtcaaacgatatggcccgcgtcgatgaagttcggcgacgggcgagcgattatttggctattgagatcccttaa

SEQ ID NO: 10593 - DNA, 1428 bp, Escherichia coli
atgaaaaattgctggaagattctcgaaatagaggaaacgactgacgtcgatattatccgccgcgcttatctggcgctgttaccgtcctttcatccagaaaccgatccgcagggttttaaacaacttcgtcaggcgtatgaggacgcgctacggattgcgcagtcgcctgctaaatctgtttggcaaccagaagaacatgaagttgcagaacatgaaattctgctcgcctttcgtgcgttactcgcctctgatagcgaacgttttctgccctctgcctggcagcgattcattcagcaattaaattattgctcgatggaagatattgatgaattacgctggtcgctgtgcacaatagccatgaacactgcccatttatccttcgagtgcgtggtgttattagcagaaagattgcggtggttgcaggaggaaaacgtcggggaaatagacgaagaagaactggaatcctttttatatgccattgcgaaggggaatgtttttaacttccagaccattctgcatctgcccgttgccgtacaaaatgacaccattgatttttaccaaatgttcgctcggatttggtcatcgcatccagaatggctgacattgtatttagcgcaacatcgcgcagtgattatccccgatgatgcaaatttgcacagaaatttactccgctggtatagcacaagccgtctggatatccccgaacttctggattacgcccggtcgtggcgggaagctgaacctgataatgaagatgcgcgttattatgaatacgcgcaacgcgtctattgtggagaaggcgaaagcctgctggcagaactttgtgactactggcgcgagtatccctccacccaggcggatgctttaatgttgcaatggtgccgtcagcatcgggtcgattattacccgttagtggtgatgatgattgaagcgcgtgatctggttaacgatcagggaaaaccgctactttatgtccctggtgacagcgctcgtacgcgttttcatttatacgaaatactcagtgatgaaaaactctctgcgctggggcgttctctggtcgagatggttttgcacaaaggacgtaagccgcggatctcactcacgcgtgatacagaacataccttatggtcattatatctagttgccaaacaattagtgcaggccagccaaccgacagaagaatcattaatgccgattgtgagccgccttgatgcagaagatcgttgtcctctggaagcattaattattcgacggttattaattcaggcggcgaattttaccgagaagcaaaccgtcgaaccggagccgcaaccgcagtcgatgcccgttgacgatggtgggccgggctgtctgggcgtcatcaaaattattttctacatttttatctttgccggtttaatagggaaaatactccatctgttcgggtga

SEQ ID NO: 10594 - DNA, 708 bp, Escherichia coli
atggacatggagtcgcaaaaaatattgtttgcactttccactccgatggaaatacgcaatgaatgctgtttaccttcgcattcatcccccaaaatgtatttaggtacacgcttttttgacctttcttcctcctggggaattgatgaccgtgatgacctgctgcgcacaattcaccgaatgatcgataacggtcatgccgctcggttggcagggctttatcaccgctggtttcgttattctccgtgtgaatggcgtgactatcttgctgaactaaatgagcaaggtcaggcttatgcgcaatttgtcgccagcaccgccgaatgctgtggcgaagggggaatcaaagcctgggattatgtccggatgggttttttaagccgaatgggcgtacttaataactggttgagtgaagaagaaagcctgtggatccagtcgcgcattcatctacgggctctacgttattatagtaactggcagcaatactttgccggttatacctttggtcggcaatattggcagtctcccgaggatgatgatctgcctttattacgtgaattcttagcgcgtaaagaatacgacgattccggcaatgatatgttttatcaattatttgccagtgacgatgcatattacgcgaccttaccctggcaaccactggctgactaccccacatgcccggaaacgcttaaggatatgagcgacctatga

SEQ ID NO: 10595 - DNA, 4569 bp, Escherichia coli
atgaacaggaccaatctccattattgtcgccgctcagtactttccttattgatatctgccttgatatatgccccgcccgggatggcggccttcactcctgatgttattggtgtggtaaacgatgagactgtagatggcagccaaaaagtagatgaacgaggtacaacaaataacactcatattatcaaccatggccagcagaatgtttatggtgggatatctaatgaaagtcttattgaatctggtggatatcaagatataggacgtcataacaattatgtggggcaggctaataatacaaccattaacgggggcagacagacaattcatgacgggggtatttccacaggtacaataatcgagagtggcaatcaggacgtttatacaggtggtatcagcaatggaacgacaattaaggggggtaattcacacataagtggggggactgcgaatggaacaatcattgatggtggcagccaacgagtaacaactcaggggcatgtcgacagtacaacgataaataagtctggctctcaggacgtagtacaaggaagtctggcaacgaacacaaccataaatggtggtcgacagtatgttgaacagagcacagtagaaacaaccaccatcaaaaatggcggtgagcaaagagtatatgagagccgtgcgctggacactacgattgaaggcggaactcagtctctgaatagtaattcaacggcaaaaaatacgcagatctattctggtggtacgcaaattgttgattacaccagcacctcggatgttattgaaatttattccggtggcgtgcttgatgttagaggtggtatggcaacaaatgttactcagcacgatggagccgctttaaaagtaacgacttacgatttgacggtgagcggtacgaatagtgaaggggcattctccatccacaataacgtggcagacaatgtgttgctggaaaatggtggtcatttagacgtatatggttcggcaaccaggacgataattaaagataaaggaacaatgtcagttttaacgaatgctaaagctgatgcgacccgaatagataatggcggggttatggatgtcgccggaaacgcgaccaataccataatcaatggtggtacacagaatattaataatcatggtattgccactggcaccaatatcaacagtggaacgcaaaatatcaagagcggcgggaaagctgacacgacaaatatatcctccgggagccggcagattgttgagaaagatggtacggcaactggcagcaatattagcgctggaggctcgctgattgtctataccggcggtattgcacatggggttaaccaggagacgggcagtgctttagttgccaacacgggcgcagggactgatatcgaaggatacaacaagctctctcgcttcactattatcggaggggaggctaattatgttgtgctggaaaataccggcgaactgacggtagtggctaaaacctcggcgaaaaatactaccattgatgctggcggtaagctgattgtccagaaggaggctaaaacagatagcaccagacttaataatggcggcgttctggaggttcaggacggtggtgaggctaagcatgttgagcaacaatccggcggcgcattaattgcttccacgacctccggaacacttatcgaaggaaccaacagttatggtgatgctttctacatcaggaattcagaagctaaaaatgtagtgctggaaaacgctggctcattaacagtcgtcactggttcccgggcagttgacacgattattaatgccaacggcaaaatggatgtttatggaaaagatgttggtactgtacttaatagtgcgggtacccaaacaatatatgccagtgccacttctgaaaaagcaaatatcaaaggtggcaagcaaacggtatatggtttagccactgaggcaaatatcgaaagtggtgaacaaattgttgatggtgggtcaacagataaaacgcacatcaaaggcggcacgcaaaccgttcagaattatggtaaggcgatcaataccgatatcgtctctggcctacaacaaattatggtaaacgggacagcggaaggttccattattaatggcggttcacaggtagttaatgagggcggtctggctgaaaactcggtgcttaatgacggcggcactctcgatgtgcgggagaaaggcagcgcaacggggatacagcaaagtagccagggcgcgttggttgcaaccaccagagcgacgcgggtcacagggacacgcgctgatggcgtcgcgttcagcatcgagcagggtgcggcgaacaatatcctgctggcaaatggcggcgtgttaaccgtggagtcagacaccacttccgccaaaacacaggtcaatgcgggcgggcgggagatcgtcaaaacaaaagccactgcgacaggcacgacgctcaccggcggcgaacaaatcgtcgagggggtggcgaatgagacaacgattaacgacggcggaatacaaacagtttcggctaacggtgaggcagtaaaaacaacgattaatgaaggcggtacgctgacagtcaacgataatggcaaagcgacagatatcatccagaacagcggtgccgctctccatacgagcacggctaacggtattgaaatcagcggtactcaccagtacggtaccttttccattgccggcaatttagcgaccaatatgttgctggaaaatggcggtaatttattggtattagcaggtaccgaagcccgtgactccaaggttggcaagggtggtgcaatgcaaaacctgggtcaggactccgccacaaaggttaactctggcgggcaatatacccttgggcggtcaaaagatgagtttcaggctctggcccgggcagaagatctccaggtcgctggcgggacggcaatcgtctatgcaggtacgctggcggatgcatcggtcagtggcgcgacaggaagcctgtcgttaatgacgccacgggataatgttacgccagttaaactcgaaggggcgatccggattaccgatagcgcgacattaactatcggaaatggcgtcgatacgacgcttaccgacctgacggctgccagccggggcagtgtctggcttaacagcaataattcctgtgcaggtaccagcaactgcgaatatagagtaaacagtttgctcctcaacgacggtgatgtttatttatcagcacaaacagcagcgcctgccacaactaacggtatctacaatacgctgacaaccagtgaactttccggcagcggtaatttctacctgcataccaacgttgcaggctcccggggcgatcaactggtcgtcaacaacaacgccactggtaattttaaaatctttgttcaggataccggcgtcagccctcagtctgacgacgcgatgacgctggtgaaaacagggggaggggatgcttcgtttacgctgggtaataccggcggtttcgttgatcttgggacctatgagtatgtcctgaaaagcgacggcaacagcaactggaacctgaccaatgatgtcaaacccaacccggaccccaacccaaatccgaagccggatccaaaaccagacccaaaaccggatccgaaaccagacccgactcccgatccaacgccgacacccgtcccggagaaacgcatcacgccttctacggcagccgtactcaatatggcagcaacattaccgttggtctttgatgctgagctaaacagtattcgcgagcggttgaacataatgaaagcgagtccacacaacaataatgtctgggggacgacgtataacacccgtaataatgtcaccaccgatgcgggtgccgggtttgagcagacgctgaccggaatgacggtggggatcgatagccgtaatgatattcctgaggggattgcgacgctgggcgcttttatgggttattcccattcacatatcggttttgatcgtggaggacatggcagtgtgggcagttattctctggggggctatgccagctgggaacatgaaagtggtttctatctggacggtatcgtgaagctgaaccgctttgaaagtaacgtagccggtaaaatgagcagcggtggagccgccaacggcagttatcgcagcaacgggctgggtggtcacattgaaaccgggatgcgatttaccgatggtaactggaacctgacgccgtatgcatcgttaacggggttcaccgctgataaccccgaatatcatttatccaatggcatggaatcgaaatcagtcgatacccgcagtatatatcgtgaactgggcgcaacgctgagttacaacatgcgtctggggaacggcatggaagttgagccgtggctgaaggcggctgtgcgcaaagaatttgtcgatgataaccgggtgaaagtgaataatgacggtaattttgtcaatgatttgtcgggcagacgtggaatataccaggcaggtattaaagcctcattcagcagttcgttaagcgggcatctcggggtggggtatagccatggtgccggtgtggaatccccgtggaacgcagtggctggtgtgaactggtcgttctga

SEQ ID NO: 10596 - DNA, 858 bp, Escherichia coli
atggaatcacataatttatatgacaaccaaatagataagatttcacctgtagctaaaaactcgcagcaagttaaaggtcactatggagataaatttaaagaaatgcacatgttcattaaccagatgagcaatgcacttcaacaggctccatctttgtcagagtcaaaggaacacaccgtagatattcaagaaaaaacgaataagtttgtgcagcattttcagcgggtattatttgataaaaatggaaggtcatcagagtttctacttaatttttatgagtgttgctataagtttttaccaagagcgcagcctcaagataaaatcgatagctataattcagcactgcaagctttttccatcttttgttcatctacgttgacacataataatgtagggtttaatttcaaattatttccagaagtcaagctgtctggaggagatcttgaaacggtattcaaatacaaaaatggcaattttgtctgggagatagccagaattaaaattactctcccaaaagaagagggttgtttatacaatttaggtggattggactttaaggggtgcttcttttctggacagaacttcagtaactatgatattaaatatgtgaactgggggacgtcattgtttgatgttgatactccgtgtatttttaatacgcctgctaacaatgagagttatgaaaaatcattagaacgcgtcagcgaaaacggtttaagtggagtcttgtctgatcgtaataaaaaaataaaactcatcacgggcgtggcaccattcgatgatattttatttatggatgatgactttgatgatccttccactaaggatgatcccgtggagaatagtccccttgtataa

SEQ ID NO: 10597 - DNA, 657 bp, Escherichia coli
atgccatctacacgctatcaaaaaattaatgcccatcactatcgttatatatgggccgttggtgatattcatggtgactatcaattattacaatcccgcttacatcaactctctttttgccctgaaaccgacttacttatttccacaggcgataatattgatcgtgggccgaagagtcttaacgtgctgcacctgctaaaccaaccctggtttacgtcggttaaaggcaaccacgaagcgatggcgttggatgcattcgaaactggcgatggaaatatgtggcttgccagcggtggtgactggtttttcgatttaaatgattcagagcaacaagcggcaatagatctgttgctgaaattccatcaccttccacatattattgaagttactaacgacaacacaaaatatgtcatcacacatgcagattatccggggaatgaatatctctttggtaaagaaatagcggagagcgaattactctggcctgttgatcgtgtgcagaaatcgcttaatggcgagttacaacaaataaacggcgctgattattttatatttggacatatggtgtttgataacattcagacgttcgcaaaccagatttatattgataccggatcgccgaaaagcgggcggctgtcattttataaaataaagtaa

SEQ ID NO: 10598 - DNA, 285 bp, Escherichia coli
atgagtatgttggtcgtggtcactgaaaatgtacctccgcgcttacgaggcagattagccatctggttgttggaggtacgtgcaggggtgtatgtaggtgatgtatccgcaagaatccgtgaaatgatctgggaacaaatatctggactggcggaagaaggcaatgtggtgatggcatgggctacgaatacggaatcgggatttgagttccagacatttggggtaaacaggcgtactccggtagatttggatggtttaaggttggtctcttttttacctgtttaa

SEQ ID NO: 10599 - DNA, 918 bp, Escherichia coli
atgacctggcttccccttaatcccattccacttaaagatcgcgtctccatgatctttctgcaatatgggcagatcgatgtaatagatggcgcgtttgtacttatcgacaagacagggatccgcactcatattcctgttggctcggttgcctgcatcatgttggaacctggtacacgggtttcgcatgcagctgtacgcctggctgcgcaagttggaacattattggtatgggtgggggaagcgggcgttcgtgtttatgcttctggtcagcctggtggtgcgcgttcagataagctgctctatcaggcaaaacttgctctggatgaagatttgcgtctgaaggtcgtacgtaaaatgtttgaacttcggtttggagaacctgcgcctgcccggcgctccgtagagcaactcagaggtatagaaggaagtcgtgtgcgagcaacctatgtacttctggcgaagcaatacggggtgaaatggaatggacgtcgttacgatccgaaagactgggaaaagggcgatacggtcaaccaatgcattagcgctgcaacttcttgtttatatggcgtaactgaagcggcgatacttgcagctggttatgcaccagctattgggtttgtgcatacaggaaagcctctttcctttgtttacgatatcgcggacatcattaaatttgacactgttgtaccgaaagcttttgagatagcgcgtcgtaatcctggtgagccggaccgggaagtccgtttggcgtgcagggatatttttcgcagtagtaaaacattagccaaattgattccgcttatagaggacgtgcttgctgctggagaaatacaaccgccggccccacctgaagatgcacagcctgttgccattccgcttcctgtttcactgggagatgcaggccatcggagtagctga

SEQ ID NO: 10600 - DNA, 600 bp, Escherichia coli
atgtatctcagtaaagtcatcattgccagggcctggagcagggatctttaccaacttcaccagggattatggcatttatttccaaacagaccggatgctgctcgtgattttctttttcatgttgagaagcgaaacacaccagaaggctgtcatgttttattgcagtcagcgcaaatgcctgtttcaactgccgttgcgacagtcattaaaactaaacaggttgaatttcaacttcaggttggtgttccactctattttcggcttcgggcaaatccgatcaaaactattctcgacaatcaaaagcgcctggacagtaaagggaatattaaacgctgtcgggttccgttaataaaagaagcagaacaaatcgcgtggttgcaacgtaaattgggcaatgcggcgcgcgttgaagatgtgcatcccatatcggaacggccacagtatttttctggtgatggtaaaagtggaaagattcaaacggtttgctttgaaggggtgatcaccatcaacgacgcgccagcgttaatagatcttgtacagcaaggtattgggccagctaaatcgatgggatgtggcttgctatctttggctccactgtga

SEQ ID NO: 10601 - DNA, 675 bp, Escherichia coli
atgagatcttatttgatcttgcggcttgctgggccaatgcaagcctgggggcagccgacctttgaaggaacgcgacctaccggaagatttccgacccgaagcgggttattagggctactcggtgcttgtcttgggatccaacgtgatgatacttcttcattacaggcgttatcagagagtgtgcaatttgcagtgcgctgcgatgaactcattcttgacgatcgtcgtgtgtctgtaacggggttgcgtgattaccatacagtccttggagcgcgagaagattaccgtggtttgaaaagtcatgaaacgattcaaacatggcgcgaatatttatgtgatgcctcctttaccgtcgctctctggttaacaccccatgcaacgatggttatctcagaacttgaaaaagcagtattaaagcctcggtatacaccctacctggggcggagaagttgcccactaacacacccgctttttttggggacatgtaaggcatcggatcctcagaaggcgctattaaattatgagcccgttggcggcgatatttatagtgaggaatcagttacagggcattatttaaaatttacggcgcgcgacgaaccgatgatcaccttacctcgacaatttgcttcccgagaatggtatgtgattaaaggaggtatggatgtatctcagtaa

SEQ ID NO: 10602 - DNA, 1092 bp, Escherichia coli
atgtctaactttatcaatattcatgttctgatttctcacagcccttcatgtctgaaccgcgacgatatgaacatgcagaaagacgctattttcggcgggaaaagacgagtaagaatttcaagtcaaagccttaaacgtgcgatgcgtaaaagtgattattacgcacaaaatattggtgaatccagtctcagaacaattcatcttgcacaattacgtgatgttcttcggcaaaaacttggtgaacgttttgaccaaaaaatcatcgataagacattagcgctgctctccggtaaattagttgatgaagccgaaaagatttctgccgatgcggttactccctgggttgtgggagaaatagcctggttctgtgagcaggttgcaaaagcagaggctgataatctggatgataaaaagctgctcaaagttcttaaggaagatattgccgccatacgtgtgaatttacagcagggtgttgatattgcgcttagtggaagaatggcaaccagcggcatgatgagtgagttgggaaaagttgatggtgcaatgtccattgcgcatgcgatcactactcatcaggttgattctgatattgactggttcaccgctgtagatgatttacaggaacaaggttctgcacatctgggaactcaggaattttcatcgggtgttttttatcgttatgccaacattaacctcgctcaacttcaggaaaatttaggtggtgcctccagggagcaggctctggaaattgcaacccatgttgttcatatgctggcaacagaggtccctggagcaaaacagcgtacttatgccgcttttaaccctgcggatatggtaatggttaatttctccgatatgccactttctatggcaaatgcttttgaaaaagcggttaaagcgaaagatggctttttgcaaccgtctatacaggcttttaatcaatattgggatcgcgttgccaatggatatggtctgaacggagctgctgcgcaattcagcttatctgatgtagacccaattactgctcaagttaaacaaatgcctactttagaacagttaaaatcctgggttcgtaataatggcgaggcgtga

SEQ ID NO: 10603 - DNA, 483 bp, Escherichia coli
atggctgatgaaattgatgcaatggctttatatcgagcctggcaacaactggataatggagcatgtgcgcaaattagacgtgtttcagaacctgatgaattacgcgatatccctgcgttttataggctggtgcaaccttttggttgggaaaacccacgtcaccagcaggctcttttgcgcatggtgttttgcctgagcgcaggaaagaatgtcatccgacatcaggacaaaaaaccggagcaaacaacaggtatctcgttgggaagagctttagccaatagtggaagaattaacgagcgccgtatctttcaattaattcgggctgacagaacagccgatatggtccagttacgtcgattacttactcacgccgaacccgtacttgactggccattaatggccaggatgttgacctggtggggaaagcgcgaacgccagcaacttctggaagattttgtattgaccacaaacaaaaatgcgtaa

SEQ ID NO: 10604 - DNA, 1509 bp, Escherichia coli
atgaatttgcttattgataactggatccctgtacgcccgcgaaacgggggggaagtccaaatcataaatctgcaatcgctatactgcagtagagatcagtggcgattaagtttgccccgtgacgatatggaactggccgctttagcactgctggtttgcattgggcaaattatcgccccggcaaaagatgacgttgaatttcgacatcgcataatgaatccgctcactgaagatgagtttcaacaactcatcgcgccgtggatagatatgttctaccttaatcacgcagaacatccctttatgcagaccaaaggtgtcaaagcaaatgatgtgactccaatggaaaaactgttggctggggtaagcggcgcgacgaattgtgcatttgtcaatcaaccggggcagggtgaagcattatgtggtggatgcactgcgattgcgttattcaaccaggcgaatcaggcacctggttttggtggtggctttaaaagcggtttacgtggaggaacacctataaccaccttcgtatgtgggatcgatcttcgctcgacggtattactcaatgtcctcacaatacctcgtcttcaaaaacaatttcccaatgaattacatacggaaaaccaacctacctgggttaagcctgtcaaacccaatgaatctgtgccagcttcgtcaattgggtttgtccgtggcttattctggcaaccagcgcatattgaattatgcgatcccattgggattggtaaatgttcttgctgtggacaggaaagcaatttgcgttataccggttttcttaaggaaaaatttacctttacagttaatgggctatggccccatccgcattccccttgtctggtaacagtcaagaaaggggaggttgaggaaaaatttcttgctttcaccacctccgcaccatcatggacacaaatcagccgagttgtggtagataagattattcaaaatgaaaatggaaatcgcgtggcggcggttgtgaatcaattcagaaatattgcgccgcaaagtcctcttgaattgattatggggggatatcgtaataatcaagcatctattcttgaacggcgtcatgatgtgttgatgtttaatcaggggtggcaacaatacggcaatgtgataaacgaaatagtgactgttggtttgggatataaaacagccttacgcaaggcgttatatacctttgcagaagggtttaaaaataaagatttcaaaggggccggagtctctgttcatgagactgcagaaaggcatttctatcgacagagtgaattattaattcccgatgtactggcgaatattaatttttcccaagctgatgaggtaatagctgatttacgagacaaacttcatcaattgtgtgaaatgctatttaatcaatctgaagctccctatgcacatcatcctaaattaataagcacattagcgcttgcccgcgccacgctatacaaacatttacgggagttaaaaccgcaaggagggccatcaaatggctga

SEQ ID NO: 10605 - DNA, 2667 bp, Escherichia coli
atggaaccttttaaatatatatgtcattactgggggaaatcctcaaaaagcctgacgaaaggaaatgatattcatctgttgatttatcattgcctggatgttgcagctgttgcagattgctggtgggaacaatcagtcgtactacaaaatgctttttgccaaaatgaaatgctatcaaaacagatggtgaaagcctggctgttatttttcattgcccttcatgatatcggaaagtttgatatacgattccaatataaatcagcagaaagttggctgaaattaaatcctgcaacgccatcacttaatggtccatcaacacaaatgtgccgtaaatttaatcatggtgcagccggtctgtattggtttaaccaggattcactttcagagcaatctcccggggattttttcagtttttttgatgccgctcctcatccttatgagtcctggtttccatgggtagaggccgttacaggacatcatggttttatattacattcccaggatcaagataagtcgcgttgggaaatgccagcttctctggcatcttatgctgcgcaagataaacaggctcgtgaggagtggatatctgtactcgaagcattatttttaacgccagccgggttatctataaacgatataccacctgattgttcatcactgttagcaggtttttgctcgcttgctgactggttaggctcctggactacaacgaatacctttctgtttaaagaggatgcaccttccaacataaatgctctaagaacgtatttccaggaccgacagcaggatgcgagccgggtattggagttgagcggccttgtatcaaataagcgatgttatgaaggtgttcatgctctactggacaatggctatcaacccagacaattacaagtgttagttgatgctcttcctgcagctcccgggctgacggtgattgaggcacctacgggatcaggtaaaaccgaaacagcgctggcctatgcctggaaacttattgaccaacaacttgcggatagtgttatttttgccctccctacacaagctactgcaaatgcaatgctcagcagaatggaagcgaacgcgagccgtttatttacctccccaaatcttattcttgctcatggtaattcacgttttaaccacctttttcaatcaataaaatcacgcgcatttactgagcaggggcaagaagaagcatgggttcagtgttgtcagtggttgtcacaaagcaataagaaagtgtttcttgggcaaatcggcgtttgcacgattgatcaggtgttgatatcggtattgccagttaaacaccgctttatccgtggtttgggaattggtcgaagtgttttaattgttgatgaagttcatgcttacgacacgtatatgaacggcttgctggaggctgtgctcaaggctcaggctgatgtgggggggagtgttattcttctttccgcaactctaccaatgaaacaaaaacagaaacttctggatacttatggtctgcatacagatccagaggaaaataactccgcatatccactcattaactggcgaggtgtgaatggtgcacaacgttttgatctgttagctcattcagaacaactcccgccccgcttttcgattcggccagaacctatttatttagctgacatgttacctgaccttaggatgttagagcgaatgatcgtagcggcaaatgcgggtgcacaagtctgtcttatctgcaatttggttgatgttgcacaactatgccaccaacggttaaaggaactaaataacacgcaagtagatatagatttgtttcatgcgcgctttacgctgaacgatcgtcgtgaaaaagagaatcgagttattagcaatttcggcaaaaatgggaagcgaaatgttggacggatacttgtcgccacccaggtcgtggaacaatcactcgacgttgattttgattggttaattactcagcattgccccgcagatttacttttccaacgattgggccgtttacatcgccatcatcgcaaatatcgtcccgctggttttgaggttcctcttgccagcgttttgctgcctgatggcgaaggttacggacgacatgagcatatttatagcaacgttagagtcatgtggcggacgcagcaacatattgaggaacttaatggagcatccttatttttccctgatgcctaccggcaatggctggatagcatttacgatgatgctgaaatggatgagccagaatgggtcatcaaaggcatggataagtatgaaagtgctgagtgtgaaaagaggttcaaggctcgcaaggttctgcagtgggctgaagaatatagcttgcaggataacgatgaaacaattcttgcggtaacgagggatggggaaatgagcctgccattattgccttatttacaaacgtcttcaggtaaacaactgctcgatggccaggtctacgaggacctaagtcatgaacagcagtatgaggcgttagcacttaatcgcgtcaatgtacccttcacctggaaacgtaatttttctgaagtagtagatgaagatggggtactttggctggaagggaaacagaatcaggatggatggatctggcagggtaataatattgttattacctacactcgggatgaagggatgaccagagtcatccctgcaaatcccaaataa

SEQ ID NO: 10606 - DNA, 1272 bp, Escherichia coli
atggaagacgactgcgacattattattattggtgccggtattgcaggcaccgcttgcgcgttacgctgcgcgcgagcgggtttatccgttttgttactggaacgcgctgaaatccccggcagcaaaaatctttccggcgggcgtttatatacccaggcgctcgcggaactcctcccacaatttcatctgaccgcgcctcttgaacgacgcatcactcacgaaagcctttccctgttaacgccggatggcgcaacgacgttttccagcttacagcccggcggtgaatcctggagtgtattacgtgcacggttcgatccgtggctggttgccgaagccgaaaaagaaggtgtcgaatgcatccccggtgcgacggtggatgcgttgtatgaagaaaacggcagggtgtgtggtgtcatttgtggtgacgatattctccgcgcctgttatgtggtgctggcagaaggtgccaacagcgtcctggctgaacgtcacgggttagtgactcgtcctgctggcgaagcgatggcgttggggatcaaagaagtgctgtcgctggaaacatccgctattgaagaacgttttcatctggagaataacgaaggcgcagcgttgctgttcagcggcgggatctgtgatgacttacccggcggcgcatttctttatactaatcaacaaacgctctcgttagggattgtttgcccgctctcttcccttacgcaaagtcgtgttccggcaagcgagctgctggctcgctttaaaacgcatccggcagtgcgcccgcttatcaaaaacacggaatcactggagtatggtgcgcatctggtgccagaaggtggcttgcacagtatgccggtgcaatacgccggtaacggctggctgctgctgggcgatgcgttgcgcagttgcgtcaataccggaatttccgtgcgcggcatggatatggcgctaactggcgcgcaggcggcggcacaaacgctgataagcgcctgccagcaccgcgagccgcaaaatctgtttgcgctttatcatcacaacgtagagcgcagcctgctgtgggatgttctacaacgttatcagcatgttccggcgcttttgcaacgccctggctggtatcgggcgtggcctgcgttaatgcaggatatttcccgcgatttatgggatcagggtgataaacctgttccaccgctgcgccagttattctggcgtcatttacgtcgtcacggcctgtggcatctggcgggcgatgttatcaggagtctgcgatgtctgtag

SEQ ID NO: 10607 - DNA, 1374 bp, Escherichia coli
gtgaccgctttttctaccctgaatgttttgcctcccgcccaactcacgaaccttaatgagttgggttatttaactatgacgccggtgcaggctgccgcgcttccggcgatccttgccggaaaagatgttcgcgtgcaggcgaaaaccggcagcggcaaaacggcggcttttggcctcggcttgttacagcaaattgatgcgtcgctatttcaaacccaggctttagtgctgtgtcctacgcgtgaactggcggatcaggtggcaggtgaattgcgtcggctggcgcgttttctgccaaataccaaaattttgacgttgtgcggtggtcaaccgttcggtatgcagcgtgattcgttgcaacatgcgccgcatattatcgtggcaacgccgggccgtttgctggatcacttgcaaaaaggcacggtatcactggatgcgctgaatactttggtgatggatgaggccgaccgcatgctggatatgggatttagcgatgccattgatgatgtcatccgttttgcgcctgcatctcgacagacgcttctgttttcggcaacctggccggaagccatcgccgcaatcagcggaagagtgcagcgcgatcctttagcgattgaaattgactcaacagatgctctgccacctattgaacaacaattttatgagacatccagcaaaggcaaaattccgttgttgcaacggttattaagtttgcatcagccatcctcttgcgtggtgttttgcaataccaaaaaagattgccaggctgtctgcgacgcgctgaatgaagtagagcaaagtgcattgtcgttacacggcgatctggagcaacgtgatcgcgatcagaccctggtacgttttgctaacggtagcgcccgtgtactggttgcgactgatgttgctgcgcgtggtctggatattaaatcgcttgagctggtggtgaactttgagctggcgtgggaccctgaagttcatgtacatcgcatcggccgtacagcgcgtgcaggaaatagcggtctggcgatcagtttctgtgccccggaagaagcacagcgggccaatatcatttctgacatgttgcagataaaacttaactggcaaacgccgccagttaatagttccattgtgccgctggaagcagaaatggcaacgttatgtatcgatggcgggaaaaaagccaaaatgcgcccgggtgatgtattaggtgcgctgacaggagacatcgggcttgatggcgcagatattggcaaaatcgccgtgcatccggcgcatgtctatgtcgcggtgcgtcaggctgttgctcataaagcatggaaacagttacagggcgggaagattaaaggaaaaacgtgccgggtgcggttattaaaataa

SEQ ID NO: 10608 - DNA, 3525 bp, Escherichia coli
atgattactattgacggtaatggcgcggttgcttcggtggcgtttcgcaccagtgaagttatcgccatctaccctattacccccagttccacgatggcagaacaggctgatgcctgggccggaaacggcttgaagaacgtttggggagacacaccacgcgtggttgaaatgcagtcggaagcgggtgctatcgctaccgtgcatggcgctttgcagacgggtgccctttcaacatcgtttacgtcatcgcagggtttgctgctgatgatcccgacgctgtacaaactggcaggcgaactgacgccatttgtcctgcatgtagcggcacgtaccgttgccacacatgcactctctatttttggcgatcattccgacgttatggcggtgcgccagacgggttgcgcgatgttgtgtgcggctaacgtccaggaagcgcaagactttgctctcatttcgcacatcgcaacgctgaagagccgcgtgccatttattcatttctttgatggtttccgcacgtcccacgaaatcaataaaattgtcccgctggccgatgacactattcttgatctcatgccgcaggccgaaattgatgctcatcgcgcccgggcgctcaacccggaacatccggtgatccgcggtacgtccgccaatcctgacacttatttccagtctcgcgaagccaccaacccctggtacaacgcggtctatgaccatgttgaacaggcgatgaatgatttcgctgccgcgacaggtcgtcagtatcagccgtttgagtattacgggcatccgcaagcggaacgggtgattatcctgatgggctctgccattggcacctgtgaagaagtggttgatgaactgctaacccgtggcgaaaaagtcggcgtgctgaaagttcgcctgtaccgtcccttctccgccaaacacttgctacaagctctgccgggatccgtacgcagcgtggcggtactggacagaaccaaagaacccggtgcccaggcagaaccgctctatctggatgtgatgaccgcactggcagaagcctttaataatggtgagcgcgaaaccctgccccgtgtcattggtgggcgctatggtctttcatccaaagaatttggcccggactgtgtactggcggtatttgccgagctcaacgcggctaaaccgaaagcgcgctttacggttggtatttacgatgatgtgaccaatctgtcactgccgttgccggataacaccctgccaaactcggcgaaacttgaagccttgttttatggccttggtagtgatggcagcgtttccgcgaccaaaaacaatatcaagattatcggtaattccacgccgtggtacgcacagggctattttgtttacgactccaaaaaggcgggcggcctgacggtttctcaccttcgcgtgagcgagcagccgattcgttccgcttatctgattccccaggctgattttgttggctgccaccagttgcagtttatcgataaatatcagatggctgaacgtttaaaacctggcggcattttcctgctcaacacgccgtacagcgcagatgaagtatggtcgcgcttgccgcaggaagttcaggccgtgttaaaccagaaaaaagcgcgcttctatgtgattaacgcggcgaaaatcgcccgcgaatgtggcctggcggcccgtattaataccgtcatgcagatggcttttttccatcttacgcaaattctgcctggcgatagcgccctcgcagaattgcagggtgcgattgccaaaagttacagtagcaaaggtcaggatctggtggaacgcaactggcaggctctggcgctggcacgtgaatccgtagaagaagttccgctgcaaccagtaaatccgcacagcgccaatcgaccgccagtggtttccgatgccgcccctgatttcgtgaaaaccgtaaccgcggcgatgctcgccgggcttggtgatgccctccccgtttcggcgctgccgccagacggcacctggccgatgggcaccacgcgctgggaaaaacgcaatatcgccgaagagatccccatctggaaagaggaactctgtacccaatgtaaccactgcgtcgctgcttgcccacactcagctattcgcgcaaaagtggtaccgcctgaagcgatggaaaacgcccctgccagcctgcattcgctggatgtgaaatcgcgtgatatgcgcgggcagaaatatgtcttgcaggtggctccggaagattgcaccggttgtaacctgtgcgtcgaagtttgcccggcgaaagaccgtcagaatccagagattaaagccatcaatatgatgtcgcggctggaacatgtcgaagaagagaaaatcaattacgatttcttcctcaacctgccagaaatcgaccgtagcaaactggaacgtattgatattcgtacatcacagctgattacaccgctgtttgaatattccggtgcttgctccggttgtggcgagacgccgtatattaaattgctgactcagctgtatggcgaccggatgttgatcgctaacgctacgggatgttcttcaatttatggcggtaacctgccctctacaccgtatactaccgatgccaacggtcgcgggccggcatgggcgaactcgctgtttgaagataacgccgaatttggcctgggtttccgcctgacggtcgatcaacaccgtgtccgcgtgctgcgtctgctggatcaatttgccgataaaatcccggcggaattactgactgcgttgaaatcagacgctacgccagagattcgtcgtgaacaggttgcagctttacgccagcaactcaacgatgttgccgaagcacatgaactgctacgtgacgcagatgctctggtggaaaaatcaatctggctgattggtggtgacggctgggcttacgatatcggctttggtggtctggatcatgtattgagtttgacggaaaacgtcaatattctggtgctggatacgcaatgctattccaacactggtggtcaggcgtcgaaagcgacaccgctgggtgcagtaactaagttcggcgagcacggcaaacgtaaagcgcgtaaagatcttggcgtcagtatgatgatgtacggtcatgtttatgtggcgcagatttctctcggcgcgcagctgaaccagacggtgaaagcgattcaggaagcggaagcgtatccgggaccatcgctgatcattgcttatagcccgtgtgaagagcatggttacgatctggctctcagccacgaccagatgcgccaactcactgctaccggcttctggccgttatatcgctttgatcctcgtcgtgccgatgaaggcaaactaccgctggcgctggattcacgcccgccgtcagaagcactggaagaaacgttacttcacgagcagcgtttccgtcgtctgaattcgcagcagccagaagtggcagaacagttatggaaagatgctgcagctgatttgcaaaaacgctatgacttcctggcacaaatggccggaaaagctgaaaaaagcaacaccgattaa

SEQ ID NO: 10609 - DNA, 591 bp, Escherichia coli
atgccaatttatcagatagacggtctgactccggttgtgccagaagagagttttgtccatccgacagcggtattgatcggcgatgttattctcggcaagggcgtttacgttgggccaaatgccagcctgcgtggcgattttggtcgtatcgtggtgaaagatagcgcgaacattcaggataattgcgttatgcacggttttcccgagcaggatactgtcgtggaagaagatggacatattggtcatagcgctatccttcacggctgcattatccgccgcaatgcattagtgggaatgaacgcggtagtgatagacggtgcggtgattggcgagaacagcattgttggcgcatccgcatttgtgaaagccaaagcagaaatgccagctaattacctgattgtcggcagcccggcgaaagcgattcgtgaactcagtgagcaggagttggcatggaaaaagcagggtacgcatgagtaccaggtgctggtgacacgctgtaagcagacgttacatcaagtcgagccattgcgggaagttgaacctggcaggcagcgcctggtatttgatgagaatctgcgaccgaaacagtaa

SEQ ID NO: 10610 - DNA, 2307 bp, Escherichia coli
atgtttaagcccaggatttgcagctggataggtttacttcccctgtttatgctgagtcttccagtacaggcggaccttcgatgtgttgcaaatgcagttgatattgaaccatttttttctgcggctaccgctgaagataaacaacaagttgaacaagctatcaacagtagcgtgaatcttgtccccttcggtttatctgcatcggactggaaagtgcatcgtggcgatttagtggtagacggtaatatagagagtaatcaaaaattgattgttcttggcaatttgacagtcaaaggtaatatttccactttctctctttctaatccatgggttattctcggtaacgtgacggcaacgaatatagttacggattcaccactgttaattaccggttcgataaatgcaagtggactggtatttatcgactcatattacgataatccgtctacgattaaggggagtattaatgcgcgtgggatatttatcaatgacataattgcacctgttgttgcgtcttcgacaaatagtgaattcatggtccgtgcgagtgacaaaaatgacactgaaaatgtcaaaaaagcgctgatgataataaatcctgatgcatattattgggatctaataaatgatgaagatgctctgaaagaaatttttaagcgaagcaatattcgcatggcagggaatgtctgtaatctgatgaaaaaagaagcgctgtttcgccctaagccttctcctgagttagtgcaggaattgcaaatgctggatgaaggcaacgttgctgcatttgaaggacgagatattgcgacatttgatcttgccataatgcgaactctcccaaggcttaaaggaatttcagctaacctacgcaaacaacttattaatagcaatgatggacaaacgattgaaagtatggcgagatatatgcctgacaatgagattctggagttgaccgatcagcaattgggttaccagcctgttgttctggggttgctcgaccgtgaaccgctctctgtcgaaataatgacgcgaatgagtcatctacctgatggtgtcggtccgttgaatcttgcgctacgtgaaaatctccctctggatatcgtcatgactatggcgaaaagagattgggatatgatcattcaggagctttataaagatgcgtggttattgcccgaatccattattgatggctatatccgcagtgatgattcctctattcgtcaggtcggtgctggaggacaactcacctacaatcaggcaatgcagttggcgaacgattcatcaaacgatgttgtcacaagcttagcgtcaaagctggcagagatgaaacaccatggtcaattgttgcggatgacgccacaagagagtgacaaaatagcagtatatttataccaaaaattcgagaatgacgatgatctaataggtgcgttatttttagcgttgccagataacttacagtttaattttgttaaaaggatggagaaaaaatcccctgcctacttttgctgtcgggatatgcaggtaattcactctgacgctgctttacaacggttattgacacgtttcaacgatcctgaggggtggagtaatctggcgaaaaatcagtatctgagtacggcgatgaaacaaaaaatttggcatcgcgctttatcgcatcgaaaaaataatccgaaagcagattctgcagcatatgaaaccagcgctgatatgattttgtcggagcttatcagctacggtgaagttgatgaccagatgctattaaatgccgcctctctgatacgttcggaaggctgggactttttagagagtgcattagttagttgggataatttacccgctgttgtcctcaaggaattacagcaaaatatgccacgcaatgatatttgggcgaagttttttctgaggcaggaaaacagctctcgtgcgcaggttaacgaagcgttacgtgtttattatgcactagaccccgatgcgttagcacaactggatgtactggcaaaacaaccggatcgtatatggtggagttcgctggcgaaaagcaatcttacatttttcaagttcggtgcacttaacaatcgccatacaccgtctgcggcactggcggcagaaattgatcccgagtggtggattgtggcgatgaataatccccgttttccagttgatgtattaaaggcgaggctgaaacgtgatcctttgctggcgttagagcttgttaaacctgaactggatttagtccgccagctggcgcttaacggtaagacgcgcgcaatacgggaacaagcgatgagaaaacttgatgagttgtattga

SEQ ID NO: 10611 - DNA, 150 bp, Escherichia coli
atgaagcgcaaccctctggtggtgtgtctgctcattatctgcattacgattctgacattcacactcctgacccgacaaacgctctacgaactgcggttccgggacggtgataaggaggttgctgcgctcatggcctgcacgtccaggtaa

SEQ ID NO: 10612 - DNA, 213 bp, Escherichia coli
atgttatgttttttaatttatatcactctccctttcattcagcttgtctatttcatttcctctgaaaagaaactaactattcacattgtgcagatgtttcagttgttatcacaggtattctataatctcaaaatgtttttaatgatggatatgctcggagttggagatgcaattaatattaatacaaataaaaatatccggcaggtatgctaa

SEQ ID NO: 10613 - DNA, 1095 bp, Escherichia coli
atgagaaatcgattaattgccgtgattttatgtttatttggcatggtcgcgggggggcacgctacgccaaatgtgacggctgaaattacttatgatttggccgctggtagggcggattattacttctggaatagggaagatccccccgcagtaagctacaacacgacatggtcaagttataaatgcgattttcctgatgtgcagcagacctgtaccgcatcaggaaatttatcaacagtgaaaatatatttgacagaaaaacgcagtggaatgcgttggcccgtcaaactcaaaggctatgttgatgcggaggtctggaacccgggtggagtctgtaacggatggtcgacgcaaatcgcgttagctaacggtacgggttatcaatgtaaaagtgcttcagacggttatatacaacatcttgcgagcgcaaagccgatgacgctctatcttgaacagtccgaaatgaaaaatttaccaatcggtggtgtttgggaaggttcggtcaaattgcagtttactaatccgtctacggattatcgcgccgatattacgcttaatgtcctcgatcccaaccatatcgacgtgttcttcccggagttcgcccacgctacgccacgcgtacaactggatttgcatccaacaggcagcgttaacggcaacaactacgcgcaagatctgactatgttggatatgtgcctgtacgatggctttaacggtaacggtcttagctatgaaattttgctaaaagatgagggaagaacggcggcaggacgcagtaatggtgagttttcgatttatcgtcagggcgcgagctcaacggatgaaggggagcgtattgattaccgtgtcaaaatgtacgacccggaatcaggtgggcaaatcgatgtgcgcaacaatgagagcatggtctggaccaacatcaaccttaaacgtgtccgcccggtggtgcttccaggcattcgttacgctgtgatgtgtgttcccacaccgctgacgctggtggtcgacaaatttaacgtgacggcaaaacaggcgggatattatatgggtaaattgtcggtcatctttaccccgtcattgccgacaatcaattga

SEQ ID NO: 10614 - DNA, 1332 bp, Escherichia coli
atgagtacttcagatagcattgtatccagccagacaaaacaatcgtcctggcgtaaatcagataccacatggacgttaggcttgtttggtacggcaatcggcgccggggtgctgttcttccctatccgcgcaggttttggcgggctgatcccgattcttctgatgttggtattggcataccccatcgcgttttattgccaccgggcgctggcgcgtctgtgtctttctggctctaacccttccggcaacattacggaaacggtggaagagcattttggtaaaactggcggcgtggttatcacgttcctgtacttcttcgcgatttgcccactgctgtggatttatggcgttactattaccaatacctttatgacgttctgggaaaaccagctcggctttgcaccgctgaatcgcggctttgtggcgctgttcctgttgctgctgatggctttcgtcatctggtttggtaaggatctgatggttaaagtgatgagctacctggtatggccgtttatcgccagcctggtgctgatttctctgtcgctgatcccttactggaactctgcagttatcgaccaggttgacctcggttcgctgtcgttaactggtcatgacggtatcctgatcactgtctggctggggatttccatcatggttttctcctttaacttctcgccaatcgtctcttccttcgtggtttctaaacgtgaagagtatgagaaagacttcggtcgcgacttcaccgaacgtaaatgttcccaaatcatttctcgtgccagcatgctgatggttgcagtggtgatgttctttgcctttagctgcctgtttacgctgtctccggccaacatggcggaagccaaagcgcagaatattccagtgctttcttatctggctaaccactttgcgtccatgaccggtaccaaaacaacgttcgcgattacactggaatatgcggcttccatcatcgcactcgtggctatcttcaaatctttcttcggtcactatctggggacgctggaaggcttgaatggcctgattctgaagttcggttataaaggtgacaaaaccaaagtgtcgctgggtaaactgaatactctcagcatgatcttcatcatgggctccacctgggttgttgcctacgccaacccgaacatcctcgacctgattgaagccatgggcgcaccgattatcgcatccctgctgtgcctgttgccgatgtatgccatccgtaaagcgccgtctctggcgaaataccgtggtcgtctggataacgtgtttgttaccgtgattggtctgctgaccatcctgaacatcgtatacaaactgttttaa

SEQ ID NO: 10615 - DNA, 345 bp, Escherichia coli
atgacggggataaccatattttatggcgataacatcattcgttatgtggttaatacaaaaaaggggctgagaccatatttcaagcaattaccggataattaccaggcaaaatttgagttaaatttaatgagcaagttctcaaattttattataaataaaccattttcagcgataaataatgcggcacgtcacattttttcacgctatttgttggagaacaaacatttattttatcaatattttaaaatttcgaatacagatattgatcatctcgaacaattgattaacgtcaactttctccctcatgacaggacgtcattttgtgaatgcaatcgttttccataa

SEQ ID NO: 10616 - DNA, 1188 bp, Escherichia coli
atgttccctgtttcatcaattggtaatgatattagtagtgatttagtccgtcgaaaaatgaatgatcttcctgaaagccccatagttaataacctcgaagcactagcaccaggtatagaaaaactaaaacagacctctattgaaatggtcactttacttaacgcgttacaaccaggtgggaaatgcattatcactggtgattttcaaaaagaattagcgtacttacaaaatgtaattctttataatgattcgtctcttcgtctggatttttttggttataacgcccgaattattcaacgatcagacaatacctgtgaacttacaattaatgaaccgttaaaaaaccaggaaatatccacaggcaatatcaatgttaattgcccattgaaagacatttacaatgaaatcaggaggttgaacgtaatctttagttgtgggagtggaggtatagttgatctatcctctctggacttacggaatgtcgatttagaactttatgattttacagataaacatatggccaatacaattttaaatccttttaaattggatgacacagattttactaatgccaacatgtttcaggtaaatttcgttagttcaaaacaaaacgccacaatctcatgggattatttactaaaaataacgcctgttataacaagcattaacgatatgtattctgaagaaaaaattaagcttgtcgaaagttgtttaaatgcgcttggagatattaccgaagaacaattaaaaatcatgagacttgcaattatagaatctataccaagagcagctctaacagatcaattagaaaatgaattaacaaaagaaatatataaaagctcatcgaaaattaacaattacttgaacagaattaaattaccagagatgaaaggattctcatcagaaaaaatagattattacatcgatataatcattaaagattatgaaagcgtcaaagaaaatgcttatcttatcgatccaaaaattaattacaatacagatttaaacatagaggattctagctcagaggaattcctttcagataatacactagagaaagacgaaaattctcctgacaattgctttgaggtcgtaaaatataacacatatgaagcttataactcagagaagcaatattttaccagagaggactatacgtatgattacgaccttttaaatgcaatatag

SEQ ID NO: 10617 - DNA, 516 bp, Escherichia coli
atgctccaaaagcaaaaacccgccgaagcgggtttttacgtaaaacaggtgaaactgaccgataagccgggttctgtcgtggacagtcattcatctaggccagcaatcgctcactggctcaagcagcctacccgggttcagtacgggccgtaccttatgaacccctatttggccttgctccgggtggagtttaccgtgccacggactgttaccagccgcgcggtgcgctcttaccgcaccctttcacccttacctgatcccgcttgcgcgggccatcggcggtttgctctctgttgcactggtcgtgggtttcccccccaggcgttacctggcaccctgccctatggagcccggactttcctcccctccgcccgtctcccccgaagaggacgacgacgaagcggcgactgtctggtcagcttcggcgcgcagtatagagggtttgcgcgcccttgtcaccccgcgttgcgcattccaatcgccagtgtcgcggcgatattacgtgaagcacggtaa

SEQ ID NO: 10618 - DNA, 3144 bp, Escherichia coli
atgaaaattctcagcctgcgcctgaaaaacctgaactcattaaaaggagaatggaagattgatttcacccgcgagccgttcgccagcaacgggctgtttgcgattaccggcccaaccggtgcggggaaaaccaccctgctggacgccatttgtctggcgctgtatcacgaaactccgcgcctctctaacgtttcacaatcgcaaaatgatctcatgacccgcgataccgccgaatgtctggcggaagtggagtttgaagtgaaaggtgaagcgtatcgcgcgttctggagccagaatcgggcgcgtaaccagccggacggtaatttgcaggtgccacgcgtagagctggcgcgctgcgccgatggcaaaattctcgccgacaaagtgaaagataagctggaactgacggcgacgttaaccggactggattacgggcgcttcacccgttcgatgctgctttcgcaggggcaatttgctgccttcctgaatgccaaaccaaaagaacgcgcggaattgctcgaggagttaactggcactgaaatctacgggcaaatctcggcgatggtttttgagcagcacaaatcggcccgcacagagctggaaaagctgcaagcgcaggccagcggcgtcgcgttgctcacgccagaacaagtgcaatcgctgacagcgagtttgcaggtacttactgacgaagaaaaacagttacttaccgcgcagcagcaagaacaacaatcactaaactggttaacgcgtctggacgaattgcagcaagaagccagccgccgtcaacaggccttgcaacaggcgttagccgaagaagaaaaagcgcaacctcaactggcggcgctcagtctggcacaaccggcacgaaatcttcgtccgcactgggaacgcatcgcagaacacagcgcggcgctggcgcatactcgccagcagattgaagaagtaaatactcgcttacagagcacaatggcgcttcgggcgagcattcgccaccacgcggcgaagcagtcagcagaattacagcagcagcaacaaagtctgaatgcctggctacaggaacacgaccgcttccgtcagtggaacaacgaactggcgggttggcgtgcgcagttctcccaacaaaccagcgatcgcgagcatctgcggcaatggcagcaacagttaacccatgcagagcaaaaacttaatgcgcttgcggcgatcacgttgacgttaaccgccgatgaagttgctagcgccctggcgcaacatgccgagcaacgcccactgcgtcagcgcctggtcgcgctgcatggacagattgttccccaacaaaaacgcctggcgcaattacaggtcactatccagaatgtcacgcaagaacagacgcaacgtaacgccgcacttaacgaaatgcgccagcgttataaagaaaagatgcagcaacttgccgatgtcaaaaccatttgcgagcaggaagcacgcatcaaaacgctggaagcccagcgcgcgcagttacaggcgggtcagccttgtccactttgtggttccaccagccacccggcggtcgaggcgtatcaggcgctggagcctggcgttaatcagtctcgattactggcgctggaaaacgaagttaaaaagctcggtgaagaaggtgcgacgctacgtgggcaactggacgccttaacaaagcaacttcagcgtgatgaaaacgaagcgcaaagcctccgacaagatgagcaagcacttactcaacaatggcaagccgtcacggccagcctcaatatcaccttgcagccacaggacgatattcaaccgtggctggatgcacaagatgagcacgagcgccagctgcgattactcagccaacgacatgaagtacaagggcagattgctgcgcataatcaacaaattatccagtatcaacagcaaattgaacaacgccagcagcaactcttaacggcattggcgggttatgcactgacattgccacaggaagatgaagaagagagctggttggcgacgcgtcagcaagaagcccagagctggcagcaacgccagaacgaattaaccgcgctgcaaaaccgtatgcagcagctgacgccgattctggaaacgttgccgcaaagtgatgaactcccgcacagcgaagaaactgtggcgctggaaaactggcggcaggttcatgaacaatgtctcgcattacacagccagcagcagacgttacagcaacaggatgttctggcggcgcaaagtctgcaaaaagcccaggcgcagtttgacaccgcgctacaggccagtgtctttgacgatcaacaggcgttccttgcggcgctaatggatgaacaaacactaacgcaactggaacagctcaagcagaatctggaaaaccagcgccgtcaggcgcaaacgctggtcactcagacagcagaagcgctggcacagcatcagcaacaccgacctgacggcctggatctcagtgtgacggtggagcagattcagcaagagttagcgcaaactcagcaaaagttgcgtgaaaataccaccagtcagggcgagattcgccagcagctgaagcaggatgcagacaaccgtcagcaacaacaaaccttaatgcagcaaattgctcaaatgacgcagcaggttgaggactggggatatctgaattcgctaataggttccaaagagggcgataaattccgcaagtttgcccaggggctgacgctggataatttagtccatctcgctaatcagcaacttacccggctgcacgggcgctatctgttacagcgcaaagccagcgaggcgctggaagtcgaggttgttgatacctggcaggcagatgcggtacgcgatacccgtaccctttccggcggcgaaagtttcctcgtcagtctggcgctggcgctggcgctttcggatctggtcagccataaaacgcgtattgactcgctgttccttgatgaaggttttggcacgctggatagcgaaacgctggataccgcccttgatgcgctggatgccctgaatgccagtggcaaaaccatcggtgtgattagccacgttgaagcgatgaaagagcgtattccggtgcagatcaaagtgaaaaagatcaatggactgggctacagcaaactggaaagtgcgtttgcagtgaaataa

SEQ ID NO: 10619 - DNA, 1008 bp, Escherichia coli; identical to SEQ ID NO: 6621

SEQ ID NO: 10620 - DNA, 2646 bp, Escherichia coli
atgttatcaccagaagacctagatgagacacaaagtttctttgatcttattattattgatgaaggtcattctgaaccatctcctgtatggcgagaaatcgtacgacaatcagatgcaataaaagttgtaataacggcaacaccatataggaatgatcttttcgaattaaacgttgacttagatgattattttatctttacatttaaacaggctatttctgataaaataattactgagccaaatttcattcaagtgaattcaatggagaaaatgcttcaagaagtacagctttttctagaaaaaaatgaaaatataaaatgcataataaaatgtaaagatgcctatgatatatctcgataccacgaatcaatttctaaaaaattcaaaacagtaagtatacatgagacatttagaaatgatgaagctagcggtaaatttaaatcagtaaattccgcattaaaatctgacaacataagagttctaattcatcaacataaacttgatgaaggtgtagatttgcctgaagcaaaattactagttttaacctatcaagttggaagtggtagagaattggttcaaactattgggagagttgttaggaattacaattcaatagaaccgatgataatagatctagctagttcatccaatgaaagaatgtggcaaagttaccgcgtatttgatgactacatatccacacctagcggttcaaaaggatttataaaatcgctaagcacaactaacctaataaaaggatttcttgataacttccctgaatacagctacttctctagtcgtttcagagaacgattggacttgcaatccataaatgccaatgatatttcaataccattggcatccgtttgctttatagaaaaagggcctaattactcaactccccttcttttggataaaatatattgggaactgcatacacaaggttcacttgttaaagaaataaaaaatgaccataatgtattcatgtatctatacatatcattcaatagctccaggtatctttctgataaattattttttgaaccaaagctagaaataataataattaaagagttatctaatagcatagctatctttgacagcgctggtgccaagtatgcaaatagaatcgacttaaatcttgcaaaccctataaatattaatagattaacagcattagctgcagccacaaaagtccgtgaaataaaagaagctcactcaagggctataggtactgcaaaaaatagaccggaagcgatgtccttaaaaggtaaaaacctagaaaatataaatagcactcagcgcaatgccatgtacgcactaacaacattgaaagtagttaataaggatgaacaagggaaaaatgacagtagtttctatataggggctaggtctggtcgtgtctctgaccaaatggaaaggaattttagtatagaagaactatctgaatggattgaaaaaattgatttaggaacagcaaaagaagcaactaataatggccgattaataaagtcattctcacaacccatcaatgaaaaacccaattccgatatagtttcaattattctagatttatcagatttcgataccgaattaatttccgaaaagaatttcctaccggactattattaccttcaatattcagaaagtgaaggtgcggagttatttgttggttcaaaaccatttaaaatacaaattcagtatgaagaagataaacatagttaccttttgacaaccactaacaattatgatgatttcaataaaataatttcttatttaaataatgactattttagaattcttttcttagacggaacaacatacagtgcgtcgaaattttataaattttcacttccttttgaaaaaggtattactgctgaggaaagttgggcaggacgttcactcataagcattccagccctgctttcaaagggtcttaaagaaaaaggaaagtatgataaaaaagatatgtatattaatactacaagtacaagctttgataagaattctatattttatttaattgatcaattaaaaaaccactcaaatagcaatgctactcttccacaattgggcccctttcatccttatattccaaattgcgatctcgttctttgcactgacatggatacagaaccatgtgattttatcgtatcatcaccggataaattatgtttcattcatgtaaaatgtgggaaatcattcagttctccaaaatcctcagcaggagcgatagcagaagtcggaagtcaagcaattaaaaacttaacctatctgatttcacactcagatgctaataccccaggaaactattctatttgggataaagcatggccatcccataaagccaaacataaacttgagtctcgttttagattagcctttaacgaaattggaaagatccctaataaagaaaataaacttaaggaaaaaacctgggagttaatatctaatagaagaaaatcaccactgtgcaataaagaaatatggatagtaatgggcaactctttttcgaaaaaacatttcattgaagagatgtcaaaagatactgaccagcaatctgaaacaatacaagcttttcaactaatcgaagattggttaagtagtgctgatgagatgggtgtagatataaaaatattcacatcataa

SEQ ID NO: 10621 - DNA, 234 bp, Escherichia coli
atgaagtgtaagtatcccggtaagccgtggtgcgacagagaaaccaagaaagttcgccatagctccggtgaagtctttcattacgccatagttaccagccgtacggaatacaatcccgcagcggatctaaccagcgtgatgtcaggacatgaatcaaaacattatcccttccttattgttgtggagtcagagagtaaatggcatttattagtcattaaaaaaataatcagttga

SEQ ID NO: 10622 - DNA, 1482 bp, Escherichia coli
atgatgaagaaaacgcctacctctacgaaagactccttacccaacaaggagatgaatgatttgccccggctggcgagcgcggtgctgccactgtgttcgcaacatcccggtcagtgtggtcttttccctctggagaaaagtctggatgcgtttgccgcccggtatcgtctggccgaaatggcagagcatacgctggatgttcagtattacatctggcaggacgatatgtcgggtcggttactgttttccgccctgttagccgcagcaaagcgtggcgttcgcgtccgtttgttgctggacgacaacaatacacccggacttgacgacattttacgcttgcttgacagtcatccccgcattgaagtccggctttttaatcctttctcgtttcgcttgctacgtccgcttggttatatcaccgacttttcccgtctcaatcgccgtatgcacaataaaagtttcactgtcgatggcgtggtgacgctggtaggggggcgaaatattggtgatgcctattttggtgcaggggaagagccacttttttcggatttagatgtcatggcaataggaccagttgtagaggacgttgccgatgatttcgcccgctactggtattgcaaatcggtttcacccctacagcaggtgctggatgtcccggaaggtgaaatggcggatcgcatcgagttacccgcctcctggcataacgatgctatgacgcatcgttacttacgcaaaatggaatccagtccgtttataaatcatctggttgatggaacattgccgcttatctgggcgaaaacacgtttattaagtgatgatccggcgaaaggggagggcaaggcaaaacggcattcactgttaccgcagcgcctgttcgatatcatgggctcacccagtgaacgcatcgatattatctctgcctattttgtaccgacacgcgcaggtgtggcgcaactcttacggatggtgagaaaaggggtaaagattgcgatcctaaccaattctcttgccgctaacgatgttgctgtcgtccatgccggatacgcacgctggcgcaaaaaattgctccgctacggcgtggaattatatgaactcaagccgacgcgtgaacaaagtagtacgttacacgatcgcggcataaccggtaattccggtgccagcctgcatgctaaaacctttagcatcgatggtaaaacggtgtttatcggctctttcaatttcgatccgcgttcgacattgctcaatactgaaatggggttcgtgatagagagcgaaacgctggcacagttaattgataaacgctttattcagagccagtatgatgcggcctggcagctccgtctggacaggtggggacggatcaactgggttgatcgtcatgcaaagaaagagattattctcaaaaaagaacccgccaccagtttctggaagcgggttatggtcagactggcatcgatattgcccgtggaatggttattataa

SEQ ID NO: 10623 - DNA, 714 bp, Escherichia coli
gtgcaaacccttcaacaagttgaaaactatacggcgttaagtgaacgtgccagcgaatatttattggccgtgatccgtagtaaaccggatgccgtgatttgcctggcgaccggagccacgccattactgacgtatcattatctggtagaaaaaatccaccagcagcaggttgatgtcagccagctcaccttcgtgaagctcgacgaatgggtggatctgccattaacaatgcctggcacctgcgaaactttcctacaacagcatatcgtgcagccgctggggctgcgtgaagaccagctcatcagctttcgctctgaagagataaatgagacagagtgcgaacgggtaacgaacctgattgcgcgcaaaggcggtctggatttatgcgttctcggattggggaaaaacggtcatcttgggctgaacgaaccgggagaaagcctgcaaccggcctgccatatcagtcaacttgatgccagaacacagcaacatgagatgttaaaaaccgcgggccgtcccgtgactcgtgggatcaccttaggcctgaaggatattctcaatacccgcgaagttttgctactggtgactggcgaaggaaagcaggatgcgacagaacgttttctcacggctaaagtctctaccgctatcccggcttcgtttttatggctgcataaccatttcacatgcgtgattgatgaaatgtgtcgtcgttaa

SEQ ID NO: 10624 - DNA, 792 bp, Escherichia coli
atgggatctgaaatcagtaaaaaagatatcacccgtctgggctttcgttcgtcactgctgcaagcgagctttaactacgaaaggatgcaggcgggcggttttacctgggcgatgttgccgatcctgaaaaagatttataaggacgacaaaccgggcctaagcgcggcgatgaaagataacctcgaatttattaatacccacccgaatctggtcggattcctgatggggttattaatttcgatggaagaaaaaggagaaaaccgcgacaccattaaaggcctcaaagtggcactgtttggcccaatcgccgggattggcgatgcgattttctggtttaccttattgccgattatggcgggaatttgctcatcatttgccagccagggaaacttgctggggccgattctatttttcgccgtttacctgcttatcttcttcctgcgcgtcggctggacccacgtcggttattcagtcggcgtgaaggctattgataaagtgcgagagaactcgcagatgattgctcgttcggcaaccatcctcgggatcacggtaatcggcgggctgatcgcttcgtatgtgcatattaacgtggtgacatcgtttgccatcgacagtacccacagcgtcgcactgcagcaggatttcttcgataaagtcttcccgaacattttaccgatggcctacaccctgctgatgtattacttcctgcgggtgaaaaaagcgcatccggtgctgttaatcggcgtgacttttgtgctctctattgtttgttccgcattcggcattttgtaa

SEQ ID NO: 10625 - DNA, 804 bp, Escherichia coli
atgcatgaaataaccctactccagggattatccctggcggcgttagttttctttctggggattgatttttggctggaagccttatttttattccgcccgataatcgtttgtacccttacaggtgctattctcggtgatattcagactggcttaattaccggtggcctgacagagttggctttcgccggattaacccctgcaggtggtgttcagccgcccaaccctattatggcgggtctgatgaccactgtcattgcatggtctacgggcgttgatgccaaaacggcaattggtcttggcctgccgtttagtttgttaatgcagtacgtcattctgttcttctattccgctttctcattatttatgaccaaagccgataaatgcgcaaaagaggcggatacggcagcattttcccgacttaactggacaacgatgctcatcgtcgcttcagcgtatgcggtgattgctttcctctgtacttacctggcacaaggggcgatgcaggcgctggtgaaagcgatgcccgcttggctgacccacggctttgaagtggctggcggtattctgcctgccgttggttttggcttgctgctgcgcgtgatgttcaaagcgcaatatatcccttacctgatcgccggtttcctgttcgtttgctacatccaggtcagcaacctgttgccggttgccgtgctgggtgcaggctttgcggtgtatgagtttttcaatgcgaaatcccggcagcaagcgcaaccgcagtccgttgtcagtaataatgaagaagaggactacagcaatgggatctga

SEQ ID NO: 10626 - DNA, 1098 bp, Escherichia coli
atggcgtactataacatagagaaacgactaaaatccgatggcacaccacgctatcgctgtaatgtgattatcaaagaaaaaggggttatcacttacagggaaagcaaaacattccctaaacatgctcatgccaaaacatggggcacacagaaagtgatggaattagatctacatggcattccatcatcaaatgctgttgacgggcttacagtccgtgacttactacgcaaatatttaaatgacccaaatgccggaggtaaagcaggccgtactaaaagatatgtgctggaactacttatggatagtgacatttctgcgatcagactatctgaattaacagaaaatgacgtaatagaacattgcaggttgagaaacaacgccggtgcaggtccagctactgttagccacgatgttagttatcttggcagtgttctggatgcagccaaacctgtatacggaattaattacacatcaaacccagcaaaagccgctcgtccatatctacttaaacttggtttaattggtaaatcaaatcgtcgtaatcgtagaccagcatctgatgaactagacatgctcattgaaggccttcaacaacgatctactcataaatgctcaaaaattccgttcgttgatatcctcaaattttctgtgtggtcctgtatgcgaatcggagaagtatgccggttacgatgggaagatctcgaccaggaacaaaaatctatactagtaagagacaggaaagatccacgtaaaaaggaaggtaaccatatgaaagtggccttgcttggggaagcctgggatatcgtccaacgacaacccaaaaaatctgaattcatttttccatacaacagcacttctgttaccgcaggatttcagagggtaagaagcaaattaggtattaaagatctgcgataccatgatttgcgtagagaaggggcaagtcgcttatttgaggctggttttagtattgaggaagtcgcccaggttacagggcatcgttcattaaacgtgctatggcaggtatataccgaactgtatccaaaatctttacataatcgttttgaagaactccaaaggagcagaaataagacctcttga

SEQ ID NO: 10627 - DNA, 249 bp, Escherichia coli
atgcgtattgagatctgcatagccaaagagaaaatgactaaaatgccaaacggtgctgtggatgcgttaaaggaagaattaactcgacgcatcagtaagcgttatgacgatgtagaggtgatcgtaaaagccaccagcaacgatggcctttctgttacgcgcaccgccgataaagattcagctaaaacttttgttcaggaaactctgaaagatacctgggagtctgctgacgagtggtttgttcattaa

SEQ ID NO: 10628 - DNA, 1344 bp, Escherichia coli
atggctgcaaaagcaagtgaagacgcagcgagagagtatgcaagccaggcagcagagccgtataaatatgtcttacagccactgcctgatgtgtggataccgtttaacgattcactggatatgcttgctggcttttcgcctggttataagcaaataactgtaggtgatgatgttattaaaatgccatccgataaggttgttagcttcaaacgcgcatcaggtgcaacatacattaataaatcaggtgtattaaccgttgctgaagttgacgaaccgcgatttgaacgagaaggtttgctgattgaaggacagagaacaaactatttcagaaattcaaatacaccagaagcatggaataacacgggtagtgtgtctgttgagtcgttcgacagtgataatgggtttaactatggaaggataactgttattaatgaaaatccgacagcacaaggatatcaggcaattgctgtaaacacgaatgatgcttacacctgcccggcaggttcttatacgacgatatcgtgtctgacgaaaagtgataattcccggtgtcgtgcaaggttcggaaaaatgtctgataatggtgcgtttgtttttcattcagatgcagctctggatcctgttacgggaaatgttgttcatggaaataatgtgacggtgacggcagaaagagtcggtgaatggtggttgtttaccgccactctttttgcagatgaggaaatgataatcagctcaagatttgaaatcctggcgatgcctggaatcagtattatccccaatggctctacgttagatattgcgatgcctcaggcggagattgggtcgtacaggacgtcatttatcattactgaaggggctcctggcactcgctccagcgacatggtgacaatacctgtaagaaacaatattcaccgattaccattcagtgctcttgttgaagttaataaaaactgggatatccctcccagcaaatcaccattaatctttaatgttaaagattatcaggaaaatggtctgttcacgcatggattccgtggtaataatttctctgatgccggttctccttttatttctatgggagggtgtaataaatatgtggcaacaacccagaggaaaatcatttcaggcttacgttgtggcgctgatggagatgttcaggccgtatgtaatggtgaattatctgttgcggcaaaaacaacatggacttcaattgttccacgggcagtattgcgaattggagggcagggcactaatggggagtatcatctttttggtcatatccgtaatctgcgtatctggcataaagaattaactgatgcgcaaatgggggagagtattaaatga

SEQ ID NO: 10629 - DNA, 291 bp, Escherichia coli
atgagtgtgtcggcagaaatggacattatctttgaagaatatgcccttattgacgttgtgtggataactatttgtctacgtgaaaatatcatcagttttgccgatttttgtcttttacggatagcaaatatcacacttataggcgctcgccttatggggaacgttgctgctctgtttcattcaggctcgcggcatgttggggctggatcgggtggtttaaatattggctatattcaatggacgcgttttgccgcgatgacatatcaggcatcgccaaatacacatagctaa

SEQ ID NO: 10630 - DNA, 174 bp, Escherichia coli
atgccatggcggggcagctttgagccgcacgcatggggtgtggcaagcctgatggattttgctgtgcctgtggtggcgtgtttgctggtttggctgttggttaaacgcgaaagtcataatgccaggggaataccgcagggtgttcaggttttgcataaaaaagcccaccattaa

SEQ ID NO: 10631 - DNA, 360 bp, Escherichia coli; identical to SEQ ID NO: 5306

SEQ ID NO: 10632 - DNA, 432 bp, Escherichia coli
atgtcagtgtatgactatcccgtaccaaccacaccgtggctgaatacggcacccggtttatttattgacgattatacctcgacagcctccagtacagtgtcttccctgagccggacactgatttatgactatgagcagaaccctgattccggcaacaatgtggtggcgctggcagcaaaagcaggatacagcacatggtggatatccaatcaaggaaaactgggggagcatgacacacgcatctctgttattgcttctgatgcggagcatgccactttcctcaagaaaggcagcttcgcttcccgtaaaacagatgacaaactgttgttacaggaaacagaacgtgcgctggcggatacatcctctccgaagataattttcctgcacatgatgggttctcatccaaatccgtgtgacagccttaactcctag

SEQ ID NO: 10633 - DNA, 1278 bp, Escherichia coli
atgaataaaataaagaattatcgatggcatatgattgccctcgtatgctttatcactgtaatcaattatctggacagaacggcgttaggtattgcggctccaacgattatggagacaaccggaataaccaaagaacaatattcatggattgtcagtgcattccagttggcctatacattagggcaaccggtaatgggcttctttattgataccgtgggtctgaagttaagttttgcgatatgtgccgcaatttggggcctggcgacaatggggcatgccttgacaggaacatggtcaggtctggcatttatgcgcgccctgatgggtttcagcgaagcgtcggcaattcctgcgggtgtaaaaaccgcatcaacatggttcccggcaaaagagcgtggcgtggcgacaggtgttttcaatatgggcacctcactcggcgcgatgcttgctccaccgttgattgcctggtgcattatgtttcatagctggcaatttgcgtttattgtttcaggtagccttgctttgctcgcggctttattttggttcttttgttataaagatccaaaagatgccaaacgcctttctgatgaagagcgccactatattgaatcagggcaagaacagcatcttaaaacagataagaaagaaaaaacgtcaatcaagcatatcctcagccaacgtaatttctgggggattggcatcgcgcgttttctcgcagacccggcatggggaaccattaacttctgggtgccgattttcttcgtcgaaacgctgcattttagcctgaaagaaattgccatgttcgtctggctgcctttcctgctgggcgatctcggctgtttagccagtggttttgtcgcgaagttcttccacgatcgcggcgtgagtttaattaactcacgaagaattaccttcactattgcagccgtcattatgatgacgattggcctggtgagtattgtcgaaaatccctacattgccgtattactgattagtattggcgcgttctcgcatcaatgtctttctactgtagcagcaactctgggtggcgatctgttcaaaaaagacgaagtagctaccgcagtgggtatggcaggagcctgtgcgtggagcggtcagttgattttcaacctgttcatcggggcattcgttcacattatcggcttcgcgccgttctttattgccctggctttctttgacattattggtgctattgcgttgtggacgcttatcaaagttaaagatgaagaaccacaattacagttagctacccactaa

SEQ ID NO: 10634 - DNA, 603 bp, Escherichia coli
atgctggttggacgtgaaaccgcaggctggaatacgctgagtggtaagaatacgatatcacgggtgttgggacttatgcctgacgtcaccatcgggcaagtggttgaagaagctgtagatcgttacaggaaacatcttccggtacaaaattatggcaccaccaacctcaaatcacgtagccgcttcacgcaatatcatttcaggctggcccgggagcttaatatccctcctcaggctatcgtgtatgccaatctactggcgtgggattacgacgggctgacccctctcaatcgccctcaaaatgaagtgcaggaagtcatattagcctcactgaaactgctggcggtacaaattaaacaccttgaaccaaatttcatcatctttgcatccggagcccagagaacagactacatcataaaacaagtgcttactgagttaggcggctataagacttcttcagtcataccggggaagctatgggagttcaaaacaggtaatgcaatctgtttcagaattgcccatccaagggctatgcgcggacaccagaagtacagaaatgaggtgattgcacgaattaagcaactttgtactcagggtggctag

SEQ ID NO: 10635 - DNA, 168 bp, Escherichia coli
atgttattgtgccaggaggggcagggtaaggtgctgtatcgatatgcttcggcaattgcgtgtgccgcagatggagatgaaatgccaataaaaaagcctgagttcgatgagggacgaactcaggctagtgttaagttttacagtaacacgccgcagcgagttggctga

SEQ ID NO: 10636 - DNA, 1272 bp, Escherichia coli
atgtctacgaaattatggggcggacgttttgatatgccaacaaataaactcgttgaacaatataatgcaactatcacgctggagcagcgcctatgcccctttgatattcaaggaagcatagttcatgccacgatgttaggacgtcagggaataatcacacaggatgaagccaatacaattattagaggtttgagacaagtaagtaaagaaattgaagacggccaattcattttcgatactgtagatgaagatattcatatggccattgaaagacggatgactgaaattattggccctgttggtggtaaactccacacggggcgaagtcgtaatgatcaaaccactgttgattctaaaatgcatatgcgagcaattatccgtgaaattcaagaggatattaccaacctgcaaaaaataataattaacaaagcagaaaacaatattaatgtcatcatgccaggctatactcatttgcaaacaggtcagcccattcttttatctcactggattatggcatattactggatgttgcgtcgtgactggaataggtttgaagatctgtatcaacggatgggagaatgccctttgggggcagcggctctcgccggtacgacattccctattgatcgtaattttacggctcgtgaacttggttttgataagccaactgagaatagtattgattctgtcagtgaccgcgaccatatggtcgaattcaccgcggcagcagcgatgtgttttatgcatctaactcgcctttcagaggaactgattttattctctagccaagactttaaatttattgaactttctgatgacttctgtacaggatccagcatcatgccgcagaaaaagaaccctgatgtggcggaaaaaatgcgtggtaaaggtgggagaatgtatggaaatctgatggccatgctgactattatgaaaggcataccgctagcgtataatacagacatgagcgaggataaagagcaggtctatgactcaatggatactctacaggccagcttaagaataatggcacctatgatcgaaaaaatggttatccttgccgaaaatacgcgtgcagcagccgctcgaggattctcgaatgcaacagatatggccgattatctggtccgtaaaggtattcctttcagagaagctcaccatattgttggtagtgcagtaaattactgtattaaacataaaaaaatgttagaagagcttactatggaagaattctccacatttgataataaggtaatggtgccaacttactga

SEQ ID NO: 10637 - DNA, 381 bp, Escherichia coli
atgttgcgtatatttatcccaacatctaacggtaagatttccagacgtcgttatatattttcatttattttaataaatttcatttttgcctttcttattatcttttttaacgatggggacgcaggttttcttgttattgtctctaccatcgcactccattatctcgtcatcaacatgaattgccaacgactccgtgatagtggtttcatatatataaaaacttatgtttttggtacattagcagtatatatcatctctatcatcacaatgatagccgaacattttgattgttcaggcaatggttcgatgatttttttgatttgttatttttccactttcagtatgctaatgcttgcacctactgattcatcaaaacaatag

SEQ ID NO: 10638 - DNA, 144 bp, Escherichia coli
atgagtaaggaatatatgaacgatggttcattaagtgaaaaatggaaataccgatttaacttttatgatcaacatggctttcctggattctggggggcaacaccagaatataaagcagcatttaaaacattaaaagtaagataa

SEQ ID NO: 10639 - DNA, 222 bp, Escherichia coli
atgaatttcattgctttcttctgttcctggatctatttatttgttctgggattatggaaaaaagcaattatagttctattacttggcattctatctctatttgttggtgcactaattggcgttaacattctgggaattgccgtagcagcctatgttgctgttaacacgaacaaatggttttatgagaaagaggtaaaagggttaaatacctggagcctttga

SEQ ID NO: 10640 - DNA, 849 bp, Escherichia coli
atgaataacatattacttccgccaattaatattccctgtacacttttcgaaactattaatttattcgatgatttttctgctgatgatatgcaatatggtgatatggtagaacaagactttctctcactcggcctaagcgatatctcagcaaaagttgatccttaccgacttattaaataccatttccctagcccaggttctattaatgttgcttttagtgcctcaagttccggaacaaaaatatcacaacgtgaatgcactgatattttatttgcagaaatgaaagaactagcaaaaatgttttccttttttggacaaaataaaacacttatcgaagatctgattgaacattttagatatggaaatggcagcaattttcatagccaacaattaaatttatcttttcatgaaaaaataaataaatatggttataatagtccaatacggataatcaaagaatgtatcgaaaatggcattaattcaactccctcgacaggataccaacctcttatcctgcaaagcattaaaaccaaattactttcatcaagactaaataaatttaatgacttcgaggacagttttaatggcttaggaatcagtgttcatgatatttcagctcaaaaaatatctcttttaagttttcaaaaatacgctataggatggagtgcaacaattcattttgtagcacaggaccacttcggtcttgatgtaactgatatcaaaaacaagacttacagcaaatatagattttttcgcatatggttctttttacaacggcataaagactttgctttcaaaccttttttcaccaattttaacactatcgaaagaatcgaaaattatctatga

SEQ ID NO: 10641 - DNA, 330 bp, Escherichia coli
gtgcagggagaaaacagcaccaccgttaaacaacgtgtaatggccgccagagagcgccaatttaagcggcagaataaactgaacgcctggctggataatccggaaatacgccaattctgcaagcttgagagcgaagatgcgcagtggctggaagaaacgctgatccatctggggttatcgattcgtgcctggcagcggttattgaaagttgcacgaaccattgctgatattgatcagtctgacattatcacacgtcagcatttgcaggaggcagttagctatcgtgcgattgaccgtttgctcatccatctgcaaaaactactgacataa

SEQ ID NO: 10642 - DNA, 696 bp, Escherichia coli
atgatctgccggttaatcgcgctcgatttagacggcacattgctgaacagcaagaaaatgatttcccctgcgtctgtttcggcactgcaaagcgcgcaacaggcaggtgtgaagattatcctcgccaccggacgttcgcacagcgaagccctgccctattatcagcaattgcagttaaccgagccgatgatttgctgtaacggcagttatctttatcatccgcgacagcggcaaatattgcgtccgctgccgctggatacccaaaaggtggaacagctacgacgctggttttcacaacaggcattgcagccacatatttatacgtatgatgattttgttttgcagattagcctggtgcaccgcaaggcttcgttattgcgccaggcagaggaatttgcccggcaagaattatcgctagcctgtagctggtcctggcatcatcaactggatatcacccaggcggggtgtgagaaaggcaaaagtctggcctggtatgcacgacagcaaaatatcgtgctggatgaaatcatcgcctttggcgataacgataatgatgcggggatgctgcggatggtaggcaaagggattgcgatgggcaatggcagttcgctggcaaaagtcagtgctgaccgcgttattggtcacaacaacacagatgctattgcggattttcttgatgcgcagggtttcagatga

SEQ ID NO: 10643 - DNA, 858 bp, Escherichia coli
atgacgctcaagcagatccagacgctgatttatcgcggcgagataaagtcgtgtaattatcgctgtggttattgcccttttcataaacaagaccgcaatgataaacagcaggatgaagcggcattatggcgcatggttgagcatttaccggcgctgggttcaccgttaaatgtgttgattacaccctacggcgaagcattgcgctatcgttattatatggcggcgatggcgaaaataagccgctattcccatgtgcaggcggtaggtattcagaccaacgcctcgtttaatttatcctcgttgatagcgactatgcaggataatcagggggatctggcaaagctgcggctatggtgttcgtttcatccttcccaggttagtaaagatgttttccttaaacaaatactggcaattaaggacgcggggattacttgttctgtgggggccgttgccagcgtagacaactacgacacattccagtggttacgcgcgcatcttcctgccgatatctatttctggctaaacgccaatgagcgcgataaaaggcccaccagcgacgaaagaaatagccagtttcagatgctggacccgctttatcatctggaaaccagcctctggcctgcgaatgtcgagttttgtatcggcggcaaaaagagcgtgtttatgaatgctgatggcgatctcttcgcctgtaatatcagcaaaattaaaatcggcaatttatatcagcagcaactttcatctccagcctgtatggcccggcagtgccactgttatctggcttatcatctgcgtcaggatattccggccctctcacaatttgatgctgaacgctgctttcggatcttctcgttatga

SEQ ID NO: 10644 - DNA, 1239 bp, Escherichia coli
atgaataatgaatccatttatcagcaatatatgtacagttacccgcataagaccgcttatcgggaattaaacaatattgcttttgcggatgtgaagtcgcgtatttacgagcataaaacacatctctatattcatatgcccttttgccagagccgctgcgggttttgtaatctttttacctgcacgggagcaaacaatgcctttatcgacaactacatagaggcgattattgtccaggcccggcaaatgcaacttgcgcctgtagactgggacagttttaccattggcggcggtacgccactgttgcttaatgtcgggcaactgttgcggttgtttaacggagtatttgacgaattacaggtcgatgcgcatatttttaaggcaattgaaacatcgccttccgataccaccgccgaaaaagtcgcgttattgcgccagcttgcggttaaccgtgtcagtattggtgtgcagagttttaacgatctggaacttgccacattacaccgccgccatagcgcgacaaatgcccatcgggcgctggagctgctgcgcaggggcaatttcccgatactcaatatcgatattatttacggtattcctggtcaaacagcagcaagtttaatggcatcgcttaatcaggcattagattatcaacctgacgaactgtttctgtacccactgtataacatgcctcgccagccggatatgtatagcctctatattgaagcccgcgatcgcttattgcatgaaggttatacgcaaacgtcaatgcgccgttttgtgcgggtgaataatgattcggcggttgaaagttgtggctttgaaaattcgctggcgcttggcgcgggcgggcgcagttaccttggcaatttacattactgcacgccgtggtcgcaaaaccagcctgcatcgcgacaaattgtcgcggattttatcgcccgacaagataaaacccttattaaccacggctatgtgctttcgcaagcagagatgaagcggcgttttgttatcaagaatctctttttctataaagggctttcgttacgtgattatcagcgccagttctcctctgaggtattaagcgattttcccctgctgggcgattttatcaaacaagattattgccaccagcaggataatcgtattctgctcaccgcgcagggtttagcgctttcggaccagcttggcccgctgtttatctccccggaagttcgcaggctggagacgcataaacgatga

SEQ ID NO: 10645 - DNA, 873 bp, Escherichia coli
atgtataacgtaacagacgaagtaccggaaaatacccgcacggcaatccattcctgcgatggcgaaatcaatttaaatgatttgatagccagggaggcgaatgttctgtttgtagtgcttgattccctgcgttttgatattgcgtttcaggaacaagaggcgggcaatacgccgaacattaaccgctatggtcgctggataaagtgcgaagccgctggcaattttacctggccttcgcatcattcgatgttttctggttttatgcctaagccgctggaagccgcaccgggccattcaatgctctttttcccgaaagatattggcttagggcgtttagggccaaaaaatgcgttcgcattcagcgaagagacgtggattaaagggctggaaaacaaaggttaccgcactatctgcgtgggtggcgtctccttttttaataaccgttcagggatggggaaagtgttcccggcgatgtttaaagagagttactggtatcctaatttctcctgcacggtaaaagagagcatggataatcagctcaccttaattaataaaaaggtgaacgctgaacagccgctgatgatgtatatcaatatcgacaccattcattatccgaatcatttttatattgaaaatgccaagcctggcgatacggtagaaactcacgccgctgccctgcattatattgatgcgagaatcgaaaaacttttcgacaccttccggcaaaccggacgagagacgttagttattctctgttccgatcatggcacctgctacggggaagacggtaaatatttccacagttttaaccatccgattgtgaataccgtaccctattttcactttgtattagacggcacagctcatgaataa

SEQ ID NO: 10646 - DNA, 987 bp, Escherichia coli
gtgattacgctaattggtcatcctgaaagcaaacgcacattttatttttgccaggcagcgtcacgcttacaggaacatatcaacgtggtgaactatgatcaggcacttaccctgccgctaaataaaggcatggtaaaaattgatccccccttacatcaggaaacagatattcgcttaattaatacggttagccaaaactatattagttttttacacaaaatggctaccagaagggaaatccgttttattaactcgccagaaggtattattcatcttctggataagcgctactgtaagcaacgattaatcgaacacgcgatcccgacaccgccgatattagcggatgatgcccgtagctacgatcaattgatcgcctgtatgcgcagcgaaaaggtttatcgcgtgtttattaagccaaatctcggatcaggcgcagccggggtgctggctctaaatttacatcccggcgataaccgtcaggtactttattgcgccatccaggttgcaggtgacaggctggtgaacagtaaacatattatccgctatgaaaacagcgatgatattaagttgattgtgaatgctattttacaacaagaaaatattatcgaatgctggctggcaaaagccagagtgggcaataaaagctacgatttacgaatagtatacgttaatggcgaaatcgtctggcgggttgtcagaacatcatcacagccgatcaccaatttacatttacaaaatgaagctatccgttttgccgatcttaatttacccgcagaaaaagtggctgaaattgacacgctttgtctcaacgccatgaaactctacccggacgtacacattgccgggcttgacgtattactcacgcaaaagttaacaccctatattatcgaaattaacggccagggcgatcttatttatcaggacacctgcgaacaaaacaaaatttatcaacgccagattcaggtaatgagagaacaccatgtataa

SEQ ID NO: 10647 - DNA, 846 bp, Escherichia coli
atggaaaagaaattttttatagattggaataatgagatcccgcaagaagaatttattaataatattttagctgatgaagacttggtcaaaattcgctctttggtcattagtcgttggggggaatgctacgaggaaagttgtcaaccgataatcgacatgtttgctgaacatgcagaacgctttgctcatcttgagtccctgtttatcggcgatatggaaagcgaagaatgtgaaatttcgtggataaaacaaggcgattattctcgtctgtatgccgcactgccgaacctcaaaaagctgacgattaaaggtactcaagacctggaactgggagaaatcgcccacgacaaactggagcacctggaaatcatctctggcggtacaccgtgtaatgtgtttgcgtcattgcaaaactctcaactgcctgcgttaaaaacacttatcgtttatattggcgttgaggattatggttttgatgcatcgctggatatcgtgatgaaactggcgtcgaaatccctcttcccaagcctgacgcatcttggtctggtgaacagcgaagagcaaaacgaaatcgtccgccgcgtgctggaaagcgacattctgccgcaactggaagtgttggcactctcctgcggtacgcttaccgacgaaggtgcagagcatcttctcaaacatgccgatcgccttagccatctgaaactgctggatttgtatcatcattacctgacagaacagatgcagaaaaaactgcaaaaaacactgacatgtactgttgaattatcagaagcgctaacacctgaagtctatgatgacgaagtttatatgcacccgatgtttaccgaataa

SEQ ID NO: 10648 - DNA, 2037 bp, Escherichia coli
atggatacgccacgcccacaattaccagattttcagtttcatcagaataacgacagttttaccctacattttcaacagcgtcttattttaacccatagcaaagataatccttgtttatggattggttcaggtattgcggatatcgatatgttccgcggcaatttcagcattaaagataaactacaggagaaaattgcgcttaccgacgccatcgtcagccagtcaccggatggttggttaatccatttcagccgtggttctgacattagcgccacgctgcgtatctctgccgacgaacagggccgtttattgctggaactacaaaacgacaaccttaaccacaaccgtatctggctgcgccttgccgctcaaccagaggaccatatctacggctgcggtgaacaattctcctactttgatctgcgcggcaaaccgttcccgctatggaccagtgaacaaggcgttggtcgcaacaagcaaacctatgtcacctggcaggccgactgcaaagagaacgcgggcggcgactattactggactttcttcccacagcctacgtttgtcagcacgcagaagtattactgccatgttgataacagttgctacatgaacttcgactttagcgccccggaataccatgaactggcgctgtgggaagacaaagcaacgctgcgttttgaatgtgctgatacatacatctccctgctggaaaaattaactgccctgctgggacgccagccagaactgcccgactggatttatgacggggtaacgctcggcattcagggcggcactgaggtgtgccagaagaaactggacaccatgcgtaacgcgggcgtgaaggtcaacggcatctgggcgcaggactggtccgggatccgtatgacctcgtttggtaaacgtgtgatgtggaactggaagtggaacagcgaaaactatccgcaactggattcgcgtattaaacagtggaacaaagaaggcgtgcagttcctcgcctacatcaacccgtatgttgccagcgataaggacctctgcgccgaggcggcttcacacggctatctggcaaaagatgcctctggcggcgactatctggtggagtttggcgagttctatggcggcgttgtcgatctcaccaatccagaagcctacgcctggttcaaggaagtgatcaaaaagaacatgattgaactcggctgcggcggctggatggctgacttcggcgagtatctgcccaccgacacttacctgcataacggcgtcagcgcggaaattatgcataacgcctggcccgcactgtgggcgaaatgtaactacgaagcccttgaagaaacgggcaagcttggcgagatccttttctttatgcgcgccggttctaccggtagccagaaatactccaccatgatgtgggcgggcgaccagaacgtcgactggagtctcgacgatggcctggcgtcggttgtcccggcggcgctgtcgctggcaatgaccggacatggcctgcatcacagcgatattggcggttacaccaccctgtttgagatgaagcgcagcaaagagctgctgctgcgctggtgcgatttcagcgccttcacgccgatgatgcgcacccacgaaggtaaccgtcctggcgacaactggcagtttgacggcgacgcggaaaccatcgcccattttgcccgtatgaccaccgtcttcaccaccctgaaaccttacctgaaagaggccgtcgcgctgaatgcgaagtccggcctgccggttatgcgcccgctgttcctgcattacgaagacgacgcgcagacctacaccctgaaatatcagtacctgttaggccgcgacattctggtcgctccggtgcatgaagaaggccgtagcgactggacgctctatctgccggaggataactgggtccatgcctggacgggtgaagcgttccggggcggggaagttaccgttaatgcgcccatcggtaaaccgccggtcttttatcgcgccgatagcgaatgggcggcactgttcgcgtcgttaaaaagcatctaa

SEQ ID NO: 10649 - DNA, 801 bp, Escherichia coli
atgagtaacgcgattacgatggggatattttggcatttgatcggcgcggccagtgcagcctgtttttacgcgccgttcaaaaaagtaaaaaaatggtcatgggaaaccatgtggtcagtcggtgggattgtttcgtggattattctgccgtgggccatcagcgccctgttactaccgaatttctgggcgtattacagctcgtttagtctctctacgctgctgcctgtttttctgttcggcgctatgtgggggatcggtaatatcaactacggcctgaccatgcgttatctcggcatgtcgatgggaattggcatcgccattggcattacgttgattgttggtacgctgatgacgccaattatcaacggcaatttcgatgttctgattaataccgaaggcggacgcatgacgttgctcggcgttctggtggcgctgattggtgtagggattgtgactcgcgccgggcagttgaaagagcgcaaaatgggcattaaagccgaagagttcaacctgaaaaaagggctggtgctggcggtgatgtgcggcattttctctgccgggatgtcctttgcgatgaacgccgcaaaaccgatgcatgaagccgctgccgcactgggcgtcgatccactgtatgtcgctctgccaagctatgttgtcatcatgggaggcggcgcgatcatcaacctcggtttctgcttcattcgtctggcaaaagtgaaagatttgtcgctaaaagccgacttctcgctggcaaaaccgctgatcattcacaatgtgttactctcagcactgggcggttga

SEQ ID NO: 10650 - DNA, 1584 bp, Escherichia coli
atggaatggattgccgatccgtctatctgggctggattaatcacgctgattgtgatcgaactggtcctcggcattgataacctggtctttattgccatcctcgccgaaaaactaccgccgaagcagcgcgaccgcgcacgggttaccgggctgctgctggcgatgttaatgcgcctgttactgctggcgtcaatctcctggctggtcaccctgactcaaccgctgttcagcttccgctcgtttacctttagcgcccgcgacttaatcatgctgtttggtggtttcttcctgctgttcaaagccacgatggagctgaacgaacggctggaagggaaagacagcaataaccccacgcaacgcaaaggtgcgaagttctggggggtggtgacacaaattgtggtactggacgccatcttctcactcgactcggtgattaccgccgtcgggatggtcgaccatttactggtcatgatggccgccgtcgttatcgctatcagcctgatgttgatggccagcaagccgttaacgcaatttgttaacagtcacccgacgatcgttattctctgcttaagcttcctgttgatgattggctttagcctggtggcagaaggtttcggcttcgtcattccgaaaggctacctgtacgctgctattggtttctcggtgatgatcgaggcgctcaatcagttggctatctttaaccggcgacgttttctttccgctaaccagacgctgcgccagcgaactaccgaagcggtaatgcgcctgttaagcgggcaaaaagaagatgcggaactggatgccgaaaccgcgtctatgctggtggatcatgataatcagcaaatctttaatccgcaggaacggcggatgattgagcgggtacttaatcttaaccagcgtaccgtcagcagcattatgacgtcgcgccacgatattgagcatatcgatctcaacgcaccggaagaagaaatccgccagttgctggagcgaaatcagcacacgcgactggtggttactgatggcgatgacgcggaagatttgctcggtgttgttcacgttatcgacctgttacaacagtcactgcgcggcgaaccgctcaacctgcgggtgttgattcgccagccgctggtgttcccggaaaccttgccgttgttacctgccctggagcagttccgtaatgcccgcacacactttgcttttgtagtggatgagtttggctcggtggaagggattgtgacattaagtgacgtcacagaaaccattgccggtaacttaccgaatgaagtggaagagatcgacgcccgccatgatattcagaagaatgccgacggttcctggacggcgaatggtcatatgccgctggaagatctggtgcaatatgtgccgctgccgctggatgaaaaacgtgaatatcacaccattgccgggctattgatggaatatttgcagcgtattccaaaacctggcgaagaagttcaggtgggggattatttgcttaaaacgttgcaggtggaaagccatcgcgtgcagaaggtgcaaattattccgctacgtaaggatggcgagatggagtacgaggtgtga

SEQ ID NO: 10651 - DNA, 1140 bp, Escherichia coli
atgatgaaatccaaaatgaaattgatgccattattggtgtcagtaaccttgataagcggttgcacagtacttccgggcagcaatatgtcgacgatggggaaagacgtcatcaaacagcaggacgctgatttcgatctcgacaaaatggtgaatgtttatccgttgaccccgcgcctgattgatcaattacgcccacgcccgaatgtagcgcgccccaatatgacgctggaaagtgagatcgcgaattatcagtatcgcgtcgggccgggagacgttcttaatgtcaccgtctgggatcacccggaactcaccacgccagccggtcagtaccgcagctccagcgacaccggcaactgggtacagcctgacggcaccatgttctacccgtatatcggcaaggttcacgtcgtggggaaaacgctcgctgaaatccgcagtgatattaccgggcgcttagcgacgtacatcgctgacccgcaggtggacgttaatatcgccgccttccgctcgcaaaaagcctatatctccggtcaggtgaataaatccggtcaacaggcgattaccaacgtgccactgaccattctcgacgccatcaacgccgcaggtggcctgaccgacaccgctgactggcgcaacgtagtgctaacacacaatggtcgtgaagaacgcatttctttgcaggcgctgatgcaaaacggcgacctcaatcagaaccgactgctttaccccggcgatattctttacgtgccacgtaatgatgatctgaaagtgtttgtgatgggtgaagtgaagaaacagagcaccctgaaaatggactttagcggcatgaccctgactgaagccctgggcaatgctgaaggcatcgacatgaccacctccaacgccagcggcatctttgtcattcgtccgctgaaaggcgagggcgggcgtaacggcaagattgccaatatctaccagctggatatgtccgatgccacgtcgctggtgatggcgacagaattccgcctgcaaccttatgacgtggtgtatgtcaccaccgccccggtttcccgctggaaccgtctgatcaatcagttgctgccaactattagcggtgtccgttacatgacggatacagccagcgacattcataactggtaa

SEQ ID NO: 10652 - DNA, 1239 bp, Escherichia coli
ttgaataaaatagtgagcaaaagtgaaataaggaacgtaatccacaatgctggctatatgatgattactcagatagctttatatgttgcaccattatttatactgagttatctgttaaaaacactgggggttgcacagtttggtaattatgccttaatactatcaatcgttgcatatttacagattataacggattatggtttttcttttagtgcaagtcgtgcgatctcacagaatagagaggacaaagaatatatatcaaaaatttatctgtcaactatgactatcaagttggcgatatgcgctttcttattcttattgctcatgctatttttaaatcttttgcctgtgcaagctgaattaaaacaaggaatattatatggatatcttcttgtaataggaaatactttccaaccacaatggtttttccaaggtatcgaaaaattaaaaatcatagccctttctaatgttatatcaagatgcgccgcgtgtttacttgtatttatctatgtgaggaatagcgaggatttacaaaaagcacttttagtacagtcacttccattagtaatttctgcgattggattaaatatatttatattgaaatatatcaatattatttttccggaaaaaaaattatttaaggtaattttaaaagaaggtaaggatttttttcttgcatcactttattctgttattctcaataatagtggcatttttctattagggatttttactaatcctgttattgttggtgtatatgccgccgctgaaaagatagtcaaggccgtattgtcgctatttacaccactgacgcaagctatatatccttataattgtcgtaagttttcactatccgtatttgacggcattgaggcagcaaaaaaaactggtataccaattataattttagcatttatagctgctgttatcgttgcaattaccttacctgttgcaatcgactatcttaattttccaaaagaaacaatttttgtaggtcaaatattaagtgcatggatcttttttggtgttcttaataatgtattcggcattcagatattgagtgcatcaggaagaagtaaaatatatagtaggatggtattcgtatcagcgcttataacattacttttgattactctattattgcagttttgtaacgccactggagtggcatgtgcaatattattgggtgaaatgttcttatcaatattgttacttaagcgatataaaaaaataatttaa

SEQ ID NO: 10653 - DNA, 441 bp, Escherichia coli
atgaagggatgtgcacgttgcaacaaaaaaagaagcgtccttgaacagaggctctcactcgataaagaattctgcgacgagtgcttattcgatatcgatgaggaaatcagggaatgctggtccagtaaccgggtgagcagtgtctgccagatggtgactggagacgggcagcacgatacctcccgtacatgcgtgtcgggtaatgttttcatactgaagattttcctgatatgcagagataaaaaatgggacagtggcgtggtgaaagcaccaggccggagcagaaggttattccggtggtttactttttcgtttcaggtgtcggataaacagccagataaacgtaaccacaggagccgagggtgtcggcttcacaggtcagccccttcgcatacagtgtcacggtatgctgatggcggggattcagttcaccactggtga

SEQ ID NO: 10654 - DNA, 360 bp, Escherichia coli; identical to SEQ ID NO: 2016

SEQ ID NO: 10655 - DNA, 264 bp, Escherichia coli
atgattatctcggaagcgcgttattgcgggtttgaacgacgcaaatatgcccgatgcgcaggtttatcgggcatgagttttgtgcacaaattattaatcacttgtaggtcgggtaaggcgttcgcgcagcatccggcaaacacgaggcacattttaccagcccagcgaatcctgctgaaagcacacagcttttttcatcactgtcatcactctgtcatctttccagtagaaactaatgtcactgaaatggtgttttatagttaa

SEQ ID NO: 10656 - DNA, 1509 bp, Escherichia coli
atggctattagcacaccgatgttggtgacattttgtgtctatatctttggcatgatattgattgggtttatcgcctggcgatcaacgaaaaacttcgacgactatattctgggcggtcgtagtcttgggccattcgtgacggcattatcggcgggggcgtcggatatgagcggctggctgttaatggggttgccaggcgctgtttttctttccgggatttccgaaagctggatcgccattggcctgacattaggcgcgtggatcaactggaagctggtggccgggcggttgcgtgtgcataccgaatacaacaataacgccttaacattgccggattatttcaccgggcgctttgaagataaaagccgcattttgcgcattatctccgcgctggttattttgctgttcttcaccatttattgcgcttcgggcattgtggcaggcgcgcgtctgtttgaaagtacctttggcatgagctacgaaacggctctgtgggcgggggctgcggcgacgatcctttacacctttattggcggtttcctcgcggtgagctggactgacactgtacaggccagcctgatgatttttgccctgatactgacgccggttatcgtaatcattagcgttggtgggtttggcgactcgctggaagtgatcaaacaaaagagcatcgaaaacgtggatatgctcaaagggctgaactttgttgccattatctcgctgatgggctgggggctgggttacttcgggcaaccgcacatcctggcgcgttttatggcggcggattctcaccacagcattgtccatgcgcgtcgtatcagtatgacctggatgatcctctgcctggcaggggcggtggctgttggcttctttggtattgcttactttaatgagcacccggcggtagcaggtgcggtaaatcagaacgctgaacgcgtgtttatcgaactggcgcaaattctgtttaacccgtggattgccgggattctgctgtcggcgattctggcggcggtaatgtcaaccttaagctgccagctgctggtatgttccagtgcgattaccgaagatttatacaaagcgtttctgcgtaaacatgccagccagaaagagctggtgtgggtagggcgtgtgatggtgctggtggtggcgctggtggcgattgcgctggcggcaaacccggaaaaccgcgtgctgggcttagtgagctacgcgtgggcaggctttggcgcggcgtttggtccggtggtgctgttctcggtgatgtggtcacgcatgacgcgcaacggtgcgctggcggggatgatcatcggtgcgctgacggttatcgtctggaaacagttcggctggctgggtctgtacgaaattattccgggctttatctttggtagtatcgggattgtagtgtttagtttgctgggtaaagcgccgtcagcggcgatgcaaaaacgctttgccgaggccgatgcgcactatcattcggctccgccgtcacggttgcaggaagggtaa

SEQ ID NO: 10657 - DNA, 696 bp, Escherichia coli
atgatgacgaccttaaccgctcgaccggaagccattaccttcgatccgcagcaaactgcgctgatcgtggtggatatgcaaaacgcttatgccacgccaggcggctacttagatctcgccgggtttgatgtctcaaccactcgcccggtcattgccaacattcaaaccgccgtgaccgcagcgcgagcggcagggatgctgatcatctggtttcaaaatggctgggatgcacagtatgtcgaggctggcggccccggctcaccgaattttcataaatcgaacgccctgaaaaccatgcgtaagcagccgcagctgcaggggaaattgctggcgaaaggctcctgggattatcaactggtggatgaactggtgccgcagcctggcgatattgtgctgccgaagccgcgctacagcggtttcttcaatacgccgctggacagcattttgcgcagccgtggaatacgccatctggttttcaccggtatcgctaccaacgtctgcgtcgaatcgacgctacgcgatggcttttttctggagtatttcggcgtggtgttggaagacgcaacacaccaggcggggccggaatttgcacagaaagccgcgttattcaatatcgaaaccttttttggctgggtcagcgacgtcgaaacgttctgcgacgcgctttctcccacgtcctttgctcgtatcgcttaa

SEQ ID NO: 10658 - DNA, 135 bp, Escherichia coli
atgaagaaaggcgatgccgctgaacatgcagagttccatatgaaagacaaccgctgggtgcctggctggatgtgttcaccacgtccacagacggatgccactgaacgcgccgataacctggctgatgccgcctga

SEQ ID NO: 10659 - DNA, 720 bp, Escherichia coli; identical to SEQ ID NO: 8275

SEQ ID NO: 10660 - DNA, 207 bp, Escherichia coli
atgacgattgcagaacgtcttatacagaaaggtttcgacgaaggtttcgacgaaggttttaaagaaggttttaagaaaggtgcgcttgaagtggcgcgggaagcagcctgccggctgcgggatatgggctggacgccggaacggattcaggaggcagccggactttccggtgaagaactgaaaaaactgtttcctgatgagcagtag

SEQ ID NO: 10661 - DNA, 1086 bp, Escherichia coli
atgtcgcaattaaaacaacctattttcctgaaaaagataaaaaaagtcatcaacacaatccctgggcttgaagagcaaatctttgcatgccgaaataaaaaacgcagcgacaatccattattatttatcgacagaaaagatgaagaacgcatactaatgagtcgtctccagagccaacaaaaaaatgaagaactggcttctaaactagaatctttatttcatggaaaagaattatcgtcaccacacagtattttgtgttttatatactggcgctatacaaagaaaatttatcgcctaagcgaggacatcatcagtgatgtggctaacacctatgttgataacattcctgcacagatccttaaggaactcccttcatggagtatctatgtttcagccgaaaatctgcatactatacttcctacgtcctatccgatacatggatttttcttttatccatttttggacaataatggaaatattatccggcttttcattattgatgatctgaaacaaagccaaggaactacagggctaaaagaaaaggatgttgacgtcgtcaataatatcatcagaataaaggactctcgtgaaggacttcttgactccagaaagatggagtgtatcgatggtgaagtcgtcgtaacagttaacgaaaagctcaaagatttcagagacagggagtttaatcttcttaacgcacagatatcaatggtgctttatatctgttcacagatcaatgatataaaagaaaaaaatcaatttaaacggtcagaaaagcacaaaaagcatgttcacactcaccatgaactaccagcacaaaacattcgggagtgggacgttggtattcgaatggggcaagccatacggcaatatcgccaagcagaacccacagggaaagagcggacaacaataggtagcaaacgtcctcatatacgccggggacactggcatacatactggacaggaagtaagaaaccagaactagcccatgagcgtaaacctagattaatatggttacctccggtaccagttaatttagaagacgtaaacaaactaccggtggtaataacgcccattgataaatga

SEQ ID NO: 10662 - DNA, 297 bp, Escherichia coli
atgtcagctctgaggcatgttctgtccggcatattgttcagcgggaagaacaggttacaagtcctggccaaaacatcaggtggtgctggttttggtgctctggtcggagaagaactgtctataactgacactatagaaaccgttgtgacaggcagtgtaagagcgaacaacggggttctttctccagtgatggagaagcggatgattaatctgttaatcatcgttctcagggcagtagttgccgttgcaaacgcgctgattgctgttctggaactgatccgggaacttatcgactga

SEQ ID NO: 10663 - DNA, 615 bp, Escherichia coli
atgattggagcatatgcaaaccgtggcggcacccattctaaaaaagaaacatgcgtgatcgcattcgcacttttctacattattttcgccgtcccattactaatcatttggaatacacctaccagttggggactagcagtaatcccaactggattcctactatactccggatataaaaatggaagaaagaaaagagcaatcgtaaataatatcctagaacagataaagactgaatatcatgatgtattcgatccagacccatcttacgaacacaaatcaataccatcattatatttcggaattgatatcaaaaaaggtactgcgttatatattcggctttaccccaataaaacattagatgtcattggcattgatattgataattttacacggacagtagtaagagaaaactgtatggaaatacacacaaagtatgtcaatatgccaatgttagaattgcctattggtgttaactctgctcgttctattgcaaacacattgcacgcaatggcaagtcgaggatatgattaccctgtcgactttcctcgcctgattcaggaaaagcgtaaggagtgggagcagattgcaggcatgcctgtagccgaagtattttaa

SEQ ID NO: 10664 - DNA, 2169 bp, Escherichia coli
gtgaaaattttacttcgcgcactctgtgcaggccttgctatatcctcactgccggcaatggcttcagtgacctatcaggatattgtgtctgccgcaaccaatcctgacgatctgtcccgtcaggcgctggtcacgatattcggtgatgtggtcaccaatccactgtcaaccagcgcccccaccctaatcggaagcatgttcggggcgttcaacagtatcatcgccgtacttgccgttgtctggtttatgttcattggtatccgtcatgttgtgcgttcggggcatcagggacaggtattcagcaccggacgcgatgtcgtcggcacactgagtgtcgttgcaggttttctgatgatcgttccaaccggaaatggctggagtctcgctcagctcattatgttatggggcgcatcgataatgggggttgggtccgccaatgtgatggttcaacttgccgctgataatatcgcaaatggttattcaatgactgtacagccagttcaggcatccacacgaacagcagcgcgtggcatttttgaaatggaactgtgtaagtatgcggttaacgcaggactaaatgattttaatcagacggccaaatcctcgacttcactgatgacagaatcagctaaaaccgccagtggtaattacactgtcacggtatccaatggcagcggtatctgtggtacagccagcctgtcagtagaaggaaacggaacaacagatcaatcgacgattggaaaattctttaatcccttcagtaaaaacgaatacagcggtgttatctcagcacaacgtgcagccatggataatatgattagcgacatggacaacgctgccagtgagtttgtgacaacatttctggaaaaaagaaattctggcaacggaacattgccggatatcgagacacggattcagagagcagccgacgagtatgagcgtgctgtacaaaaatcgctacctattgataacggagaacaatccaggaaagaagctctcaagtcttatctcacaacctatggatgggtaacgcttggcgcgtggtatcagacctttgccactgctaaccagcgtctggcagagctggctgacagagctccagctgtaacttcaatgtcatcacttggggaagttggcgatactgatttatttagtgctgttatgggggcatacaagactcaattgcagaattcaacttataccccacctttaggtactataacttcagcagacgaacaactactttcaaaaacaagcacgccacaagatgctttaatcaagcccacagagaagtttgggcaatggcttacgaacaatattgccaccgagtggactgattcgggtacaagtagcaatcaagttaatccactgataaaaatgaaaaatattggtgataaaactatggtcgctgcagagggtatttggattacttatacatctgctagagttattacttcaggaactgggagttctatatttggtaaattcatagatttgacgacaagtgctatttcaacactaaatgccttacttgaggccttagcgccccccgtatactttctgttactactgctgttttgtgcaggattctctttatctatttatttaccatttattccgtttattttctggatgactgggattggtaactgggtcattagtgtattaatcggatgtacagctggacctctgtggggggcaactcatctaggcacatcacaggacagagggagtcgtgctgcctacggttatatatatttaatagacagcatgataagaccacctatcatggttttcggattcttttttgcctctgtagccattatagcaataggtactatattaaactttttattcggtgctgcactgaccaatgtacaaataagttcatttacaggtatatttagcctcgcaggtttcttacttctttatgctagaagttgcacaaccattgtagccgcagcatttgccttacaagcatacctcccagaccatgtaattaatttcctaggaggacgtgatggtgtaaacacgcttggcaatatggctggttcaataaaagagatttttgctggcagcaatagaaacataagacacgcacctaatataagagaggagcaaattaaaaggatgaataacgacaacaataaggatggaataaagggataa

SEQ ID NO: 10665 - DNA, 135 bp, Escherichia coli
atgcagaaaaccctcaaggttggaagccgaattactttgcaggatcagttgcaacttatgatgcaaatcgaattgttaaatgtggtttttatgatgaatacaatttccataaagggacatttagagctgatttaa

SEQ ID NO: 10666 - DNA, 135 bp, Escherichia coli; identical to SEQ ID NO: 10665

SEQ ID NO: 10667 - DNA, 615 bp, Escherichia coli
atgttaatccaaaatattgatgttaacgctctgaagaaaaatgagaaagaaacgtctcatgacaaaggctggggtattatggaacagggtgcaatagcacttgttgtaattatcgtacttgcccttgtttttggtggattgtatatgttgcgttcacgaaccggtgtggcaaatgaaagttcgaacatacagacaatcatcacaagtactcaggggctgctaaaaggtagcgatggatatacgtttaccagtggaaccaaaatgacgggtgctctcattcagatgggtggcgtacccaagactatgacagtgcgtggtactccatcatcaggtacagcaacgctctataactcatggggcggtgccgtaactgttgctccggcttcaacatcaggtttcaacaatggttttaccgtcacctatgaaaaagtcccacaggatgcctgtatccagattgccacacaaatcagtcgtactggtttaactaacggtattaccctgaacagtacgactcacaatgatggaaaagtcactactgaagaagccagtgcgcaatgcacagctgataatggcagcaccggtacaaacaaactaatcttcaccatcaatggctaa

SEQ ID NO: 10668 - DNA, 267 bp, Escherichia coli
atgaccaaattaatttggactgtttattatgttgtcctactcacaattttctgtgtggggatatttactgcaatacattatctgatttcaagagaaacaacagatgacgaatctgacattaataccctgtaccttgattcatttaaaagtaaaaacaactgcaaatcatttgaaactaacaccaatttactggataaaaatggtaaccctgtggaaataatggtgtgtgatgatcaggaactgcatttttttgttccaaagaattaa

SEQ ID NO: 10669 - DNA, 261 bp, Escherichia coli
atgaacgcaactgaagcaaaatgtttattcttttcctgtgccggagtgctcatccttctggcgtactgcatccagttattagacgatgctcgctggaaacaatacagacaagaacaccagtgcaccgtgacggactcccgtgaatctgaacccggtttaatattcacccgtcctgcccaggaggcctggacatgcaacgatggctctgtccactggaaaaaactcgaccctaaccgtgacggacttctgtacggagaataa

SEQ ID NO: 10670 - DNA, 948 bp, Escherichia coli
atggaaaacagtgacgatatccgtttgattgtgaagattgcccaactctattacgaacaggatatgacgcaggcgcaaatcgcgcgcgaactgggtatttaccgcaccaccatcagccgcttgcttaaacgaggccgcgatcagggaattgtcaccatcgccatcaactatgactacaacgaaaatctctggctggagcagcaactgaagcaaaagtttggcctgaaagacgttgtggtggtgtcgggaaatgatgaggatgaagagactcaactggcgatgatggggttacacggcgcgcaactgctggatcgcttgctggaacctggcgatattgttggtttttcctggggccgcgcggtgagcgcactggttgaaaacttgccgcaggcggggcaatcgcggcagttaatctgcgtaccaattattggcggaccgtccggtaaactcgaaagccgctatcatgtaaacacattaacctacagcgcggcagcgaagttgaaaggggaatcgcatctcgcggattttccggctctgctggataacccattaattcgtaatgggatcatgcagtctcagcactttaaaaccatctctgcctactgggataatctggatgtcgccctggtgggaattggctcaccggccattcgcgacggcgctaactggcatgcgttttatggtggtgaagagagtgacgacctgaatgcccgccaggttgctggcgatatttgctcgcgcttttttgatattcacggcgcaatggttgaaacgaatatgagcgaaaaaacactctctatcgaaatgaataaattaaagcaggcacgatattccattggcattgccatgagtgaagaaaaatacagcggaattgttggtgcactgcgtggaaaatatattaattgtctggtaacgaatagcagcacagctgaactattactgaaataa

SEQ ID NO: 10671 - DNA, 708 bp, Escherichia coli
atgaatacttttaccttttccgatgaagctcaaatactaactgtatataatttttcacaagactcccaagaatatatcggtgagtctgatgcatacattgcacctaatacaggcttgccaaattattgcacattaatttcacctcccgaaaaggttcctggttttactccagtgtgggagaatgaaacatggagacttattgaagatcatcgaggccaaactgtttataacaaagttgatggtagccagcttattattcaagaattgggccaattacctgaaaatgtaacagtcatttccccgacaggttcttttgaacgttgggatggtgaaaaatggcaaccatctataaccgatgctaaagaggcgaaatactctgcaatcaaaaatcaacgcgatgccatcacaaccgattacatcatcatcaacaaccatcacttccacagtgatacaaatagccgtatccaacagctttcactcacaaaaatgggagcggagaaaaaaattccgccaggtttaatgtggaaaactaaaaataatggtctgattgagttaaccaacgaaatcgctgcccagtttgaatcggtcaccatggatcacgatatgcgcttgttcgcaaacgcccagcgtcatatcgcggcggtggaagcactggacgatattcaggcggtgctcgactacgattattcaacaggctggcaaccatga

SEQ ID NO: 10672 - DNA, 573 bp, Escherichia coli
atgttttgcgaagaaaaagtagctcaaatggctgcatacctacttcttaagcgaggtgggcgcatggcatatctgaaattgatgaagctgctctatctgtctaaccgcaagtcgattttgaagcatggcaggatgatcggcgaagatagtctttactctatgaaatttggtccagtcatgtcgaatacgctgaacttgattcgtggtaaggctgaaggcattggtgactactggtacaacttgatagagacgaacgggcatgatgtgttgttgcgttcagatccgagggaaatggatgcagacgaggtctttgatgagttgagccgtgcagatatccggattttagatgaaatctattctctgtatgggcatatgaaccgatttgatctcgcaaacatgacgcatttagaaagcgtttgtccagagtggcataatcctggcaattctcgtaagcctatagacctgaaagaaatgctgatcagtgagggtaaaagcgaggatgaggctaatcgtataattggcaaaatggaagaatctcagaaacttaaggaattttctttgcaattatcatga

SEQ ID NO: 10673 - DNA, 420 bp, Escherichia coli
atgacggattatcagccatacaggaaaggaactgtgcttgccccaactgggccatgcaatcatcttcatgtgatttgtaatgatcctgtttattaccccgttaacgattgttattgtgttttagttgttaatatttctagtatcaaggatggtgtcccccacgatccgtcttgcgtcttgaattctggtgatcatcgctttatcaagcatccaagttatgttgtttacgctgaagctataatttggcgagtggataacatggttagaaagcagcgatcgggtgagatttctgttcatgatgatatgccagaagctacattcaatagaattctggacggttttgatatatctgatgaagttacgccaaagaaccttaaatttaaaaataaatattgcgtatcatctattgatgatgagtaa

SEQ ID NO: 10674 - DNA, 174 bp, Escherichia coli
atggaagatcaaaaagcaaccaagccacaggttaagttcgacacaatgaaagcattcgcaggtatgggggctgctgctgaagttctgatgaaggctgctcctaatgcgttcactcacgctattgtctctggtaaagagcagcagggtaagcttcgtcgtcgcaaagcagcatga

SEQ ID NO: 10675 - DNA, 282 bp, Escherichia coli
atgaataccttgtttttactgatggctgaattcaataccccaaacattgaactctcagcagttagtcaaaaatactttggtatgagtccagccacagcagaagcaaaagcaaacgcttgtaagttgcccgttccaacatatcgcatcggcacatcacaaaaagcaaaacgttgcatcaatattcaggatcttgcggaatatatagacaaaagacgagaagaaggacgtatcgagtgggaacaggtcagaacaggcaaacagaagggcaaagaacatcactaa

SEQ ID NO: 10676 - DNA, 753 bp, Escherichia coli
atgtggctatggtccttatttgacattaaattcttatctattcttgccgctgccttcactatatattttggcgtgcaaaaaatatcaaaaaaggtgacagtgtcgtattcgacagatgtaagtagaatatatgacatgcatatatcaaccataatcctgaataataaaagagataatgcaattgctatatcttcaatcaatatggaggttgaaggtaaagggatactacaagttattaaatttgactcccctcttcttttaaagaactatgattctttaaaagttgaaccaccaaaatttagcagcctttataataatgatggcgtagttaagttagatatttctgataagtttcatttttatataatcacgacatctggagatgaaattaaatgtatttctgaaaataaatatgtggcaccaaacatggaaaacaaaatagctacagacataagaaaatttaatggcattgtcttaacaaacagaatgtcttatatttttttctatgcaaatgacaacggagagaaatactgcataatagatgtttcattgttcataaatggtgacaacccatttcattttaattttttaaaagaagatgaattaagagatttttctagcatccttattggttacagatatcaccaacggtttaaaagttatgcattgtttaaaatagacaaccatcttgctccttctttggttttaaataagtcaatgatagaaaataatattattgaaatgaataagtaa

SEQ ID NO: 10677 - DNA, 333 bp, Escherichia coli
atgcctctgcgcacccgatccttgccatcaactgacgagttagcgcatctgcgagggctttctgcgtttctgccagtgaatattctacacacaatgggggagcggtcagcgagcaccattgccattgagcgcaacggagagcctggggacgcgcagcataacggaggcttcatccgcttctccagtcatgaaacaacatggcgaacgagcgcagcgagtgagggaaggcgtcagcctgaacagggggaaagatttgcgaccggagtggagcaaatcatgggcggagcccgtcctcgcgactggggttttgactttcaaattgctcagtgttga

SEQ ID NO: 10678 - DNA, 1443 bp, Escherichia coli
atggccaatcacattcaaggacaaggcaggcaccaggtgacattactccctgatgcactggatgattttgtcactgaagataaccccgtcagagtcgttgatatctttgttgatggactaaagctcgattctcttggtttcagaagagttgatgcaaagcgaaccggacgacccggatatcaccctgcaaccctactgaagttgtacatttacggatatctcaaccgaattcagtcctcccgcagactggaaaaagaggcccatcggaacgttgaactgatgtggttacttgaacgattaacgcctgattttaaaaccattgcagacttcagaaaagataacggtgaaggtatcaggaatgcctgtagggcctttattggcctgtgccggcaaatgcaaatgttcactgatgtcgttgttgccatcgacggcagcaaatttaaagcagtaaacagcaaacccaacaacttcacatctcagaaagccaaagaccatattgagcgcgttgagcaaagtattacttattatttaaacaagctggatgaagccgacaagaatactgagccagatgcaaacacaaagttaactgccactaaactggcctggctaaaaaagcgtttacgtgagcttcaggagatccaacaagcagtcgcacaacagccagataaacaactctctttaaccgaccctgactcccggttgatgaaaacaaataatatgaatcggcaagtttgctacaacgttcagacagctgtggatacgaagaaccacttgattgttgcgcataaagttaccaacacaacagataatgggcaacttggttcagtagcaacactggctcagaaagctgttggccggaaggacataacagtacttgccgacaaagggtattacagtcgcagcgatattaaaacagttctggatagcggagccgtggcgttagtgccaaaaggagatacctctggtgctgaacgtaaggggctctataatcgctcaatattcagatataacagggaaaaagatgtttatgtatgcccaatgggcaatgagcttcagaatcgatttatctcaatagaggacggactggagcaacatttatactttaacaatattgcctgtcgcgattgcagccagcgctccaggtgcactacatcgaaacgcgatccaaggcgtatacggcgttgggttcatgaagctgaaatggaagaaatgcatgcgaggcttgagtcatttcctcaggcggtagtcatgcgaaagcaaacggtagaacatccgtttgggacaattaaaatgtggatgggtgcaacgcacttcctgatgcggaaatttaaaaatgtcagtacggaaataagtctacatatattggcttataacctgaaaaggatgatatcgatatggggtactacaggattgatatttcagcttcaggaacaatacggctaa

SEQ ID NO: 10679 - DNA, 336 bp, Escherichia coli
atgaacaacattccctctatgccgcagttagggatttatgtctcaaaaatcgatcccacccttcgcatcactgtaaccgacgttgatattgttgatgacgatgatgagtctcctgatgatgaattgttttatttagtccgctggatcgagggggaagatgaaagtgatatgtcggcgatggaatttgagctaggcccagtagagtggcatgcttttgttgagtctgagcaattagtgtttgagcgcgatccatacatggattcagcccccgtaaattcaaaccttgcgaaaatccgggatttactcatgaagactaaacagaatgatcgttcgtaa

SEQ ID NO: 10680 - DNA, 384 bp, Escherichia coli
gtggacactttgtctattaaagggattcttgaagttttcgttaacaattgggttcctggtatcttcaccttctttttaggtatctgttactcaaatatcgttgaaaaaaagaaacttaagcagaagctaaagaacgatattcttgagatcttcataccggtctttaatgcaggaaacgagatctcattcgaaatcgcggaaaatgcctgcaggaagatgaaaggtacctttcaggcatacaagagaatatatccaggtatcttcaacaaagaggtagagagtgaacttgaagacctacttaaagatggtttcctcataaatggtgaagttaatccgcattactttgaaccagccaatattgagaatctgattaaaaaattatag

SEQ ID NO: 10681 - DNA, 4770 bp, Escherichia coli
atgaaatcgcatgaagatggattgaccgaacaggaaaaagaatggttttacgccctaatgcaagatcgtgcggataatgctaacactctggaaaaaccatcaatgcgtggtatccagcgcagcgttgtggacaagtattccgaccaggcgcatttcatctacgagcttttgcaaaacgcagatgatgtcagagcaacatcggtgagcttccgccttgatcaagatggactttatttcattcataatggctctattcacttttccgtatctgacccgcactgtgaaggtgaagacgctggcaacggtgctttaggacatattaattcaatcacctccatcgctaactcaagtaagacggaggcgtctataggtaagttcggtgtaggatttaaagctgtctttcaatacacgcaaaccccacacatatatgaccctggaattcgttttaagatcgaacgtttcatcgtgccgcagatgctaaatgctgaccttgattggcgtaatgcttcagataccgtttttttctttccgtttgaccataaagaaaaaacgcccctggagagctacaacgaaatttttgaaaaattgaaagcgcttgaatttcctgtcttattcctttcgacgttaaaatcggtatcctttaccgtaggtgaaactactggcagatatactaaaaaaattgtagaggaactggagcaagaagacattctggcgcaaaaactggtgctgacattagaagtgggtgacagtaaggctattcatcaattactcctatttacacacaatcacgcgaacagaaatgcctgcacaatcgggtatgcaattggagaagacgggaaactcgagcctgttgaacatccagcgttctgttttttcccgaccaaagaaataacgcatctgaaatttatccttcacgcgccatttctgttaacggatagtcgtgaaggtatcaaagcaggagaaaagcataaccagcaactgattcagcagctggcgaaacttacagcggatagtttacccattattcgtgataaaaaactgctcgatgatggcatctttgacattattccctatgacgaaaatcagttcagtgaactagacgaccggagaaaaatttcgttcaagccgttttattctgctatcaaaaccaaactccagaccgacacgttgctccccgccgccaatgccaactactcaccaaaaaactgctcctattgggcagcagacagtgaactagttgaattattctctgacatgcaactggcgcaattgacgggtacagagaacgcaagctggatttttcgtagtcgtggcaagaaagacgtacaaaatgttaataaggccctggccgaatacatcgacggcggcgatgctagggtatggtcaataagagaacctaatctgatcgtatcaagtcttgatcccgaagctacccttaagaaaattaccgctgacttcatcgccagtcagtcaatagaatggctgcacagactctatatataccttgccggacgcgattcttaccaaaaatttgtgaaagataagcctatctttcttgaccagcaaggtcaggcaatcccggcctttgacgcctggaatcaactcatcctgtttctaccagacgacgatattgacggctacaagaccgtcaacgccgaattgctgtccgacgagagcactcgtgagtttattgaaaaatttggaatcaagaagccaagcctgcgtgatgagatctacaacaagatcctcccggcctataacagcaccagcagccctgttaacgcagacacccatttcggccgattcttccgttacttcaaagagtgtaaaaacgaagacgtttcagaatttattaagcttattaaggataaagcttttcttctctacacaacggctgggaaaaatgagttttctcatggcaaagccgatgacatctatatgccgaccgaggatttgcaaacctggttcacgaccaagccagaaacaccatttctgtttttggacaaataccacgagatgtttagcgaaaaagaatatcctgcactcaaggactttttcaaaaaactgggaattgcggatcgccctaaaataatcaccgaagagcgctatattgagtggcaagagcggcgcgatcgacacttatccttagagggacattcgcacaagctgtatgaaaaaaaccttgatggctgtcagcagatcatggcaaatattgacttgccacggtcactcctgctgtggaaattacttccacaattcattcaccagcttagcggcaagcatgtatggttttattatacaaatcgaagcgagtcttacgaatccgcagagcaagaaaaattgcgtacaacccgttggatccttgataaggatggagcatgggtttcagccaaagagatcacgattcaaacgcttgcagagcaatacgacatagtcagtgcagaagcaaagatgctcatcaactttttgcacattcgcgatgagacacatttaagccccgaggaagccagaaaaattagactggcggatgcaattgaacactccggtttgtcagaggacgaaatccgcatagcgattgaagatgctaagcgaaaaaagcaagattcatcccaacccatcgtggagcccgttgacaaagatcagccagcggccgactcaccattcatccgtgatattgctcgacgccgtccatccatccaggacacccactcggatggcccgcagaaagacgattctgcggcagcagatcgtcaaagcgacgaaagcatcgacacagacgattacacgccaaaaacggttgactacggcaaaaaaattgacttggccaaagaccgttatgccagtgaaattgactgtctggagcatgagcagacgttatatgacaaggccaacgaattacctcgttacagttatggctggtttctggctttgctggaacttgagtgcttagcaaccagaacaaagaatgctgacagtaagactatttctattggctttggcaaggtggagcacgatgaacaatcatccagaaccatcgtactgaaagaacccagtcgcttcattccgcaatctattgaagaactttccggcatacgtgtggatctcgattttggtaatgggcgtacaggaaagttacatattgagtcgtttacggccagagaattttcattacttggtaaactggaatctgccgatgatttacaagggatggcactggaagaggtggtggaagcacgtattgaagtccagaatccatcgttcctgcagcaggtgttgctggaacgattccaggaattgagattaggcgaaacgtttgcgatgaaagcgggcctgacgtctgacattgattttgtgtttggtccaccaggaacaggtaagacgactcatctcgcagaaaaagtactgataccaagaatgaagggtagtgggaaggaaaacgtgcttgtcctagcgccaaccaacaaggctgcagatgtgttgacgacccgcgtcatggaggcgatggttggggatacctcatatcaggagtggttggtgcgtttcggatcatctgttgatgtgcgtattgaaaacgctggagtatggcgggacagaacattcaacatcggcgcattggatcgctctataacgatcaccaccattgctcgcttcgcctatgatggatttactggtgagtatggtaagaaactttatgaaatggagtgggataccgtcgtcattgacgaagcgtcaatgatttcgttagccaatatcatctatccactttaccgcatacacccacgaaagttcattatcgctggagatcctttccagatcgggccgattgttgctgtagaagaatggaaagatgagaacatttacacgttggtcggtctcaataagcgaggttcttttgcgcagccgtcgacagagcctcatgattacccgatagtcaatctggaaacacagtaccgtagtattcctgcaattggtgaagtttatagccgtttcacttatgacgggatcttgcaacatcaccgtacggcagaatctccctgttcgtttagtttctgcgaattcgatgctatgccgataaatctcatcaaatttccggtcagtaaatatgaaagtatttaccgggcaaaacgaatggaaagcggaacaccttatcagacttattcagcattgttcactttcgagtttgttcgctggctgtcagggaagatacagagaaaaaattcagagataatccgtataggagttatcgctccttatcgcgctcaagctaatctactgagcaagttgaatgattcatggcttaccaaacctgatactgtaaatgttcaggtcggtacgatacacggcttccaaggggatgaatgcaatattattattgcggtgcttaatccgccgccaaacatttcaagtgactcccggatgttcctgaataaacagaatattcttaatgtagcgatcagtcgcgcacgcgataacttgttcattgttatgcctgatgctgaaacagagaatattggaaatttacgcaaagttactgagattgagaggctggtgaaagcaagtgatgcgtactacgaatatggatcgaatgaaattgagaagatgatttggggcaatgcaagatatcttgaagagaatatattctcgactggccatcagatggtgaacgtttatcggaagcctgaacgttactacgaggtacgtagtgatgattctgcgattgatattcagattcatgaaaaacaaagcggaagtaagtcacagataccttga

SEQ ID NO: 10682 - DNA, 909 bp, Escherichia coli
gtgagggacgatttctcaaacaaaattaaacagaggttggccgaacgcgtagcatggctttgctccaatcccgattgcagagttgtgactgttgggccccatacagatcctacaaagcgagttaatgttggacaggcatgccatattgaagccgcatctgaaggtggcccccgctacaacaaggaaatgcaaaaagatcaaagatgctcttttgacaacggtatttggctttgctctatccatgcaaaagaaattgatgtagatccagaccgcttctctgtagagcttcttcgtaaatggaagcttacagctgaacagtatgcgctgagtaaagtaggcaaagcgagatatgatgtatctcaggatgtctttacggaaaatgtaaatcgccatcgtgaacttttttcaggtattcgtgatattgaatatttcagtttatatagggactcaaatgataaatgcttcactttgcgcggtgttgggcctttaaatataatcgtaaaagatcgtagaatagatatcttttttaaagattcattcaatcccatcaaatatagaaatgattcttacataggattaatatgcttgccagtaaaggaattaattgattatgtagtattatctcacgagtttgatgaaacaattgagtcctttaatatgacatttaactttagtccaaactcgttgaatgaaatgtatttttcgatccacacggacacggttaacgttaatccacacatggatggtattagttattatggcgattacacagtagagatggatgaattaatagatgatttaggtagagctatacctccttatcggcaggacatttaccttaagattattgtagcaatgtacaacatttaccgacgaattgtaacatacaaaacagaaggatttacttaa

SEQ ID NO: 10683 - DNA, 2139 bp, Escherichia coli
atggaaattgaaattaactgctgtaataacatcgataaagcaaatataactctggcagtaaaaaaattaaatattaaatttgcgcctaacggcaccggaaaaagcaccatttcccgcgcgattcagtgtacggtaaacggggatgaacaaggtctcagcgacctgcttccgtttagataccgtggttctaatcccgatgcagtacagcctagggtaactggtgtcgatggcctgcaaaacgtcatgtgctttaatgaaaaatatgtcgatcaattcacttttcaaccagacgagttagtaagtaatagttttgacatcttcatcaaaagtgaagcgtatcatgagacagaacgcgaaatcgaagccatggtcgtggccatacggcagcagtttgctgataacgtcgggcttgaagaattcatcacgcacctgggggaactcagcgccgcatttaagctgagtagtaccgggattgcaaaaacgtctaccggtatgaaaggcttatcagccggcaacaagcttcagcacattcccgacggtttggaatcttataagccgtacatccaaagtaaaagcagcgtagagtggatcgagtggcagacccgggggtatgagaaattctccgcgctatccgacggctgctgtccgttctgtactggcgactcccgtgaaaaggccgagcagattagccgcgtcagcgcggagtatgataaggctgtcattaaaaacctgatcggcctgatcggcgtgctagataaactcggcgaatatttttcagagtctgcccgtgcccgcctcactgatattacaaccctaaaaagtgggctggaaaaacagcacgaagaatatctcgtgacagtgaagaagcagacagacagcctgataaatatgctgaatacccttaagactcttaacggctttacattcagcgcttcaaccaacgtcaaggctgcactggaagcctgtcgcctagacgtgaagtttttcccggagctgcagtcggataaaacggcccgcaccgtagccagtctcaatacctctttagacgatctgacgacgcaggccggacgcctgcagggtcaaataaataagcagcgtcagggcatgcagaagctgatcctcaagcataaaaccgatatcaatacctttctggcttacgctggctatcgttatcaggtggatatcacgggggaaggcgataaatgtcggctgaaactgcgccacgaagactttgaaggctacgtcagcggcggcagccagcatctcagctacggtgaacgcaacgcctttgccatcgttctgtttatgtatgaatgcctagccaagaagccaggcctgatcattcttgacgacccgatttcatcgtttgataagaacaagaaatttgccatcctggagatgctgtttcgccgcaataccggtgagtgcctgaaaaatgaaacggtactgatgctgactcacgatgttgagcctattattgatacgctgaagtccgtcaggaagctgttcagtaatctggttacggcctcacacttgcgctactgcgcaggctgcatcaccgagcagctcatcggtgaaagtgatatccgcacttttgctcagatctgccagtctgtcactgactctgatagtgaagacatcatcaagttgatctatcttcgccgacattatgaaattatggacgacctcggtgatgcctatcaggtgctgtcaaacctttttcatcaccgtgaaacgcccatcgacacccgtgaacccgttgtgcagggagtgggacatcctgaaatgtccgcagaaaaagttgccagcggctgccaggcaatcgccgatcgcattcccggctttgactaccaggccactttcgttcagctcaccgacccggatcgtatacgtgcgctttatctgctctgccgtaatggctacgagaaactgcaggtgttcaggttgcttcagaccggagtcgaaaacgcagtcatacgtaaattcatgaatgagacctaccacattgaaaatgaatttatctgtcagctggatcctgcccggtttgatctcattcctgaatatgttatcagggagtgcgacgcgcttatacttcctcctccaccggcaaatgacgatgcgctggaagaaattgcctga

SEQ ID NO: 10684 - DNA, 249 bp, Escherichia coli
atgaaccatcctgaaattcacgtcaaagactggattgatgttggcaatcgtgagtgtgtggtgcaacgacttcttcctccagggtctcccgtcggcgcctgtattgttgttctgaataaaaccaaaccgaccacccggatcgctggttggaacggcgaaaagtggtacttcatgcccagccatgactttggtggctatgcagatgagtatgatccctgtgtacgtgaactgaatcggggccgtcgctga

SEQ ID NO: 10685 - DNA, 525 bp, Escherichia coli
atggggctactggcccacaaaagaaaggatgtacgagatcgagctatgcgtattcatcagcagaataagtcccgtacactatatcgcagcgtcaacacgacgacgcggcaccattctaataatccgggtgctgagtatcggtgggaacgaaatcgcaaaaaagtcggagatgagctactggtaaagcgtgagacaatgcttagcagacagaagcgtggccgagactacacaccattgttttattttctgatcaaagagattggcaagccgtggaatgaaatattcagcgaagtatgtggacgtcttgataccactgagccggtattctggttggtcgcgctacatgagcatcagcgaagggatttagtctgcattggtgcaagcagtttttacccaggtctgtttgttgatgagaatggaattctgcaacaggtaaacctttcaatcacaagagatgacgttaaggtgacatgtcgttgctgcacacacacttatattggtgaacctgtaccttggatagattga

SEQ ID NO: 10686 - DNA, 888 bp, Escherichia coli
atggatgcgagatacgaagaaaagactttcgaaagttacttcaacaatgagcttgatagaaaaacatctatctatttcccccttggccaggtgcaagaaggcgttttaggcttggactccgttgctcattctagaggatggtttctgtggcgaaagctcggatatccattctggctctctccgcaattttcaggcgttgaactaagggaaatcgctcatgaaatggagcattaccttggccgagaggttaagaacataccgaccatgaaagttaacttgctatttcagtataagcgtccgcaatacataacgatgtcaagtggttctgagtggcacttatggaatcagaagtatttccgctatgacctgtacactcagcaacataccttgctctcccacatagaaactaaatttggtaacgatgccgtagtcctttacgctgccccttctgtcgtagatgttggcgatttggttaacctaaaaagggctgggtcaatcattgatcacactaactttagacgcgccagagaattggatgggcaccacagaaacacctacataaaggcaggcacatactcgcaagcatgtagtgaaccagaaatgattgaaaattttaatctaattgaaatgattgaagcaatggaaccacgccaatcagaagataacgttaatctaatcattaacttttcaaggcagattaattcagccatgaaggatgtcgaagggattggttatctgaaaaccgcatttgagaatcgtatggatgaatttagagattacggacttcaacagttcgtactgttctactcaatgcttactatggcaatattcagagaggttaccggctgccaatggttaataccatttgacggacgaaaaaatgcataa

SEQ ID NO: 10687 - DNA, 1188 bp, Escherichia coli
atggataatcttattggcacaccaccaaaccactcagttccccataagtatatagacatggagcaaatggaatatttatgtcatctcaatcgtttttctaaattgtctgacgattttttaataaatggtccaagagatgacctttttacatacaaatatgttttagatggctctttttcaaatttacagcatttacttcccaaaggacaactacagaagatacaacagagattaagttctcttattgacaaaaataagttccattgttttcatatttttttattaaaactatgctcaattgaaaatattccagtcccaaatgccgattatgctttctttgatgacgaaatgccatttacattaactgatgaacagatcgaaaatatttcttttttaaacgcatatcacaaagaaaagaaagggaacaacgacattgttacatttgatttcatgagctatgatcaccatcataattttagcacaaccatagctttaacaaatgatagcttccatatatcttcaataaataaccataatgcacaggttatattcgatgaaaacgtccttttatacaccaatgaattaccagaatcatcacagtggtgttatcagttaataaaaaatatgatttctttacattgcagatataataacaacttcaaagtcaaaaaaacctgttcttttgattttaaaaataaatctttttgtcattccagtttgcaatatataacgtttattgcatgtttattttcacatgcaaacatgaaatgttcgacatttcatgatattaattttgatatgtgtgagataaagaattgcaattttgacaattcagaaatgaatttcatttcgtgcgtcgggacaaattttagcggttctacatttaacaatgtaaaaacaacaacagcacaactaattaagacaccaacaaagtggacgaataatactctaaaatattggttctccaattctaataaacgtaatatcatcttcacacttaatacaatatctgatagagatataaaattaaaatgtatcaaggatatattactgtcgttggttgaccaaaaagccaatatttatagtgtaaggcaagagcttctggattttcttaataatgatttatataaaaatgatggagagattctctcttataaagaatcaataatgttgttttgtgctgtgtag

SEQ ID NO: 10688 - DNA, 246 bp, Escherichia coli
atgttaaataaagaagataaaaaagatgcagccaaaattcgtaagattaatgaaacactaaataaaatagatgacgaaatagcaacaatagataaagagattgtaaagcttaaggatgaaacagagagattggagaaagagtatgaacaagaaaatacacttaatgatgtagttcaaaatatcaggagttggctaaaagaaaatcaaaatatggtgaaagctattaagaaaattgatactgaataa

SEQ ID NO: 10689 - DNA, 312 bp, Escherichia coli
atgggagttgagcagaataatttcagggacatgctgaccggttatctgtccggcccgccgcagacgcagcatgtgttttgtgtattcccggcggctctggtcgcgcacgcgggtctggcaggcaaagaacggctgaaagccttcctgctgcagattttccaggacggtgatagtgggaatgtacgcatagtgttcactgcgagaggtatgtcggttttccccaaaaatactcggtacatggcgcatcagttcttcgtgtgtcagcggacgatcacgacgtatctggttcgcataaccaaaacgactggctaa

SEQ ID NO: 10690 - DNA, 885 bp, Escherichia coli; identical to SEQ ID NO: 9865

SEQ ID NO: 10691 - DNA, 1224 bp, Escherichia coli; identical to SEQ ID NO: 9864

SEQ ID NO: 10692 - DNA, 192 bp, Escherichia coli
atgcttaatatctttaaggttatagtattgcacaattttattatcatttggtatgttgttttctttaccataatctctatcaaagattgttttatcgagattgttaatattatgtatgctggtcgcatttttaatttcataggtggccatgttaaaaccctcttatacgatagaatgggaagcaaattttaa

SEQ ID NO: 10693 - DNA, 960 bp, Escherichia coli
atggatgctacccggataacccttctggcgctcgatttgttcggctcgccgggctggagcgccgataaagaaatacagcggttgtatgcgctcagtaatcatgccggacgccattaccgacgcattattctttctaaacgccacggtggtcagcggctggtgttagcccctgattacttgctcaaaaccgtacagcgcaacattcttaagaacgtcctttcacaatttccgctttccccttttgctacagcctaccgaccaggttgcccaatcgtcagcaacgcgcagccacactgccaacagcagcagatcctgaaactcgatatcgaaaactttttcgatagcattagctggttacaggtctggcgtgtgtttcgcctggcccagttgccacgtaatgtggtaaccatgctgacctggatttgttgttataacgacgcgttaccgcagggggcaccaacttcgccagccatttccaatcttgtgatgcgctgttttgatgaacgcataggggaatggtgtcaggctcggggaattacctacacccgctactgcgatgacatgaccttttcaggtcacttcaatgcccgccaggttaaaaataaagtgtgcggattgttagcggagctgggcctgagcctcaatcaacgcaaaagctgcctgatagctgcctgtaagcgccagcaggtaaccgggattgttgttaatcacaaaccacagcttgcccgcgaagcgcgccgggcactgcgtcaggaagtacacttgtgccaaaaatatggcgttatttcgcatcttagtcatcgtggtgaacttgatccttctggcgatctccacgcacaggcaacggcgtatctttatgctttgcagggaagaataaactggttattgcaaatcaaccctgaggatgaggcctttcaacaggcgagagagagtgttaagcgaatgctggttgcagggtaa

SEQ ID NO: 10694 - DNA, 867 bp, Escherichia coli
atgacagacaatacttatcagcccgcgaaagtctggacgtgggataaatccgctggcggcgcgttcgccaatatcaatcgcccggtttctggtccgacgcatgaaaaaacgctgccggtgggcaaacatccgctgcaactctattcgctgggaacgccaaacggacagaaagtaacgattatgcttgaggagctgctggcgctgggcgttactggtgcagagtacgacgcctggctgattcgtattggcgatggcgatcaattctccagcggctttgtcgaagtgaacccaaactcgaagatcccggcgctgcgcgaccatacccataatccaccgatccgcgtgtttgagtctggatcgattctgctttatctggcggagaaatttggctacttcctgccgcaggatctggcaaaacggactgaaacgctgaactggctgttctggttacagggcgcggcaccgttcctcggcggtggttttggtcacttttaccattacgcgccggtgaaaattgagtacgccatcaaccgctttaccatggaagccaagcgcctgctcgacgtgctggataagcaactggcgcagcacaagtttgttgcgggcgatgagtacaccattgcggatatggcgatctggccgtggtttggcaacgtggtgttaggcggcgtgtatgatgccgcagagtttctggatgcgggcagttataagcacgtgcaacgctgggcgaaagaagtgggcgaacgtccggcggtgaagcgtgggcgtattgttaaccgcaccaacgggccgctgaacgagcagttgcatgagcgccatgacgccagtgattttgagacgaatacggaagataagcgtcaggggtaa

SEQ ID NO: 10695 - DNA, 693 bp, Escherichia coli
atgcagtcaataacacctccattaattgccgttattggtagcgatggttcaggcaagtcaacggtgtgtgaacatctcattaccgttgtcgaaaaatatggtgctgccgaaagagttcatttaggaaaacaagccggaaatgtcggtcgtgcagtgacaaaattaccgttgatgggaaaatccttacataaaacaattgaacgaaatcaggtgaaaacagcaaaaaaattgcctggccctgttccggcgctggtaattacagcgtttgtcgcccgtcgcttactgcgctttcgtcatatgcttgcctgtcgtcgtcgcgggttaattgttctaaccgaccgttatcctcaggaccaaattcctggcgcttacgatggtacggtgtttccgcctaacgttgaaggtggtcgttttgtctcatggctggcaagccaggagcgtaaagcgtttcactggatggcgagccataaacctgatctggtcatcaaactcaatgttgaccttgaagttgcctgcgcgcgtaaacccgaccataaacgggaatcgctggcgaggaagattgccataacgccacagttaacctttggaggcgcgcaactggttgatatcaatgccaatcaaccgctggaacaagtgctagttgatgcggaaaaagcgataatggattttatgaccgcgcgtggttatcactag

SEQ ID NO: 10696 - DNA, 990 bp, Escherichia coli
atgggttcttcattagaagatagcgttgacgcaataaaatccattactaagaaaaaaaatacaatatatattggtagttcaatgggaggaacgggagcagcgttatatggaattaaaaataaagcaaaacatgtaatttgtttcggggcagaatatgttttacaactcccttttagccgaagtaaattacatatgcccgaagacattaaagttaaatatcatgatttaacaaatttgttttctaatgccaccgacacaacgttttatatattttcaggtgagcttgacataatcgatctatataatgcatcgttactgccatatacattagaaaatatccacatcataataataaaaaacactggtcataatgtaacaaaaagtattcatgagaactttattaaaattgataaatttattgaaactgtgataaagaatgataacgaagcaacaaagatatttcattgcgaatattcaggaaaagattatttttcaaagtacaacatacatgaaatttataatgcctatgtactaatcagaaacagaaagtacgaccaagccattgaagttcttgattctgtaaaacacaataatataacaaacccactatataatttatattatggcatggctttaactcgacaaaaaaaaccagcagcagccttaccgtttttaacaagatctgtaaaaatagcgaaaaaccgcgatacatattttgaacttggaatagcattgaatcatgtgaataaatttgatgaagccatcaataattataagtgctgtatcaacgaagatccaaattatgctccagcataccatcatatagggttaatttttgaaaaagttaaggactacaaaacctctgagctatacttaaaaaaggcatattctataaaacctgataacctgaggtataaaaatgatttaattagggttttagatattatttataaaagttatagcgaattaattaaagaattaaagaattaa

SEQ ID NO: 10697 - DNA, 279 bp, Escherichia coli
atgaaagattttacgctgaagtttcgagatcgggaaggctataaagcattcttgaatgaaattaattgggaagataatgaagtattgcaagatcaactcctgattgatgaaattggattcgctttcgatgaagtcggcagaaatgccgacgacgaaccaatttatcaacgacgcgacggttattttgtaaatattagaatcttagatgaaaagctggacgcatcaccatttaccggaaatgtagtgattcttgatgctcctcttcgtgaatgggcttga

SEQ ID NO: 10698 - DNA, 393 bp, Escherichia coli
atgaaatttcaggccattgtattagcaagttttcttgtcatgccttatgcgttggcagatgacccgggcggtttaaaacaggatgcagcgccaccgccgcctcatgcaatagaagatggctatcgcggaaccgacgatgcaaaaaaaatgaccgttgatttcgcaaaaaccatgcacgatggcgcttcggtttcactacgcggtaatttgatttctcacaaaggagaggaccgttacgtttttcgcgataagagcggtgaaattaatgttgttattcctgcggccgtctttgatggacgagaagttcagccggaccagatgatcaacattagcggcagtctggataagaaaagcgcgccggccgtcgttcgggtcactcagttgcagaaataa

SEQ ID NO: 10699 - DNA, 900 bp, Escherichia coli
atgtcgcgaaaagatggggtgttggcgctactggtagtggtcgtatgggggctaaattttgtggtcatcaaagtggggcttcataacatgccaccgctgatgttggccggtttgcgctttatgctggttgcttttccggctatcttttttgtcgcacgaccgaaagtaccactgaatttgctgctggggtatggattaaccatcagttttgcgcagtttgcctttctgttctgcgccattaactttggtatgcctgctggactggcttcgctggtgttacaggcacaggcgttttttactatcgtgcttggcgcgtttactttcggggagcgactgcatggcaaacaattggcggggatcgccttagcgatttttggcgtactggtgttaatcgaagatagtctgaacggtcagcatgtggcgatgctcggctttatgttgaccctggcggcagcatttagttgggcgtgtggcaacatcttcaataaaaagatcatgtcgcacgcaacgcgtccggcggtgatgtcgctggtaatctggagcgcattaatcccaatcattcccttctttgttgcctcgctgattctcgatggttccgcaaccatgattcacagtctggttactatcgatatgaccaccatcttgtctctgatgtatctggcgtttgtggcgacaattgttggttatgggatctgggggacgttactgggacgctatgaaacctggcgggttgcaccgttatcgttactggtgcctgtagttggactggcaagtgcggcactattgctggatgaacgcttaacgggcctgcaatttttcggtgcggtgctcattatgaccgggctgtatatcaatgtatttggcttgcggtggcgtaaagcggtaaaagtgggaagttaa

SEQ ID NO: 10700 - DNA, 360 bp, Escherichia coli
atgaaactcaaacatgtcggtatgattgtcgtttctgtgttggcgatgtcgtctgctgcggtaagcgcagccgagggtgatgaatcagtaacgaccactgttaatggcggtgttattcattttaaaggtgaagtggtaaatgccgcttgtgcgattgattcagaatcaatgaaccaaacggttgagctgggtcaggtccgttcttctcgcctggctaaagcgggtgacctcagctccgccgttggcttcaatatcaagctgaatgattgtgataccaatgtttccagtaatgcagctgttgcattcctggtagactggccccctgaatctccagacaaccagtatcacttaaataagtga

SEQ ID NO: 10701 - DNA, 1080 bp, Escherichia coli
atgtctatggagtttatagataagctgaattcattatccgcaaaaataaaacaacaagccggagtcattgaaacggaggaagctaccaaaaatgctttcgtaatgccgttcattaacaatgtgttaggttatgatgtctttgatcctaccgaagttatcccagagtttgtatgcgacattggaacgaagaaaggtgaaaagattgactatgcaatcttaaaaaatagcgaggttcaaattctcattgaatgcaaaaaaattggcgatcctctaaatataaatcatgcttcacagctttttcgatactttcatgtaacaaatgcaagaatatctattctaaccaatggacaagtttataaattttttactgatttagaagcacctaataaaatggatgaaaaaccatttcttgagatagatctacttgacttagatgaaacagttgttcccgagataaagaagcttactaaatcagcatttgatttggaatcaataattaatgctgcaggtgaattaaaatatgttagtttaattaaaaaagttctccatgcacaaatgaataatcctgaagaggattttgtaaaattctttgcagcaagaatttatgaaggtatgttaacacaaaaggtaaaagatacgtttgcaaaattaacaaagaaagctgccaatcaatatattaactctcaaataaacgaaagattgaaatcggcaataggtggtgggtcattatctgtaattgattcgaattcacacaatgaggaagtagaatgtattaataaagaagaaaccgatattgccactactatggaggaacttgaaggatttcatattgttaaagctatagtccgcgtagtgcttgatgcaccacgaatagtccacagagatacaaaaagctattttggtatacttgtagatgacaataatcgaaagccactctgtagattacatttcaatcgaaatcaaaaatatattggtttatttgacttagagaaaaacgaaacccgccatcctattgaatctctcgatgatatttattctttcagcgatgagttaaaagcgactgccgctttatacaactaa

SEQ ID NO: 10702 - DNA, 180 bp, Escherichia coli
atgaaaacttgcataacaaagggaattgtgaccgtaagtttaacggcaatattactcagctgttcgttcacatgggcggcaggtaaaggtggggtcggacttgcagcaacacgtcttgtttattcggaaggtgaagagcaaatttcactgggtgtacgggtaatggtgccaacttactga

SEQ ID NO: 10703 - DNA, 1698 bp, Escherichia coli
atggaaccaaaaacaaaaaaacagcgttcgctttatatcccttacgctggccctgtattgctggaatttccgttgttgaataaaggcagcgccttcagcatggaagaacgccgtaacttcaacctgctggggttactgccggaagtggtcgaaaccatcgaagaacaagcggaacgagcatggatccagtatcagggattcaaaaccgaaatcgacaaacacatctacctgcgtaacatccaggacactaacgaaaccctcttctaccgtctggtaaacaatcatcttgatgagatgatgccagtcatttacaccccaaccgtcggcgcagcctgtgagcgtttttctgagatctaccgccgttcacgcggtgtgtttatctcttaccagaaccgccacaatatggacgatattctgcaaaacgtaccaaaccataatatcaaagtgattgtggtgactgacggcgaacgtattctggggcttggtgaccagggcatcggcgggatgggcattccgatcggtaaactgtcactctataccgcatgtggcggcatcagcccggcgtatacccttccggtggtgctggatgtcgggacgaacaaccaacagctgcttaacgatccgctgtatatgggctggcgtaatccgcgtatcactgacgacgaatactatgaattcgttgatgaatttatccaggctgtgaaacaacgctggccggacgtactgttgcagtttgaagacttcgcacaaaaaaatgcgatgccgttacttaaccgctatcgcaatgaaatttgttcttttaacgatgacattcagggcaccgcggcggtaacggtcggcacactgatcgcagccagccgcgcggcgggtggtcaactgagcgagaaaaagattgtcttcctcggcgcaggctctgcggggtgcgggattgccgaaatgatcatcgcccagacccagcgcgaaggattaagcgaggaagcggcgcggcagaaagtctttatggtcgatcgctttggcctgctgaccgacaagatgccgaacctgctgcctttccagaccaaactggtgcagaaacgcgaaaacctcagcgactgggataccgacagcgatgtgctgtcactgctggatgtggtgcgcaatgtaaaaccagatattctgattggcgtctcaggacagaccgggctgtttacggaagagatcatccgtgagatgcacaaacactgtccgcgtccgatcgtgatgccgctgtctaacccgacttcacgcgtcgaagcaacaccgcaggacattatcgcctggactgaaggaaacgcgctggtcgccactggcagtccatttaatccagtggtatggaaagataaaatctaccctatcgcccagtgtaataacgcctttattttcccgggcatcgggctgggtgttattgcttccggcgcgtcacgtatcaccgatgaaatgctgatgtcggcaagtgaaacgcttgctcagtattcgccgctggtcctgaacggcgaaggtctggtactaccggaactgaaagatatacagaaagtctcccgcgcaattgcgtttgcggttggcaaaatggcgcagcagcaaggcgtggcggtgaaaacctccgccgaagctctgcaacaggccattgatgataatttctggcaagccgaataccgcgactaccgccgtacctccatctaa

SEQ ID NO: 10704 - DNA, 774 bp, Escherichia coli
atgaacttgcccatttatattgtctcacttaaaagagatattgagcgaagaaataaaataaatgatgtttttcatcgattaaatattaattttgatttttttgatgccatagatgctaaagaccctcaaaataaagaaattattgataaaatgagattaagtggtgtcggcgcagaaatgactgatggagaaattgcttgtacattaagtcatcaacttatatatcaggatatgatagataaaaatatagaatgggcagtcattctcgaggatgatgttatcgtcaatgagaaatttaaaaaatttctgcaatattttaatctttctgaaaaagacaagttaaaacataataatttgtatttgcttggaggacagaaaggattacatgattatccggtattggggcaaagcctttttagtaaagttaaggtaagtacttgtacttttcggcgtgttaatttcaataaaaataaaattcggcgtacatgttcatatttgatgaataaagatatggcacaaaagttgctcaaattgacaaaggattatggcacctatcgagctgatagctggaagttaatgcatcaacataatattataaaagagttttatttagacgaaataatattacatcctattttaaatgagtttaatagtcatcttgaaagtgaaaggctattaacatcggaaaaaaaacaacccaggacaaggcttcaaaaaagaatgaagtttatacgctcctggataaaggtggcttttttttctcttttgaaatga

SEQ ID NO: 10705 - DNA, 429 bp, Escherichia coli
atgaacaagtatattatacagtggtgctttactgtttttatcttctcctttagtggtgcaacatttgcggccccaaaaggtatctgcacctcagataatggggcctttcatagcacacttgatttttccggctatctgattacggcagacgagaacaaagtgggagagacctttaataaaaccgtgacaaatggggactcttatcctgctcactgccattgtgatacagggaaagtgggggagtttccttatatttactatacagcgagaataaacgaggccttaagttatgcgggtgttcgttctaatgtaaactactttaatttgaatcctaatctggatgttggaatatcgatagaccttctcggtgtaggatacattaatgcaccttttgaataccatgctaacaggcctactggaggttggtaa

SEQ ID NO: 10706 - DNA, 2523 bp, Escherichia coli
atgatgacgaccagaataaaggttggcctcacggcagggacgtgtctgattttctcgcaaagcctgatggccgaggtcagtgtattcaatccggcgcttctggaaatcgaccatcaatccggagtcgatattcgccagtttaatcgggcaaacctgatgcccccaggtgtttatagcgttgatatttttatcaacggtaaaatgtttgaacgtcaggatgtgacctttgttcaggataatcccgatgctgatttacacgcctgctttgtcgctattaaaaaaacgctaaccacctttggcgtaaaagttgatgcgctgaaatcgctcaatgatgtagatgaaacagtctgtattgatcctgggccacgcattgaaggctcatcatggcagttcgacagcgataaactgcaactgaatatctccattccccaaatctatatggatgcgatggcttatgattacatcagcccctcgcgttgggatgaggggattaacgcgctcaccatcaactacgatttttctggttcacatactctacgttcggattatggttcacaagagacagataccagttatctcaatttgcgcaatggactgaatattgggccgtggcgattacgcaattacagcaccttaaatacgaccgatggcagtgcagaatacaactctataagcacctggatacaacgtgatatagctgcgttaagaagccagattatgataggtgatacgtggacggcgagcgatatcttcgacagtacgcaaattcgtggcgcacgcttgtataccgataacgatatgttgcctgccagccaaaacggatttgcccccgtagtgcgtgggattgcaaagtctaacgccactgtcattattcgccagaatggctacgtgatttatcagtcagccgttccacaaggtgcttttgaaattaccgacctcaacaccgccagtacaggtggtgatctggacgtaaccatcaaagaagaagacggtagcgaacaacgatttactcaaccttatgcgtcgttagccatcctcaaacgtgaaggtcaaactgatgttgatgtcagtgtgggagaattacgcgatgaagatggctttacccctgacgttattcaggctcagatccttcatggttttccctacggtttcaccttgtatggaggtatgcaggctgctgaaaagtatggttctgccgctttgggtgtcggtaaagatcttggcgcattgggcgcaatttctttcgatgtgacacatgctcgcgcgaaatttagccatgatgatacggaaaccggtcagtcttatcgcttcctgtactcgaaacgctttgacgatacggataccagcttgcgcctggttggctatcgttactccaccgaaggttattataccctcaatgaatgggcgtcccggcgtaataatcctgaagatttctgggaaaccggtaaccgccgcagccgtgtggagggaacgttaacgcaatcactgggcagagattatggcaacttatatctgacattaagtcgccagcagtactggcataccgatgatgttgaacgattaatgcaatttggctacagcagtagctggaagcgtctctcgtggaacgtctcctggagttattccaatactgcccggcaggggacggggaacaaccatgccagtgataacaccagtgagcagatctacatgctctctttatctgttcctttatcgggctggtgggggaatagttatgccacctattctgtttcacaaaacgataattccggtagctcacatcaacttggactcagcggtacggcgctggaaagaaataacctttcctggaatttaatgcagtcctataacagccatgatgatgaggttggcggtaatatgtccctgacctatgatggcacttatggcacggtgaacggcagctataactacagccaaaattctcagaggctgaattatggtatcagagggggaattctggctcacagcgaaggcgtaacgttaagccaggagttgggtgaaaccatagctcttgttaaagcaccaggggctgccgggttagaaatagacaatatgcgtggtgctgcgacggactggcgtggttatacggtcaagacacagctaaacccttatgatgaaaaccgggtagcaatcagcgataactatttctcgaagtcgaatatagaacttgataataccgtcgttacgatggttcccacccgtggcgcggtggttaaagccgaatttgttactcgtgtaggttatcgtgtgcttttcagggtggcgggtacaaaaggtaaaccagcaccttttggcgctattgctacagtacaaaatacaagctccgctgattcagggattgtcggtgacctgggggagctttatctctctggccttcctgaaaaggggcaagtgatgctctcctggggggaaaatgccgccactacatgcaccttcgattattcactttcaataccagaaagtgaaagcggcttaattgaacaaggtgtgacatgtcattaa

SEQ ID NO: 10707 - DNA, 165 bp, Escherichia coli
atgatgaaatatgtgtacccggtaaccccggtgtgcatcgtttttgattattcccgcacactcgcgcagaaggagttccccgtcgggctacggtctctgttaatacgggaatacggcgacgatacagcgcatgatgtgtcaggcttgaatacctttatcctttaa

SEQ ID NO: 10708 - DNA, 732 bp, Escherichia coli
atgctatacatatgttctatcattttggtgttgaactcgtttgatgtccgaattggtaaagaagatattttgtttaaaaaaggaagtgctgttctcattgattacaatttaaaagattttttttcatcaaatatagatcatgtaatgatcgtagatgttgaagaaaaaacagttaatgatttctttaaaagcaacacactctcacctttttctgtaagaaggttttatccggcatacttgatggtggaatgtgaagatttttcattgttaaagaacttgattgcatgcttgaattgtgatggcagaactgtggattttgttagaaatcaaatatcacttgcatgtcttgctatcttatcttcagagaaaatagtgcaaagttttttatttggatgtcttaatagtttaggaagtaaagttaaggctattattcacacggatatatctgcagcatggagactttgtgatatatcttcaagactgtatctgagtgaaagtctgttaaaaagaaaattaaagcacgaaggcttatcatttagtaagttaattcttgaagagcgaatggtgatggcggaaaggttattaagctacaatttatattctgttggaaaagttgctgagatatgcagttatgaaaacacgtcatattttgtaagtgttttcagaaggtattttggtgttcctccccatcaatattcatcaagattttttttagaaaaagacatgatgtaa

SEQ ID NO: 10709 - DNA, 960 bp, Escherichia coli
atgataaaaaaacctgtgattggaatcagcggttgtttggccggttctgctgttcgttttgatggtggtcacaaaagagctgactttttaatggacaaattagtggaatgggtaacattcagaccagtatgtccggaaatggctatagggctgccagttccgcgtcctgctctacgtcttgtgcgctcgacgcaaggaaatatacggatgtgtttcagccacgaccagaatgaggatgtgacagagagaatgacagagtttagtcgttcttatatggacaaattaaaggatgtatcggggtttgtggtttgtgctaaatctcccagctgtggcatggagcgcgtgcgtgtctatgatgaaaatggtaatcgaggtcgtaaagatggagtgggactatttacgagcactttgatggaaaagttttcctggctaccggttgaagaggatgggcgattacatgatccagtgcttcgtgagaattttgttgaaagagtttttgctttgcatgagctcaatcacctttacaaggagaaattatcaagaagagagttattagcttttcatagtcgttataagcttcagttgttggcgcatagtcaggcaggctataaagatatgggaccatttgtggctgcaatacacgagtgggcggaccttgaatcatactttgaggtgtatcgtgataagctgatggcgattctcagaaaacctgcatcacgtaaaaatcacacgaatgtgctgatgcatatacaggggtattttagtaactacttaagtacacgccagcgtaaagagttgagcgaggttatacttaactatcgttctggcacattacctcttcttgcgccgttgactctgctgaagcattatctgggtgagtatcctaatgattacttgcttacacagaattacttcgatccctatccggacgaactggctctaagactgatggtaaattaa

SEQ ID NO: 10710 - DNA, 357 bp, Escherichia coli
atggatacaattatcacatggatgggagatcgtctgttggggtggataacaaacaaatccgatctgcggcagagggcaatcactggattaactcctgcgatttattcaacaattttatatactgaaaaattaaaacgtggtgagcctaataacccaaacgaagaagaaaaactttatagactttggtatgaagcgtcttcccaagtcgtagactttgatcgagagctggctaaaagatgtttagataaatcagaatattggcttcattctgaattatatagccctgagaaagttggagagctaaacatttctttggttggtatgaaggcaacgcttgaaggaataaagcacaattaa

SEQ ID NO: 10711 - DNA, 324 bp, Escherichia coli
atggatgctggcgttctcgttctagcagttcaacaatacccaatcacaaaacaattcactgataacgaactttgcacactcgcctggttatggcgagcagggaatgtgatgttaattacctaccagaacgttactcctcttcttcaggttgcggagcatcgtgaagctggtcgcttcacttctatcgagcaagaatatccccagatactcaataaggcacaggcaatccttgccagagaaacggcacatgtaaaattccggccgtggcaggatgataagtggagtcgagttttgccgcatttacgttcggatcgattacagtag

SEQ ID NO: 10712 - DNA, 702 bp, Escherichia coli
atgaaaaacatcgccgcacagatggttaactttgaccgtgagcagatgcgtcggatcgccaacaacatgccggaacagtacgacgaaaagccgcaggtacagcaggtagcgcagatcatcaacggtgtgttcagccagttactggcaactttcccggcgagcctggctaaccgtgaccagaatgaactgaacgaaatccgccgccagtgggtgctggcttttcgggaaaacgggatcaccacaatggaacaggttaacgctggaatgcgcgtagcccgtcggcagaatcgaccattcctgccatcacccgggcagtttgtcgcctggtgccgggaagaagcatccgttaccgccgggctgccaaacgccagcgagctggttgatatggtttacgagtattgccggaagcgcgggctgtatccggatgcagagtcttatccgtggaaatcaaacgcgcactactggctggttaccaacctgtatcagaacatgcgggccaatgcgttgactgacgcggaattacggcgcaaggctgccgatgaactgtcctgtatgaccgcacgaattaaccgtggtgaggctatacctgaaccagtaaaacaacttcctgtcatgggcggtagacctctaaatcgtgcacaggctctggcgaagatcgcagaaatcaaagctaagtttgggctgaaaggagcaagggtatga

SEQ ID NO: 10713 - DNA, 1164 bp, Escherichia coli
atgtcactcttccgcagaaatgaaatatggtatgcctcgtattcgctcccgggcgggaaacgaattaaggaatctcttggcacaaaggacaagcggcaagctcaggagttgcacgacaagcgaaaagcagaactctggcgagtagaaaagctaggggatttacctgatgtcacttttgaagaggcctgcctaagatggcttgaggaaaaagctgataaaaaatctctcgattcagataaaagccggattgagttctggcttgaacattttgagggtataaggcttaaagatatctcggaggcaaagatttactctgctgtaagcagaatgcataacagaaagacgaaagaaatatggaaacagaaagttcaggccgccatcaggaaaggtaaagaactgcctgtttatgaaccaaagccagtatcaactcagacaaaggcaaagcatcttgccatgataaaggccattctccgtgctgcagaacgcgactggaagtggctggaaaaagcgcctgtcatcaagataccagcggtcagaaacaagcgagtcagatggctggaaaaggaggaagcaaaacgccttattgatgagtgccccgaaccactgaaatctgtcgtcaagtttgcgctggcaactggtctgagaaagtcgaacatcataaatctggaatggcaacaaatcgacatgcagcgacgagttgcctgggtgaatccagaagagagcaaatcaaaccgcgccattggtgtggcgctgaacgataccgcctgtaaagtgttgcgtgatcaaataggcaagcatcacaaatgggtgtttgtacataccaaggcggctaagcgagcagatggaacatcaacgcctgcggtcaggaagatgcgcatcgacagcaagacatcatggctatcagcttgtcgtcgtgcaggaattgaagatttccgtttccatgacctcagacacacctgggcaagctggctgattcagtcaggcgtcccattatcagtgcttcaggaaatgggcggatgggagtccatagaaatggttcgtaggtatgctcaccttgcgcctaatcatttgacagagcatgcgaggaaaatagacgacatttttggtgataatgtcccaaatatgtcccactctggaattatggaggatataaagaaggcgtaa

SEQ ID NO: 10714 - DNA, 480 bp, Escherichia coli
atgaaaccaacgtcggtgatcattatggatactcatcctatcatcagaatgtctattgaagttctgttgcaaaaaaacagtgaattgcagattgtcctgaaaacggatgattaccgcataaccatcgattatctccgaacccgtcctgttgatttaatcattatggatatagacttgcccggtacagacggttttaccttcctaaaaaggatcaaacaaattcagagtacagtgaaagtattatttttatcatcgaaatcagaatgcttttatgctggcagagcgatacaagctggtgctaacggttttgtcagtaaatgcaatgatcagaatgatatttttcatgccgttcagatgattctctccggatacactttttttcccagcgaaacgctcaactatataaaaagcaataaatgtagtacgaatagttcaacggtggatttgcccctatatttccagacatctgttatcacttaa

SEQ ID NO: 10715 - DNA, 225 bp, Escherichia coli
atgacggcacacaaaaatatctccgggacataccacctctctgttgcagacgttctgcaggtggtttaccaggtatgtttcagcccgtccgttgaaatcaaccaggatggtgtggctgcgctgattacaacactggatcgccgtatcagtgatctattggatgagattatccatttttgtgagtttcagcagagcgcgtcgcactggcagcgcgtacttcactga

SEQ ID NO: 10716 - DNA, 1281 bp, Escherichia coli
atgccggaagagaaactacagacgctttcattgcaggtcattaacggcagtgagctggaaagcgggcgggcggcgcgctgtctgttcacgcagcagggaaatgtcggccatggccccgaatgccactggtcggtacaggatcgtcagcagagcattccggctcaggcctttaccgttatcctgcacgatggcacattttgtctgcgcccgcagacggcacaactgtggctgaaccaggcaaaagtcacagcaacatcagacctgatacagctgcgccagggcgatgagatccagatagggcgtctgatggtgagggttcatctgaaccggggagatatcccccattacgatgaggaaatggccactcccgaaaccatcgtcaccaatcgcgatatgctcacggataccctgctgtcaacggagggtgcgccacactatccgggaatgactcaccggcatcagcttgcagacaccgtggtaaacggtttttctgccgatccactccaggcacttcagtccgaaagcctgattaccgcgggcgatccgctttcaggcattgcggctgtccggccatcggcaccgctgtccgatccggcaagtaatggggggatcaatacgccgtttatggatctgccgcccatttatgccagccccggcgagcgtaatgatgacgtctctgtggcagaaatggcgcaacgccaccttgcggtcacccccttactgcgcggtcttggcggctcgcttaccgtgagcaattccgacgatgcggatgattttctggaggaggccggacgcacgttacaggccgcaataaaaggtctgcttgatttgcagcagcagcgtaacagcctctcagacaaacatttgcgcccgctggaagataacccgctgcgcctgaacatggattacgccaccgcgctcgacgtgatgtttgccgaaggtaaaagtccggtacatctggcggctcccgccgctgtcagtgaaagcctgcgcaatgtccgccaccacgaagaagctaaccgggcggcgattgtggagtcgcttcgtgtcctgctggacgccttctcaccacaaaatctgctgcgccgctttgtgcagtaccgccgcagccatgaactgcgccagccgctggatgatgccggagcatggcaaatgtacagccattattacgaagagctggcctccgatcgccagcaggggtttgagatgctgtttaacgaggtctacgcccaggtctatgaccgggtgcttcgtgaaaaacagcgggagccggaagcatga

SEQ ID NO: 10717 - DNA, 525 bp, Escherichia coli
atgaacaggaaggcgtttctggcctgcgtgctgatgtgcgtcatattaaccggctgcgaaacggcgaaaaaaatcagtgaggtgatcaaaaacccggatatccaggtcgggagcctgaaggagcaaccttcggaaataaccgtcaccctgctgaccgaaccggacaccaatactaatgcggagggtgaatcagccgccgtggatgtgcaactggtgtacctgactgacgactcaaaattgctggcagccgactatgaccagatagccagtacgccgctaccggatgtgctgggtaaaaactatatcgaccaccaggatttcaacctgttgccggacaccatcaaaaccctgccgccggtaaagctggatgagaaaacgcagtttattggtgtcgtggcctatttctccgatgaccaggccactgaatggaaacaaatcgagacggtggaaggaaccggccaccattaccgcctgctggtgcatgtacgtcaaagcagcatcgaaatgaaaaaagaggatgaataa

SEQ ID NO: 10718 - DNA, 1416 bp, Escherichia coli
atggcaatggacttacgcgatccgaatgtctggatatcgcacctgctggaaaacctgcctgaagaaaaacaggcatcggcgctaaaagatgacaacccggactgggagtatatcgacggcgaaatcgtcaaactgggttcactggcccacagccaactggatatcccggaactccagcgccgggggctggtcattctggcttcggagagtaaggattttcgtctgctggcgcatctgctgagaaccctgcaacatgccggtgatccgcttctggccttgcgcctgctggcactgtatgtggaacattactgggcggtggccgcgccgcagaatatggcacataaaaaacgcttcgccagccaggtcattaaacgctttgaaacaggtattgaaggcttttcacagaacgccgccacagcgcagcgcgatgcgctattaggtgaactggcgaaactggcgcagtgctggcagtcacataacgtcccggaactggcacaggctaccgatgatctttttgccctgtaccagcgtacgtttaatcgtgcggctcctgctccggtccccactccggcggcctccggtagttcaccacaaaccaccgtcacgtctgaaagcagcatgacgcaaaccagtgctccggctctacagatcgccatcgacagtcacgacgacaaagcctggcgcgacacgctgttaaaagtggcggctattttatgtgaacgccagccggactcgccgctgggctatcgcctgcgccgccatgccctgtggcaatccatcaccagtacgccccaggcggaaagcgatggacgtaccccactggctgcggtctctgccgatatggtggcggattaccatgctcagctcggtagtgccgatatggcgctgtggcagcaggtggaaaaaagcgtattgctggcaccctactggctggacggtcactgcatttctgcacagacggcgcaccgtcttggctataccgccgtggccgatgccatccgcgatgaagtcgtttccttccttggccgtctgcccgctcttgccgatcttctgtttaacgaccacacaccgtttgtttctgaaaaaacgaagcaatggcttgcaactcagccaggtaaccaggccgcgccagtcatacaggtgagtaatgaagatattcaggctgcgcggttgtgttttgatgaacaggggctggaagccgccttacggtatctggatacgttgcccgccggtgaaccccgcgatcagtttcaccgccagtaccttgccgcacagttgacggaggaggcggggctgatacagcttgcgcagcaacagtaccggatgttgttcaggatgggattgcagatgatggtggcagactgggagccgtccctgcttgagcagctagaacaaaaattcacggcagaacaataa

SEQ ID NO: 10719 - DNA, 3525 bp, Escherichia coli
gtgttcagattaccaacaccccgactattcagcggactcaaatcagccctgcgcccggcgatgccccggtttaaagtttctgcattctggctgctgatactggcgtggattttcctgctggtatggatctggtggaaaggcccgacatggacgctgtatgaagagcagtggctcaaaccactggcgaaccgctggctggcaacggcggcgtgggggattattgccctggtgtggcttaccgtccgggtaatgaagcgcctgcaacagcttgaaaaaatgcaaaagcaacagcgcgaggaagccgttgatgcgctcagtgtggaactgaacgcccagcagcgttacctcgaccgctggctgctgcgcctgcaacgccatctcgacaaccgccgtttcctgtggcagttgccgtggtatatggtcatcggtcctgtgggcagtggcaaaacgacactgctgcgcgaggggtttccgtcagacattatttatgccccggagggcgcgcgcggcgcagaacaacgcctgtacctcacgccccatgtcggtaaacaggcggtgatctttgatatcgacggcacactctgcgctcccgctgatgcggatatcctgcatcgccgtctgtgggaacatgccctcggctggctgaaggaaaagcgcgcgcgccagccgctgaacgggattattctgacactcgatttacccgatctgctgaccgcagacaaacgccgccgcgagcatctgttacagacgctgcgcagccgcttacaggatatacgccagcatcttcattgccagttaccggtttacgtggtactgacccggcttgatttattgcagggttttgccgccctgtttcagtcactgaacagacaggatcgcgatgcgattctgggtgttacgttcacccgccgtgctcatgaaaatgatgactggcgaacagagttgaatgctttctggcagacatgggtggatcgaatgaatctggcgttgccggatctgatggtcacccagactcacacccgcgcgtctttattcagtttttcccgccagatgcagggaagccgtgagccgctggtgtcactgcttgagggtctgcttgacggcgaaaatatgaacgtgatgctgcgtggtgtctatctcacctcttcgcttcagcgtggacagatggatgatatattcacccagtctgctgcccgccagtaccgactgggcaataacccactggcgtcctggcctctggtggacaccgcgccttatttcacccgcagcctgttcccgcaggcattactcgcagagcctaatctggcaacagagagcagcgcctggctgatgcgttcccgtcgccgcctgacggttttctctgccacaggcggcgtggcggcactgcttctcatcaccggctggcatcactattacaacggtaactatcagtccggcatcaccgtgcttaagcaggccaaagcctttatggacgtgccgcctccgcagggggaagatgactttggcaacctgcaactgccactgctgaacccggtacgcgatgcaacactggcctatggcgactggggcgagcgcagccgtctggccgatatgggcctgtaccaggggagacgtatcgggccatatgtggaacagacctatctgcaacttctggagcagcgttacctgccctcgctgtttaacgggctggtcaaagcgatgaatgccgcgccgccggagagtgaagaaaaactcgcggtgctgcgcgtgatgcgaatgctggaggacaaaagcggacgtaacaatgaggtggtgaagcagtatatggcaaaacgctggagcgaaaagttccacggacagcgcgatatccagacacaactgatgtcccatcttgactacgcgctggctcatactgactggcatgcagagcgtcaggcgggcgacggtgatgccatcagccgctggacgccatatgacaagcccgtggtatcagcacagaaagaactgagcaaactgcctgtctaccagcgggtttatcagagcctgaaaacgcgggcgctgggcgttcttcctgctgacctcaatctgcgtgaccaggtagggccaacctttgaccaggtgtttacatctgccgatgataacaaactggttgttccacagtttcttacccgttacggcctgcaaagctattttgtaaaacagcgcgatgaactggttgaactgacggcgatggattcctgggtactcaacctcacccgcagcgtgaaatacagtgacgccgaccgcgcggaaattcagcgccagttgaccgagcagtatatcagcgactacaccgccacctggcgggccgggatggacaatctcaatatccgcaattttgagtccattggacaactgactggcactctggagcaggttatcagcggcgaccagcctttgcagcgggcgctgaccgtgctgcgtgacaacacacagccaggagtcttttctgaaaaactctctgccaaagagcgggatgaggccctggcagagccggattaccagttacttacccgcctcgggcatgaattcgccccggaaaacagtaccctgacagtacagaaagacaaagaaagcacgatgcaggccgtataccagcagctcaccgagttacaccgctacctgctggcaatccagaacgcgcctgtaccagggaaatcggcgctgaaagccgtgcagttaaggcttgatcagaacagcagcgatccaatattcgccacccgccagatggcaaaaacactgcctgctccgctcaaccgctgggtaggcaggctggctgaccaggcctggcatgtggtgatggtggaagccgttcactatatggaagtggactggcgcgacagcgtggtgaaaccgtttaacgagcaactggcaaataactatccgtttaatccacgttctgcacaggatgcctcactggatgccttcgaacgattctttaaaccggatggcatactggataccttctaccagcagaacctgaaactgtttatcgacaatgatctgagcctggaagacggcgataacagcgtcattatccgcgaagatattattgcgcaactggaaaccgcgcagaaaatccgtgacatcttcttcagcaaacagaacggtctgggaacatcctttgccgtggaaacggtatcgctttccggcaacaaacgccgcagcgtactgaaccttgacggccagttagtcgattacagccagggccgtaactataccgcccatctggtctggcctaacaatatgcgcgaaggcaacgaaagcaaactgacgctggttggtgccagcggcggcgcaccgcgcagtatcagcttcagcgggccgtgggcacagttccgcctgttcggggccggacaactgaccggagtacaggatggcaactttaccgtgcgctttagcgtggacggtggcgcgatgacctaccgtgtgcataccgacaccgaggataacccgttcagcggtgggttgttcagccagtttggtctgtcagacacactgtactga

SEQ ID NO: 10720 - DNA, 468 bp, Escherichia coli
atgcgtttacatgttaaattgaaagagtttctttcgatgttttttatagccatattatttttccctgcattcaatgcatctttgttttttaccggaattaaacctctatattcaataataaaaggctccacggaaatattttatgattggagaatgttgattctatgcttcggtttcatatcgttttccttgttaaatattcatgtaattttactaacgataataaaatcattcttaataaaaaaaacaaaggtaatcaatttcgccacagacataacaatacagctaactcttatatttttactaatagctatcgtaatagcacctttaatagctccttttgtcacaggatatgttaatgataattatcacccctgcggtaataacacggggattttcccaggagcaacctatattaaaaatggcatgaaatgtaataatgaatatatttctcgcaaggaagattaa

SEQ ID NO: 10721 - DNA, 510 bp, Escherichia coli
atgtttatcggtcatcttccggctggttatttaataacttgtactttagtgaaacgcttgccactgattgctcgtcatgcgcgctgggcgatggttattggcttagttggggccattgcgcccgattttgatcttttctggtgctatctggttgataacgggcaacgccatcatcatctttacccgtctcattggccattattatggtttgctctgctggcggcgacattagtttgggccgcaattgcgaagaataaacttccggcgtggttgggcgtggtgttttgcctgaatggtatcgtgcatttattactcgatacgctggtcggtgatatctggtggttgatgcctttcgttaaccaaccctttgcactctttcatattacggcggtacatcatccgtggtggctcaattttttattacactggtcgtttttacttgaactggcattagtggttgccgccattgccatgtggtacaggcgtaatgccaaaatggtaaatgcatga

SEQ ID NO: 10722 - DNA, 282 bp, Escherichia coli
atgtccacgcctgcgggcgtggacttctgtttgaagccaatggctatctatatcgaaataacaaaacattatgaaactcatgaaaaggtcgcatatttatatagctgcgaccatatttcatggggggagtttctgatcaccaaagaaagttttgcgctggaatccgtgaaagaacttaagggtgaaaagcagaatttttatatgttcagagcctggggcaaagtcaggaaaacatacttagccacgggagaatttccccaggaaacatgttacgccgcttaa

SEQ ID NO: 10723 - DNA, 1167 bp, Escherichia coli
ttgaaacgccgtcttattattgctgcttctttgttcgtttttaatttatcgtctggttttgcggcggaaaacattcctttttcacctcagcctccagagattcatgccgggtcctgggtattgatggattacaccaccggtcagattctcaccgcgggtaatgagcatcaacagcgcaatcccgccagcctgacaaagctgatgacgggctatgtcgtggatcgtgctatcgatagtcatcgcattacgccagacgatattgtcaccgtggggcgtgatgcgtgggcgaaagataatccggtgtttgtcggttcttcactgatgtttttgaaagagggcgatcgcgtatcggtacgtgatttaagccgtggtttaattgtggattccggaaatgacgcttgtgttgcactggctgactatattgccggtgggcaacggcagtttgttgaaatgatgaacaactatgccgagaagctgcatctcaaggatacgcattttgaaacagtgcatggtctggatgcacctggccagcatagctcggcttatgatttagctgtgctttctcgcgctatcatccacggcgagcccgagttttatcatatgtacagtgagaaaagcctcacctggaacggtatcacccagcaaaaccgtaacgggttattgtgggataaaaccatgaatgttgacggcctgaaaacgggtcatacttctggtgccgggtttaatctcattgcttcggctgtagatgggcagcgtcgtctcattgcagtggtaatgggggctgacagcgcaaaaggtcgtgaggaagaggcaagaaaattactgcgttggggtcaacaaaactttactacggtgcaaattttgcaccgtgggaaaaaggttggtacggaacgcatctggtatggcgataaagaaaatatcgccctgggaacggaacaagagttctggatggtgctaccgaaagccgaaattccacatatcaaagccaaatatacccttgatggtaaagaactcaccgcgccaattagcgcccatcagcgggtaggggaaattgaactttacgaccgtgataaacaggtggcgcactggccgctggttaccctggaatctgtcggggaaggcagcatgttttcccggctgagtgattatttccaccataaggcctga

SEQ ID NO: 10724 - DNA, 2220 bp, Escherichia coli
ttgcaacagtgccataatttcataacctgtaaggatgcgtcggtcacgctgaaagacaggctgaatctcgatacaaagacgggaggcaagacctggcattattatgtgcagcagatatttggcggcagaccggacccggacctgttattcagacaactggtcagtgacagttacagttatttctacggctccagtcagtctgccagccagattatgcgccagaacgtcacaataaatgccctgaaagagggtatcaccagtaatgccgcccgtaatggtgacaccgccagcctggtgaatctggccaccacgtcatcgatggagaagcaacgtctggcgcatgtctctatcggtcatgtgacaatgcgaaacctgccaatggtacagactatcctgacgggaattgccattggtattttcccgcttctggtactggcagctgtcttcaacaaactgacactgtccgtcctgaaaggctatgtgtttgccctgatgtggctgcagacctggccgttgttgtatgccattctgaacagtgccatgacattctatgcgaagatgaatggtgcgccggtcgtgctgtctgaactctctcagatacagctgaaatactctgacctggcctctactgccgggtatctttcagccatgatccccccgttgtcatggatgatggtaaaaggccttggcgcaggtttttccagcgtgtacagccacttcgcctcttcctctatcagtccgacggccagtgcagcaggcagtgtggttgacggtaattactcctacggcaacatgcagacggaaaacgtgaacggcttcagctggagcaccaacagcaccacgtcgtttggtcagatgatgtaccagaccggcagtggcgcaactgccacacagacccgtgacggtaatatggtgatggatgcaagcggagcgatgtcccggttaccggttggtatcaatgcaacgcgtcagattgcagcggcacaacaggaaatggcccgggaggcgtcgaacagagcagaaagtgccctgcatggtttcagcagcagtattgccagtgcctggaacacgctcagtcagtttggttctaaccgggggagcagtgattctgtcaccggtggcgctgacagcaccatgagtgcacaggattccatgatggccagccgtatgcgcagtgcaatggaaagctatgcgaaggcgcataatatcagtaatgagcaggcgactcaggaactggcatccagaagtacgagagcttctgccgggatgtatggcgatgctcatgctgaatggggggttaaacctaaaattcttggtgttggtggaggattaggcgttagaggcggtggtcgggctggcattgactggagtgatgatgatgcgcatcaggccagcagtggttcacgggccagcaatgatgctcgtcatgatatcgatgccagagctacacaagactttaaagaggccagcgattactttaccagtcgcaaggtcagtgagtccggcagccatactgacaataatgctgattcccgtgtggatcagttgtctgcagccctgaattcagcgaagcagagttacgaccagtacacgacgaatatgactcgcagccatgaatatgctgaaatggcatcccgtactgaaagcatgagtgggcagatgagtgaagacttgtcgcaacagtttgcacagtatgtaatgaaacacgcgccacaggatgcagaagctattctgacaaataccagttcaccggagattgcagaacgccgtcgggcgatggcctggtcttttgtgcaggaacagatacagcctggtgttgataatgcctggcgggaatcccgtggcgatattggtaaaggaatggagagcgtaccttcgggtggtggcagtcaggatattattgctgaccatcagggacatcaggccattattgagcaaagaacgcaggacagtaatatccgtaatgatgtaaaacatcaggttgataatatggtcacagaatataaagggaatataggtgatactcagaacagcatacgtggcgaggaaaatattgtaagaggacagtattctgaactacagaatcaccataaaacagaggcattatctcagaataataaatataatgaagaaaagtcggttcaggaaagaatgcccggggctgacagtccacaggaactgatgaaaagggcaaaggagtatcaggataagtataagtaa

SEQ ID NO: 10725 - DNA, 243 bp, Escherichia coli
atgaaagagataatagctaaaacaagttctgcgaaagaaatagcagtcccctggtttgaaaccatggggaaacaggttgggttatcgaaacgtactaccgctgccatattaagggaacaacagttgcggatacgtaagcttaaccgggtatctgcacggattttgtctgatgccatcaaaagaggggagcactggtgggaggattgtagtggtcaagtaatattggccacggttttacagtaa

SEQ ID NO: 10726 - DNA, 375 bp, Escherichia coli
atggttaaactgatggcagattcagctgataagctggtagggcagcgtattcagaccagacgtaaagaagcagggctaactgctgccgatcttgcagagactatcgatatctctcaacaacaactttcccgctatgaacgcggaacgaataagatcaatattgctcatttagtcaaaattgctgttgctttaaaaactccaataagctggttctttattgattgtatggaggatttgaatgtttctgatatcccgattaactatgccactgggcttgacgttgaattaaaacaacgactcgagcaagtctggaataagctggataaccctaagaggaaaagcttaattatgtttttagatgagtttataaaataa

SEQ ID NO: 10727 - DNA, 5184 bp, Escherichia coli
atgagagaacagcacacgttacctgaggataaaagcccagggacaagcacgcttgccagtgggcctgcaggtactcattttgaggcccaagttgcggcgtcgtacatgctagccatgctcgctggtgcccctgcacgtggccttcccggtgcgtcaatagatcgagtagccttgcaacaggccaacgcggggtatccgcttgatgacgtgatcattcacgggcatgacaatatttccgggaaagtggctgttctcgaagttcaggttaagcggtctatcaccttcgccgcttctgatccggtctttcgtaaagtcgtgggccaaatcgtcaaagcttctcaacgacctgatttttcaacccagcgatacgagttagcgatcgcgacgactaaagggtctcgcaagatagatggagcatatcaagacgtactcacactagcccgccaaattagcgacgcaactacgttcgccgcacaaattgatctggctggtgtagcgaacgacgatatgcgctcattcgtcaagacgttcaaaacccatttacttgatgaaggttcgcccgacgacaatgaaactgtttggtttttgctgcgtcggatccaaattttgaccttcgattttacggcacccggctctgcatcgcatgacttggcactggaacgggcccttcgtatcctccatgctgatgacggatcgcgtgttggggccttttggggcagtcttattgaactttcaatcgatgtggcaaaaagcggtggagacaaaacccgcgacacggcactagtgacacttgcacaatttggctatcggttcttaggtgagcgacgccacatggcggcccgtgctgcattgactgagtcttcacgtttggctcttgctgatattcgtaatcgagttggtaaagcagtccttgctaggcaggagcgtgttgccgctatacatgcagcactggggcttgggcgctatgtagagatccgtggagatgcaggggtcggaaaatcagggatcctacggcagatggccgaagccatgcaaactgaggggccggtcattgtactcagcccagggcgatgcgttccccgtgggtgggtggcatggcgtgcacagctaggcttcgacggtacgctacgtgagttacttgtcgagcttgcaaacgacggtggagccacgatatatatcgataacctcgattttttcaatgcagaagagaggctcaccgttgtagatattgtcagcgaagcatctatcgttccaggcttggtcattgtagcgacagcgcggcttgagtctgggctcgatgagcccaattggctaccaaacgatgcactagcgcgtttgggactaactgaaccaatcattatcgatgagctgagtaaggcagaggtcgaacagctaaaagcgattgatccttctcttgcgccccttctcaccgaaggtcatcccgcacgtcaggtcgcgaggaacttatttcgcctctcacgtctagcaagccagaccgcatctgagccgatgccccgtaccgaagtagatatggccgagcaatggtggattaatgcggatggtacacgtgatgccggttggcgtgatcgctctcggctactgcaggacttggcttttcagattttgtctggtgccgactttctcgatataaaatgtcacagtgctatcccgatcgatgccttagtgtccagtggcacgctgcgaaatctaagcaccgacctcgtcgcatttcgccatgatgtactgcgagagtgggcgatcgcgaatgccattcactctgacccaaggcttattgacggtttacaactagatcggccggcaaccgcgatgtttgctcgtggaattgagttggcagctcgtatggcggtcgagcgggcggttgatggtgtaaagtggctcgcgattgttgagcgtttaagccaggtgggagtgcatcagtcttggcgccgagctgcgttgctcgcattagctcggtcagaggctgcggaaacacttctcagtcgtgcatcacctgaacttcttgccaatagggccgcattgttgcgggaactcatccgaatcgtcatggctgtcgatgtacttccggctgcaaaagtctttgctgctgcgggagtggacccagcactgatacccccatcagtcaatatcccacgcggtccagcatggatagcgttgattacctggctgttggacactgcggaaatagctccaattgaagctattcccgacatcgtccagctatacacagcattttccattggtacacttggcattaccgatatcacggcccttacaacacgacagatatacggttggctacggctgttagagccaagaaacgagatgcttttgccgggtgaagagcctttgttcagggggcatcttgatcggaatggtactcagtctcttaaatctgaccttcgcgatgcgttcatcatatttgcacgtacaacaccggaattggctgccgaatacctgacagcagtgggaagttgcgaacacaacgaatatattgtgcgcagtatcttgaagatgcgcggcacgttggcacaagcagccccagttgaactggccaatttaaccgcacaggcgttgatctcgggtccccggggacgcaagcgccacttcggcacggaacgcgaagaggcgtttacctatctcgatcacgtattccttccggtatccccggaccaaggcccatttctcgatttattgattaactcacccaagaacggcctggctctgatccatcgcttggttacacacgcagtcgcacatgagagccaaggagccgattctgggataaatggattcaagctggtcttgccgaagggtgtgcgcacgttcccatggagtcagacttacttctggtcacgcaacagtaatttctacgccgttacatcctcgcttatggcacttgaagcgtgggctcatcgccgcgtagatgcaggtgaagcatttgaagatgtactaacagatgttcttggtccgccaggctcatgcgctgcgtacttattggtgggagttgatctcatcatctcgcattggcccaaatcgcttaggatagccacggcttttctcggctgtcccgaactgctgtgcttagatcgcatacgtcaggtgcatgatagagtcgaaatacccgaattcttcgatctcaacactgcgcgtagcgagtcgcaaggtaatatgattgcggctgatcttcagcgtcgctcatccagacggactactcttgacgaactgattggttctttcacgtttcaagcatctttggaacaacgtaccgcgctgaggatgctgctggtgagcgaggcggctcgtttaggcgaacccgtcgcgagctctaatctcagaagcccggaatttatggttcggtatgcgctgaatctatcagatgccacaaattggcaagaatttgaaatgactctcaaggacggttcatccacgactgcgcgcaagtatgtatcacctccggcagagcaaacccatctacaggctttgcgcgatgccgcaaccgagcgagagtcagatttcgccacatgctctgtgttgacactcgcgatcgacgatccatctcagttactgccggaaggtcgaatagtggctgtagcttgggcacgacgtttggcgatggctacgacagacattgaatccgacgacgatgacgacgagcgttggatgcaagaggaagcgtttgtggcggccgccatgatcgtgatgcgggatggtaatgatgccttgtatgctgaacacggagaatgggctcggtcgcaactgggcaagacgcttgtggcgcttgacgacaatcctgtgcgtcagatgcgagggggccttcgcttcaatccgactgcaatcgcctatgctggattgattcacgccttgcgacatcgatcaacaacagaagatgtgcggtcacttcttgaggtagcggctaggggaaatcacgctgccgcgcacggcttagggacgtccgtctcagtcctcgcggccgtcgatagtcgtcttccgagatctattctccgatgtgcattcagcgcttgtgttgttgaggagcgggtttgggatgcgtcggaggaagaagtagaagctcgtaaagcgcgcagccacgaacgagcacgggcagccgttgccgccgagatctcatggcttaacagcgatgggacggagccattgtggccagtttttccagaagagcgcgcacggccgggaaggcgactacgcttgcgagaagttagcatggctgcatcaaagcagccagaagtgtcaattgccccaccaaaagtgcatgcagatcatcaggcggcggcactctggctacgccaagtgaatattgtctccgaggatgctgcgctgtcctggctcagcgaagtcgtgaaatcctacatgccgtggacgatcgtcgcaaatggagcaaacctagacgacggagatgaaacggatcagcctccatctgaatggaacaatacattctttgatttggctgcgcgttgcgttgtcgggctatcgtcgtctgaagtcattgagttagtcgtacagcacataattactctcccagaccagaatttctacgacgtactcgtcgattttttgcgcaacttcgatgtggtttactttggtggcaatagtattccgacgcagattgccatagatgttcgcaaagtacttgttgaccatatgctcaccacgcgtggatgggggcgtctcaaccggagcagggacttgtcaatcgaaatgcaccttggcccggcaatcgcagtgttgttcttcaacgaccaaatgtttgggaagggatcgaaatgctatctacttgagaaaggaatggatcgaattggtccgtttttacctattctggataaattagtcagcaaagggccgtcaccgttcgtcgcattgttgttactcaacttacttgaggttgcgccccgggctgaacaactgaatatgctcgttggggctgtatgtgtatggcttgaggtctatcctgatttccaacaactatggattgactacggcgtgggccgccgatggtgcttggtgatggaggctatactgggacgtagcccttgtagtttcagtaatagcgcaccgctgcggcctgccatcgacaacttcgtcgcatcacttgtcgcgctcggtgtacccgaggccgcacggctggaggaggaacttggcaagctttga

SEQ ID NO: 10728 - DNA, 4032 bp, Escherichia coli
atgaatgagctccttttaccagagcaagttaaagctgcaagagctcttctcgcttggtctcaacaagaactggcctccaaagcaaatgtggcaacatctacacttgcggattttgagcgtggctttcgtactccagtagcaaataatgcccaagctatccgtgatgccttagaagctgaaggtttgcagtttatagctggtggggtagttgaaaggggtatgctgcagccacctgaaaatgtaaaacctggttctttgatgcgctggattaatgcaactcacctttcacagtggggtgaacggagagatggtcagagtggtattcctgaattattacgacgtttaatttttgcaacagtaggtcctgccgcaaaagttcatttcccatcagatgagagtgtgcaatatcctggttgggatggtgagtgtaaaacgagtttgggtttgggcttcgttcctgagggtgattctgtttgggaaattggtgctcaacgtacctctatccgcgctaaggcagaagaagattttaataaaagatctgggaatccactcgggtatagtccagataaaacaacgtatgtattcgttactccacaacgctttcctggtaaaaataagtgggtagaggagaaaaaagctctcaatatttggctgaatgtctgtgccattgatgctgatgatcttgtccattggttagaaatttatcctgcggtcgctcagtggttgtcagtaaaaataggtcatcggccacagggattgcgtaatattgaagagtcatggagcgagtggattcacgcaacgagaacacctctcactcccgatgttatcttggccggacgtgatgaagaacaaacaaaagtccttaggtggttaagagattcaccgcaacaactctcggtgcaagccgaagctcccgatgaagcactagcttttctttatgcatctataagtcctctgcctgaagagcataagctgttctattggagcaaatgtgtcgtagttgacaacgcaacaacagcccggcaattagctggtttaggcacgccattaatcattgttctcactatttcagaaccggggattgcacaatctcttgttaataatggtcaccatgtctacgctatctatggctcagatgtgtctcatctatccggtcattcaatacgccttcctcgcccatggagatttgagctaaaaatagcattaactcatgctggattaaatgaggaggatgctcatcgttatgcccacgcatcaggccgcagtattacggtattaaggcgcttaatgcccatagccccaaactataaaccacaatgggctgaacatgtttcatctgagcttattgccgcaatgttcgcggggagctgggatgaaacctcatctcaagatcaaaaaattattagtgatttagctggttgctcttatgagcaggtagaagaaatcttggcaccgttagcatccacttttggtggtccattaattcgctctggtaatctttggaaagtagtttcattacgagatctttggactcaagtaggtaatcagctaacttcccaccaactaaagcgctttgagaatacattccattcggtggtgagcgccattgatccccattttgagactcaacctaatgccgataccttctatgaagataatagcgtagggaaaccatcaggtagcatcagacgtggcttaacagaatcgatgattgccttggctgttttcccagaggtagcaacgcttattacggatgtatcttctcatgtgaatagtgcggtgtataagttgcttaataatgcaactgagccactttggtggtctttgtctcaggatttccataatcttgcagaagcagccccaacggtatttctagacgctgtagaagctgggttggaaggcgattcacctcagattttgtcattattccgaagtgatgaagggataatgcatcccacagagtatctttcaaatttgttatgggcattagagatgttagcgcgtagcccgcgttatctaatgcaatctgcacttttactggcttggttagatgatgttgatcccggaggtcgatggggaaaccgtccagcagtttctttaaggcggatttttgttagttggtcaccacaaacttatgctaattcatcacaacgtattaaggtcattgatcggatcatatcgctgcatccaattgctggttggaagttattgctcgcattagcacctcgttcacacgatacttcagaaccttcttctatgccaaattggcgtgatttcactcctaatgagccggagtcgattacctggtcctctgttgcaacagcagcatgtgaaatcggtgaaagattattaatgcatataaatgggaggtgcgaacggtggtttgaacttttccacctttgggggaattttgattcaaactggaaattttcagcagctaagcaattagctgattactccctgaacctcacatcttctgatgaaaaagaaaggttgtggaatgagttacggcattttttacagagaaaccgtggcttcaaagatgctccatgggctctgtctgaagaagaattagcaccgttggatgctatatttctttcactaacaccagaaaatgtcgaggagcgttttcgctggctattttgtgcaggggccaatgagttaggcgaaaattatgattggcaaacacaacgaaataggctcgaagagagacaattggaagcagtagagttcttacttgcagaacttgaatttgaacaaatatttcatttctcttcaacaattacgctgcactccgattttggtcttgctttagcgcgatcctcaacaaagtgtgggcataaacattttctaatgaaaaaagctctaatgtctggtgattcagatatagcaaatattggtttgggaattctttatggactcaaagccacgaaaggctcagaaagcgaaacttgggttcaagaaatatgggaacaagctataactgataattggggggagttagcggaagtacgcatttcccaagtattaccacctgtaatgtcgctttggctgaaaatagaatcgagaccagttaatattagtacaatatattggcagacgatccctacatttaggctttctgcagatttagagcttgagtatgtcattgaccatttacttctggcagaccgaagtcacgatgctcttgcgtggcttgctaataatataaaaatagaaccagaaggctcagttattattagagtaatgcataccgctgcaagcactaaagactctcccaataatgataatacgatgtcgagctattatattggtattctcctagattacctggagagtgatgtaaatacttcaaaagaagaacttgtgaggctcgaatggatttattttcaagttttacggcattcacgacatccagccagaaacttacatcaggctcttgctaaagaccctgtattttttacctcactaatgaaattactctatctacctgaagaagatagtggtgtagttgaatctgaaccggcaaatcctaagcaggcccgtgatctagcaagccaggcatatcaagttttgcatgattgggcaattgtacccgggaccgatgagaacggtactattgactcttatgcattgatgtcgtgggtcaagcaagctcgccaattactgaagtctgcaggtcgtggtgaaataggtgatgacaagattggcatgattctctctgccgcaaaaagaaaaaaaaatgaaacgtggccaccagaagcaattcgcgaagttcttgagtttgctagaagtcgagcaatggagagtggttttgaagttggtgtttacaaccgccgtggcgtaactgtacgcatgccacatgatggtggggggcaagaacgaatattagtagaacgctataaacaagatgctgatgatcttagatttgaatggcctcgaaccgcagcgtgcttagaccgcattgctataagctatcaacaagatgcaattagagaagatcatagtgcggaccaaggtgattggttataa

SEQ ID NO: 10729 - DNA, 432 bp, Escherichia coli; identical to SEQ ID NO: 8375

SEQ ID NO: 10730 - DNA, 1557 bp, Escherichia coli; identical to SEQ ID NO: 8317

SEQ ID NO: 10731 - DNA, 3117 bp, Escherichia coli; identical to SEQ ID NO: 8319

SEQ ID NO: 10732 - DNA, 780 bp, Escherichia coli
atggctagaagaagtggttttgaagttcaaatagcagcagtaaaagctttatttcttcgtgaaattaagactcgttttggtaaatatcgtctggggtatttatgggcactccttgagccaacagcacatttgataatcttgattggtatatttggatatattatgcatagaactatgccagatatatcgttcccagtgtttcttctaaacggacttatcccttattttctttttagtaatattgctgtccgctctattggagcaataaactctaatcagggcttatttaattacaggcctataaagcctattgacaccataatttcacgaacccttcttgaagcattaatatatagtggtgtttacataatcctcatgtcaattgtaggtctacttggagaagaattttcatttttaaacatcattatactcgctgcaacttggggattacttattatattttctcttggtataggtttaattttcatggtgttaggtaaaactttcccagaaacggaaaaatttttgcccataatgattaaacctctttatttcatatcttgcgtaatgtttcctctccattctatccctaaaatatactggggatatttattatggaatcctttagtacatgttgtggagttaagtcgccaatctgttgtaccgggatatataagtgaaggtgttagtattaattatcttgcatttttttctttagtagtgtttttcgtaggactttgcctttaccgtttcaaagaggaggctatgttaacctcatga

SEQ ID NO: 10733 - DNA, 582 bp, Escherichia coli
atgatacgtattgagaatctcaccaaatcatatcgtacacctaaaggaagacattatgtttttaaagatttaaatattgaattacccacaggaaaaagtgttgctttagttggacgcaatggtgcaggtaaatcaacattgcttcgaatgataggtggtatagatcgaccagataaggggagaatacttactgatcaaaccatttcatggccagtaggtttagctggtggttttcaaggcagtctgacagggcgtgaaaatgttaaatttgttgcaagactttatgctaaaaaagatgagctgcaagataaggtttcatttgtagaggaattttccgaactggggaaatactttgacatgccaataaaaacatattcttctggcatgcgttctcggttaggatttggactcagcatggcatttgattttgattattatcttgttgatgaagttatggctgtaggagatgccagatttaaggagaaatgtttatcactctttaataaaaagcatgaaaaatcaagtttcttaatggctgtctcttatacacatctgacgctgccgacgaagaggatagtgtag

SEQ ID NO: 10734 - DNA, 150 bp, Escherichia coli
atgatcatgcaacgggttatgcaaatgcataaatatgtgatggctgtcacttatttatttcaagaaatatatcacctaaaaacaacgcggggcagggaatggctgccccatttaattcttacgcagcgtgtgtggttgactactcgttag

SEQ ID NO: 10735 - DNA, 1158 bp, Escherichia coli
atgcacgttacagccaagccctccagttttcaatgtaatctcaaatgtgattactgtttttaccttgaaaaagagtcgcagtttactcatgaaaaatggatggatgacagcactctgaaagagttcatcaaacaatatatcgcagcgtctggcaatcaggtctattttacctggcaagggggtgaacccactctggctggcctggattttttccgtaaagttattcactatcaacaacgctatgcaggccaaaaacgtatttttaatgcattacaaacgaatggcattttattgaataatgaatggtgtgcctttctcaaagaacatgagtttctggttggtatctcgatcgatggcccccaggagctacatgaccgttacagacgcagtaattcaggcaacggtacttttgcaaaagtgatagcagccatcgagcgtctgaaatcatatcaagtagagtttaatacgttaaccgtcattaataacgttaatgtccattaccctcatgaggtttatcattttttaaaatctatcggcagtaaacatatgcaatttatcgaattgctagaaaccgggacgccgaatattgatttcagtggccatagtgagaacacattccgtatcattgatttttctgtgcctcccacggcttatggcaagtttatgtcaaccatttttatgcaatgggttaaaaacgatgtgggtgaaattttcatccgtcagtttgaaagctttgtcagccgttttttggggaatgggcataccagttgtattttccaggaatcctgcaaggataatctggttgttgaaagtaatggagatatttacgaatgcgatcattttgtctatccacagtacaaaattggaaacattaataaatctgaactcaaaacgatgaacagtgttcaactgacagcgcaaaaaaaacggatttcagcgaaatgtcagcaatgtgcatataaacctatctgcaatggtggttgccctaagcatcgtattactaaagtaaacaatgagactgtttcctatttttgcgaaggttataaaatccttttttcaaccatggtaccttatatgaacgccatggtggagttagctaagaacagagtaccgctttaccacattatggatgttgcaaaacaaatggagaataattaa

SEQ ID NO: 10736 - DNA, 699 bp, Escherichia coli
atgatcataaaaaaaagcggtggtcgctggcagctaagcctgctggtgagcgtggtaatcagtgccttttttctcaacacagcttacgcctggcaacaagaatatatcgttgatacgcaacccggacattccacagagcgttacacctgggatagcgatcatcaacctgattacaacgatattttgtcgcaacgtattcaaagtagccaaagggcgctgggactggaagtcaatctggcggaagaaacccctgtggatgtcaccagtagtatgagtatggggtggaattttcctttatatcaacaggttacaaccggtccggtcgcggcattacattacgatggcacaaccacctcgatgtataacgagtttggcgacagtactaccacgctgactgatccgttatggcatgccagcgtgagtactttaggctggcgtgttgactcccggcttggcgatctccgaccctgggcgcaaatcagctataaccagcaatttggcgagaatatctggaaggcgcaatcaggcctgagccggatgacggcgacaaaccagaacggcaactggctggatgtcaccgtaggcgctgatatgttgctcaatcaaaatattgctgcctatgcggcgctatctcaggcagaaaataccactaacaatagcgactatctgtatacgatgggggttagtgccagattttaa

SEQ ID NO: 10737 - DNA, 486 bp, Escherichia coli
atgggggcagaagttgccttacgaccactgggaattcaatttttttacccgaaaaatctgccggcactggtgacaatggtgtatctggaggacggggatatccgggagagctttttccggcgactggatccgactgaacccagtcagagcagtgtgggaaaatggagccagcacgtaggcggttttttagccagttttaatattggcaaggcgctgcctgtcaggatgacggtatgctgggactcagttatcgataaaaaggcgtatgagacggagatctggttcagccgggatacgtggcagcagatgctgactgcctatcctgatacttatcgtccgggaaaaatatattaccgaaacaaaatgattattggcctgccccccggtggtaaagtcagggtatggttaaaagacaatcgtaatcctgttgtactccagaatcctgcccgacagttcaccctgccggggatatgttctcaggtataa

SEQ ID NO: 10738 - DNA, 2850 bp, Escherichia coli
atgtattcagatcaccaacgtagttatctggcccactggttgacgttaagcggcaaagccgaggactcgctgacgcaaactattgccagcgcacgggttgatatgaatcctcatcaggtagaggctgcgatgtttgcgctggcatctcccctgtcgaatggcgtgatcctggccgatgaagtgggactggggaaaactattgaggccagcctgattttggcgcaaaaatgggctgaacgccgccgaaaactgttgctgattgcacccgcaacgctacgcaagcagtggagccaggagctggaagagaaattttcgctgccttcacaaattattgaagcgaagatcttcaatcaaatggttaaagaggggagcgataatccctttgatattgaaaatgcaaccgggaaagcggcgatctgcatttgttcatacgaattcgctgcccgtaaagagcacgagctggcacgaatcccgtgggatctggtcgtcatggatgaggcgcataaactgcgtaatatctacaagaacgatggcgctaaaacagccaaaaaactcagtggcgcactgtccggcagaaaaaaaatactgctttccgccacgccgctacaaaacagtattcttgagctttacggcctgatttccgtgattgatcctcattttttcggcgaccttgcttcgttcaaggcccgttattcccgacagaatattgacgatgcagaactggcattattaagggttcgtctgaataaaatctgtaatcgaacgcttcgtcgacaggttcagcaggaaggcgggatcagttttacccgacgccattcaataaccgaagactttcgtccgacggaagacgaagaagtgctctataaacaggtttcctcttatttgcagcgggacgatctactggcgatcaaaagcggcgcgcgtcacctagtaacgttagtcattcgtaaaattctggcctcatcgtctacagcgatccagggaacgctggaaacgatgatccaccgtcttgaaagtaaaatgccggtgctggatgcgctgacggattatgaaaattacgacgattacagcgatgaagaaggcattgatgacgaagataccatcgatcctcaggcgctacaggccgaaattgaccagttaaaaaattataagactttagcggcatcgattaccaaaaacgccaaggccgaagcactgttacgcgttctcgatcgggcctttacctttacggctgaactgggcggattacgtaaggcggtcatttttaccgagtccgtacgcacccagacctggctggcgcaactgttgtcagaaagtggctacgagggagaagtggttctgctcaatggcagcaatagcgatgcggtgtcgaagaagatttacagcgactggctggagaaacatcagaactctggccgggtttccggttcgcgtacggcggatatgaaggcagcgctggttgaaaaattcagggacgaaggcaccctgatgatttgtactgaagcgggcgcagaaggtatcaacctccagttttgttcgctgttaatcaattatgatttaccgtggaatccgcagcgcgtggagcaacgtatcgggcgtgttcaccgctatggacaaaaacacgatgtcgtggtggttaattttattaataaaggcaaccgtgccgatcagcgcgtgtttgaattattgagccagaagttccagctttttgaaggggtgtttggcgcatccgatgacattctggggtcgatcgaatcaggtgttgatattgaacgacgtattcatgagatataccagcactgccgctccgatgaacaaattgaacaggaatttaatcagctgcaggatgaactcaaagatcaactggaaaatcgggagaatgaaacccggcgttcattattcgagcattttgacgttgatgtggtccgcaatctgaaaacccgacgtacaaccaccctcgcgcagttaaacgattaccaggaaaatctgttgctgctggcggaaatgtttctgagcgacgagagcgattttcaacgttctgagacgggttttcgttccagaggaaagtattttgacgtcaactggcccattgcggatgaaaaagatgccgaattcttccggcccagccagggatatgggaagcaactgattgatgctgccctgcatgaaggggcaagcctttccacatccccagtttgccagaagctccatttcatctaccaacccagaagcggacaactggccgatgttaaactgttctgcgggaaatcgggacagctgttgctggcaaaagtcagcatcggaaatcaggagcaacagcgagagaaactattgaccgtcgctgttacagaaaatggcgaagtgctggcagaggaaaccgtatcccgtctgcttcgcctgccattatcagagataacatctgtcgaagaacagcctttgctgcctgcgttaacgacacaatgtgaggttttacggcattcttttatccaacaggtcgaacgcgataacgaactttattacaatgaagaagtagaaaaacttgaacgctggtcagaagatcgacgtatcgcgctggacttacgtatcaaacagttagatgcagaaattaaagaggcgcgtaaagccgcccgtcagcttccttctctaaaagagaaaatggaagccaagcgcgcattaaaggtgctggaacgcgagcgggatagcatcatgttgcagtatcatgatgaaaagaaaaaaatcgagcaggaagaggaccgtctgctggaagaggtcgagcaaaagctggcgacggaaataacgtcccgtcaattattcgcggtgagctggacgttgagttcaccttccgcatga

SEQ ID NO: 10739 - DNA, 981 bp, Escherichia coli
atggctaacggtaagatattaaggcaactaataaaagcgggcgcaacgggtgataccgctactttccgtcgtgtttcggaagccattattgatgaggaacgtcagaaacagcaccaccttctggctaacgatctggagcatattctttacggcgatcgtcttgttcaggcttcgcgctcgcctgcgcttcctcaagcaccgatagataaagaaaggggcctgccgttgctggatctccggcagccacagcgcagccttgatgaaatgatcctcccggcgaccagcgctacagtgattgatgaactccttgaagagcaccggcgtagcgatgtattgcatagctacgggatgaaagcagccagtaagatcatgtttttcggaccgccgggctgcggtaaaacgctgacagcagaggttatcgcttttgaactggacatgccgctggcaattgtccgcctcgacgtactggtgtcttcgtttttgggagaaaccgccgccaatctgcgtaaaattttcgattttattgcagagcacccaatggtggtgttgttcgatgagtttgatgccataggaaaagagcgtggcgacagcggcgaacacggtgaattacgccgggtcgtcaatgccgttttacaaatgatggatgcttatcagggtaaaagcctgattctggcggccactaaccatgaacacattctggacagcgccatctggcgtcgatttgatgaagtgattgaatttccgttgccggatcaggcgcagttacgtgagctgttggcgttaaaattacgcggcacccgccgtcagtttgagctggacgatagcgagctattatccctgctgctcgggaaaagcggtgcagatattgagcgcattgtccgtcgggcaaccaagcatatgatcctgcgtcatcaggaattcctgacgctaaaagatttaaaaaacgcaactcagcgagaaaacgccagaacccaccgataa

SEQ ID NO: 10740 - DNA, 2388 bp, Escherichia coli
atgacggcgaattatcagcatctaacgattaccaaagcaccacttcaaaacgaccgacggacccgcagagtcaatatgccccgtattcgcaggggcgatttacgccagcacgggcaaatgctgttgacgcaactccataccttgcgcccaacgctggcacaagtacccggcagcgccgatgacgggcgctatatcctcaagctgaactacagcggcacaatgaatttttcagcattgatacatcacggcgtggagttcatcagtcaggaaggtaaacaggtctgtatcgttttcactaatgagcagggtctgacaaccttcgaaacccatctggcgcaactggggcttccccgtacggacctaacctacaggaatattctcgaagcgcttgacggcattgacggctggtcggcggaagatcgtaaaagctgggcactccggcgctatggttttcctgtagcggaacgctttaatctggatgtggagctctggccagtcgatgtggcgcatcaccccagacgtatcgacctgtatacccgttttgaaaattggctcagagagcaggggattctctggcgggataaagtcaatctggacagcctgttgatgtaccggatagaggtttcgctcgcgcaagcagaatacctgttagcgcatcgggacgtcaggttggttgatttgccaccgtccagcggcattagctatcaacaaattaaccgggacatcaatacacttccagagcatctgatttcgcctgcggtaaatgcggccagagtctgtattctggatagcggcatcaacaccaatcaccctctgttaagtgccgccattgctgaaagcgccagctttattcccaatcaggatgcgtttgatcaagaggggcatggcaccgccgtagcgagtattgctctgtatggcgacgttgaagcctgtaaccagagcaatttctggcagccgcagctatggctgtataacgggaaagtactgaacgagcgggctgaattcaatgccgaaacgattgaaagcacactaacagccgccgtcgcgtattttaccgatctcggttgccgcattttcaatctgtcgctggggaatgctaatgcgccctatgacggcaaacatattcgcggtatggcgtatctgttagatacgctggcgcggcaatataatgtactgtttgtcgtctctgcggggaatttcgcaggcagcgacgatcctccggtgccgcaaaatagctggcgggatgaatatcctgactacctgttgcatgaggacagcgtaatcatcgatccggctccggcgctgaacgtactgacagtgggcagcgtcgccagacataacgcaacgttggatgcgcagcgtaggcctggcgatattcagcatctcagcccggcaacggaaaaccaaccgtcgccttttacccgacacggcccgtcggtaaaaggcgcgtttaaacctgacgttgtagcgcacggtggcaatgtcgcttccaacgttcggcaagggcaatggcaggcacatatgcgcggtctgggcgtattaagctgccatcaccagtttcagggtaatacgctgtttaaagaactcagcggcaccagctttgccgcgccgtatatcacacatctggcgggtcgactgctaaatgaatacccggaaatgtctgccaatatgctgcgggcaatgctggtcaatcatgcttctgtttctcaggagatgacgcaggcttttccgcaggccatgagagaaagctatagaaatgcgcctgcaacgagaaaccgggagattgagcgcgacgtgacaggctacggcatcattgatgaagatgcgttatatcgttcttctgaaaatgtggtggtcatgcgatgtgaagagcagatagaaaataacgcgcaccaattttttgaactgcccttcccggcttcttttttacgatcgcagcgtgcaacccgtgaagtccgcgttacgctggcatattcacccgccgtgcgtaccacccggctggattatactgccacacggatcggtttccggctggttaagggccgctcgctggatgaagtgcaggcctgttttaatcaccagacgcagagtgagacggaaacccgctccgatgatgcccagactaaccgtgttgtatcagcccaacagcgggaacgcgggacggtacagtcgtcgatttggacttttcgccagcgtaacccggatgaaaaatggtttattgttgttacccgtcaggacagagactggggcgaagcattcagcagcgagcaggagccttacgcactggtcgtgaccgcgaccgatcgcgataatgaacaggcgcagctttatacacaaattcaggcgcagatccgtgaacaggaacgcgcacgagcacgtattggataa

SEQ ID NO: 10741 - DNA, 1629 bp, Escherichia coli
atgtcaacgaagcaaaaattagaacttaactggattggtaagcataagcgtcctcgtgtggagccgcgtattctgctcgaagataaggagttatcttatggtgatgcggatagtgagaatctgctgattcatggggataatctactggcgttgaaggcactggagcagaagtatacggggaaggtgaagtgtatatttatcgaccctccttataatactggaagtgcttttacacattacgatgatggacttgaacactctctatggctttgcttgatcagagatcggttagaattattacgcactttattatctgaagatggctctatatggataacaattgatgaccacgaagttcattatttaaaatgtctttgtgatgaaatattcggaaggaataactttatttcaaatgttatttgggaaaaatccgatagcccaagaatggatgctgcatttttctcttctcgccatgatcacatattagtgtacgcgaaagatcagtcaaaattcaaagtaaaaagacaaccactgtccctcaatgatctacctagccattacgataaagtagatccaagcggcaatccttactacctaaaaccgctaagggcaatgggacaagcagataaaagagaagatcgcccaacaatgtatttccctcttgttgcccccgatggcacagaaatttttccaaagcgccaagatggaactgatggacgttggcgttggggcgtacaaaaaatagatcaggagaaatggagaattgattggtcgaaaggacgaaatggttggactccatattttcgtgtatatgctgatagttcgtcaggtagaccgccagaaacgatatggtttcattctgaagttggaagtaacaggacatcaaaagccgaaattaagaaggtgattcctactataagtgcatttgatacacctaagccggaagctcttataaaaaaaatactggagattgcaactgacaatggtgatcttgttctagactcctttgctggttcaggcacaacaggggccgtagcacaaaagatggggcgtcagtggattatggttgaattaggcgaccactgtcggactcatattgttccgcgtatgaaaaaagtgattgatgggaaagatttaggcggtattacaaaatctgtaagctggcaaggtggtggaggttttcgttatttgagtctagcaccttcattgcttaaaaaagatacttggggtaattgggtaataaataaatattacaatcctgaaatgcttgctgaagccatgtgcaaacatatgaacttcacctatgcaccaagccagactcaatactggaatcacggttacagcaccgaaactgaccacatctacgtcactaccggttctttggcttatgaacaactgaaagttctgagtgaagaggtaggaactgaacgtaccttactgatttgctgcaaagcctttatgactgaaggcgcggacttccctaacctgacgctggtaaaaattccgcgtgccattttgagcaaatgcgaatgggatcaggacgactatagctttacgctaaacgttctctctgattcagaacagcctgacgatattgactacgacgaagacaccgaagacgaagaataa

SEQ ID NO: 10742 - DNA, 2871 bp, Escherichia coli
atgagccagaataacgccgttaaaattgtcaatcgagttagcgcacgactgtctctgcgcgatccgcaggatgaatcattgtgcatcttatgtgacgtgctggaacaactcgatctcagtaaagatcccgatcttaatcgctggctggcggtgctgcatcagcaatacccaacggtaaaaggatttgaacgcgcctttccttcactctgctttgcactggcgaccggcgtgggcaaaacgcgcttaatgggggcgatgattgcctggttatacctaaccgggcgcagtcgtcattttttcgtgctggctcctaacctgaccatctatgaaaaactcaagatggattttttacccggttcgccaaaatacgtttttcagggtatccctgaactggcgcaaacgccgccagtattaatcactggcgatgactatcaggaagggcgaggtgtccgtctggactatgcgattgccgaaagcaaaacgggcgatctgtttggtggcgaaaccgcgccacatattaacatcttcaatatttctaaaatcaacgcgctggataatgccaaaggggccgctaaatccaaagtcgctaaaatccggcggattcaggaatacgtgggagagtcttatttcagctatctggcaaacttgccggatttagtcgttttaatggatgaagcccaccgttactacgccagcgcgggcgcgcaggcgcttaacgatctgaatccagtattgggtattgaattaaccgccacgccgaaaacggtgggcgcaaatccccgtgatttcagaaacataatttatcactatcctctttcgcgagcgctgaaagatggatatgtcaaaattcctgccgttgccacgcgcaaagacttccgggctgcaaattattccgaagaacaactggaaaaaattaagctggaagacggtattcaccatcatgaatacgtaaaaacggaactgaccagcttcgccaataataccggcaacaaactggttaaaccgtttatgttggtcgtagcgcaggataccgatcatgcggacaggctgaaagcccgtattgagcatgacgaattttttaacggcgcgtacagaggcaaggtgatcaccgtccactctaacctgacgggcgaagaatcagaagaaaccatgcagcgactgttgactgtcgagcatgacaaagacactgaaatcgtcattcacgtcaacaagttgaaagagggctgggacgttaccaatctctacacaatagttccgttacgtgcatcagcctccgaaattctgactgaacagaccataggccggggacttcgcctgccctacggaaaaagaactggcgtcgaggccgttgatcgcctgaccatcattgctcatgaccgttttcaggagattatcgatcgcgccaataatgatgactcgataatcaaaaaagttctctatatcgggctggatgatgatgagaatggtattccagaagtaaaacctcagcaaattatcgttccctcaatggctgaatatctgctgggtaatcaaattatcgataatagtgggttgcagctttgtgaagataaagcgatataccgaacaaactcaacactaaaaccgatactcggtacagaaacggaacgtaaagtcgccgagctcacgtttaaagtcgtctccgaagaagcaaaacggttaaccagcagccagcaactcagtatgccagaagtcaaagcgaacgtaacacggcgggtgcaacaagccttgcgcgaatgggaagtgactcaacaccaaacctctccctcttctacacaaatcgatctggctgaaatgattgaagagcaacctgaacaaccgagtttcccctcaatggaagacgcagaggttcagcaactggtcggaacgatcaccgaaaaactgatggaatatactattgatattcctcgaatcgtggttttgccagaacgtgaagtcaattacgggtttaatgatttcaacctctccggactggatcgcattgcgctcaaaccaggcagtaaagagcttcttctgacgcatctggagaataacgaacagcggacaatcagttggcaggaaggcggtgaaacggaagaacggttagaaaactatctcattcgttatctgctcgaccatgatgaaattgactacgatgaacatgccgatatgctttataaacttgccggacaaatggtgagccatttgtgcagttatcagccgcaggaagatgcagaatccgttctgaaaaatgcaggccgtcaactggcagaatttatgtgggcacaaatcaaacaaaatatgtggacaacgccaacgggttataccggacgcataactcagggattcgatgttatacatccagccacattcaattttgccggaaatgaaaaaccgagagattttcgtgtcgccattcccggtggtgaaaaaaataaagttcgccagatgattttcactggtttcaataaatgctgctacccttatcagaaatttgactccgtcgatggggaacttcgtctggcgcaaatactggagaacgatgcttcagtggtgcgctggatgaagcctcgccctggacaattccgtattgaatatactaatggtagaaactatgagccggattttgtggttgaaatgaacaatgggtactgtcttattgaaccgaaaaaagccaatgaaatcgatactcctgaagttcaggccaaaacacgggcagccctgcgctggtgtgaatttgccaatcagaatgcagcaaagaatggcggaaaagtatggagatatgcgcttatcccacataatgaaattgaattaagtcgcacagtttcagggttaatggctgattttatgatgacaaatagtttatcagcatag

SEQ ID NO: 10743 - DNA, 294 bp, Escherichia coli
atgaatacagaaagaccgctccctcaaaagcagaatctttataagaccatgtggtatttaatattcagcgcagagagatttgtaactatcgctgccgaaaattcaatggccttcgaacttgaacatgaagagtataaacgaaaacttgccgagaggaattatagtattgatcccaaagttcatgtccactctcatccacaaaggctgaaagacctgcgaactttattactcaagacaacgggttgtattttgagtgtaataatcttaatagtaggtattggcttttatacttga

SEQ ID NO: 10744 - DNA, 1425 bp, Escherichia coli
atgcgtatcggcatgcggttgctgctgggctattttttactggtggcggtggcagcctggttcgtactggccatttttgtcaaagaagttaaaccgggcgtgcgaagagcaacggaggggacgttgatcgacaccgcaacgttgctggcagagctggcgcgtcccgatttgctctctggggacccaacgcatgggcaactggcgcaggcgtttaatcagctacagcatcgcccgtttcgcgccaatatcggtggcattaacaaagtgcgcaatgaatatcatgtctatatgaccgatgcgcagggcaaagtattgttcgattcggcaaataaagccgttggacaggattattcgcgctggaatgacgtctggctaacgttgcgtggtcagtatggtgcgcgcagcacgttgcaaaatcctgccgatcccgaaagttctgtgatgtatgttgccgcgccgattatggacggctcgcggcttattggcgttttgagcgtaggcaaaccgaacgcggcgatggctccggtcattaagcgcagcgagcggcgaattttatgggccagcgccattttgttggggattgcactggtgattggcgcaggcatggtttggtggatcaaccgctccattgcccggctcactcgctatgctgattccgtcactgacaataagcccgttcctcttcctgaactcggcagtagcgaactgcgtaagcttgcgcaggcgctggaaagtatgcgcgtgaagctggaggggaaaaactatattgagcaatatatttatgcgttaactcatgagctaaaaagcccactggcggcgattcgtggcgcggcggaaattttacgcgaaggtccgccgcctgaagtagtggctcgttttactgacaacattctgacacaaaatgcgcgtatgcaggcattggtagaaacgttactacgccaggcaagactggagaatcgtcaggaagtcgttctgactgctgttgatgtggcggcattattccgccgcgtcagcgaagcgcgcaccgtgcagttggcagaaaaaaaaatcactctgcatgttacgcccaccgaggttaacgttgctgctgaaccggcgttactggagcaggctctggggaatttactggataacgccatcgattttacccccgagagcggttgcatcacgctaagcgccgaagtggagcaggaacacgtcacgcttaaggtgctggataccggtagtggtattcctgactacgcgctttcacgtatttttgaacgcttttactctttgcctcgtgcaaatgggcaaaaaagcagcggtctggggttggcgttcgtcagtgaggtcgcccgtttgtttaacggcgaagtcacgctgcgcaacgtgcaggaaggtggcgtgctggcttcgcttcgacttcaccgtcacttcacatag

SEQ ID NO: 10745 - DNA, 750 bp, Escherichia coli
atggattatgtttgctccgtagttttcatctgtcaatcatttgatttaattataaacaggagagttatctcgttcaaaaaaaattcattgtttattgtaagcgacaaaattagaagggagttaccagtatgcccctctaaactaagaattgttgatatagataagaaaacatgtttatccttttttatcgacgtgaataatgagctgcctggcaaatttactcttgataagaatggctatattgctgaagaggaacctccattatcgcttgttttttctctgtttgaagggattaaaatagcagactcacactccctttggttaaaagaaagactatgtatatccttacttgccatgttcaaaaaacgcgaaagtgtaaattcatttatactaacaaatataaatacatttacctgtaaaattactggaataatcagttttaatattgagcggcaatggcatttaaaagatattgcggaattgatttatacgagtgaaagtttaataaaaaaaagattaagggatgaaggaacgtcatttactgaaatattgagagatactaggatgaggtatgcaaaaaaactcataacttcaaactcttattctatcaatgtcgtagcccagaaatgtggctataacagtacttcatatttcatatgtgcatttaaagattattatggtgtcacgccatctcattattttgagaaaataatcggcgtcacagatggaataaacaaaacaattgactga

SEQ ID NO: 10746 - DNA, 1368 bp, Escherichia coli
atggaaaaagactatttgggaattagtagtactgtattagtgagtttattgtttgggcttgcgttggttttggtgaatagttggttcaatcagccaaccgttgaggaagttgttccacgatcaacctatctgatggttatgattgctttattttttatcgatactgttgcatttatttttatgcagttgtatttcatttatgaccgtaggcaattttcaaactgtatacttagtttggcttttctaagttgtttgatttactttattaaaaccgtcattatcattcagcaaattattgaggggcgtttgacaagcagtgttgttcaaaatgacattgcaatttattatttgtttcgtcagatgagtttgtgcgtattaatatttctggcattggtaaataaagttagtgaaaacacaaaacagcgcaatttgttttccaaaaaagtgactttgtgcataactttgttttttgttcttggggggccgatagttgctcacatattttctagccattatgagagctacgatttacacattgccgagttaaccaatgaaaatggtcaggtggtttggaaagcctcatatgttaccataatgattttcatgtggttaaccttgctttcggttaatctatactttaatggtttacgctgtgatatctggaacggggtgtcggtgattgctttttgtgccgtgctgtacaatatctctctgttatttatgagcaggtatagcgtgtccatttggtatattagtcgcactattgaagtagtcagtaagttaaccgttttggtaatttttatgtgccatatattcagtgcgctacgagtaacaaaggacattgcacatcgcgatcccttaaccaatatatttaacagaaattatttttttaatgaactgacggttcaatcagcatcggccaaaaaaacaccttattgcgtcatgattatggatattgaccacttcaaaaaagtcaacgacacctggggacatccggttggcgatcaagtgataaagacagtggtgaatatcattgggaaaagcatacgaccagatgaccttttagcgcgcgttggcggcgaagagtttggcgtcttgctgacggagatcgatactgaatgtgcgaaagctttagcggaaaggattcgggaaaatgttgaacgtttaactggcgataatcctgaatacgccataccacaaaaagtgacgattagtattggcgctgttgtaacgcagaaaaatgagttaaaccctaaggagatctatcaactggctgataacgcactttacgaggcgaaagagaccgggcgtaataaggtggtagtaaaagaggcagaaattcttatcaaccgcaaggatgatgaatga

SEQ ID NO: 10747 - DNA, 531 bp, Escherichia coli
atgaaatacaataacattattttcctcggtttatgtctggggttaaccacctattctgctttatccgcagatagcgttattaaaattagcgggcgcgtcctcgattatggctgcacagtctcatcggattcgcttaattttaccgtagatctccaaaaaaacagtgccagacaatttccaacgaccggtagcacaagtccagccgtcccttttcagattacattaagtgaatgcagcaaagggacaacgggagttcgggttgcatttaacggtattgaggatgcagaaaataatactctgttgaaactggatgaaggaagcaatacggcctccggtttgggtatagaaatactggacggaaatatgcgtccggtgaaattgaatgaccttcatgccgggatgcagtggatcccattggtaccagaacagaacaatattttgccttactccgctcgtttgaagtcaactcagaagtccgtcaatcctggactggtgagcgcttcggcaacctttacccttgaatttcaataa

SEQ ID NO: 10748 - DNA, 183 bp, Escherichia coli
atggcccccgtggtgttgtcaggtgcatacctgcaacgtgcgggggttttctctctccagcaaccaatgccaccagggataaagcccccgcaacattgcgcctcaccggaacctttccggcttgccgctgattctacgattgctttttaccgtcagcacccggcaatcttcctcattgcgtga

SEQ ID NO: 10749 - DNA, 747 bp, Escherichia coli
atgagcaaatatttgatcaagctagttttaacagcagtgatattaatagctgtctttgttggtatatatcttgcctacggaatcgatcatgaaacattcaaatatctgataacatgtctaatgacagctattcccgtaatctttttaagtgtgtttattaagcagttaaccaatgcgatgacatcattagcaaagtctcttatgggaattgctcctaactctgtttctaaaatactagaggctgctatttttattttagaaaacaacgaaaaagtcgtcgaaaagttaattatcaggcgcgcaataaaaattgtggttatgcagaaacatactgcaaaaaaaaataaacataaaataaataaaagaaaagaggctatagaaactgtaacagaattatttttggccaaatctaaaattgaaaacttacgagcaaagtttattgctgtaatagggattatagtgttaacaatcgcaagtctgctttatagtcagtcattattagcttgcataattcctatcacattctttattattcttgaagtaaaaataagagtattggaatttagagtaactaatggctttttcggtaataatagactagaggctttacaacttctgcagttcattactgacaagaaaaataaagacgactttgataataaaaatggaaaaagaaaaatctttattgacctattagaagtagaaaacagtcaagtgtttaactcggagaatggagtcctacaatga

SEQ ID NO: 10750 - DNA, 414 bp, Escherichia coli
atgaatagcgatatcgcttcaagatggattgatgctggatgtagaaccttaactttttattacccaatcagaagcgctgttggttatgttattgccgcattcctatggtttttaaccggcgcatatccaggcataattacatttcttgctatggagcctaattcttctgcgagaacatctgtatctatttttggcttcatactgtgccagattagaaccatatttgatgcaacaacaggaaaggggataaacgaagaattacaaagggttgttaatcttattgacaaatccaacttatcagatgttcaaaagcgcctcaaatacatagaattgattgatactgagataggcaaacttagcaaatcgacaagtagctcgaaaggtgaagataaaaacccacaaactgaagaatga

SEQ ID NO: 10751 - DNA, 390 bp, Escherichia coli
atgagtgagcaaaacataattaatgatataaagcaccataattggaaagaaagttggttggatttttcagtttttctttatgaacataatcgcttgattatttccgggagtgatgacctttcttactatcacacactggaaataataatagacacgccatgctatattagcggtgttatggactggtcatgcgatcttaatgaggagtttattaagctatcaagttgcactgacaatgctcgtgaaatgttagtattagagttttattcggaatttgaattgaaattcaaagttattgcgaaaaaaatatccattaactttgatactgtattttattacaaaagagaaaatttgaagattggtgagagattagcttactggattaaataa

SEQ ID NO: 10752 - DNA, 717 bp, Escherichia coli
gtgatcggctaccgcagcgcccggggtgagcagtgggaatactgccacgacgccagtggcagacggacagagaaacgctgcaaacaaaaagccctccgcatcacatatctgtgggacggcgacactattgcggaaatccgggaataccgcgatgataaactgtacagtgtgcggtacctggtgtttaacggctttgagctgataagccagcagttcagccgggtacggcagccgcacccgtccgtggccccgcagtgggtgacgcggaccagccatgcggtaagcgacctgacaggccgcccggtgatgctctttaacagtcagggtaacgtggtgtggcgtgcggagcagaccagcctgtgggggctggcactcagcgtcagcgcagacagggactacccggacccgcgcggggagcgggacgcagaagcggaccccggtctgctgtatgcggggcagtggcgggatgcggagtcagggctgtgctataaccggttccggtactacgagccggagaccgggatgtatctggtgagtgaccccctgggtgtattgggtggactaaacacttatggttatgtgctgaatccgtgttgcttcacagatccattaggtttaggagcctgccctgaattaagtaaaatggctcaaaaagttcatgatttagctgggggattacacagggaaagatcacgtaacgctgcttttttgtactaa

SEQ ID NO: 10753 - DNA, 426 bp, Escherichia coli
atgaacggtataaaaacggggctggggatcacgccgggtgagcacattatcagtgccgactctgcgttcagcagaaatatccggcattgtttctgcctttcctgtcgtggtcggttgattctgcagacagatgctcagggggcgtggtttgagcacgatttacatgccctgagcgagcaacagaaggcggactgtgtggtgctgaatccggaaaagtcccacccttacattgaggatatggcgatgtttttatcgccattaccggtcgtgctggaatggcattgtgtgatgtgtgagcagttttttcatgggaagaagttctgtgaggcctgtggtacggggatttattgcagagcggtatgtacaaagtatgtttacagctaccagccagacttgtttgaggactgcggaggtgcgagtacttaa

SEQ ID NO: 10754 - DNA, 2058 bp, Escherichia coli
atggatcttgtagatagtgtcgaagcaggcaagctgacgatcagagaattgattgatgccctggtgaaagataaaaattacacaacttccaagtgggagcagcgataccgggaatttacgaccttgctacaacaaacctcaacttttgctgagcctgaaacggatgatttagtcaagaggctctggtatgaacgtgataacggtattgccagtattcgtcagggcgttccatcattagcagaatatcagcaaagcctcccattgcttagagaactcaccgaacgtgttcgtcaacaaccaaatgaagttacctaccaatacgtaggcactgcactgcagcaggccaaaaagatcggacagcttaaacgcatgtattggagtttaagaaatcgtgtctttgccgcgttctcgccagaaaactacaccagtactgtggatgagaatgctttcaataaaacagcagaattcctaaatcaacgcttccatctcggtttggtactgactggaaattggttacagaaaaactatgaattgaaacaagccatacacgcccaatctcctgacacagatccctattacgtgaatatggctatctggcatatctatgaattgctccgtgagcgcgataatgaacagaagcaagagaaagtagcaagcagtgagcccatcgagaacaagactattccacattcaccaactaacgtgatcttctttggccctccaggcactggcaagaccttcacgttgcagcaaaaaatgaaagagtatacttctcatgcagttcctgctgatcgtgaagcctggctggattctcgtcttgaatcgttgaactggatgcaggttataacgctggtgctgctcgatcttgggaaactagccaaagttcgccaaattattgaacatatgtggtttcaacgtaaggcattattaaacggtcgtaatggcaatctatcgaatactgcctggaaggctttgcaagcctatacaattcccgaatcgttaactgttgattataaaaatcggcgtgagcctgccgtatttgacaaaacggataacagcgaatggtttctagttgattcacagctcgagcaagtggaggatttgttagcgctctacgccgaacttaaacgtggtccaaaatctgccgaagccatccagcgttttgcggttgttacgttccaccaatcttacggctatgaagaatttattgaaggtatgcgtgcacgctctgacgagagtggcaatatatcttatcccattgagccgggtatttttatgcgcctttgccaacgtgctaatgccgatccagcacatcgctacgccattttcattgatgagatcaatcgcggaaacatatccaagatctttggcgaactaatctcactcattgaagtagacaagcgtgcgggtatgcccaatgcaatgagtctgcaactgtcttatagcggtgattactttagcgtgcccgccaatgtcgacatcatcggagccatgaatacagcagaccgttctttagctctgctggacacggctttgcgccgtcgctttgactttgtcgaaatgatgccagatctttctttactgagtggagctaaggtgaaaggcatagagcttgagtcgttgttagaaaaactcaatagccgcatcgaagctctttacgatcgtgagcatacactaggacatgcattctttatgccggtaaaaaatgctctcgataccggtgatgaagaaactgcgtttaaacaattgaagatcgcatttcagaaaaagatcattccgcttttacaggaatactttttcgatgactggaacaagatccggttggtgctggcagacaatcaaaagcaagacgacaaccagcaattcgtgattgagaaaactgacgatctcgatacgctttttggtaacaaccatggtttacgacgccatgatcagcaatcaacaacttacgagctcaaagatctcgatcaaggggtctggaatatgccaaaggcttatcgttcaatttatcagccacagcggaccactcctgatgagcaggtcttaaaccatgagtga

SEQ ID NO: 10755 - DNA, 1287 bp, Escherichia coli
atgagtgaagttatctcaatttttgaatatgacctgttggggagtggaaaagcggcttcagttggcgcaaagttggtgcctcaacaggtctttgattatttagaaacacttagcctaacaagtgagcaaggaagccagtttctcaaactcacctctcgttcaggtttcaaattgctgcaggtacaaaactacgcggggatgctttctacacctcacggtttgcagcttgagatactgcccaagattggtaaaaacctcacgcttgcgagtgcgcgagaaacattcattacgatgctaagtcacctacctaggtttcgacacattcaaacccagcaggccactcttcaggcgcaacgcatgcctttgctcgagatttttatcagccaatttttgcaaagcgtcagccaattgcttaaacaaggtttacgctccgactatgtgagtgagaaaggtaatctggcttttatgaagggcaaactgatgctctctgcacaactgcgacataacgcggtgaatcgccataagttttgtgtcgattatgatgagtatatgcctgattgtgctgccaatcggctcttacactccacactggataagttacttagtctgaagctgtcatcagagaatcaacgctggctttacgaactgtgctttgcttttgacggtattccacttagtagggatatagagagcgatctgaacagcttacgcattgagcgtggtatgactcattacagcgagccaatagcttgggcgcagttgatcctgagaggaatgagcccaagtgcattgcaaggaaacaccaaagcgatatcacttttgtctcctatggaagcggtatttgaatcctttgtggcacagaccctaccctacgaattaccttctcacctaaaagttttttctcaagcagcaacgtattctttggtaaagcatggactcaaagattgctttaagcttcgcccagacttgctgattcaatctcggcaaccgattcaaaccaaaatggtgatggatacaaaatggaagcaggtgaatagcagccagcaaaaaaaatcactttatgggctagcgcaatccgacttctatcaaatgtttgcctacggccaaaaataccttggcggaacaggcgaaatgtacctgatttaccctgcgcatgatgactttagccaaccgataccgcagcactttgctttttcagagactttaaaattatgggttgtgccataccggataatggcaaaacgtggtgagaggatgatgtgggcaagtgatgtgttagctacatag

SEQ ID NO: 10756 - DNA, 249 bp, Escherichia coli
atgcgcgataaatatcagttcacctatgacgatgaaaaaatgctgtcgctggcaaaagagatgaaaagcgtggttgacaacacatcgaaatatcctgactggagtaaacgcgatgatattaaagcgaaactgaaagttgaacttattctgcttctacacaagcataagttcccgccagtagcgaatgatgatgtttatatggggggactggcgcaagcagagaactttaagaaaaatcacatgagttga

SEQ ID NO: 10757 - DNA, 672 bp, Escherichia coli
gtgaaaaaccatctcgatttgttggggcaagtcttttacgaatttgacagtcggggttattttagtggtgagccacaagcgcaattatcctgcctcaaccgcgcggcggaattcgttctgcgtacccagaaagttgaacgtcgttttatgggactggttaaacgcatgaaagccgcctacgacgtctgctgcggcagcgaagcattatcacagacagaacgtgactatattcactattatcttgctgttcgttcaattgttttcaaactgacgaaaggtgacgcaccggatgtcacccagatgaatacacgcgttcgtgaaatgattgcagaagcgttaaaagctgatggcgtagaagagatttattttcttggcgataaaaaagcggaatccatcgatatttttgacgaagattatctggcgcgaattaacaagatcaaacttccggcaacgaagatccagttattacaaaaattactggaaaaagcgatcagcgacttcaggaaagtgcaccagttacaagggattaacttcacccgccgcttccaggcgattatagatcgttataatgagcggcgagaagatgatgtactcaacggtgaagaattcgatacattcagtcaggaaatgaccgatattatctatgatattaaaacagaaatgggcacctag

SEQ ID NO: 10758 - DNA, 435 bp, Escherichia coli
atgtacggaacatgcgaaacgctctgccgggcgctggcagcaaagtatccgggagacatgccgctgatgctggttatctggtccccggaagagattcaggccctcgctgacggaatggatatttccctgtccgatcatgaaatcagaaccgtcctggcgcgcctggaggacatcccggaagaccagcggactgaatccggtatttcttccggcgtggcgatggagatcatcaataacgtgagcgaaaaccgccaggtgaccgtccctgctgaactgctggcgtccctgattcagaccgctgaacaggcattgtggaaacgtgaatgggccgcccgggatcatggcctcgccgtcccggaatgcgtcacccgccgtcaggcggtgattaatcaggcccgcaccctgctgaaaaacaacagacacgaaaacgactga

SEQ ID NO: 10759 - DNA, 222 bp, Escherichia coli
atgaactatgcaggacacgaaaaactgcgcgccgaagtggcggaggtggccaatgccatgtgcgacctgcgtacaaccatgaatgagatggagcagcggtacagctttaatgccgacaccctgccggaacgtctggtgcgtcagacgttgtttcgcgcaaaccgcctcctgatggaggcatataccgaaattctggaactggatgcgtgctttaaagactga

SEQ ID NO: 10760 - DNA, 168 bp, Escherichia coli
atgtattttcttctccaggcgcatctgtctcacctgaaaccagggctgccccattctgatgccaagggcttttgcctccgggctgcgcgcgatcacacagccatcgttattgctgagtacgatgaccggttcgttgcgaaggtccgggcggaaaactttttcacatga

SEQ ID NO: 10761 - DNA, 1350 bp, Escherichia coli
atgattaataaagataataatttaaatatagatattctacgtcagcagaatgcaaacattcctcttcaagaggcatcctcgcaaagtgaggagcctcatcaactggaaaacagcaaaagcgagggtaatttgcataacagcgccagtaaggataataatattggcgctatgctcaagaaagatgttgaaaaactatcaactttagtcagtgaacgtagcccgcgaaatgaagactggaaatgccagcatgacatacagcttaacttcgttaaaaacatgctcagaaatttcccaactgagaacctgtcagagaaaggatctgcgctcttacacgaaagttattcgctgataaaaaacgttctgcagcttacagaaaatgttaatactattgacggaaaattaaaggatcccgctaaaatattgaccttgcataactctgtgagaaaaaccctggctaacgttgctcacaacacaaccgggtcaagtgcaatggcatcgaccaaaggtaccttaaatcacgctatcgcttctttagagagttctgcgcctgaaatgagaagttcagcaaccagcagtactttaacggccagtagttcaaacgaatttaaaagtgataaatatatatgcagtgatattgctgatttgatgagtgtgctcggtagcgactacctcgaaatctatgcaaatagcgttgagataatgagcgcatactggcaggacttcagtgaacatatccaaagcaatatgggaaaatggactcactctaataaaaaaggcgatgcgatagtttttgacgtcaatgcattccaaaaagccttgatgcatttttattatatcgataaatatcctaatggtgatttccactatcattacaatccagactatgttttataccctccggcacctgctgacaaaattggtgtaccactagaagaagcagaaaaatggtgcgccgctttaggacttccggtaattccacccgatcccaaacaccgcacaccttctccgattgtcgaagttgaaccgcaaggtagcggtctgtatgttattattcccaaccctcagattattgacagtatgagtcagtcttcagactcaatggtgcatagggacgataaagggaaggaaaaaaatatatctaaagaattcaccggttatgaaataagcacagctgaataccaggcatggctggcgggttataacggccaggcagaaaacatgaaaaccgacgtgcaggttatcacgactaaatacagtacagccaactccacctacgatacaattatcaaattattatcttcaaccattactgcgttgtttgattcagcgaaagattatttacgtttctga

SEQ ID NO: 10762 - DNA, 1290 bp, Escherichia coli
atgagtcaggagcctttcttcatcattgccttcggttatgtgaaaaaagcagctgcgatggctaataaggagttaggtacaattcctgctgatgttgcggatgctttaatctgggcttgcgaccaattaattgatggtaagtaccgggaacagtttgtgaccgactggcttcaggggggagccggaacgtcaaccaatatgaactgcaatgaagtgatttgtaatcttgctgcagaaaaacttggtagcgttaaaggggattacaaacgcgtttcgccaaacgaccatgctaattttggtcagtccaccaatgatacatatccgacagcattacatctggcattgctgctgcgaagcaatgtattgcttgaagctgttgaacacctcgtaggagcattctacaaaaaggctgacgagttcagcacagtgctcaagatgggacgtactcacctgcaggatgcagtgccaatgactctcggccaggagttccatggctggggttttacaattaatgatgaaattcgggtcatccgtaatgcacaggaacacctgcgggttgtaaaccttggtgctactgcgattggtacctgtgttaccgctcacccggattatcccgctttagccgtgaaatatctggcccagatcacaggcattaatttcaggaacagtgaagatctcatcgctgccacaagcgactgtggtgcatatgttgcactcagttcggccatgaagagcctctctgtgaagcttaccaaggtttgtaatgacattcgactgcttgcttcaggcccccgttgcggcctggctgaaattaacctgcctcaattgcaaccgggttcttccattatgcctggtaaggttaaccccgttatcccggaagtaacaaaccagtcttgcttcctggttcaggggctggacaccacagtgatgctggcggcatctgctggtcagcttgagcttaacgttatggagccggtcatcacctttgcgctgttcacctcactcaaggtgatgacgaatgcctgtaacacactccgaactaaatgcattgatggcattacagctaattccgatcgaactgcagagatggtaatgcattcctgcggtattgtgactctcctgaagccacatctgggatataaggtgtgttctgaaatggcgcacgaagcataccatacaggcaaatccctccatcagatagtggttgtcgaacgtaagctactcacacaggaagaatgggagaagacattcaatctggataatctgattgctccgaagttcgaacaataa

SEQ ID NO: 10763 - DNA, 1335 bp, Escherichia coli
atggatattatcactgttcttcagatagtggttctgctgggggcaatctttttgggtgtccgtatgggcgggattggtattggttatgccggtggcattggggtattgattctggggctttgtctggatatgaagcctggtaatatcccctgggatgtgattctaattattgcatcggtaatttctgctatttcggccatgcaactggcgggaggactggactatctcgttcaggtcgctgaacgaattcttcgtaaaaatccaaaatatattaattacctggctccggttgtcacttatgtgctgacaatctttgccggtacgggacatactgcattttcaatgatccctgtaattgtcgaagtttccaaagaacaaaacattaagccctcatgtccgctctcaattgcggttgtatcatctcaaattgcaattacagcatcacctgtatcggctgccgttatctatatgtctggcgtactggaaggctttgggtggagttatccagtattgcttgggatatggttgtttaccacattcgttggttgcatgcttaccgcatttataatcagtctgatttctgacatgaaattagacaatgatccggtttaccgggagcgtctttccaaaggactcgtaagcgcgccagtaaagagtgttaacaaacagctcaagccttatgccagacgatctgtcgcaattttccttattggcgtcatcctggtggtcctttacgcttcggccattagcccgacgctgggtctgattgataacgttgttgttagtcgtgatgcggctattatgagtctcatgctactggttggcggattcattacccttttctgtaaagcagatataaacaagattgcggactcctctgtgttcaagtcaggcatggttgcctgtatctgtgtactgggtgtggcatggttgggggacacttttgtatctggtcattcaggagaaattaaggagcttgccagaactactgtatcccagtatccagctcttctggctgtggtatttttcctggctgcgatgcttctgtattcacaggctgcaactgccaaagctatcactccggctattgtgactgcattgggtattactgcagcgaatccggatgacagttacatgctggtagcttcttttgctgctgtgtctgctttatttgtgttaccaacttacccaacccttctgggggcggtgcaaatggatgacacaggaacgacccgtattggtaagtatgtgttcaaccatgctttctttattccgggtgtactggctattgctttctcagtgcttctgggatttcttgtggtgagtatgttctga

SEQ ID NO: 10764 - DNA, 1047 bp, Escherichia coli
atgaatttctataaaagaacggcacttgccgcactggttatgggttttagtggtgcagcactggcattacccaatatcaccattttagcaaccggcgggaccattgccggtggtggtgactccgcaaccaaatctaactacacagcgggtaaagttggcgtagaaaatctggttaatgcggtgccgcaactgaaggacattgcgaacgttaaaggcgagcaggtagtgaatatcggctcccaggacatgaacgataatgtctggctgacactggcgaaaaaaattaacaccgactgcgataaaaccgacggcttcgtcattacccacggtaccgacacgatggaagaaaccgcttacttccttgacctgacggtgaaatgtgacaaaccggtggtgatggtcggtgcaatgcgcccgtccacgtccatgagcgcagacggtcccttcaatctgtataacgcggtagttaccgcagctgataaagcctccgctaatcgtggcgtactggtagtaatgaacgacactgttctggatggccgtgacgtcactaaaaccaacaccaccaacgtagcgaccttcaagtctgttaactacggccctctgggttacattcacaacggtaagattgactaccagcgcaccccggcacgtaagcacaccagtgatacgccgttcgatgtctctaagctgaatgaactgccgaaagtcggcattgtttataactacgctaacgcatccgatcttccggctaaagcactggtagatgcgggctatgatggcatcgttagcgctggtgtgggtaacggtaacctgtataaatccgtgtttgacaccctggcgaccgccgcgaaaaacggcactgcggtagtgcgttcttcccgcgtaccgacgggagcaaccactcaggatgccgaagtggatgatgcgaaatatggcttcgtcgcctctggcacgttgaacccgcaaaaagcacgtgttctgctgcaactggctctgacgcaaaccaaagatccgcagcagatccagcagatattcaatcagtactaa

SEQ ID NO: 10765 - DNA, 726 bp, Escherichia coli
atgaacaatgtattaattgttgatgacgatatattagtagctgatgtgattcgtcgcattgtagaacaaaccccggcatttaaatgctgtggcatagcgttatcacttggtcaggcgaaagaaattatatctgaaaataaaaaactggctgacttgattttgcttgatctttatatcaataaagataacggacttgatttactcccttttcttcatagcattcattgcaaaagtgatgttattgtaatttctgctgctgatgactctgcgacaattaaagattcattacattatggtgtttctgattatctgataaagccatttcatatctcacgtttggttgattcgcttacacgatggaaacataaaaagactcttcttgagagtcagaagatattcaatcaatcagaactggatttattaactcacaaaataattccgaacacagaaaaaataagacatttacccaaaggactgtcaacagatacattgcgaattatttgtaggtggattgatgagcatcaacataaaaaattcacactcaatgaactggccagtggtattaagatatccagaatctcatgcagaaaatatatcatctggctggtaagttgccatatattggcatttgatttttcctgtggtgtcactggtcgccctgcttatcgttactggataagacatcaatattacccatatattaaaaaatatagtgaaaaaccgtaa

SEQ ID NO: 10766 - DNA, 279 bp, Escherichia coli
atgatgctggcgctcaggatggggcgcacattgtcagagttacgccgggaaatgtctgcatcggaaatcatgatgtgggcagaatttgacaggatcagcccgctgggtgacgagcgggctgatatccgggctgcccagatagtttctgcagtttacggggcgcagggtgtcaaagttccactgaatgaagcgattcttcagtgggaggtcgttcctgcaaataatattaaagatccgttcacagcgtttgaaaatgcattatttgcagcgacacaatga

SEQ ID NO: 10767 - DNA, 342 bp, Escherichia coli
atggaagttattcttattgcgctagtcctggggttaattccggctattatcgcgcaaagtaaagggcgttcattttggggatggtggatatacggagccttactctttatcgttgccctggttcattcacttgtaatccaaaaagatgaaaaaacgcatgagcaacaaatggtgagcaatggcatgaaaaaatgcccttactgtgcggagttgatcaaagaagaagccattaagtgtaagcattgcggtagtgatttaacacataaccctgatagtaccgtttcgcaaaaaacggatgatgaatatcttgaagaagcaaggcgtaaggctgggcttctttaa

SEQ ID NO: 10768 - DNA, 321 bp, Escherichia coli
atgaaagatggtatctattttgttgttttcagaagcaatcaacgtgattttggtaatggtaccgtagttgtcaaaaacaatgcagtaaacggcggagattttggttttacgtatcagggaaaaattgacggtagccaacttattctgcgcgtatcgcagcatgatttaaatgtcacctcggttttccctggggtaaagaactttgaattgagtctttctttgcaggaacgaggacgtgattacctgttaaatggatctgtggtcggaatgcctcagatgcaaatttcaattagtgcaaaatacattggtgatctgatttag

SEQ ID NO: 10769 - DNA, 336 bp, Escherichia coli
atgcaaaacagcagatcgcactggagtcacagagaacccaggaagatatcaaagtggctgttgcggatgatgattgtgcttcacgtcctgtgcctgctgccgctgctgaccggttgcggaagtacgcgaacagtttacgtccaggttccggtagttccgttaccagccagcctgacggctgaaacccctcagcctgatttacctgatcattttacgtggggctcgagcttagatctgaatgtcgccttgttgtctgcattggcgcagtgtaataccgataaagctgacatcagaaggattgaagttgagcgtggtcacatcatgcaaaaaaaatga

SEQ ID NO: 10770 - DNA, 615 bp, Escherichia coli
atgaaccaacaattatttcaaaaggcggctggtattagcgccgggctggctgcgcgctggtttccgcacattgatgcggcgatgaaggaattcggcattacagcaccagcggatcaggcaatgtttatcgctcaggtaggccatgagtcgatggggtttagcgccgtagttgaaaatcttaactacacaccatctgcgcttgtggcgacgttcggaaagaggatcacacagcagcaggctgatgcccttggcagaacatccggacatgcagctcgtcaggatgctattgccaatctggtgtatagcaaccgactgggtaacaaagcaccaggtgatggctggaaatatcgtggtagaggattaattcaaatcactggcctccataattatcgcatctgtggcgcggcgctgaagttagatctggtgacttcacctgaacaactggaacaggaactacaggctgcgcgctcagctgcatggttctacacctctaaaggttgcatgatctacggtgccgatattaaccgtgttacgcgcatcattaacggcggtttgaacggtattgaggatcgtaaggtccgatacaacaaggcgcgggcggcgctgctggtatga

SEQ ID NO: 10771 - DNA, 282 bp, Escherichia coli
gtggagctaaatgacccgacagcaactataaatgcgctgttatgtgcttgtgttgttattactctgatgttttatcgtcgtggtgattcgcggcatcgtccttgggtttcacgtttagcctggctgattactgttacatacagtgctgttccgttggcctatctctgtgggatttatccccattcctcatggcccattatcgtggcgaacactatttttctttccgtgctggtggctgtcagaggcaacgttgcacgtctggttgatcatctgaggcactaa

SEQ ID NO: 10772 - DNA, 387 bp, Escherichia coli
atgtccgatccgatttccggtactgggctggctggtggtgccctgacgggtgccagtgtttatggactgctgaccggaactgattacggcgttgtatttggcgcatttgcaggggctgtattctacatagcaacagctgcagatctgagtgcatcgcgccgactggcatattttatcgtgtcatatattgccgggattctttgctctgggttggttggctccaagctggcgaacttgaccggatacagtgataaacctctggatgctattggtgccgtaatcgtctctgctttagccgttaaaatcctgacgttcctgaataatcaggatatcggctcgctggtggcgctcataacgcgccggggaggttcaggtggagctaaatga

SEQ ID NO: 10773 - DNA, 597 bp, Escherichia coli
atgacttggcaaaacgtaccgtacgctttcgaaaaaactactggcgagttgaccttggtaatagaaaaattaccgccaattgaaatcagttcttcctttccttttgaaacactcattactgctcttgcaggcgttattgccgcaggaataactggttgggttgcatacagggcaatcaaagaaaattttgccttagccacattacaggctcacttgaatactaataaagaattggcgcaacaaatacgttttgctggcgctgagcatgtgacagacgtaattatgttggccagcacatttgagcaatggcatctggtcggaaataagaatatggatatattggctaagggtgttttccctgaggagattcaagttccaataaaggccgctgaaataagtaaaaataaattacttctattaataaggcctgatgaggaaggttgtaagttgataaccctgacggcagatcttcaaaaagcgctaaaagtatgttttacaaaagggtattttactccggaagaaaaaaagtcatttattgatgcacaaaacgcctttatttttgggtgtcatgagtatatcaatcaaagtttatcttaa

SEQ ID NO: 10774 - DNA, 579 bp, Escherichia coli
atgattaatccttctgaagttggcaaatcaggtgaaatggttcgccttcgtactctggaaagtatctggatacaaggcaagttgcgcatgtggggccgctggtcttatatcggcggtggtagtggtggaaacatgtttaaccagcttctggcatccgggaaaatcaccaagacagctatcaatgaagcgctacgccggatgaagatagcgggtatcaccaagcctgaacttgaagcgtacctgcgtgaaattctcaacagcaaaaataaaagcggcctggcgttctgttcagatgaagaagggttgttagtggacggtgtcattgcttcagtactgatgaatgatgactaccgatcgctctatagcgtgattgttgaccggtatcgtcttcgtaagagcaagttgcagatggccaatgaactgcaggctaaacatcctgactggccgctgatcacctgtcgtcgacgcattgacacttggctaagtcttgcagaatcgatcctgtacgctccagtttgtgacgcattcggcacaaatagcgacagatttaagttgcagagtgagcaagaaagtgcttaa

SEQ ID NO: 10775 - DNA, 291 bp, Escherichia coli
atgttacgcccgaaacgtcgccgctgggttaatgaaaagtacacgcgctgggttaagacacagccgtgtgcatgttgtggaaagcctgctgatgatccccaccacctgataggccacggtcagggtggaatgggtacaaaagcgcatgacctctttgtgttgcctttgtgcagaaagcatcacgacgagctgcatgcggataccgtggcatttgaagagaagtatggctcccagctggagctgatatttcgttttatcgatcgtgcgctggcaataggcgtactggcgtaa

SEQ ID NO: 10776 - DNA, 414 bp, Escherichia coli
atgatttcacgctggaaatggatgctgaagcagacaattaaaaaactatggttcagggcaacgttattcgcaattgtcgcgataataacggcccttttatcaattctttttaaatcaatgatacctgagtcggtttccgtgaaggttggtgcggaagcagtcgataacattctgaacatactggcatcgagtatgctggcagtgaccacattttcgctgagtatcatggtcacagcctacggttcagccactactaatgtgactcccagagctacgcgtttagttgttgaagacgtcaccacacaaaatgtactggccaccttcatcggttcttttctcttgaagtggtcaacaaaaactggccaccgcgttagagtttttccagtatcgattttccgattcgtttgggggtaa

SEQ ID NO: 10777 - DNA, 516 bp, Escherichia coli
atgagctcgctaagcttacagagatacgaaacaaacccgtttttagagcttatgacgatcccgatgaaagggaaacggatacaagtatctcgtcttgggcgggatgacaatgttttggttaatcaaaacacgggagaaaagtttggaacacatgtaaccacttttaagcgtgtagatagtgagcaatttgttaagttgtttactgcgaatattgggttaacgtttgatttatcatcggcaggaattaaagcttttaatgttcttttatgggctgttcaaaaacaagcctttgcaaaggatcaggttcttttggattcaagggctcttgatgactttttaaaaagctatgatagcttaaaacttagttatgctacgttaaagagaggaattaacgagttagaaaaagctcagattatagcaaagacaatgcgtaaaggattttattttataaaccccaattttgtatttaatggagatcgaatagcatttacaaccctaattgagagggattgttaa

SEQ ID NO: 10778 - DNA, 291 bp, Escherichia coli
atgactaaacatgatgctatacgcatttctcaacttcatcaaattttttacgatgatgatggattaattgattcagaaaagaacgtgactattttatacagtataggatttacagttgatgaaatagctcattttagaaaatcaacaccaaacacagttgcggctcagctattaaatgcaagagttaaattaggttgcgcctcggtttcatctttaaagccaatgatcttattaagattgcttttgaacataaaagagattcgttttggattcgaaactgattgcaaataa

SEQ ID NO: 10779 - DNA, 264 bp, Escherichia coli
atgaaaaaaatttgtacgctcttaatgtctattttcattctttccgcatgtggtgaagatacaaaatcatcagattggtggcttaatcatcccaaagaagcgacggagaaatataaggagtgtaaaaagtcaggggaagattctgttaattgtcaaaatgttaaaaaagttgccggaattattggtagaacctatggccctatgcttgaaatacttaaggctgagtcagctgaatatgataagcaacatggattgaacaggtga

SEQ ID NO: 10780 - DNA, 999 bp, Escherichia coli
atgtctggtttctttgaaaagtttaatagcgaagttgttagtaaaatcgaagagatgaccaaaccacttcaaagtcaattaggtcaggatatgttatctcttctaagtgcaggtattagcgtttatatcctctgggttggctatcaaatattggcagggaaacgccagaccccattacaagatctcgtctgggatctatcaaaatttgccattattttaacattcgtaagcaatgctgatggctatctgacggcagcaatggatgctattaaatctatgaaggatgggttccttggtaaacctgtatgggcaacgctagataccatgtggagtacaactcagcttttggctgacaaagtttatgctatggatcaatccaaatatgtgtcagttgaaggtggaatcgggtcaatgttggtttggggaggaagtatcctgattatgtctgtagcggctgttatttacatgcttgccgatgtaacaatgcagttagctattcttgtagctccgatatttatcggttgttatatgtttggattcactagagtaatgtttaataactggcttggtatattattttctagtgtatttactgttatttttgctggagttctcgtcaaaattggtaccgagtttcaaactgatatgcttagtcagatatcgagagatgctaactcaacaaatattttaacaatgggcgcaatggcatttgtaattggagttctgattgctgtctttgtctggaaatcatcgagtttcgcgcagcagcttgccggtgcaggtgttgaaggtactcttcagggaatggctcttttagggattggggctgctggaatggccgtagagaaaacgagaaaccagatgaaacgtggaacgcgaacagccgccgaatgggcaggtgaaaaaggggagcagaaacgggcttcaataggcgcattgggaatggaagcaagaagacgagcatccctggaaaaagcacgtgcgaggaattcagcatga

SEQ ID NO: 10781 - DNA, 714 bp, Escherichia coli
atgaacaaaaaactaattttttcagtacttttgtgcttattttcatttggttctgtcgcaggtattccggttgctattgatgccagtccggaatgggctgttgaagccacaagatggacagaacgactcaaacaatggtctgaaacagcgcggcattatcaaagtcagattcaggcatataaagaccagttagccacggcaacaggtataaggaatattgcggcattcacaaatgaactaagtaacctacaatcagagctggcaaacatttataagcaggggaacagttatatttctgattttaccagtaatcctgaaggtgcattaagtagtcaggcgaaaaatctgttcagcaagtatggtgcttttaatatgtgttctacaggcattgaaagttctgataacctttgtaaggccagaatagtttcaacggccgctagcattgaacagggaaatgagataaataagcagctatcaagtgcaatgtctcagattcagagtttaagtaaccgaattgagtcttcaaaggatatgaaagaatcccaggatttggctaacgcattgcaggcgcagtcgttaaaaatacaggcaattaaaatgcagtatgatgtatgggatagtaaaaacagggctgatgcggaaatgttgaaagagcaaaagtatgctgagtatcgcctgcgtcagaaaaatgcaaagataccgagtttcgaatga

SEQ ID NO: 10782 - DNA, 357 bp, Escherichia coli
atgctgagtatcgcctgcgtcagaaaaatgcaaagataccgagtttcgaatgatatgataaagctaaataagctaaaagaatgggtagataatcattggtctagattgaatagtaccggttctacaccgccgccactgttaatctcgctaccaatcatagttattgttttaagtgtggagcttacgttaaagctggttaatgctttaatgtattatggtacattgcaatttatcactgataaaattgaaaagaggtttgttcccagcggtggtataaaagaaagactcctttttacgttaaagctgttttgtattttacttctgttattaatagtaatgcgattttcaatgaagtaa

SEQ ID NO: 10783 - DNA, 744 bp, Escherichia coli
atggccgccctgccagtgaccatcgactatcccgcagcactggccttgcggcagatggcgctcgttcaggacgaactaccgaaatacctgctggcgccggaagtgagcgccctgctccactatgtgcccgatctgcaccgtaagatgctgctggccaccctctggaatacgggcgcccgcattaacgaggcgctggcgcttactcgaggggatttttcgctggcaccgccatatccgttcgtacagctggccacgctgaagcaacgtgccgagaaggctgccagaacagcaggacgtctgcccgccggcagtcaggcccatcgtctggttccgctatcagacagccagtacgtgaaccagttggaaatgatggtggccacgctgaagattccgctcgagcgacgtaataagcgtaccggcagaaccgaaaaggcgcgtatctgggaggtcactgaccggacggtacggacctggctgaatgaagcagtggagaatgcggccgctgacggggtgtcattctctgtgccggttaccccacatactttccgccattcctacgcgatgcatatgctgtatgctggtattccgctgaaggtgctgcagagcctgatggggcacaagtcgattagttcgacagaggtgtacacgaaggtgtttgcgctcgatgtggcagcaaggcacagggtgcagttttcgatgcctgagtccgatgctgtcacaatgctgaaaaacagacacgcataa

SEQ ID NO: 10784 - DNA, 150 bp, Escherichia coli
atgatcggtatctcagtatcattagttgttcaggtaagtctgatggatttttcgcgccgtttctggctgtcagaagctgtccagaatttgattccattcggctttacagtccagcaggtaccggaggccattgtcgaccccgtcaagtaa

SEQ ID NO: 10785 - DNA, 897 bp, Escherichia coli
gtgactggcgatgatcagtacagtaaaggtccgtatgttaccgcgtcgttcagggtaagaagtgatctcaatgttcgcgcacgtatccgttttgaacggtataactcggaaggatacactttcctttgtgacgcctatttgtcattacagactcatgaactacaaattacgggtggtaatgcccagctattaacagcaaactttgaaatcgaccctggtagtggatggatatattttcaggcaacactgaaatgtctgccagaatggggaatggttggtacgcagctgcaaattgcagccgacagagcagtgggggcttttgcaacaggtgactggatagaagtaaccaccccgcaattcgagtatggtgcttgtgcaacttcctttatcataacgacaacagagccagcgactcgtgcatcagatttatgtaaatttccgctgatgaaaaatatgtataccatgccttttacgttcatggtggaagtccataaaaactggtttatttctcataatgctgcaccgcgtgtcattgattcagaaaatcaccagtccggaggcccatttattatggggtttggttcttctggaactatcagtcaggatggttattcgtattgcgatataggcggggctaaccggcgtgtatatgagtcatgcggagtaagagatctcgttatgggattcagggttaaggctgacggcatgacatgctcatttgcaaataagcatataagcactgaaaccaaaacagtatggaaatatattcgtgaagcagccgtgattcgaatcggggggcaaacgacgacaggattacgacaccttaatggtcatataaaaaacctccgtttctggaacagagcattgtcagatacgcagcttaaggaatacgtataa

SEQ ID NO: 10786 - DNA, 1041 bp, Escherichia coli
atggttacaaaaacagtaattcctgatgacatcaaaacgctaaaatcggatgttagtaaattaaaaaccgatcaaggaaactacgcaacaaaatcttatgtagacaataaaacaacatggaatggttattgcaatgtaatctatgatcaaaaaacattgccaacaactggaactatattcagcggtaagctgcatttgtcaaataagactggtgaaacggaaaacgcttatagtgacatatataccagaaaaaatattgatggtactaaagatacaatgacgaggatcgtcacacataacgggacaaaaggtatcttttgggactttagtgatctttacggaggaactttaatttttccaggcagtgatggttaccttaagatggggaactgtctcatgtcgtatggtgtgcggggaagtaacgcgcttattaagtttgataatacagactcattgcagatcaaatatgctaatcacgggtcgaccatgacactaaacacgcaaggtacggcgtattctggtgtgtcgacgttattatggggaaattccagtcgtccagttgtttatgaaattagggatgatggcgggctttttttgttttatgcacaaaggaacccagataaaacctatcagcttgagataaacgggtcatgcaaggctacatcattcgaccaggtgtcggacagagatcttaaagaaaacattcaggttattgataatgccactgagcgcatcagattaatgaatgggtatacttaccgtctcaagtctaatggtatgccttatgctggcgttattgcgcaagaggcacttaatgcaatccctgaatcagttggtagcacaataaagtacaagagcggggacaatgggtctgatggagaagagggagaaagatactataccgttgattactcaggcgtaacgggtttgcttgttcaggtagccagagagtcagacgacaggataacagcactggaagaagaaaacgcagaattaagacaaagattatctgcaattgaggcggcgcttgcgtctaaataa

SEQ ID NO: 10787 - DNA, 603 bp, Escherichia coli
atgaaacaacagtatcagacccgctacgaatggctccacgaaagctaccagaaatggctgaccggcttcacccggcacgccgtatcctggggcgtgtgtcatccgaatatctactacttccataatctgacgcccggttgggtgtcattcaatggtgaaaaaccggagattgccatcgtaccccagagcctgcaccggctgatttatggccctgacaaacgggccacaccgcccctggatgatgatctgatagtgaatttatgcaccagtgaacatctgctggttcatcatccgatgctggaagggatcctcctgtctgaatgtgaacgtctgaggcagcgttctctggcaaataaactgatcagcctcttccgtcagtttggtggcacggagttgcgcctcaaactggtctggctttgctggcttgatttaatgaccggaaactgccttgacgactggacggagaatctgaaacggaaatcagaaaaagagctggaggaatggatcatcaaccgtcagaagcagagcgcagcactgacggatctgatggatcagtacgtgctcctgtcataccgcacaacggttgacgataagcgcacctga

SEQ ID NO: 10788 - DNA, 1485 bp, Escherichia coli
atgtcattcggtcagccttgtgatgagtttcccctgagttcgctgcctccactcattcgtgatgccgttattgaagctcagcaaattacgcaggctccccttgggcttgtggcagcgtctgccctgggcgctgtttcacttgtctgccagaatctgattgatgtctgcagactgaatacactgcgggggccggtctctctttttttcctgacgcttgccgagtccggagaacgaaaaaccgcagtggacaaattattaatgaagcccctgtaccagcaggagatgcagttatattccagatacaaaagtgaactggctgtctggaaaaacaaggaagagcttttaaaggctcagaaaaaagcattgttgtcaaaactgaataaagaactccgcaaaggcgcggatgagtcagaaaccctcagacaactggaagtacttcagaaaaacagtgcggaagaacctgtgaggtataaattcatttttaatgatgccacgactgcggcaattaagaatcagctttgtggtaaatggcgttcagttggtattatgtcagatgaagccggtattatatttgatggatataccctgtctgagttgccttttattaacaaaatgtgggatggctctgtattgtctgtggacagaaagaatgaacccgaacagatgattgaaaatgccagaatgacgttatccctcatggtgcaacccggtctttttgaccgatatatggagcgaaaaggttctgttgccagggacagtggttttcttgcccgttgtcttatcagtaaacctgcaaccacgcaggggaaacgctttattaacggagctgtgattccgggaggatcattaacggcatttcatgaacgattaatggaactggccagaggcagtattgaaaaatccagtgaggatgaacggtattgtctgcatttttcgcctgaagcgcaaaaaatatttattgagcactataatgttctggagcaggatttatccccttccggacccttaagcccgtttcggggacatgtttcaaaaaaaacagaaaacattgcaagaattgcagcgttatttcagtatttcagctatggtgaagggaaaatctctgccgatatcatgacgtctgctgtcgtaataagttcgtggtacacagatgaatataaaaaattatttgcgttacctgatgaatctgaactgcagcagaaggacgccgaggagctgttcgactggctcattgaggagtgccgcggagaatgcccgccccgtgtcaggaaaaattatattctccagtgtggcccgggccggttcagaaacaggaaaaaactgaacgcattgctgaacattcttgaatctcagttcaggctttctgtcgtgccggaaggaaaaaccatgtatgttctgcttccccagatagccagtttaaagttgtctgatgtctctggtatttttacctcgggttatcactacaataagctgagagcgaagtaa

SEQ ID NO: 10789 - DNA, 204 bp, Escherichia coli
atgaaaattctctgggtcatcagtcttttgtgtagtgctattggatttattgaaggaatcctcggggttttcggtgctcagagtgctccacaacaggctgcaggtgcagcaatgggagtagcatgggcagttattccatattgtatttgtcgtgctatccaacaattgcgccctcgagaagtcattattaaaaaggaagaatga

SEQ ID NO: 10790 - DNA, 204 bp, Escherichia coli
atgcaaaatagtaaacacacgaccaagaaggtcgtggcaattgcaaataatattgagattggctcagtattagtgtctgctactcagaaaagtattctgctgaatactggttgggaattaccaattagagaagtagacaagctgtctcattcctatgaggtttacattaaacctcgtcataaaaccctccatccttcgcgatga

SEQ ID NO: 10791 - DNA, 753 bp, Escherichia coli
atgaaccttgaagccttaccaaaatattactccccaaaatctcccaaattgagcgatgaggcaccggcgacaggctcgggtggtttaacgattacggatgtgatggctgcgcaggggatggtgcagtcgaaagcaccgcttgggtttgccttattcctggcaaaagttggtgttcaggatcctcagtttgcgattgaaggtctgctcaattacgcgatggcactggataacccgacattgaacaaattgagtgaagaaacccggttacagatcatcacttaccttgtgaattttgcctttgctgattattccaggtctgcggcaagtaaggctcgctgtgagcattgtgctggtactggatttcataatgtattgcgcgaagtggtgaaacactccagaagcggtgagtctgttatcaaggaagagtgggtgaaggaattatgtcagcattgccatggtaagggagaagtcagcacggcttgcagagggtgtaagggtaaaggcattgtcctggatgaaaaaagaacccggcttcatggcgcgcctgtttataagatttgtgggcgttgcaatggaaatcggtttagtcgtttaccgaccacactggcacgacgtcatgtccagaagctggtaccagacctgacggattatcagtggtacaaaggatatgcagacgtcattgataaactggtaacaaagtgctggcaggaagaagcattcgcagagttacagttgcaaaaagtgacacgatag

SEQ ID NO: 10792 - DNA, 3270 bp, Escherichia coli
atgacatattacttcgtaagtcctttttcacataaaaacaatggaatttcgaactatgtggcgagtgcatatcatctactattagaaaatggcattgatgcacagattattaggaatgacgaaagattatcccctaaacaattagaagataagataaacagtatagccacagaaaatgatattgtcgaatttccagatgcgtgggggctttatcataatgaaacacatacaaaattcaaacgacatgtacgactgcatgccccttctaagttattacaagaattaaataaagtaaccattaacttgaatcgttatcagcgagagttagactctgcaataaaggctgattatatttcatcaccaagtctaaaaaactaccaagcatacggtttttctttacccaatgtagctatttttcccaaccctataccttttatgtatcaagaagttacttgcaaagatattgatgttatttttgtaggacggcttgatttagtaaaaggaagcgattatctttcaaaattaatatctcactttccaaataatataaacattaagattattggcattaacattaccgaaaaagattatgttaatcttatcaattctaaatgtaatgttgaatttttagggtgggttgataatgaaacaaaattagaactattgaaaaaatcaaaagtatgtataatccctagtcgatttgaaagttttagtttagtagcggctgaagcgattagttgttcatgtcatgttgtggcttgggacgtagggggggtttcagaatgttacccagcagagcttttaacgttaatacactatcaagatttaataacttttagtgcagctgtaattgacaagctatcacagttaccgcctaaccgaaaaatcgttgaagaatttatacttgaaaacaataggaaatatatctcaaatataattaatataattaatggcaataattccctatgtataagcaagaatataaagaacaatctttatactgcatcagatacctcaataaagttagcatacaaaaatgccgcatctaattatctagataataaactagatgtatttggtctgtctatgatgaatgaacactcacaagagatgtggggcgggcttttaagctcagtaataaataactatcatttcgtttccagaaaagagttaaattacaataccaaattctcgagaaaattcccaatatctcccaaaaactatacattttatgattggcgatttaatttgaggaaactttctgaagactttctagcatctaatccgaatatgctatttatatttaatggcaacactaaattttttaataatgctttagatgaactttattcgcttcgctctatacccactgtttattctgaattaggatggttaccacaaaatggaaatatatattttgattatatgggcgcaaactataaaagtagtatccgatttaaatcactagaagaactaacgcataattatacaattgacaataatgaaacgattctaacttcttatagtaaaaaagtgattcttgcactgcaactacccggagatactactttagataaagaatcatatccacttcaactcagtcatcaggaactaatttatcatatacgcacctcacttcctaaagatattcatattgtaataagaaagcatcctcgggataaaaacaactattcaattgaaaaattagataatataagctttgataacgaagaaaaattatcaaatagtttaagtgattcgttagcattaatcgccgttaactcaactgttataatagaagcaatgcaatacccagttaatatatattcattaggttatggcatttttcaaaataaaggaatagttgttgaatgccatgacggaaatataaaagaacgctggttatctaacatacatatccccaaaaaacgaagagatattttcttagaatatttaaaaatacgccaactcccagtatctgatatatatgacaaggggcattgggatggttttgaaatatctctataccctttaattgaagctattatgaatccaccaacacaacgaaaaaagcaacttccttctcaagaacaacaaccaccaatgaattatataaaaacaactccaccccatatacctaataaaaaaatattaaaattgattaaatccccaaaaaaattcgctcaagacatgctcttgaaaaaaaataaaaaaaatgaaataatattaaggttaaataaaaactttaataattggcttttttctgacaccattcgcccgctcatagcaaagcgaaaatttggaagcgaattagataatgcttataagcgagtaaaaccaatagaaaaatacacgccaactctttcctatctatattacagaacaaaatggatttattttggcataaacaaagagatggtaaaatttgctaagtcacccatcacagcgaatcttacgatagatcaacaatttgatttatcatcaatacttgccgaaagtggaaattatcaagatgctataattctcgctaaaaagtgtatagcaaaatcaccttccattttcagaaagaaacaatatcttcgattggccaatatcattagtaatgacgaaaattatatttcatctttagacttcgatgaaggtgaatatatcagagaactggctcggtgttataattttgtggaaaatagcaaagatatcatagtttctttattaaagaaaaacaaagataatattaaaatcataggtaattcaccaaaccaaagagggattaaaaagggaaaagagataaataagtgcaatatcgtaattagatttaatagctacgatacgagccttaaccgaagagctgatataggagtaaaaactgacatttgggtaaaatcaccttcatttgaagaagtctctagaaagtctttagctggcttaaaagctgttataataacgggtactaatcatatagaccgttctccttcagcatttgactttttctacgatttttataagtcaaatattcctactacctgtattccatttgatatttaccagtcgttatgtaaaaaaatatcatcaccgccaagcggaggagttcaagttttatcttggataaaagaaattaacggaaaattagcaaatgatgacgtgctcggttttagcctcaataaaaatgatgcacttaaaggacctaatggggaaaaaaaccaaaaaataaaatattctcataattgggataaagaaattttaattattaaaaatgattgtttgagataa

SEQ ID NO: 10793 - DNA, 1215 bp, Escherichia coli
atgaaatttgaacgccctcatgaaatattgaaacgactcagtaaattcggttctgtaaaagtatccgatctgtccaatagcctcaatgtaacgaaagaaactattcgatcagatcttaatgaacttgccagacttggctatctgactcgatgtcatggcggtgcttttatcgtcctagactcgcttgatactattgcgaaaaatgaaatcgcttatgcgcttgaaaattatgatacagcccagggaataaaaaaaggccactcaactatgaaaagtcaagtatgcgttattggttcgtttaatgttgatatcatcagttatttgccgaggcttcccactatcggagaatcgcttctggcaagtaattttatattttcaccggggggaaaaggttgtaaccaagcgctggcagcaagctttgccgatactgatgtttatttcataacaaaagtaggtacagatcactttagtgattatgcgatcaactttatgaattcgtctaagatttataaaagtataatttatcaaacgaaagaaacgcaaaccggaactgccacgatccttgttaatgaaggtactggcgataatgttattgcgatctatcccggtgccaacatgacaatgtcgtccgatgaaataactattcagaaagaagcgattattaattctgatgtcatacttctgcagctcgaaacaaattataccgctctgcaacaagcgatcacattggcgcaaaaaaacagtatcccggtcattattaacccggcaccctataatgatatcgtcaacgaacttattcaggatgttgattatatcacccccaatgaaacagaagctggtttactgtccggcatagacgtacacgatcttgaatcagctaaacgagctgcagaagctatccacaataaaggggtaaaaaacacggttatcacgctcggtagcaagggctcactcgcatttgatggcaaaaaattcattcattcgccagcgtttccagcggtcgttaaaaatacggcaggagccggggatgcttttaacggcgctctggcatcaggacttgcgaaaggaaaatcactggaatcagcactgtgttatgccagtgcctttgcatccctggcggtggagacaagcaatgcttccgacatgcctgaacatgaatctgtgatacatcgaattcagagtatacattatcagcaaactatttttacgcattaa

SEQ ID NO: 10794 - DNA, 792 bp, Escherichia coli
atgacaacacgtataactttcaatatgaccagtgatgagacgctgcgaattgtggatgagtactgtcatacccacaaactttcgcgctctaaggtaatcgacgcattactcagcgccacagcacctgtccttaacgatattaactgttattatcaacttgcaggcaaactgcagtcacgcttattaaatggagtgtatcaacgggatcttcctcacaaacgcaatgtcgtcagtgcagagaagtattgtctggaaatctgggaaaacaaacttttcaccaaaagaatcctggagtttgacagttcaaatggtgttctatacgcgctgaaacataaaagacactatcgccgggataagatgattggacgggttgaaagccggcgtatcaaagacatttgcgaataccagatgcaactgtccggggagaaggcaaaatatgcctgttttatttatattgaaagaacaatatacaatcacgataatccatccggtgggacacctgtaaaagcggctgttggtaatgcagtcatcctgctggcaaaagacgtgatatatgacgagtacttttttgatctgcggcagtcatttttcgtgagcgttaaagatctgatggcctctggcgcaaaaggtattccggagacacagaaatatccggacgtttattgctggatcccgcttttctccataaattccggcgtggtcattaccccgatctataaaattgatccccggaaacccttaacggtaaaaaaaccggatcagatcactgttgtttgtaattacagagaataa

SEQ ID NO: 10795 - DNA, 213 bp, Escherichia coli
atggaagttaagaccaaagaagactggctgtatcagttccgtcgttgttcatcccgggagacactggaaaaagtgatttcccacacgcgttataagcttactccagcggagctggaagctttcaactctgcggtcgatcaccggctggcagaactgaccatgaacaaactttacgatcgtgttcccgcttcagtctggaaatatgttacctga

SEQ ID NO: 10796 - DNA, 600 bp, Escherichia coli
atgaagacttacaacgccaatcccggttacgaaatggatccccagctcctgacacactttaaccagcatctggattcattattcggggtatattcgaaactgttaccgttcagaacggattttgcttaccgaaaaaacacattcagctacggatgcgcctgcaggtatgccatgtgcgcggagatgctgcaactgattaacgaggtaggagataaactggtcgggtatgcctgggtgatggaatatacggaacgtaaagggcttcacattcattttgtgggttatctgaacggtcagatccacaggagttcgtatctggtatccagattgatgggagatatctggaggcgggttaccgatggtaatggttactaccactggtgccggtttaataaaaattatccggtaaacattaatcacgtcattcactattcagaccacaaagcggtgaatgctttacgctatgccattagctaccttgccaaacgagaacagaaagaatgtggcatcgttcttggttgcagcaggcttcctgaaaaaagtcaccgggggcggccgcgactggacagcaccctgccggggatatgttctcaggtataa

SEQ ID NO: 10797 - DNA, 276 bp, Escherichia coli
atgaaagtccagattttaaacaatagtggtgaagtcgtttggtcatacgacatagccgctcctgtagatcagagcggcgatagctggaccaatgggaaacatcagattatggctggagttgtgttctctttacgccgtgctttggaacaggctgaagtatttccatcagaccctgaatggaaatggcctttttctatttgtccaaattcggagagcacatttcagaaaattggtcagaaagtcgcactcgaagagcatcagccaactgtttcctga

SEQ ID NO: 10798 - DNA, 204 bp, Escherichia coli
atgaaccgttatttcacatgctcgttttgtggcgcaaacgagctgcaggcaaaaaaaatcatcgccaaaggcggaaaagatgaagttgctatctgctctgagtgcgtagtcttgtgtgtcggggcattaatcaatatcagcacaactattcagttcacaccaaatgagaatgcgcctttagatgcgcggaaatctggaggttaa

SEQ ID NO: 10799 - DNA, 891 bp, Escherichia coli
atggaagacgcgctttacgcttttaattacacacagaaccgggacaagttatttgctaacttgattagcatcattgatggaatcattgcagatggagttgtccgtgaagaggaggttctttacttagatacatggttacttgaagcaaagcagattatcaataatggagttataaaaagtctatcagcacgggtgtcggatattcttgcggatggaataatcacatcagaagaacgtgatgaccttaaaaatagccttctccaaatacagagggaaattcttgatatccctgaaattgatttttactccaaggatgtagatgtccatttacttaatggactatgtaaaggattaattgctgatcggaacttaactcaagaagaaataagatatcttaattggtggcttgagcaaaatggagctttgaagaacaactacccaggaaaaaaactttatgcacttgtaaaggaaattcttaaagatggtgttattactgaagatgagagtttaactctacataaggcattagtagacttcacaggatgtgacttggaaagtggggtggtggatggtttggcgaccaggctgcctattgatgtaggggcttcgatagagttagagggtaaaacctattgtcttacaggcacttttgttgcaggaaagagagctgtagttgaaaatttgattaaaaatgctggtgggaacatcagtagtggaattactcaaaagttggattttttagtaattgggacgctttcctcccgtgattggaaattctcaagtcacggaaggaagatcgaaaaggctatatcttatagggatgataatggtgcaaaacttaaaattatttctgaagaaatgcttttcgatgcattaccaagttcgcgatga

SEQ ID NO: 10800 - DNA, 687 bp, Escherichia coli
gtgaaaacactggcagaacgattaaagataggtagagagaaagctggcatgagccaagctcaactagctgaaaaaattggactttcacaacaatctgtagccaaaatagagaatggcgaaactctacaaccgcgcaaaattaaagaaattgcaaaagttttaggtgtatcacaaaagtggttacaacttggtattgaagacaacgcatccatacctgatcttgttgtaaaagaagcagaaagcaccgcattagaccccgatattttcgtaaacattcctgttttagatgtcgagttatcggcaggtaacggatgtctggctgaaatagttgaatcagctattgactggtttccgttaagaagagcagatttgagaaaatctggcgtatgtgcatctaatgccaagatcgtaaaaatatgggggaacagtttattaccggttctcaataatggagatcttgttgccgttgatatttctcaaaccgttcctattcgtgatggcgatctttatgccgtacgagatggtgtattgctaagggttaaaatacttatcaacttacctgacggtggcttgattcttagaagcttcaacaaagatgagtacccagatgaaatactcacctttgaagatagacgagccagaattcatgttataggtagggtattctggtcatcgcgaacttggtaa

SEQ ID NO: 10801 - DNA, 249 bp, Escherichia coli
atgacacctgagcaattagccttatcggaggcaatcgctctggctggtggtcaatcagaattggctcggaagctcacagccagcagcggtcatttagtaaagcaacaacatgtctggaactggttgaacagagaaaagcgtccccctgcaaagctctcgatattcattgaaaagaccactggcatatcaaaagaaaaattacgtccagatatttttcaaaagattaaagattcatcagatgaaaagtaa

SEQ ID NO: 10802 - DNA, 351 bp, Escherichia coli
atgtttactgcattcaatgagagaaatgatttcagttatgcttttgaaaaaattcgcaatgcgatttccgcgccaggagaaaataatgtttatgctgccacagaattaggtcttggcattctgctccgtaaatacgagcagtttcgccgggagctggatgtggccggtgagctgggaaactgggaatacgatctcgatacctacaatcactgtattgcggtgctgcaacgttacttcactggcaatccatccggactgacagaacgtgacgcccggatttacagtcagtacctgcagactgagcacaaagggtttgtgaagctggctgaagaactggcggctgaccgctga

SEQ ID NO: 10803 - DNA, 969 bp, Escherichia coli; identical to SEQ ID NO: 8348

SEQ ID NO: 10804 - DNA, 1317 bp, Escherichia coli
atggacgctctattttttatacaactatttattgttctggcctgtattggaatcggcggaaaatacggcggaatggggcttggtgctggaggtgggttaggggttgcaatattggttttgggctttggactgaaaccctcctctccctccattactgctatgttaattattatttgtgttattagtgctgtcagtatattacaagctgttggaggattagattatttagtcagggtcgcagaacggatactccgtaagaaaccacaggcgataacctttgtagcgccaatattaacttcagtatttacactattttgtgggacgacttatgtcgctttctccttataccctgttattgctgaagtcgccgctgaagcaaaagtacgtccagaacgtgcattatctgcaacggtcattgcagccagtgtggcagtggctgccagccctatgagtgcagcaactgccgggatgctggctatacttcatgagtatgcagggatcacgttagggcaaatattatctattgcccttccttcgttttttatggctgcaattgttaccagcttttcagtctacaagcgtggtaaagaactggaagatgatcctgaatttcaaaggcgtgttgcagcaggtgagtatgagttcatgcacaccgaacagaaaaaagaatatgtcgctgcaccaggtgcaagaaaaggggttgctatttttgccataggagtcgtgctggtccttattctcggatcttttactgagcttcttccgtcgtgggatggaaaaagattatcaaccccaatggtcatccagatgattatgttgactgcagctttattgatcatgattgtggggaaagttccaagcaataaatttaacagtggctctgtgttccgtgctggtttgatgggggttgtggcaatacttggtgtttcgtggatgactgcaacattttttgatgcttatcaggcagagctgatcaatgtttttggcaatcttgtaaatgatgcgcctttgctgtttggctttatcgtattcttgttttctctggtgatcatgagcccggctgcgacagtagctgcgattatgccattaggagtcaccctgggtattcctgcaccttatcttattgcaatttttgcctgtacttgtggtgattttattatacccggagcgaatcagattggttgtgtggcgtttgacagaactggtactaccagaattgggcgctttgttatcaaccatagctatatacgtcctgggttcgtcatggtcatttcccaggttgtttttgcctacttaattgcgcaggttattctgtaa

SEQ ID NO: 10805 - DNA, 1317 bp, Escherichia coli
atgatgttattcgtaattcagtttgcaatagtacttacatgcattgggataggtgggcgctttggtggaatcggcttaggggcggcggggggattagggctcgcaattctgacttttggttttggagtcccgcctgattccccgcctatcactgtcatttccattattcttgctgttatcacatgtattgctatcctgcaggcagcgggaggtcttgatcttttcgtgacaatagctgaaaaaatactgcaaaagaggcctggtgcaatcacgtttcttgggccagcagttgcttatctttttacggcaatatgtggaactggttatgtcgctttttccatttatcctgttattgctgaaatcgcagctgatgcaagagtgaggccagaacgcgccatgtcaatgtcagtcattgccgccaactttggtcttatagcgagcccagtaagtgcggtcgttacaggaacgattgcggtcttttccggattacatgtttctgctttagatattttattgattactgtaccgggaactattttggggtgtcttgttggttgtttgtttgtttataaacggggccatgatcttgaaacggacccagagtttcaacgcagagttgcagaaggtgaatttgagtcagtaaaaactggggaacgtacaatcagtattatatctaaaacagcgaagaaagccctgatgatttttatttctgggatcattttggttgttgttttaggctctgttccagaattacgtccggtatggaataccagtgccggtgtagaacggatgagtattccaacagcattgcaaatcatcatgttgactacagcatgtatcattatgatggtatgtcggatttctccatcgaaacttgactcaggatccgtttttaaggccggtctggttggagttgttgccatatttggtctttcatggatgatgagttctttctttgaagcatggcaagatttatttaataacactttcaatgattttcataacccagttatattcggtgtgattgtgtttgttctttctgctgtgatttacagtcccgcagcaactgctgtggcattatttcctgctggcgtattaatgggatattcgactgagacgctcatagctttgcttccggtaacgtgcggatcattcattattcctggtggtgcacaaattgcttgcgtggcgtttgacagaacaggaacaaccagagttggcaagtatgtagtaaatcacagttatatgttacccggtctgattaccgttctggcttcaactatcttctgcttccttttttccactatattagtgtaa

SEQ ID NO: 10806 - DNA, 1728 bp, Escherichia coli
atgctggcagtgactgcactgattcctgccgtctggctggtgacagagatctccaccgtcccgtccggctgcgtggtgaccgtcggagcgaccgttgcgccgttgtccgccaacacgctgaccgtctgcccggcaagcgcattaccgaatgcatcggttaccctcgcccgcagcgtgttcgccgtcgcaccgtctgcctctgaaccgtccttaatgaccaccagatccgcgatctgcgccgtcctgacatcggcgacaaacgtcacgttccggctctggctgctgttgttgatggtcgcagtgactgcactgactcccgccgtctggctggtgacagggatctccgccgtgccgtccggctctgtaatcaccgttggggcaaccgttgcaccgttgcctgccaacacgctgaccgtctgtccggaaagtgcattcccgaacgcatcggtcaccttcacctgcaacgtgttcgccattgcgccgtctgccaccgcgttatcctgcgtcacctccagcatcgcgatctgcgccgtgctgacatcggcaataaacttcacgctctggctcaggctgctgttgttgatgctggcggtgaccgcactggtgcccgccgtctggctggtgacactgatctccaccataccgtccggctctgtgattaccgtcggggcagtcgttgcgctgttgtccgccaacacgctgaccgtctgcccggcaagcgtattaccgttagcatcggtaaccttcacttgcagcgtgttcgccattgcgccgtcagccactgagttatcccgggtgaccaccagatcagcgatcttcgccgtcctgacatcggcgataaacatcacgttctggctcgcggtgctgttgttgatggttgcagtgaccgcactgattccggcggtctggctggtgacactgatttccaccgtgccgtccggctgcgtggtgaccgtcggagcagtcgtggcaccgttgtccgccaacacgctgactgtctgcccggcaagcgtattaccgaatgcatcggtgatcttcacccgcagcgtgttcgccattgcgccgtcagccactgagccatccttaatgaccaccagatcagcgatcttcgccgtcctgacatctgcaacaaacgtcacgttccggctcgcggtactgctgttgatactggcggtgaccgcactggtgcctgccgtctggctggtgacactgatttccaccgtgccgtccagccctgtgatgacagtcggagcgaccgttgtgccggtatccgccaatacgctgaccgtctgcccggcaagcgtattaccgaacgcatcggtcaccctcaccagcagcgtattcgccattgcgccgtctgccacggcgttatcctgcgtcacctccagactcgcgatctgcgccgtgctaacatcggcgataaacgtcacgttccggctctggctgctgttgttaatgctggcggtgaccgcactgattccggcggtctggctggtgactgagatctccaccgtgccgtccggctgcgtggtgaccgtcggagcagtcgtggcaccgttgcctgccaacacgctgaccgtctgtccggcaagtgcattcccgttagcatcggtgaccttcacttgcagcgtgttcgccattgcaccgtctgccactgagtcgtccttaatgaccaccaggtccgcgatcttcgtcgtcctgacatcggcgataaacatcacattctga

SEQ ID NO: 10807 - DNA, 855 bp, Escherichia coli
atggttgcagtgaccgcactgattccggcggtctggctggtgacagagatctccaccgtaccgtcgggctctgtgatgaccgtcggggcagtcgttgcgccgttgtccgccaacacgctgaccgtctgcccggcaagcgcattaccgaatgcatcggtcaccctcgcccgtagcgtgttcgccgtcgcaccgtccgcctctgaaccgtccttaatgaccaccagatccgcgatctgcgccgtcctgacatcggcgataaacgtcacgttccggctctggctgctgttgttgatactggcagtgactgtactggttcccgccgtctggctggtgacactgatttccaccgtgccgtccggctcggtgatcaccgtcggggcaaccgttgcgccgttgtccgccatcacgctgaccgtctgtccattcagcgcattcccgaacgcatcggtgaccttcacccgcagcgtgttcgccattgcgccgtcagccactgagttatcctgcgtcacctccagactcgcgatcttcgccgtcctgacatcggcaacaaacgtcacgttccggctcaggctgctgctgttgatgctggcagtgaccgcactggtgcctgccgtctggctggtgacagagatctccaccgtgccgcccggctgcgtggtgaccgtcggagcagtcgtggcaccgttgcctgccaacacgctgaccgtctgtccggcaagcgcattaccgaacgcatcggtgaccttcacccgcagcgtgttcgccattgcaccgtctgccactgagtcgtccttaatgaccaccagatccgcgatcttcgccgtcctgacatcggcgataaatgtcacgttctga

SEQ ID NO: 10808 - DNA, 876 bp, Escherichia coli
atggacgaagtcaagaaaattgaacattataaaaatttaaacacagacacatccgagaattctgctgcggatttagacagtttcttaaagaaaaacaaaaaaaataaagaaatgagtgagattgttgctggatccattctccagttattacgtcaggctcaggatagccaattccctacgtttgggaaaaagaatgggcaaatgaagtctattgataacaaatcgtctctccaggttgacaggaattcatctttttctttgcaaacaaatggaatagagcaactttctacaaagaaagtcctcaatatgacttcacgatatcagggtgttaattctgaactatctgataaagcgatacaatttaagggggaaatccataatggtatccatacagaaaacatcacggttcaaaaccacagtaataataaagagcgtgaaaaaaaatatcgcgatggagacaaaaaaaatggagagcaggcccatttattagatattactaacgaaagaaggtttgctgataacaaaatcatgtttactcaacatatcgaaaagcaaaggaatgttcatacgctcaatcagaatgatataaataattctgttaatagtgccaatgtacccgaaaatgaattgacatatcagtttcagcgttggggacagaatcatacagttcggattctggaaagtagtgaagggatacgactaaaaccatcagacacgattgtctccgacagactccatgaagcccaacacaatgatgttacagcacaacgttgggtattgactgagcaagatgaacgacaagggcaacgacatcagcctcatgatgagcaagaaaatgaaggtaaattcgaaaacgatcagaaggacgaaagttaa

SEQ ID NO: 10809 - DNA, 519 bp, Escherichia coli
atgttcggtctgagaaaagtaaatggaaacactcattcctttgaaaccacttttcaaaactggaaagaaaagggtgaagatgttgcgttattaatgcccgaatttagcgccaaatggctaccgatagcagaagagagcggcagctggtctggatgggtgttacttcgagaaatatttcccttaatttctgccgagctcgctgggatggctttaatgccagaaacggaaaggttaataggggaatggctcagtttaaccagttccccgttaaatctagagtatcctgaactaaaatataatcgtttgtgcgtaggtaaagtatttgatggagtattgagttcagctcaaccactgataagaatatggacaggggaattgaatctttggttagataaagtcacagtctgccaatacgaaaacgctccaacgttagacaaaaaatcattatattggcccattcattttgtaattggatttagtaaaacatcaccaacttcaatatcaacaatagttatataa

SEQ ID NO: 10810 - DNA, 678 bp, Escherichia coli
gtgtccggtcagcacatccaggcgtccgccattttccagtacgacattatcagctttaccctccacaacagagaatgctcccaggcggtttatgccggtaacggttgcagccgtactggtaaccagtgcgccgccctgcttcagggtgacattcgtggctgtaccaccggcgtccacctgcagtctgcccttctgattaacggtggtattcccggccacacccccgtttttgacaatctgccagccgtcactgtttacaacagtgccagacgccgtaccgccgttgtgcacatactggtaccccccattcagcgtggtatccagtgcgtgaccatgtacagtctggtcgccgccggcataaaccacagtggtatttgccgttccttcagcagccacaatctgacgaccatttttattgatggtggtgcgtacggcatctccgtagacggtctgcccggtatcaccattttccgcatccggtcccccttccgcgccggtattcacaaccgtgtcggttgccactgcgccggatttgatggcctgccagcccttctcattaatgacggtacccgttgcaatcccgccttcatgtacccactgctcaccgccgttcagagtggtgttcactgcctgcccctgaaggctctgtccgcctccggcactgataaccgtgtctga

SEQ ID NO: 10811 - DNA, 774 bp, Escherichia coli
atgaccgccctgaatgctgagacggacgctgttattttcaccgtttacaccggtctgatggctgcgggagcctgccagaatccggtcatagtccattgcctgtgtcagcatggatgtatacagggggacttcagcacgataagcattttcactgcgcagataccagctctcatcactgtcccggttgagggagtagttaaaggcaccggcctgcagcttattcccctggataaaggccccttcctccgtggtggcaccgttaatggcttccaccacctgaatacccttaccgctggtcgccagccccgacgcactgttgccggcgttcaccaggttcaggatggtttttccggttgccctgccaccgtcaatgaccagtctgtcagcattgttctgtgccatatccgggcgtacacgcaggctgatggtgccattctgtccgttcaggtttttcactttcagggttgccggtacgaacttccctgtgcgggtggaggtgaaatgaatctgtccggcatggctgaggtcatccaccaccgactgcaccgtggcgttatcgggaatattccaggtggcaccagaggcgagagtgacattcgtggggtcaatggcaccgttcagcacagtgctgccggtcagcttcagggctgtaccgcgctgagcaatgacatccgtggtgacggtactgtcgttcagcgtcagcgtgccttcattcaggttgacggctttctgggtgagtgtggtgttgctgacagtgagtgtgccacttcctga

SEQ ID NO: 10812 - DNA, 1902 bp, Escherichia coli
atgctgcctgatgaacttgagaaaagattagatggaattgaggatgcttcaaaaaaagggtatccagtacgtaatctatacaaaattgcgtgtgagcccggactgtggctgcaagcctacgtgaatatacgggccaatgcaggtgcactgactcaaggtgtatcaacagataccattgatggcttttctatcgaaagagcagagaagctggcaaaaacattgcggagtagagaatacgtagcgaaacctgtacgcagagttcagatcccaaaaaaggacggaaaaaccagaccgctggggattccaggtggagacgataaactggcgcaagaagtagcaagaattattctggaaagggtttatgaaccagtattctctgaacactctcatggattcagaccaaaacgttcgtgtgaaactgcgctcagatctattcgtccagtctggaacggagttaaatggatcgtggatgttgatatcaaaggtttctttgacaatatcccccacaaactattgctgaatacactggcagagaaaattaaggataagaatttcctgaaattaatcgaacagtggctgaaggcaggatatgtggacaattggaaataccatcgctcatattctggcacgccacaaggtgggataatttctcccttactggcaaatatatacctcgacaaactggaccgttttgtagaacagaatttaattcctgcatatacaagcggtacaaaacgaagagcgaatccagatatgaacaggctggcccataagattcataaactacgaaagaaagtagacggtatggcaactgattctgaatcagaaaaagaagccataaagaaagaaattgaacgactgcttgaagaaaaacgttctataccatctcaggtcatgaacgatccaaacttcaggcgtatgtactatgttcgatatgctgatgacttcgtaatcggtgtcatcggctcgaagaaagatgctgaacatatatcaagacaggtcagaaactttattactacttcactgggattggaagttaatgaagcaaagaccaggatccgccatatctcagaaggagttaattttttaggctatgaaatcagacaggcagatgcaaagaaattgctgaagcagaaaatgcaagggcggcacgctctccggagatccaccacaggaattgtgcagctcttcgttcctgacaatatagccgctaaattttgtcaccaaaagaaatatggctgttatgagaatgtgaaggctgtacatcgttcaagtctacaaaatctcagtgaagctgaaattgttctgactttcaacgcggaaatgcgcggattggcgaactactacagtctggcgctggacatgaaatataaattatcaaaattatatttcatatggcaaataagcctttttaagaccctggcgaataaacgacgtagttcagtgaataaagtcgccaaatcgctacggcaaaataatggagatctggctattaccgttcaggccaaaaatggatcccgaaagattgaggttttcaaactcaaacatgtcaatcgcaaccgaacaacgattgtcgatacggaaccgagaaccgcacatatcacaacccgcacaacagagatcatgcgtcgattaggggcaaggatctgcgagtattgtgcgaagactgggcgctgcgaagtacatcatgtcagaaagctaaaagacctgaagaaaggtcgtaaggccggatataaacccagcttgtggcaactaatgatgatcgcacgccgccggaaaacgatgattttgtgcgcaagttgccacgacaagttacatagcggaaaactacccgatttgagacaggaaaagggaagaatactcctgcaaccacctgtctcaagcggggattctgctaaatga

SEQ ID NO: 10813 - DNA, 201 bp, Escherichia coli; identical to SEQ ID NO: 5078

SEQ ID NO: 10814 - DNA, 1275 bp, Escherichia coli
atgcaggcactgtggctgctggctctggaacccgtatccgagaccactgctgaccataacagctatggtttcagaccaatgcgcagcacgcatgacgccattgagtccatttttctgcggatgagccagaaagtatcgcccaaatggatactggagggcgatattaaagggtgtttcgataacatcagccatgactggctgctttcccatattccgatggacaggagactgcttaaaaaatggttgaaagcaggttacatggaaagaggcgtgtttaaccatacgaacagcgggacaccgcagggaggcatcatatcccctgttctcgccaacatggctctggacggactggagaaggaactgatgcaaacgttcaggaaaagtggttatcacagtgcaaagcaccaggtgaattatgtgagatatgctgatgatttcatctgttcaggcagctcccgtgaattgctggaaaatgaggtcagaccactgattgcagctttcatgcgcgaacgagggctggaactgtcggaagaaaaaaccgcgattacacatatagataaaggcttcgactttttagggcagaacgtcaggaagtacaacggtaaaatgctgattaaaccgtcgaagaaaaacctgaagaacttcctctgtaaagtcagagaaataattaaacgcaatccgacgctcccggcatggaaactgataggccagctaaacccggtaatccggggatgggctacctatcaccgacacgtcgtggcgaaagaaacatttaattatgtcgacacccaaatctggcgagctatatggcgatggtgtgtaagaaggcacccccgaaaaggattgcggtggatcgccggacgatacttctcctttgaaggcaggcgctggatctttaaagccataaccccggaagggaaaattctgactctcttccgggcaatggaaacaccgataaagcgccatataaaaatcaaaggcgaagcaacaccatacacccccggaatggaaatctactttgaacgtcgtctggatctaatctggaaaggcaaatcaaagaagatgaagacagtagttcaactctggaagaggcaggggaaacactgtccgcagtgcggacaacccataaccaaccagaccggatggaatatacatcaccggatcaggaaagttatgggcggcagtgacgaactgaccaatctcgagttgttacatccgaactgccaccgacagttacacagcagggaagccggtgctcaccgaaagcacttataa

SEQ ID NO: 10815 - DNA, 309 bp, Escherichia coli
atgagagaagccacgctgtatgctcttctgtcccaactggccggagggcaggtttatccttacgtggtcccgctgacggagggaaagcctgcggtatctccaccatggctggtgttttcagtggtgtctgacatcgcgtctgatgtgcttgatggtcaggctgaatccagaatcacagtgcagattgatatctgggcaacggctcctgatgacgcagatgatatccgtgagcaggcgcttgatgcggtaagggaactggcaccatccgttatttctaaaactcagggttatgatgtagtggtcaagtaa

SEQ ID NO: 10816 - DNA, 339 bp, Escherichia coli
atgcaggcaggaagattacgtgatcgcgtggttattctgaatattacgacctcccgtaccccttccggtcacccggaggaaaccctgaaagagggggctacggtatgggcagaggttaaggggatcagtgggcgggaacgtatatcgggcggtgcggaaaccgcgcagacaacagtaagagtctggatgcgatttcggcgcgatgtgacggccgcctcacgtctgaaagtgctgacaggggcattcaagggagccattctgaatatcgacgggccgccgatcccggacgcacgatcctccaggcttgaaatactttgcagccagagaggtggaatgtga

SEQ ID NO: 10817 - DNA, 306 bp, Escherichia coli
atgatgcctactctggaagagcttcgtgttcagtgccggattgatgatgacaatgaacaggagaatgcacttcttatgatgtatctggcagcagccagagaagaggctgaaaagtttttaaaccggacacttcacgatgaaactgttcctgatcaggatacgaccgggcttgtaataacaccgctgataaagctgcgtcttatgcaactggttggctactggtacgagaacagggaaatgcaggatgctgtacctgattttttctataccggactccgaatgtatcggtttcatcccggaacatag

SEQ ID NO: 10818 - DNA, 189 bp, Escherichia coli
atgatcctgaaacaagatctgaaatggtcaccggacggtatgcgcgttgagatcattcgtgctggtgagtatgaagataaagaattacccgaacgggtacgtgaaattgccactgcaacagggattgtttctgataagagaacacctgttgcacgggtatctgataaggctaaaaaacagcattcatag

SEQ ID NO: 10819 - DNA, 384 bp, Escherichia coli
atgtctgcagagttcatggtaatatgtaaaaaaatattttttaggaactgtgtcattgtatctttgtttgtttttacatacaacacatgggcgcagtgtaataataatattaaaataatgcgcaagtatgaaagtgagggtaaatataccgttagaaatttggttaaaaataaagctatagcattggaattagctgagatatatgttaagaatcgttatgggcaggatgccgcagaagaagaaaaaccatataaaatcactgagttaacaacaagttgggttgttgaaggcaccattcactcagaccaaattgctggtggggtttttattatagaaataggcaaaaatgatggggtaattctgaattttggccacggaaaataa

SEQ ID NO: 10820 - DNA, 492 bp, Escherichia coli
atgtgggaggatgcaaaatcgggggcatgtactaatggtctttgcggcacactatccgctatgataggtccagataagtttgattctatagatagcaccgcatatgacgccttaaataaaataaatagccaatctatttgcgaagataaagagttcgctggtttaatatgtaaggataatagtggcagatatttctcaacagcacctaaccgaggggaaagaaaaggatcatatccattcaatagcccttgccctaatggtactgagaaagtatcagcttatcatactcatggtgcagatagtcatggagaatattgggacgaaatattttcaggcaaagatgagaaaatagttaaaagtaaagataacaatatcaagtcattttatttgggcacgcccagtggtaattttaaagcaatagataaccacgggaaggaaataacaaacggaaaaggattacctaatgtctgcagagttcatggtaatatgtaa

SEQ ID NO: 10821 - DNA, 675 bp, Escherichia coli
atgaaaacagtccatgacatccggcggtctaacgccagaaaactgagagatggtgttggcgggaattcttcctttgccaccatgattgatcgcgagccgacccagaccagcaggtttatgggagatggtgcaactaaaaatatcggtgacagcatggcacggcacatcgaaaaatgtttcgacctgcctgtcggatggcttgatcaagaacaccagacaacgaacatcacaaaaaaacctgatgtttcaatcactaacaaacaaataacgttagtccctgtcatatcatgggtacaggccggagcatggaaagaagttggttattctgaggttgatttgagcacagcagaaacttatccctgccctgtaccctgtggtgaaatgacttatatcttgcgggtgattggtgattcaatgattgatgagtaccgcccaggagacatgatttttgttgatcctgaagtccctgcctgccacggtgacgacgttattgcattgatgcacgatacaggcgaaaccaccttcaagcggttgatagaagatggaacacagcgttacctcaaagcattaaacccaaactggcctgaaccttacattaagatcaacggtaattgctctataattggtacagtgattttctcgggaaaaccaagaagatacaaaataaagacctaa

SEQ ID NO: 10822 - DNA, 264 bp, Escherichia coli
atgggagttcagcaggatgatttcagggacatgttgtccgtttatctccccgtcacggcgcagacgcagcatgtgtttggtgtatccccggcggcccgggtcgcgcacgcgggtctggcaggcgaagaatggctggaagccttcccgctgcaggctttccagcacggtgatggtggggatccaggtatagttctcgcttctggatgtgtgtttctcttccccgaatacgctggggacgacctgcatcagttcttcacgggttaa

SEQ ID NO: 10823 - DNA, 741 bp, Escherichia coli
atgagacgaacatttacagcagaggaaaaagcctctgtttttgaactatggaagaacggaacaggcttcagtgaaatagcgaatatcctgggttcaaaacccggaacgatcttcactatgttaagggatactggcggcataaaaccccatgagcgtaagcgggctgtagctcacctgacactgtctgagcgcgaggagatacgagctggtttgtcagccaaaatgagcattcgtgcgatagctactgcgctgaatcgcagtccttcgacgatctcacgtgaagttcagcgtaatcggggcagacgctattacaaagctgttgatgctaataaccgagccaacagaatggcgaaaaggccaaaaccgtgcttactggatcaaaatttgccattgcgaaagcttgttctggaaaagctggagatgaaatggtctccagagcaaatatcaggatggttaaggcgaacaaaaccacgtcaaaaaacgctgcgaatatcacctgagacaatttataaaacgctgtactttcgtagccgtgaagcgctacaccacctgaatatacagcatctgcgacggtcgcatagccttcgccatggcaggcgtcatacccgcaaaggcgaaagaggtacgattaacatagtgaacggaacaccaattcacgaacgttcccgaaatatcgataacagacgctctctggggcattgggagggcgatttagtctcaggtacaaaaactctcatatag

SEQ ID NO: 10824 - DNA, 426 bp, Escherichia coli
atggacattgagttttcgcagattcatgaaatggtctatatgcatgatattgtaaattcggactcgaaaaagaaaccaaggattccgttaaaaaaattccttaatgctgagaaggttctcacgcaaacaacatcatgggtactaaattcaagatatgtgaatgttaattctgtcagtaaagtcaacgtaaagagtaaagttaaaaacagttatatctcacgatctgtcaatgatgagtttagtttaacagatgatgaaatcaattcttttaaagaaacgttagtcctttcctctattgattctctaagtaaactggttcttaataatcctctttctgtattgtttacatcgactgtacgaaggaataataatagagctaagatgaatgttgagttcgactcatggatttgcaccagatgttgttga

SEQ ID NO: 10825 - DNA, 141 bp, Escherichia coli
atggatttgcaccagatgttgttgatacatgatattttacattgcaaggtgatatctaaaatgaaagatgttgatcaaaactttgatgctttatactggcatatactacaagcatatttaattttattgttttatgattag

SEQ ID NO: 10826 - DNA, 423 bp, Escherichia coli
gtgattgattataaaaaaaacttattatttattttagtttttatcagtgggtttattctcttcattgtttactcttatactgcagaaaaaatgatatataatgaaacatgcactgcaaattgggtaatttttaatgacaaggggcgagcaaatcttaccatcgactttatgtataaccaaaaaaataaaacaggaactgttgcgttgagcggaacctggcaacaaggtaacagagaaagtaagtcaatacggcgaaatattgaatacacatggattgaaaactatgacacagcccatttaacatcaaagaaagttaataaatttgagatcatggatcaagtcgatgatgatagacttgcagaacttattcctgatttttatgtctttccagaaaaaagtgtaagctataatatactaaagtaa

SEQ ID NO: 10827 - DNA, 657 bp, Escherichia coli
atggataaaagaaaagaactatttgaatctattaaagattatttgcttgatgaagctaatcgtaaagccgatggccgtatagaaacagaaacggaacttgcaactcgttttaacacctcccgatataaagtccgtcaggcacttagtactctcgtccaaatgggaatgcttgaacgagcccctcgcagaggaagtctgttaaaaaacgttggccagagtagtattaacgaccaattgttgatgcagtttgatctatctgggtttgatatctcggaatttacagaggccagaattttagttgagtgcgcgatcattccactggcaacacgccgaattttcccagcgatgctctccaaacttgaaaatgaattgagattgattgaggaaaatgcagacaatccacaaatagcagatcaacatgatcgggattttcacctgctcttgcttcaggccagtggtaatcgtgttctgcaggttttctctgatgtgttaatcgcttattttgagaaaacaagagagtcgttaccggataatgattgtcaatacttccttgatactgcttcaaaacagagagagatattgtcgtatatcaaaaaaggcgatgcccaaatggcttcagagttaatgcgagttcatttactggaaaagaaaatatag

SEQ ID NO: 10828 - DNA, 351 bp, Escherichia coli
atggagattatttattatccttcgtatatattaacaaatactgcaatgaatgaaattcagttgaaagaccgctacgtttataaagttgagattaatagcatacaagaaaatccttttcatacggaaattgttaaaatgcttaatattaattattttaagatggacaatcttaatgatataagatggggaattcatatagtatctaacagtgaaagagtttgtcagttatattttgactcgtttggttcctgtgggagtttgaatggtattaaagtatgctttgaaaaaaatcacattataaagtgggttagccataatataccattgtttataaaatatgacgctccataa

SEQ ID NO: 10829 - DNA, 303 bp, Escherichia coli
atgagaatacactgggatcctaaagctgctctattgtgtacgggtgtacagaaagatggtaattttgattttaaaaatgacaatcttgagcctgtagtagcattaggtcatgaaatagcccatgcagaggcttatttaaatgaagaattcagtgtttatatgaagcgagtaaatacacctgatcctatatatgataacgcagaggaaagaagagtaataacaggtattgagaaacatgttgcacaaacattaaaacaatgtgttagaaaaaaccacgggggaataatttaccatgtaccttaa

SEQ ID NO: 10830 - DNA, 426 bp, Escherichia coli
atgcaatatgcgaaacctgtcactctgaacgttgaagagtgcgaccgtctctcctttctgccgtatctgtttggcaacgattttctgtatgccgaggcgtatgtgtacgcgctggcgcaaaaaatgatgccggaatatcagggcggcttctggcacttcatccgcctgccggacggtggcggttacatgatgccggacggtgaccgtttccacatggtgaacggtgcaaactggtttgaccgtaccgtgagtgctgatgcctcaggcatcatccttacctcccttgtgattaaccgccagttgtggctgtaccacgacagcggggatgcaggactgacccagctttaccggatgcgcgatgcgcagttgtggcgtcacatcgaatttcaccctgaatgcaacgcgatttacgcggctctggactga

SEQ ID NO: 10831 - DNA, 423 bp, Escherichia coli
atgtactgtactgttaaagaaattatccgcgaagtgctggatacagacgtgccggacagtgaatgcgtttttgccgtggtgctgacccgtggggatgtgcgtcacatagcccaggactggagtctgacagacgatgagctggaaactgtcatgcagcggctggacgatgcctttgagcatggtgcggatgtcagcgttgttcacgacgttgttcgtgaactgatggaagaaaagcgcgccagccgtcaggtgacagtcccggcggtgatgctggaaaaagtgttggcgctggcaggcagtgaaatgaagcgcctgtatgccgtcgggagtgagaacgggggcgacggtgatgcgttcgtcagggaagaacgcgaagcaatggacgttgtgttacaggcgctggacggggagcacatgtcatga

SEQ ID NO: 10832 - DNA, 192 bp, Escherichia coli
atgaatatcagcacagaaacccgcgaaattctgcgcaattacaaagccgtgattaatgcgcggcgtcgtgaaatggggcagaaaccgctcaccactgcgcagattgttgatgaaatctgcgattttgtggcgaatcagcaggcggttttcctgggcggtcactacatccttcagggcagcagaaacaggtga

SEQ ID NO: 10833 - DNA, 573 bp, Escherichia coli
gtgaaaacgggggctgaagccatccgcgcactggccacacagctcccggcgtttcgtcagaaactgagcgacggctggtatcaggtacggattgccgggcgggacgtcagcacgtccgggttaacggcgcagttacatgagactctgcctgatggcgctgtgattcatattgttcccagagtcgccggggccaagtcaggtggcgtattccagattgtcctgggagcagccgccattgccggatcattctttactgccggagccacccttgcagcatggggggcagccattggggccggtggtatgaccggcatcctgttttctctcggtgccagtatggtgctcggtggtgtggcgcagatgctggcaccgaaagccagaactccccgtacacagacaacggataacggcaaacagaacacctatttctcctcactggataacatggttgcccagggcaatgttctgcctgttctgtacggtgaaatgcgcgtggggtcacgcgtggtttctcaggagatcagcacggcagacgaaggggatggtggtcaggttgtggtgattggtcgctga

SEQ ID NO: 10834 - DNA, 369 bp, Escherichia coli
gtggtgctgttcggcaagctcgcggaagtggctggcgaatatctgcgcaagggcgcgcaggtctacatcgaaggtcagcttcgcacccgtagctgggaagataacggtatcacccgttacgtcaccgaaattcttgttaagaccacaggcaccatgcagatgctgggacgtgccgcaggtgctcagactcagccggaagaggggcaacagttcagcggtcagcctcagccggaaccacagtcggaggccggtacgaaaaaaggtggcgcaaaaacgaaaggccgtggacgtaaggccgcgcagcccgagcctcagccgcaaccgccggagggggaggattacgggttttcagacgatatcccgttctga

SEQ ID NO: 10835 - DNA, 363 bp, Escherichia coli
atggctagcgaacgcagtactgatgtgcaggcatttatcggggagctggacggcggcgtatttgaaaccaaaatcggcgcagttctcagtgaagtcgcttccggtgtgatgaacacgaaaaccaaaggtaaggtctcgctcaacctggaaatcgaaccgtttgatgagaaccgtgtgaaaatcaaacacaaactctcatatgttcgcccaactaaccgcgggaaaatttccgaagaagacaccaccgaaacgccgatgtatgtcaatcgcggtggtcgcctgactattctgcaggaagaccagggacaattactgactcttgccggtgaacctgacggaaaactccgcgcagcaggtcattaa

SEQ ID NO: 10836 - DNA, 234 bp, Escherichia coli; identical to SEQ ID NO: 8563

SEQ ID NO: 10837 - DNA, 1158 bp, Escherichia coli
gtggtggcaagtgaactgcacggcgagcagccgcaggcggtgccgggacgcagtggttcaggtaccacgctgaataaccactttgcggtaataccggcagacagaacatggcggccacagccgttgctgaaaccgctggtggacggcccgcagagcgccgtcgtgacgggaccggcaggagaagaaatcttctgtgatgaacatggccgcgtgcgggtgaaatttaactgggaccgttataacccgtcaaaccaggacagttcatgctggatccgtgtggcacaggcgtgggcaggcaccgggtttggtaacctggcgataccgcgtgtgggtcaggaggtcattgtggacttcctcaacggcgatccggaccagccgattattatggggcgcacctaccaccaggaaaaccgcacccccggcagcctgccgggaacaaagacgcaaatgaccattcgttcaaaaacctataagggcagcgggtttaatgaactgaagtttgacgatgcgacagggaaagaacaggtctacatccacgcgcagaagaacatgaacaccgaggtgctgaataaccgcaccacggatgtgataaacaaccatgctgagaccatcggcaacaatcaggtgattgcggttaccaacaatcagatacagacggtgggcgttaaccagatagagacggtgggcagtaaccagatcattaaagtgggctctgttcaggtggaaacgattggacttgttcgtgcgctgactgtgggcgtggcgtatcagacgacggtaggtggcattatgaacacctcggtggccctgatgcagtcctcgcagatcggtttgcataaatcgttgatggtcgggctgggttatgacgtcaaagtcggaaataacgttaccttcaccgttggtaaaacgaaaaaggatgataccgggcagaccgcgatttactccgccggtgagcatctggaactctgctgtggtaaggcaaggctggtgctgactaaggacggacaaatttttctcaacggcacaaaaattcatttgcagggtaaggagcaggttaatggtgactcactgttgattaactggaactgtgcagcctcgaaatccccaccgaagacccctgatgaaaagcaggatacgccggatatgagagagtactga

SEQ ID NO: 10838 - DNA, 537 bp, Escherichia coli
atgcaaactcaaaatgttgtgacggacaaagaacgggaaatcagaaaaagagatcttgaagataaagaccgtaaaaacgcctcagagcgtcgacaggagcaaaaaaaccaaaacttcacccaagtataccctttaggctggaagcgtctcagagagcttttcaggaagaatccgggggcagcagagctttattcaatgcttgcagaaaacattgatggctcttgtggtgcggttgttgccgatcaaacccatttagcatcgttgcttggtgttggtagacaaacaatatctaggtacgttaagtggctagaagagcaaggtgttttagtaaaaatcccagtagctggaaaggtatgcgcttatgctctcaacccgcatgaagtctggaaaggctacgataatgccaaaccgtatgccgcatttttgacgaaaaccctagtcaacaaagacggcgatattcagcgccgaatcatggccatgttccacggaaacgatgcccgtcagggcatggaaggcgacacgccagaagccgaatag

SEQ ID NO: 10839 - DNA, 453 bp, Escherichia coli
atgaaaaaactagttgagaaagattttatcgaccaaatgcatgataataaaatgtgggcagttaaattcaatttcgatggggggcaggtattaattaaagattatcttgaacttgatattgattatgttataaatgttgattcctccatcggagatggaatcgtgtttcacatatgccctgcaaagataatttttgaatgcgttagtagctttaatatccaattgtcttccgatactgaatcggaaggctattttaatgcagattgcttatacatcttggaaataaaaaagaaattcattaaaaataacaaatcgcattacagtataattttttgcaataatgttgggtatattaaactttatgcagccaaagcatcattatatattagtgatgaggaggtgtataaagttggtgattctgattctatacctattgaaaaaagaattaaataa

SEQ ID NO: 10840 - DNA, 966 bp, Escherichia coli
atgaatagtgtacaggctaaaaaatacactgaaatcaatcttgctgataggattcgtagtcagttttttattgaatatggtatccgtattcccggtattgtcattcgcgagggggaaggccttaatgatgaagatgtcatattaatgctaaatgaagtcagagcctcgcaatttaaaatttatcatgatctcgtcttgttggttgaatattcagatgaagtggtttcgactttgatcaagaaacctgtcatcgtaaatagtaatggtgaacaatattattgggttacaaaaagtgatgcccaaaaattaacaaaaattggctgttatactcgcacggccatggatgaaatgtacaatcatttatctgtatgtctggcgcataatattaatgagtattttggtatacaagaaactaaatatattcttgatcaattagagatgaagtatcctgatctattaaaagaaatattaagatatataaccgtgcagcgcatttcagaggtaattcagcgtctgatccaggagcgaatttcagtgcgcaatatgcgtttagttatggaggctttagcattatggagcccacgagagaaagatataattacactcgtcgagcatgtacgaggtgcattaggtcgctacatttgccataagttttcatattctggagaaattaaagcaattgtgatttcgcctgaaatagaggacagaatcagagatggtgtcaggcctaccgctggcggtacttttcttaatctcgatgcatccgaagctgagatgattctggataattttaaactggctctttctggaatcaatattcctattaaagacattattttactgggttctgtggatattcgtcgttttatcaaaaaacttattgaatctagttatcgagacctcgaagtactttcgtacggggaactaacggaaaatgttcccgttaatattctgaaaactatttag

SEQ ID NO: 10841 - DNA, 339 bp, Escherichia coli
atgaacagtttaacaacaccctaccgtcgctcgcaactgattgcgcttcctgtaccgggtggaaaagcgaaggtggagtattgctatgcagtaaatgtaccaggtgacagggaaattgtaacccacagctttgcagagtgggctgtgggtgatttcaaccggcagaaggagacagtcctttgcgacaaattaaccgctggttcaaagatcactacggagtacccgtcagagtcattcgttgggagccggaaacacaacgggttatctacctccgcgaaggctatgagcatgaatgcttcagtccgctcgaacagtttcgtcgtaaattcagggaaatag

SEQ ID NO: 10842 - DNA, 369 bp, Escherichia coli
ttgacctgcgcacagtggctctggaaaaaaatcatcgccctgtacgagcaggccgccgaatgtgacggcgaggtggttcgtcccaaagaaccgaactggacagcctgggcaaacgaaattcgcctgatgtgtgtgcaggatggtcgtactcataaacaaatctgcgagatgtacaaccgtgtcagccgcgacccgttctggtgccgtaacgtgctcagcccgtcgaagctgcgggaaaaatgggatgagctttccctgcgcttatcgccgtccgtcagcacgtacaccgaaaaacgcgaggacccgtacttcaaagccagttacgacaacgtggactacagccagatcccggcaggattcagggggtga

SEQ ID NO: 10843 - DNA, 495 bp, Escherichia coli
gtgagcatgagtcttttgaatgacgttcagaaattcattgaagcccatccgggctgtacttccggagacattgcggatgcttttgcaggttactcacggcagcgcgttctgcagtctgcaagcaagttacgtcagagtgggcgtgtggctcaccgttgtgaaggggatacacgcagacatttcccgcgcctgactgagagagcgcaggagccggaaccagttcgtgaaaccagacctgtgcgcaatttctatgtcggcactaacgacccccgggtgattttgtgcctgaccgccaggctgaagaactggagtccaggggcttattccgtcgtgctgcaacggtgtggatggcggcattccgtgaaagccactcccagccagaacgaaacaattttctggcgcatcgtgagcggtgcttacggaaaagcagcaagcgcgctgcatcgggtgaagagtggtatctgtcagggaattacgtgggggcttaatgagtaa

SEQ ID NO: 10844 - DNA, 261 bp, Escherichia coli
atggacgacattgtttttgcggggaatagggcgctgtatctgattttagttatgtctgcaggacctattgcagttgcgacatttgttggtttattggtagggctttttcaaacggtaacacagttgcaagaacagacgttgccatttggcgtcaaattattatgcgtaagtatttgcttttttttaatgagcggatggtacggtgaaaaattatactcttttggtattgaaatgctgaatttagcattcgcgagaggatag

SEQ ID NO: 10845 - DNA, 381 bp, Escherichia coli
atgagtggttataaatcatatttgataaaatattctgaaccggagttggttagcttttttgaaaagattcagaaggtgaatagttctgaagacaatgaagagataatcgatgatgagaatatttcaattttctcgttactcccggcatatgcgttgagtgagataaaaagtgcatttattataggtttctatatctatttaccctttgttgtagttgatctggttatatccagtgttctgttaacgttaggtatgatgatgatgagtccggtaaccatatctacaccgataaaattaattctgtttgtcgcgatggacggttggacaatgttatcgaaaggactcattttacaatattttgatctatccattaatccctga

SEQ ID NO: 10846 - DNA, 204 bp, Escherichia coli
atggcgaagctggggatcgttgaacagcgcgaacgatacagccgtaccgcgattaacaacatcaaaaaattctggtcgctgacagcgaaaggctgcatgttcggcaagaacatcaccagtcccgcaaatccgcgcgagacgcagccgcacttcttcgaatcccgattccctgagctgttaaagctgctcgataccgttcattga

SEQ ID NO: 10847 - DNA, 309 bp, Escherichia coli
atgctggaaggcattctgctgtctgaatgtgaacgtctgaagcaacattctctggcaaacaaactgatcagcctcttccgtcagtttggcggcacggagttacgtctcaaactggtctggctctgctggcttgacttaatgaccggaaacagccttgacgactggacgaaaaacctgaaacacaaatcagaaaaagatctggagcaatggatcattgcacgtcagggtcagagtgaaccactgacaaatctgatggatcagtacgtgcttatggcataccgtacatcggttgatgccgctcacagttga

SEQ ID NO: 10848 - DNA, 780 bp, Escherichia coli
gtgatcactgttggcggttccgactacaaaaaactggtgaatctgggcggcacggcttccggatgggtgggggaaacggatacgcgatcccagactgccacctccagactggagctgattgaacctctcatgggggaaatttacggcaacccgcaggctacccagaaaatgctggacgatgccttcttcaacgtggaggcctggatcaacagcgagctggcaaccgaatttgccgaacaggaagaaattgcctttaccaccggtgatggcaccaagaagccaaaagggttcctggcgtatgaatccaccgatgaaaccgacaaggtccgggcgttcggcaaacttcagcatattgtatccggcgaagcgaccgcggtgaccgcagacgccattatcaaactgatttacacgctgcgtaaggcacaccgcactggcgcgaagttcatgatgaacaacaacagcctgtttgccatccgtctgttgaaagacaccgagggtaactatctgtggcgtccggggctggagctggggcaaccgtcctctctggcgggttacggtatcgctgaaaacgaacagatgccggatatcgccgctgatgcgaaagccattgcatttggtaacttcaaacggggttacaccatcgttgaccgtatcggcacccgcattctgcgtgacccgtacaccaataaaccgtttgtcggtttttataccaccaagcgcaccggcgggatgctggtcgattcgcaggccatcaaactgctgaagattgcagcggcgtaa

SEQ ID NO: 10849 - DNA, 642 bp, Escherichia coli
atgaccaccagatccgcgatctgcgccgtcctgacatcggcgataaacgtcacgttccggctctggctgctgttgttgatactggcagtgactgtactggttcccgccgtctggctggtgacactgatttccaccgtgccgtccggctcggtgatcaccgtcggggcaaccgttgcgccgttgtccgccatcacgctgaccgtctgtccattcagcgcattcccgaacgcatcggtgaccttcacccgcagcgtgttcgccattgcgccgtcagccactgagttatcctgcgtcacctccagactcgcgatcttcgccgtcctgacatcggcaacaaacgtcacgttccggctcaggctgctgctgttgatgctggcagtgaccgcactggtgcctgccgtctggctggtgacagagatctccaccgtgccgtccggctgcgtggtgaccgtcggagcagtcgtggcaccgttgcctgccaacacgctgaccgtctgtccggcaagcgcattaccgaacgcatcggtgaccttcacccgcagcgtgttcgccattgcaccgtctgccactgagtcgtccttaatgaccaccagatccgcgatcttcgccgtcctgacatcggcgataaatgtcacgttctga

SEQ ID NO: 10850 - DNA, 444 bp, Escherichia coli
atggggtccgaactcataaaatgggttaaatcgcataaaatagatgctcatattattacatttgtagcaaaaatgccgtatattgattcaataaaattgcttgaagccggtgcgaaaggatgcgtatggaaaaccagtcacccggcgaaactaaatcgcgctattgattcgattagtaatggttacacttattttgatagtgtacatatggattgtgaaaaaatatcttcaagatattcctctgataatcaacttacaaatcgtgagtctgaaatactacaactcatagctgatggaaaaacaaacaaagaaatcgctaatttcttgcagttaagcaggaaaacagtcgaaactcatagactcaatatcatgaagaaattagatgttcacagtggtatcgagttgatcaaaacagctttacgtatgggtgtttgcactatataa

SEQ ID NO: 10851 - DNA, 477 bp, Escherichia coli
atgcagcagctttcctttctgcccggagaaatgacaaccagagagcgcagtctcattctgcgggccctgaaaaccctggaccgccatcttcatgaacccggcgtggccttcacctccacccgtgcggcacgggaatggctgattctgaacatggcgggactggagcgtgaagagttccgggtgctgtatctgaacaaccagaatcagctgattgccggtgaaaccctcttcaccggcaccatcaaccgcacggaagtccatccccgtgaagtgattaaacgcgccctgtatcacaatgccgctgctgtggtgctggcacacaatcacccgtccggtgaagtcacacccagtaaggcagaccggcttatcaccgaacgtctggtacaggctctgggcctggtggatatccgggtgccggaccatctgatagtcggtggcagccaggttttctcctttgccgaacatggtctgctttaa

SEQ ID NO: 10852 - DNA, 522 bp, Escherichia coli
atgaaacatccatttgaagtaaaacttgccgccgtaaatcattacctggccggtcatgctggcatcatttctacggcaaaactatttcaactttctcacaccagcctctcacactggattaatctttttcttcttcacggtcctctggcactggattgcagacacaggcgtagctattctcctgaagataaactttgcgtggttctttatgctctcgggcattctgagtctctaccccgggtagctgcccggtttaacattcccagccacaacacggttaaaaactggataaaaggctaccacaaatctggtgatgaggcctttatcaggcgcaggaaggagaaaagcatgacccgttctgatgatacccatgaaaacgaggcaaacatgacgccggaagagatgaagaatgagctgcgttatcttcgcgcagaaaatgcatatctgaaagccatgcaggagcatctcctggaaaaaaagcgcctggagctggagaaaaagcgaaagtcatccagaacctga

SEQ ID NO: 10853 - DNA, 462 bp, Escherichia coli
atgtctttggcacttcatggaaagtatgaacttgaacttgctgctcaaaaagcattagagcttttacattatgtatcagacataaccaatgtcgatggaaaaattttagctattatgggactgataactggtttgtctggacaagcaaaagtatctcatatcttatttgaacaggctaagatacacacaactgatatagcctctctctactactatagagcacttgtcaattttcataatgaaagaattgaagaggcaaggatttgtatagacaaatcactacaactcgaacccagaagacgaaaagcagttgtgataaaagagtgtgtagatatgtatgtgcctaacccgctcaaaagcaacatgaaactctactataaagaaacttcgagtgaaagccatcgagtgataattgacaacattttgaaactaaagcaactaacgagaatttgtatgcgataa

SEQ ID NO: 10854 - DNA, 327 bp, Escherichia coli
atgacgacgttaactcaatgccagcagcaggtgctggatatgctgatttcttatcagaaagaacgtggcttcccgccaaccaatcaggaggtggcaaccatgctgggataccgttcagtgaatgcagcggtggagcatcttcgcgcactggagaaaaaaggcgtcatcacgataaagcgtggcgtggcccgggggataacgcttcataccgcggtgaaggacgacgacagcgaggcggtcgggattatccgcgcactgcttgccggtgaggaaaacgcaaggctgcgtgcaacccactggttacatgagagggacctgaaagtatga

SEQ ID NO: 10855 - DNA, 198 bp, Escherichia coli
ttgtttcctccggataaccggatccgcgatctggacaactataacaaggctctgtttgacgccctgacccacgcgggtgtgtgggaagacgacagacaggtgaaaagaatgctggtggagtggggaccggttatcccggaagggaaggtcgagatcactatcagtaagtacgagaaaacggcgggtgcagccgcctga

SEQ ID NO: 10856 - DNA, 336 bp, Escherichia coli
atgcggctcgctgaacagcggactccactccgtgacgtcattttcctgcagtatggtgccgaggatgcttctgatgtcctcgttctggaagatacggaagttctgacgcagtcctgcccgccacagcggcgggcgcacctttatgctgtacagcatctggtttttgtcgttctccccgagttcaaaccaggtcaccacgcctttcacccggcgctgtacgtcatcgccctgccataccgtcaggtaggccattttgtccagcacctgcgcaaattcaagggagagaaactgctggctgaccagggagagatcgagggaaaagagcgaagagagtga

SEQ ID NO: 10857 - DNA, 237 bp, Escherichia coli
atgactcatactatcgtttacgcaagccccgtgattgcggttatgctgggcggtgaagctgtcctgggattgctggcacgctatgcttcacaactaaatgcttttgccatctcactgactgtcaaaagtgcgctggcatttttaatattaattatttattttggcccaatactggctgaacgagttatgccgttatcctttttcccagaacaattgcaattatacattgataaatag

SEQ ID NO: 10858 - DNA, 564 bp, Escherichia coli
atgaaactcaaacatgtcggtatgattgtcgtttctgtgttggcgatgtcgtctgctgcggtaagcgcagccgagggtgatgaatcagtaacgaccactgttaatggcggtgttattcattttaaaggtgaagtggtaaatgccgcttgtgcgattgattcagaatcaatgaaccaaacggttgagctgggtcaggtccgttcttctcgtctggctaaagcgggtgacctcagctccgccgttggcttcaatatcaagctgaatgattgtgataccaatgtttccagtaatgcagctgttgcattcctgggtactactgtcaccagtaatgacgacacattagcgctgcagagttcagcggcaggctctgcccaaaatgtcggtatccaaattttggaccgtacaggggaggtattagtacttgatggtgctacttttagcgctaaaactgacttgattgatggcacgaatatactgccgttccaggctcgttatattgctctcgggcagtcagtagctggtactgcaaacgctgatgcgaccttcaaagttcaatatctataa

SEQ ID NO: 10859 - DNA, 1065 bp, Escherichia coli
ttgaaaacggtcttaaaaatgctggccatctgcatgatggcaggaggcctgggggtgcagtctgtatacgccgaaccattggtcattcaggagcaaggaagtttttctgccggaggcaccatcatcaccgccccgggaacatttgacgcgaaaaagccgctggactctgcaggtcaaacttatcatggcgatcatgcgtcggtgttctatcaaataccggagaatccgcataaatatcccatagttatgctgcatggcgcgggccagtcttctcgtacctgggaaagtacgccggatggtcgtgaaggatttcagaacatattcctgcgccgcggattctccacgtatattgtcgatcagccgcgtcggggtgatgccggacgtaccactgtagaaggtacggttacaccaaaacctgatgagcagatgtggtttaaccagttccgtgttggcgtgtggccagattattttaaaggcgtccagttttcccacgacaaagaggcactaaatcagtatttccgccagatgactccgaatacagggccatttgatgtcaatgtcatctctgatgcgatgtctgccgtagtggataaatcaggtccggcaatcctctttactcactctcagggtggtggaccaggctggtataccgcgatgaaaaacaacaaggtcaaagccattgtcgctttcgagccaggcagcggttttgtgttcccggaaaaagaactccctgcccctatgccaagtgcgttcgacacgctgaagggggaaccagtgccaatggaacagtttatggcgctgactaaaatcccgattttgattatttacggcgataacataccggataaacctgtagccatgcccgcacaggacagctggcgagtacggctggcaatggcgcgtaagtggcgtgatgtggttaacaagcatggtggggatgtgacggtgacgcatcttcctgaagtagggataaaaggtaatacccacttcccgttcactgacctgaataatgtgcaaatcgctgatttggtgagtcggtttttgaaagagaaaaatctgcaatag

SEQ ID NO: 10860 - DNA, 762 bp, Escherichia coli
atgaacaataccacgcccattaagatattaacggcagcggtactgctaacctttggttttgcgcttaccgcaaatgctgcgctcatcaataaaggagtcaccgaaatgaatcatgaatatacggtttcagatacgctgtcagctcgccagcaggtcattccgttgattgccgcatcaatggccagcagtcagatggataagctgaatgcagcgcttaatcaaggacttgatgcaggacttacgataaacgaagctaaggaaattctcatccagctctatgcctatacgggatttccccgcagcctgaatgcactgaatgagctgatgaaagtcgttgaaacacgtaaacaacgtggcatcgaagacattgaaggtaaagcgccgatcgcccggattcccgtcggggatgagcttcggcgtgtcggtaccgcaaaccagacgaaaatctcaggcgcgcctgtgcaggggccactgtttgattttgcgccaacaataaatcaattcctgcaaacacatctgttcggcgatattttcgctcgcgataacctcgactggcaaagccgtgaactggcaacagttggagcattagccgctacgccaggcgttgaagcccagttactgtcacatacgcgagcaagtctgcgagtcggtctgacggcagcgcagttacgacagttagcacaggttctgcgtgaacatggcgacaatgatgcagctacaagagctgatgaggcactgcaaaaagcgcttgagaacaaatag

SEQ ID NO: 10861 - DNA, 570 bp, Escherichia coli
atgcagatcatatttcacaggatggatattgaccttgcctgcgacattttcggtgatagccccgtcatagagtccggcctgagtaaatgtatgatcagacagttacattatcttgggctactactgcctctcttcacaacttcatcatgggctgcggagcaaaattcatctgtccatatcgcccccgccggaagccacactgcagtgtatggctcggcggagaattttatcggtcgtgtccgggttgatccgctgttcaacgctgacaacgacatccgtgtttccgcggcttatgtcacctttgaacctggtgcccgctccgcctggcatacgcatccagcaggtcagcgactgattgtgacctctggtgttggactcacccaacaagaaggcaagccggtgcaggtgatccgtgctggcgatgttatctcttgtccggcggacgttaaacactggcatggggcggcccccggtagtgcgatgacacatctggcaataaccggcatggtggatggcaaaagcgttaactggaaggagttagtgacagatgaacaataccacgcccattaa

SEQ ID NO: 10862 - DNA, 492 bp, Escherichia coli
ttgtatgcgcagcgccttgctgagcatggctatattactgttaccgccgatgcagcttatcagggggctagcggtggggtgccacgtaacgtggataaacctgcgaatcgtattgaagatatccacggtatggctgatttcatcagccagtatcctggtgttgatagcacccgtattggtttgttggggatttgcgggggaggagggtattcacttgctgccgccgagacggacaaacgattcaaatcgattgcaaccattagcatgtttaattcaggacttgtacggcgcaatggtatgcaggattcacagttggatactattcaacaacgtcttaagcaggcttcagatgcacgagctcaggaagtcgccggtagcgaagtgctttactccggtgatgccaacctgactgatgaacagatcgctaaattaccttttgcgttatatccaacgcaagtatccaactcatggtctatggtgtgccatcactga

SEQ ID NO: 10863 - DNA, 198 bp, Escherichia coli
atgacacatcaggagctgaaagtgatgcttctcaaagatccagcattccgggctgcttatgaagctgagagccagaacccgcaatccggttaccagattatccggcatcatggtgatggcactgaagaagtggtgtttgattctcgtgtatcaggtacagatttaccaactaactggatgaacaggcctgattggtga

SEQ ID NO: 10864 - DNA, 249 bp, Escherichia coli
atgtctgtaaaaaataaggcgcgtgaccgacttcccggtggccgccttaagtcttatcgtcgtgtaggttcacattttgccagttgtgccagatggtttgataaatcgccgtcctggtatcgcaatatgatgatgaccaggcctgagcgccgtgaagtcagaagtcttctcaatcaggtaatgcgtggtcatgatgctgacggcattgcttttccggtcagtcatcgtccgtttgtttattggtggtga

SEQ ID NO: 10865 - DNA, 1245 bp, Escherichia coli
atgaaaaagattttactcgcattaacgctactattttcttcatgtgctttcgcagggtcagagcttgaattaaataaagtcaagctaccggaggctatttctcttatttacagtgaggtgcttaaagtcccgtatatgctagatccacagcttgttaatgatgaacgaatgattacattcaggttaacacctgatattgatgaacgggaatttgtaacccgttatcttggcaatatgaacattcgaatatggacgaaaaagggtgttgattttatcgcgccctatacgccgaaagagccggttaagccacgttatacatggacttatacgcctcagtaccgttctgttgcctacctgtctgatattcttggcggctacgtttcaggctccttcaataacagtggagccgtgatttctgacgattcgctaaaaggttcatcaggggcaagcaactacatcaatcgaaccggtgatattctggtttattatggtacgaaagaggatatcgccatcctgaaaacactggtcacttcgctggatacgatgagtgatgaagtggttgtttctggttatgtttttgaggttcagacctcgcagtctgacggctccggcattcttttagcggctaaaattctgtctgataaattcaatatttcagttggtgctgccggactggataattttatcaatattcgaaccggctccattgatgccattttcaatctgctgaaaaccgacagtcgttttactgttgtcagtgcgccacgactgcgggtaaaaaataatgcctcagcgtctttttcagtcggctctgatgtgccagtactgggcagtgttacggtgaataacaatacgacaacgcaatccgttgaatatcgttccagcggtgttttgtttaacgtgacgccatcaatcaaaagtcggacaatggatctcaagattcagcagcagctttccaactttgtgaccactgaaaccggcgtcaataactcgccaacccttatcaagcgtgatgtaacaaccgaagtcagccttgcagatggtgatattattttacttggtggccttgctgaacagaaagacagtaaggccagttccggctggagcttcttcggttcccgtaccagtgaaagcaacaagactgatattatggtgatgcttcaggtcagaaaggttgaccggagcagggcgacgccccgcagcgccgcgaggagcggtgaactgttccgggacaacctgaactga

SEQ ID NO: 10866 - DNA, 1026 bp, Escherichia coli
atggctatttctgcatatattggcatacccggctcaggaaaaagttatgaagccgtttgcaatgtcattattccggcatttaccagcggccggagagttgtgacgaacatttatggtttacaaaaagataaaatcaccgaacgttatcctgatgcaacgggagaaattattgttgtggataatgatgatgtgcttaaagcagatttctttccttttaaaggtggggaagggagcttttgccagtttggtgatttaattgttattgatgaagcatggcgaatcttcggtagcgataaggatatgacggctgagaagaaatcatttattgctgaacatcgtcattttacgcaccctgaaacgggtattagctgtgatttggttattgtaaatcagtcactttctaatattgctcgctttctgaaagacaaaatagaaacaacttaccggatgcgcaagctgaaagcgttgggcctgaataatcattactgcattgacgtatattcaggccacaaaatctataaaagcaacctcgtcaccagttatcgcaataaatataaccctgatatttttgaactttacaaaagctatgaaggaaataacggtaatgaaaagcagacagataaacgccagagcatctggaattctggcaaagtcaggttctttcttgtgctttttccattgatgtttatcgggtcaggctggctgatttactcatttttcagcacgtttggccgaagcgatccctcgccagatttgactacaacagatgtacgtgatgcggccatgtttcgttcttccgctgttactccagcatcagatactccctcagaaccagctgaaccgccactttcaaccgagtggcgtatatcagggagaatgaccagtgaaggcagggcgtttgtgattcttgttaacggtgccggtgttttgcgtgccgttcctgcatccagttttaattacaaagggatgttgatgagcggaattattgatggtgagcgtgtgacgctttatacggggaaaaaataa

SEQ ID NO: 10867 - DNA, 288 bp, Escherichia coli
atgtttgggattctgattagtgcattaaatactttgttaggttttgtattccggtcattgattattaaattcgtcgtattctttgcgctgtattttgtagtccagggcttcgttgaaatccttgttgagttactgccagattcaagcaatctctcatcgctgtttgccaatttatcagacggattctggtacttcattaacctgagtaaattaccacaggggattagtatgattatctccgcaatggctactcgttttattattcgacgtattcctgttatagggtga

SEQ ID NO: 10868 - DNA, 1713 bp, Escherichia coli
atggaaattgggttcccttttatgggggatcgtctcagcttatgtcgttattcttgggctaagaggctgacggtttattcctttattttttcctttctctgggtttcctttccccgatattcatattcatttgtaccagcaattgcagcagtggctgcgcgggctgttattcctaaagtcgttggccgggtgcttgttcgtcgctttgctgccaatgatgcgatttatacggcatcacagcttacagcaacccgtgtttttgttggccgcgctgcggctaatgctgccgaatacttgcctgctgcctcatcatacaaaatgagcggtgttgcaacgtgggcgggtattgctgctgctgtatcatcttttgttccgtcttctttgagttcatctgacggctcggtaatggtaatgactaacggtaaaaagatttccgataatttatatgaagtaacgtacagtggtcaaagtggtgaaagtaagacgataaccgttaattttgaaccacaggaattaagtccggtaatccttcatgttagtcgtaataatgtggatgcgggttctccagttgtaggtgttgaaacaggatattccacgccagataatgcactttattattatcaggattcgaaagagctaatttattactatggtgataatccaactgaaattgccagaaattatcttaatgactataactcgcgtacttatactgaaacactaacaaattttgaacgcactgtgacgaataaagttgtcaacagtaatggagatgtatcctttactgaacagaattataagtttacttatccttcctcattttatgaaatacctgagattacacacttgtatagcaacccggccgcatcttcatttcccgcaggtattcccatgtatgaaaatgtagcagggcttcccatgtattacagcgttgcttatttaacagcaggcaagcaatatcagtatcacaacacgccttgtaaaacgactaatcagtcaaatggtggatattcgacgatttgcgccgttcctgaaaaagaggattacaccgcaaaagatattgatgaaaagagtgagcttactatctggaccaataccaaatataaagccatgacggaagtactggaggccggaaatattgagtccatgattgattatctggagtatcttgatagtgttagtgtatcgccagcacttcttgccgacatgattaacgagctgtggtctgaagctgccgttaatgccgattataacggcttaccgtttaaagaggtttcaccggctgaagtaacttctgcgatgtcggaacttaggctatctccaacgttattagatatgctttcacctgtatctgacagtgcaggggctgacgtcaatattgatattaccattaataacaactcaggatctgacactggaaataatggcaatatagatttgggagaagatcccggtgtaaaagagcctgagcttgaagaaacgccaacggcaagagatattttaacgccaattattaacttgttgccttttacaaacgaatttaacatcggctctcgttcagcatcctgccccgttgttgaattcagcgtgtttaatcaccagtacagaattgactcccattgtccgttaattgagcagaacagaagcgccgtagaaaccatatttctgattatatggggatttgttgcgctccgtattattctgagtgcctaa

SEQ ID NO: 10869 - DNA, 234 bp, Escherichia coli
atgtttaaaaaaatcgttagttttctggctgtacctgcattaatggctgtttctggcgcgactttcgctgcagaaggagcggcatcaagtggtgttgatttatcgccgctgacgaacagcattgatttcagtacagttctggttgcgattatggccgttgctgcttcactggtaacactttatgccggtgtcgctggcgttcgctgggtattgcgtaccgttaaatccgcataa

SEQ ID NO: 10870 - DNA, 252 bp, Escherichia coli
atggatacatcaggtttcgatattcagtttgataatcatattcctgaaaatggttaccgtattgaaggttatttatgtaatgcgaacaatgcaaaagaatgtcaggcaataatggtacgttctgaaccatttcatcaaattgattattctgcaatgggaaattactggatattaggttttggctctgtcctgctgctctggcttttttctgtaggtgtgggacaggtaataaagatggttcgtactgcttga

SEQ ID NO: 10871 - DNA, 318 bp, Escherichia coli
atgtctaattatggtctttttgtaaaaggtaaaatgcttggtgctcgccagcgtaataaggtcaatggtcagggatactataatgaaattggtgttggcttagagattcctgatggttttggcggcactaagcaagaccagattattattcgtgtatctcaggctcttgttaatgccggtgtaatgaatcaggcaaataattttatcggtaagttagtccagatacctgtatatgttcgcgtctggtcaatggaggggagggaaggagtaacttataacatttcatcagatggcggcattactgaaataaaaggctga

SEQ ID NO: 10872 - DNA, 1053 bp, Escherichia coli
atgatcgactggtttaccggaatcctgccttgcacacaccgaccgttaccggctggtagtgtcgtcagcgtcgatgctgacggtgcagtggagtgggaaacagtaaaacggttgaccgttcgcggttcgcatgagtccacaatgaaagtaaggtctgttggatctgatggtgaaggtagggcaacacatctctacattgacggtaatccatcaaagtttttgcaaggtcactctgttataggttccgacgatttgcaagggttggtgttaacagcttacgccagaatattggcattactgcatattcctcatgatctaccatcctatcggcaggtcatggaagggcaatttaagatctcgcgcatcgatatcaattacatgtattcattgtcaacattagaaaatgtccgcgcatggttatatgccgcagaatttaaagctaaaactcgccacggtcgcgcctgtggtaaaggtggcactgtttacttagggaaaaactcccgtcgttggagcctgaaattttattcaaaatatgatgagcatacatctggcaaaaaagggcaccagatggcagacgaattcgttaaagctggtttactggactggtcaaaagataaattacgcattgaattaacattaagaacaactgaattaattgatttgaatcttacgcttggtaatagctggaatattgagacgcccaataaattattctctgactatgtagggagaatagaaatgaatcaaaataccatattaactgatgaaaaaataattaatctcccaagaaaaatacagtctacatatttattgtggaagcagggcgcgaacatgaaagagatgttaccgaaacctacattctaccgacaccgtaaagaactactttctttcggaatagatattaacttttattgtgagtcaccggattctaataacgttgttccgttggttcgtactcttgaagccaaaccagccaaaattccatcatgggtttatgagaaaggtttaattttcgattataaccgtatttcacatgccagtaactggcattaa

SEQ ID NO: 10873 - DNA, 447 bp, Escherichia coli
atgggcaacaatgagcatgaagttatggcggacaaacagagagcagaacgtatcaaaaaggtaattctggaacactcgacttatgaagaactggccgagaagactggcattagcgtgagtacgctggtcaggatagcgtccggcaaaactgaacctaaattcagtgacatcattcagatagctaaaattacgggtgcagacttaaacaccttagcttatggctatgctcttgatgttaaagaagaagctaccgagcggaagctaatcacttctgcggatggatatactgatgaagaaaccactaacgcacataatttcatcgtgtggaacatcaggacactggaaaaacaagatattctggcactcgcaaggcaggtttctgcattaagttcatacacttacagtactaaaatgtttatgaaaaaagcggtgtctggagaagagtaa

SEQ ID NO: 10874 - DNA, 423 bp, Escherichia coli
atgagtagaaataacgaaacaagcggcgttgaactggttgtcgtcggcgtatttgctttctgtctggcagttgttgcctggctaatgaaaactttcgatgttgaatggcaaacagcactggaaactgcgcctggcctgatagtctggctgcttgttgttggggcggggatctttttcgggatcaaaatggaaacaggccttgttcgctggggtgctccactggcgatcgcccttctgattccggtattcaaaccaattcttaaggaagctgccggagtacgtgaaatgggtgggttggttttcgatgatatggtttcgtggtacggaactggctggggaatgtcgttaatgtttttcggtattcttatcgtcggatacggtctgctttattggtggcacagaagaaactcttattattggtaa

SEQ ID NO: 10875 - DNA, 795 bp, Escherichia coli
atgaagccagaaaaagctatcgagatattaaaaagacaacgggagcaaatcccagcaatacaaaatgaacgaaggagtacaggaaataacccaagttttaacttatggcaaagaaacactaagaccgccatatcaaaaatatttggtgaagagtcagatcacaaaaaagaatttggctcaattcgatactctttaatggcatttgttggtgatacaccagattatgttttcgataacgcattttgtagtggtttagatgaagcacattctcttcttacgtctatgattgctgagattgaagaatatggaattgacggaaatttcatagagacaaaaaatgatcccgtagctcttgttgaactaatttgccatcaatttcataaggttgcaagacagctacagcaacgacacgataatagacaaaccattgaaataaatgacgaatatgacgttcaggatttatttcatgctcttttgaagattcatttcgaggatgtcagaccagaagaatatacgccaagctatgcaggatcttcaacacgagttgacttcttgttaaagaatgaaaaaatcattatcgagttaaagaaaacgagaaaaaatctcaagcaaaaagaagttggtgagcaattaattgttgatatagctcattatcaaacgcatcctgattgcgaaactttagtgtgttttgtatatgaccctgaaggtagaattgccaatccaattggtgtggagaatgaccttgagcgttgtacaaattcaatttcggtaaaagtaataatctcaccaaaataa

SEQ ID NO: 10876 - DNA, 267 bp, Escherichia coli
atggctactgtagatgatgttgcacaatggatgaaatcagagctggaaaacacaaactggctatatcaagaaactgttgtatataaaataaaagagttatttggcgatactttcgtatatttgaatgctaatggaaatttatccattgataaaaaagtattagcgaagtttagaaagctaactaatgacacggttatatgggagagaggtgaaaaagcatggcgaaaaagacaaggttatgatgcccctggtcgacagcaggactaa

SEQ ID NO: 10877 - DNA, 858 bp, Escherichia coli
gtgtttacaaacaatggctctacactgcaaacagacataacaacattcggggtgaatatgaaattagcacatctgggacgtcaggcattgatgggtgtgatggccgtggcgctggttgcgggcatgagcgttaaaagttttgcagatgaaggtctgcttaataaagtcaaagagcgcggcacgctgctggtagggctggaaggaacttatccgccgttcagttttcagggggatgacggcaaattaaccggttttgaagtggaatttgcccaacagctggcaaaacatcttggcgttgaggcgtcactaaaaccgactaaatgggacggtatgctggcgtcgctggactctaaacgcattgatgtggtgattaatcaggtcaccatttctgacgagcgcaagaaaaaatacgatttctctaccccgtacaccatttctggtattcaggcgctggtgaaaaaaggtaacgaaggcaccattaaaacggctgctgatctgaaaggcaaaaaagtgggtgtcggtctgggcaccaactatgaagagtggctgcgtcagaatgttcagggtgtcgatgtgcgtacctatgatgatgacccgaccaaatatcaggatctgcgcgtaggccgtatcgatgcgatcctcgttgatcgtctggcggcgctggatctggtgaagaaaaccaacgatacgctggcagtaaccggtgaagcattctcccgtcaggagtctggcgtggcgttgcgtaaaggaaatgaagacctgctgaaagcagtgaatgatgcaattgcggaaatgcaaaaagacggcactctgcaagccctttccgaaaaatggtttggtgctgatgtgaccaaataa

SEQ ID NO: 10878 - DNA, 1311 bp, Escherichia coli
atggcacaagtcattaataccaacagcctctcgctgatcactcagaacaacatcaacaaaaaccagtctgcgctgtcgacttctatcgagcgcctctcttctggtctgcgtattaacagcgctaaagatgacgccgcgggccaggcgattgctaaccgcttcacttctaacatcaaaggtctgactcaggccgcacgtaacgccaacgacggtatctctctggcgcagaccactgaaggcgcgctgtctgaaatcaacaacaacttgcagcgtgtgcgtgagttgaccgttcaggcgacgaccgggactaactctgattctgacctgtcttctattcaggacgaaatcaaatcccgtctggatgaaattgatcgcgtttccggtcagacccagttcaacggcgtgaatgtgctggcgaaagatggttcgatgaagattcaggttggcgcgaatgatgggcagactattagcattgatttgcagaagattgactcttctacattaggactgaacggtttctccgtttcgggtcagtcacttaacgttagtgattccattactcaaattaccggtgccgccgggacaaaacctgttggtgttgatttcactgctgttgcgaaagatctgactactgcgacaggtaaaacagtcgatgtttctagcctgacgttacacaacactctggatgcgaaaggggctgctacatcacagttcgtcgttcaatccggcaatgatttctactccgcgtcgattaatcatacagacggcaaagtcacgttgaataaagccgatgtcgaatacacagacaccgataatggactaacgactgcggctactcagaaagatcaactgattaaagttgccgctgactctgacggctcggctgcgggatatgtaacattccaaggtaaaaactacgctacaacggtttcaacggcacttgatgataatactgcggcaaaagcaacagataataaagttgttgttgaattatcaacagcaaaaccgactgcacagttctcaggggcttcttctgctgatccactggcacttttagacaaagctattgcacaggttgatactttccgctcctccctcggtgcggtgcaaaaccgtctggattccgcagtaaccaacctgaacaacaccaccaccaacctgtctgaagcgcagtcccgtattcaggacgccgactatgctacagaagtgtccaacatgtcgaaagcgcagatcatccagcaggcaggtaactcggtgctgtccaaagctaaccaggttccgcagcaggttctgtctctgctgcagggttaa

SEQ ID NO: 10879 - DNA, 1239 bp, Escherichia coli
atgagtttaattagaaacagtttctataatattgctggttttgctgtgccgacattagttgcagtccctgctttggggattcttgccaggctgcttggaccggagaattttggacttttcacactagcattcgctttgataggatatgcaagtattttcgacgccgggattagtcgagctgtaatcagagaaatcgctctttatcgagaaagtgaaaaagagcaaatacaaattatttcgacagcaagtgtaatcgtactattcttaggggtggttgcagctttgttactttattttagtagtaataaagttgttgagttattgaatgttagttccgtttatattgaaacagcagtgcgtgcattctctgttatttcatttataatacctgtgtatctgattaaccagatttggcttggttatctggaagggctagaaaaatttgcaaatataaatgttcagagaatgatttctagcacaagcttggctatattaccagtgatattttgttattacaatccctcgttgctttatgctatgtatgggttggtggttgggcgtgtgatttcatttttgattagcgcaataatttgtcgagatattattcttaaaagtaaactttactttaatgtggcaacttgcaatcgtcttatctcttttggtggatggataacagttagtaatatcataagcccaatcatggcatatttcgaccgctttatcatctctcatattatgggggcttcgagaattgcattttatacagcgccctcagagggtgtatcaaggttaattaatatcccatatgctttggcaagagctctatttcctaaattggcatatagcaataatgatgatgaacgaaaaaaattacaactacagagctacgcaattataagcattgtatgtctacccatagttgttattggtgtcatttttgcctcattcataatgacaacatggatgggacctgattatgccttagaagcagcaactatcatgaaaatacttcttgctggttttttctttaactctttagcgcaaataccttatgcatacttgcaatctatcggaaagtcaaaaattaccgcatttgtgcatctcatagaacttgcgccatacttattattattgtattacttcacaatgcatttcggcataattggcacggcaatcgcttggtcacttagaacattttgtgattttgttatactactttcgatatcgagaagaaaatga

SEQ ID NO: 10880 - DNA, 549 bp, Escherichia coli
atgaacgtaattaaaactgaaattcctgatgtgctgatttttgaaccaaaagtttttggtgatgaacgtggcttcttttttgagagttttaaccagaaagtatttgaagaagctgtaggacggaaggttgaatttgttcaggataaccattctaagtctaaaataaatgtattgcgtgggatgcattatcaaacacaaaatactcaaggaaaactggttcgggtaatttctggttcagtatatgatgttgccgtagatttaagagaaaaatcaaagacatttggcaaatgggtgggtgtagaattatctgggaataataaaagacaattgtggatccccgaaggttttgcccatggtttttatgtgttggaggagaataccgaatttgtttataaatgtaccgatacttataaccctgctcatgaacacacattgctatggaatgatccaactatcaatataagttggccaatcatacaaaactgcaagccaattatttctgaaaaagatgctaatggacatcttttttcacataaaacctatttctga

SEQ ID NO: 10881 - DNA, 1416 bp, Escherichia coli
atgaatactgtaaagttgtctttactggctgtcgttgttgctaccgcggtaagtccatctgcgtttgcgggagatactgttgaggcggcagcgacagaattagcggcaatccagccaggaatgtcgcaaatggaaattgatcagaaaattgggcgatttttagaaaggacagaaaatagcgcagccgcacaaaattatctgattgcgcatgattaccagacaacgacgcctcaggaaaatagaacttcttctcccgtacagcccgccagtacgctgaacccgataaccaatcaagcgcagatcgaccgcgacaatgggcaggataccgccattcagaacgcacagcacacagccaactgggcatcgctgaaagctgatgacgcgcagcacgccattatggtggcgcagacggatattgataccaataaagcctccattgccgacacccgcagtgatgtctccgcagtgcagtcagacgtcaccaacataaaaggcgatgtcgcacatgcccagtcaacggctgaccatgccaacgctaacgccaacaccgctctgatgaacggcgtcaaactctcctctgctgtgacagaaaacaaaaacaatatcgagcagaaccgcagcgatattgctgaccaacagaaacagctcgacgaaacccaaaaaaccgttgctgccaccggtgatgtacagactgccgcccgatatcagagcatgattgacgccagacagacagccgctgccaatgcgcaacaggaacaagcggacacccagcagcaacaaattaccgatcagcagaagcaaatcgacgccacacaaaaaacggtttccgcacttggcgatgcccaaaccagcgcacactatcaggaaatggttaacgccagactgagcgcacaaaatgatgcaaatgcgcgtactgctgcagaacaaaaacagaaaattgatacccttgcgaccaaccaggaaacgcaacaacatatcgatagtgtgcagtacggggaacaaattcagcgtctggcgcaagactcaacgcaaacgcatgaacaaattgacagcctgacacaagacgcaacccaaacgcatcagcagttaagcaacacgcaaaaacgggtcgcagataacagccaacaaattaacacgctcaataaccatttcagttcgctgaaaaacgaagttgaggacaaccgtaaagaagccaatgcgggaactgcatcagccatcgctatcgcctcacaaccacaggtgaaaaccggtgacttgatgatggtgtcagcgggagcgggaaccttcaacggtgaatctgcggtgtctgtcggaacatcttttaatgccggaacgcatacggtacttaaagccggtatttctgcggatacgcaatctgatttcggcgcaggtgtcggcgtaggatattcgttctaa

SEQ ID NO: 10882 - DNA, 129 bp, Escherichia coli
atgcggaagttctggaatgtttctttttttggtgatggagaactgattgtgactgaagcaatttggctacttttgcaatgtgacaagttatggcagagctggctggtggcgaagaattttgacgattga

SEQ ID NO: 10883 - DNA, 381 bp, Escherichia coli
atgaaaacattacctgacacacacgtacgggaggcatcgcgctgcccgtctcccgtcaccatctggcagacactgctcacccgactgttggaccagcattacggcctcacactgaatgacacaccgttcgctgatgaacgtgtgattgagcagcatattgaggcagggatttcactgtgtgacgcggtgaactttcttgttgaaaaatacgcgctggtacgaactgaccagccgggattcagcgcaggagtcccgtcgcagttaatcaacagcatcgatattctccgggcccgccgggcaaccggcctgatgacccgcgacaattacagaacggtaaatgacattaccctgggcaggcatccggaggaggcgaaacaatga

SEQ ID NO: 10884 - DNA, 198 bp, Escherichia coli; identical to SEQ ID NO: 10040

SEQ ID NO: 10885 - DNA, 828 bp, Escherichia coli
atgtctgcaatcacagtctcccgtccggaagtggtcaacgggcatacggacgttatctgctcaaccagtatccgccacattctggctgtacgaaagagtacactgctgcaaatcgacacacttatccggcaactggctgaaatctcatcaatgacagaaagtattggcggtaaaaccgcactggactgggccatgaaacaggattttcgctgtggttgctggctgactgagaaaccggaaaccgcaatgaaagccattacccgcaaccttgaccgtgaaatctggcgtgacctgatgcaacgctccgggatgctgtcattaatggatgcgcagacccgtgatacatggtaccgatcactggagtacgataattttccggaaatcagtgaagagaatattctgagtacgtttgagcagctacaccagaataaggatgaagtgtttgagcgaggagtgagcaacctcttcagagggttgagctggaattacaaaaccaattgcccctgtaaatttggcaataaaattatcgtcaacaatctggtgaggtgggaccggtggggattgcatcttatcaccgggcaacaggcagatagacttgccgacctggaaagaatgctgcatctgttcagcggcaaaccgatccccgacaacagggaaaacataactattcatctggacgatcacatccggtctcttcagggaaaagaatgctatgaagatgagatgttcattattaaatactttaagaagggctctgcgcacatcacgttcaggaagccagaactggttgacagactgaatgatattatcgcaagaacactatcctga

SEQ ID NO: 10886 - DNA, 1119 bp, Escherichia coli
atgaataacgaggaaacattttaccaggccatgcggcgtcagggcgttacccggcgcagctttctcaaatattgtagtctggctgccacgtcgctgggattaggcgcgggaatggcaccaaagattgcctgggcgctggagaacaaaccgcgcattccggtggtatggatccacggtctggaatgcacctgctgtaccgaatcttttatccgctccgctcacccgctggcaaaggacgtcatcctttccctgatttccctcgattacgacgatactttgatggctgccgccggaacccaggcggaagaagtctttgaagacatcatcacgcaatacaatggcaaatatatcctcgcagtagaaggtaatccgccgctgggcgagcaggggatgttctgtatcagcagcggtcgaccgtttattgagaaactcaaacgtgccgctgccggagctagtgcgattatcgcctggggaacctgcgcgtcctggggctgcgtgcaggccgcgcgacccaatccgacgcaggcaacgcctatcgacaaagtcatcaccgacaaacctattatcaaagtacctggctgcccgccgatcccggatgtgatgagcgccatcattacttacatggtgacctttgatcgtctgccagatgtcgacaggatgggccgtccgttgatgttctatggtcagcgtatccacgataaatgctatcgccgtgctcacttcgacgccggagagttcgtccagagttgggatgatgacgctgcccgcaaaggttactgcctgtacaaaatgggctgcaaagggcctaccacctataacgcctgttcctccacacgctggaacgatggcgtttccttcccgatccagtcaggtcacggctgcctgggttgtgcggaaaatggtttctgggatcgcggttcgttctacagccgcgtggtcgatattccacaaatgggtacccattccaccgccgacaccgtcggtttaaccgcgcttggcgtggtggcagcggctgttggtgtgcacgcagtcgccagcgccgttgaccagcgcagacgtcataaccagcaacctacagaaaccgaacatcagccaggcaatgaggataaacaggcatga

SEQ ID NO: 10887 - DNA, 573 bp, Escherichia coli
atgagcactcagtacgaaactcagggatacaccatcaacaatgccggacgccgcctggtggtcgacccgattacgcgcattgaaggccacatgcgctgcgaagtgaatattaacgatcagaatgtgatcaccaatgccgtctcctgcggcaccatgtttcgcgggctggagatcatcctgcaagggcgtgacccgcgcgatgcgtgggcgttcgttgaacgtatctgcggcgtctgtactggcgtacacgccctggcttcggtttacgccatcgaagatgccatcggtattaaagtgccggacaacgccaatatcatccgcaacattatgctggcaacgctctggtgccacgatcatctggtgcacttctatcagcttgccgggatggactggatcgatgtgttagatgcgctgaaagccgacccgcggaaaacctccgaactggcgcaaagcctctcctcatggccgaaatcatcccctggctatttcttcgacgtacaaaaccgcctgaagaaattcgttgaaggcgggcagttggggatcttccgcaatggctactgggggcacccgtag

SEQ ID NO: 10888 - DNA, 708 bp, Escherichia coli
atgcaacagaaaagcgacaacgttgtcagtcactatgtctttgaagcacccgtgcggatatggcactggctgacagtgttatgcatggcggtgttgatggtcaccggttactttatcggcaagccgctaccttccgtcagcggcgaggcgacgtatctgttctatatgggctacatcaggttaattcacttcagtgccgggatgatttttaccgtggttttgctgatgcggatctactgggcttttgttggcaatcattactcccgcgagctgtttatcgtgccggtatggcgtaaaagctggtggcagggcgtgtggtatgaaatccgctggtatctgtttctggcaaaacgtccgagtgccgatataggccataaccccatcgcccaggcggcgatgttcggctatttcctgatgtcagtttttatgatcatcactggctttgcgctgtacagcgaacacagccagtacgctatttttgcgccgttccgttatgtggtggaatttttctactggacgggtggcaactcaatggacattcacagctggcatcggctggggatgtggctgattggcgcgtttgtgatcggtcatgtctacatggcgctgcgtgaagacatcatgtccgacgacacggtgatctccactatggtcaacggctaccgtagccacaaatttggcaaaataagtaacaaggagcgttcatga

SEQ ID NO: 10889 - DNA, 462 bp, Escherichia coli
atgaacagagtaaccgcgattatctccgctctggttatctgcatcatcgtctgcctgtcatgggctgttaatcattaccgtgataacgccattacctacaaagcccagcgcgacaaaaatgccagagaactgacgctggcgaacgcggcaattactgacatacagatgcgtcagcgtgatgttgctgcgctcgatgcaaaatacacgaaggagttagctgatgcgaaagctgaaaatgatgctctgcgtgatgatgttgccgctggtcgtcgtcggttgcacatcaaagcagtctgtcagtcagtgcgtgaagccaccaccgcctccggcgtggataatgcagcctccccccgactggcagacaccgctgaacgggattatttcaccctcagagagaggctgatcactatgcaaaaacaactggaaggaacccagaagtatattaatgagcagtgcagatag

SEQ ID NO: 10890 - DNA, 147 bp, Escherichia coli
atgtggcgttacaactggatgaagagcggtaggtcgattacaaaattacagccgggtgagactttacccggccacagaatggcattatttacgcgtcagtttttccagatcggcttcaatctcgctgatcttattggttactactga

SEQ ID NO: 10891 - DNA, 1614 bp, Escherichia coli
atgctagcagacatcactggacagcctaatacaacctccacaacaggaagcttcacacaacagaatcgtaatgggatgttgcttccaggagagtcagatgtacgaaaattactgccgcaatctgaagcaggcttacctcctccgtatggtgctaatttatttgccggaggctatgaaacagaaaggagtgacggcttaagcgataattatttgattgctcctggggataagttaaatatctggatttggggagcggtcaatttctctaatgtggttacggtagataatcaaggaaatattttcatacctgatgtaggtccaataaatgtaaaaaatgttcctgcaagccaagttaatcagttggtggcaagtaagatcggtgatgtatttaccaataatgtaaatacttacgtaaatcttttgactgcaacccctgtaagtgtattcgttacggggcctgtaattcgtcctgggcagtatgcaggacaatcttctgatagtatattgtattttttaaaacgtgccggtggaatagattctgaccgtggaagttatcgaaaaattaaggtgttacgacaaaatagagtaatacagcaaattgatctttatgatttcatacggtatgggaaactcccgaagctggcattaaaagatcaagatgtgattttagttgagcaacaaggtccaatgatcaatgttgcgggaaaggttcgaaacccattccgatttgagcttacccagcgcaatgcattaggctctgaattggtgaattatgcacttcctctcgcaaaagtcagtcatgtcggtgtgattggcgacagggaaagcggcccgttttccgtctacttgccgtataaagattttacacgtcttcaacttaaagacggtgacaaagtactttttaatgatgacatgcatgcacaagtatatgatatacaagtatcaggcagttatatgggaccgtcatatttcacggttcgtaagcaaactaaattgcatgatttattgaactatatccctattgacccagagcttgcggattatcaatcaatttatctgatacgaaagagtgtggctgcaagacaaaaagagatgctggatgaatctctaaaccgcttggaacgtagtgtatttaccacacccgcgcgatctgatggtgaggcgaatatacgtgctaaagaagcagagttagtgatgcagtttgttgaaaaggctcgtaaagttcaaccgcttggtaaagtagtagttgcagataaaggtgttattgccaatatccaattagaacaaggcgatcaaatagttattccaaataagactgatcttattcaagtggggggtgaagtgttgatgccacaagcagtagtatataatgccgatgctaatttggatgattatgttgcatgggccggaggttttactgagcgagctaacgacaagcgaattgctattgtacatgcaaatggtcttgtagaatttaaagggcaaggtaaagtacaaccgggggatcagatattggttctacctcaggttgatagcaaaaccatgcaatcatttaaagatatcacacaaattatttatcaaatcgctgtagctgctaacgttgctattaaatga

SEQ ID NO: 10892 - DNA, 801 bp, Escherichia coli
atggacaaacccattattagtcaaactccacgcacttctttgcaagtattacgtgatgtagtatttggcttattaattcgtgagctaaaaacaagatttgataattaccgactaggttatgcttgggcattacttgacccattattaatgattagcctgttcagcgtagtatttgggatgagaagccaaagtggctttggtggtgtcccagcccaggtttttattactgctggttatttacctttcatgtttttcaataaagttgtgactcagttgaaatctgctgtcaatgctaatatgggacttttttgttatagacaagtgactccttttgcaacttttatagcacgttttatgctagaaacaatggtgggcatgattgtcggtataatcctagtactaggattattgtggtttggctttgatgcaatacctgcggatccattgcaagtgatccttggttattctcttctgatgctgttttctttttctcttggtattgtattttgtgttatttgtaatttagcgaaagaggcagataaatttcttagcttgttaatgatgcctttgatgtttatctcttgtgttatgtttcctcttgctactattccccctcaatatcagcattggtttttatggaatccacttgtgcatgctgtagaactaatccgaagggcatggatatctggttatcgtagtcctgatgtaagttgggcgtatctgtcggttgtcaccttattattgctcacttttgctatgagttgttaccgattacggcatcgccaattgattgctagttag

SEQ ID NO: 10893 - DNA, 651 bp, Escherichia coli
atgattattcttgataatgtatcaaaatattatccaactaaatttggacgaaattatgtcctgaggaatgtaaatattgagctaccaagggaccgtaatataggtattctaggtatcaatggagcaggaaaatctactttgttacgtttgttaggagggatggatacgcctaacagggggaaagtaactcgtctctgccgagtatcttggcctctagcactagctgggggatttcaaggtagtatgactggtcgtgaaaacacgcgatttgtttgccgcattcatggtgtacgcgatacaagccccgtagaagagtgggttaaagagttttctgaaattggacaacattatgagctgcctattaaaacatactctagcggcatgaaatcaaaattttcttttgctgttagtatggcttttgattttgatatatatcttaccgatgaaattacctcagtaggtgatgcacgttttaaacaaaaatgtattgatgtatttaacaaaaagcgagaaacagctagtttgattatggtttcgcatgatatgaaaaatctacgacaacaatgcgatatgggcatcttgttacgtgatggtaaattagaagtttttgataatattgatgatgccatcaaaatttaccagtcactttga

SEQ ID NO: 10894 - DNA, 1248 bp, Escherichia coli
atgatgccatcaaaatttaccagtcactttgagcagcaactgattatgacatctccgaattcttcatcctcaatatctcgccttacgcgaaagttaagaaaactgagcaataatccaaaactatttttgattgattcgagaggatatcaaattgtacaccgctcgtggaagaaaagtttacagctaggcagttttctttgggtagttatctgcttttctatcgcagtgctctattttggcttcattgcttccgatcgttatgtgagccgggctgaattaatgattaaacaagccgatcaagttaaaatgttgcctgatgcgttatcaatgttagggataggtggtagtaatcatcaggatatattactcgttcaggattatatgaagtcatgggatatgctggccaagttggacaaagaacttgcacttaaagcacatttccagagtgatagtgcagattatttctcgcggttgcataagggagtcagtagggaagattttcttgattattaccgcaaacatttgacgttacaccttgatgaattatcaggagtacttaccgttgagttgcagacatttgatccccaatacggtcagcgagttgttgagttaatgctcaaagaatcggagcgttttattaacaaattaggtcatcaggttgcgctcgaacaattggcctttgttgaaaaagaagtaaatagagcatatcaacgcttacaggatgaaaaagctaaagtattagcatttcagaatagccaccaacttctcagccctgaatctaccagcagcgcacgcttgggagtggtcagccagattgaaggagagctggtgcgtcaacaggcggagctaaaacaactgcgcagctatatgaaggaaaccgcaccggccgtagtctcattacagagccgagttgacgccctaaccaagcagcttgaacaggagcgtgctaagctgactggtcaagataacgatgccatgaatgaaatcaccgccggttacatggatgtgcaaacgcaggcaaccttggcagcggatctctacaaaactggccttatcagcttagagcagacgcgggttgaggcatatcgtaaacttaagcatctattggttattacccaaccaactttagcggaagatgccgaatatccacggcgattctataatcttgcgactgtgggtgtattactttgcttgttctatggtcttattattatggggctggcaactttgcgtgagcaccaggattga

SEQ ID NO: 10895 - DNA, 2733 bp, Escherichia coli
atggatagtcaaaaaattagtcagttagtagagaatcgtgagttatatcccatcactgatattggcagggaattgaatttcattttcaaaccatctcttttttggtgtcctacataccttgcacaatctgcttggctagaacacattccttttgctttctggttagttgacacactgcggccaagaaatattgttgagctgggaactcattatggaagttcttatttctcattttgccaagcagtctctaaactagatttagaaacatgctgctttgccgttgatacctgggggggagatgaacatgcggggctgtatggcgaagaagtttacaggcaagtatcagaatataatcaacagcactattcaggtttttctactctcattcgcagtacatttgaccaagcgttagagcatttttcacaaggtagcattgatctgcttcatattgatggtttgcatacgtttgaagcggtacgccatgattttgaaagctggttgccaaagctttctgaaagggctgtggtcattatgcatgataccaatgttagggaacgtggttttggcgtatttcagcttttggatgaattaaaacgacaatatccacactttgagttcgctcatgggcatggactagggatagttggtgtggggtgtgaacaatctccagaacttaataatttgtataaaatctcagaaaatgctcgtgtaaccaaacaagtccaagacatcttttgtcgtttggggaaatcttgtagcgagagttgggagaattcccagttaaaacgtcagttgtctacacaacaagatgacattcaggctgaacggcagctattggtagaacagcaggcattggaaagggggcgtcttgccgagcgcattactgcacaacataacagcatattagaaatggaaaagcagcttgcacatgctcaagtgcaatctgatgagctatcttttgcccagcaacatatcaattcgctgacatctgaggtggcattattgcaagaacagctcaatgaggcccaaacaaacttgagtgtatggtcgcaggagcgaatacaagccaacgatgagttgcatacagctctgcatcaactagagcagcaacagagtcgcatcacgagccaggagcaagctcgccatcaactggagcaacaggtcaataccctgacgttacaattgagtgaagaaacacagcgtgcatctcaccttactctcgcgctcagcaagagcaacagagcattgagcgaacattcgcggcaaattaccgaattacagcttcagttggaacaagcgctacatatccaggatacacaggttcgtacactggccgagcgagacaatatggtgaacttgttgcaacagcaggctaatgcattgcagcaacagcttgacggtgagcagcaaactaaaaaccagttgcagcatgcttatggattactggaagcacagcacgatacgttaggcttggaatatgatgcactgaaaaaggtaagtgcaaatctacagcaacagctggaagaagggcaacttgtgcaacaaacattgcagcaaagcatagatgagcaaactcttgctttggctgcggcttctaaacaatgtgatgaactgactcaactaatagcagtgcacgagtctaatattgcgtcacaaagcgacgtaatggctgctcaacaagcagagtataagcaactcacagaggcgctatcagcattacaacaacaactggcagttgaacagaccacacatcagcaacagattagcgaacgggacttggcattagccgagcgttttagtgaaacggtagctctaacacgtctattagaagagcgcacgcagattatcactgaactagagattgaaaaacaattgcttaccaccaagttgtctggcgtagagcagcagttaagggctgagcaagagtcgcttcagcaggcccagtctgcattgctctcagcagcaaaagaaaagcaacatcaacttgatgagttggaatcggtgctcaatgagcggtacagtgagattgcaaccttaacccgttggctggaagaacgtgatcaggcactccttagtgcagcaagtgaacaacaacagaccaatgaaacatatagagctcagcagcaagcctggaaagaagagaaggaggccttaatccgggaacaaaccttgctgcagagccagcagtctgtactgcaagaccaggtaagagaactaaccacactcaacggaaggttggaagctaatattgcagagcgtttccaggagttggcagtcatgacgcggcatatggagcagcttagctgtgagttaaaacaaaaagagcggcaattgaatagagcaaaagaacgcgctcagaatttgaagagaaccgtctcttggaagattacagccccagttcgtgctcttggcagaacatttaaggaggagactccatccagaacaacagctacagagagtgccgcggagcgtattgccgcttcaggattgtttgatgaactctggtatcaacatcgctacccagaggttgcagacactgggctctcagctcttgagcattttattagcgtgggggcggataaaggttatagccctagtgagcagtttgatactcgctggtatttgcaaacctatccggatgtggcccaaggaggcattaatccgctgcttcattacattatgtatgggaagtttgagcagcgcagttgcctgcctgtcaataagggagaataa

SEQ ID NO: 10896 - DNA, 2415 bp, Escherichia coli
atggttaaaaatcaccaagacgagttgctagctcactttgatgaacattggtatctgcataactatttggatgtgaaacagaccgggttgtcagcaagagaacattttaagcgttatgggatgttacttggtaggaaaccatgcgaagcatgggacgtttctcctgcagtgagtaaaatgcaaaatacagttgtgctgccctatctggcaacaaatcagctctcgatagatatagataattcacaaagttgggttgcagagggaaatgatccatttttcattattgatttggagcagctctcaaatattagcaagggatggtatcaatttaatatctctattaattgccaaccaaagcaaggattagctaagttatatttggatacaggtaaagggttcaatgagtttgaaacagtaacgttgccatataaacgagcggtcagcgtcagtcgtttgttctatctggaatcgcctcttgttgcattacgatttgatccattagaacaggcagcaaaatttgcaattaatcagtttgaaatagcggctgttgatgtgaaagtagtcgagtctgcactattggctcgcattcaaaaagaacaccaaagctatcgtgacatgccgctagaaaaaatcaaaaaatccatattgatggacaatggcgatatgtcaatagagcgcctgcaagcattctataacgaaacgttcagcgttaccccgtcttctgtcggttatgaggaatggatagaaacggtggaattaccttcgttgcctggcaacgaagaggtgagtctgatgcttgccagtatgactcaccctccagttatatctattgtgattcctgtttataatccagcggagatctacttgcgtgcctgtctggattctgtcctggctcaaagctatccccattgggaactctgtattgccgatgatcgttcgccaaaagaacatgtgcaacgcgtactgcgcgaatacgaggccaaggatagccgaatcaaagttgtctaccgaaagcacaatggtcatatttcggctgcttccaacagtgctctcgaaattgcaaaaggggatttcgtagctctgttggatcatgatgatgtgttgccagagcatgctatgctatttatggctcaggctatttgtgagcagcctcatacccagatcctttacagtgacgaagataaaattaatgcccgcggtgagcgttttgagcctcatttcaagagcgattggaatccagatctattcttttcgcaaaactatgcctcgcatctcggggtctatcgtcgctctctgctgcaacagattgggggattccgtttgggagtagaaggaagtcaggatcaggatctactgctgcgttgtctgcctcatgtagctgcagagcagatagttcacattccccgtgtgctttaccactggcgtaccattgagggctctacagctttggcttctggcgagaagagctacaccacggaggctggcatcaaagcgctacgcgactatttttctaagcagcaacctgaggttacggttgaggtggggttggttcccaacacctatcgggtacgttaccctatttcagaaccagccccactggttagtttgcttattcctacccgggatcgtcgtgctctaaccgaaactgcggtgcgtagcatcatcgatcgcagtatctatacccatttcgagatcctgattctcgataatggcagcgtggagcaggagactctcgatttctttgcccagatccagcaggaagacagccgggtcagagtattgcgctatgaccacccctttaactactcggccatcaacaactttggcgttcgtcacgccaagggggccattatcggcttggtcaataatgatgtcgaggtaatcaacccggattggctgaccgagatggtgagtcactgcatgcgaccagagattggttgtgtcggggccaagctctattacagtaatgatactttacaacatggcggagtgattctcggtattggtggtgtagctggacactcccataaacattatcctcgccaccatccgggctatttcagccgtttgttgttgacacaaactctctcggccgtcacggcggcttgcctgcttattcgcaaagatatttatgaggaagttgccgggttggatgaagagaatctgcatgttgcttttaatgatgtggacttctgtctgaaagtacgcgaagcggggtatcgtaatctctggacaccttatgccgagctttaccactatgaatcgattagtcgaggagccgaagattcaccggagaaactagccagatttgccagggaagtggactttatgaaaagcaaatggggtaaacatcttgaactcgatcctttctacagccctaatctgacaaaaattagagaggatttttcaatttaa

SEQ ID NO: 10897 - DNA, 861 bp, Escherichia coli
atgagatgggcaatagataagatattcgaacggggtttggtaaatgggtgggtagcatctgatgatggaaatcccaaagacctatactgcataactataagaactccggaaaaagttatttacaaaaaccttgctaattctgagcgccctgatgtaaaagccgcaggattacatgaaactggcttctgtggcttttcttttaatgcgaatctatgtggtgttagggagggggatcttctttttattgaactgattagtgatagtggtgaggagcgggtaactcattctttcttgtatgctgcgaagaaggagacacaagcacagtttgatcgttttgaaattcctcgtgatgatttttctattatggagcagtgtactagttcactattgttacattatccccatttgcttgctcttaaaatattaataattaggttgcgtcgacacaaaagagcaaagggatggcgtagtcaatttataggtgtgaattatgattataaagaaagtgattggaatcttttctattatatggtttcaactttcagagaagctatattcaatagccttaccgtacgaaacctattttccataactgacacaattgctgacttttctataccaatagagcgttgtgctgcatatgctttatttacatttatggctcatgaacgtttttcccaaacccttactccattgagtataaataaaattgaaacgattaaaaataattcaaggcagtacaatatatggggaggaatgctcacaaataggctacagttagatgattcattagatatttttcttacgagatcttgtgacgttctggcagtgaggagtcttcaatttattcaagaaacataa

SEQ ID NO: 10898 - DNA, 735 bp, Escherichia coli
gtgagtcattaccatgagcagttcctgaaacaaaatccgttagccgtcctgggcgtgttacgcgatttgcacaaagccgcaattcctttgcgtatcagctggaatggcgggcagctgatcagcaaaatactggcaataactccggataaactggtgctggatttcggcagccaggccgaagacaacatcgccgtgctaaaggcgcagcacattaccattaccgccgaaactcagggtgcgaaagtcgagcttactgttgaacaactacagcagagtgaatacttgctgcttccggcatttattaccgtaccgcctcccaccttatggtttgtacaacgacgccgatatttccgcatcaccgccccactccatccgccttatttttgccagaccaaactggcggataacagtacgttacgtttccgcctgtatgatttgtcgttaggcggcatgggcgcattactggaaacagcaaagcctgccgaattacacgaaggcatgcgcttcgctcagattgaagtcaacatggggcaatggggtgtttttcactttgacgcccagttaatctccatcagcgagcgcaaagtgattgatggcaaaaatgaaaccatcaccactccccgtctgagcttccattttcttaacgtcagcccgacggtggagcggcaattacagcggattattttctctctcgagcgagaagcccggaaaaaagcggacaatgtgcgcgactga

SEQ ID NO: 10899 - DNA, 813 bp, Escherichia coli
gtggctggaatcagctatgactggcgcgatagcgtagaagcgaaaaaacatgagaaagatggcagtatcacccattatgacgacaacaatcagtcagcttttaactggcaggtgatggggaaataccactttgccaatgaagacacgctggcgctttcgtactatgaccgcacacgctttccgacgctgaaagaacgctataccacgtccaaacctgcgtataaccagatagcgattgttaacccgcagctcaagccggaacgcgcgcgcggggtggatttaacctggaatggtgccttcacgcacgactggggatttgaggtcagcgtttactataaccgggtgagtgatgccatcctctcgcacaatatcgatgccgataccattcaaaatcagaacagcggcacggtggattacagcggtctggatgccggtattaaggggaaaatcagcaatatactggatgtaggattgagctacgccctgatccacgctgatgccaaacgtaaagacatcggcaagataaccgatctgccaacgcagacaatgaccgcatggatgactctcaaaccgtgggagccgttaagcgtaacgctgtcggaagaggcgcgttcctccagctacagcaacagtgacggttcacaaaaagccgccggttttgcggtgacccacattcgagccgattacaccttaggtcatggcttcagcgttaatgcgtcggtcaataacctgtttgataccaaatatgcctacagtgaagggtttattgaagaaggtcgcaatttctgggctggtatcgagtatacgttctga

SEQ ID NO: 10900 - DNA, 609 bp, Escherichia coli
gtgaccgccgccgctcacatccagctcgccgtcctggttcaccaccgcgttattacccgcgatttcggtaccggtcgagccctgtccgtcaacggtggtattgccactgttgttggccgtcgcatcatcacccgtaatgcgggttccggtgccgccatcaaggatcgtgttgtcaccgtcgttgttgacaaccgccttgtcgccgtcgatctgaataccgatggaatccggatcggtgacggtcatgccgcctttgttgtccaccgtcgcgctgtcgccggtgatatcaataccgtgaccgccgccgctcacatccagctcgccgtcctggttcaccaccgcgttgttacccgcgatttcagttccggtggcgcctgtgccgtcgacgatggtttttccagtgttgtttactgtggcattatcacccgtaataacgagctcaccgttgtgattatattgccacttcgttgcaccatctgcgcttatcccttcaagggcaaccgtgttatgcgtttcatcaatctgccaaagattaatagtcgccttacgcccattgctatcttgcagagaaatagtcccgtcagcattctcggtataagtaaaaactga

SEQ ID NO: 10901 - DNA, 1170 bp, Escherichia coli
atgaatttacatgagtatcaggccaaatcgttactggctggcatggggatgccgtgtccaaaagagatagccatccaacagatttcgcaactggcagatgcctggcaacatattgcttgcccgagtaaaggcgcggtacttaaagcgcaggtacatgctggtgggcgcggtaaagctggcggcgtaaaagtgcttaagcagctgccggaagcacaggcttttgtacagcaaatgttgggatcgcaactggtgacttatcagaccgggccagaagggcagtatgtcagcagtattttgctgtgcgaaaacatctatccggtacgccaggaactctattttggcatggtggtggatcgtgaaagccagcgggtcacgtttattgtcagcccggaaggtggtgtggaaattgaaaaagtcgcccatgagacaccggagaaaatcagcagtgtcagcattgatccactgacaggcgtgcagccttgccatatccgcgaaatgtttgctgttctgcaactggaacacgggctatttgctacctttagtcgcctggttaatcaggcgtggaaagcctttaacgaactggatttcgccctgctggaaattaaccctctggtgttgcgggaaacgggcgaatttatgtgtgcagacgcgaaagtatcgctggatgataacgcgctgtatcgtcacccggaactccaggtgctacgtgatgaaacccaggaagatccacgcgaaagccaggcagcgaagcttgatcttaattatgtctcgctggacggaaatatcggctgcatggtcaatggtgcagggctggctatggcaaccatggacatcatcaagctatacggtgaacaacccgcaaacttcctggatgttggcggtggcgcaacccaggagcgcgtcagtgaagcctttcggctgattgtttccgacagcaaagtgaaagccattctggttaatatttttggtgggattgtccgttgcgacatgatcgccagagccattattcatgctctgaatgaggcccgtatcaccctgcctgtcgtggtgcgtctctccggtaataacgctgccgaagggaagcggttactggcagaaagtggcctgacggtggaagccgtcaattctctggatgatgccgctaaacgcatcattgcgttactgaattaa

SEQ ID NO: 10902 - DNA, 204 bp, Escherichia coli
atgcctcattttgttcacatctatgttgaaattagtgatgtgaccgagctaaggactctattaggagtagagcggccatattgttcgtctgaacagcctgtagacagctctattattgagacatggtatttttcgtggtatctgctaagtggtttgtttcaatgcattgatttatttatattttattttctcattgatagctga

SEQ ID NO: 10903 - DNA, 1470 bp, Escherichia coli
ttgaaagtaagcgagttatctagccaaattggccgactttacggcttaaacaacatcaacataattatgggccgaaacggtgcgggaaaaagtcgtttccttcgtgatatcgaacaaacaatcagccagaacaagcagcaattttatgtccggtatgtaagtccagagcgagcaggatcgttcaagcgtgatggcaccgtcctcacaaatatgagcgacaaccccgaatggctgaggcacactcgggcagttaatcaggcaagcaacttcaaagctgcatcggctatgctatttcgcgaggccgagacgctttacttacgtcgacttgccaatactccggaaattcgaactgatctaacgcgaaactttcagacagaccgattaagtaaaattaatcagcttctcactaacatttcgctcgagatgggtaatgtcgattatgagtttcgatcacttgtagatggtcagattattgatccggcccaaatcagtagcggtgaatcggaagcggttgcattagccgcggaaatcatctatttcttcgacacaatagatccggagaaattcaacgtactcctcctcgatgagcctgatgtacatctgcaccccgacctccaagctagactgggcaagctgataatcagtatgctcgacgaatttagaacacacgcgaacagtattgccatatgcttatccacccatagttccccgctcgtctgttctcttgccgcctccccatatgtatcaatcggcacgaagagctttgcagtgaatgaaatctcattgataccggccagcgatgaacttcgaaagattgcaccattcttcgggcaccccctatcgctttctcttagcgaagacgctgcattaattttggaaggagaggacgacgaacgagtctggcaacaagcggccagaacatcacagggtcgaataaaaatctttcccgtactagcaggtagcgtagatcaacagagtcaacttgaggatttttgcgtagacctccttagtacactctatgacaatccaatcgccttttcccttcgtgatggcgatggtgtaatcaacgagtcgcttgaacatcgcctacctcttaaacgctatcgcttacgatgctacgctatcgaaaatgttcttttgactgattcatgccttgcagtaatgaatgttacatgggtggaatttgtagacgcagccaaaaaatgggttgaggataatcaaacacactccgacatagcgttgattgcaaaactaatggaatcgaacgaccgattgcgtcacaagaagatcaagaaaatccgccaactcgtctgtgctattgttgagtgtaaaaaaccttgggaggtagtagttggacaagcaatcggggcattgaccagagaagaccttgaaaactcgaatatgttgatcgattttcttggaggagagatggtcagcgacgtcatcttcagggacgcaataaacccatga

SEQ ID NO: 10904 - DNA, 396 bp, Escherichia coli
atgaccacgattgatccgccctcatggtatcagtatttattttataacccgcctctcaatacaccaagagattgcggtaaagtggagcagcatgattaccagctttatctggcgataaatgatattgagcatacgaaaacgaaagcaatgtcatctaagaccaatagtatctgcgagcagttccataaaacgatactgaacgagttttatcaggtgacgttccgcaaaaagttatatgatgatcttgaagcattacaatcggttcttgatgaatggcgggttcactataataatgagcgaacccatcagggaaaaatgtgcagtggccgaacgccgatggaaacgttacttgatggaaagcacatctgggatgagaaaaacttaagccagatgtaa

SEQ ID NO: 10905 - DNA, 771 bp, Escherichia coli
atggaaccagagaaatttgctgaaactgcaataggatttaccaaaagccctcttggtatcattgcactctttattgttctcgtttatggatttgcctctttcgtcgttggctttggtaatggcttatcagagcatatagctccccttatttatttcatggttttctttcctgtcattgtgtttcttggctttctctggcttgttgcgaaacatcataataagctttacgggccgtcagatttcaaagatgaaaataattttttaagagcgcaaatagctacagcagcatcattgaccgccgccacagcaaaacagcctgaaaatagtgcaggggtcactgaaagccaactgcgaaaaatcgtcaacgttgtatccaatgcaaaacggcagagtaagcatgaaaaatggcgaaatcgtattttatgggtggatgatcgaccagaaaataatgtttacgaaagacaggcatttgaggcacagggaatagagttcgctttagctctttcaactgacgaagccttagaattgttaaaaacaaataagtttgcagctattatttcggatatggatcgcaaagaaggggcgcaagaaggttatgtcttactagaaagattacgcgcaatgggagacaaaactccttttatgatctatgcgtcctcagatctaccagagcacaagagaatggcgagagaaagaggtgcaattggctccactaatcgagcagaagaactctttcaaattgtcatgggtgcgattaccaatggctcataa

SEQ ID NO: 10906 - DNA, 405 bp, Escherichia coli; identical to SEQ ID NO: 2569

SEQ ID NO: 10907 - DNA, 174 bp, Escherichia coli; identical to SEQ ID NO: 4526

SEQ ID NO: 10908 - DNA, 243 bp, Escherichia coli; identical to SEQ ID NO: 8603

SEQ ID NO: 10909 - DNA, 306 bp, Escherichia coli
atggaaaactgggttattcaggagctaaaatcactggatataggggactcaagacttgataaaagagtaaaacatatcctcaatagcctcagtcgttcaccagaagaaagtattcctgtttcctgccgtacctggagtgaaacaaaggcagcttatagttgtttttcaaacgataaagtctctgctaataaccagacaggagtaaccagaccaaccgaaaacaccggggaggtgattacccgctggcagaggaaatccggtttttttgatgtcagccataacgtatttgacaataaagcattatga

SEQ ID NO: 10910 - DNA, 921 bp, Escherichia coli
atgttcttaacaaatacatcgcgttttttatttttatttttatttcttatgcacaagaataaattatatgcatatgataatttctcattcaatgcggatgtacattatggttatggtaagctattatggcatgataaaaaaccagtcatatacccattggcatccttatctgattatacttattataacgaattcgacccatttgaaacgatttattatgtggggcaatactataaaattagcttaaatgagagtaagcgaattcaagaacaaaaggacatttacgcacatcttcaattaaaacataataaatcattaattacagcaaatgtaacgttacataataaaagtaatagttcgtattatgttcatcggatgaatttaccagcaagcatccatgaatcaccttactctcctttgtgcagtggttcttttttaatcgtaacaaataacattcggttagattatataagaaaaattacatgccgatttgatttgtggatgaaaaaatctgactggatagaaatatcacccggagaaaaactctcatacacagtaaatttgaatgactattatgcttttctccctgcgaagcatcaatatgatataggaactgtagagttcacattggtaaatagtaattggttcttagagcagcatatttatgatcttttttttgctattgtggatgaacgacactataagcagtgtaaaaacacttctggcattgttaggaagtatatctataagtcgtggcagttatgtgagacttatcgtgggaggtggagccctttacaggaactcatgaatcgatttcattatgaaggagggagtgaaaatatatttcaaataagaacaaatcaagaaaatataaacattaatggagataaaattaaatctctttattcatcgatgcagtga

SEQ ID NO: 10911 - DNA, 846 bp, Escherichia coli
atgaaaaaactaccaccaaatctctttttccgacttaatagagcagcaaatttattagaaatagaagtcgatgatcttctacttatgggagtatcaggctctatatttttgagcacaataattcaccagtatgaaggtgtactctatcaagcgggaaacttgccaccagaccacggcagcaaagacatagaaaacttattatttggttctattatttctactagagaagataccgaaagatatctaaatgaaggtgttttcgatggtatgaagtgcttagcaagtggattatggcacgttcctagtgatttcattgcttcccttgcaggggttaagagagcccctgacattccactcatattctcaccagcatatataaaaaaagaactagatatcacatcaggacgttactttttctacgattttcgcgaacatgataccaccgtatcgtctgtggaagatttgtatatatcaagaccgtgggttgaatatatagctgaaagcatggataaaaatcagccaatacccagcatactccatttgggttcacacgatctttatgaaaaggaatttaaaaacatagagcatggaaatagagcacgacatagcctgaaccgtgagaatagcattatggcgttgatttatgtgaaacggcactatccggaagagtgcaaagggaaaaacgggaaagaaaccaacgaagcgtgggcaaacgctacgatagaccactggccacatgtgggtggcgattatgatgaaccatctacagattatttaaagaagatcatatctgacatggacagattgccggaaaaacgtaccacggcaggaaagaagaaatcatga

SEQ ID NO: 10912 - DNA, 195 bp, Escherichia coli
atgctggctactacccctacccaaaaaccgcaatttatctggattatcgccgcagttcgccgcgattgcccgacaattaccgccaaaattcatcatattgctgccgagtctgaacgcgatgctcgccgttctctggtgcgcgatcacgtctgcttttttgctggtcgtatccgcatggaggtggcacatgattaa

SEQ ID NO: 10913 - DNA, 186 bp, Escherichia coli
atgcgccttatcaaattaagcgaagtcatgctcagaacgggcttcaagaaaacggcaatctactcatgggttaagacgggcacgtttccacagccagttaaaattggtagatcagctagatggtcgcttgaggaggttgaagcttggatccagaacaaacttgattcgcgggctggcaaccaatga

SEQ ID NO: 10914 - DNA, 192 bp, Escherichia coli
atgacaccacgagaaatcgagctgctgaccattgccaagctggagcatgacggccaccagctcagcccggcagaactgcgggaattaaggcgccagctggcagagggccctgtaatagccaggcggtaccgcgaaatgatgaccagccacgcatatcgctggagcaaaccagcgccgctccgtgcgcggtga

SEQ ID NO: 10915 - DNA, 765 bp, Escherichia coli
atgactacaacggtatatgatcgtgttaacgccttagtagcgaccgactctaggtggtctgttgatcttagcccacatggctacgatggtcatatcctgtatattgacgacaccggcttcggtaagctagctccacgaaatgattttgttatgcttttagccggtgatggtcttttgattcagttatggaagcattggtggcgaggagacctatctcaacaagaaccaccagttgttttacctactggtcaatcggtaaatttacatattgtgaaaaaatcaactaatgaagtgatttttgataaaggtcaaaaattagttgtaaaaaataacgaaacggaagaactgttcgctgtctttacaggctcaggatgcggtgctgctgcgcaaaactggatgtatagccattgcgcaagatcagcaattgaagaatctaaaaagcttgacccatacactggcggcactgtacgttttttagacttcaggactaacgcatcattagtagaagactctgtttcaaccattagcgaagtaaacgaagctctattgcagagggggctgattatggataccaaaaacccacattcaccacacgtttctatcagtgcacaagaagttgctgaagttcgtcaaatgctggttagtggttcaattaccccatgtgcaccagtaggccaaagaacccaagattgggatgacaactccaaattgcgtttagcaaatgctattcagcgtattcgtgaagaagaagcacaaatgcgataa

SEQ ID NO: 10916 - DNA, 1008 bp, Escherichia coli
atgaaaaaatggctccctgcttttttatttttatccctgtcaggctgtaatgatgctctggctgcaaaccagagtacaatgttttactcgtttaatgataacatttatcgtcctcaacttagtgttaaagtaaccgatattgttcaattcatagtggatataaactccgcatcaagtacggcaactttaagctatgtggcctgcaatggatttacctggactcatggtctttactggtctgagtattttgcatggctggttgttcctaaacatgtttcctataatggatataatatatatcttgaacttcagtccagaggaagtttttcacttgatgcagaagataatgataattactatcttaccaagggatttgcatgggatgaagtaaactcatctggacgggtatgtttcgatatcggagaaaaaagaagtctggcatggtcatttggtggtgttaccctgaacgccagattgcctgttgaccttcctaagggggattatacgtttccagttaagttcttacgtggcattcagcgtaataattatgattatattggtggacgctacaaaatcccttcctcgttaatgaaaacatttccttttaatggtacattgaatttctcaattaaaaataccggaggatgccgtccttctgcacagtctctggaaataaatcatggtgatctgtcgattaatagcgctaataatcattatgcggctcagactctttctgtgtcttgcgatgtgcctacaaatattcgttttttcctgttaagcaatacaactccggcatacagccatggtcagcaattttcggttggtctgggtcatggctgggactccattgtttcgattaatggcgtggacacaggagagacaacgatgagatggtacagagcaggtacacaaaacctgaccatcggcagtcgcctctatggtgaatcttcaaagatacaaccaggagtactatctggttcagcaacgctgctcatgatattgccataa

SEQ ID NO: 10917 - DNA, 522 bp, Escherichia coli
atgaaaaagataagaggtttgtgtcttccggtaatgctgggggcagtgttaatgtctcagcatgtacatgcagctgataatctgacctttaaaggaaaactgattattcctgcctgtactgtacaaaatgctgaagttaactggggtgatattgaaattcagaatctggtacagagtggcggaaatcagaaagactttaccgtcgacatgaactgcccctatagcctgggaaccatgaaagttacaataacatcaaatggtcagacaggtaattcgatactggtgcctaatacttcaaccgcttctggtgatgggctgctcatttatctttacaatagtaataacagtggtattggtaacgctgtcactttagggagtcagtttacgcccggaaaaatcacaggaacagcaccagccagaaagattactctttacgcaaaacttggatataaaggaaatatgcagagtttgcaggcgggaacattttctgcaacggcaacgctggttgcatcatattcgtaa

SEQ ID NO: 10918 - DNA, 564 bp, Escherichia coli
atgattaagtcggttattgccggtgcggtagctatggcagtggtgtcttttggtgtaaatgctgctccaactactccacaggggcagggtagagtaacctttaacggaactgttgttgatgctccatgcagcatttctcagaaatcagctgatcagtctattgattttggacagctttcaaaaagcttccttcaagcaggaggcgtatccaaaccaatgaatttagatattgaattggttaattgtgatatcacttcatttaagggggtgggaggagccccggcagcaaaaaaagggactgtgaagctggcttttagtggtccaagggtttctggtcataatgaggagttagataccagcggggggacaggtactgcgattgtagttcaggctgcaggtaaaaacgtttctttcgatggcacagaaggtgatgctaataccctgaaagatggtgataatgtgctgcattatactgcgattgttaagaagtcgtcagccaataatgcccaagttactgagggtgctttttctgcagtcgcaacctttaatttaagttaccagtaa

SEQ ID NO: 10919 - DNA, 192 bp, Escherichia coli
atgcttggtaaggtattttttgtggttttgtcatgttctttgttattaaacccactagctacctatgctagaaattatccctgctcagggaaaaagggaggtgtttctcactgtacctctgatggcaaattcgtttgcaatgatggaactattagtaaatccaaaaaaatctgtactaaaaactcacgataa

SEQ ID NO: 10920 - DNA, 570 bp, Escherichia coli
atgaatttggagaaaggcggacgaggcgccatagagcgcatggtagaagcttatggattcaagactcgacaggcgttgtgcgatcatttaggaatctctaaaagtacactcgccacacgctacatgcgtgactcattcccagcagaatgggtaatccagtgcgcccttgaaacaggcacctcgcttaattggctcacaaccgggcatggttcaaagcaaacttcaggtaatacaaatactatggaagttgctaaatatgtattatctgatggggccttgtgtgaagacggtttttatattttcgatagagaatttctaccgtcggcattcaagaatctttttgtaatcacagataataattctgaatttatttgtgataaggaatttgatgatatacgtgatggtaaatgggtaataagtattgatggcgaaataacgatccgtgacattactcgtttacccggtggaagaatcttcgtcgagggtggaaacagagcctttgaatgtaagatagaagacattgaaataattggtaaaattataagtttaacagtcaagtatgttaaatag

SEQ ID NO: 10921 - DNA, 426 bp, Escherichia coli
atgaaaagcttttacgtattaattttaattctggttgcaagctttgttagcgtcccagttcaggcggtaacagctaaaaactatgagaaaggaactaaagctcaacagaaatcaatatcttacctttcatgtgcattctatggcagtagcacacaattagatcctagctacacggagcaagtacctacagccgatatcaagatattacagaaagcagcttaccacgcttacaacgatgcgctctcatactttggctatgaggaaccagatcacgaacaacgcataattgattatgctgaatttgtggcgtcgcaagaagctgtgttatgggataagccgggaatgaatggaaagcaggtaacactaattgctcgttctctctacaatgagagtaactgtaacttgttactggactcaattaagtag

SEQ ID NO: 10922 - DNA, 1107 bp, Escherichia coli
atgacaggaaatgtcccagtagtacttagtgaagcagaaatgaaatccattttgacactaatcacgagatttccatggaacgtggcaaaacctgttatttcagctcttggattagctcgtggtaaaggtagagatgctactcatggaaaaatactggaagaattaacagaattaaaggaaaagaatttaaataaatttaatgatatcataaggtctgtaaataatttgatatttggtcaattggtctacggtgataaagcttttttttgtttatcagtagacaaccaaataatttcctcgctaacaaaggctatgaaattaaagtgggatttatctgaacagccttctgtcgcctcagatgtaatcctttctgagcaggaaattaatgcgtcggggaagaataaaataaacttagttcattattctgagagcaataatcaggctttagctctatttagttccgttagagagcaaaaaattagagagcggatttcgcctaaaagtttaccgcagtacagtggctacgaagagatcattgctactaaaaaagaaaagcatcaatgttttgatgtgtgcatttttaataagaccaactctactatctctattttgatagatgcaggtattaatacaataggtgagagcgtcttgtttgcaaagagtactgtagtaagagaactttataatattataggtgctgagtttgcatcaaaagaaagagatttctttcccttgattgaaccaatctttaagcaagatcaaaaaccatactcaactcttaattataaagtttttgagctttcattccttacccctgaagggacaacacataaggaaaggaaaactgactccactaaagatttgagacaagatatcttcaatcaagaaggtattaaagccgtaggcaatatcggactttataggataggcatcagggttgagcgaacaaatcctttactacagttagcggacaatgtagaacttactataccaggaacgctaagacggtaccttggtggaagctctggttcaccagtgaattttgctatacttagtaaatgtatctctcgtgatgatttcgaaacgcttacgaagctgatactatag

SEQ ID NO: 10923 - DNA, 429 bp, Escherichia coli
atgaaggatgctaacttggcaaagactatacaagacatatgctcagaacgcccagaagtgggagttttggcgtgcatgttttatgaaaaacttgctaagttagcagctcgctctcctaatatattcattagttataaccttttatttgatatagcgatttcgaataaggggggcgctaaagtggatgagcatgatatttacttggctatccaagttttgtgtaatccaaaagttaattttttgaaattaaactatcaatttatagacgatggtttcgatccagttaatataagcattgcggacgtgattgatgctgaagataatcaaggtttagagcatccatatactggtgagattgtgccagactacaaaaaatatgtatttcctttctttacagttattaatttcacaaaggaaggggcgtactaa

SEQ ID NO: 10924 - DNA, 648 bp, Escherichia coli
atgcttacaagtctggatgatttggagaaaaactttcatttgcagaaggttcactttgccattcaaaggattcaatttgcgttggagtcctattctaatttcaacagtcttgttcgaaaggagctggattacgctgtaagtaaattagagcaaaatggcaataaaattaactttgatctctctgaagatcagttaactctatatttgctttcgtatgttgaaaatagatatctggggctcgaagccagtcacgagaagaaccagagaggacattgtgatatatctattacccttgcagattatatctggcatggggaagctaaaaaacattcttcatatttatatctttttaaaggttatgcacaacttaccgagcggtatagtactgggactataaatagctcttcgggtggtttaattatttatacgaaaaacgcttcctgttctgacatgatggattcatggaaaacattcttatcaaagaatgcacctaggattcatgcttgtaaatccgttaatattattgattgcccaaaaaaccccttggttttttatagtcagcaccttcatactgtaagtaagctggattatcaagttgtgcattatcctgtatcattacatcataaacctatagaccctgatctatag

SEQ ID NO: 10925 - DNA, 453 bp, Escherichia coli
gtggctgaactgcagaaagtggacgactggctgagtgccttgctggcgaatctggagccagccgcaagaagccgcatgatgcgccagctggcgcaggaactacgccggacacagcagcaaaatatcagaatgcagcgcaatccagatggcagcagttatgaaccgcgacgggtaacagcacgcagtaaaaaaggccgtatcaaacgtcagatgtttgcaaagctgcgcaccacaaaatacctgaaaacttccgccagcgccgactctgccagcgtgcagtttgaaggcaaggtacagcgcattgcccgtgttcaccactacggattgagagagcggataggtaaaagaagcaaaagtattaaatacccagctcgcagattgctgggacaaacccaagagagtaaccagataattctaaacactctcttgaggtggatgacaaaagataactaa

SEQ ID NO: 10926 - DNA, 1521 bp, Escherichia coli
atgagttgcttagatcaattatcttcagaaaataaaaaatccctattatcatcagtattttcaaagagttatttcctctggattggctctggattttcgtacaatttcggatatccaagttggggggccgtacttgaagaaatagcaaagcgaatagagtacccgttaaaattagattcatcacagcctctgcgtgctgcagaattacttttaagttatgcgatgagtgaatcatcaataaaagaatatgatttcaattcgctcgttgccaggacgattatagatttaaaaacagaaactaaagaaccaagatggcttaaaagattcaaactcttcgctcccaatacaattgtaacaactaactgggatgaggtgcttgaagaaacatttgagcatatggcaaataaaatcatcagaaaggatccattccctaaagtatcaacaaaagggaaaaatatcttcaaaattcatggtgacgtcggaaaacctgattcgattgttataacacaaagtcaatacttttcttttcagcgcgaagacacttatcttagccgaaaaatttacacattgttttcagaaatgtcccctatattcatcggttacagcttaaccgaccccaatataggtttcctttatgaagaagcattagcacatctgcatggaaaaaacccgccagcattcatggtaattcacccagatgcaaaccctttaactttcgaggagacaaagtatttatttaaatcaaaaaatatacacctgattaaagcaaccatagaagacttccttgcagatttatctcaggaatataaatcctttaaagaatcacctcatcgtttcaaccttgagcacgaacatgttcttcccaaaataaaaactgtaatggataccgttacgaaaggaaaaaaaaataaaaaagcggaactagaagccttatgtcctcaaagagctgcaagctgggccgtgacaaaagccataattgacattctaaagaaaccaatattgtacattcaattcggcggaaaacttctttctccagacaatattatcccctacagagagttcgatgctttagttaatgtagtcataacacttagcaacaatcacggttaccctgacgagcttatacgtcaagattttcatgcttctgttgtcaaaatgtgcatcgaaacagaaggggtttgggacttcaactatgctgaagtacctttctctaacattttaagaataagccctagccccggcactgaaagtttcgacaaaaaaatatcccatataatagaaattatgcgatggtcgtccccatctgaaatagggaagtgctgggcaacatggaatgtatttaaagaaaaacaagattggattagccacagtgatattgttggcattctttcgaaacttgaaaccgatggtgacttagaataccaacccagagataaaaaatggctaaacatcctgaaaaaatgccctcacgcaacggctgcagatatcaagagaattgatactctgataaccccagcttag

SEQ ID NO: 10927 - DNA, 579 bp, Escherichia coli
atgaacgcacaactaaccgaaatcatgcgccttatcaccaacctgatccgcaccggcaccgtgaccgaagtggatcgggaaaactggctttgccgggtgaaaacaggcgacctcgaaaccaactggattaactggctgacgctgcgtgccggtggtgcccgtacatggtggtgtccgtcgccggatgagcaggtggtggtgctgagcatggggggcaatctggaaaccgcttttgtgctgcccgccatctactccagtcagtttgcgcctccgtcggattccgtggacggctgcgtgacggagtacccggacggcggcaggtttgagtacgaacccgccaccgggcgatggtacgtccggggtatcaaatccatggtgatcgaggcggcagacaatatcaccctcaaaaccggtcagtttgtggtggaggctgacaccacgcgcatcaacagcgaggtggtgatcaatggtggcgtcacccaaggcggcggcgcgatgagttccaacggagtcgtggttgacgaccatgagcatactggcgtcctgaaaggcggcgatacaaccggaggcccggtatga

SEQ ID NO: 10928 - DNA, 1401 bp, Escherichia coli
atgagcacaaaattttataccctgctgacggatattggcgcggcgaaacttgccagcgccgccgcgctcggtgtgcctttaaaaattacccatatggcggtcggcgatggcggagggacattgccaacgccggacgcaaagcagactgcactggtaaatgagaaacgccgggctgcgctgaatatgctctatatcgacccgcagaacagcagccagattattgctgaacaggtgatccctgaaaacgagggcggttggtggatacgtgaagtgggcctgtttgatgagtccggagcattgattgccgtgggcaactgcccggaaagctataagccgcaactggctgaaggcagcgggcgcacccagaccgtgcgcatggtgctgattaccagcagcacggacaatatcaccctgaaaatcgaccctgccgtagtgctggcaacccgcaagtatgtggatgacaaggtactggagctgaaagtgtacgtggatgacctgatggcaaaacatcttgccgcacaggacccacattcacagtatgcgccaaaagccagcccgacatttaccggaacccccaaagcgccaacgccagcggcagggaataacaccacgcaggttgcgaccaccgcgtttgttcaggcggcactgacggcccttattaatggtgcgccagccacgctggacacgctaaaagaaatagccgcagccattaacaatgatccgaatttcagtaccaccattaacaatgcgctggcactgaaagcgccgttgtcgagtccggcactcaccggaacgccaacagcacctactgcggcacagtcggtcaacaatacacagattgccaccacggcttttgtgaaatcggcgattgcggcaatggtgggttctgcacctgctgcactggatacactgaacgaactggcggcggcactggggaatgatccgaactttgccacgacaatgcttaatgcgctggcaggtaaacaaccgctggacaatacgctgactaatttgagtggaaaggatgtagctggtcttctcgcataccttggtttgggagaagcggcgaaaagggatgtgggcacaggagataatcagataccggatatgggtagcttcatgctttctgtttcaagtgttgggtatcaaaaattgccatccggtttgattcttcaatggggatcaatcggtactacagacattcctaaagatttagtaactcatttcccgattgcatttccaaacagatgtctgcgtgttttggtctcacaagactacacaccagatagcggggctgttggttatattgcctgtgcaggttttagtgccgacccagttaagtttattaccagagccaaccaaccaggcctcggcgcttcatttttagcgttaggctgttaa

SEQ ID NO: 10929 - DNA, 399 bp, Escherichia coli
atgccaaattctgtcatcgacagctggtccggtatggtgtttttgaagttcaacggcgcgaaattctctgccactgattatcctgtgctggcgaaagtgtttccttcgctggtattacctgaagcccgcggtgatttcattcgtatctgggatgacgggcgaggtgcagacggtggtcgcgaattattaagctggcaggcagctacaaacttttctcagcgtgccggaaatataggcgaaggtgcgggacacgcaattaactttcatgatggcatcgccggaaatcagccaggattttcacgatttaatttcaccagtaactctgtgggtgatggtgtgaattttgttgctgtcagaccgcgaaatattgcatttaactttctggtgagggctaaataa

SEQ ID NO: 10930 - DNA, 456 bp, Escherichia coli
atgagaacccatcacaccccagcagaagactcggccaattttggaatgctggttaagaccttcacccacgcagtgaaagacatccctttatgtggccctaaagcggatcaagaggaataccataatgcgctgaaactgatcgaatttttagtcgatcgtgacgatctggaaaaccctttatttgaattactctgcgtgcggatccgcgaatatgaaaataacgctccagaatttcagcattttaatcagagattagcatcgaccccgtgcggtgtaagtctgttacggatccttatggatcaacatgggcttaaagcggctgatttggcacaagaacttggctctaaatctaatgtgagtaatattcttaatggtcgccgggcgctcaccgttcgccatatcaaggcgttaagcgagcgttttaatctcccggctgaagcgtttattgataagtaa

SEQ ID NO: 10931 - DNA, 363 bp, Escherichia coli
atgcatgtcatcagccacaaaccttttaacgaggcgataaaacgctttccaccttacgaaggtgcacttattgatttattaaatcttcttgagaaaacagagtttagcgatccgggtgagatgaagagatatattccctcactggataattttaaatacagagataaatggtgggttattaatattgcaggtaatcatttacggcttatcgcatatattgatttcaggctccaaaaatgttttatcaaacatactgttatctacaatgaatacgacagattcacaacctggcaccggagccataaaaatgagaacccatcacaccccagcagaagactcggccaattttggaatgctggttaa

SEQ ID NO: 10932 - DNA, 1839 bp, Escherichia coli
atgattaaaaaagcttcgctgctgacggcgtgttccgtcacggcattttccgcttgggcacaggatactagcccggatactctcgtcgttactgctaaccgttttcaacagcctatcaatactgttctggctccgacggatattgtcacgcgtgaggatatcgaacgctggcaatccagaaccgttctggatgtgatgcgccgcttacctggtgttgatgtcgcacagtatggcggcatgggacagagttcttctctttttatccggggaaccgaatcgaaacacgttctggtgttagttgatggaattccagtagcacgccctggtatatcgaatagctcagacattgaccagatcccagtctcgctggtccagcgtattgaatatattcgtggcccacgctcggctgtttatggctctggtgcaattggtggtgttgtcaacatcatcactatgacgaataaagagcgttcgcaaattaactccagtatcggttcgaaaggctaccaacagtacgatggcacataccgccagcgttttggagatacggtggtgactgctgcaggggcttatcagacgaccaaaggtttcaatgttcagccacactcaagttatagcggagatggcgatcgcgatggttatcgtaacaagctgttctgggggggaattgagcacaaatttaacgatcaatttgatggttacttccgtggctacggttatgccagtaatgccgattacgaccaagggaactggggatatgatggcggcaatgatgagcatcaaaattacacacagtcatgggatactggattgcgttttaattcgggagtctactcttcgcaactggtggtaaattatcagcgcattaaggactacaactacagcagtctgactgggcgttacgcatcaggttatacacttgatgatatggagcaacgttacatccagtggggtaacaatgtcattgttgggcatggtgctatcagcgcaggagcagactggaaacaggaaaaactgatgtcttttggcgctaatggcacggataactacaagcgtaataacactgggctttatctaaccgggcagcagcaaattgataacatcacactagaagcctctggtcgtgaggatcacgatggccagctaggttggcatggcacttggcaaacggcagcagggtggcagtttgttgatggttacaaagtaacgctttcctatggaactggtttccttgctccttcgcttggtcaacaatttggcgcagagcggtttggtattgcttctaaccctaacttgaaaccagaagaatctaagcaatgggaggcaggattagaaggcttgacaggtcctgttgactggcgattgtcgacctatcgctacaaaattcagaacctgatcgactacaacaacaatacctattttaacgttaaatccgcgaccattaagggcctggaatggacgggtaatttcacaactggtcctatcgatcatcgtttaacgttgcagtatgtagacccccgtgatgatgaaactgatcaacaactctatcgccgtgcaaaacagcaggtaaaatatgagttgagcggtgaggtttacgagttggggtgggatgtcacgtatcagtacattggtgaacgatacgattacgactatgacagtacccgtaaggtgaaaatggggggactgagcgtgtgggatatcggactttcatatccggtcacctctcacctgacagttcgtggtaaaatagccaacctgttcgacaaagattacgagacagtctatggctaccaaactgcaggacgggaatataccttgtctggcagctacaccttctga

SEQ ID NO: 10933 - DNA, 1029 bp, Escherichia coli
atggatttattagctgagagtattactgaagtcgctgtctctggggaaattgctaacaccgatcgtgtgttaaatatcgcttacggtattgaccgtaactttttatttggtgcggcagtatctatgcaatcagttgttatgcataacccggaccttgcggttaagtttcatctctttactgactacattgatgaagattatctacaacgtgttaatgcttttaccagcaaaaatgctaacgttgaagtaagaatttataaagtatccagtgcctttattgatatcttccccagcctgaagcagtggtcttatgcaacattcttccgtttagttgcgttccagtatctgagtgaaactattgaaaatctgttatatatcgatgctgatgtcatatgtaaaggctcattagctggattgcttgatattaattttgatggcgataagttcgcggctgttattaaagatgtgccttttatgcaggaaaaacctgcgaagcgtctggctatagagggacttccagggaattatttcaacgccggtgtagtatatctgcagcttgaagcatgggcgaaaaatgattttatgaataaagccattgctatgctggcaagtgacccgcagcacacgaaatataaatgccttgatcaggatattttaaatattctgttctttagtcattgtatttttattagcggcgattatgattgcttttatggcattgactatgagttaaaaaataaaagcgatgaagattataaaaagaccattaccgatgatactaagctgattcattatgttggcgtaacgaagccctggaacgactggacgaattatccctgccagaagtattttaatgaggcttatcaggtttcttgctggaatgatgtggcgtttattccagccacgaatgaaaagcagtatcaagtgaaataccaacatgcaaagaaaaatggtgatacgtttaacgcttttatttacttcattaaattcaaattaaataagtataaaagaaaactatttgggcaataa

SEQ ID NO: 10934 - DNA, 1710 bp, Escherichia coli
gtgcataaagaaaattcttcgagcgatttatttgaaaaaattaatgcaatattgaatgctcggatacatcataaaaagaaaaatacattttatgttgaaccatctactgggaagaatttatctgacttgttaagtgaagatgatttagataatattgcttttttggcagaaaagataactcatttacctgtacgtggccgattatatgatgtgttgtggctttataagaaaccaaggcaacgtgattttgcttcagaggcattaaatgctttttcatccttagatatcaaggaagataattggtatggatacgtaaaggatgttttctacagagctctttatttaccaaagttcactcaagagttctcggcgtatgatgtgattgaatcaaaaataatggcttgttttcatgagactaataatccctacttgttctgtgaaatggcggatataataacatcaaatagcatcaaaaatgaagatgatgtcttaatcaataaagtaataaggacatttatctataaatcaaaaaaatcaaaagactatgtgtctgcttatcgttgtctaacaatattatatgagcggtataaaaatgatatcttccaaggaaatggtgatcataaatgccaattagtgaatttataccatgccagattgttagatgaagaaggaagggagtatcaaggcctgcatgcagtaaattgctttaatgaatccttgaaaaaatataaagcctcaaaaatcacacttcgtgggatctttgatgtagatgaagctattacagcattaaaagctatgattagaaaagaaggtaaacatgcctatgagtctatggcaataataaaaacagaaccattagacatttcagttgaagtaaatcgagctatagaacttgtttcagaacaaaaggatataattcattctctttacaatttttgttttattgcccatccagttaataaaaaaagaatgattaaagatacggttgaaagtattaggaatcacccattacaaagtatatttccttccatagtaactgatagagatggcagagttcttgctaaaacaaacggtgttgaaattgatgaattgaaagatgaggattatagcatagagaatattataattccattatcacaaggtttttcaatatatgtatcgctacaaatacaggcaagaattgctcctgcacttaaacaaatttgtgaagagtattatattgattataaagttattaaagatctttgtgaacattgtggatttatacccgatagtaaaatggcccttttctcgcaagccctgcattttggctttgagtacaatttttctgcatcagtgcacctattggcccctcttttagaagatataattagaaagatactttatgatcaaggtgaatactctgcaattatagataagaatgcaaaaagcactgaagtatctatatcaactcttttagataaaccaaaagctaaggaagtttttgacgagaatttcctttttgagttaaaaatgctattaactaacaacattggctctaatctgagaaatgcagtagcacacgggttattagatgacgatactgccagtgggggggatgttgtttatctctggtggagaatattaagatgggtaatgctatctgtcgtgattggtcataatgaatatcaggaactaaaaaatgctcctgtcattgaggaacctgaatga

SEQ ID NO: 10935 - DNA, 312 bp, Escherichia coli
atgagtattgactcacgatttgaaaaattcatgctttcattaccctcaatagaaagcatagattcaatagaattgagtgaggaactcagaaaagagaaaaaggctgattatttgggaatgggaaggaagatcatttttgaacaaaaatgtataacacaagagcaatctcaaaaaatcgaacttgagttagagcaatatgtcaatgacgaaaactatcctgttttctatggtgaaagggatttcaatttagtcataaaagatcttcctgtctcttatacacatctgacgctgccgacgatctactctgtgtag

SEQ ID NO: 10936 - DNA, 153 bp, Escherichia coli
atgcttgtgtggttgagcaggagaggcatgtattgtatgaggaatttttgcaatcataatttaatttctattttttttgttattttgaataagtttattattggttatgctcaatgtaataatattcagttaattatggattgcaaagagtaa

SEQ ID NO: 10937 - DNA, 585 bp, Escherichia coli
atgagtgcaatcgatactttaagggagtatgccgaagtatggcggctatttggtagtatgccagatgatgcaaccctgagtgctgaggtttcagccctttatcttggtgtaagtgtcaaaacattggctcgttatcgccagactggtaatggccctgcttatatccaataccaggcagaagacagcaaagcaaggaatcaacgagtaaattatcttttaggtgatttaagaacatggcgtgatcgtcataaggtcagcagcacaatggaggctgcacaggtccgtggactggcttttacttcattggttgactttatcgaaccggaacctttctggactattgataataaaatttattcacatgttcttactgtttctgacgaaatattcaaggaactattaaatacaagccgtgcagaagttatctggatctctgtggaaaaagttttgtctgaggactggcatactgcgagagaacggcagagatggaatgatttgtttgttggggttatgacaggattggtagatgcttgtgtggttgagcaggagaggcatgtattgtatgaggaatttttgcaatcataa

SEQ ID NO: 10938 - DNA, 1458 bp, Escherichia coli
atgaaaatgacacttactcagtcgattataatcaataagttatctatcgacgtgaaaccagatctcgaccagcaagggcgagtagcctacttacccaatcctgaacgaaagccgtatattatcactgacaaccacagggattcacccgtaggtttcggtgtcaaaatcagtgccaccaaaaaaacctatatcattcaacgacgggtggcatcagctgacaagcgacccttgacgggtggcaaggcaccgaaacaggttatcagatctacgattggtaatgtttcagattttgccaacattgatcaggcacgcgatgctgctcgcaaattcgttgaaactatgaagttgaccagacgaaatccgaatgcagtaaagcgagaagcagaggcttctgagctaacgatcagtgaagtttttgcgcaatacagaagtcatcttatgggcagatcgaaaccggcaaagcccaacacattaaatgtgctgaacaaagccgaaaaccgcctgaaagagtgggaaaatcttagagtaaaagatctgacaggcaacgagatattgcgcaagtttgatgagatcgcttcaagagccagaactgcggcagagcagacttttcgctgggtgaatgtggcggtaagacatgcgattgagatcgaagcgggaaatgctcagacacaacaacgacaaccgacactaagctacaaccctttctcaattctgacgatacagaaaaaattcagaacccgttcacagcttgaagaaagctatcgcgcaaaaggtgtacgaaacccactgtcgccaaaggacaccttggggcgatttttaacggcattgcacaacaagagaagcttcaaccgcctgggatgcgattatcttttgctgactgttctgacaggagctaggaaagaagaaacagcttcattgtgctggcgagaggctctgacagaagaagaagccagaacgaccagctatgttgatcttgaaaataggataattcgattttacgacactaaaaaccgcaacgaccatgaacttccaatttgtgatgctacgaagcgaattcttgaagaccgaagagatttagtcaacgagactgaaaaacgagcagataaacgcaaatgggtttttcctgcccggtcgtcgcgaagcaaagtggggcactattcagacagcaaaagcctacgcgagtatatctgtcaggaagccggaatagggaagttgggaatgcacgacctgcgaagaacctttggtcgtgttgcagaaggactcacttcatatagtgtggtgaaaaggttgctcaaccatcgcaatactactgatcctactgaacggtatgcaatgcctgataatgaccgaatttatgaggcacttcaaagtattgagctccatatgcttatgactgcaccagagttatataatacacttctggcttcggcgaaatatcaaccattgccaacaaattag

SEQ ID NO: 10939 - DNA, 909 bp, Escherichia coli
atgaaaacgggatcggagtttcatgtcggtatcgttggcttagggtcaatgggaatgggagcagcactgtcatgtgtccgcgcaggtctttctacctggggcgcagacctgaacagcaatgcctgcgctacgttgaaagaggctggtgcttgcggagtttctgataacgccgcgacgtttgccgaaaaactggacgctctgctggtgctggtggtcaatgcgacccaggttaaacaggtgctgtttggtgaaaaaggcgttgcacaacatctgaaacccggtacggcagtaatggtttcttccactatcgccagtgctgatgcgcaagaaattgctaccgctctggctggattcggtctggaaatgctggatgcgccggtttctggtggtgcggtaaaagccgctaacggtgaaatgactgtcatggcctccggtagcgatattgcctttgaacgactggcacccgtgctggaagccgttgccggaaaagtttatcgcatcggttcagaaccgggactgggttcgaccgtaaaaattatccaccagttgttagcgggcgtacatattgctgccggagccgaagcgatggcgcttgcagcccgtgcggggatcccgctggatgtgatgtatgacgtcgtgaccaatgccgccggaaattcatggatgttcgaaaaccggatgcgtcatgtggtggatggcgattacaccccgcattcagccgtcgatatttttgttaaggatcttggtctggttgccgataccgccaaagccctgcacttcccgctgccattggcctcaacagcattgaatatgttcaccagcgccagtaacgcgggttacgggaaagaagacgatagcgcagttatcaagattttctctggcatcactctaccgggagcgaaatcatga

SEQ ID NO: 10940 - DNA, 657 bp, Escherichia coli
atggctatcaaagaaagtcagatcaacagcacatctaacattaatacatctaacagcaaggttaaatctgataacggatttgccattatatgtagcaacctgaataacgagaatgcatcaacgatagccagttataaagctattacttttgacgctgttccggcaactaaggtttcacgttctgccgatgttacatcgtatcctgtgcaggatggtaatgatgtatctgataatgtcaggatcaagaataataaacttatgctttcaggcattattacagaaacaccattagcattacgtggtgatatgctatcaagtgcaggggtgaacggtaacaggtgttcacaggctattgcttatcttgatgaaataatgaatgccagacagcctattattgtaagcacagagcataagacgtttgataatatgattctgacaggcattgactacgaatataaaacagaatcagctttacagtttgatttgcagttcgaacagataagattagtgagttatgcaactactaacgctattgctgtaaagaccgcatcacctaagagcacaggcggacaggtaaaaagccaagtgccaaccaatgcaggaacagccagcaccactaaagacacccttccgacgtatgacggagaagtgaaataa

SEQ ID NO: 10941 - DNA, 1902 bp, Escherichia coli
atgttagaaattagcgcctcacgaattagtaatgttgtgacatttaccactgatttcaagagcttacagaaagctaagaatgaagtggataagctacaaaagaagatgcaggggatcaaacctgtgcaagtggcggcagcacgtcagaaagatttacagaggctgggaaaagagattcagcgccagcatgatcagcatgttaagcaggctgttaaatctgagacacaggcatctaaagccagcactaaacagaagctacaggaagctaaaaacctcgctaaagcacaggctaaacgagcctcaattgctgaaaaggcagagatcaagcgccttgcatcatatcgccagttacaaggcatcaagaacaattcccgctatggcgaagggatggatattaagaaatatcacgatgctctacgttacattaaggaacaaacccgcctctatgaatccggcgctatatcgcaagcgaagatgaatgccctgatccgtgaccgcatcacattagaaagacgagccgcagccgctgctacgcgtcgtaatgctgccgctgggggggtatatccagttacttctaagaagctccacaaagaaggtgttagcggcggtggcgcgttaatgatgggcggtgttggtggcattatcggcggcgctgccgttggcttaggaagtatggctgtatccgctggaatggaaaaagcccgtgaacgtatggaattgcagaagatgagcgatctggtaggtgccgatagcaatcaggtggctgcaatggttaattgggggagggcaaacggtgtatcaagtgcaagcgcggacaagaccactgataatatcaaagacttaaacgaacgcattggtcatcaaagccgaactgctgaatgggatagtaagaaaaaagagtggcgaggcggggaaggatcattaaatgatattcagaatgcctttgcatggaacaaagataagatagcttcctaccaggggcgaccgctgcaactcttgcaagacgtggtgagagaaggtgaacgccgaggaatgactaaagaagccatcatatccctgatcgaaccattagcagacgatgccagccattatctcaagatgttttcccgtgatggggaagagttccgtaaaacgatggttgatatggaaaacaacgggcagctactgacagaagcacagaaagagcaatatcgcgcagctaacaagacagctacagcctttgaccgtctgacagatggactatcgaatcaggctattttgggcttctttgatggcatagccaacatgccagcactcaaaccggaagaaagcaaagccttacagaatgcagcttatggtgttggtgcatcgttcggggatttggctaaacaaggcgctatattactgacctctatgacttcttacgggaatcaaatcacaagctggattaataaacatcttagccgtggtgagaatgataaccgacctgagacacaaaaggttatggacgctgttacagatggggaatggtcgccatcaacgattatcaatgaaggtattcgttatgcaactggactcgatacgaaagatgtagggcgtattgtgcgcggtgaggaaacacagtccggcgttccagggtggtggactgatttaattaatggcaatgctaacagctacggatcaacccttgttgcacgtaaagcagaagcctatcagccgactgtaagcctacaacgtcaatacgcaacccctgttaacgtgaatgcacaggttacggtgccgagtgatatgatctctgttaacgtcatccctaacggtcccggctttcaggatttaatccgcactgagatcagagcgaacaacaatcagtttagttcgaatctgattcttagcacgttgtcaggacagagtagcgttaactaa

SEQ ID NO: 10942 - DNA, 198 bp, Escherichia coli
atgaacacagaaaattcacaggcattaattcttaagtctgtaaaagaactggcagctattagcgatgactcaataatcaatgtcagtgccttatgcagaatgctttcaattgatgcaaataatgtgcggcagcgtgtgtttcagactgggtgcagcacttttgaagcaattacatactactgttctaaaaaacaataa

SEQ ID NO: 10943 - DNA, 561 bp, Escherichia coli
atgattaatgaagaacaatttgtaaaagttcctatgtggattctaaaaataagccaagtaaacgggcataaatttacagatagtgctaaaaacctttactgctatttgagagggtttgatcgtgcatttccctcttacgctaagataggcgatgtttttggcataacaccaagagcagcagaagaaagggttaagaaattgctcgaaatgggattaattataaaagatgcacgaccaggaagctctaacctttatcgagtgcttgatattccaaaaggagaatcatcactacctgatccttctgagaaagaaaacgaatctaatgaaatattgaatgtttcagaaatcatcgttgaagaagaaatacaggaatcagagttccctgagcggcccgaaatttttacttggcttctttcccttgataagaagaaaccaccgcacgaagaaacagaagactacgaagcattagagcgttatcgtgatgaagtgctgacgctcaagacaccttttaacatcgtattgaatatgattaatgatgcattacaaggagaagccgcataa

SEQ ID NO: 10944 - DNA, 171 bp, Escherichia coli
atgagcgaaactacagaaaagaaaagacaaccacgcacttgctttcatattcctgatgaagtatttcaggtgttgtttaaagaagccagaagtaaacgtatcactgttacagattacattcttgatatgttgaaaagagaggctgaaacactctcaaacaaaagcaagtga

SEQ ID NO: 10945 - DNA, 183 bp, Escherichia coli
atgaaatggtttacaccatatgacattgtttctgcgtatctcgctggtgagatgacccgctaccaggttcgccagaatcgtaatacagcccgtcgccgtggctacccagagcgtgaaaaatgctttgacgacgcactaaaaattattgatgaactgcgtaaggcagaagcagagaaagaataa

SEQ ID NO: 10946 - DNA, 198 bp, Escherichia coli
atgatagaacgtttattgagcaacaattttgcagtgatgcgctatatgccgcattacacaaggcacagcgaaagtgatgtaaaagtgaagaaagctaacattgcacttttaagctacttttcattgaatttttacgtaggaattacacagggattaatcatcaattacattgaatttaagcctgttttagatgtttaa

SEQ ID NO: 10947 - DNA, 552 bp, Escherichia coli
atggctaatattggatacattagggtatcgactgtccaacaaaacacagaccgtcaattagctggagtaactcttgataaagtctttgaagataaagcgtcaggcaagaatacccagcgcccacagtttgaggcaatgatgaactatgtgcgtgaaggtgatgttttgcatgttcacagcattgatcgactttgccgtaatacagccgacctactggcaacggttgagcaattaacagagcgcggcgtgtctgtgcatttccataaagaagactttaagacagggaagaactctcccgcagggaatatgatgctcacagtgcttgcagcagtggcacaaatggaacgtgaaatgatgcttgagcggcagcgtgaggggatcgccgcagctaaggccgctggacgtatagcaaaacgtggtaatggaaaagcaattgatcgagcgggaattgttgccgctctcgcgaatggtggatcaattcggagcgtagcaaaagatttcagtgtcagcacacagacggtgcaacgtatcaagaaagagcaggaagcgtaa

SEQ ID NO: 10948 - DNA, 159 bp, Escherichia coli
atgcatttactttcaaaacatcttcacactattcactttctcgttattgatgtattcgttgtggctattagttaccgcatttgcatcgcttccagtgaagagatggacgctgttgcaattattgctcaagcaatggcgatgttaactaaacgactttaa

SEQ ID NO: 10949 - DNA, 132 bp, Escherichia coli
atgagtttaggttgtggtgagtgggggttgtgtttagggccggggagagtcggggaagactacgaaagcccgcactcctgcgacgacttttatcacaggagtgtggaagtgcttttccatcaatcgcaatga

SEQ ID NO: 10950 - DNA, 1434 bp, Escherichia coli
atgtgcttacttgcaccagaaaatccttatccgatatatgcactaccaccgctggtgagaaatgcaataattgaaactcaaaaaaatacacaggcacctttggctatggtggcaacatccgcattaacagcgacctcaattgcctgtcagaatcaggttgacgtgtgcagacctggaaatttacgtgggcctgttaatctttactctctgattctggctgattccggtgaaaggaaaacgaccgtggataaagtgtttatgaaagcattttatctcagggatgaagccctggcggaagaatacgcgaaactggttgagaattacagtacagaaaaggaaatatgggagcaaaaacaaaaagcgctggaatcaaaatttcataaagagattcgtgccggtaaagattacaaggcaacagaatcagagcttgaaacgcatctgaataagtctcctgttccgccgcagatacgtcgaacaatttttaatgagacaacgatagagggaatgttaaaatattactccgatagcaatcgttcttttgctcttgtatccagtgaagggggggtaatttttgacagccgggccatgagtaaactgggaattattaacactttgtgggatggaggttctcttttcatcgacaggaaatcatctcccggaattaatttgaaggagccaagactgacgatgtcggcgatgattcagcctgatgtttaccacaaaggtttttgtacgcgaaaaaaagaacttgtgaaaacgtcaggacatcatgcaaggtttttgatgtgtcaaccaacatcaacgcaggggacaaggataataaccggagataattattcatcacagtatcaggagttatttgataagaggatcaatgaacttattgatgaaagtctggctatgagtggtgaacgacgttgccttcacttttctcctcaggctgccagaatctggacggattattacaacgatgtggaatcgaagctggggggattggggcctttaagacattgtcgggaatatgctgccaaaaatgcagagtatatggcaagactggcaggacttcttcaccatttgagcagtgaggagggggacatttccccttacactgcagaaatggggagagaattagcaatatggtacggtaatgagtatatgcggttgtctaatccgttaacttttgacaacactgctcaaaacgagactatgcgactcattccagaggagcttgaacttttcaactggataaaaagctattgcattgagaaggggatcccctgtatgaaaaaaaatgacattttacagcgtggtccgaaccgtttccggaaaaaggataaaatcaactggttactggatttactgtatgaacaaaacagagttgtaccggttattgagggaaaaacgttgtgtgtcgcacctaactttgacctctga

SEQ ID NO: 10951 - DNA, 567 bp, Escherichia coli
atgcttattggctatgtacgcgtgtcaacaaatgaccagaacaccgatttgcaacgtaatgcactgaactgcgcgggatgtgagcggatttttgaggataaaatcagtggcactaagtccgacagaccggggctgaaaaaactgctcaggacactatcggcaggagacacgctggttgtctggaagctggacaggttggggcgcagtatgcggcatcttgttacgctgatagaagagttgcgccagcgtggtgtgaatttcagaagcctgactgacagtattgataccagtaccccaatgggccgtttcttttttcatgtcatgggtgccctggctgaaatggaacgcgaactgatagttgaacgtaccagggcagggctggctgcagctcgtgctaaaggcagagtaggtggacgccgtcctaagttgaccaccgaacagtgggcacagattggacgtttactcgaggccggagaatcaagactgcgtattgcactgatttttgatgtaggcgtttctaccatttatagaaaatttccggcaaataagagcaatgaatctccctga

SEQ ID NO: 10952 - DNA, 1647 bp, Escherichia coli
atgaaattaaatatatttactaaatctatgattggtatggggctggtgtgttccgctctgccagcattggcaatggaagcatggaataaccaacaaggtggtaataaatatcaggttattttcgatggcaaaatttatgaaaatgcctggtgggtttcttctacaaattgcccgggaaaagcgaaagcaaatgatgcaactaacccgtggcgtttaaagcgtaccgcaacagctgctgaaattagtcagtttggcaatacactttcctgcgaaaagagcggaagctcatcttcttcaacttcaaatacgccagcatctaatgcgccagcatctaatacgcctgctaatggcggttcggctacaccagcacagggcactgttccgtctaattcttctgtagttgcctggaataaacagcagggcggtcaaacctggtatgtcgtctttaatggtgcggtatataaaaatgcctggtgggtagcctcttctaactgcccgggtgatgcgaaaggcaatgatgccagcaacccatggcgttatgttcgtgccgctacggcaacggaaatctcagaaaccagtaatccacagtcttgtacttcagcaccacagcctgcaccggatgtgaaaccggctcctgatgttcagccagccccagctgataagtcaaacgacaactatgctgtcgtagcctggaaaggtcaggaaggttcttctacatggtacgttatctacaacggcagcatttataagaacgcttggtgggtaggcgcggcaaattgcccaggcgatgcgaaagaaaacgatgccagcaacccatggcgttatgttcgcgcggcaacggcaacagaaatcactcagtatggtaacccaggctcctgttccgttaagccggataataatggcggtgctgtgactccggttgatccaactccggaaacaccggaaactccagttactccaactccggataacaacgagccatcaacaccagcggatagcagtaacgattactcactgcaggcgtggagtggccaggaaggcagcgaaatttaccatgttatcttcaatggtaatgtttatcagaatgcctggtgggttggttctgaagattgcccgcgtggcaccagtgtagaaaactccaataacccatggcgcctcgtgcgtacagctaccgctgcggaaatgagtcagtacggtaacccgactacctgtgaaattgataatggcggcgtcattattgcggatggtttccaggccagcaaagcgtacagcgcgaacagcatcgtagattataacgatgcacattataaaacctctgtcgatcaagacgcatggggctttgtccccggcggcgataacccgtggaagaaatacgaaccggcgaaagcatggtccgcttccaccgtgtacgtgaaaggtgatcgcgttgttgttgatgggcaggcttatgaagcgctgttctggacgcaaagtgacaaccctgctctggttgcgaaccaaaacgccaccggtagcaatagtcgcccgtggaagctcgctttaacggtgagaactacatttctcagagtaaagtgcagaaagtttctccttctgacagcaacccgtggcgtgtttttgttgactggaccggaaccaaagagcgcgtag

SEQ ID NO: 10953 - DNA, 150 bp, Escherichia coli
atggcggtaggttcgtattttacgcccgtcctttcctcagcgcttgcagccgtgctgctcagcgccccgctgtcgttctcgttctggcaaggcgcgctaatggtctgcggcggttccctgctctgctggctggcgacacgtcgtggctaa

SEQ ID NO: 10954 - DNA, 372 bp, Escherichia coli
gtgcgtgtgtcgcaggcgtgggcggggccgggatttggtaatctggcgataccgcgggtgggccaggaggtgattgttgattttctgaacggggacccggaccagccgctggtcatgggccggacgtaccatgaggacaaccgttcgccgggggacctgccgggaacgaagacgcagatgacgatacggtcgaagacctataaaggaagcggttttaatgagttgcgctttgaggatgcgacggataaggaacaggtctatatccacgcgcagaagaacatggacacggaggtacttaacgaccggacgacggatgtgaaacatgaccatacggagaccatcgggaacgaccagaagagtgccagcacctaa

SEQ ID NO: 10955 - DNA, 1035 bp, Escherichia coli
atgtttaatggtaaaatattgttaattactggtggtacggggtctttcggtaatgctgttctaagacgttttcttgacactgatatcaaagaaatacgtattttttcccgggatgaaaaaaaacaagatgacatgaggaaaaaatataataatccgaaacttaagttctatataggtgatgttcgcgactattcgagtatcctcaatgcttctcgaggtgttgattttatttatcatgctgcagctctgaagcaagtaccttcctgcgaattccacccaatggaagctgtaaaaacgaatgttttaggtacggaaaacgtactggaagcggcaatagctaatggagttaggcgaattgtatgtttgagtacagataaagctgtatatcctatcaatgcaatgggtatttccaaagcgatgatggaaaaagtaatggtagcaaaatcgcgcaatgttgactgctctaaaacggttatttgcggtacacgttatggcaatgtaatggcatctcgtggttcagttatcccattatttgtcgatctgattaaatcaggtagaccaatgacgataacagaccctaatatgactcgtttcatgatgactctcgaagacgctgttgatttggttctttacgcatttgaacatggcaataatggtgatatttttgtccaaaaggcacctgcggctaccatcgaaacgttggctattgcactcaaagaattacttaatgtaaaccaacaccctgtaaatataatcggcacccgacacggggaaaaactgtacgaagcgttattgagccgagaggaaatgattgcagcggaggatatgggtgattattatcgtgttccaccagatctccgcgatttgaactatggaaaatatgtggaacatggtgaccgtcgtatctcggaagtggaagattataactctcataatactgataggttagatgttgagggaatgaaaaaattactgctaaaacttccttttatccgggcacttcggtctggtgaagattatgagttggattcataa

SEQ ID NO: 10956 - DNA, 1107 bp, Escherichia coli
atgaaaattttagttactggcgctgcagggtttatcggtcgaaatttggtattccggcttaaggaagctggatataacgaactcattacgatagatcgtaactcttctttggcggatttagagcagggacttaagcaggcagattttatttttcaccttgctggggtaaatcgtcccgtgaaggagtgtgaatttgaagagggaaatagtaatctaactcaacagattgttgatatcctgaaaaaaaacaataaaaatactcctatcatgctgagttcttccatccaggctgaatgtgataacgcttatggaaagagtaaagcagctgcggaaaaaatcattcagcagtatggggaaacgacaaacgctaaatattatatttatcgcttgccgaatgtattcggtaagtggtgtcgaccaaattataactcctttatagcaactttctgccatcgcattgcaaatgatgaagctattacaattaatgatccttcagcagttgtaaatctggtgtatatagatgacttttgttctgacatattaaagctattagaaggagcgaacgaaactggttacaggacatttggtccaatttattctgttactgttggtgaagtggcacaattaatttaccggtttaaagaaagtcgccaaacattaatcaccgaagatgtaggtaatggatttacacgtgcattgtactcaacatggttaagttacctgtctcctgaacagtttgcgtatacggttccttcttatagtgatgacagaggggtattctgtgaagtattgaaaacgaaaaacgcgggccagttttcgttctttactgcgcatccaggaattactcggggtggtcattatcatcattccaaaaatgagaaatttattgtcatccgaggaagtgcttgtttcaaatttgaaaatattgtcacgagtgaacgatatgaacttaatgtttcctctgatgattttaaaattgttgaaacagttccgggatggacgcataacattactaataatggctcggatgagctagttgttatgctttgggcaaatgaaatatttaatcgttctgaaccagatactatagcgagagttttatcgtga

SEQ ID NO: 10957 - DNA, 1131 bp, Escherichia coli
gtgaaaaaattgaaagtcatgtcggttgttgggactcgtccagaaattattcgactctcgcgtgtccttgcaaaattagatgaatattgtgaccaccttattgttcataccgggcaaaactacgattatgaactgaatgaagtttttttcaaagatttgggtgttcgcaaacctgattattttcttaatgccgcaggtaaaaatgcagcagagactattggacaagttatcattaaagttgatgaggtccttgaacaggaaaaaccagaagccatgttagtacttggcgatactaactcctgtatttcagcaataccagcaaagcgtcgaagaattccgatcttccatatggaggctgggaatcgttgttttgaccaacgcgtaccggaagaaactaacagaaaaatagttgatcataccgctgatatcaatatgacatatagtgatatcgcgcgtgaatatcttctggctgaaggtgtaccagccgatagaattattaaaaccggtagcccaatgtttgaagtactcactcattatatgccgcagattgatggttccgatgtactttctcgcctgaatttaacacctgggaatttctttgtggtaagtgcccacagagaagaaaatgttgatacccctaaacaacttgtgaaactggcgaatatacttaataccgtggctgaaaaatatgatgtcccggtagttgtttctactcatcctcgcactcgtaaccgcatcaacgaaaacggtattcaattccataaaaatatcttgcttcttaagccattaggatttcacgattacaaccatctgcaaaaaaatgcacgtgctgttttatcggatagtgggactattacagaagagtcctccattatgaacttccctgcactcaatatacgagaagcgcacgaacgcccggaaggcttcgaagaaggggcagtaatgatggtcggtcttgaatctgatcgcgttttacaggcattagaaattattgcaacacagcctcgtggagaagtacgcttacttcgtcaggttagtgactatagcatgccaaatgtttcagataaagttctgcgtattatccattcatatactgactacgttaaacgggttgtctggaagcaatactaa

SEQ ID NO: 10958 - DNA, 1209 bp, Escherichia coli
atgaaacttgcattaatcattgatgattatttgccccatagcacacgcgttggggctaaaatgtttcatgagttaggccttgaattactgagcagaggccatgatgtaactgtaattacgcctgacatctcattacaagcaatttattctattagtatgattgatggtataaaggtttggcgtttcaaaagtggacctttaaaggatgtaggtaaggctaaacgtgccataaatgaaactcttttatcttttcgcgcatggcgcgcatttaagcacctcattcaacatgatacatttgatggtatcgtttattattccccctctattttttggggcgacttggttaaaaaaataaaacaacgatgccagtgcccaagctatctgatcctaagggatatgtttccacagtgggtcattgatgcaggtatgttgaaagccggttcaccaattgaaaaatattttaggtattttgaaaaaaagtcatatcagcaggctggccggataggggtaatgtctgataagaatcttgagatatttcgccagaccaataaaggttatccgtgtgaagttttacgtaattgggcctcaatgactcctgtgtctgccagcgatgattatcattcacttcgtcaaaaatacgatctaaaagataaagtcatttttttctatggcggtaatattgggcatgctcaggatatggcaaacttaatgcgccttgcgcgtaatatgatgcgttatcatgatgctcatttcctgtttatagggcagggtgatgaagttgagctgataaaatctcttgctgcagaatggaatttaactaatttcactcatctaccttcagtgaaccaggaagagtttaaattaattttatctgaagttgatgtcggcctgttctccctttcatctcgccattcttcacataatttccccggaaaattactagggtatatggttcaatcaatcccgatccttgggagtgtgaatggcggcaatgatttaatggatgtaattaataagcacagagccggtttcattcatgttaatggtgaagatgataaactgtttgaatctgcacaattgcttcttagtgattcagttttaagaaaacagctaggtcagaacgctaatgtgttgttaaagtctcaattttcggttgaatcggcggcacatactatcgaagtccgactggaggctggagaatgcgtttag

SEQ ID NO: 10959 - DNA, 408 bp, Escherichia coli
atgcgtttagttgatgacaatattctggatgaactttttcgcactgcagcaaattctgaacgtttgcgcgctcattatttattgcacgcatctcatcaggagaaggttcaacgtttacttattgcatttgtacgcgacagctatgttgaaccccattggcatgagttaccgcatcagtgggaaatgtttgtcgtcatgcaagggcaattagaagtttgtttgtatgagcaaaatggtgagatccaaaaacagtttgttgttggagacggtacgggaataagcgtcgtggaattttccccaggagatatacatagtgtcaaatgcctgtcaccaaaagcccttatgttggagataaaggaggggccatttgacccactcaaagctaaggctttttctaagtggttatag

SEQ ID NO: 10960 - DNA, 258 bp, Escherichia coli
atgcgcaagcttatcgtgcctacacattatctcaacacacgtaggccggataagatgcgccagcatcgcatccggcaaaaaaacgggcatggtgtcaccaccctgcccgtttctcttaaatgcacaataatattatttcgcgttgtaattacgcagcgcgttacgcccaagcacaatccccgcgccaaccatgccgcccagcagcacagccagaatcaaggtaattgctttcttcgggctatcgcgacgaataggtaa

SEQ ID NO: 10961 - DNA, 318 bp, Escherichia coli; identical to SEQ ID NO: 9009

SEQ ID NO: 10962 - DNA, 492 bp, Escherichia coli
atgaaactgaaagctattatattggccaccggtcttattaactgtattgcgttttcagcacaggcagtggatacaacgattactgtgacgggtaatgttttgcaaagaacatgtacgactccaaaagatataaatgtacctttaggaaatctgtatacaacagactttcctgcgacgggaagtacatctcagtggaagacgttttcattatctctaacaaactgtcaaaatacaggtcgtgtacaggcatcatttgcaggcactcaagatggtagtggatattttgccaataacggtagcgccggcaatataaagatagagataggagatgctgatgtttcatcagtaacatatggtcccaacacaataaaaacggtttccgtacaaaataataatgcaacctttaatcttaaagcccgtgcagtgagtaaaggccaggttactcctggagatatcagttctgttataaccgtcacatatacttattcataa

SEQ ID NO: 10963 - DNA, 549 bp, Escherichia coli
atgaagttaaaattcatctccatggctgtattttcagccctgaccctgggtgttgcgacaaatgcgtctgctgccaccacggttaatggtggtacagttcattttaagggtgaagtggttaatgctgcatgtgctgtaaatatgaactcagtagatcagacggttttgcttggccaagtgcgaagcgccacattagggagtgatggaaaaactagtggttctgttggttttaccattcaactggatgactgtgatttaactaccggcccaacccaaagtgcaaaaattatattttcggggacccctgtcacagggaaaacaaatgttcttgcattgcaaaactctgcttcaggtgctgcaacaaatgtagggatccaaattttagattctaaaggtcagcctgtagaattgaattcagatgcggcatccgaatatacattgactgatggcactaacaaaattccgttccaggctcgctattatgcaaccggacaggccactgctggtattgccaatgccgacgccacctttaaagttcagtaccagtaa

SEQ ID NO: 10964 - DNA, 990 bp, Escherichia coli
atgcaaaaacgttatctgggtaaatccggactcgaagtctccgcccttgggctcggttgcatgggcttaagccacggctacggcccggcgaccgatacccgtcaggctatcgaacttattcgtgctgcggttgaacgtggcgtcaccttcttcgataccgccgaagtgtatggtccgtatctgaatgaagaagtggtcggcgaagccttaaaaccgtttcgtgaccgcgtggtaattgccactaaattcggttttaccttcgacaatgataataagcagcagattttaaacagccgtccggaacatatccgtgaagccgttgaaggatcattacgtcgtctgaaaacagatgttattgacctgctgtatcaacaccgtgttgatccagatgttcctattgaagatgttgcaggaacggtgaaagacctcatcgcagaaggtaaggtcaaacatttcggcctgtctgaagcaggagcacaaaccattcgtcgtgcacatgcggtacaacctgtcaccgccctgcaaagcgaatattccatgtggtggcgtgagcctgaacaggaaattctgccgttgcttgaggaactgggaattggttttgtccccttcagcccactaggtaaaggtttcctgacaggggcgattaagccgggaaccactttcggcaaagatgattaccgcagcaccgtaccgcgtttcgcagcacaagccattgaagccaatgaaaaactggtcaccttgttaggtgaactggctgcggagaaaggggtaacgtctgcacaaatcgcactggcatggctattagcacaaaagccgtggattgttcccatccctggcaccactaaactgcaccggctggaagaaaacctggccgctgctgacattgttctttcgcagaaagatacgcagcagataagcgaggcgctggaaacaattaaaatcgtcggtgaacgttactcgcctgaacatcaggcacgcgtaggccgctaa

SEQ ID NO: 10965 - DNA, 894 bp, Escherichia coli
atgctcaaagaaaacttcaacgaactgcaaatctttcttgtggtggcaagagagcgaagttttaccaaagcagcgggcaaactcggcgtctctcagtctgcacttagccatgcaatgaaggctctggaggaaaggctcaatatccgcctcctgacacggactacccgcagtgtggctcccacagaagcgggggagagaatcattgcctgccttgaaccgcgtattgacgagcttgaacaggaactggaatcacttattcaattgaacggcatgccctccgggaatattcggttatctgccggggaacatgccgcgcgaagtctggtctggccgaagctaaaaccttttctcagagagtatcccgaaatcaatgtcgaactggtggtggataatggttttgtcgatattgttgaaggccgttttgatgccgggatacgactgggtgaaaatgttgataaagatatggttgcagtcaggattggaccagatatgcggatggctgtggtgggagctccggcgtattttgctgcaaaccctgcgcctgaaacgcctcatgagctacaaaatcatcgctgcatcaacatgcgtttgccaactgccggtgggctttaccactgggagttcgagcgagaagggaaaccgcttcgcgttaaggttgatgggcaactgacgtgtagtccattgccagaaagaattgatgccgcgttatcagggtttgggatcgcttgtgtccctgaagacatggttcaggagtatatagagtcaggcaagcttattcaggtgttacaggagtggtgtccaacttttcctgggtattatctttactaccccagccgcaagcagcatccgccagcttttgcgttgttgatcgatgcgcttcgctacaccgaataa

SEQ ID NO: 10966 - DNA, 921 bp, Escherichia coli
atgaaaactgtttcgataaaacacacttactgggatatagctgctgatatctatttccctgacgattttaatagtgaaaaaaagtatcctgccattatcagtgcccatccaattggaagctgcaaagaacagacatcgggtagtgtgtatggtgccgccctggcaaaagctggctttatcgtcattgcttttgatgccagttttcagggaagcagcggtggagaaccgcgttatctggaagatccaacaatgcgagtaaaagacttcagcattgtcgttgattaccttaccaccttaccttacgttgatgccgggcgtattggtgtactgggtatttgtggtggaggtggatatgccattaatgccgcaatgacagaacgtcggattaaagccattggtactgtcacgggtgcaaactacgggcgtcttatgcgtgagggatttacagcgtttaatcctatcggagcactcgaagcaatggcgcaacaaagaacagacgaagctaacggcgcaaaacttcgcgtagatgatttgctcccttcttctccggaagcagctcttgaagcgggattaacagaaatagacctttttgaagcaacagaatattatcgttcgccacgaggctgtgcgcctaatggggtaaatcgttcgctattttcacatcagactgttgccgtaggctgggatgcttttcatcttgcagaagtcctgttaactcaaccactaatggttgtagtgggcgatagagtgggcgcttttggtgcctatcgtgacggctgcgaaattattggtcgtgcagcctcaaaacataaagagctggtcgtggttgaaggttattcacattacgacctgtatgataagccagaacctgtgaaacaggcgctcgataaattaattcctttttacaaaacacatttgtaa

SEQ ID NO: 10967 - DNA, 198 bp, Escherichia coli
atgcactgcggtggcagcgacgcgttctccggcgttaccgctaaccccgctgtcggctacgcctctgacctgctggtgcgctgcggcgcaacggtgatgttctccgaagtcactgatgtacacgacgccattcatctgttaacgccgcgcgccatcaatgaagaagtgggcaggtgtctgctcgaagagatggcctga

SEQ ID NO: 10968 - DNA, 1614 bp, Escherichia coli
atgagtcggaaatacctcattcgtatcactgagctggaaaggctactctctgagcaggctgaagccctccgtcagaaagatcagcaactgagtctggttgaagagacggaggccttcctgcgctctgcactggcacgtgccgaagaaaagatcgaagaggaggagcgggaaacagaacatctgagggcccagatagaaaaactgcgccggatgctgttcggtacccgttctgaaaaactgcgtcgtgaagttgaacaggctgaggccctgctgaatcaacgccgacaggacagcgatcgttacagtgggtgggaagacgatccacaggttccccgccagttgcgacagtcgcgccatcgtcgtccgttaccggcacaccttccccgtgaaatacaccgtctggagtctgaagaaagctgttgcccggagtgtggcagtgagctggattatctgggtgaagtcagtgctgagcagctggaactggtgagtagcgccctgaaagtgatccgcactgttcgggtaaaaaaagcctgtacaaaatgtgactgtatagttgaagcgccagcgccgtcccgcccgatagagcgcggcatcgcgggctccggattacttgcccgcgtgttaacgggaaaatactgcgaacacctgccactgtatcgtcagagtgaaatctttgcccgacagggtgccgaactgagccgtgcattactctccaactgggttgacgcgtgctgccagttaatgactccgctgaatgatgccctgtaccgttacgtgatgaacacccgcaaggttcacactgacgacataccagtaaaagtgctggcaccgggcagaaaaaaggcaaaaacaggacgcatctggacgtatgtccgggatgaccggaatgcgggctcatcagagccaccggcggtctggttcgcctactcaccagacaggcagggaaaacatccggtacaacaccttcgtcccttccggggtatcctgcaggcggatgcattcagcggttacgatcggctgttcagtgccgaacgtgaaggtggtgcactgacagaagttgcgtgctgggcccatgcccggcgaaaaatccacgatgtatacatcagcagcaaaagtacgacggcagaagaagctctgaagcgcatcagtgaactgtacgccattgaggatgaaatacggggcttaccggagtctgaacgtcttgcagccaggcagcagcgaagcaaagcgttactgacgtcgctgcatgaatggatggtggagaagaatggcacgttgtcgaaaaaatccagactgggcgaagcgttcagctatgtcctgaatcagtgggacgccctctgttattacagtgatgacggtctggcggaggcggacaataacacagcagaaagagcgcttcgtgccgtctgtctcgggaaaaagaattacatgttcttcggcaacgatcatggaggcgagcgcggagctctgctgtgcggactaatcgggagctgtcggttgaacggtatcgatccagaagcgtatctgcgccatatcctgagcgtactgccggaatggccctccaaccgtgttgacgaactgctgccatggaacgtagttttcaccgataaataa

SEQ ID NO: 10969 - DNA, 351 bp, Escherichia coli
atgatctcgctcccatcagacactcgaatctggctggttgccggcgttactgatatgcgtaaatccttcaacggtctgggtgaacaggtacaacatgtgctggatgagaaccccttctccggtcacctgtttatctttcgcggccgacggggtgacacgattaaaatcctgtgggctgatgctgatggtctgtgcctgttcaccaaacgtctggaggaaggccagtttatctggcctgcggtgcgtgacggtaaggtatccattacccgctcgcagctggcaatgttcctcgataaactggactggcgtcaacccaaaacatcccgccttaatgcactgacaatgttgtaa

SEQ ID NO: 10970 - DNA, 363 bp, Escherichia coli
atggttaaactggcttcacaaccaggagcctctgttgcccgtattgccagggaacacgatatcaatgataacctcctgttcaaatggctcaggctctggcagaacgaagggcgtatatcgcggcgtcttccggtaacaacctcttctggcgctggcgttgaattattacctgttgagataacgcctgatgagcagaaagagcctgtggcggctcttactccgcttttatccactccttcacaaagcacagtcagtgccagttcctgtaaagttgagttccgccacggtaacatgacgctggaaaatccgtcaccagagctgctcacggtgttgatccgtgaactgaccgggagaggacgatga

SEQ ID NO: 10971 - DNA, 2148 bp, Escherichia coli
atgtatttatatacgggatcgaaagggattcttgccagaaaaaataatattgagcctatgcttggtcacccattgctttatatgaaaggagacgaggctttttctaaaaatgacgttttagttggctggggaaaaaaatctaatactaagcagattaaacagaaagctcaagagttaggaatatcttattggcaacttgaagatggttttattggctatatcgggcacccagcaaaaggaggaaaggcggtttctcttattgctgaccctctggggatatattatgatgcacatcagacgagtcaattagaacagcttattattgaacctgttgatacggctttacttgcgcgcgctgagcatctgatctctgatattttgcgtttaggaatcaccaagtataactgctataccaatagcactgagcatacatttaatggctctgtccgtgctactgacgggccttctttagatttaccgacacatatacaacctgagttattcaccctcacggctcattcaaacttagcacgtttactggatgatccaagaccgcgtattttgcttgtggatcaagtagcgggagacttgtcaatttctggggctcttgcttgcgaagctgattttgtttctatggtggtcgaggctcgccgtaatcaccctaatgcgcgtctattgttgcgaacacacccagatacacgctttagcaaaaaaagcggcgtgttagcacgtttagtggggcgtgatcctcgactggctgatgttgaggtggtgagtgaaccttgccatccgcatagaataattcgtatggtggatgcggtgtacacagtttcatcgcaggttggctttgaagcgttgctgttgggcaaacctgtatattgcttcggtatgccattttatgctgggtgggggttaacgcatgacagtaaacgttgtatacgccgtgaagaagcaatgtcagccgaaggcgtttcatctatttcattgccccgcttagttgcggcggcgttgatccgttatccgcgttatttagatcctatattgggaaaacgttgtgaggtagaagatgttgtagcgattttggctcagcagcaggtagagcccaaaccttggcgtcgtctttatctcgttggtttttctctgtggaagcgtgcttttatacgcacattttgtgcgtatttggcagatgaactttgttttgttcgtactgtgccctcacagttaaaagatgatgaacaggtgttggtgtggggaaaccgttatcctgaactgcaatcagtgatccggattgaagatggttttatccgctccaacggattggggtctaatttatgtcgaccttcatcactctcgattgaccccgttggaatctattttgatagccgccgtccgagtaagcttgagcagttactcactacgtacgttttagatgcgaaagaagaagcacgcgcagagtcattattagcgcaattacaatcatcacgagtcagtaaatacaatgtggggagtacacaagaatatgagccccctaacgacggacgtgagttgattctagtggttggtcaggttgatggtgatgcatccattttgtgtggtagcccgattatccgcagcaatgaacagttgttgtgggctgtgcgtgaagctaaaccgaatgcacatattctgttcaaacctcatccggatgtggtatctggcaatcgaaaaggtactatttcggcgcgttgtttagcacactgtgttgatagccaagtatctgatattagactggaatcgctatatccacacataaatgagttacataccatgacttcgcttagtggatttgaggcactagttcaaggagtgaaggttacgacatggggacagccgttttatagtggttggggattaacacaagataagcatccatcagaaagacgccatcgtacattaacgttgagtgcattagcatatattacattagtaaaatatccgcgttatatagattggaagtcagggctttggtgcagccctgaacaattaattcatctattatctactcaaaaaaaagctacgacggcaggtgttaagtggtggcagcgttggcgaattaagttagtttcttttgctcaaactttgagactttttcgttcacttttaccctga

SEQ ID NO: 10972 - DNA, 552 bp, Escherichia coli
atgaatgtaatcaagacagcaattcctggtgtgcttatttttgagccaaaagtatttggagatgagcgtggttttttctttgagagttttaatcacaagttgtttgaagaggctgtaggatatccagttacctttgtgcaggataatcactcaaaatcttctaaaggggtactgcgtggcttgcactatcagttacctccccatgcccagggcaagttagtgcgttgtgtagccggtgaagtgtttgatgttgcggtagatattcgcaaaagctcaccgagcttcggacaatgggttggcgttcatctttcaggggaaaacaaacgacagttatggattccggaaggatttgcccatggttttgtaacactgactgaatcggccgaatttttgtataaaacaactaattattatgcccctgccagtgatagaggcattgcatggaatgatcctacaattggtattaggtggcccgagttaaaggcggacattctcacttcagcaaaagatagtattgcaaagtcattagagagcgcagagctgttcatctaa

SEQ ID NO: 10973 - DNA, 879 bp, Escherichia coli
atgactaaacgtaaaggtattattctggccggtggatctggtacacgtctctatccggttactatggcggtgagcaagcagttgttgcccatctatgacaagccgatgatctactacccgctgagcaccctgatgctggctggaattcgcgatattttgatcattagcactccacaagatactcctcgctttcagcgattgctgggtgatggcagccactggggactgaatttacaatatgaggttcagccaagcccagacgggttggcacaagcttttattctaggtgaagaattcattggttcagccccgtgtgcactggtgctgggggataacatcttctacggtcatgacctacagaaacagttggaggcagccgcggccaaagagaccggtgctactgtatttgcctatcatgtgcacgacccggaacgttatggagtggtcgaatttgataatcaaggtaccgctatttcactggaagaaaaaccactggagcctaagagtagctacgcagtcaccggcctctatttctacgacaacagcgttgtggacgttgccaagggtctcaagccatcgccgcgtggtgagttggaaatcaccgatgtgaaccgtatttacctggagcaaggcaatctatcggtggcaatgatggggcgtggttatgcctggcttgataccggtacccacgaaagcctaattgaagcgagtaactttattcagaccatcgagacgcgtcagggattgaaagtggcttgtccggaagagattgcttatcgccagaagtttattagtgccgaccaggttcgtgagcttgctgctccgttggcaaaaaacgcctatgggcaatatttattaaaaatgattgataaggcgtga

SEQ ID NO: 10974 - DNA, 888 bp, Escherichia coli
atgcatattctgttgtttggcaaaaatggtcaggtaggatgggagctgcagcgtgcattggcgcctctggggcacatcactgccgttgattttgactccaccgactattgcggtgattttagcaattctgcaggggtggctgaaacggtacgtctcgtcaagccggatgtgattgttaacgcagcggcccatactgcagtcgacaaagcggagagtgagcgggaatttgccgagttactcaatgcaactagtgtggcggttattgccaaagaagctgaagcattaggtgcgtggctagtacattattccaccgactatgttttcgatggaagtggtgaacgtccttgggtggaaaccgatgtgatttccccgctcaacgtctatggcgaaaccaagctggcaggggaacacggtgcggcactctgctcacgtcaccttatctttcgtaccagttgggtttatgctgcgcgcggtgccaacttcgccaaaactatgctgcgtcttggcaaagagcgtcgcgagatatcggtcattaatgatcagtttggcgctccaactggagctgagttgctggccgattgtaccgcccatgcaatccgagttgcacagagcaaacccgacgttgccgggctgtaccatttggctgcctccggtactaccacttggtttgactacgcccggttggtgtttgacaaagccagagacgcaggagttgaactggcagtcacacagcttaatgcagtgccgacaggcgcctttccgaccccggcgaaacgccctcataattcccgacttgatactaaaaaattccagcgtacatttgatctggttttgccggactggtcagtcggtgttgagcggatgttgactgagatcatggggaagtaa

SEQ ID NO: 10975 - DNA, 1086 bp, Escherichia coli
atgaagattctcgttactggcggtgctggttttatcggctctgccgtggtgcgtcatatcattagtgatactggagactccgttatcaatctggataaactcacctatgctggcaatttggaatctttggccagtgtatcgtcaagtgagcgttattcgtttgaacaagttgatatctgtaatcgtgctgagttggatcgggtgtttgctctgcaccagccagatgccgtgatgcatctggctgctgaaagccatgttgatcgttctatcacagggccagccgactttatcgaaaccaatatcgtaggcacctatacattgctggaagcggctcgcgcctattggagcagtctgggcgagttgagcaaggcggcctttcgcttccaccatatttctaccgatgaagtatatggcgatctgccccatccggatgaagtagcctccggtgaggcattgccgctctttaccgaaactacctcctacgctcctagcagtccctattctgcctccaaggcttccagcgatcatctggtgcgtgcttggtaccgtacgtacggcctgccaaccgttgtcactaactgctccaacaactatggcccttaccactttcccgagaagctgatcccgctagtgatcctcaatgcgctggatggcaagccgctgccggtttatggtaaaggtgaccaaattcgtgactggttgtatgtggaagatcatgcacgagcactctacaaggtagtgaccactggcttggtcggggagacttataacataggcggtcacaacgagaagcagaacctggatgtagtacatactatttgtgatctgcttgacgagatggtaccgaaagctggctcttatcgcgatcaaattacttatgtggcggatcgccccggacacgatcgccgatatgcgattgatgcttgcaagatgagcgctgcgttggattggcagccagaggagacttttgagtctggtattcgcaagaccgtgcagtggtatctggataatcaacaatggattaacaacgtcaagagtggtgcctaccaatcctggattgaacaaaactatagggagcgtacctga

SEQ ID NO: 10976 - DNA, 1032 bp, Escherichia coli
atggatgaattaattcgcaggaaactatttaagccttatcgtaaattaaataaacagagttatagaagtccgcaaagctctgagattaactttgaacgattgtttatattacatgagggaaaatcacctacattagcctattttgaatcggctattataagtcggtttcctgatgcagaatgtcattttatcgacacattagcatccactgatatatttattcctagaggatctgcccttgtcgtcattagattcatctccccaaaatggcaacagcacatagaaagatataacgacaggttttctcgaattgtttattttatggatgacgacctgtttgacccgactgcactatctacgttaccaaaagagtatcgtaccaagataataaggaggtcggcggctcagcatcgatggattacgcaatattgtgataacatttgggtttcaactgcctatttggctaataaatatgcacatcttaacccggagattgtttctgctaaaccgtcactggcactcattgaaacacatcgatcagtaaaaatcgcttatcatggctcaagttctcatcgggaagaaaaatattggttgagacaaatcgtagagggggtattgggagaatgtccccgtgccagctttgaaatttttggcgagcatgatatttataaatattatcgtgacctaccaagagtttcagtactgcatccgatgagttggcaaaattatcttgcgtataccaagactcatcatctggatatcgggttagcaccattacttgactctgactttaattcggctcgcggccccgtaaaattttatgattttgtcagaatgggggctgtaggtttatatagtaattgtgtaccatatagtgacttcattgaacaaaatgtaaatggaatcttgctggagaatgacccacatatatggataaaagctctttcattacttgttagtgcagatcataaacgtagcgagttggcgttcaatgctaaaaaatatgcttgtaaaattgtaggtgtcgagtaa

SEQ ID NO: 10977 - DNA, 2049 bp, Escherichia coli
gtgttaccttggactgtaagttatattatgtgtagctattgcgattggcagcctctgacattgccagactcgttttctcttcattctggttggcttctgattcgggggcgcgtgttgacgactcaaactcgaggtgaaactcgtctgcgctggcaatgcggacaaggaatatggcatgaacagaagttgccggtcactcgtcgaggcacgttgctggagctggtttatctaccctcgggagctagtcatttgtctttgctggcaagtaataagggcgctgagtgtaatgttgaaattactcagctttgttgtgtatcccgtgccgagagtctctggcgtcgattgcgccgggttgtacctttttaccgacgcttaacgaagtccagacgcaaaaggttaggcctttcatggcatttgtggctcacggacttgcagcaagcttaccaacttgtcagcagagttcgcgatgataaaccactcaatagctatgatgagtggctagcagacttcgacacccttgaacccgccgaatacaagctgattaagcgccagctggctcgctggggcacattaccacgtttctgtttgcatcttgttggcgttggggatgaacagagccgccacaagaccctggagagtattcaggcactctgttatccggcaagcaatataaacctgcaggagcatggtgcatatccagaaatctccagtcagtcaagcggcgaatggcagtgggtgttgcctgtaggggcagtggtttcgccaagcgccttattttgggttgcccaccagttacgccagaatcctgattgtttatggatatacggtgatcacgatctgcttgacgagagaggtgaacgtcactctcccaacttcaaacctgattggaatgaaacgctgctacagagccaaaactatattagttggtgtggtttgtggcgtgaacaaggtgctggccgtgttccctttgatgcggcgacatgccatcagtggtggctacagttggcaaagatgtgtgaaccgaaacagatagtccatattccatcattgatgatgcatttgcctgcaagagcgttgatttcggatgattttgagtcgctgaaagataaagaagatttactgccatcaggagtgagcattgaggcagcacctcatggtgtatgtcgttggcgctggccgttgccagcgcaattgccattggtttcagtgattatccctactagaaatggtattgctcatttacgcccttgtatcgaaagcctgatacaaaagacgcaatatgccaatatggaagtcatagtgatggataatcagagcgatgaggaggagacgcttgcttatcttgctcatatcgaacaggtttatggcgttagggtgatttcttatgatcaaccgtttaactattcagccatcaacaatctggcagtgagaaacgcacatggagatatgatatgtttgctgaataatgatactcaggtaatcagtattgactggctggatgaaatggtttctcatttattacgccccggcgtgggtgtggtaggagcaaagctgtattacggaaatggcttgattcagcatgcaggcgatgctgtcggccctggcggttgtgcagatcattttcataatggtttgtcagctaacgatcctggatatcagcgtagggctgttagtgcccaagagctgtcagctgtgactgcagcttgtttattgactcataaagagttatatctggcgctcggaggacttgatgaaacgaatttgccgatagcttttaatgacgtagattattgtctcagagttcgagatgctggctggagagtaatctggactcccttcgctgaattgtatcatcatgagtctatttcccgtggtaaagatgtatcaaaacaacagcagatacgagcgaaatctgagttgcgctatatgaaaaaacgatgggcatgtgcacttaaacacgatccagcctacaaccaaaatttgagttatgaacgtcctgatttctctttaagtagagctcctaatatagtattgccatggatgaattaa

SEQ ID NO: 10978 - DNA, 906 bp, Escherichia coli
ttgagaatctatatagccgctattatcaaggatgagtattcaagtttacttgaatggattgcctaccatcgagtattaggtgttgatgggtttattattgcagataatggcagtcgtgatggtagccgagaattactattttccctcgctcgcctaggtattgtgacgatgttcgaacaaccgactttggtgaatcaaaagccacaattacctgcatatgaacatattttacgtagctgtcccagagacatagacctgcttgcatttatagatgctgatgaatttttattgccacttgaatcggataccaatttgtcagattttttttctgaaaagtttcaggatgagagtgtcagcgctattgcattgaattgggcaaattttggttctagtggtgaattgtttgctgaagaggggttggttattgaacgttttacctatcgtgccccgcaatcctttaacgttcatcataacttcaaaagcgtggtcaaacccgaacgagttaaccgctttcataatccgcattatgctgatttgcgttatggtcgatatatcgatgcattgggtcgtgatttgattctgcacccgaggcatggtaatggggttagtgctgaagtgacttggagcggtgtcagggtaaatcactatgcagttaaatcacttgaggaattcttgttgggcaagcatctgcgtggtagtgctgccactgctaatcgagtaaagcataaagattatttcaaggcacatgatcgtaatgatgaagagtgccttctcgctgccgcattctcagaacaagtaaaagctgaaatggaacgattaagtgtgaagttgactgagttaccagcagttgaacctattcctactggttcttggttcaaaaaaaaaatgaagaaatggatggtttga

SEQ ID NO: 10979 - DNA, 384 bp, Escherichia coli
atggctgtcatttataccctcactaaatcgtcacttgtcaagtctggtggtcaattacattggaatattgattcgccatcagaacaacagccacaaaagatcgtcaatggtcgggttgcgcttcggggatggttactggcagatgtggaaaaagatctccgtgttgcggttaaaattgaacatttgacatacagttttcccttcaatataaagcgccctgatgttatttcagctatactgaaacagccacctgaaaaacatcaaagacttcattgtggatttgatatcaatgtcccattttctactaaaataattattggccttgagtctgatgggttgattacctggttggaagagttattatttctcctgcctgataattga

SEQ ID NO: 10980 - DNA, 1545 bp, Escherichia coli
atgaatcatgtattaaagcagattgcctctcaaaagcagaggggggatatcgtcatcattggtaaaggtcccagtattgaccagatagatttatccctgcttaaaaactgtattgttattaataccaatgactccgaacttatttatccgggggatattgcagtatttcatcatggctgggtactggacatctttgatgaacaagctcctcagtgtaaattgtacgtctctgatcgtaatcttcctgagggcgttgaacatctatccgctgaatttataccctatactcctgagtcggcagattttctgattcaacgttttttctctgaaactatccatattgaaagtgcaattgttgttacagcacttaaaattgccaatcagattgctctatctcaaaatgagaccaagaatgtgtatctgcttggatttgattttacgataaagggggggttcactagcaagatcccctgcgcagccttgcatgccgaaccagaatatcaagagcgaattatcagtagtcaagaacagctattgcagatgctccttgcagaaaaaacacgcctgaatatcaatatcaatcatgttggtaataagccttacagcgtatattctgttgatgcatttaatcaagtgttcgctgcccgccatcgtggagtcgtgctgcccacacatgcccagatttccactacatcatcacaaaatggggtgaaggtgatcgcagagattactactaatcactttggtgatatggaccgattgaagtcaatgattgtagcggccaagcaggcaggggctgactatatcaaactgcagaagcgtgatgttgaaagtttctatagcagggagaagctggagtcaccgtacaactctccttttggcaccacctttagggactatcggcatggcattgaactcaatgaagagcaattttcctttgtcgactctttctgtaaagagattggtatcggctggtttgcttctattttagatatgccctcgtatgagttcattcggcaatttgaaccagatatgatcaagctaccatcaactatatctgaacataaagattatttggctgctgttgcttctgattttactaaagatgtagtaatttcaactggttatactgatgaggcctatgagcgttttatccttgataactttaccaaggttagaaatatttatctgctgcaatgcacctcggcttatcccacaccgaatgaagatacccagctaggtgtgataagacattattataatttggcgaaaaaggatccacgtattattcctggtttttccagccatgatattggtagcctttgttccatgatggctgtcgcagccggtgcaaaaatgattgaaaagcatgttaaatttggcaatgtggcttggtctcactttgatgaagttgccatagacttggtgaacggcgattttgcccagttcgtaaaagacgttcgtaaagcagagcgaattgttggtagtgaagtgaaggttattcattcgactgagcaccacaaatactgggtatctcccagatag

SEQ ID NO: 10981 - DNA, 693 bp, Escherichia coli
atgttttcaatgctagttgttaattctatcaagcgagagcttaaggatattcttcgattgagatccttttactccaaaaaagatgatgatagttttgtatcagaaggagatctaaaagttcaagatatagttttcgaactctgtagaaagcatctaccagggcatgtgctaatttcagaggaattagcccctttaggagatattgagtggaatcccaaaggttcttacattgttctagatccaattgatggcacagaaaactttgtctctgggctcaaagagtggggcattggtatcagcatttacaccgaggggaaacatcaagagtcctgcatcttcttacctgaattgaatgatcttcatatcacaggtatgccgattacacatcatcgctctcgtattcgtggcctctcttcctcccttaccaagcaggatctgatgcaactggaagagggctttgaatatcgtatcattggctgctccatgtataacatgttggccgccgtacgcggtgcctatgacagctttgaaaatgtcaaaggggtgaattgctgggatattctaccaggtcttaatttagctctggaacatagctgtgaaacgttggtaaatggtgagccgtatcaggggcaattacttttccctacccaaaaatataaaattaagatcaaagcgcagcaagaggtgttgtga

SEQ ID NO: 10982 - DNA, 837 bp, Escherichia coli
atgaaaattaaggtaactaaagagctgggtgtgactttagcacaccttggtgtattcactcattggtcctatgaggaggctcttcaaggtaagtcttggttaacatcatttgattttctggatattgctgatgacattgttatcgaaaccccatctgcgttttatgcttcaaatccacctacagctaaatttctatgtaaaggtggactatgtacaataggttcttattcatacactcattcttttttaccttcggatgtcattattggtcgatatacctcaatagcaagcggccttaaaattttagagttttcacatcctatagaatggctatctacttcagttgcattctttacacctaaaccactcgtatcaaagtcagcattggccgaatttatagatactgatattgcaagagaaaattcgctgttctatcgctcagactttgatcctacacaagggagaaaatatcctgtaattggtcacgacgtatggattggtgaaaatgttactttagctatgggtataaccattggaaatggggcaatcattgcctctaatacaacggtaactaaagatgtacctccatatgcggttgtagccgggtgtcctgggactataaaaaaatatcgttttgataaagatttaattgataaaataactgagtctgaatggtgggactatgatgtgatcagctttgctggattagattataaagatccaatctcctttattaatgacttcaatcttaataaaaaaataataagtaaactaaaaaggccttgtatcaaatttaatagagaggggaagatgaatgttttcaatgctagttgttaa

SEQ ID NO: 10983 - DNA, 546 bp, Escherichia coli
atgtgtataagagacagcatatccagtgataattatgactgcgctagaattgctgataagtatggtgttgaatttatttttagggatagcaaatactgtctagattcaaccccttggagcgaggttcttgtatccgtattggagcaaacaaatactgatgatgatgatcttatttcttgggtacctgtaacttctcctctattctcagactattcaagagcactgttattgttatcagaaaatagccgtgctcatgactcattgatgaccgttacagagcacaaacattatatgttgaacaacgattttattccttgtaatttccattttggggtatgggcaagttattctcaacttataaagccttattatcaaatgaattgtgctttatggatagcacctaaagaaaaaatgataagaaatcgattccaaacaggtgataatccatatttcatggtgacgcctatgcttgatagcatagatatcgatgaaccagaagaatttgaattggcgcagattctatttaagaaaaaatatgaaaattaa

SEQ ID NO: 10984 - DNA, 3006 bp, Escherichia coli
atgcccgttgactttctgaccactgagcagactgaaagctatggcagattcaccggtgaaccggatgagcttcagctggcacgatattttcaccttgatgaagcagacaaggaatttatcggaaaaagcagaggtgatcacaaccgtctgggcattgccctgcaaattggatgtgtccgttttctgggcaccttcctcaccgatatgaatcatattccttccggcgtccggcattttaccgccagacagctcgggattcgtgatatcaccgttcttgcagaatacggtcagagggaaaatacccgccgtgagcatgcagcgctgatacgtcagcactatcagtatcgtgaatttgcctggccctggacatttcgccttacccgtcttttatatacccggagctggataagcaacgaacgtcctggcctgcttttcgatctggcgacagggtggcttatgcaacatcgtattattctccccggagccactacgctgacccggttgatttcagaggtaagggaaaaggcgacgttgcgcctgtggaacaaactggcactgataccgtcagccgaacagcgttcacagctggagatgctgctggggccaactgattgcagccgcctgtctttactggaatcactgaaaaagggccctgtgaccatcagtggtccggcgtttaatgaagcaattgaacgctggaaaactctgaacgattttggcctgcatgctgaaaacctgagtacactcccggctgtgcgcctgaaaaatctcgcacgttatgctggtatgacttcggtgttcaatattgccaggatgtcaccgcagaaaaggatggcggttctggttgcctttgtccttgcatgggaaacgctggcgctggatgatgcattggacgttctggacgccatgctggccgttatcatccgtgacgccagaaagattgggcagaaaaaacggctccgctcgctgaaggatctggataaatctgcattggcgctcgccagcgcatgttcgtacctgctgaaagaagaaacaccggacgaatcgattcgtgctgaggtgttcagctacatcccaaggcaaaagctggctgaaatcatcacgcttgtccgtgaaattgcccggccctcagacgataattttcatgaagaaatggtggagcagtacgggcgcgttcgtcgtttcctgccccatctgctgaataccgttaaattttcatccgcacctgccggggttaccactctgaatgcctgtgactacctcagccgggagttcagctcacggcggcagttttttgacgacgcaccaacggaaattatcagtcggtcatggaaacggctggtgattaacaaggaaaaacatatcacccgcaggggatacacgctctgctttctcagtaaactgcaggatagtctgaggcggagggatgtctacgttaccggcagtaaccggtggggagatcctcgtgcaagattactacagggtgctgactggcaggcaaaccggattaaggtttatcgttctttggggcacccgacagacccgcaggaagcaataaaatctctgggtcatcagcttgatagtcgttacagacaggttgctgcacgtctttgcgaaaatgaggctgtcgaactcgatgtttctggcccgaagccccggttgacaatttctcccctcgccagtcttgatgagccggacagtctgaaacgactgagcaaaatgatcagtgatctactccctccggtggatttaacggagttgctgctcgaaattaacgcccataccggatttgctgatgagtttttccatgctagtgaagccagtgccagagttgatgatctgcccgtcagcatcagcgccgtgctgatggctgaagcctgcaatatcggtctggaaccactgatcagatcaaatgttcctgcactgacccgacaccggctgaactggacaaaagcgaactatctgcgggctgaaactatcaccagcgctaatgccagactggttgattttcaggcaacgctgccactggcacagatatggggtggaggagaagtggcatctgcagatggaatgcgctttgttacgccagtcagaacaatcaatgccggaccgaaccgcaaatactttggtaataacagagggatcacctggtacaactttgtgtccgatcagtattccggctttcatggcatcgttataccggggacgctgagggactctatctttgtgctggaaggtcttctggaacaggagaccgggctgaatccaaccgaaattatgaccgatacagcaggtgccagcgaacttgtctttggccttttctggctgctgggataccagttttctccacgcctggctgatgccggtgcttcggttttctggcgaatggaccatgatgccgactatggcgtgctgaatgatattgccagagggcaatcagatccccgaaaaatagtccttcagtgggacgaaatgatccggaccgctggctccctgaagctgggcaaagtacaggtttcagtgctggtccgttcattgctgaaaagtgaacgtccttccggactgactcaggcaatcattgaagtggggcgcatcaacaaaacgctgtatctgcttaattatattgatgatgaagattaccgccggcgcattctgacccagcttaatcggggagaaagtcgccatgccgttgccagagccatctgtcacggtcaaaaaggtgagataagaaaacgatataccgacggtcaggaagatcaactgggcacactggggctggtcactaacgccgtcgtgttatggaacactatttatatgcaggcagccctggatcatctccgggcgcagggtgaaacactgaatgatgaagatatcgcacgcctctccccgctttgccacggacatatcaatatgctcggccattattccttcacgctggcagaactggtgaccaaaggacatctgagaccattaaaagaggcgtcagaggcagaaaacgttgcttaa

SEQ ID NO: 10985 - DNA, 819 bp, Escherichia coli
atgcaattagccagtcgttttggtcatgtaaatcagatccgtcgggagcgcccactgacacgcgaagaactgatgtaccacgtcccgagtatttttggagaagaccggcacacctcccgcagtgaacggtatgcgtacattcccaccatcaccgtcctggaaaatctgcagcgggaaggctttcagccgttcttcgcctgccagacccgtgtgcgcgaccagagccgccgggaatataccaaacatatgctgcgtctgcggcgggccggacagataaccggtcagcatgtgcctgaaattattctgctcaactcccatgacggttcatccagctaccagatgttacccggatattttcgtgccatttgtaccaatggcctggtctgcggtcagtcgctgggagaagtccgggtgccacaccggggaaacgtggtggacagggtcatagaaggtgcttacgaagtggtgggcgtgtttgacctgattgaggaaaagcgtgatgccatgcagtcgctggtcctgccgccaccggcacgccaggcgctggcacaggcggcgctgacttaccgttatggtgatgaacatcagcccgtcaccactaccgacattctgacgccacgacgccgggaggattacggtaaggacctgtggagtgcttatcagaccatccaggagaatatgctgaaaggcgggatttccggtcgcagtgccagaggaaaacgtatccatacccgggccattcacagcatcgataccgacattaagctcaaccgggcgttgtgggtgatggcagaaacgctgctggagagcctgcgctga

SEQ ID NO: 10986 - DNA, 354 bp, Escherichia coli; identical to SEQ ID NO: 8009

SEQ ID NO: 10987 - DNA, 180 bp, Escherichia coli; identical to SEQ ID NO: 8008

SEQ ID NO: 10988 - DNA, 570 bp, Escherichia coli; identical to SEQ ID NO: 6885

SEQ ID NO: 10989 - DNA, 732 bp, Escherichia coli
atgaaaatgaaaaaattgatgatggttgcactggtcagttccactctggccctttcagggtgtggtgcgatgagcacagcaatcaagaagcgtaaccttgaggtgaagactcagatgagtgagaccatctggcttgaacccgccagcgaacgcacggtatttctgcagatcaaaaacacgtctgataaagacatgagtgggctgcagggcaaaattgctgatgctgtgaaagcaaaaggatatcaggtggtgacttctccggataaagcctactactggattcaggcgaatgtgctgaaggccgataagatggatctgcgggagtctcagggatggctgaaccgtggttatgaaggcgcagcagttggtgcagcgttaggtgccggtattaccggctataactcaaattctgccggtgccacactcggtgtaggccttgctgctggtctggtgggtatggctgcagatgcgatggtggaagatgtgaactataccatgatcacggatgtacagattgcagagcgtactaaggcaacggtgacaacggataatgttgccgccctgcgtcagggcacatcaggtgcgaaaattcagaccagtactgaaacgggtaaccagcataaataccagacccgtgtggtctcaaatgcgaacaaggttaacctgaaatttgaagaggcgaagcctgttctcgaagaccagctggccaaatcaatcgcaaatattctctga

SEQ ID NO: 10990 - DNA, 738 bp, Escherichia coli; identical to SEQ ID NO: 5109

SEQ ID NO: 10991 - DNA, 159 bp, Escherichia coli
atgaatggcctgctgtgccggcgtgtgaagcccggctttctgcagactgatagcggtttccagcaatgtctcaccggcacgcgcctttatctgctcagaaaccaccgtaaaggagggatggcgggcaagtttttccgcagtacgggtttcatccagtga

SEQ ID NO: 10992 - DNA, 348 bp, Escherichia coli
atgatcccgttaccttccgggaccaaaatttggctggttgccggtatcaccgatatgagaaatggcttcaacggcctggctgcgaaagtacagacggcgctgaaagacgatcccatgtccggccatgttttcattttccggggccgcagcggcagtcaggttaaactgctgtggtccaccggtgacggactgtgcctcctgaccaaacggctggagcgtgggcgcttcgcctggccgtcagcccgtgatggcaaagtgttccttacacaggcgcagctggcgatgctgctggaaggtatcgactggcgacagcccaagcggctgctgacctccctgaccatgctgtaa

SEQ ID NO: 10993 - DNA, 546 bp, Escherichia coli
atgtctctcactaaattactgccggtcattttgttgatgatggccacaggtgtgcaggcctccacccgggatgaaattgaacgactctggaatccgcagggtatggccgtgcagcctgcacaaccggcagcagacacatcagccagaacagaaaagccggctccccgctggttccgcctcagcaacggcaggcaggttaacctggccgactggaaggtggtgctgtttatgcaggggcattgcccttactgtcaccagtttgacccggtactgaaacagctggcacagcagtacggcttttccgtttttccctacaccctggatggtcagggggataccgcctttccggaagcattaccggtgccaccggacgtgatgcagaccttcttcccgaatatcccggtggccacaccgaccaccttcctggtcaacgtcaacacacttgaggcattaccgcttttgcagggggcaacggatgccgccagttttatggcgcggatggataccgttctgcagatgtacggagaggaaaaaggtacgaaataa

SEQ ID NO: 10994 - DNA, 1668 bp, Escherichia coli
atgacaagctctactgattttcataaactttctgaagactgcgttcgccgttttttacattctgtagttgctgtagatgacaatatgtcttttggagctggtagtgatactttccctacagacgaagatattaatgctttagttgatcccgacgatgatcctacaccaataataacagcatcagcatccccaaggatagaatcaactaaatcaaaagcaaaggtaaaaaaccatccttttgattaccaagctctagcagaagctttcgccaaagatggtattgcttgttgcggattattagctaagagttttaatgttgaagaaagagatataattacagcatcatcccacaaggcagatataacaatacttgactgggatatgcaaagcgatagtgggcaatttgctattgaaataataaaatcgataatcgtttcagatataaattctggaggacgtttacgtcttctttctatttatactggtgaacatgttactgctgttataactaagttgaacaatgagttaaagaaaacataccgtagcgtaataaaaaatgatgatagtatttttattgaagataactatgcactcgaacaatggtgtatagttgttattagtaaagacgtttatgaaaaagatcttccaaatgtgttaataaaaaaattcactaaccttacagctgggttgctatccaacgccgcactctcttgcatttctgaaataagagaaaaaacccatgggatattaacaaaatataataataaattagacactgcatatgtttcccacatcttaaatttaataaaatccaaggagtcaagggcatatgcttatgaaaatgctcatgattatgcagtagatttaatttctgaagaaataagatcaatattgcaaataagtgaaaacttaaagaaatctctaagcaaaaactccttatcccattggcctatttttcactatgcaaaaaatggttgtaagaattttctattaactggaaaaaaacaaaaagacttatcagtagaacatctaaggaatatactctctgctgattctttagaagaaattcaacacgctattgaacacgcatctttaggtaaaaaggaatacttaagccaagatggtgaagaagataaaaagttaatgcaattatgctctctggaaatcacgcgcaggagtttaagatatcattctcatatagataatgtgtccttaaaacaaggaactttacttttagatgcatataattttgtctatctatgcatacaaccattatgtgatagcgtcagattgcatgaaaaagccgattttttattcctcaggggaacactggacgataataattacaatttgttaatcgaagatgaatatggcggtttttataaaattaaaatgccggcaaaagcttctaatattatttcattttcatttggagtcgaaaatggaaacggtgtcatcatagggaaaaagaacaatctagttaatactgactatatctcattcgttcctttactcgttgaaaaaatatctactccaaaagtattgaaatggatcggggaaataaaaacaacgtacgcgcaaaaaataacaactgatattgttgctaatctgtcaagaataggtttagatcaacatgagtggttacgaataaaatcaaaagatatataa

SEQ ID NO: 10995 - DNA, 321 bp, Escherichia coli; identical to SEQ ID NO: 8024

SEQ ID NO: 10996 - DNA, 597 bp, Escherichia coli
atgtcagcccggtcacgctcctgcccggcaatttccctgacagcctgctctgttttgccatccggcaggtcaggtttgttctctgccattttacggacaatttcatccgcacggcgttccgtttcacgacggatggcctcttcagcctgccgctgtgccagcacctctgccgtgaccggttcgccatttccggctcccggctggacactgttgtccgggatatccccccacacgcgaccaccggtgatggcaccgggattccacggacgaccttcaccggcaattctcaccaccacaccgctgtcaggattatcacgggcaatccggacgccatcctgcatattatcagccagcaggctctctccgttacggctgccctgcagggccacgaactgcgcatccccgctgcctttcacccgtccttcaccactgaatccccgcagcccgtttccgtcatccgtggtcagtgggttcagccagataccagctgacttgccgttacggtcaaacgccggcagtgccacatacggctgcggatatttgcgccccggtgcaataaaccgtgccggactgtctcccccggccagccctgcctga

SEQ ID NO: 10997 - DNA, 159 bp, Escherichia coli; identical to SEQ ID NO: 10991

SEQ ID NO: 10998 - DNA, 2199 bp, Escherichia coli
atgagttttaacgcaaaggatatgacccagggcggtcagattgcgtccatgcgtatccgcatgttcagccagatcgccaatatcatgctttactgcctgtttatttttttctggatcctcattggtctggtcttatgggtaaaaataagctggcagacgtttatcaacggctgtatttactggtggtgtacgtcactggaaggcatgcgggatttaataaaatcccagccggtctatgagatccagtattacggcaaaaccttccggatgaacgctgcccaggtactgcatgataaatatatgatctggtgcggagagcagctatggtctgcattcgttctggcgtctgtcgtggccctggttatttgcctgatcaccttctttgttgtctcctggattctggggcatcaggggaaacagcagagtgaaaatgaggtgaccggcgggcgtcagctgacggataacccgaaagaagtggcccggatgctgaaaaaagacggcaaggactccgatatccggattggcgacctgccgattatccgggattccgaaatccagaacttctgtctgcacggcacggtcggggccggtaagtcggaggttatccgtcgtctggccaactacgcccgtcagcgcggtgatatggtggtgatttatgaccgttcaggggaatttgttaaaagttactatgatccctccatcgataaaatcctgaatccgctggatgcccgctgtgccgcatgggatttgtggaaggagtgcctgacacagccggattttgataataccgcgaacacgctgatccctatgggtacaaaagaggacccgttctggcagggttcaggacgtaccatttttgcggaagcggcgtacctgatgcgtaatgaccccaaccgcagctacagcaaactggtggacacactgctttccatcaaaattgaaaaactgcgtaccttcctgcgtaattcaccggcagccaacctggtggaagagaaaattgagaaaacggcgatttccatccgtgctgtgctgaccaactacgtgaaagccatccgttacctgcaggggattgagcataacggtgagtcttttaccatccgtgactggatgcgtggtgtccgggaagatcagaaaaacggctggctgtttatttcgtcgaacgccgacacccatgcctccctgaagccggtgatctccatgtggctgtccattgccattcgtggtctgctggcaatgggagaaaaccgtaaccgtcgtgtgtggtttttctgtgacgagttacccacgttacacaaactgccggatctggtggagatcctgccggaagcccgtaagttcggtggctgttatgtgtttggtatccagtcctatgcccagctggaagatatctacggtgagaaagcggcggccacgctgtttgacgtcatgaacacccgtgcttttttccgttccccgagccataagattgcagagttcgctgccggtgaaattggtgagaaagagcacctgaaagccagcgagcagtattcctacggtgctgacccggtacgtgacggggtatcgaccggtaaggatatggagcgtcagacgctggtcagttattccgacattcagtctctgccggatctgacctgctatgtcactctgcccggaccgtatccggcagtcaaactctctctgaaatatcaggcacgaccgaaggtcgctccggagtttattccgcgtgacatcaacccggaaatggagaaccgtctgagtgccgtacttgccgcaagggaagcagaaggtcgccagatggccagcctcttcgaaccggaggttgcctccggagaagatgtgactcaggctgaacagccacaacagccacaacagccacaacagccacaacagccacaacagccacaacagccacaacagccagtgtcttctgtcatcaatgataagaagtcagatgcaggtgtgagtgttccggcaggggggatcgagcaggagctgaaaatgaaaccggaagaagagatggaacagcaactgccacccgggatcagtgaatccggtgaagtggtggatatggccgcttatgaggcatggcaacaggaaaatcatccggacatccagcagcatatgcagcgtcgtgaagaggtgaacattaatgtgcaccgggagcgcggggaggatgttgagccgggagatgatttctga

SEQ ID NO: 10999 - DNA, 738 bp, Escherichia coli; identical to SEQ ID NO: 5109

SEQ ID NO: 11000 - DNA, 663 bp, Escherichia coli
atgagcacagcaatcaagaagcgtaaccttgaggtgaagactcagatgagtgagaccatctggcttgaacccgccagcgaacgcacggtatttctgcagatcaaaaacacgtctgataaagacatgagtgggctgcagggcaaaattgctgatgctgtgaaagcaaaaggatatcaggtggtgacttctccggataaagcctactactggattcaggcgaatgtgctgaaggctgataagatggatctgcgggagtctcagggatggctgaaccgtggttatgaaggcgcagctgttggtgcagcgttaggtgccggtattaccggctataactcaaattctgccggtgccacactcggtgtaggccttgctgctggtctggtgggtatggctgcagatgcgatggtggaagatgtgaactataccatgatcacggatgtacagattgcagagcgtactaaggcaacggtgacaacggataatgttgccgccctgcgtcagggcacatccggtgcgaaaattcagaccagtactgaaacgggtaaccagcataaataccagacccgtgtggtctcaaatgcgaacaaggttaacctgaaatttgaagaggcgaagcctgttctcgaagaccagctggccaaatcaatcgcaaatattctctga

SEQ ID NO: 11001 - DNA, 1509 bp, Escherichia coli
atgccgggtggcatgatatccgccggaggtcacagcggacatgcggaaggaacgactcaggccgcagtggcagatggcacaatcaccatccgggacagggacaatcagaagcagaatctggcgaacctgagccgtgaccctgcgcacgctaatgacagtatcagcccgatatttgacaaggagaaagagcagaggcgtctgcagacagtggggcttatcagtgacattggcagtcaggtggcggatatcgcgcggacgcagggggaactgaatgcgttgaaggctgcgcaggataaatatgggcctgttccggcggatgcgacggaagaacagcggcaggcatatctggcaaaactgcgtgatacgccggaatacaaaaaggaacaggaaaagtatggtaccggcagcgatatgcagcgcggtatccaggctgcaacggctgcacttcagggcctggtgggcggcaatatggcaggcgcgctggcaggtgcttcagcgccggagctggcgaacatcatcggtcatcacgcgggtattgatgacaatacagcggcaaaagccattgcccatgccattctcggtggtgtgacagcagcccttcagggcaacagtgcggcagcaggcgcaattggtgcgggtactggtgaagtgatcgcgtcagccattgcgaaaagcctctacccgggcgtagatccgtcgaaactgacagaagatcagaagcaaactgtaagcacgctggcaacgctgtcagcgggtatggccggcggcattgccagtggcgatgtggctggcgcggctgctggagctggtgccgggaagaacgttgttgagaataatgcgctgagtctggttgccagaggctgtgcggtcgcagcaccttgcaggactaaagttgcagagcagttgctagaaatcggggcgaaagcgggcatggccgggcttgccggggcggcagtcaaggatatggccgacaggatgacctccgatgaactggagcatctgattaccctgcaaatgatgggtaatgatgagatcactactaagtatctcagttcgttgcatgataagtacggttccggggctgcctcgaatccgaatatcggtaaagatctgaccgatgcggaaaaagtagaactgggcggttccggctcaggaaccggtacaccaccaccatcggaaaatgatcctaagcagcaaaatgaaaaaactgtagataagcttaatcagaagcaagaaagtgcgattaagaagatcgataacactataaaaaatgctctgaaagatcatgatattattggaactctcaaggatatggatggtaagccagttcctaaagagaatggaggatattgggatcatatgcaggaaatgcaaaatacgctcagaggattaagaaatcatgcggatacgttgaaaaacgtcaacaatcctgaagctcaggctgcgtatggcagagcaacagatgctattaataaaatagaatcagccttgaaaggatatggaatatga

SEQ ID NO: 11002 - DNA, 252 bp, Escherichia coli
gtggcggatacgggcgtaaaacgcgccgctttccgctgcctctttatcgcctttttgcaggaagttgtcggcgtagtgataggcttcgccgtaggtggttttatcgcccccggtggcgtcatgctgctctgtcatcatctccgccgtggcggtgcggtagttgtagtcccgcgtggagacgcttttctccaccacgctgtatgccgtgttcagcccccatacggcttccgtttcaccatcaaacagccctga

SEQ ID NO: 11003 - DNA, 489 bp, Escherichia coli
gtgatactaaaaataatttcaaggttattcttttttattatagtagcagtttattttttagtgtttatgctttctcttgatggcggtggacgacttagtattcttaatatattagccgccattggtggtaacacgttctggtgtgtgctggtggtgatatccctggcagagagcgcaggaatatgcgtttatatgctcaagaaaaactgcctgactaattctgcggtgacaatattgtctacttcatttatctttacaacaagtatatttgtcatcctttttcttaaggcggagtttgtactggactggttatattgcatatatattgagatattttttaatggggatttttattcaggtcaggaaaaattattacagacagttccgtttatgattagaacatatttcctttttctaatggctaatctttttttattctggttatccttcttttttcttattaaaaataaaacattgcacaaagcgtag

SEQ ID NO: 11004 - DNA, 1482 bp, Escherichia coli
atggctaaaaaatccattgttgagtcaacgcaatggatccgcgacaatgaaattattagtgctttcttcttgacgggggaggtcacgagaattaatgcagcaaaggtgttgtttgcgaatgcttttgttgaaaacagcacgaataaaaaggattcaactgcgattaaaataaaatcaatatctgtttcgttgtatggctatgacaccggagctgcactggcacgaaaatttctggatgagttactcgaagagttttgtgaaaaagaaggtgaggataaatacctgtttaaaaaggtaccagtaaatatcgtctttgccggcttctttgactgttcacgtcattcaccagccagtaataataatggactggactattttttaagtcttccgggggaaattaccaagaataataagctgaaaacagctggcaaaatcgccaaagtcgcatttggcgagaaggccatcgaactggataccatcttacccggtacagttaagaacgcgttacatctggtagcggcttatgagcgacgtctatggcgcagtctttaccagttggggggtatgaatgcggaacataaggaaattttactgcctagttgtagcgaggatgtgggcggtggtctgaagccagatgaacagaaaccaagcgcagagttatgtcgtgtggccctgcaaaagatgtatgaagcggcatatgatgctggggtaccttatactgatttctctgttctggatgagaaagatagtaaagtgtctcgctatttcctcatgaatgatgctgtagaaggcaaatccgttaaagagtggatgaaaagctatgaaatggaagtgggacagtgccaaaaagaaacgcaaagcgcctctgaaagtaaagtaaatgatacggataataaaaatgacctgccctttgatttttatcttgatatatatttcaaatggttggcaaatcaatactatctttactgcactgaactttatcaattggatgaaaaactatcacttgcacatcgcaaacaaataagcgggcatggccctcttgccggaacgggaattaaccctaatcctgaagctgatgaaatcaatgcacagatcgcagaacttaaatctcactggggatggctagatgatgtaaggcgtgtcgctacaggattatcgaatgattttaattacggaaggccaatggatacccgcatgctaaatcatgaagatatttttcgcccggcatggaagcgagctgaactgtttcttgactattatcataaagcatggaacggagaagaactcacggagatatcatggctaggcatagatactattcattcttattttactcatgatttacaaactgttgataccggggcttctattaacgaaagttttttccttcgtcgtatggctgaatatcccaaagcaaaagaaaaaccagaagaaaagtcagaagaacagtcaccatctccagatttatcaggtgttgattaa

SEQ ID NO: 11005 - DNA, 555 bp, Escherichia coli
atggggctatttacccgactggaaaaatttgaccaaaagcttacgcgtggttatgcccgctgggggcgttgggtgtggcggatgctgatcgccgtgccagtactggtcgtattgtggaatatagggcaggcagtatggggaggtccaagaggtggagtgattctggaaatccacagtgaaattgaccgtccgatactgggattcagtgttaacggcgtggcgggcgcgaatgcttttgcgaatggtggcggttcagtcacctgttgcggtgatgtcagtggggatacggcagaggttatctggacattaagtactactcgtacacagtataatgctggaatgcgtctggagaaacgtaacaagactttgcctctcccaaaaagagaatggggagaaaattatctgcacgtgcattttatgcctggcgataaagtgttgctggggtggagtaaagattctttttctccgtatgaagatcttcacaacggggggaacaagacccgcgttcggcaggatgtgaaagataaactttatggcacagggaaaatgaattga

SEQ ID NO: 11006 - DNA, 789 bp, Escherichia coli
atgtctctggcagcctgtgttccgtcaagctgtgcgttctgcacatccacgctgacactgttgccttgcgtctgcgcagtggtcgtggtcttcagactgttgccttttacagacaccgtgccacccgcactggtttcacccgccagtgtggaagacgcgctgttcagcatgaggttaccgtcactgtttgtgaccgatttttctgtggtggtcagtgtgtctgcagaaaccacaagttcctttgccccggagagggtaccgctgttgtttatctgcgtggcactgagcgtcagcacgtcatcgctgacgagtctgccgcggttttcgagtgtaccgctgacggtaacgcgggcactgtcttttgcaccggcatcaccggacagtgtggcattgcggacgctgatatcgagtgtgctgccacttttaatactgccggtgctggtcaggtcagtggcggtgactttcaggccgttcccctggacggcaccggtattactgaatgtcccggttttcaccgtggcatcgcgcccggcaaccagtgtcccgccgttgttcaggctgccggaactgacggtgagtgttttcccggcaacgctgcggcctttcagtgtggtatcatcggtggtggtcaaggtgacattttcagctgcattcacggtcccggaagtctggttcaggtgctgtgcactgagcatggcgttctgcccggcagtcagttcaccaccgttctgtacaatctgcccggatgaagacagcaccagatttttatccgtcaccagacgggactga

SEQ ID NO: 11007 - DNA, 207 bp, Escherichia coli; identical to SEQ ID NO: 5080

SEQ ID NO: 11008 - DNA, 570 bp, Escherichia coli
atgacctacaaatacaaccccttctggcagcaacgtattcgtgagacggtgcggcacgcactggatgttcatccccgcctgacggcattgcgggttgacctgcgtttcccggatgtaccggcagcaacggacgcagctgtgatatcccgcttcattaatgccctgaaagcccgaatcgacgcttaccagaaacgtaagcatcgggaaggtaaacgcgtgcatcccacaaccctgcattacgtctgggcccgggagtttggggagtgcaaaggtaaaaaacactatcacctgatgctgctggtcaaccgggatacctggtgtcgtgccggtgattaccgcgctccgggatcactggccgggatgattaaacaggcgtggtgcagtgccctgggagtggataccggagatcataccacgctggcgcattttccggtcaggccggctgtgtggctggaacgcgatgatgacaccggctttcagcaggtgctggagcgtgctgactatctggcgaaggagagtaccaaagcttacggcaccggtgagcgcaactttggctgcagtcgtggctga

SEQ ID NO: 11009 - DNA, 213 bp, Escherichia coli
atggaagttaaaaccaaagaagactggctgtatcagttccgtcgttgttcatcccgggagacgctggaaaaagtgatttcccacacacgttataaacttacccctgcggagctggaagcctttaactctgccgttgacaaccggctggcagaactgacaatgaacaaactttacgatcgcgtgccggcttccgtctggaaatatgtcacctga

SEQ ID NO: 11010 - DNA, 183 bp, Escherichia coli
atggttcagaaaattttgtcggataaggttatgaatgaaagaacaaatgcgtattactcttattatcttggagagcgtaatatctccgtactgccccttaatgtttatgatcccccggaacgttttatcgcttacataaaaaaaaaacagagaaaatctgaacatcacactttcagattttga

SEQ ID NO: 11011 - DNA, 624 bp, Escherichia coli; identical to SEQ ID NO: 7934

SEQ ID NO: 11012 - DNA, 435 bp, Escherichia coli
atgtacggaacatgcgaaacgctatgccgggagctggcagcaaagtattcgggagacacgccactgatgctggttatctggtccccggaagaaattcaggccctctctgacggaatggatattgccctgaccgatcatgaaatcaggactgtcctggcgcgcctggaggacatcccggaagaccagcggactgaatccggtatttcttccggcgtggcgatggagatcatcaataacgtgagcgaaaaccgccaggtgactgtccctgctgaactgctggcgtccctgattcagaccgctgaacaggcattgtggaaacgtgaatgggccgcctgggatcatggcctcgccgtcccggaatgcgtcacccgccgtcaggcggtggttaatcaggtccgcatcctgctgaaaaacaacacacacgaaaacgactga

SEQ ID NO: 11013 - DNA, 300 bp, Escherichia coli
atgtacgccctgcattccgtagtgctgacagatagcagtataacgctcagtcagctcgcggcgtccatctccgcccagttgtccgagggcttcctgcagaccttcagccagagcagagaagctcttaccacccagcacaacccgcatccagctccagtggctccattccagacggaagtgatacaacttaccgacgatggtgacaactacacctttcagttcagtaaagtccgacaggcctcgcagaccgggctgatgtcgctggcggaacatgacctcctgctctgcactatactgtag

SEQ ID NO: 11014 - DNA, 375 bp, Escherichia coli
atgatcgccaaacgccagtttaagtccgaatgcgacgccaccaggaccaccaccaacaccacacggcagatagacaaacagagggttatcagcatcgacgatacgaccttgctgggcaaattgcgctttaagacgctggccagcgacggaatacccaaggaacaacgtgcgggaattctcgtcatcaataaagaaacagttcgggtcagactgcgcggctttacgtccttcctcgacggcaacaccataatcttgctcatattccacgaccgtaacgccatggctgcgcagtttcgcttttttccatgcccgggcatcagcagacatatgcaccgttactttaaagccgatgcgggcgctcataatgccgattga

SEQ ID NO: 11015 - DNA, 237 bp, Escherichia coli
atgacacagggctggcgggaggataaatgcccgtctgtccgcgccgggaaaagaccgcgcgccggtggcgctgaaaggggccgcgcttacgcgccgcccctttcattacgcggacgttctgatgggggcttctgtcttttcagacctgtcatttgcctgttactgatgatgttgttgttcctgctactgctactgctactgctactgctactgttcttcttttttctactgctctga

SEQ ID NO: 11016 - DNA, 564 bp, Escherichia coli
atgcacagtcagttaagagaacgtatccggctgatgcgcgcaaggctggataacgccgcgccggttgctgaaatccgggctgaatctcagctttttgtgagtcctgccccgatctgtgatcgcctggtgacgctggcggaaatcagcaaccgtgatcacattctggaaccctctgccggcaccggggccatactgcgggcgattcgggataccgcgccggaggccatgtgtgatgcggtggagattaacagcgggctggtccggtatctgcgggataattttaacggtgtcagggttcagtgtggcgacttcatggaatggcagccggtgcagtattacagccggattatcatgaatccgccgttcagtcacgggcaggatatccggcatatcctgcgggctttttccctgttgcgtccggggggcgttctggttgccgtctgtctcaacgggccacgccagcaggagaagctgttaccgttttctgacgtccgcgaggagctgccgcgcggcacgtttgcttataccgatgtcccgacgatgattattcgtttgcgtgcctga

SEQ ID NO: 11017 - DNA, 1362 bp, Escherichia coli
atgacattagcagcaatcaccatgaccgccccggaagccgccagccctgtgcagatgtaccgcgcgacctactcaccggatgacaacaaactgcgcctgtatgccgcgtcacgtcttgacccggagacgtataaaaaagtgcatgatgccggtttccgctgggcacccaaacaggcgctgtttgtcgcgccagcctggacaccgggccgggaagacgtgctcctctcacttgccggagagattgaggatgaagacagcacgctcgctgaacgtcaggaagcacgggcggagcggtttaccggatacagcggaaagcgggccagtgaatccgcacaggcacttgatgaagtggaaagactggccgcgatgatcccgcccggtcagcccattcttgtggggcatcacagcgaacgccgcgcccgtcgtgatgcgcagcgtattgaaaacggcatgaaacgtgccgtgatgctctttgaacgtgcggaatactgggaagaacgtgcgcggtcggcactgcttcacgcgaagtataaagaacgcccggacgttcgctggcgtcgtatcaaaaaaatcgaagctgatttgcgcaaggctgaaaagaccatcgcacagtcgcagaaatatctgacgatgtggcgggctgaatcgctggatctgaatatggcaaaactcatcagcagtcatgaccatatcagcgcctgtttcccgctggatacgtatccgcgcccggcagaaaaaagccagtatgaagggagccggtcgttatggtcggccctggatgatgacatcatcaccacggagcaggcccgcgaaattgcgatccgctgtcatgaacggcagattcagcatcagcaacgctgggttaaccactatcagaaccgcctgatctatgagcgtgccatgctggacgaaagcggcggcgtggttacccggacacaggattttgagccgggcggacaggttttcagccggggcgagtggctgactatcatccgcgtgaacaaaagcaacggggcggtgagttcagtcacaacgccaaattacagttttctcgggtacagcggcacgatgaaagtgacgcccgatcgcatcacggactacaaagcaccatcggcagaagaggctgccgtcgccagtcaggccgcgaagcgtccgccggtagtcaactatccgggggaaggtttccgggaaatgacaaaggcgcagtgggccgccctgccccgggactgtaaggccgtgcgcagtgtggaagaagcagaagaccacggggcataccgctaccgccgcacaatggacaataatttccgcctggtgaatgtgtatatcaccgacatgaaaatcacggaaatcccgcagaaataa

SEQ ID NO: 11018 - DNA, 231 bp, Escherichia coli
atgacaataagtattgtttcaccttccgcagcggctgtaaagccccgccgtcatccccgtttcagacgcgaagacatccccgcgccggaaattgaccccgtgctgaaagccttcgggcgacacatagcccggagttttcaccgggggcgtggtgtacacatccccgccatgaaaaacacggctttcgggcaggtgctccgcacactcgaactgaaacgcgcttttaactga

SEQ ID NO: 11019 - DNA, 723 bp, Escherichia coli
atggtgacggttttaccgctgtctgttgtggtttcagtccactcagtaccgttacctttctcgctgccttttgccgcattaacgccggcaaagacgctgataccggcaccgttaccaccggcaccgatactgacacccacgccaccgccactgctgctgttcctgcccgttgttttttgtgtgtttgcagcgccactcaacagaacatcattcgcggcatccaggcttgtgttaccaccggccttaagctggcttccggcaatcacaatatctccgcggttatcgcccctgtttttaccggttgcgacaacagacagattattcccggcattcagcgtactgccggatactgtgtcactttcagaatgttgttgtgatttcgatttctgggtggtgagcgacaggctgactcccgtcgcattcgggtcaccggttgcggaggccattgtcgcagcctgtccggcctgcacaccagacagcgctgtctttgtggcctgcagggctttcagacggctgtcactgctctccttcgtctcctgtgcactggtgaccgcattattgatggcactgcccaccgtgccggaaagggcaaccgtcagcccgcttttcttctgctcaaatttttcgtccacagtacgacgatcatgccccgggtcaaccaccacactgtcaccggtaatgctgatatcccggttcgcaatcacatccgaaccgctgatatga

SEQ ID NO: 11020 - DNA, 1158 bp, Escherichia coli
atgggacctttcttcaatgatgttgccgagtggttagagtcattaggtcgtaacgctgtgaatgttgtattcaatggaggagatcgtttttactgccgtcatcgacactatctggcttattaccaaacgccgaaagaatttcctggttggttacgagatatccaccggcaatttgactttgataccattctctgttttggtgactgccgtccattgcacaaagaagcaaaacgttgggcgaagtctaaagggatccgctttctggcatttgaagaaggatatttacgtccgcaatttattactgttgaagaggacggtgtaaacgcgtattcatcgctgccgcgcgatcctgacttttatcgtaaattaccagatatgcctgcaccacatgttgagaacttaaaaccctcgacgatgaaacgtattggtcatgcaatgtggtattacctgatgggatggcattaccgacatgaattcactcgctaccgtcatcacaaatcattttctccttggtatgaggctcgttgctgggggcgtgcgtactggcgtaagctattttacaaaataatgcaacgtaatgtattggctcggttagtgaatgatctggaccaacgttactatcttgttattttacaagtttataatgatagccaaattcgtaatcacagtaattataatgatgtgcgtgattatattaacgaagttgtatattcattttcgcataaggcaccgaaagagagttatttggtgatcaaacaccatccgatggatcgcggtcacagactctatcgaccattaattaagcggttgagtaaggaatatggcttaggcgagcgagtcatatacgtacacgatctcccaatgccggaattattacgccatgcaaaagcggttgtgacaattaacagtacagtggggatctctgcactgattcataacaaaccactcaaagtgatgggtaatgctctgtacgacatcaaggggttgacgtatcaagggcatttgcaccaattctggcaggccgattttaaaccagatatgaaactgtttaagaagtttcgtgaatatttattgatgaagacgcaaattaatgctgtttattatggtgtaaaatcaaaaagcaatagaaggtccgcattcctaaacggtagcagatga

SEQ ID NO: 11021 - DNA, 237 bp, Escherichia coli
atgatgtcagataccacacactcccgcccggaggtggtgagcgggcatacggacgttatctattccacctcagtctgccacattctggctgtacgaaaaagtatactgctgcaaatcgacacacttatccggcaactggctgaaatctcagttctgacggaaagcattggaggtaaaaccggcctgaactggtcgagaaagcagggttttcgctgcggttgttggctgattgagtaa

SEQ ID NO: 11022 - DNA, 624 bp, Escherichia coli
atgaaactttccctgacgccggaagccgacagcgttaacgtacaggcactgaatatggggcgcattgtcgttgacgtcgatggtattaatctcgctgaactgattaacaaggtcgctgaaaacggttattcactccgcgtggtggatgaatctgaccaacagtcaacctgcactccacaaccgtttacgactctttccggcatacgctgcagtaccgcacatatcacggaaaaggacaacgcctggctgtactcgctgttacaccagaccagtgactttggtgaatcagaatggattcattttaccggtaccggttatctgttacgttccgtcgtctggtcgtcacactcatccggcgttatggtgtcagtctcattcatctggatgccagtgccagatgtctgccaggtttacccactttcgactggtaatccggaaattcacaacatgaaatcattaaccacggaaacagcgctggatattctgattacgtggctgcaggacaatatcgactgcgaatcgggaattatcttcgacaacgatgaggataaaacagattcggcagcactgttgccctgtatcgaacaggccagggagggtatccgtaccctgcgccaacagtaa

SEQ ID NO: 11023 - DNA, 1464 bp, Escherichia coli; identical to SEQ ID NO: 9318

SEQ ID NO: 11024 - DNA, 429 bp, Escherichia coli
gtgaaccgtgctcccctacatatcagaaagcagaccaagccacgacaaaatggtttgtttaaacgtttcacactactcatcgtagacttcctgaaagagagatttgtatgggcgagaaggaaaactgataccactgatgctgaccatgataagcgtatcgctgaaaattatgtgtttgatgaagtgctgggtgtcaatgttccacgctcggagtttgaaagacgcgctaagtttaacaataaccaaacatcacaagaagcaggagtctatggtaacgaatcaaatattaacaagactgttcgtttcccaaatcgttttgagcaagaacaaacggaggtcaataaacacatggaatttatactgtctattggtggaaaaccttctatgccaaagttaaaacaaactaacagaaaatctaacatcaaatag

SEQ ID NO: 11025 - DNA, 912 bp, Escherichia coli
  misc_feature (43)..(52): n is a, c, g, or t
gtgatagcatatgaaaacatagaattttttatatgcttggtgnnnnnnnnnnataatatccttttcttcatctttctttcaatagcaattccattccttttattcctcgcatggaaacagcacctaaaaaccaaagagattcgttcatatctattgaaagagggatataatattattttcaacggagaaggtaactcatatctcgcgtttaatattagtaatgcgacatttcgcgcaggtaatttaacttccaatgattattttcaagcatcaatttcttatatccacgattatagatgggagtggaaggaggttgaggcaaagaaaataaataatatatttattatttacatttcgaatattgatttcccttcccaaaaactattttatcgcaataataaatctttagcagaaatagactgggcaaaattacaagcaatttttcatcaaccatatgaaatacagaatgacgtcatgcaagataacaataatacgcactatgattttttcatatcccatgcaaaagaggataaagatacttttgtcagaccactggtagacgagttaaatagacttggtgtaattatttggtatgatgaacagacacttgaagtcggcgatagcttaaggagaaatattgatttaggcctaagaaaagcaaattatggcatagtcatactttctcataactttctaaacaagaaatggacacaatacgaattagatagtttaattaatcgtgcagtgtatgatgataataagattatattgccaatctggcataatatcaatgctcaagaggtatctaaatacagccattatttggcggataaaatggcactgcaaacttctttatatagcgttaaggaaatagcaagagagttggctgaaatagcatacaggagaagataa

SEQ ID NO: 11026 - DNA, 822 bp, Escherichia coli; identical to SEQ ID NO: 8707

SEQ ID NO: 11027 - DNA, 555 bp, Escherichia coli
  misc_feature (523)..(532): n is a, c, g, or t
atgccaacaataaccactgcacaaattaaaagcacactacagtctgcaaagcaatccgctgcaaataaattgcactcagcaggacaaagcacgaaagatgcattaaaaaaagcagcagagcaaacccgcaatgcgggaaacagactcattttacttatccctaaagattataaaggacagggttcaagccttaatgaccttgtcaggacggcagatgaactgggaattgaagtccagtatgatgaaaagaatggcacggcgattactaaacaggtattcggcacagcagagaaactcattggcctcaccgaacggggagtgactatctttgcaccacaattagacaaattactgcaaaagtatcaaaaagcgggtaataaattaggcggcagtgctgaaaatataggtgataacttaggaaaggcaggcagtgtactgtcaacgtttcaaaattttctgggtactgcactttcctcaatgaaaatagacgaactgataaagaaacaaaaatctggtagcaatnnnnnnnnnnggcaaaagcgagtattgagctaa

SEQ ID NO: 11028 - DNA, 1200 bp, Escherichia coli
atgaaaggtatgcagaaaatcaagagaggtaagcaatttacaggagtagttgtctatgcacttgaaccggcttcacaccataaaactgatcccagggttattggtggcaatatggctggcaaccatatcgttgaccttattcgcgagtttggacaaacaaaacttttacgacctgatattaaaaaaccggtatggcacaactctcttcgcttaccgcatggagaaaaattgtcagaagcacaatgggcaaccgtagccgacgactatatgtcccgtatgggttttaatgatacacatcttcgttgctatgttcttcataatgatgagactggacaacatattcacattattgccagtcgtatcgatattactgacggaaagttgtatctgggaaaaaatgagaaccttgccagcactcgaattatcagtgagcttgaaagaatacatggtctcacagaaacagcgactacttcaaaccgacgatctcagagcataaagaagctttcgcgcaacgaaaagatgctctctgaacgaacggcaactccctgcccaaaagccgctttgcaaacttgcatcgataatgtgttatccaatcacccagatttgttatcgttcattcagcaactggaacaagtgggtgtaacctgccagcccaacattgcttcgacgggcaaaatgaatggtttttcatttgaatttcaggggattgccttcaaagcttcgcagcttgggaaaaggtatacctggtcaaatattcagacacttattgattactcgccggaacatgtaaacttacttaatacgcagtctaagtctgctcctgctccttgcacacagccagaaacacatcatcccagcagagaaactattctcgataaactactgcaactcgacgagcaagtcagaaatgaaagggagagtgaacttgcccacaccatccaattgcaccaaaaactacgctttacggcccatcagttatccagacaacaccaatcccacttccagatgtggcttccatttcttagcaagctcatacaactgctcagacagttggatagttctctgttgtatgcgaccactcgtccctttagacaaatctatcatcttcacttacttgcctcctctcctgaacctggcgatgaaatacattcagaacaattggttagcaaaggatccaactacaaaccacatttcaagtag

SEQ ID NO: 11029 - DNA, 438 bp, Escherichia coli
atgcattataatcctcaaaaacaacagcttgatttaacaaaaacatcgaggaggggaaaatttcatactgaacggttaccagagaatgaaatcagatcatactgtgtaagtgtcagattaaatgaaaatgaattatctattctggaagaaaaaagaggttcctataaaaaaggagaatggctcaggatggcttcgctgaataaacttcctttggtattaccagcgattaataaaagtgcatgggtagagcttggtcgcctttcacaagatttaaatcgcctactgacctacctcgatggtaaaagtcctgacagcgatccaaccctaacagaaatgcatgtaatcaaacggcaggtgcagacacttcgcactcttctacttccctcaactttttggagtaatacaaatgaaaggtatgcagaaaatcaagagaggtaa

SEQ ID NO: 11030 - DNA, 567 bp, Escherichia coli
atgtatacagaatcaaatgttaagctttcctgtaacgccctctggcaaaagtgtgtccttgcaactctgtatcgggctgcagctacacatcctgaaattaaattattacaatttaaattaataccagggcagggtattaataagaccattccctctctgatggccgattttactggtgaactgcatagactcatttctgaatatttgcagtgcaagagacgtaaagataaatctgttgagcccacccctttatattatctctggagtagggaagctgtggctaacgataccactccttatcttatggtgttgctacttaataacgatgtctggtgtaagagtcgtgaggtggtggttctaagaaatctgattgagcaggcgtggggaaaagtattgggtgaagataactccattacacatctggttgtgtatcctgaagtgttgtcgttggtatttgatgcagctaacacatacaacgctgagtctggtgtactggaacagacggcccgggcttacattgaatcgcatggtgctattgaacgtcatcttgggtgtagtgacttttaa

SEQ ID NO: 11031 - DNA, 516 bp, Escherichia coli; identical to SEQ ID NO: 5775

SEQ ID NO: 11032 - DNA, 126 bp, Escherichia coli
atgcgtttattttcttctcctgggcatattgtggttgccggacaatccggtggcggaaaatctgcttcggtgaaagaactaatcgacagaattattcagaaatataaggaacccttcgatgaataa

SEQ ID NO: 11033 - DNA, 516 bp, Escherichia coli
atgaaacagatttctttatttattcctctgctgggaaccttattactttccggctgtgcaggaacgaactctgattttgagtgtgatgccaccacgtcagatacctgtatgacgatggagcaggctaatgagaaggccaaaaaactggagcagtcctcagaagcaaagccggttgcggcatcactgccgcgcctggctgaagggaacttccggaccacgtcggtgcaggccgttgcggcgacaacgccgtcccgcagcaggcctgcggtgacagcacatccggagcagaaactgctggcaccacgcccgctgtttaccgctgcccgggaagtgaaaacggttgttccggtcagttcagttgcgccggtaacacctccccgtccgctaagaacgggtgagcagacggctgcattatggatagcgccttatattgataatcaggatgtttatcatcagccatccagtgtgttttttgttattaaaccgtctgcgtggggaaaaccacgtattaattaa

SEQ ID NO: 11034 - DNA, 426 bp, Escherichia coli
atgtgtaataacattactctttcgcaggaagaaaaatttatccagttgattgataaatatatcactcagcatcgtgatgatgctattaatgctgtgttttaccgaaagctgtatgtgcttttcgtcggatatcaccttaaatattattactcacgtaagcaatactgtaactcgtgttttcatgtcgataatattatgcagatgttcacaggtgtagtttcatcactcagggctaatgtgctaataaagctcaacaatagtcatacaatgcttcattgcttgaacgggcttgtggattacatttccactaacctcatggaggttgaacaactctatgcagatttactggcgcaatatgaaaggaaaagtatttctcattcgttggattttataccaccacccatggggggcagaaaaagactgtga

SEQ ID NO: 11035 - DNA, 420 bp, Escherichia coli
atgtactgtactgttaaagaaattatccgcgaagtgctggatacagacgtgccggacagtgaatgcgtttttgccgtggtgctgacccgtggggatgtgcgtcacatagcccaggactggagtctgacagacgatgagctggaaaccgtcatgcagcggctggacgatgcctttgagcatggtgctgatgtcagcattgttcacgacgttgttcgtgaactgatggaggaaaagcgcgtaaaccgtcttgtaacagtccctgcggtgctgctggaaaaagtgatggtgatggctggtagtgaaatttatcgcctccatgctgtagggagcgagaacgggggcgacggtgacgcatttgtcagggaagaacgtgagattatgcgggtgatgcgtcaggcgctggacggggagaatgggtaa

SEQ ID NO: 11036 - DNA, 279 bp, Escherichia coli
atgccaggtttttccgccactctgtgtgtccagattcagcttgtctttcagcgaaaccgacgcgtccttacaggtcacgaaattattattgctgtcgtaaacgccccgcagcggactggggcgggaaaaaatcagcgtgtagggatcagcggaggccatcagctcctccagcgtgtatttgtggttcaggtaaatatcccccatcacacagttctgcacataatcctgaaaaagattggcgatttccggattgcgggacaaaaagtcggtgctttttga

SEQ ID NO: 11037 - DNA, 744 bp, Escherichia coli
gtggacttcacctcccgttttgatttcgccattcatgtggcgcatgcccgttcccgtggtttgcgtcggcgcatgccaccggtgctgcgtcgacgggctattgatgcgctgctgcagggactctgttttcactatgatccgctggccaaccgcgtccagtgctccatcaccacgctggccattgagtgcggactggcgacagagtccggtgcaggaaaactctccatcacccgtgccacccgggccctgacgttcctgtcagagctgggactgattacctaccagacggaatatgacccgcttatcgggtgctacattccgaccgacatcacgttcacaccggctctgtttgctgcccttgatgtgtctgaggatgcagtggcagctgcgcgccgcagtcgtgttgaatgggaaaacaaacagcgcaaaaagcaggggctggataccctgggtatggatgagctgatagcgaaagcctggcgttttgtgcgtgagcgtttctgcagttaccagacagagcttaagtcccgtggaataaaacgtgcccgtgcgcgtcgtgatgcgaacagggaacgtcaggatatcgtcaccctggtgaaacggcagctgacgcgtgaaatctcggaagggcgcttctctgccagtcgtgaggcggtaaaacgtgaagtggagcgtcgtgtgaaggagcgcatgattctgtcacgtaaccgcaattacagccggctggccaccgcttccccctga

SEQ ID NO: 11038 - DNA, 237 bp, Escherichia coli; identical to SEQ ID NO: 8060

SEQ ID NO: 11039 - DNA, 237 bp, Escherichia coli
atggtcacagaatataaagggaatatcggagatactcagaatagtattcatggcgaagaaaatattgtagacagacaatattcagagttaaaaaataatcacaaacaggaagaaattcagcaaaacaacagatataatgaagaaaataaacgacagaaattaatgccaacaccgtctgaagatgcgttaaaacagatggtggatgataagaaagaacgattgaaggggccattatga

SEQ ID NO: 11040 - DNA, 438 bp, Escherichia coli
atgcgaattctgaactgttatatggcgaatgacagcaaaggccattttgttacggcgaaagaagcagcgaagcacaaccgccaggacgttttgtgctgtgtgtcctgtggatgcccgttaacacttcagcggggcaatgacggacaaccaccgtggtttgaacatgaccagatgactgtcgctgagaaaatcctgctgcgatgcacctggcttgacccggcagagaaagaggcccgtcgtttgcatctgcagggtatgacggttccggattatacggtgaaggtgagaaagtggttttgtgtgatgtgtgacgaagattatgaaggagaaaagtgctgcccgcgttgtggtaccggggtatacagcagggaggggggctgcaggaaggcaactggaaggataggaactgagcggttcagtcgcggaaatcagttgtag

SEQ ID NO: 11041 - DNA, 477 bp, Escherichia coli
atgcagcagctttcctttctgcccggagagatgacacccggcgagcgcagtctcattctgcgggccctgaaaaccctggaccgccatcttcatgaacccggcgtggccttcacctccacccgtgcggcacgggaatggctgattctgaacatggcgggactggagcgtgaagagttccgggtgctgtatctgaataaccagaatcagctgattgccggtgaaaccctcttcaccggcaccatcaaccgcacggaagtccatccccgggaagtgattaaacgcgccctgtatcacaatgccgcagccgtggtgctggcacataatcacccgtccggtgaagtcacacccagcaaggcagaccggcttatcacggaacgtctggtacaggcactgggcctggtggatatccgggtgccggaccatctgatagtcggtggcagccaggttttctcctttgcggaacacggtctgctttaa

SEQ ID NO: 11042 - DNA, 333 bp, Escherichia coli
atggcagggctccgttttgtcggcctgcgtcaccacaaacagcacctgctgatgtccccggtgcaggatgtgtcgccagaaatactcatccacagacagggcacggtcatcggctttaatcagccacagtaccaggtccagttcaggcagaatgtcacggtacagggcttcatactctgcatccctgtcacgactctcgcccaccccgggcaggtcagtgataaccatgctgtgaccatggccactcagacggaagcgctgcacttcccgggtgccggcgtgaacatcactgaccggggtgacctccccctgaaacagtgtattacagagtga

SEQ ID NO: 11043 - DNA, 234 bp, Escherichia coli; identical to SEQ ID NO: 10186

SEQ ID NO: 11044 - DNA, 519 bp, Escherichia coli
atgaaagaaaaaaaagatgacgactttagatttaatactattgactatataatatttatatctgaaacacatgagataaacggtaatccagttgtgattattttagaaggtcctaatgcggctaagaatcctgcagaaattaatgaatatttgaattatattgccaatgggtggtctcaatttaatggtcgtaatactatgaaaattggcaatgccagagatttattcattaatttagaagagaaagaagagcctaaatcaaatagtttaactcgcactgatgaaagaaaactatggtatcgtaaaaatcgatatatgaaagattggtcagatgataaagttttacaggcggcggttgatcatatgaacaaaataatgccatttattttgaaaaatggaccaaaattaccagtggataagttaggtgagctaatgttggcatttggtgattttattgaagagtccaacatgcgtggcttagatctaaaaggacttaataaccttttcacggataagtaa

SEQ ID NO: 11045 - DNA, 141 bp, Escherichia coli
atgctgaaaggcgggatttccggtcgcagtgcaaaaggaaaacgtatccacacccgtgccattcacagcatcgacaccgatattaagctcaaccgcgcattgtgggtaatggcagaaacgctgctggagagcctgcgctga

SEQ ID NO: 11046 - DNA, 435 bp, Escherichia coli
atgaaaactgaactgaccctgaatgtattacagaccatgagcgcacaggaatatgaagatatccgggctgccggaagtgatgaacgtcgtgaactcacacatgccgtgatgcgggagctggatgcgccggataactggacgatgaacggcgagtatggcagcgagttcggcggctttttccccgtccaggtccgtttcacgcctgcccacgaacgttttcacctggcgttatgttcaccgggcgatgtctcccaggtctgggtgctggttctggtgaatgccggtggtgagccgtttgcggtggttcaggtacagcggcggtttgcaccggaagccgtcagccattcactggcactggcggcgtcactggatacgcagggatacagcgttaacgacatcatccatatcctgatggcggaaggaggtcaggcatga

SEQ ID NO: 11047 - DNA, 432 bp, Escherichia coli; identical to SEQ ID NO: 8375

SEQ ID NO: 11048 - DNA, 246 bp, Escherichia coli
atgcaactggtcaccgcattctgggcaacgctggcactgatgtatatgtcgtttgcggcaggcaccgggaaatatccgatgtggcccggaaaaatgaaatgtgtccgggtgggaaccgcagatgaacatctgaaggaagtttatacggaagacgcttccctgccggaaaaaatcaggaaatgccctgtttatttccatgatgacagaacaaacagaagcaacggagataaaaatgaacatgcgtaa

SEQ ID NO: 11049 - DNA, 219 bp, Escherichia coli
atgcatacctttatttttcttgtgctgataaaaaatattaacggtggcggaagctggaatattacacccatgccaaatacggacgtatgcgtgcaggttcttcggacaatcgaagcacatggcggcaggggctttggaaatacaggggagtgtattgaagttaaaacaaatgaacctttgaacagcgtgatggatacactaaatggtggtgggcaatga

SEQ ID NO: 11050 - DNA, 240 bp, Escherichia coli
atgatgccggatggcgaccgttttcatctggtcaacggtgaaaactggtttgaccgcactgtgagtgctgatgccgcaggtatcatcctgacttcccttgtgattaaccgccagttgtggctgtaccacgacagcggggatgcgggactgacacacctttaccggatgcgcgatgcgcagttgtggagccacatcgaatttcaccccgaatgcaatgcgatttacgcggcacttgactga

SEQ ID NO: 11051 - DNA, 141 bp, Escherichia coli
atgctgaaaggcggaatttccggtcgcagtgccagaggaaaacgtatccatacccgtgccattcacagcatcgacaccgacattaagctcaaccgcgcattgtgggtgatggctgaaacgctgctggagagtatgcgctga

SEQ ID NO: 11052 - DNA, 336 bp, Escherichia coli; identical to SEQ ID NO: 5780

SEQ ID NO: 11053 - DNA, 234 bp, Escherichia coli
gtgaccgtggtgttccaggacggcttccagctgaaaaccgtggaagagatggcgctggagcgcacgcagaacagagcggaagaagataatccggaaagtccggttcctgttccgccatcagctgaaagtcatcttaacggctttaatactgaccagatgctgaagcagctgggcaacctgaatccgcagcagtttatgtccggcagccagggaggaggcaacgatggcaaataa

SEQ ID NO: 11054 - DNA, 258 bp, Escherichia coli
gtgaccgtggtgttccaggacggcttccagctgaaaaccgtggaggaaatggcgctggagcagtcacagagtacagcggaagagggtaacccggaaagcccggtgccgaatcctccctcggcagaaagccacctgaacggttttaacaccgaccagatgctgaaacagctgggcaatctgaatccgcagcagtttatgtccggagacaagaacccgctgggcggggatgccggcaaggagggcggaaatggcgggtga

SEQ ID NO: 11055 - DNA, 258 bp, Escherichia coli
atgcgcgactggtggcagccgacgaaagcaaacttcttcggacacctgcaaaagccgcagattatcgatgccctgaatgatgccggactgtccggtgctgcgcgggacgcggagaaaatgaagaaaggcgatgccgctgaacatgcagagttccacatgaaagacaaccgctgggtgcctggctggatgtgtacaccacgtccacaggcagagacggaaaccacggagtaccgtgacgaccaggcagaagccgcctga

SEQ ID NO: 11056 - DNA, 186 bp, Escherichia coli; identical to SEQ ID NO: 9349

SEQ ID NO: 11057 - DNA, 624 bp, Escherichia coli
atgtcatacagcggcgaacgagataactttgcaccccatatggcgctggtgccgatggtcattgaacagacctcacgaggtgagcgctcttttgatatctattctcgtctacttaaggaacgcgtcatttttctgactggccaggttgaagatcagatggctaacctgattgtggcgcagatgctgttcctggaagcagaaaacccagaaaaagatatctatctgtacattaactctccaggcggggtgattactgccgggatgtctatctatgacaccatgcagtttatcaagcctgatgtcagcaccatctgtatgggccaggcggcctcgatgggtgctttcttgctgactgcaggggcaaaaggtaaacgtttctgcctgccgaattcgcgcgtgatgattcaccagccgttgggcggctaccagggccaggcgaccgatatcgaaattcatgcccgtgaaattctgaaagttaaagggcgcatgaatgaacttatggcgcttcatacgggtcaatcattagaacagattgaacgtgataccgagcgcgatcgcttcctttctgcccctgaagcggtggaatacggtctggtcgattcgattctgacccatcgtaattga

SEQ ID NO: 11058 - DNA, 372 bp, Escherichia coli
atgaaacacggaattaaagcactgctcattaccctgtccctggcctgtgccggaatgtctcatagcgcgctggcggcagcttctgtggcgaaaccgacaacagtagaaaccaaagcggaagctcctgcagcacaaagtaaagcagcagtaccggcgaaagccagtgacgaagaaggcacccgggtcagcattaataatgccagcgcggaagagttagcccgcgcgatgaatggcgttggcctgaagaaagcgcaggcgattgtcagttatcgcgaagagtacggtccgtttaaaacggtggaggatctaaagcaggtgccggggatgggcaattcgctggtggaacgtaatctggcggtattaaccctgtaa

SEQ ID NO: 11059 - DNA, 1929 bp, Escherichia coli
atgctgagtttatacgaaaagataaagataaggctgataattttatttttattggcagcactgtcatttattggtctttttttcatcattaactatcaactggtatcggaacgcgcggtaaaacgtgccgatagccgctttgaacttattcagaaaaacgttggctatttctttaaagatattgaacgttcggccctgacattaaaggactcactgtatttattaaaaaatacagaggagattcaacgcgccgtaattctgaaaatggaaatgatgccatttttagactcggtgggactggtacttgatgataataaatattatctcttttcgcggagggcgaataataaaatcgttgtttatcatcaggaacaagtaaatggaccgcttgtcgacgagtcagggcgggttatttttgccgattttaacccatcgaaacgaccgtggtcgatggcttcagatgactctaacaacagctggaaccccgcatacaattgctttgatcgtccgggtaaaaaatgtatctcttttacgctacacatcaacggcaaagatcatgatttgttagcggtagataaaattcatgtcgatttaaactggcgatatctgaacgagtatcttgatcacatcagcgctaatgatgaagttctatttttaaagcaaggtcatgagatcattgctaagaatcaactcgctcgtgaaaaattgattatttataatagcgaaggtaattataatattattgattctgtcgatacggaatatattgaaaaaacatcagcggtgccaaacaacgcattattcgaaatctatttttattatcctggtggtaatttattgaacgcatcagataaacttttttatctgccgtttgctttcattattatcgtattgctggtggtttatttaatgaccactcgagtgttccgtcggcaattttctgaaatgacagatttggtcaatacgctggcgtttttgcccgactctacggatcaaatcgaggctctgaagattcgtgaaggcgatgcgaaagagattatcagcatcaaaaattcgatcgcggaaatgaaagatgctgaaattgaacgggcaaataaattgctctcgctgatctcttacgatcaggaaagcggttttattaaaaatatggcgattattgagtccaacaataatcagtatctggctgtggggatcatcaaactgtgtggtctggaagctgtggaagcggtgtttggtgttgatgaacgcaataaaatcgtcaggaaattgtgtcagcgaattgccgagaaatatgcgcaatgctgcgatatcgtgacatttaatgccgatctctatttactcctgtgccgggaaaatgtacagacgtttacccgtaagatagcgacggtaaacgattttgacagcagttttggctaccgcaatctgcgcatccataagtctgctatttgtgaacctttgcagggggaaaacgccaggagttacgcagaaaagctgaaactggcgatttccagtatccgcaaccatatgttctcagagtttattttctgtgatgatgcgaaactcaacgaaatagaagagaatatctggattgcgcgtaatattcgccatgcaatggaaattggcgaactattcctggtctatcaaccgattgttgatattaacacccgcaccattttgggcgcggaggcgttgtgccgttgggtgtctgcggagcgggggattatttcaccgctgaagttcattaccattgctgaagatatcgggtttatcaatgagctgggctatcaaattattaaaaccgcgatgggtgaattcagacattttagtcagcgtgcgtcgctgaaggatgatttcttactgcatattaatgtttcgccctggcagttaaacgaaccacactttggtaatggtgccaacttactgatttag

SEQ ID NO: 11060 - DNA, 1224 bp, Escherichia coli
atgcgtaaaaaagaagagaatctgaatacggcatcaggattgcgtattgccatgattttgctgggtattgccgtcacacctgtactgttgtcatcctcaagcctcggcaatcaactttccagcagcagtttaattagcgtcgtattgttaggcggcgtcattctgaccttactttcagccatcaccattagcgtgggagaaaaagcccgcctgccaacgtatggcattgtgaaatattcgtttggcgaaaaaggggccatcgccattaacattttgatggcgataagtctgttcggctggattgccgttaccgccaatatgtttggtcattcggtacatgacttactggctcaacatggactggaagttccactggcactgttagtggcggctggctgtgtcatttttgtcgcctctacggcatttggctttaccgttctgggaaaaattgcccaagttgccgtgccggttatcgcgctggtgctgtgttacatcctctatgtggcaacccataccgaagtggcagtaccagcggcgattgtggagatgaatacaggtgtcgccgtttccaccgttgttggcaccattattgtgctggttgccacactgcctgatttcggtagttttgtgcataaccgcaaacatgcgctgattgccgcaggcgtgacgtttctggttgcctaccctctgctctactgggcgggtgcaacgccgagcgccattagtggtcagggatctttactgggtgcgatggcggtattcggtgcggttctgcctgcggcgctgttgttgattttcgcctgcgtcaccggtaacgcgggcaatatgttccagggcacgctggtggtttccacactgcttacccgctttcccaaatggcagattaccgtggcgctgggtatcctttccgccatcgtaggcagtatggatattatggcgtggtttattccgtttctgctgttcctgggtatcgccacgccacccgttgccggaatttatatcgctgactttttcctttatcgccgtaatggctatcaagagtcagtgttagcccaggagtcacagattaaagtgctgacattcgcagcatggatcataggcgcagcggttggctttatgaccgtaaaaggcttattcaccctgacgacgatcccttcggtagactcgattctggtggcatgtatcgcgtatgcgattctcagtcgggcaactcaacaccgctaa

SEQ ID NO: 11061 - DNA, 1656 bp, Escherichia coli
atggaattttcgttttcacccaaacttcttgttgttgctgtcgccgcagctcttcctctcatagccagcgcagcagataccccgtcaaccgccaccgcacgcaaaggctttgccggatacgatcacccaaaccagtatctggttaaaccggcgaccactattgccgacaacatgatgccggtgatgcagcatcctgcacaagacaaagaaacccagcagaaactggcggaacttgagaaaaaaaccggtaagaaaccgaacgtggttgttttcttgctggatgatgtgggctggatggacgttggctttaacggcggcggcgtggcggtgggtaaccctacaccagatatcgacgccgttgccagccaggggctgattttaacttcggcgtattctcaaccgagttcttccccaacccgcgccacgattctcaccggacaatactccatccaccacggcattctgatgccgccaatgtacgggcaaccgggcggtctgcaagggttaaccacgctgccgcagttgctgcacgatcagggctacgtcacccaggctatcgggaaatggcatatgggggaaaacaaagagtcgcagccgcagaacgttggctttgatgatttccgcggctttaactcggtgtccgatatgtataccgaatggcgtgatgttcatgtcaacccggaagtcgccctgagcccgactcgttctgaatacatccaaaaactgccgttcagcaaagatgacgttcatgccgtgcgcggcggtgaacaggaagccattgccgacattacgccgaaatatatggaagacctggatcaacgctggatggaatatggcgttaagttcctcgacaagatggcgaagagtgataagcctttcttcctctattacggcactcgcggctgtcacttcgataactacccgaacgccaaatatgcgggtagctctccggcgcgcacctcttacggcgactgcatggtggagatgaacgatatcttcgccaatctgtataaagcactggagaaaaacggtcagcttgataacacgctgattgtgttcacctctgataacggtccggaagccgaagttccgccgcacggtcgcacgccgttccgcggtgcgaaaggttctacatgggaaggcggcgttcgtgtgccaaccttcgtttactggaaaggcatgatccaaccgcgtaaatctgacggcattgtcgatctggcggatctcttccctacggcgctggatctggcggggcatcctggggcgaaagtagcgaatttagtaccgaaaaccacctttatcgatggtgtggaccagacatctttcttcctgggaacaaatggtcagtctaaccgtaaggccgagcactacttcctcaacggtaaactttctgctgtgcgtatggatgagttcaagtatcacgtcctgattcagcaaccttacgcttatacccagagcggatatcagggtggattcaccggcacagtaatgcaaacggcgggatcgtcggtgtttaacctgtacaccgatccgcaggaaagcgactctatcggcgtgcgccatatcccaatgggtgtaccgctacagaccgaaatgcatgcgtatatggagatcctgaaaaaatatccaccacgcgcgcagattaaatctgattaa

SEQ ID NO: 11062 - DNA, 1203 bp, Escherichia coli
gtgacggcgttaaaagtaggaagtgagagctggtggcagtcgaaacatggcccggaatggcaacgtctgaatgacgaaatgtttgaggtcactttctggtggcgtgatccccagggttctgaagaatactcgacgataaagcgcgtatgggtctatatcactggcgtgaccgatcaccatcagaacagccagccccggtcgatgcagcgaattgcaggaaccgatgtttggcagtggacgacacaactcaatgccaactggcgcggcagctactgctttattcctactgaacgcgatgacattttttctgcaccatcccccgatcgcctcgaattacgcgaaggctggcgaaaactattaccccaggcgatagccgatccgctgaatccacaaagctggaaaggcgggcgagggcacgctgtttctgcactcgaaatgccgcaagcgcctctgcaaccgggatgggattgtccgcaagcgccagaaacgcctgccaaagaaattatctggaaaagtgaacggttgaaaaattcacgccgtgtatggatttttaccaccggcgatgcaacagcagaagaacgcccgctggcagttttgcttgatggcgaattttgggcgcagagtatgcccgtctggcctgcgctgacttcgctgacccatcgtcggcaacttccgcccgccgtgtatgtgttgatcgacgctatcgacaccacgcaccgcgcccacgaactgccgtgtaatgcggatttctggctggcagtacagcaagagttattaccccaggtgaaagctattgccccttttagcgatcgcgccgatcgcaccgtggtcgccggacagagttttggtgggctttccgcgctgtatgccggactgcactggcctgaacgctttggctgtgtattaagccagtcaggttcgtactggtggccgcatcggggcgggcaccaagagggcatgttacttgaacagctaaatactggtgaagttagcgccgaaggtctgcgcattgtgctggaagcgggtgttcgggagccgatgatcatgcaggccaatcaggcgctgtatgcgcaattacaccccctaaaagaatccattttctggcgtcaggttgacggcggacatgatgcgctttgttggcgcggtggcttgatgcaggggctaatcgacctctggcaaccacttttccatgacaggagttga

SEQ ID NO: 11063 - DNA, 741 bp, Escherichia coli
atgtcatcactgaatattaaacagggaagtgaagctcattttcccgagtatcctctggcgtcgcccagtaataatgaaattgatttacttaatctaatcgaggttttatggcgggcaaaaaaaacggtcatggcggtcgtttttgcgtttgcctgcgcaggcttgctgatctctttcatcctgccgcaaaaatggactagcgcggcggttgtcacgcctccagaacctgttcagtggcaagagctggagaaaacattcactaagcttcgtgtgctggatctggatatcaaaattgatcgtacagaagcatttaacctgtttatcaagaaatttcagtctgttagcttgcttgaggagtacctgcgttcatcaccttatgtgatggatcaattaaaagaagcgaaaatcgacccactggatctgcatcgcgccattgttgcattgagcgaaaaaatgaaagcggttgatgacaatgccagtaagaaaaaagatgagtctgcattgtatacttcctggacgctaagtttcaccgcacccaccagtgaagaggcacagaaagtgttggccgggtatatcgattatatctctgcgttggtggtgaaagagtcgatagaaaacgtccgtaataaactggagatcaaaacccagtttgaaaaagaaaaactggctcaggatcgcattaaaacgaaaaatcaacttgatgcaaacattcagcgcctggtgatgctgccaacttactga

SEQ ID NO: 11064 - DNA, 687 bp, Escherichia coli
atggaaatgacaaaaaataaaaatgcaactataaaaaaacagtcatcagccggctgcttttcaatgtttactttatcattttctattacctttattcctgcatttcttacaaacaggcaggaacttatatccaggggacttcttgttccagcattatttcttgctgaatttctaattcttgttccactgtattttattttcttccgaaaaagagaaggattaggaagaggttcttttcgactggatgttttttttactcttttctctttaataatgattattcagttatttgtcccttatctgctggcagtgaggaaaacggaagaatggatgatctcgcaaatgtctttttccggagccattttatggattaaaatattttcttctgtacttcttgttcctgtatatgaagagattgtatttcgagggtgtctttttaactcttttaaattctggtttaatgacaatatttacacctctgctattgtaacatcagtcatattttctgcattacatctacaatatactgactttcatacatttttgatgctctttctggtatcgttagttcttattagtgcaaaaataaagtcgaatggcctgttaatgcccatattacttcacatgtcgatgaatgcagtcatagcaggaatacaatatctggcttctatcagttatactcattaa

SEQ ID NO: 11065 - DNA, 459 bp, Escherichia coli; identical to SEQ ID NO: 8981

SEQ ID NO: 11066 - DNA, 447 bp, Escherichia coli; identical to SEQ ID NO: 10295

SEQ ID NO: 11067 - DNA, 219 bp, Escherichia coli; identical to SEQ ID NO: 10296

SEQ ID NO: 11068 - DNA, 309 bp, Escherichia coli
atgaaaaccgccactgcgccgttaccaccgctgcgttcggtcaaggttctggaccagttgcgtgagcgcatacgctacttgcattacagcttacgaaccgaacaggcttatgtccactgggttcgtgccttcatccgtttccacggtgtgcgtcacccggcaaccttgggcagcagcgaagtcgaggcatttctgtcctggctggcgaacgagcgcaaggtttcggtctccacgcatcgtcaggcattggcggccttgctgttcttctacggcaaggtgctgtgcacggatcggcactgttgcaaatag

SEQ ID NO: 11069 - DNA, 2064 bp, Escherichia coli; identical to SEQ ID NO: 10337

SEQ ID NO: 11070 - DNA, 600 bp, Escherichia coli; identical to SEQ ID NO: 10338

SEQ ID NO: 11071 - DNA, 1260 bp, Escherichia coli
atgacaagtattcaacaacgtgcagagcttcatcgtcaaatctggcaaattgctaacgatgtcaggggttcggtcgatggatgggattttaagcaatacgttctgggcgcacttttctaccgttttatcagcgaaaatttttccagttatattgaagccggtgatgacagtatctgttatgcgaaactggatgacagcgtaattactgatgacattaaagacgatgccatcaaaaccaaaggctacttcatctacccaagccagcttttctgcaacgtagctgcgaaagcaaataccaatgacagattgaatgcagatttaaacagcatcttcgttgctatcgaaagttctgcttacggttatccttcagaagctgacatcaaaggtttgtttgctgatttcgataccaccagtaaccgcctgggtaacaccgttaaagataaaaatgcccgcctggctgcggttctgaaaggggttgaagggttaaaacttggtgacttcaacgaacatcagattgacctgttcggtgatgcctatgagttcctgatttctaactatgcggcaaatgccggtaagtcaggcggtgagttctttacaccgcagcacgtctccaggctgattgcacaactggctatgcacgggcagaccagcgttaacaaaatctacgacccggcagcgggttccggctcactgttgttgcaggcgaaaaaacagtttgataaccatatcatcgaagaaggtttttttggtcaggaaatcaaccatacgacctataacctggcgcgtatgaacatgtttttgcacaacatcaactacgacaagtttgatatcaagctgggcaatacgctgactgaaccgcacttcagagatgaaaaaccgtttgatgccatcgtttctaacccgccgtattcggtgaaatggattggcagcgatgacccgacgctgattaacgatgaacgttttgccccggctggcgttctggcccccaaatccaaagctgactttgcgtttgtattacatgcgctgaactatctttctgccaaaggtcgtgctgcgattgtctgcttcccgggcattttttaccgtggcggcgcggagcagaaaatccgtcagtatctggttgacaataactatgtcgaaaccgtgatttcactcgcaccgaacctgttctttggcaccaccattgccgtcaatattctggtgttgtctaaacataaaacggataccaaagttggtgatgctgccaacttactgatttag

SEQ ID NO: 11072 - DNA, 2784 bp, Escherichia coli
atgagaaacctctgtttcttactgacgttagtggcaactctgttgctccccgggcgactgattgccgccgccttaccgcaggatgaaaagttaattaccgggcaactggacaatggcttgcgatatatgatttatccgcatgctcaaccaaaggatcaggtaaatttatggctgcaaattcataccggttcattgcaggaagaagacaatgagcgcggcgtggctcattttgtagaacatatgatgtttaacggcacaaaaacatggccgggtaataaagtcatcgaaacatttgagtcaatgggcctgcgttttggtcgcgatgttaatgcctataccagctatgacgaaacagtgtatcaggtgagtttgccgactacgcagaaacaaaatctgcaacaagtgatggcaatcttcagtgaatggagtaatgccgcaacctttgaaaaactcgaagtagacgctgaacgcggcgtaattactgaggaatggcgtgcccatcaggatgcgaaatggcgcacctctcaggcgcgccgccctttcctgctggcaaatacccgtaatttagaccgtgaacctatcggcctgatggataccgtcgccacggtcacaccggcacaattgcgccaattttatcaacgctggtatcaaccaaataatatgacctttattgtggtcggcgatatcgacagtaaagaagcgctggcgctgataaaggataatttaagtaagcttccggctaacaaagcagctgaaaatcgcgtctggccgacaaaagccgaaaaccacctgcgctttaatatcatcaatgataaagaaaaccgggtgaacggcatcgcactctattatcgcctgccaatggtacaagtgaacgatgagcaaagctttatcgaacaagctgaatggagcatgttggttcagctgttcaaccaacgtctgcaggaacgcatacagtcgggcgagttgaagactatttctggcggcactgcgcgcagcgtcaaaattgcacccgattatcagtcgctatttttccgtgtaaatgcacgagacgataatatgcaggatgctgcgaatgcattaatggcagagttggcaaccattgatcagcatggtttttctgctgaagaactcgatgatgttaaatctacccgccttacctggctgaaaaatgcggttgatcagcaagctgagcgtgatttacgtatgctgaccagtcgcctggcatccagctcattaaataatacgccgttcttgtcgccggaagagacatatcaactttcgaaacgtctgtggcagcaaattaccgtgcaaagtctggcggaaaaatggcagcagttaagaaagaaccaggacgcattttgggagcaaatggtaaacaatgaagttgccgccaaaaaagcattgtctcctgcggctatcctggcgctggaaaaagagtacgccaacaaaaagctggcggcttacatcttcccaggcagaaatttatcgttaacagtagacgctgacccacaggcggaaattagcagcaaagaaacgctggctgagaatctgacatcattaacactttccaatggtgccagggttattctggcaaaatccgcgggtgaagagcaaaagctacaaattattgccgtatctaataaaggcgatttaagtttccctgcgcagcaaaaatcacttatcgcgctggctaataaagcagtaagcggaagcggcgttggtgaactctcctcttccagcctgaaacgctggagtgcggaaaactcggtaaccatgagcagtaaagtcagtggcatgaatacgttgctctccgttagcgcgcggactaataaccctgaacctggtttccagttgattaaccagcgaatcacccacagcacgattaacgacaatatttgggcatcgctacaaaatgctcaaattcaggcgttgaaaacgctcgaccagcgtccagcggagaaattcgcccagcagatgtatgagacgctctatgccgatgaccgcacgaaattaccgcaagaaaatcagattgcacagtttactgccgcagatgcactggctgccgatcgccagttgttttcatctccagcggatatcacgtttgtcattgtcggtaatgtcgcagaagacaaactcgtggcgttaattacgcgttacttaggatctatcaaacactctaattcgccattagccgcaggtaaaccattaactcgcgcgacggacaacgcatcggttactgtaaaagaacaaaatgaaccagtggcacaggtttcacagtggaagcgttataattcccggactcctgttaatctggcgacgcgtatggcgctcgatgcttttaacgtcgcactggcaaaagatctacgcattaatattcgtgaacaggcatctggggcatacagcgtttcttctcgcctctcggttgatcctcaggccaaagatatcagtcatttgctggcttttacttgtcaaccagaacgacatgatgaactgttaacgttagcgaatgaagtgatggttaagcgtctggccaaagggattagtgagcaagaactgaacgaataccagcaaaacgttcagcgcagcctcgatatccaacagcgtagcgttcaacaattagcgaataccattgtaaatagtcttattcaatatgacgatcctgcagcatggactgagcaggagcaattgttgaaacaaatgacggtagagaatgttaacactgctgttaaacaatatctttctcatccggtgaatacctataccggagtattattgccaaaataa

SEQ ID NO: 11073 - DNA, 2373 bp, Escherichia coli; identical to SEQ ID NO: 10298

SEQ ID NO: 11074 - DNA, 696 bp, Escherichia coli
atgatgaagcacatgcgtatatgggccgttctggcatcatttttagtctttttttatattccgcagagctatgccggggttgctctgggtgccacccgtgtgatttaccctgaagggcaaaaacaggtacaactggcggtaacaaataatgatgataaaagtagttaccttattcagtcatggattgaaaatgctgaaggaaaaaaggatgccaggtttgtaattactcctccgttattttccatgcagggaaagaaagagaataccctgagaattattgatgccacaaacggacagatgccggaagacagggaaagtttgttctgggtgaatgtcaaggccatcccggccatggataaggcgaaaaccggcgagaattatctgcagtttgcaattgtcagcagaattaaactgctctaccgtccacagggactggttattccgccagaacaggcaccgggtaaattagagttcactcgtgaaaacggagggctgactctgcttaatccgacgccgtattatctgacagtgactgacttaaaggccggaaataaaagtcttgaaaacaccatggtacccccacagggaaaggtcactgtgaatatccctggaggatacaccggaggagatattacttataaaacaattaacgattatggtgctctgactgaacaggtgaggggtgtggtgaagtaa

SEQ ID NO: 11075 - DNA, 564 bp, Escherichia coli
atgcgtgggcacgacgctgaccacggtattctctatatcaacattatctgcaagggtgttggtatccagtgccacccggttttcacgatagtctgttgcataaggcagtacagcataccccctccagtctgtagacacccccgtctggttttcaatgcgcgtatcagatgcacctggtgcacggacaagaatcagcgtatctcccagaggctggctcagtgtcagaccattggcatgtgccagaataccgccactcagcccataatacagttgccggtaacccccactgtgactgtatcctgcactggcattaccgtatccccctctgtaattcagagaggcatatcctgttttactgctcccctcataccctccccgggtataaccactctggatgctgtatcccagattattgtcctccagcagtgtgccatacagccctgctgtactggcagcctgtccgtgagcctccagggtctgactgtaacgggcactggcgtttctccatgcagatgtgctgtccgaacgcatccagtggctgaacggaatgctgacatcaaatga

SEQ ID NO: 11076 - DNA, 240 bp, Escherichia coli
atgtttggtatattcccggcggctctggtcgcgcacacgtgtctggcaggcgaagaacggctgaaagccttcccgctgcagattttccaggacggtgatggtgggaatgtacgcataccgttcactgcgggaggtgtgccggtcttctccaaaaatactcgggacgtggtacatcagttcttcgcgtgtcagtgggcgctcccgacggatctgatttacatgaccaaaacgactggctaa

SEQ ID NO: 11077 - DNA, 372 bp, Escherichia coli
atgccctggagaataatcagggatgaagaaaattatgcttcccgatttattagtctgatgtgtgaaaaagaaccggagctgaaaatagcgcagcaactggcactcgagttctaccgtattctgaaaacccaaaataaatcacagctaagtagctggttcactcgagtccacgaaagcggttcagcagaatttcggcgcgtggcggcggggatggaagctgatgctgcagctatatgtgaggcaatcagtagccgctggagtaatggtgttgtcgaaggtcatgtaaatcgcctgaagatgctaaaacgccagatgtatggtagagccggatttgaactactcaggcagagggtcatgagtccactggcatga

SEQ ID NO: 11078 - DNA, 2532 bp, Escherichia coli
gtgattgcgaaccgggatatcagcattaccggtgacagtgtggtggttgacccggggcatgaccgtcgtactgtggacgaaaaatttgagcagaagaaaagcgggctgacggttgccctttccggcacggtgggcagtgccatcaataatgcggttaccagtgcacaggagacgaaggagagcagtgacagccgtctgaaagccctgcaggccacaaagacagcgctgtctggtgtgcaggccggacaggctgcgacaatggcctccgcaaccggtgacccgaatgcgacgggagtcagcctgtcgctcaccacccagaaatcgaaatcacaacaacattctgaaagtgacacagtatccggcagtacgctgaatgccgggaataatctgtctgttgtcgcaaccggcaaaaacaggggcgataaccgcggagatattgtgattgcaggaagccagcttaaggccggtggtaacacaagcctggatgccgcgaatgatattctgttgagtggcgccgcaaacacacaaaaaacaacgggcaggaacagcagcagtggcggtggcgtgggtgtcagtatcggtgccggaggtaaaggtgccggtatcagcgcctttgccagcgttaatgcggcaaaaggcagggagaaaggtaacggtactgagtggactgaaaccacaacagacagcggtaaaaccgtcaccatcaacagtggtcgggatacggtactgaacggtgctcaggtcaacggcaacaggattatcgccgatgtaggccacgacctgctgataagcagccagcaggacaccagtaagtacgacagtaaacagaccagcgtggctgccggcggcagttttacctttggctccatgaccggctcaggttacatcgctgcctcccgggataagatgaagagccgctttgactccgttgctgaacaaaccggaatgtttgccggtgatggtggcttcgacatcacagtgggtaaacatacccaactggatggtgcggtgattgcctccactgccacaccggataaaaaccacctggataccggaacgctgggtttcagtgaccttcacaacgaagcggattataaagtcagtcacagtggaatcagtctgagcggtggtggcagcttcggggataaatttcagggtaacatgccgggtggcatgatatccgccggaggtcacagcggacatgcggaaggaacgactcaggccgcagtggcagatggcacaatcaccatccgggacagggacaatcagaagcagaatctggcgaacctgagccgtgaccctgcgcacgctaatgacagtatcagcccgatatttgacaaggagaaggagcagaggcgtctgcagacagtggggcttatcagtgacataggcagtcaggtggcggatattgcgcgtacacagggagaactgaatgcgttgaaggccgcgaaggaagcaaccagcgaaacacttcctgctaatgcaacagagaaacaacgccaggaatatcttgcgaaactgcgtgacacgcaggcttacaggaatgaaatggcgaagtatggtaccggcagtgaaattcagcggggtatccaggccgcgacagcggcgcttcaggggctggcggggggtaatttagcaggtgctctggccggagcttcagcaccggaactggcacatctgctgaaatcaacagaaaaagacccggcagtaaacgccattgctcacgccattctgggcggcgcagtggcggcaatgcagggtaataatgtcgctgccggtgcagcaggcgcagcaacgggagagctggcagccagagcgattaccggaatgctgtatcctggcgtgaagcagtcagacctcagtgaagagcagaagcagacgataagtacgctggcaaccgtgtcagcagggctggccggcggtctaaccggaaacagcaccgcatcagcagcagtgggagcacagagcgggaagaatgctgttgagaataactcactcagtgatggctggaacaatatcctgccatcaggaacacaggattacggacaggccgtagcctcgtggaatcagtatgctcaggacaataatctgacaccggagcaggttcaagaagggatgaatcgtatagctattggtgaagggccttcttgggggacaacatataaagtacacccggtagttcaggctggcggtgatgttagctttatccggggttatactttaagcggaactatagatgacaatcatatttcagttaatcaaggggatatttatagtataggtgctcatggcggagcctcgatcggattatcctttggcccgtatttcccgggattaataaattcaaatgataacgattattcgataaatggtggttttggcgttggtgcagtggggctttctacgggtaaagatggtgttagtttcacttttggttttggcccaagttggggttggagtgcaactgaaattaaaggcgttgacgttaatggcacttcaacaagtgaggtttatcgatatgattttaaataa

SEQ ID NO: 11079 - DNA, 822 bp, Escherichia coli; identical to SEQ ID NO: 8297

SEQ ID NO: 11080 - DNA, 741 bp, Escherichia coli
atgccaacaccaaatcctctggcaccggtgaaaggggccggaaccacactgtgggtttataacgggagcggcgacccttatgcaaacccgctttcagacaatgactggtcgcgtctggcaaaaattaaagacctgacgcccggcgaactgaccgctgagtcctatgacgacagttatctcgatgatgaagatgcggactggaccgcgaccgggcaggggcagaaatccgccggagataccagcttcacgctggcgtggatgcccggagagcaggggcagcaggcgctgctggcgtggtttaatgaaggtgatacccgtgcctataaaatccgcttcccgaacggcacggtcgatgtgttccgtggctgggtcagcagtatcggtaaggcggtgacggcgaaggaagtgatcacccgtacggtgaaggtcaccaatgtgggccgtccgtcaatggcagaagatcgcagtacggtgacggcggcaaccggtatgaccgtgacgcctgccagctcctcggtggtgaaagggcagagcaccacgctgaccgtggccttccagccggagggcgcaactgacaagagcttccgtgcggtgtcagcggataaaacaaaagccaccgtgtcggtcagtggtatgaccatcaccgtgaacggcgttgctgcaggcaaggtcaacattccggttgtatccggtaatggtgaacttgctgcggttgcagaaatcactgtcaccgacagttaa

SEQ ID NO: 11081 - DNA, 249 bp, Escherichia coli
atgggccgtcgtccatctggcaccatccatcacagtaataaaggttctcagtatgtatcgctggcctacatgcagcgacttaaggaagccggattactggtatcaacagggagtcctggcgactcgtatgacaacgcgatggaggagagcatcaatggtctttacaaaacggaggtaatacaccgtaagagctggaaaaaaccggacagaagtgaaactggccacactaacgtgggtggactggtataa

SEQ ID NO: 11082 - DNA, 213 bp, Escherichia coli; identical to SEQ ID NO: 10397

SEQ ID NO: 11083 - DNA, 966 bp, Escherichia coli; identical to SEQ ID NO: 8922

SEQ ID NO: 11084 - DNA, 741 bp, Escherichia coli
atgaaaaaggtttttgctgtttcagtggtggccacagcctgtgtatttgcagcaaatgcaggtgctgaggaaggtaaaagcggtttttatctgaccggtaaagccggtacctctgtggtgtcactttcagaccagcatttcctgtcaggagatgaggaagaaacgtcaaagtataaaggcggcgatgaccatgatacggtattcagtggtggtatcgcggctggttatgatttttatccgcagttcagtattccggttcgaacagaactggagttttacgctcgtggaaaagctgattcgaagtataacgtagataaagacagctggtcaggtggttactggcgtgatgacctgaagaatgaggtgtcagtcaacacactaatgctgaatgcgtactatgacttccggaatgacagcgcattcacaccatgggtatccgcagggattggctacgccagaattcaccagaaaacaaccggtatcagtacctgggattatgagtacggaagcagtggtcgcgaatcgttgtcacgttcaggctctgctgacaacttcgcatggagccttggcgcgggtgtccgctatgacgtaaccccggatatcgctctggacctcagctatcgctatcttgatgcaggtgacagcagtgtgagttacaaggacgagtggggcgataaatataagtcagaagttgatgttaaaagtcatgacatcatgcttggtatgacttataacttctga

SEQ ID NO: 11085 - DNA, 333 bp, Escherichia coli; identical to SEQ ID NO: 9116

SEQ ID NO: 11086 - DNA, 741 bp, Escherichia coli
atgtcaggggcagttaacagtatactggaggtgaaatcaggcagaacagaatatatcctctcaccggtttttgagcctgtatggaatcagaccgggaaaatatttgcttttgaaatgctctcggatatccgttcagcaaaagacgggaggaaaatctgcgcatctgtttttttcagaagtgcgcctccggatattcagtacaaaatactcatcagtcagctgaagactgctgaaacgcttcataaatggtgtctgcagaagaaaataatgctgagtgtcaatatttcccgggtggtagccctgtatctgagaaaacatggcatcccggggcggccgggaacacatatcaggcttgaggtcagtgaggactttccggcagtggcgttaaaacccggtgatgaccccctgttacgttttttgtcagaacgtttcaccctctggctggatgatttcggctcaggaaatgcaggcttaatgtggggactgtccgggatgtttgaacgggtaaaaataagtcatgagttttttcattatgccctgaaaaacaggtgtgcaatgtcgcttctccatgctgtggcagactctgttgcctgtcataaccggggcgtaatacttgaaggtgttgaaaatgaagcgttgttccgtattgccagagacatgaatgtccagggctgtcagggatggctctacaggcgtgtgggagctgatgaattatccgcgattactgagcagtatggataa

SEQ ID NO: 11087 - DNA, 969 bp, Escherichia coli
atgcgtaaatattatcccctctttaagaaaagcaccgtcctcgagggctgtgttttattcacatttataatggcatattcccagccatcgtttgcactgttgtgcagaaataaccagacagggcagacttttcagtctggagacagtcgcttcaatatcactctttccccaacagttcagtatgataaagccattacagttctggatttaaatcaactggtgttatgtcagaatgaagatgcctctggtcagaactatgactatctcagggtcagacagggaaccggtttttctccttcattagatgctaaaacatacggaaggctggactttacaaacaggctttctgggtatagtcagacgttaccgctgcagcaagacacaaagccaacagaagcttactggcaatatggtgtatggaaacctttcccggcaaaaatgtacctttatcctgagccgggcgttttcgggaaactgatacatgccggagaattagtggccacagtttatgttaataagttttccaccatggggcaggaggcaggggagagaaatttcacctggcgtttctatgcaacgaatgatgtctatatccagacaggtacatgcagggtctcatcgaacaatgtcaaagttgaccttccgtcctatcccggagggccggtaacagtccctcttactgtacgttgcgaccagacacagtcggtcagctataccctgtcaggttctgtaacaggaagtggtaatactgtattcgcaaatacggcaacatcaggggccggcggtgtgggtgtacagttgtcggacaacgcggggctggttccggccggacaaccgaggtctctgggacaggtaggtagctctcctgtgagtctggggctgaaggcctcttatgctctgaccggtcaggcaagtccgacgcccggtgctgtccagtcagtgataaatgtgacttttagctacaactag

SEQ ID NO: 11088 - DNA, 840 bp, Escherichia coli; identical to SEQ ID NO: 8924

SEQ ID NO: 11089 - DNA, 735 bp, Escherichia coli
gtgagggtgtcacaggcgtgggcggggccggggttcggtaacctggcgataccgcgtgtgggtcaggaagtgatagtggacttcctgaacggggacccggaccagccgataatcatggggcggacgtaccatgaggacaaccgttcgccggggagtctgccggggacgaagacgcagatgacgatacggtcgaagacctataaaggaagcgggtttaacgagctgcgctttgaggacgccacggacaaggaagaaatctacctgcacgcccagaaaaatatgcaggtcgtggtgctgaacagcaaggataagcgggtcaactatgaccgggcggtcagcatcgggcatgatgaattcctggtggtggcaaatgaccggaaagtgacggttgaaggtaaacaggaccataaaaccaccaaagaccacgtcagcctgacagagggtaatcagggactggaggtgaaaggcgatctggcacagaaaataagcggcgcgctgggtatcagcgtacagggcgatattgttttacagagcgacagcaaaatcagtctgcgggtgggaggttcatttgtggtgatccattccggcggcgtggatattaagggcgcgaaaatcaatcttaacggcggaggcagtccgggagacgtgatcctgccgatgcgcccggtgatcctgaaagccgcagccgggagtggttcgatgtttgtggcgcattgcccgaaggaggataagtga

SEQ ID NO: 11090 - DNA, 210 bp, Escherichia coli; identical to SEQ ID NO: 9340

SEQ ID NO: 11091 - DNA, 699 bp, Escherichia coli; identical to SEQ ID NO: 10341

SEQ ID NO: 11092 - DNA, 330 bp, Escherichia coli; identical to SEQ ID NO: 8147

SEQ ID NO: 11093 - DNA, 699 bp, Escherichia coli
atgcaggatatccggcaggaaacattgaatgaatgcacccgtgcggagcagtcggccagcgtggtgctctgggaaatcgatctgacagaggtcggtggagaacgttattttttctgtaatgagcagaacgaaaaaggtgagccggtcacctggcaggggcgacagtatcagccgtatcccattcaggggagtagttttgaactgaatggcaaaggcaccagtacgcgccccacgctgacggtttctaacctgtacggtatggtcaccgggatggtggaagatctgcagagtctggtcggcggaacggtggtcaggcgtaaggtttacgcccgttttctggatgcggtgaacttcgtcaacggaaacagcgacgccgatccggagcaggaggtgatcagccgctggcgcatcgagcagtgcagcgaactgagtgcggtcagtgcctcctttgtactgtccacaccgacggaaacggatggtgccgtttttccggggcgcatcatgctggctaatacctgcacctggacctatcgcggtgatgagtgcggttatcacggtccggcggtcgcggatgaatatgatcagccgacttccgatatcacgaaggataaatgcagcaaatgcctgagcggctgtaagtttcgcaataacgtcggcaactttggcggcttcctttccattaacaaactttcgcagtaa

SEQ ID NO: 11094 - DNA, 330 bp, Escherichia coli
atgaaaaccttccgctggaaagtgaaaccggatatggaggtgaactcgcagccatcggtgcgtgaagtgcgttttggtgacgggtactcacagcgtatggcggcagggctgaacgctgacctgaaaacgtacagcgtgacgctttccgtgacccgggaggaggcccggcatctggaagcgtttctggctgagcacgggggctggaaggcctttctgtggacgccgccttatggttacaggcagataaaggtgacctgcgcaaaatggtcgtcgcgggtcagtatgctgcgtgttgagttcagcgcagagtttgaacaggtggtgaactga

SEQ ID NO: 11095 - DNA, 915 bp, Escherichia coli
gtggagctgagccgttcactgctgtcgggctgggtggatgcatgctgccggcagctgtctccgctggaagaggcgcttcatggctatgtgctgactgacggtaagctccatgctgatgacacgcctgtcccggtgctgttgccaggcaataagaaaacgaagaccgggcggttatggacctgcgttcgtgacgaccgtaacgccgggtcaacgctggcgccggcggtgtggttcgcttacagcccggacagaaaaggcatccatccgcagacccatcttgcggggttcagtggtgtactgcaggcggatgcatacgccgggttcaacgagctgtaccgggatggccggataacggaagccgcctgttgggctcacgcccgccgtaaaatccacgatgtgcacgttcgcaccccgtcagccctgacggaggaagcgctgaaacggatcggcgaactgtacgccatcgaggcagagataaggggaatgacggcggagcagcgccttgccgaacgtcagttgaaaacgaaaccgctgctgaaatccctggaaagctggctgcgtgaaaagatgaaaaccctgtcgcgacactcagaactggcgaaagcgttcgcatacgccctgaaccagtggccggcgctgacgtactatgcagatgatggctgggctgaggcggacaataacatcgctgaaaatgcgttgcggatggtcagtctgggccgcaaaaactacctgttcttcggttcggatcatggaggagagcggggagcgctgctgtacagcctgatcgggacgtgcaaactgaacggagtggagccagaaagctacctccgctatgtccttgacgtcatagccgactggccgataaaccgggtcggcgaactgctcccctggcgcgtagcactgccgactgaataa

SEQ ID NO: 11096 - DNA, 168 bp, Escherichia coli
atgatcgagctgttgaacgtggagagcgcgaaatcgggcaaaatcatggctgacgaggcttgcagaggagtaagccagtatacactccgctatcgctacgtgactgggtcagggcttcgccccgacaccccaaaagggcgttgcgttgcgcgcaacacccttgcctag

SEQ ID NO: 11097 - DNA, 822 bp, Escherichia coli
atgcgattagccagtcgttttggttatactgcaaaccagatacgtcgtgaccgtccactgacacatgaagagctgatgcaccatgtgccggggattttcggggaagagaaacacacgtcccgaagccagaactatacgtacatccccaccatcaccgtactggaaagcctgcagcgggaaggctttcagccattcttcgcctgccagacccgtgtgcgcgacccgggccgccggggatacaccaaacacatgctgcgtctgcggcgggccggagagataaacggagagcatgtccctgaaattattctgctcaactctcatgacggtacctccagctaccagatgctgccgggttacttcaggttcgtctgccagaacggctgcgtctgtggtcagtctctgggggaagtgcgtgttccacaccggggagacgtagtggagaaagttattgaaggggcttacgaggtggtgggcgtgtttgaccggatagaggagaagcgtgatgccatgcagtcgctgattctgccgccaccggcacgccaggcgctggcacaggcggcactgacttaccgttatggtgacgaacatcagcccgtcaccaccgccgacattctgacgccacgacgccgggaggattacggtaaggacctgtggagtgcttatcagaccatccaggagaatatgctgaaaggcgggatttccggtcgcagtgcaaaaggaaaacgtatccatacccgggccattcacagcattgataccgacattaagctcaaccgtgcattgtgggtgatggcagaaacgatgctggagagcctgcgctga

SEQ ID NO: 11098 - DNA, 579 bp, Escherichia coli
gtggccgatcgatggcacctgctaaaaaatattggcgatgcgcctgaacgaatgatgtaccgacatatgcctctgatacgtcttgttgccagtgagttgtcaccaaagaaatcacctgatccagaaccatctgtgcctgcagcatcgctccgtcgtccggaacacctaaaacagcaaccccgcaaaaaacggcatcagcgttggacagaggttatggccctgcataacaagggatgtagtttcagggaaatatcccgtattacaggcctgtcgcgtgtgacagtcagtcgcagggggcgttcaggaacattccctgaaatgtcaacccggcctccaaagcgagggcttctggacccatggagggagtggttaaaagagcaacgagaaagtggtaattataacgccagcaggatatggcgggaaatggtggccaggggggtacaggcagtgaaaccatcgtcagggatgctgttgccaaatcgcgtaaaggctggatcccaccggttactactgccgtcagacttccttcagacttccttcagtgtcccgggtaagccactggttaataatcaggggtga

SEQ ID NO: 11099 - DNA, 402 bp, Escherichia coli; identical to SEQ ID NO: 5076

SEQ ID NO: 11100 - DNA, 1125 bp, Escherichia coli; identical to SEQ ID NO: 9068

SEQ ID NO: 11101 - DNA, 930 bp, Escherichia coli; identical to SEQ ID NO: 7703

SEQ ID NO: 11102 - DNA, 708 bp, Escherichia coli
gtgtccgctcagcacatccagacgtccgccattttccagtacgacattatcagctttaccctccacaacagagaatgctcccaggcggtttgtaccggtgacagttgcagcagtgctggtaaccagtgcacctcccgtgttctgggtgacatcagacgcttcaccgccggcatgaaccctcagctcgccgttctgatttatggtggtgttaccggcagtaccaccggccttaacaacctgccagcccccctcgttaattaccgtgttcagtgcaagtccatacttgtgcacatactggttccctccctccagtcgggtgttatgtgcctctccgtgtaccgtctggtcacctcctgtgtaaatgagagtgtcccgggctatccccgaagaccagataacctgccggccatttttgtttatggtggtggattcagcaatccccccgaccatctgaccggtggacacattttcagaatccggaccaccttctgcaccggtgttgacgatggttccggttaccagtccgccatgtttaatggtctggtaaccatcctggttaatcaccgttccggatgccctgccgcctgcatgtatccattgatcaccgccgttaaggacagtaccggaagccttcccacgcaaattctgccctcccccggtactgataaccgtatccgaggtactgccacctgccatgacatcctgtag

SEQ ID NO: 11103 - DNA, 276 bp, Escherichia coli
gtgcaagtgtttacgaccggtcgtggtacgccgtacggcctgatggcggtacccgtcattaaaatggcgacccgcaccgagctggcgaaccgctggtttgatttaatggatattaacgcgggcactatcgctaccggcgaagaaaccattgaagaagtgggctggaagttgtttcactttattctcgacgtcgccagcgggaagaagaaaactttctcggatcaatggggactgcataaccagctggcggtgtttaacccggcaccggtgacctga

SEQ ID NO: 11104 - DNA, 735 bp, Escherichia coli
atgaaatgttattttcaaacagtcatgaataaaaaacctaatcggttgtctggcagtggtcttttatctttctatgagcgttgggctggagcattttcaaaaaatatctgggctgtttcaaataaggttaaaagtgaatggaatgagctttacaatattaattcacataaaatcaaagttgttcgaaattttataaatcttgcacaatttgattacactgatgttaatgaagcagaatatgtgacatttgtcgggcgattggaaaaaggaaaaggaatagatgatctgtattacatatgtaaaaatctgccagatacttccttccatttagtttcaagtattcccgccccacaaaattttgcttcgctaaataatgttctgaccagcattgctgtcccctatgcgaaaatgccagaaatatttaagaaatccagagtacttattttaccgtcctattatgaaggatatgagctggttactattgaagcgctatgctgtggttgccctgtgataggctataatgttggtgcaattagagagttgtatgcagaaagttttcctggcgtatttattgccaataataaagaagatttagcacaagtagcctacaaattaattagtcttgataatgaaaaatattatcatttgagacaaactatttatagcaagcgtgagcttttttctgaagagagatatgcggaaattttaacggcggcatttaatgaaaaaaaataa

SEQ ID NO: 11105 - DNA, 894 bp, Escherichia coli
atggttgtaaaagggatattcttttttaactttatagaatctaatagttatgttgatatttatcaatcaaatataacaacgccaataggttatgattttctatcttatttattttattgttcttttttccttatatgtgcgtttcatatacagttcagaacaaataaaaaatttctttttattgcgatatgcattgctgcatttagcaccttgaagggtagtcgtagtgaagctataacgtttcttttaacggttacatgtatatattttaatgaagtaaagacaagaaacttacgtctgctgattacaatgatttttgtttttagcgtcatttttgtgattagtgaatttatctcaatgtggcgcactggagggagtttttttcaattaatgcagggtaataatcctgttataaactttgtatacggcatgggagtatcatatctttccatttatcaatcagtaaaactacaactattgtcagggggatataatgttacctatctattcagccagttaataataacttgctcgtcaatatttaatgttaaattgagcttgccggaaataagctatagccatttggcctcatacacagcaaacccagaactatataatcttgggttcggacttggggggagttatttagcagaatcgtttttagcatttggtctgattggatgtttcattataccctttttacttttacttaatttaaatgtattggaaaaatatacaaaaaacaaaccaattatatattttgtttattatagtgtgttgccacctatattattcacaccaagagagactttgttctatttcttcccctatcttgtcaaaagtatatttgttgcttttttagttacattatacatccagtataaaaaggattga

SEQ ID NO: 11106 - DNA, 369 bp, Escherichia coli
atgtcggacacactccccggaacaacgcttcccgacgacaacaaagacctcccctggtgggggctgccctgcaccgtgacgccctgttttggggcatgtctggtgcaggagggtaaccggttgcattaccttgccgaccgcgccggtatcagaggccggttcagcgatgcggatgcgtaccatccggaccaggcctttccgctgctgatgaaacaaccggaactcatgctcaccagcggtgaactgaatccccgccatcagcataccgtgacactgtatgcgaaagggctgacctgcgaagccgacaccctcggcagctgtggctacgtttatatggctgtttatccgacgcccgaaacgaaaaagtaa

SEQ ID NO: 11107 - DNA, 645 bp, Escherichia coli
atgagcagaattatcaccatcacagtgtatacgctggatgaactttcctgcccggcacggggaaaagcccgcgactggtaccgtcagcatcatgctgacagcaactggtatgaaaacgtgtatgaggacttcagggaggtctgtggcattttcggaattgacctccgccagcgcgttttccggctcagcaacggcaggtttatggaagagccgtgcatctggttcagcggattctgcagccagggggacggagcctgttttgaagggcgctggcactggcagccagcgacaccccggaaaatcagggaatatgcccctcaggaccgtgagcttcatcgtatcgcggatgccctgcaggcggtacagaagcgtaacttctggcagttacaggctgaaatcagtcaccggggacgttactgccatccgtacagcatggatatcaccgtcacccggaacagtccgactggtcaggcaatgacaaccgatgcggaagccgctgtcagcgaagccctgcgcgacctggccttctggctgtaccgccagctggaaaacaagtacgactggctgacctcagacaccgctgtggatgaggcccttctcatcaacgaatataccttcaccgaagccggtctgcgcgccggctga

SEQ ID NO: 11108 - DNA, 1026 bp, Escherichia coli
atgaaaatattcattactgagcaacaaaaagctgaacttgaacgccttcatgattccagtcgtgacgggcgagtcagagatcgtattaaagccattcttctggcttccgaaggctggagttctgccatgattgctcaggctttacgcctgcatcagacaacgattgatcaccatatcagcgaattcctgaataaaggaaaactgaagcccgaaaacggcggctcagacagcaaactcagtgctgaacaaacggcctttttaatcagccagttatccgataatttatttcaccatacccgcgatgttattgcgtttgtcacccggacatggaacatcattttcaccattccggggatgaataagtggctgcatcgtaatggtttcacctacaaaaaaccgtcaggcgtcccccataaattcagtgaagagaaacaaaggcaattcattgaatattataaggaactgaaaacaactgtgggtgatgagccgattctttttattgatggagtccatccgactcaggccactaaaatcagctatggctggatacgcaaaggccagaaaaaagcagtaaaaacaacaggcagccgcacacgcctgaatatcatgggggcgctgaatctgaaagcactgacgtcaccgctaatctgcgaatataaaaccattaatgaatataatgtatcccgttttttcaatgagatacgaaaggtttatcctgattataaccagaaaatccacgttattctggatggagcaggttaccaccgttcacagttagtgaaagactgggcggaagtggtaaatatcaggctgcattaccttcccccttacagtccaaacctgaatccgatagaaagaatgtggaaattaatgaacgaacatacccggaataatcgctacttcagcagtacgcgagagttcagggaagcaatatctgtcttttttaaccagacactgccggatatagcggactcactgacatcccgaattaacgatcactttcaggtgctcacacccgcatcttga

SEQ ID NO: 11109 - DNA, 249 bp, Escherichia coli; identical to SEQ ID NO: 8445

SEQ ID NO: 11110 - DNA, 378 bp, Escherichia coli; identical to SEQ ID NO: 7410

SEQ ID NO: 11111 - DNA, 624 bp, Escherichia coli
atgttccgtactgatgtattgcgtaagttcggtttctctgatcgtactaaagtcgaagaccttgatctcacctggacattggtggcaaacggctatcgtattcggcaggcgaatcgctgcatcgtatacccacaggaatgcaacagcccgcgtgaggaatggcgtcgctggcggcgttggattgtgggctacgcggtctgtatgcgcctgcataaaagacttttatttagccgcttcggtatcttcagtatatttcctatgctgttggttgtgctttatggcgttggtatttatctcactacctggtttaatgaattcatcaccaccgggccacatggtgtggtgttggcaatgttcccgcttatctgggtcggcgtagtttgtgttattggtgcatttagcgcctggtttcatcgttgctggttgttggtgcctttagcaccgctttccgttgtgtatgtattattagcttatgccatctggattatttatggacttattgccttttttactggacgcgaacctcagcgcgacaaacccacccgctattccgcactggtggaagcgtcaaccgcttattcccaaccttctgtcacaggaactgaaaaactatctgaagcttaa

SEQ ID NO: 11112 - DNA, 246 bp, Escherichia coli; identical to SEQ ID NO: 10449

SEQ ID NO: 11113 - DNA, 480 bp, Escherichia coli
atgctgccgggttacttcaggttcgtctgccagaacggatgcgtctgtggtcagtctctgggggaagtgcgtgttccgcaccggggaaatgtggtggacagagtcattgaaggggcttacgaggtggtgggcgtttttgaccggatagaggagaagcgtgatgccatgcagtcgctgattctgccgccaccggtacgccaggcgctggcacaggcggcactgacttaccgttatggtaatgagcatcagcccgtcaccaccgctgatattctgacaccgcgacgccgggaggattacggtaaggacctgtggagtacttatcagaccattcaggagaatatgctgaaaggcggaatttcaggtcgcagcgctaaaggaaaacgtatccatacccgtgccattcacagcattgacaccgatattaagctcaaccgcgcattgtgggtgatggcggaaaccctgctggagagcctgcgctga

SEQ ID NO: 11114 - DNA, 267 bp, Escherichia coli
atggcgacgctggggcgtcttatgagcctgctgtcaccctttgacgtggtgatatggatgacggatggctggccgctgtatgaatcccgcctgaagggaaagctgcacgtaatcagcaagcgatatacgcagcgaattgagcggcataacctgaatctgaggcagcacctggcacggctgggacggaagtcgctgtcgttctcaaaatcggtggagctgcatgacaaagtcatcgggcattatctgaacataaaacactatcaataa

SEQ ID NO: 11115 - DNA, 528 bp, Escherichia coli
atggtgaaggatattattaaaacagtgacattctcctgcatgctggccggcagtatgttcgttacctgtcatgtctgtgcagcgggttctgtggtgaatattacaggcaatgttcaggataacacctgcgatgttgacattaactcccgaaactttgatgtcagtctgggaagttatgacagccgacagtttaccgcagctggtgataccacacctgcgtcggtatttcatgtcgggttaacctcctgcggcagtgctgtccgtgcagtgaagctgacatttacgggcacaccagataatcaggaggcggggcttattcagattaacagcataaatggagcgcggggtgtggggattcagcttcttgataaggataaacatgagctgaaaattaatgtgccgacaacaattgcgttaatgccgggaacacagaccatagcgttttatgcccgtctgaaagccacttatcttccggtaaaggccggtaatgttgatgcggtgattaattttgtacttgactatcagtaa

SEQ ID NO: 11116 - DNA, 267 bp, Escherichia coli; identical to SEQ ID NO: 11114

SEQ ID NO: 11117 - DNA, 705 bp, Escherichia coli; identical to SEQ ID NO: 8686

SEQ ID NO: 11118 - DNA, 213 bp, Escherichia coli; identical to SEQ ID NO: 5358

SEQ ID NO: 11119 - DNA, 201 bp, Escherichia coli; identical to SEQ ID NO: 9147

SEQ ID NO: 11120 - DNA, 336 bp, Escherichia coli
gtgaaagacctgggggcggtggtgtccttcaaggggtattacggcgatctggccattgtggtggcgaaaacgtcttatatagcagaagacggtaccgaaaaacgttatcttccagatggcatgctggttctggggaatactgctgcagatgggatccgttgttacggtgccattcaggatgctcaggcgttgtccgaaggtgtggtggcctcttcccgttatccgaaacactggctgactgtgggcgatccggcccgtgaattcaccatgacgcagtccgcaccgctgatggtgctgccggatccggatgagtttgtggtggtacaggtgaaataa

SEQ ID NO: 11121 - DNA, 255 bp, Escherichia coli
ttgcattaccttgccgaccgcgccggtatcagagggcagttcagcgacgcggatgcataccatctggaccaggcttttccactgctgatgaaacaactggaactcatgctcaccatcggtgaactgaatccccgccatcagcataccgtcacgctgtatgccagagggctgacctgcgaagccgacaccctcggcagctgtggttacgtttatatggctgtttatccgacactggcacccgcaaccacctcataa

SEQ ID NO: 11122 - DNA, 270 bp, Escherichia coli; identical to SEQ ID NO: 8342

SEQ ID NO: 11123 - DNA, 306 bp, Escherichia coli
atggaccgtctgtatgaagactactgcggtggtatctggaatctgtacaccctgaacaacggtggcgcatttatggcacccgaaccggatgacgatgatgacgaaacatgggtactgttcaatgccatgaacggtaaccgcgctgaaatgagcccggaagccgccggcattgctgcctgtctgatgacgtacagtcatcacgcctgccgtacggagtgttatgccatgacggttcattattaccgtctgcgggattacgccctgcaacatccggaatgcagcgccattatgcgcatcattgactga

SEQ ID NO: 11124 - DNA, 249 bp, Escherichia coli
ttgcattaccttgccgaccgcgccggtatcagaggccggttcagcgacgcggatgcgtaccatctggaccaggcctttccgctgctgatgaaacaactggaactcatgctcaccagcggtgaactgaatccccgccatcagcataccgtcacactgtatgcgaaagggctgacctgcgaagccgataccctgggctcctgtgattacgtttatctggctgtttatccgacgcccgaaatgaaaaattaa

SEQ ID NO: 11125 - DNA, 336 bp, Escherichia coli
gtggccctggagccccgtgttttcggctggatggaccgtctgtgcgaagactactgcggtggtatctggaatctgtacaccctgaacaacggtggcgcatttatggcacccgaaccggatgacgatgatgacgaaacatgggtactgttcaatgccatgaacggtaaccgcgctgaaatgagcccggaagccgccggcattgctgcctgtctgatgacgtacagtcatcacgcctgccgtacggagtgttatgccatgacggttcattattaccgtctgcgggattacgccctgcagcatccggaatgcagcgccattatgcgcattattgactga

SEQ ID NO: 11126 - DNA, 249 bp, Escherichia coli
ttgcattaccttgccgaccgcgccggtatcagaggccggttcagcgacgcggatgcgtaccatctggaccaggcctttccgctgctgatgaaacaactggaactcatgctcaccagcggtgaactgaatccccgccatcagcataccgtcacgctgtatgccagaggactgacctgcgaagccgacaccctcggcagttgtggctacgtttatatggctgtttatccgacgcccgaaacgaaaaagtaa

SEQ ID NO: 11127 - DNA, 234 bp, Escherichia coli
atgacagcgcttcccgaccatgccgccagtcccctgatgacccgcctgcaggacgagctgcgcacggaatctgtccgcgctcaggcccgtgagcagtttaccggtgcggtggaccggatatttgacacagcggagagcgtctgtgttgcctctgttgcacgcacggttctgcgtgccgtccgtgacacagtggtctctgttgcccgcgcggtatggaactggatcttcttctga

SEQ ID NO: 11128 - DNA, 1059 bp, Escherichia coli
atgctaccatctatttcaatcaacaataccagcgcagcttacccagaatccatcaatgaaaataacaatgatgaagttaatggattagtacaagagttcaaaaacctttttaatggtaaggaaggaataagcacctgtattaaacatctacttgagcttataaaaaacgccatacgagtaaacgacgatccttatagatttaatattaataattcctcagttacttatattgatattgactccaatgatacagaccatattactattggtatcgacaaccaagaaccaatagaattacctgcgaactataaagacaaagaactcgtccgtactatcattaatgacaacatagttgagaagactcatgatatcaataacaaggaaatgatcttcagcgcattaaaagaaatatatgatggagatcctggttttatcttcgataagatatcacacaaactcagacatacggtaacggaatttgatgagagcgggaaaagcgaaccaacggacttatttacctggtacggtaaagataaaaaaggcgactctctcgctattgtaattaaaaataaaaacggaaatgattacttatctctcggttactacgatcaggacgactaccacattcaaagaggaattcgtattaatggtgatagtctcacccaatattgtagtgaaaacgccaggagtgcttcagcgtggtttgaaagcagtaaagctatcatggcagaatcatttgcaactggttccgatcatcaggttgtaaacgagctcaacggggaaagactgagagaaccaaacgacgtttttaaacgttatggtcgagcaataagatatgattttcaagtggacgatgcaaaatataaatgcgaccatctaaaagaaatagtttctactttagtcggtaacaaaattaacgttggccattctcaaaaaatatataagcattttaaggatctcgaaggtaaaattgaagaaaggcttcaaaatcgccaggctgaatatcaaaatgaaattaatcaaccatctgcgccaggtgttaattttgatgatatttaa

SEQ ID NO: 11129 - DNA, 1791 bp, Escherichia coli
ttggcgctggcgtgccacggtcgcgtttgtactgacgatcctaaaacggtgctcggtttgcctgaagtacaacttggattgttacccggttcaggcggcacccagcgtttaccgcgtctgataggcgtcagcacagcattagagatgatcctcaccggaaaacaacttcgggcgaaacaggcattaaagctggggctggtggatgacgttgttccgcactccattctgctggaagccgctgttgagctggcaaagaaggagcgcccatcttcccgccctctacctgtacgcgagcgtattctggcggggccgttaggtcgtgcgctgctgttcaaaatggtcggcaagaaaacagaacacaaaactcaaggcaattatccggcgacagaacgcatcctggaggttgttgaaacgggattagcgcagggcaccagcagcggttatgacgccgaagctcgggcgtttggcgaactggcgatgacgccacaatcgcaggcgctgcgtagtatcttttttgccagtacggacgtgaagaaagatcccggcagtgatgcgccgcctgcgccattaaacagcgtggggattttaggtggtggcttgatgggcggcggtattgcttatgtcactgcttgtaaagcggggattccggtcagaattaaagatatcaacccgcagggcataaatcatgcgctgaagtacagttgggatcagctggagggcaaagttcgccgtcgtcatctcaaagccagcgaacgtgacaaacagctggcattaatctccggaacgacggactatcgcggctttgcccatcgcgatctgattattgaagcggtgtttgaaaatctcgaattgaaacaacagatggtggcggaagttgagcaaaattgcgccgctcataccatctttgcttcgaatacgtcatctttaccgattggtgatatcgccgctcacgccacgcgacctgagcaagttatcggcctgcatttcttcagtccggtggaaaaaatgccgctggtggagattattcctcatgcggggacatcggcgcaaaccatcgctaccacagtaaaactggcgaaaaaacagggtaaaacgccaattgtcgtgcgtgacaaagccggtttttacgtcaatcgcatcttagcgccttacattaatgaagctatccgcatgttgacccaaggtgaacgggtagagcacattgatgccgcgctagtgaaatttggttttccggtaggcccaatccaacttttggatgaggtaggaatcgacaccgggactaaaattattcctgtactggaagccgcttatggagaacgttttagcgcgcctgcaaatgttgtttcttcaattttgaacgacgatcgcaaaggcagaaaaaatggccggggtttctatctttatggtcagaaagggcgtaaaagcaaaaaacaggtcgatcccgccatttacccgctgattggcacacaagggcaggggcgaatctccgcaccgcaggttgctgaacggtgtgtgatgttgatgctgaatgaagcagtacgttgtgttgatgagcaggttatccgtagcgtgcgtgacggggatattggcgcggtatttggcattggttttccgccatttctcggtggaccgttccgctatatcgattctctcggcgcgggcgaagtggttgcaataatgcaacgacttgccacgcagtatggttcccgttttaccccttgcgagcgtttggtcgagatgggcgcgcgtggggaaagtttttggaaaacaactgcaactgacctgcaataa

SEQ ID NO: 11130 - DNA, 564 bp, Escherichia coli
atgagtaagtttgttaaaacagctattgctgcggcaatggtgatgggcgcgttcacctctacggcaacaatcgctgcgggtaacaacggtactgcacgtttttacggcaccattgaagactcagtgtgttctatcgttccggacgatcacaaactggaagttgatatgggtgatatcggtgccgaaaaactgaaaaataacggcaccaccacgccgaaaaatttccagattcgcctgcaagattgcgtatttgatactcaggaaacaatgaccactacctttactggtaccgtttcttctgcaaatagcggcaattattacaccattttcaataccgataccggtgcggcatttaacaatgttagcctggcgatcggtgactctctgggtacctcttacaaaagcggcatgggtattgaccagaaaatcgtgaaagatactgccactaataaaggcaaagcgaagcagactctgaactttaaagcctggctggtcggcgcagctgatgcgccagatctgggtaatttcgaagcaaataccaccttccagattacttacctgtaa

SEQ ID NO: 11131 - DNA, 2646 bp, Escherichia coli
atgcctgaccattctctttttcgattacggattcttccgtggtgcattgcgctggcaatgtcagggagttatagcagtgtctgggctgaagacgacattcagtttgattcccgttttctggaattaaaaggcgacacaaaaattgatctgaagcgtttttccagccaggggtatgttgagcccggaaaatacaatttacaggttcaactaaataaacagccattggcggaagagtacgatatttactggtatgctggtgaagatgacgttagcaaaagctatgcttgtctgacaccggaactggtggcgcagtttggtttaaaagaagacgtggcgaaaaatctgcaatggagccacgatggtaaatgcctgaagcccggtcaactggaaggcgtggaaattaaggctgatttaagccagtccgcattagtcatttcactaccgcaggcttacctcgaatatacctggcccgactgggatccaccttctcgttgggatgatggcatctccgggatcattgcggactacagcatcactgcgcaaacacgacacgaagaaaatggcggcgatgacagtaacgagatcagcggcaacgggacggtcggagttaacctggggccatggcgtatgcgcgctgactggcagaccaactatcaacatacgcgcagtaatgatgatgacgatgaatttggcggcgatgacacacaaaaaaaatgggagtggagtcgctattatgcctggcgggcgttaccgtcattaaaagccaaactggcgctgggcgaagattacctcaattccgatattttcgacggttttaattatgttggtggcagtgtcagcactgacgatcaaatgttgcctcccaatctgcgcggctacgcgccagacatttccggcgtggcacacaccacagcaaaagtgaccgtcagccagatggggcgtgtgatttacgaaacgcaggttccggctggaccgtttcgtattcaggatcttggtgattccgtctccggtacgttgcatattcgcattgaagaacagaacggccaggtgcaggaatatgacatcagcaccgcctcgatgccatacctcactcgcccaggccaggttcgctataagatcatgatgggacgtccgcaagagtggggccaccatgtcgaggggggatttttctctggtgctgaagcctcctggggcatcgctaacggctggtcgttatatggcggtgcgctgggtgatgaaaactatcagtctgcggcgctgggcgtcggtcgcgatttgtctaccttcggcgcggtcgcgtttgatgttactcattcgcataccaaactggataaagacaccgcttatggcaaaggttcgctggacggtaactccttccgtgtgagttattccaaagactttgaccagctcaacagccgcgtcactttcgctggatatcgcttctcggaagagaactttatgaccatgagcgagtatctggatgccagtgacagcgaaatggtccgtacgggcaacgacaaagagatgtacaccgccacttataaccagaacttccgcgatgcgggtgtttcggtttatctcaactatacccgccatacctactgggatcgtgaggagcagacaaactacaacatcatgctctcccactatttcaatatgggcagcattcgtaatatgagcgtttccctgactggctaccgctacgagtatgacaaccgggcggataagggcatgtacatttcgctcagtatgccgtggggcgacaacagtaccgttagctataacggcaactatggcagtgggacggacagcagccaggtcggttattttagccgtgtcgatgacgcgactcactatcagttgaacatcggcaccagtgacaaacacaccagcgttgatggctactacagccatgatggttcgctggcgcaggttgacctcagtgcgaactaccatgaagggcaatacacctctgcgggcttgtcgttacagggcggcgcaacgcttactacccacggcggcgcacttcaccgtacccagaatatgggcgggacacgcctgctgattgatgccgatggcgttgccgatgttccggtggaaggtaacggggctgctgtttataccaatatgtttggtaaagccgtcgtttctgacgttaacaattattatcgcaatcaggcgtatatcgacctcaacaaattgccggaaaacgccgaagcaacccagtcggtggtgcaagccacgctaactgaaggagccattggctaccgcaaatttgccgtcatcagtggtcaaaaagcgatggcggtgctgcgtttacaagatggcagccatccaccgtttggcgcagaagtaaaaaatgataacgagcagacagtgggccttgtcgatgatgacggtagtgtctatctggctggggtgaaacctggcgaacatatgagtgtgttctggagtggtgttgcgcattgcgatatcaacctgccggacccgctgcctgccgatctgtttaacggcttgttactgccatgccagcataaaggcaacgtcgcgccggttgttcctgatgacataaagcctgtcattcaggagcagacgcaacaggtgacacccaccgatccccctgtttctgtttcagctaaccaataa

SEQ ID NO: 11132 - DNA, 753 bp, Escherichia coli
atgtctgatttactttgctctgccaaattgggtgctatgacgctggcgttactgcttagcgctaccagtttgtctgccctggcgtctgtaacgccagatcgtacccgtttgatatttaatgaaagcgacaaatcaatcagcgtgacgctgcgtaataacgatccgaaactcccttatctggctcaaagctggattgaagatgaaaagggtaacaagatcacctcgccgttaactgtgctgccgccagtgcaacgcatcgattcaatgatgaacgggcaggtaaaagtgcagggaatgccggatatcaacaaattgccagccgatcgtgaaagcatgttctactttaacgtgcgcgagatcccgccaaaatcaaacaaacccaataccctgcaaatcgcgctgcaaacgcgtatcaagttgttctggcgaccaaaggcgctggaaaaggtcagtatgaaaagtccgtggcagcacaaggtgacgctcacccgcagcggtcaggcattcaccgtcaataacccaacgccgtactacgtgattatcagcaacgccagtgcgcagaaaaacggtaatccagctgcagggttctcgcctctggtcattgagccgaaaaccacggtaccgctgaatgtgaaaatggatagcgtaccggtgctgacttacgtcaacgactttggcgcacggatgccgctgttcttccagtgcaatggcaacagctgccaggtggatgaagagcagagccgcaaaggctga

SEQ ID NO: 11133 - DNA, 513 bp, Escherichia coli
atgacggggggagttatgagtcaaaagtttgtagtgggcgcagggctgctggtatgcagtgtctgtagtttatctgctatggctggtagtaaacccgtggatttaattctgcgcgtgttggtcgatgctccgccaccctgttcaatcaagggcagccaggtagagttcggcaatatgattgctgataacgttgatggcaccaattatcggcaagatgcgaaatacacgttgaactgcacaaacagtcttgctaacgacttgcggatgcaacttaagggcaatacctcaacgattaacggcgaaacggtactcagtaccaatatcaccgggctgggcattcggatagaaaatagcgccgataactcattgtttgccgtcggtgaaaatagctggacgccatttaatatcaataaccagccacagttgaaggctgtacctgtgaaggcaagcggggcgcaacttgctgcgggcgagtttaacgccagtttgaccatggtggtggactatcaatga

SEQ ID NO: 11134 - DNA, 489 bp, Escherichia coli
atgagaaagactttcttaaccctgctttgtgtcagtagcgccatagctcatgctgctgatgaagacatcacctttcacgggacattattgtcaccgccaacctgtagcatcagcggtggtaaaaccattgaagtcgaatttcgcgatctcattatcgacgacatcaacggcaactatggtcgtaaagaggtgccatatgaactcacttgtgactcgacgacccgtcatccagattgggagatgaccctcacctggactggtacacaaaccagttttaatgatgcagcaattgaaactgatgtacccggttttggtatcgagcttcagcacgatggtcagcgttttaaactcaatactccgcttgctatcaacgccactgattttacgcaaaagccgaagctggaggccgtaccggtaaaagcgagtgatgctgtgttaagcgatacgaatttttcggcttacgcaacattacgggtggattatcaatga

SEQ ID NO: 11135 - DNA, 540 bp, Escherichia coli
atgaataaatcaatgattcagtccggtggttacgtcctgttagcggggctgatattggcaatgagtagcacgttattcgcggcagataataatctgcatttctccggtaatttattaagtaaatcctgtgcgctggtggtggatggccaatatctggcagaggtgcgctttcccacggtcagtcgtcaggatttgaacgttgcaggccagtccgctcgtgtacccgtagtctttaagctgaaagattgcaaagggccggcgggatacaacgtaaaagtcacgctcacgggggtagaagacagcgaacaacccggttttctggcactggatacgtcatcaaccgctcagggagtgggaattggcatggaaaaaaccgacggaatgcaggttgccatcaacaatacaaatggggcgacctttgcgctaaccaatggcaataacgatatcaatttcagagcctggctacaggcgaaaagcggccgtgatgtgacgatcggtgaatttaccgcctctttaactgcgacatttgagtatatttaa

SEQ ID NO: 11136 - DNA, 822 bp, Escherichia coli
atgaaaatactacgatggttgttcgctctggtcatgcttattgctactacagaagctatggctgccgggcatagcgttgacgtttactacggttacaacggtgattcgcgtaatattgcgacttttaatttaaaaataatgatgccatccgcagtgtacgttggtgaatataaaagtagtcaatggctcatgactggggaaatattgcaaaatgtgagctggagtggtcctcctcctgccccttcggttaagctgattggctaccatcaaaatatcaacaaagcaagttgtcctggattaccgtctgggtggaactgcgggtattatacatttgaggttattgtctctgcagagattgaatcttacttttcttgtccatggttggttattatgaatgactctgaagcctctccagggggcgtgacgtatcaggggcctgatagtcacgacacgatttgtccatccgtttctgttcaaccttatgacgtttcatggaatgagaattatgtcagtaagtcaaaactgctcaccctgcagtcgacgggcggtgtggttgagaaaacgctttcaacgtatttgatgaaagatgggaagttgtgcgacagtacgcagatgaatgaaacaggtggttactgccgctgggttgcacagatgataacttttaccgcgtcgggatgtgacaaggcggaagtctcggtcacgccaaatcgacaccctataacggacaaacagttacacgatatggtcgtgcgtgttgataccagcagtatgcagccaatcgattctacttgccggttccagtacatactgaatgagttgtag

SEQ ID NO: 11137 - DNA, 849 bp, Escherichia coli
atgaaacttattcctcgcagtagtgatatttcacctggcattgatggaatttgcccggggccttttcctccgaacggatttaccgtacttacagatgcagcatatggtaacggagactgtttcggtttgtactggcctattggtcaggagcataaactacctatagtgtgcgaaacgtaccatgacgaatggcgaatcgtacctgccttttccagcattaagaagttcgaagaatggctggaagtgaatgatgatgatccccatgaaaatggcatcagcatcgaagatcaagactttgcagcaaatctcttccgtgttgctcggaaatgtctttcaacgggaaggcttgatgacgcactgccactgttacagcgagcaacagaacaattgcctgaagtcagcgaatattggttagcactggcaatccagtatcgccgatgtaaaaaaacagaagctgcagcacaggctgcgcttaatgcttatcttggcaattgggcatttggtgttcctgacaataaagtcattcatttgctgtcacaggccgcagatgtcccgaatttccaggatgatcctgtgattcagtgcattaaagaacaaggattagatcttagctttggaggaacaaaggaaaataataattaccccttgatgcagatgtgtgttgatacttattttgcgcagagaaaaccgcttcaggcattaaccctgttacataattatgcctggataatgtccagtgaaacgactgcatttcaggaacgctatgattttaatatcgatgaatggcgggcaaaattcaggcagttatgtttagagtattttggcgatagtcgtacacagttcacttaa

SEQ ID NO: 11138 - DNA, 423 bp, Escherichia coli
atgacacctttagaacgcattacccaacttgttaatatcaatggtgatgttaataatcctgatactcctcgtccattgttatctcttgaggatttttttattgacaataatatccatggttcaatatgttgcaatgtgattccagaacaatctccgcaagctatctatcaccattttctgaaaatacgtgagcgtaacaatgttagtgatgttttggtagaaattacgatgttcgatgacccagactggccctttagtgaaagtattttagttatcaccactgcttcaccagaagaagttcagagctggtttgtagaagaaattgcccctgatgagtgctgggaaggatggtcagaagatacggagcatggatgggttgaagtccctgtgggtatgcatccggttacttgttggtgggattaa

SEQ ID NO: 11139 - DNA, 717 bp, Escherichia coli
atggaatggttaagtgaaattcgtaaacttcggaagaacgtacctgtcggtatccaggttgccagacgtttgttagagaggactggcggtgatgttgatgaagccatcaagttgtttcatattgaccaaatcaatatattgacggcaaaagcagacgtcactcatcaggaagcagagaatgttttgttggctacaaactatgatattgcagaagctcttcggcgtattgatgaacaacgctatacactgacggaattgattttgcgtaaaaataaggatgccggagatgccttaaacaatatagcattggcgattgaatatgagtgggatctcaagcgtaagttttggtttggttttgcagatatccaattattaccgccagttttacaaacatttatgctggtttatgaatggcatgaatatgttggttgggaaggaatggagtgtgggatattttttgaaagtgatcatactcaccagcaattgcaagctttggggttattagaactcgcccaaaaaatggttactgcaagaatccgatatgatgagctaaaagacaaggccgaaaattttcacgagattacagaggatgacatattcaaaatgcttataatacattgtgaccaacttgcaagagaggttgattctatattactgcaatttgtgaaggacaatattgatgttttcccgtgtcgccataacagacacgagttataa

SEQ ID NO: 11140 - DNA, 1728 bp, Escherichia coli
atgcgaaataaaaatataatcatgttgcttatgagtagtttgattttgtcaggatgtgggccgcaacctgagaataaggaaagtcagcaacaacaacccagtactcccacagagcagcaagtgcttgccgcgcagcaagctgcaataaaagaggctgagcaaagcgccgccgccgcgaaagccttggcccagcaagaagtgcaacaatattcagacaaacaggctttacaggggcgattgcaggaagcgccaacatttgcaagagcggctaaagcaaaagctacacatatcgcaaatccaggaaccgctcgctaccagcagttcgatgataatccggttaagcaggtagcgcaaaatccgttggcgacgtttagtcttgacgttgacactggcagttatgcgaatgtaaggcgtttcctcaatcaagggctgttacctccgccagacgctgtgcgggtggaggagatagtcaattatttcccgtctgattgggatatcaaagacaaacaatctattccggcctctaagccaatacctttcgctatgcgctacgaattggcacctgcaccatggaatgaacagcgaacattgctgaaagttgatatcctggcgaaagatcgcaaaagtgaagagttaccagcttctaatctggtctttcttatcgacacttctggttcaatgatttctgatgaacgtttgccacttatccagtcttcgttgaaattattggtcaaagaacttcgtgagcaggataacattgccatcgtgacctacgctggcgactcccgtattgcattgccttctatctccgggagtcataaggcggaaattaatgccgcaattgattcgctggatgccgaaggcagtaccaatggcggtgccgggctggaactggcttatcagcaggcgacgaaggggtttattaagggcggcatcaatcgcattttattagccactgacggtgactttaacgttggcattgacgatccaaaatcgattgaatcaatggtcaaaaaacagcgggagtttggtgttactctgtcgacgtttggcgtggggaatagcaattacaacgaggcaatgatggtgcgaattgccgatgttggtaacggcaactacagctacattgataccctctctgaagcgcagaaagtattgaatagtgaaatgcggcagatgttgattaccgtagcaaaagatgtcaaagcgcaaattgagtttaaccccgcgtgggtaacggaataccgtcagattggttatgaaaagcgccaacttcgggtggaacattttaataacgacaacgttgatgcaggggatataggcgcaggcaaacatataacgttgttattcgaattaacgctgaacgggcaaaaagcatcaattgataagttacgctatgccccggataacaaattagcgaaatcggacaaaacgaaagaactggcctggttaaaaattcgctggaaatacccgcagggaaaagaaagtcagttagttgaattcccgctggggccaacaataaacgcgccctctgaagatatgcgttttcgcgcagcagtagctgcatatgggcaaaagttacgcggttctgaatacctgaacaatacctcctggcagcagatcaaacagtgggctcagcaggcaaaaggggaagatccacagggttacagggcggaatttattcgcctgattgaactggcggatggtgtgactgacatcagtcagtga

SEQ ID NO: 11141 - DNA, 1077 bp, Escherichia coli
atgaaattgacgctgaaaaaccttagcatggcgatcatgatgagcactatagtcatgggaagcagtgcaatggcggcggacagcaacgaaaaaatagtcatcgcccatcgcggtgccagtggatatttgccggagcatacgctgccagcaaaagcgatggcgtatgcgcagggagcggattatctggaacaggatttggtgatgaccaaagacgacaatctggttgttctgcatgaccattacctcgatcgtgttactgatgttgccgatcgtttcccggatcgggcgcgcaaagacggtcgttactacgcgatagatttcacgctggatgaaattaagtcgttgaaatttaccgaaggtttcgatattgaaaacggtaaaaaagtgcagacttatccggggcgtttcccaatgggtaagtccgacttccgggtgcacacctttgaagaagagattgaatttgttcaggggttaaatcactctaccgggaaaaatatcggtatttatccagaaatcaaagcgccgtggttccatcatcaggaagggaaggatattgcggcaaaaacgctggaagtgctgaagaaatatggttacaccggtaaagacgataaagtttatttgcaatgttttgatgctgatgagctgaagcgtattaagaatgagctggaacccaaaatgggcatggagctcaatctggtacagctgattgcctataccgactggaatgaaacgcagcagaaacagccggatggaagctgggttaattacaactacgactggatgtttaagccgggtgccatgaaacaggtggcggaatatgcagatggtattggtccggattaccatatgttgattgaggagacatcgcagccgggtaatatcaaactcactggcatggtgcaagatgctcagcagaataaactggtagtgcatccttataccgtgcggtcagataaactgcctgaatacactcctgatgtgagtcagttatatgatgctctgtataacaaagcgggtgtaaatggactgtttactgatttccctgataaggcagtaaaatttcttaataaagagtaa

SEQ ID NO: 11142 - DNA, 918 bp, Escherichia coli
atgccactcttaaagctctgggcaggttcactggttatgttggcagccgtgagcctgccgctacaggcggcttcccccgttaaagtcggttcaaaaatcgataccgaaggtgcgctactcggcaatatcattttgcaggtgctggaaagccacggcgtaccgacggtgaataaagtgcaactcggaacgactcctgtggtgcgcggggcgattacttccggtgaactggatatctatccggaatataccggcaatggcgctttcttctttaaagatgaaaacgatgcagcgtggaaaaacgcgcagcaaggttacgagaaagtcaaaaagctcgattcggagcacaacaagttaatctggctgacgcccgcgcctgcaaataacacctggactatcgccgtgcgtcaggatgtggcagagaaaaataaactcacttcgcttgccgacctgagtcgttatctgcaagagggcggcaccttcaaactggcagcctcggcagagtttatcgaacgcgccgatgcgttacccgcgtttgaaaaagcctatggctttaagctcggtcaggatcagttgctgtcactggctggtggcgacacggcggtgacgatcaaagccgctgcccagcaaacctctggcgttaatgctgcaatggcttacggcactgacggcccggtagcggcgctggggctgcaaaccttaagcgatccgcaaggtgtgcaacctatctacgcgcctgcaccagtggtgcgtgagtcggtgttgagggagtatccgcaaatggcacagtggctacagccagtcttcgccagcctcgatgcaaaaacattgcagcaactgaatgccagcattgctgtggaaggactggatgccaaaaaagtggctgccgactacctgaaacaaaaagggtggacgaagtaa

SEQ ID NO: 11143 - DNA, 1287 bp, Escherichia coli
atgagtaacgtatcatacccgacaggcgttgaaaaccatggaggatcactccgtatatggtttcactataatggcaaacgtgtcagagaaaacctcggtgttcctgacaccgccaaaaaccggaagatcgcaggtgaacttcgcacttccgtttgttttgcaatcagaatggggtgtttcgactacgccacacagttccctaattcccctaacctgaaacactttggtctgggaaaaagagagataaccgttaaggcactttcggaaaaatggttggaccttaagaaaattgagatttgtgcgaatgcacttaatcgttaccagtcagtaattaaaaacatgttgcctatgttgggtgagaaaaaactggtttcatccataacaaaagaggatttacttttcgcaaggagagatttgttgaccggttaccataagctttctaatggaaagatttcttccataaaagggcgctcagtggtcacagtaaactactatatgacaaccatagctggaatgtttcaatttgcaacagataatggttatacctcaggaaacccatttaacggtctggcacccttaaaaaagtccaaggtaaaaccagatcctctcacccgtgacgaatttattcgttttattgaggcttgccgtcatcaacaaacaaaaaacctgtggattctcgctgtatacacgggtattcgtcacggggagctggtatcgctggcatgggaagatatagatcttaaagcaaggactataaccatccgtaggaattatacaaaacttggcgaattcactccaccaaaaaccgatgctggcaccggaaggacaattcatctggttcaaccagctattgatgctcttaaaagtcaggcggaaatgaccatgcttggaaagcaacattctgtagaggtaaagcagagggaatatgggagaagtactgtgcataaatgcacttttgtttttagtcctcaggtaataaaacagcggcagttttccggaccgcactataaggttgactccatcagggagtcatggacaagtatcttaaaacgcgcaggtctgagacacagaaaatcgtaccaatccaggcatacttatgcatgctggtcacttgccgctggagctaatcctagttttatcgcaagccagatgggccacacaaacgcacaaatggtattcaatgtttacggagcatggatgaaagacaacaatcacgaacagatagaactccttaacaaaagactatctgaaagtgtcccatgtatgccccataagaaagtggggtaa

SEQ ID NO: 11144 - DNA, 255 bp, Escherichia coli
atgcagacaatcatctatcagataacccccagcaaatggtgtacggagagagtccttattgcatcaacagggctaaagcccggcaccatcgagcgggccaggagaaagtcatggatgcagggaaaagaataccgccattacgctgtagaaggtgatcctgggcattacagtgaatgcctgtacaacatcgaagaaattatgcgatggatcgaaaaccagaaacaaccaggtgccaaaaatgcaagttccggttaa

SEQ ID NO: 11145 - DNA, 135 bp, Escherichia coli
atgaataaagcatttgaacgatgggtccaccagcgttacggcaatcgctatgatctgacgcgagatgttgacggtttctactgtcgtgaagttgtgaagcgaatgtttgaaatgtggtgccactgccgtggatga

SEQ ID NO: 11146 - DNA, 243 bp, Escherichia coli
atgttcgctttgattcaacgcgggcagatatacaccgatagtgctggctacccggtaaaaattactcgcagtactgttcactcggtattctttcggaggatggacgggcgctccgggcgggtacgcatcactgagttcaacagcctgttcgaacatattgaccaccaggagtaccgcaaaattctggcagaaacagagcaggaagctcatctgaaaaaattacgagccatgaaaaggaagtaa

SEQ ID NO: 11147 - DNA, 1029 bp, Escherichia coli
atgcgcgtactgctatttttacttctttcccttttcatgttgccggcattttcggctgataacctgttgcgctggcatgatgcgcagcatttcacggtgcaagcctctacgccgcttaaagccaaacgcgcatggaaactgtgcgcgctttatcccagcctgaaagattcatattggttatcgttgaactatggtatgcaggaggctgctcgccgctacggtgtggatttaaaagtgctggaggcaggcggctacagccagttggctacccagcaagcacaaatcgaccagtgtaaacagtggggcgcagaggccattttgctcggtagtagcacgacctcatttcccgacctgcaaaagcaggtagcaagtctgccggtgatcgaactggtaaatgctattgatgctccccaggtgaaaagccgcgttggtgtgccctggtttcagatgggctatcaaccggggcgatatctggtgcaatgggcgcacggtaaaccactgaatgtgctgttgatgcccggacccgataacgccgggggcagtaaggagatggtcgagggttttcgcgcagccattgccggaagcccggtgcgtattgttgatattgcgcttggtgataacgatattgaaatccagcgtaacctgttgcaggagatgctggaacgccatccagaaatcgacgtcgttgccggaacggccattgcggcagaggcggcaatgggggaagggcgtaacctgaaaacgccgcttaccgtggtgtcgttttatctttcacatcaggtgtatcgcgggctgaagcggggaagagtgattatggctgccagcgatcaaatggtctggcagggggaactggcggttgagcaggccatcaggcaattacaggggcaatcggtttctgataatgtcagcccaccgattttagttctgacgccgaaaaatgccgaccgtgaacatattcgccgctcgctgtcaccagggggatttcgtccggtctatttttatcagcacacatcagcggctaagaaataa

SEQ ID NO: 11148 - DNA, 306 bp, Escherichia coli
atgaaacacaagctttctgcaatccttatggccttcatgttgacgacgccagctgcgtttgctgcccctgaagcaacaaacgggaccgaggcaacgacgggtactactggcaccacaacgaccactaccggcgcaaccacgactgctactaccactggtggcgtggctgctggcgctgtcggcacggcgacagttgtcggtgtggcaacggctgttggtgtggcgacgttggcagttgttgcagcaaatgacagtggcgatggcggttctcataacacctcaaccaccacgtccactacacgctaa

SEQ ID NO: 11149 - DNA, 645 bp, Escherichia coli
gtgcgccctcttattttatcgattttcgcactatttcttgcgggatgtacgcacagccagcaaagtatggtcgatacatttcgcgccagccttttcgataatcaggatatcaccgtagcggatcagcagatccaggcgttgccttattccactatgtatttacgccttaatgaagggcaacgaatctttgtggtactgggatatatagaacaagaacaaagcaaatggttatcccaggataacgccatgctggttacccacaatggacgtcttttaaaaaccgtcaaacttaataataatctgctggaagtgacaaattccgggcaggaccctctgcgtaacgcgctggcaataaaagatggcagccgctggacgcgcgatattctctggagtgaagacaaccattttcgctctgcgaccctgagttctactttttcctttgctggattagagacgctgaatattgcgggtcgcaatgtgctgtgtaatgtctggcaggaagaggtgacttccacgcggccagaaaaacagtggcaaaacacattctgggtcgattcggctactggccaggttcgtcaaagtcggcaaatgttaggcgcaggggttattcccgtagaaatgacgtttcttaaacccgcaccatga

SEQ ID NO: 11150 - DNA, 747 bp, Escherichia coli
atgaataaattacagtcgtatttcattgccagcgtactttacgtaatgacaccccatgcctttgcgcaaggaacggtgactatttatctgcctggcgaacaacagacactttccgttggccccgtggaaaatgttgtccagttggtgacacaaccgcaactgcgcgatcgcctctggtggcctggtgccttgctgaccgactctgcggcgaaagctaaagcgcttaaagactaccaacatgtcatggcacagcttgcttcctgggaagcagaagctgacgacgatgtggcggcaacgattaaatccgtgcgccagcagttactcaatctcaatatcactggtcgcttaccggtcaaactggaccctgattttgtacgagtggatgagaacagcaatcccccgttggtcggggactatacgctctataccgtacagcgtccggtgactattactctgctgggtgcggtttctggggccgggcaattgccctggcaggcaggccgtagcgttaccgattatctgcaagatcacccccgccttgcaggcgcggacaagaataacgttatggtgattacgcctgagggtgagactgtcgtcgcccctgttgccctgtggaataaaagacatgtggaaccaccgcctggcagccagctttggttgggcttttctgcgcatgtactgcccgaaaaatatgctgatttaaatgaccagattgtgtctgttttaacgcaacgtgttcctgactga

SEQ ID NO: 11151 - DNA, 2097 bp, Escherichia coli
atgaagaagaattcttatcttttaagctgcctggccattgccgtctccagtgcctgtcatgctgaagtattaacctacccggatccgctgggttcgtcgcaatcagactttggcggcacaggattgttgcagatgccaaatgcgcgcatcgcaccggaaggtgaattcagcgtcaactaccgggataacgatcaataccggttctactccacctccgtggcgctgttcccatggctggaaggcaccattcgttatacggatgtgcgcacacgcaaatatagccagtgggaagatttcagcggcgatcagtcatacaaagacaaatcattcgattttaaacttcgcctgtgggaagaaggttactggctaccgcaagtggcgtttggtaaacgtgatattgctggtacgggtctgtttgacggtgagtatctggtggccagcaagcaagcggggccatttgatttcaccctcgggatggcatggggctacgccggtaatgcgggcaatattaccaacccgttttgccgggtgagcgataaatattgtcatcgcgcagagtctcacgatgcgggcgatatcagctttagcgatatctttcgtggcccggcttccatctttggcggcattgagtatcaaacgccgtggaatcccctgcgtctgaaactcgaatacgatggaaacaattaccagaatgatttcgctggcaaactgcctcaggcaagccatttcaacgtcggcgcagtttatcgcgctgccagctgggcagatctcaacctgagttatgaacgcggtaacacgttgatgtttggcttcacgttacggaccaatttcaacgatctgcgccctgccctgcgcgatacgccaaaaccggcatatcaacctgcgcctgaatctgaaggattgcagtacaccacggtagcaaaccaacttaccgccctgaagtataacgcgggctttgacgcgccagaaattcagctacgcgataagacactgtatatgtctggtcagcaatacaaataccgtgactctcgtgaagcggtcgatcgtgccaaccggattctggtgaataacctgccgcaaggcgttgagaagattagcgtgacgcaaaagcgcgagcatatggcgatggtgactaccgaaaccgacgtagccagcctgcgcaaacagctggcaggtacagcgcctggtcaatcagagccactgcaacaacaacgtgttgaagctgaagatctttctgcctttggtcggggctaccgtattcgtgaagatcgctttagctactctttcaacccaacactttcacagtcgctgggcggcccggaagatttctatatgttccagctggggctgatgtccagtgcccgctactggtttaccgaccacctgctgcttgatggcggtattttcaccaatatttacaacaactacgacaagtttaagtcttcgctgttgcccgcggactctaccctgccccgcgtgcgcacgcatatccgtgactacgttcgcaatgacgtttatctcaacaacttgcaggcgaactattttgctgacttaggcaatggtttctatggccaggtgtatggcggttatctggaaacgatgtacgccggtgtcggttccgagctgctttatcgcccgctagatgcctgctgggcgctgggtgtggacgttaactacgtgaagcaacgtgactgggacaacatgatgcgtttcaccgattattccacgccaacaggtttcgtgacggcttactggaacccgccgacgctcaatggcgtactgatgaaacttagcgttgggcaatatctggcaaaagataaaggcgcaacgatcgacgtcgccaaacgctttgacagcggcgtggcggtaggggtatgggcggcaatcagtaacgtatctaaagatgactacggcgaaggcggctttagtaaaggtttttatatctcgattccattcgacttgatgaccattggacctaaccgcaaccgcgcggtggtttcgtggacaccattgacgcgtgatggtggacaaatgctgtcacgcaaataccagctctatccaatgacggcagagcgagaagtaccggttggacaataa

SEQ ID NO: 11152 - DNA, 1131 bp, Escherichia coli
atgaaaaagaacatttttaagttttcggtactgacattggctgttctgtctttgacagcatgtacccttgttcctggtcagaatttatcgaccagtaacaaggatgtcattgaactacctgacaatcagtatgacctggacaaaatggtcaatatctatcccgtcacgccaggattgattgatcagttgcgcgccaaaccgattatgtcgcaggctaacccggagctggagcagcaaatcgcaaactatgaatatcgtatcgggattggtgatgtgttgatggttacggtctgggatcacccggaactaaccacccccgcagggcaataccgtagcgccagtgataccggcaactgggttaacgccgatggtgcgattttctacccctatattggtcgcctgaaagtggccgggaaaacacttacccaggtacgcaacgagattacagcgcgtctcgattcagtcattgaaagcccgcaagtcgatgtcagcgtcgcggcgttccgatcgcaaaaagcgtacgtcaccggcgaagtcagcaaatcgggtcagcagccgattaccaatattcctctgaccatcatggatgcgattaacgccgcgggcggtctgaccgcagatgcagactggcgcaacgtggtgctcacccagaatggcgtaaagaccaaagtgaacctctatgcgctgatgcagcgtggcgacttgcgccagaacaaactgctgcacccgggcgatattttatttattccgcgcaacgatgatctgaaagtcttcgtgatgggtgaagtgggtaaacagagcacgctgaaaatggaccgcagcggtatgaccctggcggaagcgctgggtaacgctgagggtatgaatcaggatgtcgctgatgcgacggggatttttgttattcgtgcaacgcaaaacaagcagaatggcaaaatcgccaatatttatcagctgaatgcgaaggacgcatcggcaatgatactcggaacggaattccagcttgaaccttacgacattgtttatgtcactaccgcgccgctggctcgttggaaccgtgtgatttctctgctggtaccgacgatttccggggtgcatgacctgacagagacttcacggtggattcaaacatga

SEQ ID NO: 11153 - DNA, 447 bp, Escherichia coli
atgacccaactaaaatttaactcaatcctggtggtttgtaccggcaacatttgccgttcgcccattggcgagcgcttgctgcgtaaacgtctgccgggcgtaaaagtcaaatcggcaggtgttcatggtctggtaaaacaccctgcagatgcgacagcggcagatgttgccgctaatcatggcgtatctcttgaaggacatgccggacgtaagctcactgctgagatggcacgaaattacgatctgattctggcaatggagtcggaacatattgctcaggttaccgcaattgctcccgaggtccgcgggaagacaatgctgtttgggcaatggctggaacagaaagagatcccggatccctatcgtaaaagtcaggacgcatttgaacatgtctacggtatgttggagcgcgccagtcaggaatgggcgaagcgcctcagccggtaa

SEQ ID NO: 11154 - DNA, 2181 bp, Escherichia coli
atgacaactaaaaatatgaatacgccaccaggcagcactcaggaaaatgagatcgatctgcttcgtctggtcggcgagttatgggatcaccgtaagtttattatcagcgtgaccgcgttattcacgctgatcgctgtcgcttactcgctgttaagcacaccaatttatcaggcagatactctggtccaggttgagcaaaaacagggcaacgccattctcagcggcctgagcgatatgatccctaactcatcgcccgagtctgcaccggagatccaactgctgcaatcgcgcatgattctcggtaaaaccattgctgaactgaatctgcgcgacatagttgagcagaagtattttccgattgtgggtcgcggctgggcgagattaaccaaagaaaaaccaggtgagctggcgatcagctggatgcatattccacaactgaatggtcaggatcagcaactgacactcacggttggggaaaacggccactatacactggaaggtgaagagttcaccgtcaatggtatggtcggccagcgtctggaaaaagatggcgttgcgctgactatcgcggacattaaggccaaaccaggaacacagtttgtcctgagccagcgtaccgaactggaagcgattaacgcattgcaggaaacctttaccgttagcgaacgcagtaaagaaagcgggatgctggaacttaccatgactggtgatgatccccagttgattactcgtattctgaacagcatcgctaacaactatttgcaacagaatatcgctcgccaggcggcgcaggattcacaaagccttgaattcttacagcgccagttacctgaagtgcgcagcgagctggaccaagcggaagaaaaactcaacgtttatcgccagcagcgcgattcggttgaccttaacctggaagccaaagccgttcttgagcagattgtgaacgttgataatcaactcaatgagctgaccttccgcgaggcagagatctcccagctgtataagaaagatcacccaacttatcgtgcgctgctggaaaaacgccagacgctggagcaagaacgcaaacgcctgaataagcgggtatcggcaatgccttccacccaacaggaagtgttgcgtttaagtcgtgacgtagaagcgggccgtgcggtatatctgcaattacttaaccgccagcaggagttgagtatttcgaaatccagtgccattggtaacgtgcggattatcgacccggcagtcactcagccgcagccagtgaaaccgaaaaaagcgttgaacgtggtgcttggttttattcttggcctgtttatttctgtgggtgccgtgctggcgcgtgcgatgttgcgtcgtggtgtagaagccccggaacaactggaagagcacggcatcagcgtttatgccactatcccaatgtccgagtggctggataaacgcacccgtctgcgtaagaaaaatttattttctaatcagcagcgccatcgtactaaaaatatccccttcctggcggtggataacccggcggattctgctgtggaagccgtacgtgcgctacgaaccagtctgcatttcgctatgatggagacggagaataacattctaatgatcaccggtgcgacgccagacagtggtaaaacgtttgtcagttcaactctggcagcggtgatcgcccagtccgatcaaaaagtgttatttattgatgccgacttacgccgtggttattcgcataacctgtttaccgtgagtaatgaacatggcttgtcggaatatctggcaggtaaagatgagctcaacaaagtgatccagcattttggcaaaggaggctttgatgtgattactcgcggtcaggtgccacctaacccgtctgaactgctgatgcgcgatcggatgcgtcaattactggaatgggcgaacgaccattacgatctggtgattgtcgatacgccgccgatgctggcggtgagtgatgccgcggtcgtggggcgttctgttggcaccagcctgctggttgcgcgttttggcttgaacaccgccaaagaggtgagtttgtcaatgcagcgtctggaacaggcaggcgtcaatattaaaggcgctatcctcaatggtgtgattaaacgcgccagcaccgcttacagttacggctataactattacggttatagttactccgagaaagagtaa

SEQ ID NO: 11155 - DNA, 1545 bp, Escherichia coli
atgtgggatgtcattgatttatcgcgctggcagtttgctctgaccgcgctgtatcactttttatttgtaccccttaccctggggctgatttttttgctggctattatggaaaccatttacgtggtcaccggcaaaacaatctaccgcgatatgacgcgcttctggggtaagctcttcggtatcaattttgctcttggcgtggctaccggcctgaccatggagtttcagtttggtactaactggtcattctattccaactatgtgggcgatatttttggcgcaccgctggcgatggaagcattaatggccttcttcctcgaatccacctttgtcgggctgttcttcttcggctggcaacggctgaataaataccagcacctgctggtgacgtggctggtggcgttcggttcaaatctctctgcgttgtggatattgaatgccaacggttggatgcaatacccgaccggtgcgcattttgatatcgacaccctgcgtatggagatgaccagcttcagcgagctggtctttaatccggtcagccaggtgaaatttgtgcacaccgtaatggcgggctacgtgaccggggccatgtttattatggcgatcagcgcctggtatttactgcgcggacgggagcgcgatgtcgcattacgctcgtttgccatcggttccgtcttcggtactctggcgattatcggtaccctgcaactcggagacagttctgcgtatgaagtcgcgcaagtacaaccggtaaaactggcggcgatggaaggggagtggcaaacggaacctgcacctgcaccgttccatgtggttgcctggccggaacaggatcaagagcgtaacgcctttgccctcaaaattcccgcgctgctagggatcctcgccactcactcattagataaacccgtgccgggtctgaagaatttgatggctgaaacctacccacgcttgcaacgcggacgtatggcctggctgttaatgcaggaaatatcgcaaggcaatcgtgagccgcatgtgttgcaggcattccggggactggaaggtgacctgggctacggcatgttgctctcccgctatgcgccggatatgaatcatgtcacagccgcacagtaccaggcggcgatgcgtggcgcgatacctcaggttgcgccggtattctggagtttccgcatcatggtgggctgtggttccctgctgctactggtgatgctgattgcgcttgtccagacgctgcgtggcaaaatcgaccagcatcgctgggtgctgaaaatggcgctctggagtttgccgttgccgtggattgcgattgaagccgggtggtttatgaccgagtttggtcgtcagccgtgggcgatacaggacatcttaccgacatactccgcgcactccgctttaaccacaggacaactggctttctcactgatcatgatcgtagggctttacaccctgttcttaatcgccgaagtctacctgatgcagaaatatgcccgtctggggccgagcgcgatgcagagtgaacaaccgacgcagcaacaggggtaa

SEQ ID NO: 11156 - DNA, 858 bp, Escherichia coli
atgagcgaaacttttttccatctgctggggccaggaacgcaaccgaacgatgacagtttcagcatgaatccactgccgatcacctgtcaggtgaatgatgaaccgagtatggcggccctggagcaatgtgctcacagcccgcaggtgattgcgctgttaaacgagttacaacatcaactaagcgaacgccaaccgccgttgggcgaggtgctggcagtcgatctgttaaatctcaacgccgacgatcgtcactttatcaatacgcttctcggggaaggggaagtgtcagtgcgcattcagcaggctgacgacagtgaaagtgaaatacaggaggcgatcttctgcggattatggcgggtgcgcagacgtcgcggcgaaaagttgctggaggacaaactggaggctggctgcgcgccgctggcgttgtggcaggcggcaacgcaaaatttcttgccgacagattcgctgttaccgccgcccattgatggtctgatgaatggcctaccgttggcgcatgagttactggcacatgtacgtaaccccgacgcgcagccgcacagcattaatctgacgcaattacccatcagcgaggctgatcggctttttctctcacgtctctgtgggccgggaaatattcagattcgtaccattggctatggcgagagctatatcaacgccacggggttacgccatgtctggcatttacgctgtacggacaccttaaaaggcccgttactggaaagttatgaaatctgcccaataccggaagtggtgctggcagcgccagaagatttggtcgattctgcgcagcggcttagcgaggtatgtcagtggctggcggaagctgcaccgacgtaa

SEQ ID NO: 11157 - DNA, 1119 bp, Escherichia coli
atgagcctgccttttttacgcacgctgcaaggcgatcgtttttttcagttattaattcttgttggtatcggattaagctttttcgtgccctttgcaccgaaatcctggcctgctgctatcgactggcacaccatcatcaccttaagcggcctgatgctgctgaccaaaggtgtggagttaagcggttattttgatgtgctggggcgcaaaatggtgcgccgctttgctacggagcgtcggctggcgatgtttatggtgctggcggcggcgctgctttctacctttctgaccaacgatgtcgcgctgtttattgttgttccgctgactatcacgctaaaaagactgtgtgagatcccggttaatcggctgattatttttgaggcgctggcagtcaacgctggttcgctactgacgccaattggcaacccgcaaaatattcttatctggggacgttctggtctttcgtttgccggatttattgcccaaatggcaccgctggctggcgcaatgatgctgacgctcctgctcctgtgctggtgttgtttccctggaaaggcgatgcaataccatacgggggtgcaaacaccggagtggaaaccgcggctggtgtggagttgtctggggctgtatatcgtctttctgacggcgctggagttcaaacaagagctgtggggactggtgattgtggcggcaggctttgcgctgctggcacgtcgcgtggtgctcagtgtggactggacgctgctgctggtgtttatggcgatgtttatcgacgtccatttactgacccagcttccagcgttgcaaggcgtgttgggtaacgtgagtcatctatctgaacccgggttatggttaacggcaatcggtttatcgcaggtgatcagtaacgtgccgagtaccatattgttgctgaactatgtgccgccgtctttattactgctatgggcggtaaacgtaggtggctttgggttattacccggatcgctggcaaatttgattgcgctacgtatggcgaacgatcgccgcatctggtggcgtttccatctctattcaataccgatgctgttgtgggcggcgttggtgggatatgttttgttagttatactcccggccaactag

SEQ ID NO: 11158 - DNA, 888 bp, Escherichia coli
atgcctggttcattacgtaaaatgccggtctggttaccaatagtcatattgctcgttgccatggcgtctattcagggtggagcctcgttagctaagtcactttttcctctggtgggcgcaccgggtgtcactgcgctgcgtctggcattaggaacgctgatcctcatcgcgttctttaagccatggcgactgcgctttgccaaagagcaacggttaccgctgttgttttacggcgtttcgctgggtgggatgaattatcttttttatctttctattcagacagtaccgctgggtattgcggtggcgctggagttcaccggaccactggcggtggcgctgttctcttctcgtcgcccggtagatttcgtctgggttgtgctggcggttcttggtctgtggttcctgctaccgctggggcaagacgtttcccatgtcgatttaaccggctgtgcgctggcactgggggccggggcttgttgggctatttacattttaagtgggcaacgcgcaggagcggaacatggccctgcgacggtggcaattggttcgttgattgcagcgttaattttcgtgccaattggagcgcttcaggctggtgaagcactctggcactggtcggttattccattgggtctggctgtcgctattctctcgaccgctctgccttattcgctggaaatgattgccctcacccgtttgccaacacggacatttggtacgctgatgagcatggaaccggcgctggctgccgtttccgggatgattttcctcggagaaacactgacacccatacagctactggcgctcggcgctatcatcgccgcttcaatggggtctacgctgacagtacgcaaagagagcaaaataaaagaattagacattaattaa

SEQ ID NO: 11159 - DNA, 336 bp, Escherichia coli
atgttagttgaatggggtggcgattcctgggcttccgctgacaacttcatgaatggtcgtaccaacggtgttgcaacctaccgtaactatgatttctttggcctggttgatggtcttgattttgcgattcagtaccaaggcaaaaacagcaaccgtagcactaagaaacaaaatggtgacggctatgcgttgtctgtagactataacatcaatggttttggtatcgttggtgcatatagcaaatctgatcgcaccaacgatcaagttgccgatggaaacggttcaaatgctgaactgtggtcattggctgcaaagtatgacgcgaaaaatgtctag

SEQ ID NO: 11160 - DNA, 393 bp, Escherichia coli
atgaaaagaaaagttctggcaatgctggtcccggcgttattagttgctggcgcagcaaatgcggctgaaatttataataaagatggcaataaagttgatttctacggcaagatggttggcgaacgcatctggtcaaatactgatgataataacagcgaaaacgaagatacctcctatgctcgtttcggtgttaaaggtgaaacccaaatcaccagcgaactgactggttttggtcagtttgaatacaacctcgacgccagcaagcccgaaggtgaaaaccaagaaaaaacccgtttaaccttcgccggtttgaaatataacgagttaggatcatttgactatgccgtaactacggtgttgcttatgatgccgcagcttataccgatatgttag

SEQ ID NO: 11161 - DNA, 2079 bp, Escherichia coli
atgagtaatctggccgcgatgctgcgcctgcccgcaaacctgaaatcgacacaatggcagatccttgccggaccgattttgatcctgttgatcttgtcgatgatggtgctgccactgcccgcattcatactcgacctgttgtttaccttcaatattgccttgtcgatcatggtgttgctggtggcgatgtttacccagcgcacgcttgagtttgctgcgtttccgaccattctgttgtttaccacgctgttgcgtctggcacttaacgtggcttcaacccgtatcattttaatggaagggcataccggcgcggcggcggcagggaaggtggtcgaagcgttcggtcacttcctcgttggtggcaatttcgctatcggtatcgtggtgtttgtcattctcgtgatcatcaactttatggtcattaccaaaggtgccgggcgtatcgcagaagtgggtgcgcgctttgttctcgatggtatgccgggtaagcagatggcgattgacgccgaccttaacgccggattgattggtgaagatgaggcgaaaaaacgccgctccgaagtgactcaggaagccgatttttacggctcaatggacggggcaagtaagtttgttcgcggcgatgccatcgccgggatcctcatcatggtcattaacattgtcggcgggttgctggtcggcgtgctgcaacatggcatgagcatgggacacgcggcggaaagttatacgctattgaccattggcgacggtctggtggcacaaattccggcgctggtgatttctaccgccgcgggggtcatcgttacgcgtgtcagcaccgatcaggatgttggcgagcagatggtgaatcagcttttcagtaacccaagcgttatgttgttaagcgccgccgtgctcggtttactcggcctggtgcctggaatgccgaacctggtatttttgctgttcactgccggattgctcgggctggcctggtggatacgcggacgcgaacaaaaagcgcctgccgaacccaaaccggtaaaaatggcagagaataataccgttgtcgaagcgacgtggaacgatgtacaactggaagattctctgggaatggaagtgggttatcgactgatcccgatggtcgatttccagcaggatggtgagttgttgggccgtatacgcagtatccgcaagaaatttgcccaggagatgggatttctgccgccagtggtgcacattcgcgacaatatggatctgcaacctgcccgctatcgcattttgatgaaaggcgtggagattggcagtggtgatgcttatccggggcgctggctggcgattaaccctggaaccgctgccgggacgttacctggtgaggcgaccgtcgatccggcatttggcctgaatgctatctggattgaaagtgcgctaaaagaacaggcgcagattcaggggtacacagtggttgaggccagcacggtggtagcaacgcatcttaaccacctcattagccagcatgccgcagagctgtttggtcgtcaggaggcgcaacagctgttggatcgcgtcgcccaggagatgccaaagctgacggaagatctcgttcctggcgtcgtcacgctcaccacactgcataaagtgctgcaaaatctcctcgatgaaaaagtaccgattcgcgatatgcgcaccattctcgaaacgctggcggaacatgcgcccatccaaagcgatccacatgaattaaccgccgtcgtgcgcgtggcgttgggacgggcgattacccagcagtggtttcctggcaaagatgaagtccatgttattggcctcgatacaccgctggaacgtttgttactacaggcgctgcagggcgggggaggactggagccagggctggcggatcgtttactggcgcaaactcaggaagcgctatcccgtcaggagatgctgggtgcgccgccagtattgttggtgaaccacgcgctgcgaccattattgtctcgcttcctgcgccgcagcttgccgcagttagtggtcctgtcgaatctggaactgtctgataaccgacatatccgcatgacggcgacaattggcggcaaataa

SEQ ID NO: 11162 - DNA, 489 bp, Escherichia coli
gtgtttaaatttcttgtattaacattaggcattatctcttgccaggcttacgcagaagatacggttatagtaaacgaccatgacatttcagccatcaaagattgttggcaaaaaaattcagatgatgatactgacgttaacgtgatcaaatcatgcctgcgacaagaatacaatctcgtcgatgcgcaattaaataaagcctatggtgaagcttatcgttatatagaacaagtgccacgcacaggtgtaaaaaaacctgataccgaacaacttaacttgcttaaaaaatcacagcgagcctggctggattttagggacaaagaatgtgaattaatcctttcaaatgaggacgttcaggatttaagtgacccttattctgaatcagaatggctctcatgtatgatcatacagaccaatacgcgaactcgccagttgcagctataccgtaactctgaagatttttatccaagccctttgacaagaggataa

SEQ ID NO: 11163 - DNA, 747 bp, Escherichia coli
atggcattactggaaatttgctgttacagcatggaatgtgcactaacggcgcagcaaaacggcgcagacagagttgaattatgcgcagccccaaaagaggggggcttaacgccgtcgttgggtgtactgaaatccgtgcgccagcgggtgacgatccctgtgcatccgataattcgcccacgcggtggtgatttttgctacagcgacggtgagtttgccgccattcttgaggatgtgcgcacggtccgcgaattaggttttcctggactggtgacgggcgttctcgatgttgacgggaatgtcgatatgccacgaatggaaaaaataatggctgctgccggtccgctggcagtgacttttcatcgcgccttcgatatgtgcgctaaccctttatatacactcaataatcttgcggaattgggcattgcccgggtactgacatcagggcaaaaatcagacgcactgcaaggtttatcaaaaattatggaacttattgcccatcgtgatgctccaatcattatggccggagcaggagtccgtgcagaaaacctgcaccacttcctcgatgccggagtgctggaagtccatagctccgcgggagcgtggcaagcctcaccgatgcgttatcgtaatcaaggattgtccatgtcatcagatgaacacgcggacgagtattcgcgttatatcgtagacggggcggcggttgctgaaatgaaaggaatcattgaacgccatcaggccaaatga

SEQ ID NO: 11164 - DNA, 2430 bp, Escherichia coli
atgacattaacaagacgtgaatttattaaacacagcggtattgccgctggagcgctggtggtgacatcggcagcaccgctccccgcatgggcagaagagaagggcggtaaaatcctcaccgcgggacgttggggagcgatgaacgtagaagtgaaggacggcaagattgtttcttcaacaggcgcgctggcgaaaaccataccgaattccttacagtctacggcggcggatcaggtacacaccacggcgcgtattcagcatccgatggtgagaaaaagctatctcgataatccactgcaaccggcgaaaggtcgtggcgaagatacctatgtacaggtgagctgggaacaggcattaaaactgattcatgagcaacatgatcgtattcgtaaagctaacggaccatcggccatttttgccggatcttacggctggcgctcttctggcgtgttgcataaagcgcaaaccttactgcaacgttatatgaacctggcgggcggttattccgggcatagcggcgattattcaaccggggcagcacaggtgatcatgccgcatgtggtcggttctgtagaggtgtatgaacagcagacctcctggccgctgattctggaaaacagccaggttgtggtgctgtggggaatgaacccgctgaataccttaaaaattgcctggagcagtaccgatgagcaagggctggaatacttccatcagctgaaaaaatctggcaaaccagtgattgccattgatcctatccgctccgaaaccatcgaattctttgacgataatgccacctggatcgcgccgaatatgggcaccgacgtggcactgatgttagggattgcgcataccctgatgacacaaggcaaacacgataaagtgttccttgaaaaatacactaccgggtatccgcagtttgaagagtatctgacaggtaagagcgataatacgccgaagagcgcggtctgggcggcggaaattactggcgtaccggaagcgcagatagtcaaactcgctgaactgatggcggcgaatcgcacaatgctgatggcaggctggggaattcagcgccagcaatatggtgaacagaaacactggatgctggtgacgctggcggcgatgttagggcagattggtacaccgggcggcggttttggtttctcttatcattactccaacggtggcaacccgacgcgtgttggcggcgtgctgccggaaatgtctgcggcgattgccggacatgccagcgaggccgctgatgatggcggaatgacggcgattcctgttgcccgtatcgtcgatgcgctggaaaatcctggcggcaaatatcagcataacggtaaagaacaaacgtatccgaatatcaaaatgatctggtgggcgggtggcggtaactttacccatcaccaggatactaatcgtctgattaaagcatggcagaaaccggagatgatcgtcgtttctgaatgctactggaccgcagcagccaaacacgcagatatcgtattaccgatcaccacatcgtttgagcgcaatgacttgacgatgaccggtgattacagcaaccagcatattgtgccgatgaagcaggctgttgctccgcaatttgaagcgcgtaacgattttgacgtgtttgccgatcttgcggaattactcaaacctggcggaaaagagatctataccgaaggtaaagatgaaatggcgtggctgaaatttttctatgatgccgctcagaaaggtgcccgtgcgcaacgcgtcactatgccaatgtttaatgccttctggcagcaaaataaactgatcgaaatgcgccgcagcgagaagaacgaacagtacgttcgttatggtgatttccgcgccgatccggtgaaaaatgcgctgggtacgccaagcggcaaaattgaaatctattcaaaaacgttggaaaaatttggctataaggattgcccggcacacccaacctggctggctcctgatgaatggaaaggtaccgccgacgagaagcagttacagcttctgaccgcacatccggcacaccgtttacacagtcagcttaactatgcggaactgcgtaaaaaatatgcgatcgccgatcgtgaaccaatcactattcacaccgaagatgctgcacgctttggtattgcgaatggcgatctggtgcgtgtctggaacaaacgtggtcagattttgacaggcgcggtggtgactgacgggatcaaaaaaggcgtggtatgcgtgcatgaaggtgcatggccagatctggaaaatggcttgtgtaaaaacggcagtgcgaacgtgttaacggcggatatccccagctcgcagctggcaaatgcctgtgccggtaactcagcgttggtgtatatcgaaaaatatacgggcaatgcaccgaagttaacggcgtttgatcagccagctgttcaggcgtaa

SEQ ID NO: 11165 - DNA, 1041 bp, Escherichia coli
atgaaaaaagttttattacaaaaccatcctgggagcgagaagtattcttttaatggctgggaaatatttaatagtaattttgaacggatgattaaagaaaataaggccatgctgctttgtaagtgggggttttatttaacatgtgttgtcgctgtaatgtttgtgttcgcagcgataacatccaacggtttgaatgaaagaggcctgattaccgcgggatgctcttttctttatctattaattatgatggggcttattgttcgggccggttttaaagcaaaaaaagaacaactgcattattatcaggctaaaggtattgagccgctcagtatcgagaagttacaggcgctacaattgatcgcaccttatcgattctatcataagcaatggtctgaaacgctggagttctggccgcgaaagcctgaacctggcaaagataccttccaatatcatgtgcttccttttgactcgatcgatatcataagtaaaagacgcgagtctttagaggagcaatggggtatcgaagatagcgaaagttattgtgccttaatggagcattttctttctggcgaccatggagccaatacctttaaagcaaacatggaggaagccccagagcaggttatcgccttgttgaataaatttgctgtttttccctcagactatatctctgattgcgctaatcatagctccggtaaatcctcggcgaagctaatatgggcggcggaattatcatggatgatctcgatatcaagcacagcttttcaaaacgggacaattgaagaagaactggcctggcattatataatgcttgcttctcgaaaggcgcacgagttgttcgaaagcgaagaagattatcaaaaaaatagtcaaatgggatttctttactggcatatctgctgctatcgcagaaagttaacggatgctgaacttgaagcgtgttatcgttacgacaagcagttttgggagcactacagtaagaaatgccgttggcccataagaaatgttccgtggggagcatcatccgttaaatactcataa

SEQ ID NO: 11166 - DNA, 2325 bp, Escherichia coli
atgccacaacgacaccaccagggacataaacgcacaccgaaacagttggcgctcatcatcaaacgttgtttgccgatggtgctcactggcagcggcatgctttgcactaccgctaacgccgaagagtattatttcgaccccattatgctggaaaccacaaaaagtggtatgcaaacaaccgatctgtcgcgtttttcaaaaaaatatgcacaactaccaggaacttatcaggttgatatctggctgaataaaaagaaggtttcacagaaaaaaattacatttaccgccaatgcagagcaacttctgcagccacagtttacggtagaacaactacgtgagctgggtattaaggtggatgaaatcccggcgctggctgaaaaagatgacgatagcgtgatcaactcgcttgaacaaatcattcccggtacagctgctgaatttgatttcaatcatcagcaacttaatttgagcattccccaaattgcactgtaccgtgatgcaagaggttacgtctccccttctcgttgggacgatggtataccaacgctgtttaccaactactcgtttacaggttctgataaccgttaccgccagggcaatcgtagccaacgacagtacctgaatatgcaaaatggtgctaattttggcccctggcgattacgcaactattccacatggacacgcaacgatcagacatcaagctggaataccatcagtagttatttacaacgtgatatcaaggcgttgaagtctcagttgcttctgggagaaagcgccaccagcggcagtattttttccagctacacctttactggcgtgcaactcgcttccgacgataatatgttgccaaacagccagcgcggatttgccccaacggtacgcggtatcgcaaacagtagtgcaatcgtgactatcaggcaaaatggttatgtgatctatcaaagcaacgtgtcagcgggtgcctttgaaattaacgatctctacccctcttccaacagcggcgatttagaagtcacgattgaagaaagtgacggtacacaacgtcgctttatccagccttattcttcattacccatgatgcagcgacctgggcatctaaagtatagcgcgaccgctggacgctatcgcgctgatgcaaacagtgatagcaaggaacccgaatttgctgaagccacggcaatatatggtttgaataatacttttacgctgtatggcggcctgctcggttctgaagattattatgcgctggggatcggtatcggcggcacacttggcgcactgggcgcgttgtcgatggatatcaacagagctgacacccaattcgataaccagcactcttttcatggctatcaatggcgtacgcagtacatcaaagatatcccggaaaccaacaccaatatcgctgtcagctactatcgctataccaacgatggctattttagttttaatgaagccaatacccgcaattgggactataacagtcgccaaaaaagtgaaattcaattcaacatcagccagacaatatttgatggggtaagtctgtatgcctccggttcgcagcaagactattggggcaataacgataaaaacaggaatatctctgttggggtttccggccagcaatggggagttggttacagcctgaattatcaatacagccgctacactgatcaaaataatgaccgcgcactctctttgaatctcagtattccgttagaacgctggttaccgcgtagccgggtttcctatcagatgaccagccagaaagatcgcccaacccaacatgaaatgcgtcttgatggctcactgctggatgatggtcgcctgagctatagcctggaacaaagtctggatgacgataacaaccataacagtagcctgaacgccagttaccgttcaccttatggcaccttcagtgccggatacagctacggtaatgacagcagccaatacaattacggcgttaccggcggcgtggttatccatcctcatggcgtgacgctctcgcaatatctgggcaacgcttttgcgcttatcgatgctaacggagcatctggcgtgaggatacaaaactatccggggattgctaccgatccttttggctatgcagtggttccttatctcacaacttatcaggaaaaccgtctctcggtagatactacgcagctgcccgataacgtcgatcttgaacaaacaacacagtttgtggtgcccaacagaggtgcaatggtagcggcgcgtttcaacgccaatatcggttatcgcgtacttgttacagtcagcgatcgcaacggtaaaccgttgccctttggcgctcttgcctga

SEQ ID NO: 11167 - DNA, 696 bp, Escherichia coli
atgtcaaaacgaacattcgcggtgatattaaccttgttgtgtagcttctgtattggccaggcgcttgcaggaggaatcgttttacagcgaacgcgagtgatctatgatgccagccgcaaagaggctgcgttacctgtcgcaaacaaaggcgcagaaacgccttatttactgcaatcatgggtagataatatagatggtaaaagccgtgccccatttattataaccccaccgctatttcgtcttgaggctggcgatgactcatcactgcgaattattaaaacagctgataacctgcctgaaaataaagagtcgctgttctacattaatgttcgtgccattccagcaaagaaaaaatcagatgatgttaatgctaacgagttgacgctggtatttaaaacacggatcaaaatgttttatcgccccgcacacctgaagggacgggtaaacgatgcgtggaaatcactggaatttaaacgtagtgaccattcactcaatatatataacccaactgaatattacgtcgtatttgccggactggcagtcgataaaaccgatctcacaagcaaaattgaatatatcgcgcccggagaacataaacagttaccacttcctgcatctggcggaaagaacgtgaaatgggctgcgatcaatgattatggcggcagttccgggacagaaactcgtccactgcaataa

SEQ ID NO: 11168 - DNA, 585 bp, Escherichia coli
atgaataaagttacaaaaacagctattgcgggcttacttgcgcttttcgcaggtaatgccgctgcaaccgatggtgaaatagtttttgatggcgagattttaaaatccgcttgtgaaatcaatgactctgataagaaaattgaagttgctcttggtcactataatgccgaacagtttcgtaatattggcgagcgtagcccaaaaattccattcactattcctttagttaactgcccaatgactgggtgggagcacgataacggcaacgttgaagcgtctttccgtctatggctggaaacgcgagataatggcaccgtccctaacttccctaatctggcaaaagtaggctcttttgctggcatagcggcaacaggtgtgggtatccgtattgacgatgcggaaagcggaaacattatgccactgaatgctatgggcaatgataacacggtttatcagatcccggcggaatccaatggtattgtcaatgttgacctcatcgcttactacgtatcaaccgtagttccatcagaaatcaccccaggggaagcagacgctatcgttaacgtaacgctggattaccgttaa

SEQ ID NO: 11169 - DNA, 702 bp, Escherichia coli
gtgcaaacccttcagcaagttgaaaactatacggcgttaagtgaacgtgccagcgaatatttattggccgtgatccgtagcaaaccgaatgctgtgatttgcctggcgaccggagccacgccattactgacgtatcattatctggtagaaaaaatccaccagcagcaggttgatgtcagccagctcaccttcgtgaagctcgacgaatgggtggatctgccattaacgatgccaggcacctgcgaaactttcctgcaacagcatatcgtgcagccgctggggctacgtgaagaccagctcatcagctttcgctccgaagagataaatgagacagagtgcgaacgggtaacgaacctgattgcgcgcaaaggcggtctggatttatgcgttctcggattggggaaaaacggtcatcttgggctgaacgaaccgggagaaagcctgcaaccggcctgccatatcagtcaacttgatgccagaacacagcaacatgagatgttaaaaaccgcgggtcgccccgtgactcgtgggatcaccttaggcctgaaggatattctcaatgcccgcgaagttttgttactggtgactggcgaaggaaagcaggatgcgacagatcgttttctcacggctaaagtctctaccgctatcccggcttcatttttatggctgcacagtaactttatttgtttaattaacacctaa

SEQ ID NO: 11170 - DNA, 210 bp, Escherichia coli
atgcatattgccgacgttgacatctttcaggtcaataccaccttctaccaatttacgtaccgtttgtggcgtacggcaaatcaggaagatcttctgatgtggtgcagctttgccgatgacgttaatggttttttcgatagtaaagaaacgaatgccaaagccgtaggtttccgcggtaataccctaatttctgttgaatatcatcgttag

SEQ ID NO: 11171 - DNA, 240 bp, Escherichia coli
atgcagtggtatttgtccgtattaaaaaattatgttggtttctctggtcgcgcacgtcgtaaagagtactggatgtttactctgattaacgccatcgtcggcgctattatcaatgtcattcaattgattttaggtctggagcttccatatctgtctatgctttatttgctggcaaccttccttcccgtccttgcgcttgctatccgtcgcttacacgataccgaccgttcaggtgcctag

SEQ ID NO: 11172 - DNA, 1065 bp, Escherichia coli
atgcgctacttgttaattgtagttacatttattatgagttttagtgtgttacctgtatgggcaatggactgctatgccgagcacgaaggtggaaataccgtagttattggctacgtacccagaattgctatccccagcaatggtaaaaaaggtgataaaatctggcaaagtaatgaatacaccatgaatgtcttctgtaataatgcattacccgcgccttcccccggagaagaatacccatctgcttgggcaaatataatgatgcagttagcagaaggtcaggagttttataatcaaaactcttataccttcggtgtaacttacaatggaaacgattatgattcaaccaccacaaatgttatttcagcacctcaatgcattgatgttaaaggtgcaggtgtatacagtaatagctataaaaaccccgctgtctgtagcggtggtcctgagccacaattgtcagtaaattttccagtacgtgtacaactgtatattaagctagctaaaaatgctaataaagtaaataaaaaacttgtattacctgacgaatatatcgcccttgaatttaaaggcatgaaaagtgctggatctttagatgtagataaaaatctgaccttcaggattcgtggattaaataatattcatgtccttgactgctttgttaatgtcgcattggaaccagctgatggcgttgttgactttggtaaaataaattcccgaacaattaaaaataccagcgttagtgagacgtttagtgtagtcatgacaaaagatcctggtgcggcctgtactgagcaattcaatattttagggagctttttcactacggatattttgagtgattatagccatctggatatgggtaatggactgctattgaagatatttcatagcgatggaacagcaacggaatttaaccgcttctcacaatttgcttctttttcatcgtctagtgcaccttcggtcaccgcaccattcagggcagaacttagtgcgaacccggcagagactgttgttgagggaccgtttggtaaagacgtaatcctcaaaatcacctataactag

SEQ ID NO: 11173 - DNA, 372 bp, Escherichia coli
atgcaagtcactatgcagcacgcattgaaactattctggcggccaaaagccattgaattagaagacgatggggtaatgacttacgaaaaagttgaaatcatccgtagaaatgatggttcgatccgctttaacaataaaatgccttatcacgttacgctgggttatatcggaacaaatggggtaacgatgttaccacaaacgcaaagcttaatggtaaccccttttagccatgcagatacgcagtttaaaaatgttccgtcagcttttcaggtgggttatatcaatgactttggtggattaagtttttatgaaataaactgcccaacggtaaataattcttgtaatgtttccgtagccaaacaaggtcaataa

SEQ ID NO: 11174 - DNA, 378 bp, Escherichia coli
atgcgctacttaaatacaaagaatatcattgcagcaggagtattactctcctgtatgagcagcattgcctggggtgccatcatcccggatcgtactcgtatcataatgaatgagtcagataaaggcgaagcattaaaacttactaatcaaagtaaaaacctgccctatctggcccaaacatggattgaagatacgaaaggcaataaatcgcgtgactttattgtcactgttcctcctatggtgcgtttaaatcccagcgagcaaattcaaataagaatgataactcaagaaaaaattgctcaacttcctaaagacagagaaacgctcttctattttaacgtgcgagaaataccgcccaaaacagataaaaaaatgtga

SEQ ID NO: 11175 - DNA, 2514 bp, Escherichia coli
gtgaaacagatgtataaaaatttaaagcttacgacaataagtaaaatgataaaaaatatttattgttcattatccgttatagtaattggttgtgcgtcagcttatgctgttgaatttaacaaagatttaatcgaagctgaagatcgtgaaaacgttaacctttcccaatttgaaactgatggccaattacccgtcggtaaatattcactaagcactctgattaataataagaggacaccaatccaccttgacctccaatgggtattaattgataaccaaactgcagtttgcgtgacaccagagcaattaacattattaggctttactgatgagtttattgaagaagctcagcaaaacctgatcgatggttgttaccctatcgaaaaagaaaaacaaattacaacttatctcgataaagggagaatgcaattatccatatctgcacctcaggcatggttaaaatacaaagatgcaaactggacgcctcctgaactttgggatcatggtattgctggggcatttcttgattacaatttatatgcctctcattatgcaccacatcagggcgataattcacaaaatataagttcctatgggcaggctggggttaatcttggggcctggcgcctgcgtactgattaccagtacgatcagtcatttaacaatggcaaaagccaggcgaacaacctggattttccgcgtatttatttgtttcgcccaatcccagcaattaatgcaaaactaactataggtcaatacgataccgaatcgtctattttcgactctttccatttttctggcatttcgttgaaaagtgatgaaaacatgttaccgccagatctacgtggttacgcaccgcaaatcacgggggtcgcacaaacgaatgcaaaggtcactgtctcacagaacaaccgtattatttatcaagaaaacgttcctccaggcccattttctattaccaatttattcaatacattacaggggcaactggacgtcaaggttgaagaagaggacgggcgcgtcacgcaatggcaagttgcatctaatagcattccttatctgacgcgtaaagggcagattcgctacactactgcaatggggaaaccgaccagcgttggcggcgattccttacaacagcccttcttctggaccggtgaattctcatggggttggctgaacaacgtatccctgtatggtggttcagtattaacaaaccgtgattatcaatccctggctaccggagttggttttaaccttaactcgttgggctcattatcctttgatgtcacgcgatctgatgctcagttacataatcagaataaagaaacgggttatagctaccgtgctaactattcaaaacgttttgaatctaccggtagccagctcactttcgctggctaccgtttctctgataaaaactttgtgtcgatgaatgaatatataaatgacactaaccattacacgaattatcagaatgaaaaagagagttatattgtcacgtttaaccagtatcttgaatcattgagattaaatacatacgtaagtctggctcgtaatacttactgggacgccagcagtaatgtgaattattcattatcacttagccgcgattttgatatcggcccattaaaaaacgtatccacctcactaacatttagccgaataaactgggaagatgacaaccaggatcaactgtacctaaatatttcaattccctggggaaccagtagaacattgagctatggtatgcaacgaaatcaggataacaacatttcgcatactgcttcgtggtatgactcttccgatcgaaataattcctggagcgtttctgcttcaggcgacaatgacgaatttaaagatatggaggcgtcactgcgcgccagttatcagcataataccgagaacggtcgtctctatctctccggtacatcacagcgggacagctactattctctgaatgccagttggaacggttcattcactgcaactcgccacggcgccgctttccatgactatagtggtagtgctgactcgcgttttatgatcgacgcagacggcgctgaagatattccgttgaataataaacgcgcggtaactaatcgttatggcatcggagttattccatcagtcagcagttacataacaacatcattaagcgttgatacccgaaatctgccagaaaatgtggatatcgaaaactcggttatcaccaccaccttaaccgagggtgctattggctacgccaaacttgatacccgcaagggctaccaaatcataggggttattcgcctgccagatggtagtcacccaccactggggattagcgtaaaagatgaaaccagccacaaagaattaggactggttgctgatggcggttttgtatacctcaacggcattcaggatgacagcaaacttactttacgctggggtgacaaatcttgctttattcaaccacccaagagcagcaacttaaccaccggaacggttattttaccgtgtattagccaaaattaa

SEQ ID NO: 11176 - DNA, 828 bp, Escherichia coli
ttggaaagcctgttaacccttcctctggctggtgaggccagagtcaggattttacaaattaccgatactcacctgtttgcacaaaagcacgaagccctgttaggggtaaacacctgggaaagctaccaggcggtgctggaggcgattcgtccacaccagcacgaattcgacctgattgtcgcgacaggtgatttagcgcaggatcaatcctctgcggcctatcagcatttcgctgaaggcatcgcaagttttcgtgcgccctgcgtctggctgccgggcaaccacgatttccagcccgcgatgtacagcgcgttacaggatgcgggtatctccccggcgaagcgcgtgtttattggtgagcaatggcaaatcctgttgctggatagccaggtgtttggcgtgccgcacggtgagctgagcgagtttcagcttgagtggctggaacgtaaactggccgatgcgccagaacgccatacgttgctgctgctgcatcatcatccgctacctgcgggttgtagttggctcgatcaacacagtctgcgtaacgcgggcgaactggataccgtgctggcgaagtttccgcacgtcaaatacttgctgtgcggtcatattcatcaggagctggatctcgactggaacggtcgccgcctgctggcaacgccgtcgacctgtgtgcagtttaagccgcactgttccaactttacgctggacaccatcgcgcccggctggcgtactctcgagttacatgctgatggcacgctgaccaccgaggtgcatcgcctggcggacacacgtttccaacctgataccgcttcagaaggctactga

SEQ ID NO: 11177 - DNA, 297 bp, Escherichia coli
atggaaaaacgcacaccacatacacgtttgagtcaggttaaaaaacttgtcaataccgggcaagttcgtacaacacgtagtgcactgttaaatgcagatgagttaggtttggattttgatggtatgtgtaatgttatcattggattatcagagagcgacttttataaaagcatgaccacctactctgatcatactatctggcaggatgtttacagacccaggcttgttacaggccaggtttatcttaaaattacggtaattcatgacgtactgatcgtctcgtttaaggagaagtaa

SEQ ID NO: 11178 - DNA, 396 bp, Escherichia coli
atgaaatgtccggtttgccaccagggagaaatggtttctggcattaaagatattccatacaccttccgtggacgaaaaacagtattgaaaggtatccacggtttatattgtgtccattgcgaagagagcatcatgaataaagaagagtcagatgctttcatggcgcaagtaaaggcatttcgggcttcggtgaatgccgaaacagtggcacctgaatttatagtgaaggttcgaaaaaagctctctcttacccaaaaagaggcaagcgaaatttttgggggaggtgtaaatgcgttttcgcgttacgaaaaaggcaatgcccaacctcatccttccacaatcaaacttttacgtgttctggataagcatccagaactattgaatgaaatccgttaa

SEQ ID NO: 11179 - DNA, 735 bp, Escherichia coli
atgaaaaaacgctttatttatcacgatgaaaaatcgaataaattttggtggatagattacgaaggggatagtttagctgtcaactatggcaaggtaggtagtattggtaaattccagacaaaagagttcgataatgaagaacagtgtctgaaagaagccagtaaattgattgccgcaaaaatgaagaaaggctatcaagaagatccaaagtttaacttcatggatcgctactattttgatgatgaagaaattgggttacatgttaaaacgtcacacccaaacttccagtgccattttactgatccactttatatgtgttgctgggatgaagaatctccttttggcagcgatgaaggtgctgatgctctaaacgttcttgaaaatagcctccgtaaagagccggatctggactgtgctgatttccctcaaatgttaattgaaactatgtggggtatgaaatacatcgctatggacagtattcttgaagaggatgttcgtgcgcaattactagtcgatgaaatgagcactatccagagcaatatgattacctacgcaactgcattcggtcagattaaagtcatgggtaaaatctcccataaacttaaaaagatgggactcaatgcactagcgcgtcatcagcttaccgcaaaaattcttcaatggggtgacggtcaggactcaccaatacttcaaaaaatgattgatgaccttacggcgtttcctcacgaaaattaa

SEQ ID NO: 11180 - DNA, 147 bp, Escherichia coli
atgggaattaacgaaatcatcatgtacatcatgatgttctttatgctgatagctgccgtagacaggatcctgtcgcagttcggcggttctgctcgtttcctcggtaagttcggtaaaagtatcgaaggatcaggcggtcagttctaa

SEQ ID NO: 11181 - DNA, 564 bp, Escherichia coli
gtgtatgaacatcgcagcggtgtctatcactatcgggtaagtcaggcgtttcatttaacggcggatacgctgacggtgacgctctctgtcaccaatcaaggggcagagacgctgccatttggtaccggctggcatccttattttccgttgtcgccgcaaacgcggattcaggcacaggcgagcggttactggctggagcgggagcagtggctggcgggtgagttttgcgagcagctaccgcaggaactggattttaaccagcccgcgccgttgccgcgccagtgggtgaacaatggttttgccggatggaatggtcaggcccgcatcgagcagccgcaggaaggttatgccatcatcatggaaacgacgccacctgcaccgtgttatttcatctttgtttccgaccctgcgtttgataaaggatatgcgtttgatttcttctgtctggaaccgatgagccatgcgccggatgatcatcatcgcccggaagggggtgatctcattgcgctagcaccaggggaatcaacaacttcagagatgtcgttgcgggtagagtggctgtaa

SEQ ID NO: 11182 - DNA, 984 bp, Escherichia coli
atgcctacaaaaatgagaacaacccgtaatctattattaatggctacgctattaggtagcgcactatttgccagggctgcggaaaaagaaatgaccattggcgcaatataccttgatactcagggatactacgctggagtgcgtcagggcgttcaggatgcggcaaaagattcctcagtacaagttcagttaatagaaactaacgcccagggtgatatttcgaaagaaagtacctttgttgataccctcgtggcgcgtaatgtcgatgccattattttatcggcagtgtctgaaaatggcagtagccgtaccgttcgtcgcgccagtgaagcgggcattccggtgatttgctacaacacctgtattaatcaaaagggggtcgataaatatgtctcggcgtatctggtcggcgatccgctggaatttggtaaaaaactgggtaacgctgccgctgattattttattgccaataaaattgaccagccgaaaattgccgtcatcaattgcgaagcctttgaagtttgtgtgcagcgacgtaaaggatttgaagaagttttaaaatcccgcgttcccggcgcgcaaattgtcgctaatcaggaagggactgttttagataaagcgatttccgttggtgaaaaactaattatctccacgccggatctcaacgccattatgggggaatcgggcggtgcgacactcggcgcggtaaaagcggtacgtaatcaaaatcaggccggaaaaattgctgttttcggttcggatatgacaaccgaaattgctcaggagctggaaaacaatcaggtgctgaaagcggtagtggatatttccggtaagaaaatgggcaatgctgttttcgcgcaaacattgaaggttatcaataaacaagccgacggtgaaaaagtgattcaggtgcctatcgatctctataccaaaacggaagacggtaaacagtggctggcaacgcacgttgatggtctgccctaa

SEQ ID NO: 11183 - DNA, 528 bp, Escherichia coli
gtgcgtttatcgttgcagtcgctgaactgttacgtgatccgtgatgcgctactgaatgatgaggccgatgttggcgtcttttatcgtgtagggaatgatgatgctctgaatcgacgagagttgggtgaacaatcactggtgctggtggcttcaccgcaaattgcagatgtcgattttactgagccgggaagacataacgcctgtagctttattatcaacgaaccgcaatgtgtcttccggcagatatttgagagcacgctgcgtcagcggcggatcacggtggaaaacaccattgagcttataagtatcgaaagcatcaagcgttgtgtcgcggcgaatatcggggtcagctacctaccgcgctttgcggtggcaaaagagttggagtgcggagaattaattgaattgccttttggcgaacagtcgcagaccattacggccatgtgcgcacatcatgctggaaaagcggttagcccggcgatgcacacttttattcagtgtgttgaagagagttttgtggctggataa

SEQ ID NO: 11184 - DNA, 2187 bp, Escherichia coli
atgattactcgtattcctcgtagttctttctctgcaaatattaataatacagcccagacaaatgaacaccaaaccctgagtgaattgttttataaagaactcgaggataaattttctggcaaggagctggcgacgcctctattaaaaagcttctcagagaactgtagacaaaatggtcgtcatatctttagcaacaaggattttgtcattaaattttccacgtccgtcttacaagctgataagaaagaaattacgataattaataaaaacgaaaacacgacacttactcaaaccattgccccaatatttgaaaaatacctaatggaaattttacctcaacgctcagacactcttgataaacaagaattaaacctaaaatcagatagaaaagaaaaagaattcccaagaattaaacttaatggtcaatgttattttccggggcgaccccaaaaccgtatagtatgccgacacattgctgcacaatatattaatgatatttatcagaatgttgattacaaaccccatcaagatgattactcttcagctgaaaaatttctcacgcacttcaacaaaaaatgcaaaaaccagactttggcgttggtttccagccgtcctgaggggcgttgcgttgctgcctgcggtgatttcgggctagttatgaaagcatattttgacaagatggaatcaaatggcatcagtgttatggcagccatattactggtggataaccatgctttgacggtccggctaagaataaagaacacaactgaaggatgtacccattacgtggtttcggtttatgatcctaatgtaactaacgataaaataagaattatgagcgaaagcaaagagaatattaaacactattctctgatggattttatgaatgtagattatagcctcctgaaatggtcaaatgatcatgttattaatcaatctgttgcaataattccagcacttccgaaagaacagctattgatgttaaaaggatctgtggatgaaataacccctccattatcacctgcaacgatgaatttgctaatggcaattggtcagaatcaccaacttacgcaactgatgattcaactccagaaaatgccagaactacatagaacagaaatgttgactgcctataatagtattaacctgccaggtttatatttggctataaattatggtaatgcggatatcgttgagactattttcaattcattgtcagaaacaggatatgaaggattactctcgaaaaaaaatctcatgcatattctggaggcaaaagataaaaatggtttttctggattatttttagcgatatcacgtaaggataaaaatgttgtaacctcgattctgaacgccttacctaaactggccgcaacacatcatttagataacgaacaagtgtataaattcctgagtgccaaaaatagaacgcccagccatgttttataccatgttatggcgaatggtgatgccgacatgctgaaaattgttttgaacgcgttacctttgttaattcgcacatgtcatttgactaaagaacaggtactcgatctcctgaaggcaaaggatttttatggttgcccaggactatatctggcgatgcaaaatggacatagcgatatcgtgaaagttattcttgaagcattgcccagcctagcccaggaaattaacatttcagcttccgatattgtagatcttctgaccgctaaaagtcttgcgcgcgacacgggtttgtttatggccatgcagcgcggacatatgaacgttattaatactatttttaacgcattacccactctgtttaatacgtttaaattcgataaaaaaaatatgaagcccctcctcctggcaaataattctaatgaatatcccggtttgttttcagcgatacagcataaacaacaaaatgttgtagagacggtttatcttgctttatctgaccatgcacgcctgtttggatttaccgctgaagatattatggatttttggcaacacaaagccccacaaaaatactctgcctttgagttggcttttgaatttggtcaccgggttattgctgaattaatccttaatacattaaataagatggctgaaagctttggctttacggataaccctcgatacattgcggagaaaaattatatggaagctttactcaaaaaagcatctccccataccgtacgctaa

SEQ ID NO: 11185 - DNA, 873 bp, Escherichia coli
atgctgcccgactcatcagtccgtttaaataaatacatcagcgaaagcggaatttgctcacgccgcgaagcggatcgctatatcgagcaaggcaatgtgttccttaatggcaagcgagccaccattggcgatcaggtgaaacccggcgacgttgtgaaagtaaacggtcagttgattgaacctcgggaagccgaagatttggtacttatcgccctgaacaagcccgttggtattgtaagcaccaccgaagatggcgagcgcgataacattgtcgatttcgttaaccacagcaaacgcgtgttcccgattggccgcctggataaagactcccaggggctgattttcctcaccaatcacggcgatctggtgaataagatcctgcgtgctggcaatgatcatgagaaagagtatctggtgacggtcgataaaccgattaccgaggagtttattcgcggcatgagtgcgggggtgccaatcctcgggacagtgaccaaaaagtgcaaagttaaaaaagaagcgccgtttgtcttccgcattaccctggtgcaggggctgaaccgtcagatccggcgcatgtgcgagcatttcggctatgaagtgaaaaagctggaacgcacgcgcatcatgaacgttagcttaagcggcattccgctgggggaatggcgcgatttaaccgacgatgagttaatcgacctctttaagctcattgaaaattcctcttccgaggtaaaacctaaagcgaaggccaaaccgaaaacagcgggcatcaaacgtccagtcgttaagatggaaaaaacggcggaaaaaggcggtcgcccggcgtccaacggtaagcgttttacctcgccggggcgtaaaaagaaggggcgctga

SEQ ID NO: 11186 - DNA, 1476 bp, Escherichia coli
atgaatacccagtataattccagttatatattttcgattaccttagtcgctacattaggtggtttattatttggctacgacaccgccgttatttccggtactgttgagtcactcaataccgtctttgttgctccacaaaacttaagtgaatccgctgccaactccctgttagggttttgcgtggccagcgctctgattggttgcatcatcggcggtgccctcggtggttattgcagtaaccgcttcggtcgtcgtgattcacttaagattgctgctgtcctgttttttatttctggtgtaggttctgcctggccagaacttggttttacctctataaacccggacaacactgtgcctgtttatctggcaggttatgtcccggaatttgttatttatcgcattattggcggtattggcgttggtttagcctcaatgctctcgccaatgtatattgcggaactggctccagctcatattcgcgggaaactggtctcttttaaccagtttgcgattattttcgggcaacttttagtttactgcgtaaactattttattgcccgttccggtgatgccagctggctgaatactgacggctggcgttatatgtttgcctcggaatgtatccctgcactgctgttcttaatgctgctgtataccgtgccagaaagtcctcgctggctgatgtcgcgcggcaagcaagaacaggcggaaggtatcctgcgcaaaattatgggcaacacgcttgcaactcaggcagtacaggaaattaaacactccctggatcatggccgcaaaaccggtggtcgtctgctgatgtttggcgtgggcgtgattgtaatcggcgtaatgctctccatcttccagcaatttgtcggcatcaatgtggtgctgtactacgcgccggaagtgttcaaaacgctgggggccagcacggatatcgcgctgttgcagaccattattgtcggagttatcaacctcaccttcaccgttctggcaattatgacggtggataaatttggtcgtaagccactgcaaattatcggcgcactcggaatggcaatcggtatgtttagcctcggtaccgcgttttacactcaggcaccgggtattgtggcgctactgtcgatgctgttctatgttgccgcctttgccatgtcctggggtccggtatgctgggtactgctgtcggaaatcttcccgaatgctattcgtggtaaagcgctggcaatcgcggtggcggcccagtggctggcgaactacttcgtctcctggaccttcccgatgatggacaaaaactcctggctggtggcccatttccacaacggtttctcctactggatttacggttgtatgggcgttctggcagcactgtttatgtggaaatttgtcccggaaaccaaaggtaaaacccttgaggagctggaagcgctctgggaaccggaaacgaagaaaacacaacaaactgctacgctgtaa

SEQ ID NO: 11187 - DNA, 153 bp, Escherichia coli
atggatattcttagtgaagaagaagtgagttactataaaaaatcgctcatatcccaggaaggaagcataaaaaaaggtgcgccaggagacgcaccagttgttgcaaaatcagcactgtggggcgtaattaccccttgccttttacactgctga

SEQ ID NO: 11188 - DNA, 195 bp, Escherichia coli
atgataagtcatatcctaaattctggcggcaataactctttgatgaaacatgatgtggtgcaaggaaataatatagtagatcttgatttactacgtaatttaaatggggtgccaggtttaaacagagataactttatttatatcagcaatattttttcaaatataaaacaacggaacgaaaaaatcatgcaataa

SEQ ID NO: 11189 - DNA, 708 bp, Escherichia coli
atgtgggtcaataagtatattgacgattgcactgatgaggatttaaacgatcgtgactttattgcatcagttgttgaccgggctatttttcatttcgcgattaatagtatatgtaatcctggggataataaagatgcaatgcccattgaacaatgtacttttgatgtagaaactaagaatgaccttccctccacggttcagctattttatgaggaatctaaggataatgaacctttagcgaatatacattttcaagcaataggttctggttttttaacgtttgttaatgcctgccaggaacatgatgacaacagcttaaaattatttgcttcgctgttaatttcactttcatattctagtgcctacgcagatttatcagaaacagtgtatattaatgaaaataatgagagctacctgaaagctcagtttgaaaaattatctcaacgtgatatgaagaagtacctgggagagatgaagcgtctggctgatgggggagaaatgaattttgatggctatctggataagatgtcacatctggtgaatgaaggaacgctcgatcctgatattttaagcaaaatgcgagatgctgcaccacaattaattagcttcgcgaagtcgtttgacccaacctcaaaggaagagattaaaatacttacagacacttctaaattaatttatgatttgttcggggttaaatcggagaaataa

SEQ ID NO: 11190 - DNA, 1239 bp, Escherichia coli
atgaagactatcttcaggtacattctttttttagcactgtattcttgttgtaatacagtcagtgcatatacaagttttattgtgggaaataatgcaggagttgataactatcgaggcccctccactgccgcacagatgacctttaattacacatcaacagcaagcaacttggttttttataaacccacgcagctcggcccgactggggtaaaaatgtactggtcatacctggatacaggtaccggtggtggtattctttactgcaatacatctggcagagcgaatcctggtccaataactattgaaaatgccatggtctattcaggtaaagattatggcggacataaactatttaatacatctgttcctggtctgtattacaccatgttaatatcaagggtctggtctgcatacgatacaataactgacattcaatcgctaggaatctatatcggagatccttccaaccaagaatttttcttttccgtcacagacagcgatctacaaactaagggttgcaacaaagcagacgactacgataagttttgggctattggtggtatagtacacaacataactgttgaattttatacagatactaatttcgatcctacacttaatcagcaagtccagttatccagttcatcaaattacctttattcgtttaaggcctacagtcctggtacaaaagttgtagatcacagcaaccacatttatgtcaatttcacactgaataatgtcaaattaaccttaccaacatgttttacctccatacttaccgggccatcagtcaatggttcaacggttagaatgggagaatatagctctgggacaattaaaaatggcgcttcacctgttccctttgatatctcgcttcagaattgtattcgtgtgcgtaatattgaaacaaaactcgtcactggaaaagtaggtactcaaaacacacaactgcttggtaatacgcttactggaagcactgccgccaaaggcgttggcgtactcattgaaggtttagcaaccagtaaaaatccgctaatgacattaaaacctaatgatacgaattctgtttatatagattatgaaaccgaagatgacacctccgatggggtttaccctaatcaaggtaacggcacatcacagcctcttcatttccaggcaacattaaagcaagacgggaatattgctatcgaacccggcgaatttaaagccaccagtactttccaggtaacctatccctga

SEQ ID NO: 11191 - DNA, 1179 bp, Escherichia coli
atgatctggataatgacgatggctcgccgtatgaacggtgtttacgcggcatttatgctggtcgcttttatgatgggggtggccggggcgctacaggctcctacattgagcttatttctgagtcgtgaggttggcgcgcaacctttctggatcggcctcttttatacggtgaatgctattgctgggatcggcgtaagcctctggttggcaaaacgttctgacagtcagggcgatcggcgaaaactgattatattttgctgtttgatggctatcggcaatgcgctattgtttgcatttaatcgtcattatctgacgcttatcacctgtggtgtgcttctggcatctctggccaatacggcaatgccacagttatttgctctggcgcgggaatatgcggataactcggcgcgagaagtggtgatgtttagctcggtgatgcgtgcgcagctttctctggcatgggttatcggtccaccgttggcctttatgctggcgttgaattacggctttacggtgatgttttcgattgccgccgggatattcacactcagtctggtattgattgcatttatgcttccgtctgtggcgcgggtagaactgccgtcggaaaatgctttatcaatgcaaggtggctggcaggatagtaacgtacggatgttatttgtcgcctcgacgttaatgtggacctgcaacaccatgtacattattgatatgccgttgtggatcagtagcgagttaggattgccagacaaactggcgggtttcctgatggggacggcagctggactggaaataccagcaatgattctggctggctactatgtcaaacgttatggtaagcggcgaatgatggtcatagcagtggcggcaggagtactgttttacaccggattgattttctttaatagccgtatggcgttgatgacgctgcaactttttaacgctgtatttatcggcattgttgcgggtattgggatgctatggtttcaggatttaatgcctggaagagcgggggcagctaccaccttatttactaacagtatttctaccggggtaattctggctggcgttattcagggagcaattgcacaaagttgggggcactttgctgtctactgggtaattgcggttatttctgttgtcgcattatttttaaccgcaaaggttaaagacgtttga

SEQ ID NO: 11192 - DNA, 807 bp, Escherichia coli
atgaaagtatcagttccaggcatgccggttacacttttaaatatgagcaagaacgatatttataagatggtgagcggggacaagatggacgtgaagatgaatatctttcaacgcttgtgggagacgttacgccatctgttctggtcagataaacagactgaggcttataaacttctgttcaatttcgtgaataaccagactggcaacatcaacgcctcagaatactttactggggctatcaacgagaatgagagagaaaagtttatcaatagcctggaattattcaataaacttaaaacatgcgcaaaaaatccggatgagttggtcgcaaagggcaatatgcgctgggtcgcccagaccttcggggatatcgagttaagtgtcacttttttcattgaaaagaataagatatgtactcagacgttgcagctgcataagggccaaggtaacttgggcgttgatcttagaaaggcttaccttcccggcgttgacatgagggattgttaccttggtaaaaaaacaatgaaaggtagcaatgatatcctttatgagagacctgggtggaatgctaacctgggcggtgctaccccggacggtgctaccccggacggtgctaacccggacggtgctatcctggacggtgctaccgtgaacggtgctacctccctatatgatgaggtaattattattaataaaatcccccccaaaaaaattgatactaaaggagttgctactgaagaagttgctactaaaaaagtactgctgaacaaattactgacaacgcaattattgaatgagccagaataa

SEQ ID NO: 11193 - DNA, 1332 bp, Escherichia coli
atgcaaccgtccagaaactttgacgatctcaaattctcctctattcaccgccgcattttgctgtggggaagcggtggtccgtttctggatggttatgtactggtaatgattggcgtggcgctggagcaactgacgccggcgctgaaactggacgctgactggattggcttgctgggcgcgggaacgctcgccgggctgttcgttggcacatcgctgtttggttatatttccgataaagtcggacggcgcaaaatgttcctcattgatatcatcgccatcggcgtgatatcggtggcgacgatgtttgtttcatcccccgtcgaactgttggtgatgcgggtacttatcggcattgtcatcggtgcagattatcccatcgccacctcaatgatcaccgagttctccagtacccgtcagcgggcgttttccatcagctttattgccgcgatgtggtatgtcggcgcgacctgtgccgatctggtcggctactggctttatgatgtggaaggcggctggcgctggatgctgggtagcgcggcgatcccctgtttgttgattttgattggtcgattcgaactgcctgaatctccccgctggttattacgcaaagggcgagtaaaagagtgcgaagagatgatgatcaaactgtttggcgaaccggtggctttcgatgaagagcagccgcagcaaacccgttttcgcgatctgtttaatcgccgccattttccttttgttctgtttgttgccgccatctggacctgccaggtgatcccaatgttcgccatttacacctttggcccgcaaatcgttggtttgttgggattgggggttggcaaaaacgcggcactagggaatgtggtgattagcctgttctttatgctcggctgtattccgccgatgctgtggttaaacactgccggacggcgtccattgttgattggcagctttgccatgatgacgctggcgctggcggttttggggctaatcccggatatggggatctggctggtagtgatggcctttgcggtgtatgcctttttctctggcgggccgggtaatttgcagtggctctatcctaatgaactcttcccgacagatatccgcgcctctgccgtgggcgtgattatgtccttaagtcgtattggcaccattgtttcgacctgggcactaccgatctttatcaataattacggtatcagtaacacgatgctaatgggggcgggtatctcgctgtttggcttgttgatttccgtagcgtttgccccggagactcgagggatgtcactggcgcagaccagcaatatgacgatccgcgggcagagaatggggtaa

SEQ ID NO: 11194 - DNA, 2415 bp, Escherichia coli
atgattgcacgttggttctggcgcgaatggcgttcgccgtcgctattaattgtctggctggcgctaagcctggcggtggcctgcgtgctggcgctgggcaatatcagcgatcgcatggagaagggcttaagccagcaaagccgtgagtttatggcgggcgatcgggcgttgcgcagttcacgcgaagtgccgcaagcgtggctggaggaagcgcaaaagcgcggcctgaaagtcggcaagcagctgactttcgccacaatgacctttgcaggcgacacaccgcagctggcgaacgtcaaagcggtggatgatatctacccgatgtatggcgatctgcaaactaatccccctggcctgaaaccgcaggcgggcagcgtattgctggccccacgcctgatggcactgcttaacctgaaaacgggcgacaccattgacgtgggcgatgccaccttgcggattgccggagaagtgattcaggaaccggattccggttttaaccccttccagatggctccgcgtctgatgatgaatctggcggatgtcgataaaaccggagccgtgcagccggggagtcgggtcacctggcgttataaattcggcggcaacgagaaccagctcgacggctatgagaaatggttgttacctcagcttaaacccgaacaacgctggtacggtctggaacaggacgaaggcgcgctggggcgatcgatggaacgctcgcaacagttcctgctgctttcggcgcttctgaccttgctgctggcagtggcagcggtggcggtagcgatgaatcattactgtcgcagtcgctacgatctggtggcgatcctcaaaacgctgggggcagggcgagcgcaactgcgtaagctaatcgtcggtcagtggttgatggtgctgacgctttcagccgttaccggtggggccataggcctgttgttcgaaaacgtgttgatggtgctgctcaagcccgttctgcctgctgcactaccgccagccagcctctggccgtggctgtgggcgcttggcaccatgacggtcatctcgctgctggtggggctacgaccatatcgcttgttgctggcaacgcagcctttacgcgtattacgtaatgatgtggtagcgaacgtctggccgctgaagttttatctgccgattgtcagtgtggtggttgtgctgctgctcgccggattaatgggtggcagcatgctgctttgggcggtgctggcgggcgcggtagtactggctttgctgtgcggtgtgctgggctggatgctgctgaatgtacttcgccgcatgacgctgaaatcgctgcctctgcgcctggcggttagccgcctgttacgtcagccgtggtcaacgttaagtcagctttcggcattttcgctctcctttatgctgctggcactgctgctggtgttgcgtggcgatctgctcgaccgctggcagcagcagctacctccagaaagcccgaactactttttaattaacatcgccacagaacaggtagcaccgctaaaagcgttcctcgcggaacatcagatagtcccggaatcgttttatccggtggtgcgggcgcggctgacggcgattaacgataagccgacagaaggtaatgaagatgaggcgcttaaccgcgaactcaatcttacctggcaaaatacgcggcccgatcataatccgattgtcgccggtaactggccgccaaaagccgatgaagtgtcgatggaagaggggctggcgaaacgcttaaacgttgccctcggtgataccgtgacttttatgggcgatacccaggagttccgcgctaaagtgaccagcctgcgcaaagtggactgggaaagtctgcggcctaatttctattttattttccctgaaggggcattagacgggcaaccgcagagctggcttaccagtttccgctgggagaatggcaacggcatgttgacacaactcaaccgccagttcccgaccattagcctgttagatattggcgcgattttaaaacaggtcggtcaggtgctggagcaggtaagtcgggcgctggaagtgatggtggtactggtcaccgcctgcggtatgttgctgttgctggcacaggtgcaggtgggaatgcgtcagcgtcatcaggagctggtggtgtggcgcacactcggtgcggggaaaaaactgctgcgtaccacgttgtggtgtgagttcgccatgcttgggtttgtttccggcctggtggccgcaattggtgcggaaacggcgctggcagtgttgcaggcgaaagtgtttgattttccgtgggagccagactggcgattgtggattgttctgccgtgcagcggagcgctgctgctgtcgcttttcggcggctggctgggtgcgcgactggttaagggtaaggcgctgttcaggcagtttgcggggtga

SEQ ID NO: 11195 - DNA, 687 bp, Escherichia coli
atgccagcggaaaacattgttgaagttcatcatcttaagaagtccgtcggtcagggggagcatgaactctccatcctcaccggagttgagctggttgtcaaacgtggcgagaccatcgcactggtgggcgagtcgggatcgggtaagtcaaccttgctggcgatcctcgccgggcttgatgacggcagcagtggcgaagtgagtctggtgggacaaccgctacataatatggacgaagaagcgcgggcaaagttgcgcgcgaagcacgtcggctttgtttttcagtcatttatgttaattcctacccttaacgcgctggaaaacgtcgagcttccggctctgctgcgcggtgagagtagcgcggaaagtcgtaacggggcgaaagcgttgctcgaacagttagggctgggtaaacgtctggatcatcttccggcacagctttccggcggtgaacagcaacgagtggcgctggcacgagcctttaatggtcgacctgatgtgctgtttgccgacgaacccaccggcaaccttgaccgccagacgggcgataaaattgccgacctgctgttttccctcaaccgtgaacatggcaccacgttgattatggtgacccacgacctgcaactggcggcacgctgcgaccgctgcttacggctggtgaacgggcagttgcaggaggaagcatga

SEQ ID NO: 11196 - DNA, 594 bp, Escherichia coli
ttgcccttcctgttcctggtcctgttaaccttccgtgccgccgcagcggacacgttattgattctgggtgatagcctgagcgccgggtatcgaatgtctgccagcgcggcctggcctgccttgttgaatgataagtggcagagtaaaacgtcggtagttaatgccagcatcagcggcgacacctcgcaacaaggactggcgcgccttccggctctgctgaaacagcatcagccgcgttgggtgctggttgaactgggcggcaatgacggtttgcgtggttttcagccacagcaaaccgagcaaacgctgcgccagattttgcaggatgtcaaagccgccaacgctgaaccattgttaatgcaaatacgtctgcctgcaaactatggtcgccgttataatgaagcctttagcgccatttaccccaaactcgccaaagagtttgatgttccgctgctgcccttttttatggaagaggtctacctcaagccacaatggatgcaggatgacggtattcatcccaaccgcgacgcccagccgtttattgccgactggatggcgaagcagttgcagcctttagtaaatcatgactcataa

SEQ ID NO: 11197 - DNA, 771 bp, Escherichia coli
atgcaaaaatcggtcttaattaccggatgttccagtggaattggcctggaaagcgcgctcgaattaaaacgccagggttttcatgtgctggcaggttgccggaaaccggatgatgttgagcgcatgaacagcatgggatttaccggcgtgttgatcgatctggattcaccagaaagtgttgatcgcgcagccgacgaggtgatcgccctgaccgataattgtctgtatgggatctttaacaatgccggattcggcatgtatggccccctttccaccatcagccgtgcgcagatggaacagcagttttccgccaactttttcggcgcacaccagctcaccatgcgcctgttacccgcgatgttaccgcacggtgaagggcgtattgtgatgacatcatcggtgatgggattaatctccacgccgggtcgtggcgcttacgcggccagtaaatatgcgctggaggcgtggtcagacgcactgcgcatggagctgcgccacagcggaattaaagtcagcctgatcgaacccggtcccattcgtactcgcttcaccgacaacgtcaaccagacgcaaagtgataaaccagtcgaaaatcccggcatcgccgcccgctttacgttgggaccggaagcggtggtggacaaagtacgccatgcttttattagcgagaagccgaagatgcgctatccggtgacgctggtgacctgggcggtaatggtgcttaagcgcctgctgccggggcacgtgatggacaaaatattgcaggggtga

SEQ ID NO: 11198 - DNA, 855 bp, Escherichia coli
atgtccgtagaaaatattgtcaacattaacgaatctaacctgcaacaggttcttgaacagtcgatgaccactccggtgctgttctatttttggtctgaacgtagccagcactgtttgcagttaaccccaattctggaaagcctcgcggcgcagtacaacgggcaatttattctggcgaagctggactgcgacgcggagcagatgattgccgcgcagtttggtctgcgtgcgattccgaccgtgtatctgttccagaacgggcaaccggtagatggcttccaggggccgcaaccggaagaggcgatccgcgccctgctggataaagtgctgccgcgcgaagaagagctgaaagcgcagcaggcgatgcaactgatgcaggaaagcaattacaccgatgccctgccattgctgaaagacgcctggcagttgtcgaatcagaacggggagatcggcctgctgctggcagaaacgctgattgcgctgaaccgttctgaagatgcggaagcggtgctgaaaaccattccgttgcaggatcaggacacccgctaccaggggctggtggcgcaaatcgaactgctgaagcaggcggctgatacgccggaaattcaacagttgcaacagcaggtggcggagaatccagaagatgccgcactggcgacgcaactggcgctgcaactgcatcaggttgggcgcaatgaagaggcgctggagttgctgttcgggcatctgcgtaaagatctcaccgccgcagacggtcagacgcgtaaaacgttccaggagatcctcgctgcgctgggtacgggtgatgcactggcgtcgaagtatcgccgccagctgtatgcattgttgtattga

SEQ ID NO: 11199 - DNA, 780 bp, Escherichia coli
atgaactcgcataatattactaacgaatcattagcactggcattaatgctggtggtggtggcaatcttaattagccataaagaaaaactggcgctggagaaagatattctctggagcgtcgggcgagcgataattcagctgattattgtcggctatgtgctgaagtatattttcagcgtggatgatgccagcctgacattattgatggtgttatttatctgctttaatgcggcgtggaacgcgcaaaaacgcagtaaatatattgctaaagcttttatctcatcgtttattgccattacggtcggggcgggaattaccctggcggtgctgattctctcagggtcgattgaatttatcccgatgcaggtgatccctatcgccgggatgattgccggtaacgccatggtagcggtggggttgtgttacaacaatttagggcaacgggtcattagcgaacagcaacagattcaggagaaactgagtcttggtgcgacgccgaagcaggcttcagcgatattgattcgcgacagtattcgcgcggctttaattccgacggtcgattcagcaaaaacggttggcttagtgagtttaccaggaatgatgtccgggctgatatttgccgggattgatccggtgaaggcgattaaatatcagattatggtgacctttatgctgctctcaaccgccagcttgtcgaccattattgcctgctatttaacctatcgtaagttttataattcgcgccaccagttggtggtgacgcaattgaagaagaaatga

SEQ ID NO: 11200 - DNA, 1221 bp, Escherichia coli
atgtttaagtcttttttcccaaagccgggaacgttttttctctcggccttcgtttgggcattgattgccgttatcttctggcaagccggtgggggggactgggtggcgcgtatcaccggcgcttccgggcagatcccgattagcgccgcgcgtttctggtcgttggatttcctgattttttacgcttactacattgtttgcgtaggactttttgcattgttctggtttatctacagcccgcatcgttggcaatactggtcaatactcggtactgcactgatcatcttcgtcacctggtttttggtggaagtcggggtcgccgtcaacgcctggtatgcgccgttctatgatctgattcaaaccgcgctaagttcgccgcataaagtcaccatcgaacaattttaccgcgaagtgggcgtctttctggggattgcgctgatcgctgtggtgatcagtgtgctgaacaacttctttgtcagtcactacgtgttccgctggcgtacagcgatgaacgaatattacatggcgaactggcaacaactgcgtcatatcgaaggggccgcacagcgtgtgcaggaagacaccatgcgttttgcttcaacgctggagaatatgggcgtcagttttatcaacgccatcatgacgttgatcgccttcctgccggtgctggtaacgctctccgcgcatgtgccggagctgccgattatcgggcacattccgtatggtctggtgattgccgcaatcgtatggtcgctgatggggaccggattgctggcagtggtagggatcaaactgccggggctggagtttaaaaaccagcgtgtagaggctgcctaccgtaaagagctggtttatggtgaagacgatgccacgcgcgcgacgccgcctacggtacgcgagctgtttagcgccgtacggaaaaactatttccgcctctattttcactatatgtatttcaacatcgcccgcattctctatttgcaggtcgataacgttttcggtttgttcttgctgtttccgtcaattgttgccggtacgattacgctcggcctgatgacgcagattaccaacgtttttggtcaggttcgcggtgctttccagtacctgattaactcatggaccacactggttgagttgatgtctatctacaaacgtctgcgcagctttgaacatgagctggatggtgacaaaattcaggaagtaacccataccttgagctaa

SEQ ID NO: 11201 - DNA, 903 bp, Escherichia coli
atggccaatctctacgacttgaaaaagttcgacttaaatcttcttgtcatatttgagtgtatttaccagcatttaagcattagcaaagctgctgaatcactatatatcaccccatcagccgtgagccagtcgttacaacgcttacgtgcgcaatttaatgaccctttattcattcgctcaggaaaaggtatcgcgccgacgacaacagggttaaatctgcatcaccatcttgagaaaaatctcagaggccttgaacaaacaattaatatagtcaataagtccgaactaaagaaaaactttattatctacggccctcagctcatttcttgctctaataatagtatgctgatccgctgcctacggcaagattcctctgtcgagattgagtgccatgatatcctcatgtcagcagagaatgctgaagaactgttggttcaccgcaaagccgatctggtgatcacccaaatgccagtgatcagccgttccgtcatttgcatgccattgcatacgattcgcaatactctaatttgtagtaataggcatccacgaattactgacaatagcacttatgaacaaattatggcagaagagttcacccaattaatatctaaatcagcaggggttgatgatattcaaatggaaatagacgagagatttatgaatcgcaaaatctcatttcgtggttcctctttgctgacaatcattaatagcattgcagttacagatttactgggaatagtcccctatgaactttataattcctaccgtgactttcttaacttaaaagagataaaactagaacatccgttaccttcaataaagctttacatttcctataataaatcttctttaaataatttggtgttctcccgatttattgaccgtctaaatgagagtttttga

SEQ ID NO: 11202 - DNA, 747 bp, Escherichia coli
atgttaaaaaagatacttttactggctctgcttcctgcaatcgccttcgcagaggaacttcctgctccagtaaaagcgattgaaaaacagggcattacaatcatcaaaacattcgatgcccccggaggaatgaaaggttatctcggaaagtatcaggatatgggcgtcaccatctacctgactccagatggtaagcacgctatctctggttacatgtacaacgagaaaggtgaaaacctgagtaacacacttatcgaaaaagaaatttacgcaccagccggacgcgaaatgtggcaacggatggaacaatcccactggctcctcgacggtaaaaaagatgcgccggtcattgtctacgtcttcgccgatccgttctgcccatattgtaaacagttctggcagcaggcgcgcccgtgggtagattctggcaaagtgcaattaagaacattgttggttggggttatcaagccagaaagcccggcgacagcagcggcaattcttgcctccaaagatcccgcaaaaacctggcaacaatatgaagcctctggtggcaagcttaagctaaacgtgcctgcaaacgtaagtacagagcaaatgaaagtgttaagtgacaatgagaaactgatggacgatctgggggcaaatgtcacgccggctatctattacatgagtaaggaaaatacgctacaacaggccgtggggttgcccgatcagaaaacgcttaatatcattatggggaataaataa

SEQ ID NO: 11203 - DNA, 1239 bp, Escherichia coli
atgaaagcattgacttatcacggcccacatcacgttcaggtagaaaatgttcccgatccgggcgttgaacaggcagatgatattattctgcgtattacggcaacggcgatctgtggctctgacctccatctttatcgaggcaaaatacctcaggttaaacatggcgatatttttggtcatgaatttatgggggaagtagttgaaaccggaaaggacgtaaaaaatttgcaaaaaggcgaccgagtggtaattccgttcgtcattgcttgtggcgactgttttttctgtcgattgcaacaatatgccgcctgcgaaaataccaatgcgggtaaaggcgctgcgctcaataaaaaacagataccagctccagcggcattgtttggttatagtcacctgtatggcggcgttcctggtgggcaggcggaatatgtccgcgtccctaaagggaatgtggggccgtttaaagtaccgcctttgctttcagatgataaagcgcttttcctttctgatattctgccaacggcatggcaggcagcaaaaaatgcgcagatccaacaaggttcaagcgttgcagtctatggtgctggtcctgtgggattgttgacaatcgcctgtgcacggttgctcggtgcggaacagatttttgttgttgatcatcatccctaccgcttgcatttcgccgccgaccgctacggcgcgatcccgattaattttgatgaagacagcgatccggcacagtcaattattgaacaaacggcaggtcaccggggcgtggatgcagtaatagacgccgtcggttttgaagcgaaaggcagcaccacggaaacggtgctgactaacctgaaactggagggcagcagcggtaaagcgttgcgtcagtgtattgcggcggtcaggcgtggcggcattgttagcgtaccgggcgtctacgctggatttattcacggtttcctgtttggcgacgcctttgataaagggttgtcgtttaaaatgggacagacccacgttcacgcatggctgggagaattattaccgttaattgagaaaggattactgaaaccagaagaaattgttacccactatatgccgtttgaagaggccgcccggggatatgagattttcgaaaaacgtgaagaggagtgccgtaaggtgattctggtacccggtgcacaaagcgcagaggcggcgcagaaggcggtttcaggtctggtgaatgcgatgccggggggaacaatatga

SEQ ID NO: 11204 - DNA, 954 bp, Escherichia coli
gtggatagtaataatcaaattgaaccctgtttaagcagaaagtcgtcagaaggtaaaccacaaatatttacaaccttacgaaatattgatcttaaccttctgactatttttgaagctgtatatgtacataaagggatcgttaatgcagcgaaagtgcttaatctgaccccctcggcaatcagtcagtctattcagaaactgcgcgttatattccctgacccattgtttattcgcaaaggccagggtgtcactcctaccgcatttgcgatgcatctacatgagtatatcagtcagggccttgagtccattcttggcgcgctggatatcgaaggaagctatgataagcaacgaacgataactattgcgaccactccctcggtcggagcactggtccttcctgtcatctatcgggcgattaaaactcactatccgcagcttttactgcgcaacccgcccatcagcgacgcggaaaaccaactcagtcagtttcaaaccgatctcatcatcgataacatgttttgcaccaatcgtacggtgcaacatcatgttctgttcaccgacaatatggtgttaatttgccgcgagggaaatccactactctctttagaagatgacagagagactatcgacaacgctgcgcatgtacttctgttaccggaagagcaaaatttcagcggtctgcggcagagagttcaagaaatgtttccggaccggcaaatcaatttcaccagctacaacattttgacaatcgctgcactggttgccaacagtgacatgttagcgattattcccagccgtttttataacctgtttagccgctgctggccgctggaaaaactgccttttccgtccttaaatgaggagcaaatagatttctctatccactacaacaaattcagcctgcgtgatcccatcctgcacggagtaatagatgttatccgtaatgcattttga

SEQ ID NO: 11205 - DNA, 936 bp, Escherichia coli
atggcactgccaattctgttagattgcgacccaggtcatgacgacgctatcgcaatagttctcgccctcgcctcaccagagcttgatgtcaaagcaattacgtcttccgccggaaaccagacaccagaaaaaaccttacgcaatgttctgcgtatgctgaccttgcttaatcgcaccgatattccggtagcaggcggcgcggtaaaaccgttaatgcgtgagttgattatcgcggacaatgtgcacggcgaaagcggtctcgacggcccggcattaccggaaccgacattcgcaccgcaaaactgtacggcggtagagctgatggcgaaaacgctgcgtgaaagtgcggaacctgtcaccattgtgtctaccggaccgcaaactaacgttgccttgctgctcaatagccatccggaactgcatagcaaaattgcccgtatcgtgattatgggtggcgctatggggctgggtaactggacgcctgcggctgaatttaatatttacgttgacccggaagcggcagaaattgtcttccagtcagggatcccggtggtgatggccggtctggatgttactcataaagcacaaatccacgttgaagacaccgagcgtttccgcgcgattggtaaccctgtttcaaccattgttgccgaactgctggatttcttcctcgaatatcataaagacgaaaaatggggctttgtcggcgcaccactgcatgacccatgcaccatcgcctggctgttgaaaccggagttatttacctctgttgagcgctgggttggcgtggaaacacaggggaaatatacccagggtatgacggttgttgattattattatctgacaggcaataaaccgaatgccaccgtaatggtcgatgttgatcgtcagggctttgttgatttactggctgatcgtctgaaattttacgcttaa

SEQ ID NO: 11206 - DNA, 123 bp, Escherichia coli
atgattgatgaaaaaaaaagcggcagagaagatctccaccgcttgtcattgttggatgcgacgctcaagcgtcgcatcaggcataaagcagattactttttgatttcatacagcggtgtttga

SEQ ID NO: 11207 - DNA, 198 bp, Escherichia coli
atgatcgccctttctgtttgttggcaaatagttcgttatttatgccgcatccggcagatgcagggtctaaacgcgatcgaacacagcaactatttgcgtaattatatggggcatctgcgacaaaaactggaacaggatccggcccggcctcgccattttattactgaaaccggtattgggtatcggtttatgctttga

SEQ ID NO: 11208 - DNA, 1503 bp, Escherichia coli
gtgccgacttgtgcaacaccggtttatctggaaacggcacgtaacccgtatggctttatcggtggcattgatgcgcactgttttgaagaaagttacctgcgtgagctgatcgcggaagtcgcaccgcagcgggcaaaagaggctcgtcctttccgcctcgctgtgattcagttaggcacctacgacggtacgatttataacgcccgccaagtggtggataaaattggtcatctgtgtgactacatcctgtttgactcagcatgggtcggctatgaacagtttattccgatgatggcggactgttcgccgctgttgctggatcttaatgagaacgatccgggtattctggttacgcaatctgtgcataaacaacaggctggtttttctcagacttcacaaattcataaaaaagacagccacatcaaagggcaacagcgttatgtaccgcacaaacgcatgaacaacgcctttatgatgcacgcctccaccagcccgttctatccgctgtttgccgcactggatatcaacgccaaaatgcatgaaggtgtcagcggtcgtaatatgtggatggattgtgtggtaaatggcattaatgcccgcaaactgatcctcgataactgtcagcatattcgtccgttcgtacctgaactggtggatggtaaaccctggcagtcgtatgaaacagcgcaaattgcggttgatctgcgcttcttccagtttgtaccaggggaacactggcattcttttgaaggctatgcagagaatcaatactttgtcgatccatgcaaactgttgctgacaaccccaggtattgatgcacgtaacggcgaatatgaagcgttcggtgtacccgcgacgattcttgctaacttcctgcgcgaaaatggcgtagtgccggaaaaatgcgatcttaactccatcctcttcctgctgactccggcagaagatatggccaaacttcagcaacttgttgccctgctggtacgcttcgaaaaactgcttgagtccgacgcgccattagcagaagtgctaccttccatctacaaacagcatgaagagcgctacgccggttataccctgcgtcagttgtgtcaggaaatgcatgatttgtatgcccgccacaacgtgaaacaactgcaaaaagagatgttccgtaaggagcacttcccacgcgtcagcatgaatccgcaagaagccaactacgcctatttacgcggtgaagtggaactggttcgtctgccgaatgcagaaggccgtatcgctgccgaaggtgcgcttccttatcctccgggtgtgctgtgtgttgttccgggtgaaatctggggtggtgctgttctgcgttacttcagcgctctggaagaagggatcaacctgctgccaggttttgcaccggagctgcagggtgtctatatcgaagaacatgatggtcgtaagcaagtttggtgctatgtcatcaagcctcgtgatgcgcaaagcaccctgttgaaaggggaaaaattatga

SEQ ID NO: 11209 - DNA, 510 bp, Escherichia coli
atgtcaaaattaaaaattgcggttagtgattcttgcccggactgttttaccacgcagcgagaatgtatctacattaatgaaagtcgtaatatcgatgtggcggcaatagttttatcgctcaacgatgttacatgcggaaaactcgatgaaatcgatgccacgggttatggcatcccggtatttattgctactgaaaatcaagaacgtgtacccgcagagtatttgccccgtatttcgggtgtctttgagaattgcgaatcgcgacgagaattttatggtcgccagttagaaaccgctgccagccattatgaaactcaactgcgcccacctttcttccgcgcactggtcgattatgtcaatcaaggtaacagcgcgtttgattgccctggtcatcagggcggcgaatttttccgtcgccatccggcggggaatcagtttgtggaatactttggtgaggcgctgttccgtgccgacttgtgcaacaccggtttatctggaaacggcacgtaa

SEQ ID NO: 11210 - DNA, 249 bp, Escherichia coli
atggtacatgaccgcatagcggaggaactcgaggcaaaaggcttttaccggagggcggcggcacgatggggtgaagtcatgcaactggtggagacagacaaggaacggcatcaggttacgatgcgacggctggaatgttccaggaaggcacagaggccaccggagccgccaacggagaactatgcagacctgagaaatgcagtaaatcgcacttacgcagacatggggctgagcaaattagcagagtag

SEQ ID NO: 11211 - DNA, 411 bp, Escherichia coli
atgacagcacagatagccgcttacgggcggctggtggacgacccgcaggtaaaacagaccagcaagggcacaccgatgacgctggcgcgtatggcggtcccccttccgtgcagccaggcagatgacggaacggcgacgatgtggttatccgtcctggcatttggcagacaggccgaagcactggaaaggcaccgcaagggtgaactcctgagcgtggcgggtaacatgcagatcagccagtggactgggcagaacggagaaacgcggcagggttatcaggttattgcagacagcgtaatcagtgcccgtgcggcacgtcctggcgggaacagacgcaaaaccacaggcacacagggtaatcagctaccagcgggaggcgatgacccttacggtgatgatattccgttctga

SEQ ID NO: 11212 - DNA, 252 bp, Escherichia coli
atgacccaaaaacgcagagacagaacagagccaaaatataaagcgttagacatgactgagcacaccttaaaggtggcaatcagaacgatagaccgccacacgcgggaaggatacgcgaaggaacatcccgacctgataagcgcattcatgaccacggcggcggcaaactttgccacgctgacagaacgggagattgccgaagcggaacaggtaacaaccatcaacgttaaaaccggagaggtggaatcatga

SEQ ID NO: 11213 - DNA, 1401 bp, Escherichia coli
atgaaaagcgcaccgaacttaaaaaaacagccttacgacaagatgaccgaagtcattatttttgcgggtagtgatgcctgggcacatgcgaaacagtggcaggaacaggacgggcgactggctggcgataatgtgcctcccgttgtgctggctgatgatcaactggatgaactggcagacctgagaatcatcgacgaggggcgctattgtgtccggctgtacaaggcaggccacatcaggccatcaaatattaatgccattgcgcacaagctggcggcggcgggtgtaactgatgcgaattattaccccgaagggatgcacagccatatgcgggagaactggcgcgaatacctggaacgggtgcgcgggaaagagccggtggaagaaaaaaaccaccagcgaaaaaccacgctaccgatgagcgttggatctaccggatacgacacgcaactggattacgtggttaaggggattattccggcggtatcgctatgcagcatatacggggctagcgggtcctataaatcattccttgccggatcgtgggcgtgccatgttgccactggtcgccagtggggaggccgcagggttgcacatggtgcggttctctatgtggttggtgaaggcggtataggtgttccgcgtcgtgtaaaagcctgggaggttgtgcacgatgagcaggtgaaaaatctgtatctggtaaaccgccccatctttccggctgccccgcttgatgttgatgaaatggttatcgctgcccgtcaggtggagcgggaaacgggtaaacctgtacgcatgattattctggatacgctggcgcgttgctttggtgggaatgatgaaaatgattcccgtgatatgggggcgtttatccgtggttgtgacgaactgaaacgacgcacaggggccacggtgctggtggttcaccattccggcaaggatgagacgaaaggcgcgcgcggttccagtgcatttcgtgcttcgctggatgctgaataccggatacgcagggaggacgcaggaagcgaagcgctggttatctcatgcaccaaaatgaaggacgcggaggaactcaaagaagccgcatatgacttacgcgtggtggagctttttaccgacgctgacggtgaattaatcacgtcgctggtggtggtggatgatccgcgccctcctgttgaactggagcgcatcgaggaggcagggaacaagacggaaaaccataccgcgctatgggggtgcatccgttcacgcacacagaacggcgacaagtgcacgatcccgctgttacgtgatgacatgaaaaagctggggtatgaaatgaaaaacttccggcgctggctgtacaagctggaaaaagatggggttattcgtatcgatggggatgatgtagcgccgctataa

SEQ ID NO: 11214 - DNA, 549 bp, Escherichia coli
atggatatcatcttttatcacccaacgttcgatacccaatggtggattgaggcactgcgcaaagctattcctcaggcaagagtcagagcatggaaaagcggagataatgactctgctgattatgctttagtctggcatcctcctgttgaaatgctggcagggcgcgatcttaaagcggtgttcgcactcggggccggtgttgattctattttgagcaagctacaggcacaccctgaaatgctgaacccttctgttccactttttcgcctggaagataccggtatgggcgagcaaatgcaggaatatgctgtcagtcaggtgctgcattggtttcgacgttttgacgattatcgcatccagcaaaatagttcgcattggcaaccgctgcctgaatatcatcgggaagattttaccatcggcattttgggcgcaggcgtactgggcagtaaagttgctcagagtctgcaaacctggcgctttccgctgcgttgctggagtcgaacccgtaaatcgtggcctggcgtgcaaagctttgccggacgggaataa

SEQ ID NO: 11215 - DNA, 987 bp, Escherichia coli
atgattcctgattatttaacttttattcgctttcaggataaacgaaatctgatatacatttatgctattggacttattctgataggcttttattggaagaatgcagggtttacttttccatcagaggatattggtgtagttagtgggattctggctctggtgctgtataattttatttttgatctcaaggcgtactgggcttataaatgcgtcacgaagaatatcgatttttcgtggtttaagaaaaagcagaaccacaaaatagaattatttcttacacaacctctggtggcaggatttctgtcgttaatcatgttgagtgcaatgagttgggggctataccagcttctaccctcgttatatgcgctgttcctgatttcgttacttgggccgttggtcatctttctgctgtttcggatgaaccgcaccagttatgtcaagcaggtcgctatttcagtagcgaaaaaagtaaaatataaaagtctgactcgctatgtgctgctttcggtgtgcatctcaacggttgttaacctgcttactatcagcccgttgcgtaacagtgattcttttgtgacagaggggcagtggttaacgtttaaatcgataattgcattgctcattctttgtggcgtagtgttggcgattaatctgttttttctgcgcttctccaagcggtacgcttttctgggcaggctttttttgcaggaaatcgatctgtttttctccagtgaaaatgcgttgtcgaccttttttgccaagccgctttggcttcggttattcatattgctggttattgaagtgatgtggattacgctggtgtcggtattggcaacgcttgtagaatggcggatttggtttgaagcctattttttactctgctatgtaccgtgcttaatttactattttttctattgtcgattcctctggcataacgattttatgatggcatgtgacatgtatttccgttgggggcattttaataagtga

SEQ ID NO: 11216 - DNA, 324 bp, Escherichia coli
atggaagacggcgttcaggcaatgcgcgattatcttgccggactggatatcgcttcgccagagcatcaggttctgatgaacgtaacagcaaaaagcgaggtcgctccgtcaattatcaaagaaaatctctcattacacttaactcatacggtgaaatggactgaatctctcgatacatttctgaatatgccaaccccggtagctttccttgaaataagtaataagccctatttggggaatatgttaaatgattttgctggcgtggatcagcaacgagttatgcattgtcgtaaagcatttagtgatgcaaaggtattcaaatga

SEQ ID NO: 11217 - DNA, 432 bp, Escherichia coli; identical to SEQ ID NO: 10632

SEQ ID NO: 11218 - DNA, 477 bp, Escherichia coli
atgcgaaatataattagatctattaatgctctgcttgcagcattgaacattaccattttggcgatcatcgtggcatgtgtgacgtggcaggtggctgcacgatttatatttactagtcccagtatttttacagatgaactcagccgtttgctctttatttgtcttggactttttggtggggcatacaccgcagggcaaaaccggcatctggcgattgacctgctacctatgatgctgaaaggaaaagcccgacgtcatttatttttgtgtattcagattatcgttattatcttcgcaaccatcattatggtatatggtggtgggctattaacgatggatacattcgattcaggtcagacctcgcccgctttaggctggcaaatgggatatatctatatgagcatcccgattagtggtgtacttattattatatacaccatagatatggttttaaccgaacttaaacaaccactctaa

SEQ ID NO: 11219 - DNA, 1302 bp, Escherichia coli
atggattactggttaccgattattgtgttatttggtgccttcttttttatgttggcattaggtgtacctattgtttatgccattggtttatcgacactggcatcaatttccacacaactcgatttcaactcagcattgagtgtggtttcccaaaagttagcctccgggttagatagttttacgttgttggcaatcccattttttatcttgtctggcaacattatgaaccatggaggaatagcgcgacgattaatcaactttgcccgtattctcggcggtcgtctgccaggctcacttgcccactgtaatattctcgccaatatgctgttcggggcaatttctggttcagccgtggcttcggcggctgcgatgggcggcgtcatgcatccgcaacaggttaaagagggttacgacccggcattcagtactgcggttaacgttgcctctgccccgacgggtttgcttattccaccaagtaatacgttaatcgtctattcactggtcagtggtggtacttctattgccgcactgttcctggcgggttatgttccgggaattttgctgggtctggcactgatggtaatagccggtattatcgcggtacgtcgcggttatccaaagccagaacgcccgactttacgccaggctggcgttgcgatatggatggctatccccagtattttcctgattattttaattatggggggtgtattaagtggtatttttaccccgacagaggcctccgcaattgcagtaatttatacccttttccttgcactggttctttatcgtgaaatctcagttaaagatttacctaaaatatttctggaatccgttattaccactgcaattgtcttgttattaattggttcttcgatgggtatgtcatgggcaatgtcaaacgctgacgttcccttcctgattctcgatttgcttaacactatttctgacaacccaataataatcctgcttattatcaatattatcctgttgattatcggcacttttatggatatgacaccggcggtactgatttttacgccgatatttttaccggttgtcaccgaactgggcatggacccgattcactttggtattgtcatggtactgaacatgtgtatcggtatttgtactccgcctgtaggcagtgtgttatttgtcggttgtagtgtatctaaattaccgattaataaaattatcaaacctatgctgccattctatgccgtgatggtattggtgctggcaatggtgacctatattccgcaaatcagtatggcattgccaagagcactgggctactga

SEQ ID NO: 11220 - DNA, 972 bp, Escherichia coli
atgaaaataaaagtatccgctggcattatcggtgctgttcttatgttatccgcaagccagtcctgggcagtgacattaaaactgagtcataatcaggataagtctcatcctgttcataaagcgatggagttctttgcgaaaaagagcaaagagtactctaacggtgatattactattcgtatttatccaaatggaacattgggtactcaacgagaaacaatggagctgattcgttctggcgctattcccctggtaaaaaccaatgcggcagaaatggaagcatttgaaaattcctataaattatttagcctgccttatttgttccgcgatcgtgatcattattatcaggtcatgcagggcgatatcgggagaaaaatcctcgactcaacgaaaagcaaaggttatttcgggctgactttttatgatggaggcgcccgcagtttctatggcaataaaccagtactgaaaccagacgatctgaaaggcatgaaagtccgtgtccagccaagccctggcgcagttgaaatgatcaaagtcatgggcggtaacccgacgccactggattacggcgagttgtatacagccttacagcagggtgtggtcgatatggcagaaaacagcgtgatggcgctgactaccatgcgtcacggtgaagtggcaaaatccttcagccttgacgaacacactatggttcccgatgtggttctgatgagcaatgctgcgtttgataaacttagccaggaaaatcaggcagttatattaaaagcagctaaagaatcaatgaactacatgaaagacttgtggagcgaggaagagaaacaagaatttgcaaaactggataaaatgggcgtgaaagtctaccaggtagataaagctccgtttatcgagaaagtacagccaatgtacgcaaacttcgctaaggacaacccagcccttgccccaatgctggctgatattcaggcagctaagtaa

SEQ ID NO: 11221 - DNA, 795 bp, Escherichia coli
atgaaagggaaatctgcattaactcttctgctcgctggtatattttcgtgcggcacatgccaggcgacaggggcagaagtgacgagtgaatctgtatttaacattcttaattccacgggggcagcaacagataaaagttatttatcgttaaatccagataagtatcctaattatcgtcttctgattcactcagccaaattacaaaatgaaataaagagccactataccaaagacgaaattcaaggattgctaacattaacagaaaacacacgaaagttaacgttgacggagaaaccctggggaacgtttattcttgcttctactttcgaagatgacaaaacagcggcagaaacccactatgatgctgtctggttgagggatagtttatggggctatatggcattagtatcagatcagggaaatagtgtagccgcaaaaaaggttctgctcaccctgtgggattatatgtctacgcccgaccagattaagcggatgcaggacgtcattagcaacccaaaacgactggatggaattcccgtgcaaatgaatgctgtgcatatccgatttgacagcaactcccccgtgatggcagatgtgcaggaagaaggcaagccgcagctgtggaaccataaacaaaatgatgctttaggtctttaccttgatctccttatacaagcaatcaacactggtactattaacgctgaagattggcaaaaaggtgaccgattaaagtcggttgcgctgctgattgcttatctggataaagccaatttctatgttatggaagattcctga

SEQ ID NO: 11222 - DNA, 1779 bp, Escherichia coli
atggagcttgctactacgcagtcagtattgatgcaaattcaaccgacaattcagcgttttgccagaatgcttgccagcgttttgcagcttgaggttgagatcgttgatgaaaacttgtgtcgcgttgccggaacgggcgcgtatgggaagtttcttggtcgccagttgagcggcaactcacgcctgctccgccacgtcctggaaacgaaaactgaaaaagttgtgacacagtctcgcttcgatcccctttgcgaaggttgcgatagtaaagaaaattgccgcgaaaaagcatttctgggtacgcctgtcattttacaggatcgttgtgttggggtgataagtttgattgccgttacccacgagcaacaagagcatatcagtgataatttacgcgaattttctgattatgttcgccatatatccaccatttttgtttcgaaacttctggaggatcaggggccaggagataacatcagtaaaatatttgcgaccatgatcgataatatggatcagggcgtattagttgtagatgatgaaaatcgggttcagtttgttaatcagactgccttaaaaacacttggtgttgtgcaaaataatattattgggaaacctatccgtttcagaccattaacatttgagagtaattttacccatggacatatgcagcatattgtttcatgggacgataaaagtgaattaatcattggtcaattgcataacattcagggccgacaattatttttaatggcgtttcaccaatcgcataccagtttttctgtagcaaatgcacctgatgaaccgcatattgaacaattggttggcgagtgccgtgttatgcggcaattaaaacgactcattagccgtattgcacccagcccatccagcgttatggtggttggtgaaagcggcacgggtaaagaagtcgtcgcccgtgcaatccataagttgagcggaagacggaataaaccctttattgctatcaactgtgccgcgattccggagcagcttctggagagcgaactgttcggttatgttaaaggtgcatttactggcgcttctgccaacggtaaaacagggttgattcaggcggcgaatacgggcacgctgtttctcgatgaaataggtgatatgccattaatgttgcaggctaaattactgcgcgctattgaggcacgtgaaattctgccgattggtgccagtagcccaatacaagtcgacattcgcatcatttctgcaactaatcagaatttggcccagttcattgccgaaggtaaattccgcgaagatctcttctaccgacttaatgttatcccgataactctgccaccgctgcgtgaacgtcaggaagatattgaactattggtgcattactttttacatctgcatacccgtcgtctgggatcggtttatcctggcattgctcccgatgtcgtcgaaatattgcgtaagcatcgttggcccggaaacctgcgcgagttaagcaatttgatggaatatctggttaacgtggttccttcaggtgaagttatcgacagcacgctattgccgccaaatctgctgaataatggcacaacggagcaaagtgatgtaacagaggtcagtgaggcgcacctgtcactcgatgatgcgggcggcacggcgctggaggagatggaaaagcaaatgatccgcgaggcgctttcacgtcataacagcaagaagcaagttgctgatgaactgggcatcggcattgctacgctctatcgcaagattaagaaatatgagttgttaaacacataa

SEQ ID NO: 11223 - DNA, 744 bp, Escherichia coli
atggctatagcacttgtgactggtggcagtcgcggcatcgggcgggcaactgcattactgttggcgcaagaagggtatacggtggcggttaattatcagcaaaacctccacgcggcgcaggaagtgatgaacttaataacgcaagccggtggcaaagcattcgtgctccaggcggatatcagcgacgaaaaccaggtcgttgcgatgtttacagcaatcgatcagcacgatgaaccgctagcagcgctggtcaataacgccgggatcttgtttacccagtgcaccgttgaaaaccttaccgcagagcgaatcaaccgagtactttccaccaacgtgacgggatattttctctgctgccgcgaggcggtaaaacgcatggcgcttaaaaatggtggcagtggcggcgctatcgtcaatgtctcttcggtggcctcacggttgggttcgccaggggaatatgttgattacgcggcatcgaaaggggcgattgatacgttaaccaccggactatcgctggaagtcgccgcgcaggggatccgcgttaactgcgtgcggccagggtttatttataccgaaatgcacgccagcggcggcgagcctggacgcgtcgatcgcgttaagtcgaacatccccatgcagcgtggtggacaggcagaagaggtcgcgcaggccattgtctggctactaagtgataaagcctcttacgtcacgggaagttttatcgatttggcgggcgggaaataa

SEQ ID NO: 11224 - DNA, 1284 bp, Escherichia coli
gtggcgggcgacgtcggcaaagcgggcgtcgctatcgacaccgtggaagatatgaaagtcctgttcgaccagatcccgctggataaaatgtcggtttcgatgaccatgaatggcgcagtgctaccagtactggcgttttatatcgtcgccgcagaagagcaaggtgttacacctgataaactgaccggcaccattcaaaacgatattctcaaagagtacctctgccgcaacacctatatttacccaccaaaaccgtcaatgcgcattatcgccgacatcatcgcctggtgttccggcaacatgccgcgatttaataccatcagtatcagcggttaccacatgggtgaagcgggtgccaactgcgtgcagcaggtagcatttacgctcgctgatgggattgagtacatcaaagcagcaatctctgccggactgaaaattgatgacttcgctcctcgcctgtcgttcttcttcggcatcggcatggatctgtttatgaacgtcgccatgttgcgtgcggcacgttatttatggagcgaagcggtcagtggatttggcgcacaggacccgaaatcactggcgctgcgtacccactgccagacctcaggctggagcctgactgaacaggatccgtataacaacgttatccgcaccaccattgaagcgctggctgcgacgctgggcggtactcagtcactgcataccaacgcctttgacgaagcgcttggtttgcctaccgatttctcagcccgcattgcccgcaacacccagatcatcatccaggaagaatcagaactctgccgcaccgtcgatccactggccggatcctattacattgagtcgctgaccgatcaaatcgtcaaacaagccagagctattatccaacagatcgacgaagccggtggcatggcgaaagcgatcgaagcaggtctgccaaaacgaatgatcgaagaggcctcagcgcgcgaacagtcgctgatcgaccagggcaagcgtgtcatcgttggtgtcaacaagtacaaactggatcacgaagacgaaaccgatgtacttgagatcgacaacgtgatggtgcgtaacgagcaaattgcttcgctggaacgcattcgcgccacccgtgatgatgccgccgtaaccgccgcgttgaacgccctgactcacgccgcacagcataacgaaaacctgctggctgccgctgttaatgccgctcgcgttcgcgccaccctgggtgaaatttccgatgcgctggaagttatctggtgccaagccagtgtgttaccggcgtga

SEQ ID NO: 11225 - DNA, 264 bp, Escherichia coli
gtgtatgttctgaacaactattgttttttaagcggtaaagaaatgagacggattgatgttattcacaaggagctggagcggctgacgtatgggctggaactgtctgatttagcgaaggagaaagcatttactgctgaggcgattggttttaaccttgggctggcacgcaactcggttagtaaagatcttaatcaattatggaatgaaggcctggtggtaaaagtcagggacgtcctgttttttttctacatcgtcacgcactag

SEQ ID NO: 11226 - DNA, 732 bp, Escherichia coli
atgaaaaaatggaaagtacgtagcgcgttgatagcattagccgtgctgctggccggttgttccagtaatgcgcagtataatagcagtacatcgggcaatgtcggcaccgcctggggtggggatgtgcactcatcggttcagggcgtatctgctgagcgagcctggcgcgatccggcagagatgatcgttattagttattcgactactgttccttcgggctacgaccgcgtttatagcattcgtattaacgaactggaatatgctattcgcgatggtaattttaattctctacctattacgcgggtttatgattcatccaataatgaaccacgctatattgtccatgccagagtaggaatgaattatcaattatatgtccgcaattacagtcgtaataccaactacgagatcgttgctacggttgatggcctggatgtgctgaacggcaagcaaggttcgctgaataacaacggctatattgtgaatgccggagattcgttagcgattaaaggattccgcaaagataaacataccgaagcggcttttcagttcgccaacgttgctgattcctacgcagccaattcggcgcaaggcgatgtgcgtaataccggtgtaatcggctttgccgcctttgaattacaaggcccggcgcaaaacgcgctgccgccgtgctctggacaagcctttccggcggacaacaatggctatgcgccgccaccgtgtcggaaatag

SEQ ID NO: 11227 - DNA, 1338 bp, Escherichia coli
atgggaagccaggaactccaacgcaagctcggattttgggccgttcttgcaatcgccgtcgggacaaccgtcggctccggtatttttgtatctgtgggtgaagtggcaaaagcagcgggcacgccgtggcttacggtgctcgcgtttgtcattggcgggttaattgtgatcccgcaaatgtgcgtctatgcggaactatccaccgcttatccggaaaatggcgcagattatgtttatctgaaaaatgccggaagccgaccgctggctttcctctccggctgggccagcttctgggccaacgatgcgccgtcattgtcgattatggcgctggcgattgtcagcaatcttggctttttaacgcctatcgatccgttgctcggtaaatttatcgccgccggattaattatcgcctttatgttgctacacctgcgctccgttgaaggcggcgcagcgtttcagacgctaattaccatcgccaaaattatcccgttcactatcgtcattggccttgggatcttctggtttaaagcggagaattttgccgcccctaccaccactgcgattggcgcaacgggcagctttatggcgctgctggcggggatctctgccaccagttggtcgtataccggcatggcctctatctgttatatgaccggcgaaattaaaaaccccggaaaaaccatgccacgagcgctgattggttcctgtctgctggttctggtgctctacaccctgctggcgctggtgatttccggcctgatgcccttcgacaaactcgccaattctgaaacgccgatttccgacgccctgacctggatccccgcactcggcagcaccgctgggatctttgttgccatcacggcgatgatcgtcattcttggttcgctttccagctgcgtgatgtaccagccgcggctggaatacgcgatggcgaaagacaacctgttctttaaatgcttcggccatgtgcatccgaaatacaacacgccggatgtctccatcatcctgcaaggggcgctggggatcttcttcatcttcgtttccgatctcaccagcctgctgggttatttcaccctggtgatgtgtttcaaaaataccctcaccttcggctccatcatctggtgtcgtaaacgcgacgattacaaaccgctgtggcgtactccggctttcgggctgatgaccaccctcgccattgcgtcaagcctcattctggtcgcctcaacctttgtctgggcaccgattcccggccttatctgcgccgtcatcgttattgctactggtctgcctgcttacgccttctgggcgaagcgtagccgccagctcaacgctttgtcgtaa

SEQ ID NO: 11228 - DNA, 1023 bp, Escherichia coli
atgttggatattgataaaagcaccgtggactttctggtcaccgaaaatatggttcaggaagtggaaaaagttctcagccatgacgttccgctggtgcacgccatcgtggaagagatggtgaagcgcgacattgatcgtatttatttcgttgcctgcggatcgccactcaacgcggcgcaaacggcgaaacatctggcggatcgcttttccgatcttcaggtctacgccatttccggctgggagttctgcgataacaccccgtatcgcctcgacgatcgttgcgcagtaattggcgtttctgactacggtaaaaccgaagaggtaatcaaagcgctggagctgggccgggcctgcggcgcactcactgcggcgttcaccaaacgcgcggatagcccgattacctcggcggcggaatttagcattgattatcaggccgactgtatctgggaaattcacctgctgctctgctacagcgtggtgctggagatgatcacccgcctcgcgccgaacgcggaaatcggcaagatcaaaaacgatctcaagcagttgccgaatgcgctcggtcatctggtacgcacctgggaagaaaaaggccgccagcttggtgaactggccagccagtggccgatgatttataccgttgctgcgggtccgctgcgtccgctgggttacaaagaaggcattgtaacgctgatggaatttacctggacgcacggctgcgtgattgagagcggagagttccgccatggcccgctggagattgtcgaaccgggcgttccgttcctgttcctgctcggcaatgatgaaagtcgccacaccaccgaacgcgccattaactttgttaaacagcgtactgacaacgtgatcgtcatcgattacgccgaaatttcgcaagggctgcacccgtggctggcaccgttcctgatgttcgtgccaatggagtggctctgctactacctgtctatttacaaagatcacaacccggatgaacgccgctattacggtggtctggtggaatattaa

SEQ ID NO: 11229 - DNA, 831 bp, Escherichia coli
atgaaaacaggtatgtttacctgcggccaccagcggctgcctattgaacacgcatttcgtgatgcaagcgagctgggttacgacggcatcgaaatttggggcggtcgcccgcacgcgttcgcgccggacttaaaagcgggcggcatcaaacaaatcaaggcgctggcgcagacgtatcagatgccgattatcggctatacgccagaaaccaacggctatccgtataacatgatgctgggcgatgaacatatgcgtcgcgaaagcctcgacatgatcaagctggcgatggatatggcaaaagagatgaacgcgggttatacgctgatttccgcggcccacgcgggctatctcacgccacctaatgttatctggggacggctggcagagaacctaagcgaactgtgtgagtacgcggaaaacatcggcatggatctaatcctcgaaccgttaacgccgtatgaatcgaacgtcgtgtgtaatgctaatgatgtgcttcatgcgctggcgctggtgccttcgccgcgcctgttcagcatggtcgacatttgcgcgccgtatgtccaggcggaaccggtgatgagttatttcgacaaactgggcgataaattacgtcatctgcatattgtcgacagcgacggggccagcgacacgcattacattcctggagaaggcaaaatgccgctgcgggaactgatgcgcgatattattgagcggggctatgagggttactgtacggtggagctggtgacgatgtatatgaacgagcccagactctatgcccgccaggcgctggaacgctttcgcgcgctgctgccggaggatgagagatga

SEQ ID NO: 11230 - DNA, 786 bp, Escherichia coli
atgaaaaccctggcgacaatcggcgataactgcgtcgatatctacccgcaactgaataaagcgttttctggcggtaatgcggtcaatgtggcggtgtactgcactcgctacggcatacagccgggatgcattacctgggtgggtgacgatgactacggcacaaagctgaagcaggatctcgcccgcatgggcgtcgatatcagccatgtccatacgaaacacggcgttaccgcacaaactcaggtggaactgcacgacaatgatcgcgtttttggcgactacaccgaaggcgtgatggccgactttgccctgagtgaagaggattacgcctggctggcgcagtatgacattgtgcacgcggcaatctggggacatgcggaagacgcattcccacagctgcacgctgcgggcaaacttaccgctttcgacttctccgacaagtgggacagcccgctctggcagacactggtgccgcatctcgattttgcctttgcctccgcaccgcaagaagacgaaacgctgcgtctgaagatgaaagcgattgttgcccgtggcgcaggaacagtgattgtcacgctgggtgaaaacggcagcattgcctgggatggcgcgcagttctggcgtcaggctcctgaaccggtgacggttatcgacaccatgggtgccggagattcgttcattgccggattcctttgcggctggtctgcggggatgacattaccgcaggcgatagcgcagggaacggcgtgcgcggcgaaaaccattcagtaccacggtgcctggtag

SEQ ID NO: 11231 - DNA, 732 bp, Escherichia coli
atgtcagctacggaccgctactctcatcaactcctctacgctaccgtccgccagcgactgctggatgatatcgcgcagggggtttaccaggccgggcaacagatccctaccgaaaacgagctttgtacacaatataacgtcagccgcattaccattcgcaaagccatcagcgacttagtggcagacggcgtactgatccgctggcagggaaaaggcacctttgtacaaagccagaaagttgaaaacgccctgcttactgtcagtggttttaccgattttggcgtctcacaaggcaaggcgacgaaagagaaagtgatcgaacaggaacgggtcagcgccgcgccgttttgcgaaaagctgaacatccccggaaacagcgaagtgttccatctctgccgggtgatgtatctcgataaagagccgctgtttattgatagttcatggatcccgctgtcgcgttatcctgactttgatgagatttacgtcgaaggaagctccacctatcagttatttcaggagcgttttgacacgcgagtggtcagcgacaaaaagaccatcgatatctttgccgccacccgcccgcaggcaaaatggctgaaatgcgaactgggcgaaccgttgtttcgcatcagcaaaatcgcctttgatcagaatgacaaaccggtgcacgtctccgaactcttctgccgcgccaatcgcatcaccttaactattgataataaaagacattaa

SEQ ID NO: 11232 - DNA, 1086 bp, Escherichia coli
atgaagacgtttcctctgcaaagcctgacgattattgaggcgcagcaaaagcagtttgcgctggtggatagcatttgtcgccatttccccggcagcgagtttcttactggcggtgatttaggcttaacgccaggactgaatcaaccgcgcgttacccagcgtgtggaacaggtgctggctgatgcatttcacgcacaggctgcggcgctggtgcagggcgcggggactggcgcgattcgcgccgggctggcggctttgctcaaaccggggcagcgtcttctggtgcatgacgcgcctgtttacccgacgacacgggttattattgagcagatggggctgacgcttattactgttgatttcaatgacctgtcggcactgaagcaggtcgtcgacgagcaacaaccggatgcggcgctggtgcagcatacgcgccagcagccgcaggacagctacgtgctggcagatgtgctggcaacgttgcgcgcggcaggtgttccagcgttaaccgatgacaactatgcggtgatgaaggtggctcgaatcggctgtgaatgcggcgcgaatgtctcgacattttcctgcttcaagctatttgggccagagggtgttggtgcagtggtcggcgatgctgatgttatcaaccgtattcgcgccacgctttactccggcggtagccagatccagggcgcacaggcgctggaagtattgcgtggtctggtgtttgcgccagtgatgcacgcggtgcaggcaggggtatctgaacggttgctggctttgcttaacggtggtgcggtgccggaagtgaaaagcgcggtgattgctaatgcgcagtcgaaggtgttgattgtcgagtttcatcagccgattgccgccagagtgctggaagaggcgcaaaagcgcggtgccttgccttacccggtgggtgcagagtcgaaatatgaaatcccgccgctcttttatcgcctttccggaacgtttcgccaggcgaatccacaatcagaacattgtgcgattcgcattaacccgaatcgcagcggtgaagagacggtgctgcggattttgcgtgagagtattgccagtatttaa

SEQ ID NO: 11233 - DNA, 1305 bp, Escherichia coli
atggatctgtatattcagattatcgtggtggcgtgcctgacgggtatgacatcgcttctggcgcatcgctcggcggctgtttttcatgacggcatccgcccgatcctgccgcaactgattgaaggctatatgaaccgtcgcgaggcggggagtatcgcttttggtctgagcattggttttgtggcctcggtggggatctcttttaccctgaaaaccgggctgctcaacgcatggttactctttcttcctaccgatatcctcggcgtcctggcgataaacagcctgatggcgtttggtcttggcgctatctggggcgtgttgatccttacttgcctgttgccagtaaaccagctgctgaccgcgctgccggtggatgtattaggtagcctgggggaattaagctcgccggtggtttcagcttttgcactgttcccgctggtggcgattttctaccagtttggctggaagcaaagtctgatcgccgccgtggtggtactgatgacccgtgtggtagtcgtgcgctatttcccacatcttaaccctgaatccatcgaaatctttattggcatggtgatgctgctggggatcgcgataactcacgacctgcgtcatcgtgatgaaaatgacattgatgccagcgggctttcggtgtttgaagaacgcacgtcacggattatcaaaaacttaccctatatcgccatcgtgggagcattgattgccgccgttgccagcatgaagatttttgctggcagtgaagtgtcgatcttcacactggagaaagcatattccgcaggcgtaacgccggaacaatcgcaaacgctgattaatcaggcggctctggcagaatttatgcgcggactggggtttgtgccgttgattgccaccaccgcgttagcaacgggtgtgtatgcagttgcgggctttacctttgtttatgcggtgggctatctctcgccgaatccgatggttgcagcggtattaggcgcagtggttatttcggcggaagtcttgctgcttcgttcgatcggcaaatggctgggacgctacccgtcggtgcgtaatgcgtcggataacatccgtaacgccatgaatatgctgatggaagtggcgctgctggtcggttcgattttcgcagcaattaagatggcgggttataccggattctctatcgcggttgccatttacttcctcaacgaatccctgggccgtccggtacagaaaatggcggcaccggtcgtggcagtaatgatcaccggtattctgctgaatgttctttactggcttggcctgttcgttccggcttaa

SEQ ID NO: 11234 - DNA, 1227 bp, Escherichia coli
atggcgcgatttgtggtgttagtgattgatagctttggcgtaggggcaatgaaagatgtcacgctggtgcgtccgcaagatgcgggagcgaatacatgtggtcacatcctgagccagttgccgcatttgcagctaccaacgctggagaagctggggctaatcaacgcattgggttatgcgccaggcgatatgcagccgtcagattccgcaacctggggcgtggcagagctgcaacatgaaggtggcgatacctttatggggcatcaggaaattttaggcacgcgcccgttaccgccgctgcggatgccttttcgcgatgtgattgaccgtgttgagcaggcattagtttccgctggctggcaggtggagcgccgtggcgatgatctgcaatttctgtgggtcaatcaggcggttgcgattggcgataatctcgaggcggatttaggccaggtctataacattaccgccaatctctctgtgatctcttttgacgacgcaatcaaaattggtcgtatcgtgcgtgagcaggtacaggtcggtcgggtcattacatttggtggcctgttaaccgacagtcaacgcattctcgatgccgcagaaagcaaagaagggcgctttattggtatcaatgcgccgcgttctggcgcttatgacaacggtttccaggtcgtgcatatgggctatggcgtcgatgaaaaagtgcaggtgccacaaaaactgtatgaagcaggcgtgccaaccgtgctggtgggtaaggtggcagatatcgtcaacaatccttatggcgtgagctggcaaaatctggtggatagccagcggattatggatatcaccctcaacgaatttaacacccatccgacggcgtttatttgcaccaacattcaggaaaccgacctcgctggtcatgcagaagacgtcgcacgttatgccgaacgtttgcaggtcgttgaccgtaaccttgcccggcttgttgaggcgatgcagccagatgattgcctggtcgtgatggcggatcacggcaacgatccgaccattggtcacagccaccatacccgcgaagtggtgccagtgctggtttatcagcaagggatgatcgctacgcagctcggtgtgcgcaccactctttctgatgtgggggctaccgtgtgtgaatttttccgcgcgccaccgccacaaaatggtcgctcttttctttcctccctccggtttgcaggagacaccctatga

SEQ ID NO: 11235 - DNA, 282 bp, Escherichia coli
atgcaaaacagaaaatggattttgacctcgctggtaatgacttttttcggcatccccatactggcgcaatttttggcggtggttattgccatgctgggtgtcggacttgccggtattattgaagtttgtaatatccttatcacgccaacaatttaccttctgctcaaaatttttatgctggcgctgggcgcattaatgctatttttctcggggcgagtggggaacgtgcctgagttttgttacgttgggtatgatggcgtgggctttgcggtaattccctga

SEQ ID NO: 11236 - DNA, 1092 bp, Escherichia coli
atgaaaagagcgcctcttataacaggtcttttgttgatatccacatcctgcgcttatgcctcctcaggagggtgtggagccgacagcactagcggtgcgacaaattacagcagtgtggttgatgatgttacggtgaaccagacagataacgtgacaggacgggagtttacctctgcaacgctaagtagcactaactggcaatacgcctgttcctgctctgcgggtaaggcagttaaacttgtctatatggtcagccccgtacttaccaccactggacatcagacaggatattacaaactcaatgacagcctggatattaaaaccacattacaggcaaacgacattccaggactcacaaccgaccaggttgtctctgttaacacccgattcacacagataaaaaacaacacggtatattctgctgcaacccaaacgggtgtttgccagggtgatacgtctcgttatggacccgttaatattggtgcgaacaccacctttaccctgtatgtcaccaagccatttctcggctcgatgaccattccgaaaacggatattgccgtcattaaaggcgcgtgggtcgatggaatgggaagcccgtctacaggtgacttccatgatttagtcaagttatcgattcagggaaatctcaccgccccacagtcgtgcaaaattaatcagggcgatgttattaaggttaattttggattcatcaatggtcagaagtttaccacccgcaatgccatgccagacggttttactccagtagactttgatatcacttatgactgtggtgatacttcaaagattaaaaactcgttgcaaatgcgcatcgacggtacaactggggtagtagaccagtacaacctggtcgccaggcgaagaagttcagacaatgtgcccgatgtcggtattcgtattgaaaatctcggcggcggagttgcaaatattccttttcagaacggtatccttcccgttgatccttccgggcatggcaccgtcaatatgcgcgcctggccagttaatctggtcggtggtgagctggaaacaggaaaatttcagggcacagccaccattaccgtcatcgtgcggtaa

SEQ ID NO: 11237 - DNA, 696 bp, Escherichia coli
atggcaacagattcaactgatacagaattaactatcatcggcgagtatacccctggtgcatgtaccccagttgttacgggcggcggcattgttgactatgggaaacatcataacagtgcgctgaatccgaccggtaaaagtaataaactggttcaactgggccgcaaaaacagcacattaaatataacctgcacagcaccaacgctaattgctgtaacctccaaggataaccgtcagtcgaccattgtagcgttaaacgacacatcctatattgaaaaagcttatgatactctcgtagatatgaagggaacgaaaaacgcctttggtttaggttctgcgcctaatggacaaaaaattggcgctgcatccattggtattgacaggtctaatggtgggattcacgcggcggacgatacaggtgaaattcctgtcgacctgattcaaactgaccactggtcagcagcgacccccacatggaaagcctcatctaatggcgcattctgctcgctgacaagttgctcagcaatcgagcgcggttattctgttgcaaaaacaggggaactgacacctgttgccattacagcggtcaccttcccgttactgattgatgctgcggtaaatgacaatactattcttggttctgatgaaacgatcaaactggatggtaacgtcactatcagcgttcagtatttataa

SEQ ID NO: 11238 - DNA, 675 bp, Escherichia coli
atgctcagacacattacattcactgtatttataacaacatcaatgaataccttagccacagggatggttcctgaaacatcagtattgctggttgatgaaaagcgtggtgaagctagtattaatattaagaatacagatgatcatccttcattgctttacaccaccattgttgatttgcctgaaagcaataaatcaattcgtttaatcccgactcagcccgttattcgtgttgaagccggtcaagtacaacaggttcgatttttacttcaggcgactgttcctctgcaatcagaagagctgaaacgcgtaacgttcgaaggtattccaccaaaagatgacaagagcagcagagttactgtttcaattcgtcaggatctacctgtactgatccacccggcttccctgccggaagagcgagagacctggaaattcctggaatggcgtaaaaatggcgaccaaattgagattagcaaccccagtaattatgtcgttcgtatgaccttacaatttaaaacgctcccttcaggaaaaacgggggctataaataagacctattttctaccacacaccagtacaactactgcattaacaaacgctacggatacaaaagtcgagttttacccagccagccgatatggttatcgcggtaataaatatgtcactgacttaaaataa

SEQ ID NO: 11239 - DNA, 1380 bp, Escherichia coli
atgttaaaaaaaacgttactggcctacaccattggttttgccttttctcccccagccaatgcagatggtatagagattgccgctgttgattttgatcgggaaacattaaaatcactaggtgtagatcctaatatatcgcattatttttcccgttcagcccgttttttgccaggtgaatattcactgatagtatcagtaaatggcgaaaaaaaaggcaacattgctacgcgctttgatgaaaatggcgacatttgtcttgatcaggcatttctgcaacaagccggtttaaaaattccttctgaagaaaaaaatggctgttacgactatatattgtcctacccgggtaccacaatcacaccattacctaaccaggaagcgttagatattatcgtttcaccacaggcgatcattcccatagggttggatctcacaaacgcagcaactggtggaacagctgcgctgctaaactactctctgatgagcagccgtgcagaattttctaatgggagttcggactactcccaggctgcacttgaaggcgggattaatattaatgactggatgttacgcagccatcagttccttacacaaacaaatggcacattcagtaaccagaactcgtcaacctaccttcaacgtacctttacagatcttaaaacactcatgcgagcaggtgaagttaacctcaataatagcgtgttggaaggagccagtatttacggtatcgaaatcgcaccggacaacgcattgcaaaccagcggcagtggtgtgcaagttactggtatagccaacacctctcaggctcgtgtcgagattcgtcaacaaggagttttaattcattccattctggttcctgcgggcgcattcactatccctgatgtacctgttcgcaatggtaatagtgatcttaatgtcaccgttgtcgaaacagacggtagttcgcacaactatattgttccctccaccctgtttaatcagcatgtagaaagcttccagggttatcgcttcgcgatagggcgggtagacgatgactatgacgaatcaccttgggtaattagtgcatcgagcggatggaatctgacacgctggagtgcaatgaacggcggcgttatcgtagcagaaaattatcaggcggcatcaatccggtcgagtctggttcccctgcccgatttaacagtgagcagccaaattagtacatcgcaggatacgaaagactcactgcaaggacagaaatatcgtcttgacgcgaactacaatctcccattttcacttgggctaacaaccagcctcactcgatctgatcgccattatcgcgaactgtctgaagcgattgatgatgattataccgatccgactaaaagcactagactggccccctga

SEQ ID NO: 11240 - DNA, 282 bp, Escherichia coli
gtggcattcagcggcgctaaacatgagagagagcatactgatatttactcctcatgccgcctgatagtacggaaaaacggtgctgaaatttataaccgtaccgcgctggataatacgctgatttacagtggtgttattgatatgccagctggtcgcggccacatgacgctggagttttcggtgtcagcatggctggtgaataactggtatcccacagcaagtatcagcgatttgctggttgtggtgatgaagaaagccaccgcaggcatcagtatcagctga

SEQ ID NO: 11241 - DNA, 600 bp, Escherichia coli; identical to SEQ ID NO: 6037

SEQ ID NO: 11242 - DNA, 3027 bp, Escherichia coli
atgacagtaaaaatttctggcgtgcttaaagatggcacaggaaaaccagtacagaactgcaccattgtgctgaaggccagacgaaccagcagcacggtggtggtgaacacggtggcctctgaaaatccggatgaagccggacgttacagcatggatgttgagcatggccagtacagcgtcaccctgctggttgaaggttttccgccttcacatgccgggaccattaccgtctatgaaggttccagaccaggtacgctgaatgattttctcggtgccatgacggaggatgatgtccgaccggaggcactgcgccgctttgagcagatggtggaagaggtgtcacgtaacgcctccgcggttgcacagaatacggcagccgcgaaaaaatcagccagcgatgccagtgcatcagccagcgaggcggcaactcatgcaaccgatgctgcagcctcagcacgtgccgccagcacgtcagccggacaggccgcgtcgtcggctcagtcagcgtcttccagcgcaggaacggcatcgacaaaggcccgtgaagcagcaaaaagtgctgctgctgcagagtcatcaaaaagcgcggcagctaccagcgccagtgccgcgaaaacgtcagaaacgaatgccgcagcatcacaaaaatcggcagccacttctgcatccacagcgaccacgaaggcgtcagaagctgccacctcggcacggggtgcggcggcctcaaaagaggcagcgaaatcttcagaaacgaatgcatcatcaagtgccagtagtgcagcttcctcggcaacggcggcaggaaattccgcgaaggcggcaaaaacgtccgagacgaacgctaagtcttctgaaacagcagcgggacagagcgcctcagctgcggcaggttcaaaaacagcggctgcattatctgccagtgccgcgtcaacaagtgccgggcaggcctcagccagtgccaccgccgccggaaaatcggcagaaagcgccgcatcatccgcttcaacagccacaacgaaggctggcaaagccactgagcaagccactgcagcagcgaggtctgcttctgcagcaaaaacctctgaaacaaatgcaaagacttcagcagacaatgctgcttcctctaaggcggcagccgcatcgtcagccagttcagcggcgtcatcggcatcatctgcgtctgcttcaaaagatgaggcgaccagacaagcgtcagcagcgaaaggtagtgccacgacagcaacaacgaaagcatcagaggcggcaggcagtgcgacggctgcatctcagagcaaagttgctgctgaatccgcggcaacgcgcgccgagacagcagcaaaacgggcagaggatattgcatccgccgtggcgctggaggatgcgagcacgacgaaaaaggggatagtacagctcagcagtgcaacaaacagcaccagtgaaaagctggcggcaacgccaaaggcagttaaaactgttaaagatagttcagttcaaaaaactggcgacacaatgggagggcagttaaaaatcagcacgataaatgctcttcgaatattcaaccaagcctttggccttatttttaggcgttccgaagatcatcttcatcttattccgactaatgaaggggagggggaaaatggagacatcggttcattaagaccattctctataaacttaagatcagggttggtgtccatcggtaatggactaaaagttggtggtagtgttactggtaatttgaccggaaacgcagatactgcgaccaagatcaagacagcacgtaagattgggggcgtggcatttgatggatcggcagatatcaacttgcctggagtcaacgctaccggtaatcaaaacactacaggtaatgctgcgaccgccacgaaacttcaggcagccagaacgattaacggtgtgtcatttgatggtagtgcaaatatcacattgaccccttcaaatattggggcattggcattaactggagggactctttcaggtggtttaactgctgctggtgaggttatttcaaggtcagcaaatggtctgcgtattgcctatggcaactatggattctttatccgaaatgatggatcaaacacatattttatgttgacagattcgggtaacagtcttggtacgcacaatagcttaaggccgtttataattagtaaccatactggcaatgttacaattgcaactaaattaaacgcgagtggtggtatcactggatctttatcgggtaatgcaagcacagcaaccaaattgcaaactgcaaggacaattaacggcgtaaaatttgacggctcggcaaatattgaagcgtttccgccaggtgttccgctgccgtggccatcagatacaccacctgcaggttatgcaatcatgcaggggcagacgtttgataaggcagcatatccgaaactggctattgcctatccttcaggtgttattccagatatgcgcggctggacaatcaagggcaaacccgccagtggccgggccgtattgtctcaggaacaggacggcataaaatcgcacacccacagcgccagcgcatccagtacggatttggggacgaaaaccacatcgtcgtttgattacggcactaaatccacgaataacaccggggcgcatacgcacagtctgagtggctctacggggtctgccggtgttcatactcatggtaatggtattcgttggccaggaggcggcggttctgcgttagcattttatgatggcggtgggttcacttatgtccagaattcacagtatcaagtaagcccggagacttcttcctatagatcgtattatcaacgtattcagacacagtcagcaggtgctcatacccactcgctgtctggtactgcagcaagttctggcgcacatgcacatactgtaggtattggtgcgcatacgcactccgttgcgattggttcacatggacacaccatcaccgttaacgctgcgggtaacgcggaaaacaccgtcaaaaacatcgcatttaactatattgtgaggcttgcataa

SEQ ID NO: 11243 - DNA, 726 bp, Escherichia coli
atgaagagtaaattagtttccataatcataccagcatacaatgctcaggattggattgaaaggtgtttagtatcttgccttaatcagagctatcaaaatatagaaattattgtaataaatgatggaagtacagataatactgctaatattctcgagaagttcaatgtaaataaactgaaaatatttcatgaaaaaaactctggtgtagcaatagcaagacgaaaaggtttggattattctagaggagagtatatcttttttcttgatagtgatgattttataaatgagtctgctttagaaatattggtaaccaagattgataattataatgctgacgtggttatagcgcaagctaaacatcttaaaaagaaaagcacttttacatcatcttttaagattgaaattgatccactatattcatttttgaatggatctttaccaagaactttatggccattattatttaaaagatctgttattgagaaaaatctaataccatctcaatatacagttagtgaagactatgtaataatgtcaaaaatatataccttgccaattaaaatcgttgtcgttaatgattgtctatacaattatgtaaaacacacgggtagcgtaacagcgaatataacgccacagaaatataatgaccactataaagctcaccattatattgaaaaacagttattcgaaacgttatcagataaatataaaataagttttatatga

SEQ ID NO: 11244 - DNA, 1221 bp, Escherichia coli
atgaaggtcggcttcttcttattgaaatttccgctgtcgtcggaaaccttcgttcttaaccaaatcactgcgtttattgatatgggctttgaggtggagattgtcgcgctgcaaaaaggcgacacccagaacacccacgcggcatggacgaaatacaaccttgccgtcagaacccgctggttacaggacgaacctacgggcaaagtggcgaagctgctccaccgcgccagccagaccttacgcggcattcatcgtaaaaatacctggcaggcactcaacctcaaacgctatggtgccgagtcgcggaacctgattttgtctgccatttgcggccaggtcgcaacaccgtttcgcgccgatgtgttcatcgctcattttggcccggcgggggtaaccgcagcaaaactacgcgaactgggtgtcattcgcggcaaaattgccactattttccacggcattgatatttccagtcgggaagtgctcaaccattacactcccgaatatcagcaactgttccgccgtggcgacctgatgctaccgataagcgatctgtgggccggaaggctgcaaaaaatgggctgcccgagggaaaaaatcgccgtatcgcgtatgggcgtggacatgacgcgctttagcccgcgtccggtgaaagcacccgcaacgccgctggaaatcatttccgtcgcacgcttaaccgagaaaaaaggtctgcatgtggcgattgaagcctgccggcagttgaaagagcagggcgtggcatttcgctatcgcatcctcggcattggcccgtgggaacgacgcctgcgcaccctcatcgaacaatatcaactggaagatgtggtagagatgccgggctttaaaccgagccacgaagtgaaagcgatgctagacgacgcggatgtcttcctgttgccatcggtaacgggcgcggatggcgatatggaaggcattccggtagcgctgatggaagcgatggcggtcggtattccagtagtttccactctgcatagcggaataccggaactggtggaggccgataaatccggctggctggtgcctgagaacgatgctcgtgcactggcgcaacgactggcggcgtttagccaactggacaccgacgaattggctccggtcgtcaaacgcgcgcgcgaaaaagtcgaacacgattttaaccagcaggtgattaaccgagaactcgccagcttgctgcaggctttatag

SEQ ID NO: 11245 - DNA, 243 bp, Escherichia coli
atgatgagggggctttttttagcgatgataaaaaatctcaccgtcgtaggctttaatgattttaccgtcggtgtcgctgatcaacacgtacgcgccacccatataggtccagtgcgtcccggcatcaggcgcgggcaggttacgcaactgctactgcttaatgttgtactcatcggtacggtacatttctggtacggtgtcccctggtttgaaatgcttaaagtcagcaatgaaactacttaa

SEQ ID NO: 11246 - DNA, 2001 bp, Escherichia coli
atgaattcactacgtccggaattattagaactgacaccgcaggccctgacggcgttaagcaatgccggttttgttaagagcagtcttaaggaactggaaaatggcaacgtcccggagatcagccatgagaacgacgctttaatcgccaccttcagtgacggtgtccgtacccagctggcgaacggccaggcactgaaagaggctcagtgcagttgcggggccaacggtatgtgccgtcatcgcgtgatgctggtgttaagttatcaacgactttgtgccaccactcagtctacggaaaaagaagaagagtgggatccggcaatctggctggaagaactggctacccttcccgatgctacccgcaaacgcgcacaggcgctggtcgctaaaggcatcaccattgagttgttctgtgcgccgggtgaaattccctctgcccgcttaccgatgagcgatgtgcgtttttattcccgcagcagtattcgtttcgcccgttgtgattgtattgaaggcacactttgcgaacatgtcgtactggcggtacaggccttcgtcgaggccaaagcgcagcaagcagaatttaaccatttaatctggcagatgcgcagcgaacacgtcacatcatctgacgatccgtttgccagcgaagaaggcaacgcgtgtcgtcaatatgttcagcaattaagccagacattatggcttggcggcatcagccagccgctcatccattacgaggcagcattcaaccgcgcattgcaggcggcagagacctgcaactggcgctgggtgagtgaatcgctacggcaactgcgcgccagcgttgatgccttccacgcccgcgccagccactataatgccggagaatgcttacatcagcttgcggcattaaacagtcgattaaattgcgcacaagagatggcccggcgcgacagtattggtgaagttcctcctgtgccgtggcgcacggtcgttggctctggcattgccggagaagcaaagcttgatcatctgcggctggtgtctttaggtatgcgttgctggcaggatattgagcattatggtttacgcatctggtttaccgatcccgacaccggcagtattttgcacctttcgcgcagttggccgcgaagtgaacaggaaaactcaccggcagctacgcgtcggctgtttagttttcaggctggcgcactggcgggcgggcaaattgtttcacaagcagcaaaacgcagtgccgatggcgagctgctgttagctacccgcaaccgcttaagcagcgttgtgccgctgtcgcctgatgcctggcaaatgttgagcgcgccgttacgccagccgggcattgtggctttgcgggaatatttacgccagcgtccccccgcctgcatacggcctcttaatcaggtcgataacttatttattctgccggtcgctgagtgtatttcgctcggttgggacagcagccgccagacgctggatgcgcaggtcattagcggcgaaggggaagataatgtgctgacgttatcattaccagcctcagccagcgcaccttatgccgttgaacgcatggcggcgcttttgcaacaaacagacgaccccgtgtgtctggtttctggctttgtcagttttgttgaagggcaattgacactggaaccacgggtgatgatgacaaaaacccgtgcctgggcgctggacgcagaaactacgcctgtggcaccgctaccttctgccagcgttttgcctgtgccgtctactgctcatcagttgctgatacgctgccaggcgttacttattcaactgctccataacggctggcgctatcaggaacagagtgctattggtcaggcagagttgctggcgaatgacctcaccgcggtgggtttttatcggctggcacatgtgttgggacaatttcgtaatacagaaagcgaggcacgggtagaagcaatgaataacggtgttttgctttgcgaacaattattccccatgcttcagcaacaaggatga

SEQ ID NO: 11247 - DNA, 249 bp, Escherichia coli
atgcgtgttgagatctgtatcgctaaagaaaaaatcagcaaaatgccgaaaggttctgttcctgctctgcagcaagaaatgctgcgccgcataggtaagcgatatgacgatgcagatgtgatcgttaaatctgccagcaatgatggactcaccattttaagagccgtcgataaagaatcagcactggagttcgtacaggaaacactacaggaagtctggcaaaccgcggacgactggtttatgcaataa

SEQ ID NO: 11248 - DNA, 297 bp, Escherichia coli
atggatatcacgccgatacttcatgcaatttgtgcagtagccgtgcaggggctggtcgggtgcattaccggtgactgggtttacggagcgatagcgggttgtacgttctttattgcccgagaacatacccaggcagaatatcgctggattaagcgttttggtgatggtcacagacagaacatgccgtggtggggcggttttgatccgcgtgtgtggaatgtggccagtctgatggattttgtggtgccggtggtggcctgtgcgggattgtatggctgtatgctgatttttagctga

SEQ ID NO: 11249 - DNA, 279 bp, Escherichia coli
gtgagagatttcacgttgcgtttcagtgataaagcagatttcagggcatttctcaggaaacttaactgggaagaggacgaagagctgcagaatgccattctggttgatgagattggttttacgttcagtgagtcaggtgtttctgctgacggggagcctgaatacacgcgagacgaagggtactttgttaatattcgtcttcttgacgatggctttgatgaatccgtgttccgtgagtgggtggttacaccagagcgcccgctcagggagtggttttaa

SEQ ID NO: 11250 - DNA, 810 bp, Escherichia coli
atggaatcacgtaattcatatgaaaacaaaatagatgagatttcatctttgtcagagtcaaaggaacaccccatagatattcaagaaaaaaaagatgcgtttgtgaatgagttcaagggggtattatttgataaaaatacaaggtcttcagagcttctgtttaatttttatgagtgttgctataagtttttaccaagagctcagcctcaagataaaatcgatagctataattcagcactgcaagctttttccattttttgttcatctacgttgacacataataatataggctttgatttcaaattatttcctgaagtcaagctgtctggagaacatcttgaaacggtattcaaatacaaaaatggcgatgatgtccgggagatagccaaaattaacattactctccaaaaagaagagggtggtttatataatttacgtggattggattttaaggggtgcttcttttctggacagaacttcagtaactatgatattcaatatgtgaactggggaacgtcattgtttgatgttgatactccgtgtatttttaatgcgcctgcttacaacaagagtaatgaaaaatcattaaaacctgtgagcgaaaacggtttaagtggagtattgactgatcgtaataataaaataaaactcatcacgggcgtggcaccattcgatgatattttatttatggatgatgactttgatgatagttcctctgaggatgatcccgttgagaatagtcctgttgtgactagtcccgttgtatcaagtgaaccgccccgggtttcctggagagtgttttatctgtga

SEQ ID NO: 11251 - DNA, 483 bp, Escherichia coli
atgttagttagtaaaagcaacggatttaacgctagcgcagttttgggtagtggaagttataatgaaaataaatcttctaaacacatggagctactagctcatagtattttaaaattaatttgtaaggaagctgcatcagagacgtatcgcggtgctcttgaaactttacaaaaaatgatgtctgaatgtatatatcaagaaggcaacgcctttgtcattatgggagctggagaacaattaaaacgtattaaatatgaagttggtgaaaataacttaaaggtattcaacgtacactttaataataatcacgagttagttagttctggtgagcctgacgtaatatgtttaagcaagcaggtctgggaaaatcttctcattaaactaaagctggaaaacaatgaaaatgtgttttctgaaactaaaaaattatcgaataaaaataatgccgatcagttttttgaatgcgctaaaagaaatgaatag

SEQ ID NO: 11252 - DNA, 333 bp, Escherichia coli
atgttttctataaaaccaggacccagaaatttacctatcgacaaccccacattgttatcatggaacattactgacggggatctaaattccaaattaaatacattagaatatctaaactgtataacaaatattattaattcttgtggagtttaccctcaaggattaaaagacagagaaattatatcaacttttcacgcagaaaaagttattaataatctgttaaaaaacgattataaaatttccctttctccagatacaacttaccgagagttgaataaagcagcacagcgtagcattacagcgccagacaggataggagaaagaaaaacatag

SEQ ID NO: 11253 - DNA, 1458 bp, Escherichia coli
atggccaaaaattatgcggcgctggcacgctcggtgatagcggcactgggcggcgttgataacatctcggcggtcacgcactgtatgacgcggttgcgctttgttatcaaagatgatgcacttatcgacagcccgacgttaaaaaccatccccggcgtgctcggcgtggtacgtagtgacaaccagtgtcaggtgattatcggcaataccgtttcacaagcctttcaggaagtcgtcagcctgctgccgggagatatgcagcccgcacagcccgtgggtaaacccaaactcacgctacgtcgcattggtgcggggatcctcgatgcgctgatcggcaccatgtcaccgctgatcccggcgattatcggcggatcgatggtcaaactgctggcaatgatcctcgagatgagcggcgtgctgacaaaaggatcgccgaccttaaccattctgaatgtgattggtgacggtgctttcttcttcctgccgctgatggtcgcggcatctgccgccatcaaatttaaaaccaatatgtcgctggcgattgccatcgcgggtgtgctggtacatccgagttttattgaactgatggcgaaagcggcccagggtgaacatgtcgaatttgccctgattccggtcaccgcggtgaaatacacctacacggtgatcccggcgctggtgatgacctggtgcctgtcatatatcgaacgctgggtggacagcattacaccggcggtgaccaaaaacttcctcaaaccaatgctgattgtgttgattgccgcaccgctggcaatcctgctgattggcccgattggtatctggatcggtagcgccatttcggcgctggtttacaccattcatggttatctgggctggctttcagtcgccattatgggcgcgctgtggcctctgctggtaatgaccgggatgcaccgcgtctttacgccaaccatcattcagaccattgccgaaaccggcaaagaagggatggtcatgccgtcagagatcggcgctaacctgtcgctgggcggttcatcactggcagtggcgtggaaaacgaaaaacccggaactgcgtcagacggcgctggctgcggcggcatcagccattatggcggggatttccgaaccggcgttatatggcgtggcgatccgcctgaaacgtccgcttatcgccagtcttatcagcggttttatttgcggcgcggttgccggtatggcggggcttgccagccactcaatggcagcgccggggctatttaccagcgtgcagttcttcgatccggcgaatccaatgagcatcgtctgggtgttcgcggtcatggcgctggcggtggtgctgtcgtttatcctcacactgttgctcggctttgaggatattcctgttgaggaagcggctgcccaggcgcgaaagtatcagagcgtacaaccgaccgtcgccaaagaagtaagtcttaattga

SEQ ID NO: 11254 - DNA, 1425 bp, Escherichia coli
atgtcagtatttccagaaagttttttatggggcggcgcgcttgccgccaaccagtctgaaggtgcgttccgtgaaggtgacaaaggtctgaccactgtcgatatgatcccacacggcgagcatcgaatggcggtgaaactggggctggaaaaacgttttcagttgcgagatgacgagttttatcccagccatgaggcgacggatttttatcatcgttataaagaagatatcgccctgatggcagagatgggattcaaggttttccgtacctcaattgcctggagccgtctctttccgcagggcgatgaaatcacgcccaatcagcagggcattgctttttatcgttctgtctttgaagagtgtaaaaagtacggtatcgaaccgctggtcacgttgtgccacttcgatgtgccgatgcatctggtcaccgaatatggctcctggcgtaaccgcaagctggtggagtttttcagccgctacgccagaacctgctttgaagcatttgatggtctggtgaaatactggctaaccttcaatgaaatcaacattatgttgcatagcccgttctccggcgcgggtctggtgtttgaagaaggtgaaaatcaggatcaggtgaaatatcaggccgcgcatcaccagctggttgccagtgcgctagccaccaaaatcgcccatgaggttaacccgcaaaatcaggtgggctgtatgctggcgggcggtaacttctacccttacagttgcaagccggaagatgtctgggcggcgctggagaaagaccgggaaaacctgttttttatcgatgtgcaggcgcggggcacgtatccggcttactctgcccgcgtattccgcgaaaaaggggtaaccatcaacaaagcaccgggcgatgatgaaatcctgaaaaacaccgtcgattttgtctctttcagctattacgcctcgcgctgcgcctcggcggagatgaacgccaacaacagcagtgcggcgaacgtggtgaaatcgctgcgtaatccgtatctacaggtgagcgactggggctggggaattgatccactcggtctgcgtatcaccatgaatatgatgtacgatcgttatcagaagccgctgtttctggtggaaaacggcctgggcgcaaaagatgaatttgctgccaatggcgagattaacgacgactatcgcatcagctacttacgcgaacatatccgcgcaatgggcgaagcgattgcagacggcattccgctgatgggctacaccacatggggctgtattgatttagtttccgcctctacgggtgaaatgagcaaacgctacggctttgtctttgttgaccgtgacgacgcaggcaacggtacgctgacgcgcacgcgtaagaaatcattctggtggtataaaaaagtgattgccagtaatggggaagatttagagtag

SEQ ID NO: 11255 - DNA, 231 bp, Escherichia coli
atgcgccatgtggtggatggcgattacaccccgcattcagccgtcgatatttttgttaaggatcttggtctggttgccgatacagccaaagccctgcacttcccgctgccattggcctcaacagcattgaatatgttcaccagcgccagtaacgcgggttacgggaaagaagacgatagcgcagttatcaagattttctctggcatcactctaccgggagcgaaatcatga

SEQ ID NO: 11256 - DNA, 1071 bp, Escherichia coli
gtggaaaagccatttcgaaaaatcctggtcataaagatgcgatatcacggagatatgttattaactactcctgtaatcagtacactcaagcagaattatcccgacgcaaaaatcgatatgctgctttaccaggatacaattccgattttatctgaaaacccagaaattaatgcactctatggtataagcaataaaggtacgggaacattcgataaaattaaaaatgcactttcactgataaaaactctgcgtgcgaataattacgacctggtcattaatcttacggatcagtggatggtggccctgctggtacgttgtttacctgctcgtatgaaaatatcgcagctttatggtcatcggcagcatggcatttggaaaaaaagctttacacacttagcgcctatacacggtacacatattgttgagcgtaatttgtcggtccttgagccattaggtattaccgatttttatactgaaacaaccatgagttacgccgaggattgctggaagaaaatgcgccaggaattagatgcactgggcgtgaaagatcattatgtcgtcatccagccgacagccagacagatatttaagtgctgggacaacgataaattttctatggttatcgatgcgttgcaacatcgtggttatcaggttgtgctgacttgtggcccttcggcagatgatctcgcttgcgtagatgaaattgcacgaggctgccaaacaaaacctattaccggccttgccggtaaaacacgttttcctgaactgggcgcattaattgatcatgcagtgctctttattggtgtggattctgcgccggggcatattgcagcggctgtgaagacgccagttattagcctgtttggggccactgatcatgtattctggcgtccatggaccgagaatattattcagttctgggcggggaattatcaaaaaatgcctacccggcacgaacttgaccgcaacaaaaaatatctttctgttattccagcggaagatgtcattgccgctacggaaaagctgttgccagaagatgcaccttcagctgacaggaatgcgcaattatga

SEQ ID NO: 11257 - DNA, 1392 bp, Escherichia coli
atgtctgtttccaccctcgagtcagaaaatgcgcaaccggttgcgcagactcaaaacagcgaactgatttaccgtcttgaagatcgtccgccgcttcctcaaaccctgtttgccgcctgtcagcatctgctggcgatgttcgttgcggtgatcacgccagcgctattaatctgccaggcgctgggtttaccggcacaagacacgcaacacattattagtatgtcgctgtttgcctccggtgtggcatcgattattcaaattaaggcctggggtccggttggctccgggctgttgtctattcagggcaccagcttcaactttgttgccccgctgattatgggcggtaccgcgctgaaaaccggtggtgctgatgttcctaccatgatggcggctttgttcggcacgttgatgctggcaagttgcaccgagatggtgatctcccgcgttctgcatctggcgcgccgcattattacgccgctggtttctggcgttgtggtgatgattatcggcctgtcgctaattcaggttgggttaacgtccattggcggcggttacgcagccatgagcgataacaccttcggcgcaccgaaaaatctgctgctggcaggcgtggtcttagccttaattatcctgcttaaccgtcaacgtaacccttacttacgcgtggcctcactggtgattgcgatggcggccggatatgcgctggcgtggtttatgggcatgttgccagaaagcaacgaaccgatgacgcaagaactgattatggtgccaacgccgctctattacggtcttggcattgaatggagtctgctgctgccgctgatgctggtctttatgatcacttcgctggaaaccattggcgatatcacggcgacctctgacgtttccgaacagccagtgtccggtccgctgtacatgaaacgcctgaaaggtggcgtgctggcaaacggcctgaactcgtttgtttcggcggtgtttaacaccttcccgaactcctgcttcgggcaaaacaacggagtgatccagttgactggtgttgccagccgctatgtcggttttgtcgtcgcgctgatgttgatcgtgctgggtctgttcccggcagtgagcggttttgtacaacacattccagaaccggttctgggcggcgcaacgcttgtaatgtttggcaccatcgccgcctccggtgtgcgtatcgtttctcgtgagccgctgaaccgtcgggcgattctgattatcgcgctgtcgctggcggttggtctgggcgtgtctcagcagccgctgattttgcagtttgcccctgaatggctgaaaaacctgctctcctccgggatcgccgcgggcggtattactgccatcgtgctgaatctgattttcccaccagaaaaacagtaa

SEQ ID NO: 11258 - DNA, 2319 bp, Escherichia coli
atgaaaattagcgatggaaactggttgattcaacctggcctcaatttgattcacccgcttcaggtgttcgaggttgaacagcaggataatgaaatggtggtctatgctgccccccgtgatgtgcgtgaacgtacctggcagcttgatacgcctttatttacgctgcgctttttctccccacaggaaggtattgtcggtgtgcggattgagcattttcagggggcgctgaataacggtcctcattatccgctcaatattttgcaggacgtgaaggtcacaatcgaaaacacagaacgttatgctgagtttaaaagtggcaacttaagcgcgcgtgtcagcaaaggtgagttctggtcactggattttctgcgcaacggcgaacgtattaccggtagtcaggtgaaaaataatggctacgtgcaggacacgaataatcaacgcaattatatgtttgagcggcttgatcttggcgttggcgaaacagtttacggtctgggagagcgctttactgccctggtgcgcaatggccagacggtagagacctggaaccgggacggcggcacaagtactgaacaggcgtataaaaatatcccgttctacatgactaaccgtggttatggggtactggtcaatcatccccagtgtgtctcttttgaagtgggatcggagaaagtctccaaagtgcagttcagcgttgagagtgaatatctcgaatactttgttatcgacggcccgacgccgaaagcggtacttgatcgttatacccgctttactggtcgtccggcgctgccgcccgcgtggtccttcggcctgtggctaaccacttcatttaccaccaactacgacgaagcgacggtaaacagctttatcgatggtatggcggaacgcaatctgccgctgcatgttttccactttgactgtttctggatgaaagccttccagtggtgcgattttgagtgggacccgctgactttccctgacccggaagggatgatccgccgcctgaaagcgaaagggctgaaaatctgcgtctggattaacccctatatcggtcaaaaatcccccgtctttaaagagttacaagagaaaggctatttactcaaacgcccggacggttcgctatggcagtgggataaatggcagccaggtctggcgatttatgactttaccaatccggatgcctgcaaatggtacgccgacaaactgaaaggtctggtcgcgatgggcgttgattgctttaagaccgactttggcgaacgtatcccaactgatgttcagtggtttgacggttccgatccgcagaaaatgcataaccattatgcgtacatctacaacgaactggtgtggaacgtgctcaaggacaccgttggtgaggaagaagctgtcttgtttgcccgctcggcctccgtcggtgcgcagaaattcccggtacactggggtggcgattgttacgctaactacgaatcaatggcggaaagcctgcgcggtggtttgtctattggcctttcaggttttggcttctggagccacgatatcggcggctttgaaaataccgctccggcgcacgtttacaaacgctggtgcgcgtttggtttgctctccagccatagccgtttacacggtagcaaatcttatcgtgtgccgtgggcctacgatgatgagtcctgtgatgtggtgcgcttcttcacgcaactgaaatgccgcatgatgccgtatctgtatcgtgaagctgcgcgtgcgaacgcgcggggtacgccgatgatgcgggccatgatgatggagttcccggacgatccggcttgtgattaccttgaccgtcaatacatgttaggcgacaacgtgatggttgcgccggtgttcactgaagcgggcgatgtgcagttctacctgccggaaggtcgctggacacacctgtggcacaacgatgaactcgacggtagtcgctggcataaacagcagcacggcttcctgagtctgcccgtttatgtgcgtgataacactctactggcgctgggcaacaacgatcaacgtcccgattacgtgtggcacgaaggcacggcattccacctctttaatctgcaagacgggcatgaagccgtctgtgaagtgcccgctgctgacggatcggtgatctttactttaaaagcagcacgtactggcaacacgattactgtgactggtgcgggcgaggcgaagaactggacactgtgcctgcgcaatgttgtgaaagtaaatggtctgcaagacggttcgcaggctgaaagtgagcaggggctggtggtgaagcctcaagggaatgcgctgacaattacgttgtaa

SEQ ID NO: 11259 - DNA, 204 bp, Escherichia coli
atgaaaccaacgacactactgcttattttcacttttttcgctatgccaggcatcgtatacgccgagtcgccttttagctcactgcagtccgcaaaagagaaaaccacggtattacaagatttacgtaaaatttgcacgccacaggcgtcattatcagatgaagcgtgggaaaagttaatgttgtcagatgaaaacaataaataa

SEQ ID NO: 11260 - DNA, 894 bp, Escherichia coli
atgaatggaaaattgcaaagttcagatgtaaaaaacgaaactccgtacaatattcccttattgattaacgaaaatgtgatctccagcggaatttctctgatctcgctctggcatacctacgccgacgagcattaccgggtgatctggccgcgggacaagaagaaaccgcttatcgccaactcatgggttgcggtgtataccgtacaaggatgtgggaaaattcttttaaagaatggcgaacaaataacactgcatggcaactgtattatattcttaaagccaatggatattcactcttatcactgtgaaggtttagtctgggaacagtactggatggaatttacccccaccagtatgatggatattcccgttggtcagcaaagcgttatttataatggcgaaatttataatcaggaactcaccgaagttgctgagttaataacttcaccagaagcaataaaaaataatctggcagtcgcttttctgacgaaaattatttatcagtggatttgtcttatgtacgcagatggtaaaaaagatccacaacggcggcaaattgaaaaattaattgccactttacatgccagtctgcaacaacgctggagcgtagctgatatggctgccacgatcccctgtagcgaagcctggttgcgtcgtctgtttttacgctataccggcaagacgccgaaagaatattacctcgatgcgcgtctggatctggcgctatcgctattaaagcaacaaggaaactcggttggcgaagtcgctgatacgctcaacttcttcgactcctttcatttcagcaaagcctttaaacataaatttggttatgcgccgtcagccgtgctaaagaatacggaccagcacccaacggatgccagtccacacaattaa

SEQ ID NO: 11261 - DNA, 639 bp, Escherichia coli
atgaccaaattctcagtggttgtcgcaggcggtggaagcacctttacgccaggcatcgtgttgatgctcctggcgaatcaggaccgtttcccgcttcgtgcactgaaattttatgataacgatggtgcgcggcaggaagtgattgccgaagcctgtaaagtcatccttaaagaaaaagcgccggacattgcgtttagttacaccaccgatcctgaagtggcattcagcgacgttgattttgtcatggcgcacatccgcgtcggcaaatacccgatgcgcgaactggatgaaaaaatcccgctgcgccacggcgttgttggtcaggaaacttgcggacccggcggaatagcgtacggcatgcgttccattggcggcgtcctggaactggtggattatatggaaaaatattcaccaaatgcctggatgctcaactactccaacccggcagccattgtcgcagaagccacgcgtcgtctgcgcccgaatgcgaaaatcctcaacatctgtgacatgccaatcggtattgaaagccggatggcgcaaattgttgggctgcaagatcgcaaacagatgcgcgtgcgctactacggcctgaaccactggtggtcggcgatatcccgcagtttcagaaagggttaa

SEQ ID NO: 11262 - DNA, 1662 bp, Escherichia coli
atgagtgatatagcattaacggtcagtattctggctttggtggcagtcgtcggtttgtttatcggcaacgtcaaatttcgcggcataggattaggtattggcggcgtgctgtttggtgggatcatcgtcggccattttgtttctcaggcggggatgacattaagtagcgatatgctgcatgttattcaggaatttggcctgatcctgttcgtttatactatcgggattcaggtagggccgggcttctttgcctcattgcgcgtctccggattacgcctcaacctgtttgctgttctgatcgtcatcatcggtggtctggttaccgccatcctgcataaactgtttgatattccactgccggtagtgctggggattttctccggtgcggttaccaatacgccagcgctgggggcagggcagcagattttgcgcgacctaggtacaccaatggaaatggtcgatcagatggggatgagttacgcgatggcgtatccattcggcatttgcgggattttgttcaccatgtggatgttgcgggttattttccgcgtcaatgtcgagacagaagctcagcagcacgagtcttcacgcaccaatggcggcgcgctgatcaagactatcaatattcgcgttgagaaccctaacctgcatgatttagccattaaagatgtaccgattctcaacggcgacaaaattatctgctcgcgtctgaaacgcgaagaaaccctaaaagttccttcgccagataccattatccaactgggcgatttgctgcatctggtgggtcagccagcggatttacataatgcgcaactggtgattggtcaggaggtcgatacttcgctgtccacgaaaggcactgatttgcgcgtcgagcgtgtggtggtcaccaatgaaaacgtgctcggaaaacgtattcgcgacctgcactttaaagaacgctatgacgttgttatctcgcgcctgaaccgtgccggggtcgaactggtcgccagtggcgatatcagcctgcagttcggcgatatcctcaatctggtggggcgtccgtccgcaattgatgccgttgccaatgtgctggggaatgcgcagcaaaaactgcaacaggttcagatgctgccagtgtttattggcatcgggctaggcgtattgttaggttctattcccgtctttgtgccaggattcccggccgcgttgaaactggggctggcgggcggaccgctgattatggcgttgatcctcgggcgtatcggcagtatcggcaagctgtactggtttatgccgccaagcgccaacctcgcgctgcgggagctggggatcgtgctgttcctctcggtcgttggtctgaaatctggtggggattttgtgaataccctggtcaatggcgaagggctaagctggattggttatggtgccctgatcaccgccgttccgctgattactgttggcattctggcgcggatgttagccaaaatgaattacctgaccatgtgcgggatgctggcaggttccatgaccgatcctccggcgctggcgtttgctaataatcttcatccaaccagcggtgcggcggcgctctcttacgccactgtctatccgttggtaatgttcctgcgcattatcaccccccaattactggcggtgctcttctggagtatcggttaa

SEQ ID NO: 11263 - DNA, 1293 bp, Escherichia coli
atggatattcccgttaatgcagcaaagccggggcgtcggcgttatctgacgctggtgatgatctttattacggtagtcatttgttatgtcgaccgcgccaacctggccgtggcttccgcccatattcaggaagagttcggcattaccaaagcggaaatgggctatgtattttcggccttcgcctggctttatacgctatgtcagatccccggcggttggtttttagatcgcgtaggttctcgcgtgacttattttattgcgatatttggctggtcagtggcgactttattccagggctttgccacgggcttaatgtcattaattggtctgcgcgcgataaccggtattttcgaagcgcctgctttcccgaccaataaccggatggtgaccagctggttcccggaacatgaacgcgcttctgccgttggtttttatacgtctggtcagtttgtcggtctggcgtttctgacgccgctgctgatctggattcaggagatgttgagctggcactgggtgttcattgtcactggtggtatcggcattatctggtcgctgatttggtttaaggtttatcagccgccgcgcctgaccaaaggtatcagcaaagctgaactggattacattcgtgatggcggcggtctggtggatggtgatgcgccggtgaagaaagaggcgcgtcagccgttaacagccaaagactggaaactggtgttccatcgtaaactgatcggcgtttatcttgggcaatttgcggtggcttctacactgtggtttttcttaacctggttcccgaactatttaacccaggaaaaaggaatcacggcgctgaaagcaggctttatgaccacggtgccattcctcgcggcgtttgtcggcgtcctgctctctggctgggtagcggatctgctggtacgtaagggcttttcactgggctttgcgcgtaaaacgccgattatctgcggcttgctgatctccacctgcattatgggcgctaactacactaacgatccgatgatgattatgtgcctgatggcgctggcattcttcggtaacggttttgcttcgattacctggtcgctggtttcttctctggcaccgatgcgcctgattggtttaaccggcggcgtgtttaacttcgccggtggtctgggcggcatcaccgttccgctggtggtggggtacctggcgcagggttacggtttcgcacctgcactggtttatatctccgccgtcgcgttgattggcgcgctctcttatatcctgctggtgggcgatgtgaagcgcgttggctaa

SEQ ID NO: 11264 - DNA, 1149 bp, Escherichia coli
atgaaaatcaccaaaattaccacgtatcgtttacctccccgctggatgttcctgaaaattgaaaccgatgaaggcgtggtcggttggggcgagcccgtgatcgaaggccgcgcccgtacggtggaagcggcagttcacgagctgggtgactatttgattggtcaggatccatcgcgcatcaatgacttatggcaagtgatgtatcgcgccggattctatcgcggcggtccgatcctgatgagcgccatcgccgggattgaccaggcgttatgggatatcaaaggtaaagtgctgaatgcgccggtctggcaactgatgggcggcctggttcgcgacaaaattaaagcctacagttgggttggcggcgatcgtccggcggatgttatcgacggcattaaaacgctacgcgaaatcggcttcgataccttcaaactgaacggttgtgaagaactggggctaattgataactcccgcgcggtagatgcggcggttaacaccgtggcacaaattcgtgaagcttttggcaatcagattgagtttggtcttgatttccacggtcgcgtcagcgcgccgatggcgaaagtgctgattaaagaactggagccgtatcgcccgctgtttattgaggagccggtgctggcggaacaagccgaatactacccgaaactggcggcacaaacgcatattccactggcggcgggtgaacgcatgttctcacgcttcgattttaaacgcgtgctggaggcaggtggtatttcgattctgcaaccggatctctcccacgcgggcggtattaccgaatgctacaaaatcgccggaatggcagaagcctatgacgtgacccttgcgccgcactgtccgctcggaccgattgcactggcggcttgcctgcatatcgactttgtttcctataacgccgtacttcaggaacaaagtatgggaattcattacaacaaaggcgcggagttactcgactttgtgaaaaacaaagaagacttcagcatggtcggcggcttctttaaaccgttaacgaaaccgggcttaggcgtggaaatcgacgaagctaaagtgattgagttcagtaaaaatgccccggactggcgtaatccgctctggcgtcatgaagataacagcgtagcagagtggtaa

SEQ ID NO: 11265 - DNA, 657 bp, Escherichia coli
atgaagttgaattttaagggattttttaaggctgccggtttattcccactggcgctgatgctttcaggctgtatctcgtatgctctggtttcccataccgcaaagggtagttcaggaaagtatcaatcgcagtcagacaccatcactgggctatcgcaggcaaaagatagtaatggaacaaaaggctatgtttttgtaggggaatcgctggattaccttatcactgatggtgccgatgacatcgttaagatgctcaatgatccagcacttaaccggcacaatattcaggttgccgatgacgcaagatttgttttaaatgcggggaaaaagaaatttaccggcacaatatcgctttactactactggaataacgaagaagaaaaggcactggcaacgcattatggttttgcctgtggtgttcaacactgtaccaggtcactggaaaacctaaaaggcacaatccatgagaaaaataaaaacatggattactcaaaggtgatggcgttctaccatccatttaaagtgcgattttatgaatactattcacccagaggcattccggatggtgtttccgcagcattactgccagtgactgttacgctggacatcattactgcaccgctgcaatttctggttgtatatgcagtaaaccaataa

SEQ ID NO: 11266 - DNA, 213 bp, Escherichia coli
atgtgctgtctggtttttcaacaggacgaggtttatcatattgaaatagtggaactattggccaaactaatgaataactccagtaaaacatccacagtacagattaagcgtattaaaccttcaattatctaccgtttattgctgattggcctcggatcaccaatggtgatttacggcctggttcgcccgctcaccatcgaaacgcgagattaa

SEQ ID NO: 11267 - DNA, 1497 bp, Escherichia coli
atgacgcaatactggctggggttagattgtggcggtagctggctgaaagccgggctgtatgaccgcgaaggccgggaggcaggcgtgcagcgcctgccgctgtgcgcattaagcccgcagccaggctgggcagagcgcgatatggcagaactgtggcaatgctgcatggctgtcattcgcgccctgcttactcattctggtgttagcggggaacaaattgtcggtatcggcatctccgcacagggaaagggcttgtttttgctggataaaaacgacaaaccgctcgggaatgctattttgtcctcggaccgccgggcgatggaaatcgttcgtcgctggcaggaagatggcatcccggaaaaactctacccgctgacccgacaaaccttgtggaccgggcatccggtgtcgctgttacgctggctgaaagagcacgaaccagaacgctacgcgcaaattggctgcgtgatgatgacgcacgactacctgcgctggtgtttaactggcgtcaaaggctgtgaagagagcaatatttccgagtccaacctctacaacatgagtcttggggaatatgacccgtgcctcaccgactggctggggatcgctgaaatcaatcacgccctgccgcctgttgtcggatctgccgaaatctgcggggagatcaccgctcagacagccgccctgaccggtctgaaagcgggtacgcccgttgttggcggcctgtttgatgtggtttccaccgcactctgcgccgggatcgaagacgaatttaccctcaatgcggtgatggggacctgggcggtgaccagcggcataacccgcggtttacgtgacggtgaagcgcatccgtatgtctatggtcgctacgttaacgatggtgaatttatcgttcacgaagccagccctacctcttccggcaacctcgaatggtttaccgcacagtggggagaaatctcgtttgatgagatcaatcaggccgttgccagcttgccgaaggctgggggcgatctctttttcctgccgttcctgtacggcagcaacgccggactcgagatgaccagtggtttctacgggatgcaggccattcacacccgcgcgcacctgttgcaggccatctatgaaggggtggtgttcagccatatgacccacctcaaccgaatgcgcgaacgttttactgatgttcacaccctacgcgtcactggcggcccggcgcactccgatgtctggatgcaaatgctggcggacgtcagcggtctgcgtatcgagctgccgcaggtggaagaaaccggctgctttggtgcggcccttgccgcccgcgtcggcaccggggtttatcacaacttcagcgaagcccaacgtgacttgcgacacccggtgcgcaccctgctgccagatatgaccgcccatcagctttaccaaaaaaaatatcaacgttatcagcatctcattgccgcacttcagggctttcacgcccgcattaaggagcacacattatga

SEQ ID NO: 11268 - DNA, 999 bp, Escherichia coli
atgaaagtgacatttgagcagttaaaagcagcctttaatcgggtcttaatttcacgcggcgttgacagcgaaacggctgacgcctgtgcagagatgttcgcccgcaccaccgaatccggcgtttattctcacggcgttaatcgtttccctcgtttcattcaacaactggaaaacggcgatatcattcctgatgcccaacccaaacgtataaccagcctcggcgcaattgaacagtgggacgcccagcgttcgatcggtaacctgacagcgaaaaagatgatggatcgcgccattgaactggctgccgatcacggtattggtctggtggcactacgtaatgccaaccactggatgcgcggcggcagctacggctggcaggcggcggaaaaaggctatattggcatttgctggaccaactccatcgccgtaatgccgccgtggggcgcaaaagagtgtcgcatcggcactaacccgctgatcgtcgccattccttccacgccgatcaccatggtcgatatgtcgatgtcgatgttctcttacggcatgttagaagttaaccgtctggcaggtcgtcagctcccggtcgatggtggctttgatgatgagggcaatttgaccaaagaacctggcgttatcgagaagaatcgccgcattttgccgatgggctactggaaaggttctggcatgtcgattgtgctggatatgatcgctactctcctttccgacggcgcatccgttgccgaagtcacccaggacaacagcgacgaatacggcatttcacaaatttttattgccattgaagtggacaagcttatcgacggtcccacccgcgatgccaagctgcaacgcatcatggattacgttactagtgccgagcgtgctgacgaaaatcaggccattcgcttacccggccatgaatttactaccctgctggccgaaaaccgccgtaacggcatcactgttgatgacagcgtgtgggccaaaatccaggcgttatga

SEQ ID NO: 11269 - DNA, 1323 bp, Escherichia coli
atgcaagcaacagccacaacactcgaccacgagcaagaatacacgccgatcaactcgcgtaataaagtccttgtcgcctctctcattggcacagccattgagttcttcgacttttacatttacgccactgcggccgttattgtgtttccgcatatcttcttcccgcagggcgatcctacggcagcaacgctacagtcgctcgccaccttcgccatcgccttcgtcgcgcgccccattggctctgccgtttttggtcattttggcgatcgcgttgggcgtaaagcgacgctggtcgcctcgttgctaacgatggggatttcgaccgtggtgattggtctgctgccgggctatgccacgattggtattttcgccccgctgctgctggcgctggctcgatttggtcagggtctgggcttaggcggtgaatggggcggcgcggcgctgctggcgactgaaaacgccccaccgcgcaaacgtgcactgtatggctcctttccgcagctgggcgcaccgattggcttcttctttgccaatggcactttcttgctgctttcctggctactgaccgacgagcagtttatgagctggggctggcgtgtgccatttatcttctcggcggtgctggtcattatcggcctgtatgttcgcgtgtcgctgcatgagtcgccggtgtttgagaaagtcgctaaagcgaaaaaacaggtgaagatcccgctgggtacgctgctgaccaaacatgttcgcgtaaccgtactgggtacgttcattatgctggcaacctatacgctgttttacatcatgacggtctactctatgacctttagtaccgccgccgcgccagttgggcttggcctgccgcgtaacgaagtgttgtggatgttgatgatggcagttattggttttggcgtgatggtgccagtcgctggattactggctgatgcctttggtcgccgtaaaagcatggtaatcatcaccacgctgatcatcctgttcgcgctgttcgcctttaacccactgctcggttctggcaacccgattctggtttttgccttcctgctgctggggttaagtctgatgggtctgaccttcgggccaatgggtgcgctgttaccagagctgtttccgacagaagtgcgttacaccggagcatcgttctcttacaacgtagcgtcgattctcggggcttccgttgcgccatatatcgcagcctggttgcagactaactacgggctaggtgcggtggggttatatctggcggcgatggctggcttgacgttaatcgccctgctgctgacccatgagacgcgacatcagtcgttgtaa

SEQ ID NO: 11270 - DNA, 795 bp, Escherichia coli
atgcactctgaacgcgcaccgtttttcctcaaactggcggcctggggcggcgttgttttcctacattttcccatcctgataatcgccgcctatgcgtttaacactgaagatgcggcgtttagttttccaccgcagggcctgacgctgcgctggtttagcgtggcagcacagcgtagtgatattcttgatgccgtgacactgtcacttaaagtggcggcgctggcgacattaattgcgctggtgttagggacgctggcagctgccgcgctgtggcgacgagactttttcggcaaaaacgccatttcgctgttactgctgctgcccattgcgctgccgggcattgtcactggtctggcgttattaaccgcctttaaaaccatcaatctggagccgggatttttcaccatcgtggtcggtcatgcgactttttgtgtagttgtggtgtttaacaatgtcatcgcccgttttcgccgcacctcctggagtctggttgaggcgtcaatggatcttggggccaatggctggcaaaccttccgctacgtagtgttgccgaatctcagttcggcgttactggcaggaggaatgctggcgtttgccttgtcgttcgatgaaatcatcgttacgacctttacggcaggtcatgaacgaacgttaccgttgtggttgctcaatcagcttgggcgaccgcgtgatgtaccggtaactaacgtggtggcactgctggttatgttggtaacaaccttgccgatcctgggggcctggtggctaacccgcgaaggcgacaatggtcaataa

SEQ ID NO: 11271 - DNA, 288 bp, Escherichia coli
atgatactttggtctgtgaaaaaagaaaccgatatccggcgtggaaggcattgtgttttcctgatgcatgttcacctgctctttgtcaccagataccgacgccagatttttgaccatgacgcgacagaaaaactacgcacttacttttcaaatgtatgtgctgattttgaagctgaactggttgaaatggatggcgaaccagatcacgtccatttgttaattaactatcctcccaaactggcgatatccagtctggtaaacagcctcaaaggcgtatcgggtaggtga

SEQ ID NO: 11272 - DNA, 5769 bp, Escherichia coli
atgcaaaggaaaactctattgtcggcctgtattgcattagctctgagtggtcagggttgggcggcagatatcacagaggtagaaaccaccacaggtgaaaagaaaaataccaatgtgacttgtccggcagacccaggaaaactcagtccggaagagcttaaacgcttaccctctgaatgctctcctttagtcgaacaaaacctgatgccatggctttccacaggcgctgctgcgttaatcacggccttagccgtagtggaactaaacgacgatgatgatcatcatcatcgcaacaattctccactcccaccgacaccccctgatgatgaatcagacgacactccagttcccccaactcctggcggagatgagataataccggacgatccggatgatacgcctacacctcccaaaccggtttcgtttaataatgacgttattctcgataaaacagaaaaaacgttaactattcgcgattcagtttttacttataccgagaatgctgacgggactatatctctgcaagatagcaatggtcgtaaggcaacgattaatctttggcagattgatgaagcgaataacactgttgcccttgaaggggtgagcgcagatggcgcaacgaagtggcaatataatcacaacggtgagcttgttattacgggtgataatgccacagtaaacaacaatggcaaaaccaccgttgacggtaaagattccaccggtacggaaatcaacggtaataacggaaaagttattcaggacggcgatctggatgtcagcggcggcggtcacggtattgatatcaccggtgacagcgcgacggtggataacaagggcaccatgaccgtcaccgatccggagtccatgggtatccaggttgacggcgaccaggcggttgttaacaacgaaggcgagagcaccatcaccaacggtggcaccggcacccagattaatggtgatgacgccacggcaaacaacaacggcaaaaccaccgttgacggcaaggattccaccggtacggaaattgctggcaataacggaaaggttattcaggacggcgatctggatgtcagcggcggcggtcacggtattgatatcaccggcgacagcgcaacggtggataacaagggcaccatgaccgtcaccgatccggagtccatgggtatccagattgacggcgaccaggccatcgtcaataacgaaggcgagagcactatcaccaatggcggcaccggcactcagatcaacggtaacgacgccaccgcgaataacagtggaaaaaccactgttgatggaaaagattccacgggtaccaaaatcgcgggcaatatcggcattgtaaatctggatggtagcctgactgttacaggcggtgcgcatggtgttgagaacattggtgacaacggcacggttaacaacaaaggagatattgttgtttccgatactggatcgattggcgtgctcatcaacggtgagggggcaacagtatccaatacgggtgatgttaacgttagcaatgaagcgacagggttcagcatcacaaccaacagtgggaaggtttcgctggcaggcagtatgcaggttggcgatttctcgaccggggtagatcttaatggcaacaataacagcgtgacgctggcggcaaaagatctaaaagtggtcgggcagaaagcgacgggcataaacgtttctggcgatgcgaatacagtgaatatcactggtaacgttctggttgataaggataaaaccgcagacaatgcggcggaatatttcttcgatccatccgtgggtatcaacgtttacggcagtgataataacgtgacgctggatggaaagttaactgttgtatcagacagtgaggttacttctcgtcagagtaatttatttgatggcagcgcagagaaaacgtcaggtctggttgtgattggcgatggcaataccgttaatatgaatggtggacttgaactgattggagagaaaaacgcgcttgcagatgggtcgcaggttacttccttgcgcacaggatatagttataccagcgttattgtcgttagtggtgagtcgtcggtatatctgaatggagatacgacaatcagcggagaattccctctggggtttgccggggttattcgggtacaggataaagctttgctggaaattggcagtggcgctacgctaacaatgcaggatattgacagttttgaacatcatgggacaagaaccccagaacttacttatgctgattccggtgcgaaaattgttaataaaggtactgttgaaattcagaatttaggttttgcttttgttactggtgaaaatacaacaggtataaatagtggcacgatctcgttattacaaaatggtaaagatccggcaccgtctcccattgttttactggctactaacggagggagcgccactaatgcaggtacgatcacaggtaaagtgacggaacaacatagcgtatttaacaagtattcaacgggcacatcgaattcatttatttttaataacgatgtcagtagcataacagggttagtcgctcaatcgaatagcacaattatcaatactgacagcggcatcattgatttgtatggtcgtggtagtgtcggcatgcttgctatagcagattcaacagcagaaaatcagggtaaaattacactggattctatgtgggtagatgcaaatgacactaccgcaatgcgagatatagctagcaacagcgccattgacttcggtacaggtgtgggagttggtactgatagttatagtggtgcagggaaaaatgcaacagcaattaaccaattgggcggtgttataactatttataacgccggcgcaggtatggcggcctatggcgccagcaatacagttattaaccaggggacgattaacctcgaaaaaaatggtaattatgacgatagtctggcagcaaatactctggtagggatggctgtttatgagcatggtactgctatcaacgaccagacgggtgttatcaatatcaatgttggtactggtcaggcgttttataacgatggcacaggaacaattgttaactatggtacaatctgcactttcggcgtgtgccaatcggggaatgagtacaataatacagatgatttcacctcactgatctataccggtggcgatacgattacacgaagcggagaaactgtaacgctaaataaatctgctgctgtgactgataagctggctgggaatgttgttaatagcggaacgctttccggtgatcaaattacggtatcaagcggtcttctggaaaataccagcggtggcatcatcaataacttagtaaaacttgacaagggtgccgtcattaaaaatgccggggtgatgacgaataacgtcgatgttagcggtggaatcctcaataatgccggagaaatgactgcgcaaattaccatgaatgctggtgctgatagttcgttagtgaacaacaccggaaccatcaataaaatcgtgcagaacgcgggggtattcaataatagtggcagtgtaacagggcggatgatgtcggctggcggggtctttaataatcaaactgacggggcgattatgagaggtgctgcgctgacaggtactgcagtggcaaataacgaaggaacctggaacctcggaagtagtagtgagggtaacaacaccgggatgctggaagttaataataattcagctttcaataaccgcggcgagtttattcttgataacgacaagaatgctgtgcacatcaaccagtccggtacgctttataataccggtcacatgaacatcagtaattcttcccacaacggagccgttaatatgtggggcggaaatggtcgttttatcaatgacggaacgattgatgtttctgcgaagtcactggtagtcagcgctaataatgccggcgatcagaatgccttcttctggaaccaggataacggggtcatcaacttcgatcacgacagcgccagtgccgtgaaagtcacccacagcaactttattgcccagaatgacggcatcatgaacatcagcggcaccggtgctgtggctatggaaggtgataagaacgcgcagctggttaacaatggcaccatcaacctcggtaccgcaggcactactgacacgggtatgatcggtatgcaactcgatgccaacgccacggcggatgcggtaatcgaaaacaacggcaccatcaatatcttcgccaatgactcgtttgcatttagcgtactgggtacagtaggtcatgtggttaacaacggcacggtggtgattgccgatggggttacgggttctggactgatcaagcagggcgacagcatcaatgttgaaggtatgaacggtaacaacggtaatagcagcgaagtgcattatggcgactatacgttgccggatgtgccgaagcccaatacggttagtgtaacgtcgggaagtgatgaggctggtggcagcatgaacaacctcaacggctatgtcgtcggtaccaacgttaacggcagcgccgggaagctgaaggttaacaatgccagcatgaacggcgtggagattaacacgggctttaccgctggtacggcagacaccactgtgagttttgataacgtagtggaaggtagcaacctgaccgacgctgacgccatcacctcaacgtccgtggtatggactgccaaaggcagcaccgatgccagcggtaacgttgacgtcaccatgagcaaaaatgcctacaccgatgtggcaacagatgcctcggtgaatgacatcgcgaaagcactggatgcgggttacaccaacaacgaactgtttaccagcctgaacgtcggcacgactgctgaactgaacagtgctctgaaacaggtcagcggtagccaggcgaccacggtattccgcgaagcgcgcgtgttaagcaaccgctttagtatgctggcagatgccgcgccgaaagtgggtaacggtctggcgttcaacgttgtcgcgaaaggcgatccgcgtgccgagttaggtaataataccgaatacgacatgctggcattgcgtaaaactatcgacctgagcgaaagccagacgatgagtctggagtacggtatcgctcgtctcgatggtgatggtgcgcagaaagcgggtgataatggcgttacaggcggttatagccagttttttggcctgaaacatcagatgtcgttcgataacggcatgaactggaataacgccttgcgttacgacgttcacaaccttgacagcagccgctcgattgcatttggcaacacgaacaaaacggctgataccgacgtgaaacagcagtacctggagttccgcagcgaaggggcgaagactttcgaaccgagcgaaggactgaaggttacgccatatgcgggtgtaaaactgcgtcacacactggaaggtggctatcaggagcgcaatgccggagactttaacctgaatatgaacagtggcagcgaaacggcggtggacagcatcgtcgggctgaaactggactacgcaggtaaagacggctggagcgctagcgctacgctggaaggcgggccgaacctgagctacgcgaagagccagcgtacggcaagcctggcaggcgcaggcagtcagcactttaacgtcgatgacggtcagaagggcggcggcatcaatagcctgacaagcgtcggcgtgaagtacagcagcaaagaaagttcgctgaatctggatgcgtacaactggaaagaggatggcatcagcgataaaggcgtgatgctgaacttcaagaaaacgttctaa

SEQ ID NO: 11273 - DNA, 795 bp, Escherichia coli
ttggacataagaaaagatttggaatcagtagcccaatatataagtagactgttatcgatagggtacgaatttagccgttttgataaagactgggtccatttaaaaaatgaagaggattttcgttttatttcaagaataccatttgcaacacggaataaagtggaagcagtatatgcggaaggcagagatatggcactttatatgtctgatgagttactatccattaatagtgatttcagtaaatttccaacgttgacagctattatcgaaagattcaaggacacttgggtttatggtaattatgattcggaagtgccaaatatagctaaaaaaacatgcgaagaaaatgcagttcagctttggtctgtagaacagatgtgttccttattcaaaaagcaagaacaactattagcagcagtacgtatcacattgcagatgctacaagatagtgacctatacaagatggagaatggtttacctcttatgaaacaagaagctaatattcatgtcagtggaatttccggttctagtatcaatatacattcttcaggtgctacggcaactactacgacaaattataatgagcccacaatatttaatgaaatgattgaggcaataaaatcgaaaaactttgatggcgcgacagaatcacaccttatagataatgtacaggcactggcagccagtcaccaaagcggctgttttaaagaagcatataaggactttattaataatgtatctgcacacattacagtatttactccatttcttgctggcatatcatctttactataa

SEQ ID NO: 11274 - DNA, 858 bp, Escherichia coli
atgtcaattaaaacaattaagtatttctcaacaatcattgtagcggtagttgcggttcttgccggatggtggctgtggaattattacatgcaatctccgtggacacgcgacgggaaaatacgcgcagaacaggtttctatcaccccacaggtgtcgggacgtattgttgagctgaatataaaagacaaccagctggttaacgcgggggatcttctgctcacgatcgataaaacgccctttcagatcgccgagctgaacgcacaggctcagctggcgaaagcgcaatctgacctcgcaaaagccaataacgaagcgaatcgtcgtcgtcatctctcacaaaattttatttctgccgaagaactcgataccgctaacctcaatgttaaagcgatgcaggccagtgttgatgccgcacaggcgacgctgaaacaggcacaatggcaactggcgcaaacggaaattcgcgccccggtgagtggatgggtgactaaccttactacccgcatcggcgattacgctgataccgggaaaccgctgtttgcccttgtcgacagccactcgttttacgtcattggttattttgaagaaaccaagttgcgccatatccgcgaaggtgcaccagcacaaattaccctctatagtgataacaaaacgttacagggtcacgtttccagtatcggtcgggcgatttatgatcagagcgttgaaagtgactcaagccttattccggatgttaaacctaacgtcccctgggttcgactcgcccaacgcgttcccgtccgctttgcgctggataaagtcccaggcgatgtcacgttggtgtcgggcaccacctgtagcattgccgtaggtcaataa

SEQ ID NO: 11275 - DNA, 786 bp, Escherichia coli
atgaacccgtcgcaacatgctgaacagtttcagagccagttagcgaactatgtgccacagttcactcccgaattttggccggtgtggttgatcattgccggagtattgctggttgggatgtggttggtgctggggctgcatgccttgcttcgtgctcgtggcgtgaagaaatcagccaccgatcatggtgagaagatttatctttacagcaaagcggtcagattatggcactggtcgaatgcgttactctttgtattgttgctggccagtgggctgataaatcactttgcgatggtgggcgcaactgcggttaaaagtctggttgcggtgcatgaagtttgcggatttttgttactggcatgctggctcggctttgtgctgatcaatgccgttggggataatggtcaccactatcgcattcgtcgtcaggggtggctggaacgagcggcaaaacaaacgcgattttatttgtttggcattatgcagggggaagaacatcctttcccggcaacaacccagtctaaatttaatcccttacagcaggtcgcctatgttggtgtcatgtatggattgctgccgttgttactattgacggggctgctgtgtctctatccgcaagccgtgggagatgtgtttcctggcgtaagatactggttattgcagacacattttgctctggcatttataagcctcttttttatcttcggtcatctttatctttgcaccacggggcgtacgccacacgaaacctttaaaagcatggtcgatggctatcaccggcactaa

SEQ ID NO: 11276 - DNA, 639 bp, Escherichia coli
atgaaccatcaggatgaattgccgttagcgaaagtcagcgaagttgacgaggcgaagcggcaatggttgcaggggatgcgtcaccccgttgatacggtaaccgaaccagaacctgctgaaatcctggctgagttcattcgccagcattctgcggctgggcagctggtggcgcgcgccgtgtttctctcgccaccctatttggttgcagaagaggaactgtcagttttgctggaaagcattaagcagaacggagactacgcggatatcgcttgtttgacgggaagcaaggatgattactattactcaacgcaggccatgagtgaaaactacgcggcgatgtctttgcaagttgtggagcaggacatttgtcgcgccattgcacacgccgttcgttttgagtgccagacgtatcctcgtccttacaaagtcgccatgctgatgcaagcgccatattacttccaggaagcgcagattgaagccgcgatcgccgcgatggatgttgcacctgaatatgccgatatacggcaggtggagtcatcgacggcggtgttgtacttgtttagcgagcgatttatgacctatggcaaggcttatggcttatgcgaatggttcgaggtagagcagtttcagaacccctga

SEQ ID NO: 11277 - DNA, 618 bp, Escherichia coli
atgaaagcttcactggcgctgctcagcctgctaacggcatttaccagccactccttaaaatctcccgccgttccaccaaccgtggtacaaatccaggccaataccaaccttgccatcgcagacggtgccagacagcaaattggcagcacgctattttacgatccggcgtatgtgcagcttacttatcctggcggtgatgttccgcaagaacgcggtgtatgttccgatgtggtgatccgcgcattgcgcagccagaaggtcgatttgcagaaactggttcacgaagatatggcgaagaattttgctgagtacccgcaaaaatggaagttaaagcgctcggacagcaacatcgatcaccgtcgggtgcctaatctggaaacctggtttagccgccatgataaaacacgccccaccagcaagaaccccagtgactatcaagcgggcgatattgtctcctggcgactggataacgggctggcacatattggggtggtttcagatggcttcgcccgcgacggtacgccgctggtgatacataacattggcgcaggcgcgcaggaagaagatgtgctgtttaactggcggatggtggggcattatcgttattttgttaaataa

SEQ ID NO: 11278 - DNA, 939 bp, Escherichia coli
atggctttctgcaataacgcgaatcttctcaacgtatttgtacgccatattgcgaataatcaacttcgttctctggccgaggtagccacggtggcgcatcagttaaaacttctcaaagatgatttttttgccagcgaccagcaggcagtcgctgtggctgaccgttatccgcaagatgtctttgctgaacatacacatgatttttgtgagctggtgattgtctggcgcggtaatggcctgcatgtactcaacgatcgcccttatcgcattacccgtggcgatctcttttacattcatgctgacgataaacactcctacgcttccgttaacgatctggttttgcagaatattatttattgcccggagcgtctgaagctgaatcttgactggcagggggcgattccgggatttaacgccagcgcagggcaaccacactggcgcttaggtagcatggggatggcgcaggcgcggcaggttatcggtcagcttgagcatgaaagtagtcagcatgtgccgtttgctaacgaaatggctgagttgctgttcgggcagttggtgatgttgctgaatcgccatcgttacaccagtgattcgttgccgccaacatccagcgaaacgttgctggataagctgattacccggctggcggctagcctgaaaagtccctttgcgctggataaattttgtgatgaggcatcgtgcagtgagcgcgttttgcgtcagcaatttcgccagcagactggaatgaccatcaatcaatatctgcgacaggtcagagtgtgtcatgcgcaatatcttctccagcatagccgcctgttaatcagtgatatttcgaccgaatgtggctttgaagatagtaactatttttcggtggtgtttacccgggaaaccgggatgacgcccagccagtggcgtcatctcaattcgcagaaagattaa

SEQ ID NO: 11279 - DNA, 837 bp, Escherichia coli
atgaccgtattacatagtgtggatttttttccgtctggtaacgcgtccgtggcgatagaaccccggctcccgcaggcggattttcctgaacatcatcatgattttcatgaaattgtgattgtcgaacatggcacgggtattcatgtgtttaatgggcagccctataccatcaccggtggcacggtctgtttcgtacgcgatcatgatcggcatctgtatgaacataccgataatctgtgtctgaccaatgtgctgtatcgctcgccggatcgatttcagtttctcgccgggctgaatcagttgctgccacaagagctggatgggcagtatccgtctcactggcgcgttaaccacagcgtattgcagcaggtgcgacagctggttgcacagatggaacagcaggaaggggaaaatgatttaccctcgaccgccagtcgcgagatcttgtttatgcaattactgctcttgctgcgtaaaagcagtttgcaggagaacctggaaaacagcgcatcacgtctcaacttgcttctggcctggctggaggaccattttgccgatgaggtgaattgggatgccgtggcggatcaattttctctttcactgcgtacgctacatcggcagcttaagcagcaaacgggactgacgcctcagcgatacctgaaccgcctgcgactgatgaaagcccgacatctgctacgccacagcgaggccagcgttactgacatcgcctatcgctgtggattcagcgacagtaaccacttttcgacgctttttcgccgagagtttaactggtcaccgcgtgatattcgccagggacgggatggctttctgcaataa

SEQ ID NO: 11280 - DNA, 1779 bp, Escherichia coli
gtgactatagaatatactaaaaattatcatcatctgacccgtatcgccacgttttgcgcgctgctgtattgcaatactgctttcagtgctgaactcgttgaatatgaccataccttcctgatggggcagaatgcatctaatattgatctcagccggtacagtgaaggtaaccccgctataccgggtgtttacgacgtcagtgtttatgtaaacgaccaaccaatcattaaccaaagtattacatttgtcgcaattgaaggaaaaaagaacgcccaggcttgtatcacattaaagaatttattgcagtttcatattaattctcccgatataaataacgaaaaagccgttctgcttgccagggatgaaacgctcggcaattgcctcaatttgacggaaattatccctcaggcttctgttcgttatgacgttaacgatcaacgtctggatatagacgttcctcaagcctgggtaatgaaaaattaccaaaactatgttgatccatcgttatgggaaaacggcattaatgcggccatgttgtcatacaacctcaacggatatcatagtgaaacccctggtcgaaaaaatgaaagcatttatgctgcatttaacggtgggatgaatttaggtgcatggcgactgcgtgcctcgggcaactacaactggatgaccgattctggcagtaattatgattttaagaatcggtatgttcagcgtgatatcgcctcgctgcgttctcaactcattcttggtgagtcttatacgacgggcgaaacctttgattccgtcagtatccgaggcattcgtttatacagtgacagccgcatgttgcctccgactttagccagctttgcgcctatcattcatggcgttgccaataccaacgccaaagtcactattacgcaaggtggctataagatttatgaaacgacggtgccgccaggcgctttcgtcattgatgatctgagtccgtcagggtacggcagcgatcttattgttaccatcgaagaatccgatggctcaaagcggacattctcgcaacctttctcatccgttgttcaaatgttacgccctggcgttggacgttgggatattagcggcggtcaggtcttaaaagatgatattcaggatgagcctaatttatttcaagcaagctactactacggcctgaataactatctgacgggttataccggtattcagataaccgataataactataccgctggtttgttaggtcttggtctgaatacttcagttggtgcattttctttcgatgtgactcattccaatgttcgtatcccggatgataaaacataccaggggcaaagttatcgtgtttcctggaacaagttattcgaagaaacaagtacttcactgaatatcgcggcctatcgctattcgacacagaattaccttggtcttaatgatgcactaactctaattgatgaagtgaaacatcccgaacaagatcttgaaccgaaatccatgcgtaattactcacgcatgaaaaatcaggttacggtcagtattaaccaaccgttgaaatttgagaaaaaagattacggttcattttatctttccggaagttggtccgattactgggcttccggacaaaatcgtagcaattactctattggctacagtaacagtacatcctggggcagctacagtgtcagtgcccagcgttcatggaatgaagacggcgacactgacgatagcgtttatcttatagactggccccctgaatcaccagacaaccaatatcacttatttaagtga

SEQ ID NO: 11281 - DNA, 1203 bp, Escherichia coli
atgcactcctggaaaaagaaacttgtagtatcacaattagcattggcttgcactctggctatcacctctcaggctaatgcagcaaactatgatacctggacttatatcgataatcccgttacagcacttgattgggatcatatggataaggcaggcactgtagatggcaactatgtaaactatagtggttttgtctattacaacaacaccaatggtgatttcgatcagtcctttaacggcgataccgttaacggcacgatctcaacctattatttgaaccatgattatgcagacagtactgctaatcagcttgatatcagtaattcagtgattcacggttcgattacttctatgctgcctggcggttattatgatcgttttgatgcagatggtaataatctgggtggatatgatttttacactgatgcggttgttgatacacactggcgtgatggtgatgttttcactttgaacattgctaacactactattgatgatgattatgaagctctttacttcactgattcttataaagatggtgatgtaaccaagcacacaaatgagacatttgatacaagtgaaggcgttgctgttaatcttgatgtagaaagtaacatcaatatttccaataactcccgcgttgcaggtattgcattatctcaaggtaatacttacaacgaaacctacactaccgaatctcatacttgggataacaatatctctgtaaaagattccacagtgacttcgggttcaaattatatcctggatagcaatacttatggcaaaactggtcactttggcaattctgatgaaccgagtgattatgctggcccgggtgatgttgcaatgtcctttactgcttcaggttccgactatgcgatgaagaacaatgtattcctcagcaattcaacgctgatgggtgatgttgcctttaccagcacctggaatagtaattttgatccgaatggtcatgattccaacggtgacggggtgaaagataccaacgggggttggactgatgatagcctcaacgttgatgaactaaatctcactctcgataacggaagcaagtgggttggtcaggcaatttataacgttgctgaaacgtcagcaatgtatgatgttgctacaaacagccttactcctgatgcaacatatgaaaacatgatcttacccagcaatagtggacacgcggctaagtga

SEQ ID NO: 11282 - DNA, 696 bp, Escherichia coli
gtgtatcagccgtaccgtctgccagggcagcagcatgatgaggaatcagggctgtactataaccgtcaccggtactacgatccgttgcaggggcggtatattactcaggacccgatggggttgaaagggggatggaatttatatcagtatcctttaaatccactacaacaaattgaccctatgggattattgcagacttgggatgatgccagatctggagcatgtacggggggagtttgtggtgttctttcacgtataataggaccaagtaaatttgatagtactgcagatgctgcgttagatgctttgaaagaaacgcagaatagatctctatgtaatgatatggaatactctggtattgtctgtaaagatactaatggaaaatattttgcatctaaggcagaaactgataatttaagaaaggagtcatatcctctgaaaagaaaatgtcccacaggtacagatagagttgctgcttatcatactcacggtgcagatagtcatggcgattatgttgatgaatttttttcaagtagcgataaaaatcttgtaagaagtaaagataataatcttgaagcattttatctcgcaacacctgatggacgatttgaggcgcttaataataaaggagaatatatttttatcagaaatagtgtcccgggattgagttcagtatgcataccgtatcatgattaa

SEQ ID NO: 11283 - DNA, 369 bp, Escherichia coli
atgaaatatagttcaatattttcgatgctttcattttttatactatttgcctgtaatgagacagctgtttacggttctgatgaaaacattatttttatgaggtatgtggaaaaattacatttagataaatactctgttaaaaatacggtaaaaactgaaacaatggcgatacaattaactgaaatatatgttaggtatcgctatggcgaacggattgcagaagaagaaaaaccatatttaattacggaactaccagatagttgggttgttgagggagcaaagttaccttatgaagttgcgggtggtgtatttattatagaaattaataagaaaaatggatgtgttttgaatttcctacatagtaaataa

SEQ ID NO: 11284 - DNA, 711 bp, Escherichia coli
atgctggcgctgatggatgcggatggaaacattgcgtggagcggggagtatgatgagtggggcaaccagctgaatgaagagaacccgcatcacctgcaccagccgtaccggctgccggggcagcagtatgataaggagtcggggctgtactacaaccggaaccggtactacgatccgttgcaggggcggtatatcactcaggacccgatagggctggaggggggatggagtctgtatgcgtatccgctgaatccggtgaatggtattgatccattagggttaagtcccgcagatgtagcgctaataagaagaaaagatcaactaaaccatcaaagagcatgggatatattatctgatacttatgaagatatgaagagattaaatttaggtgggactgatcaatttttccattgtatggcattttgtcgagtgtctaaattaaatgacgctggtgttagccgatcggcgaaagggctgggttatgaaaaagagattagagattacgggttaaatctgttcggtatgtacggcagaaaagtaaagctatcccattctgaaatgattgaagataataaaaaagacttggctgtaaatgaccatgggttgacatgtccatcaacaacagattgctcagatagatgtagtgattatattaatccagagcataaaaaaacgataaaggctttacaagatgctggctatctcaagtaa

SEQ ID NO: 11285 - DNA, 261 bp, Escherichia coli
atgctggctatctcaagtaatctatcaaagatgataatatttatttttgctattataatcattgttgttttatgcgtaattacttatctttatttatacaaagatgaatctcttgtaagtaaacattacataaactatatggcaataccagaaaatgatggagtttttacatggctcccagatttttttccgcacgtagcggtggatatatcaatatacacaaatgtagaagatgattatttttttcttatttttccctaa

SEQ ID NO: 11286 - DNA, 372 bp, Escherichia coli
atgcttcatactgccaatcccgtcatcaaacacaaagccggtttgctcaatctggctgaagaactcagcaacgtatcaaaagcctgtaaaatcatgggcgtttcgcgtgatacgttttatcgttaccgcgaactggtcgctgaaggcggtgtggatgcgcagattaatcgtagtcgccgcgctcctaaccttaagaaccgtaccgatgaggcaactgaacaggctgttgttgattacgccgtcgctttcccgacacatggtcagcaccgggccagcaacgagctgcgtaaacagggggtttttatctccgacagtggtgtccgttctgtctggttactccataaccttgagaatctcaaaagacgatactga

SEQ ID NO: 11287 - DNA, 252 bp, Escherichia coli
atgaagccccaggagatatttctatcaaccctggggctgccactccaaacccgaacaatttggatggtagtcccttcttcgcatggaggcaatataaacatgctgacgaaatatgcccttgcggcagtcatagtgctgtgtttaacggtgctgggatttacgcttctggtcggagactcgctgtgtgagtttacggtgaaggaacgtaatattgagtttaaggctgttctcgcttacgaaccgaagaagtag

SEQ ID NO: 11288 - DNA, 717 bp, Escherichia coli
atgcgtttttaccggcctttggggcgcatctcggcgctcacctttgacctggatgataccctttacgataaccgtccggtgattttgcgcaccgagcgagaggcgcttacctttgtgcaaaattatcatccggcgctgcgcagcttccagaatgaagatctgcaacgcctgcgccaggcggtacgggaagcggaacccgagatttatcacgacgtgacgcgctggcgttttcgttcgattgaacaagcgatgctcgacgccgggctgagtgccgaagaagccagtgcaggcgcacacgcagcaatgatcaactttgccaaatggcgcagccgaatcgacgtcccgcagcaaactcacgacaccttaaaacagctggcgaagaaatggccgctggtggcgatcaccaacggtaacgcccagccggagctgtttggtttgggggattattttgagtttgtgctgcgcgctggcccgcacgggcgctcaaaaccgttcagcgatatgtactttttggctgcggaaaaactcaacgtgccgatcggcgagatcttacatgttggggacgatctcaccactgacgtgggtggggcaattcgcagcggaatgcaggcttgttggatcagaccggaaaatggcgatctgatgcaaacctgggacagccgtttactgccgcatctggaaatttcccggttggcatctctgacctcgctgatataa

SEQ ID NO: 11289 - DNA, 150 bp, Escherichia coli
atgatagtgtccattaaaaggatggacactatttccccggaacctgaactcaccgcacaggcgttctacataaaacgcttacgcttcattgttgactcgaactcgacttcagataaatcacgctttacccttgatggagcctgtacatag

SEQ ID NO: 11290 - DNA, 441 bp, Escherichia coli
gtgattcagaaaataaatattttagacagtagccagtcaggcgttaaaaatggggcggatagtgaggcggttttggctgcgcttattgaacatttagaattgatcaatccttctggcagattaagccaaaatacccgttcggcaatgcttcagttacgcgaagaggaatggtctgaattctttttttggttgctaaattctctggagtgtctggattatgtgattattaatttaactccagaaagcaaaaaaacgttgatgagtgaacaccgtaacaatattcaggtagcaattgatgctttatatagccaacgtcggcgtaaatcgccgggtgatgaaagtgaaacacttacccgtagaaatgacgctatcttcggcaaccacgtatggcaaacatttgcgcaatacttcccgccaggacttgaaaaaccgtctgtgtag

SEQ ID NO: 11291 - DNA, 417 bp, Escherichia coli
atggctttattgccggataaagaaaagttgctgcgtaattttttacgctgcgccaactgggaagagaaatatctctacattattgagctgggccagcgtctgccagaattacgcgacgaagacagaagtccacaaaatagcattcagggctgtcagagtcaggtgtggattgtcatgcgccagaatgcccagggaattattgaattacagggcgacagcgatgcggcgattgtgaaagggcttattgcggtcgtctttattctctacgatcagatgacgccgcaggatattgtcaatttcgatgtgcgtccgtggtttgaaaaaatggcgctcacccaacatctcaccccatctcgttcacaaggtctggaagcgatgattcgcgcaattcgcgccaaagccgctgcacttagctaa

SEQ ID NO: 11292 - DNA, 567 bp, Escherichia coli
ttgcatgttttagcaggacgctccggtggcacactggcaactgaggaagcggctattgcctatgcgatgtgggtctctgacgatttctacctaaaggtcatccgtgctttcatcgctttacgtaacgacaaagtgtcagaagctaaggcgctggcgcaggactccaaggaacttaagggtctcaagcctatagcccgtaactggctggaaaagctggataacccgaagcagggccacaccctgacagagtgtcttaagaatctcgacttcaggctaggtacaaagctggtatcagccaaggctcttaatgccgtattgaagtcagggcgtatagctaatcccttctatagtcgcaagctggacggtcgaggacagcctgtatttgacatctcgtcaggtggctggatgaccagcttcaatccgaagggtctggagaacggctattaccgtcttcaggataaccactacaacggtcaggaggggcttaaggtcctcaccaagggttacgagtggcttaagtccaacaaggtcgagctggttcgtctgtgcgctaagggaggactctaa

SEQ ID NO: 11293 - DNA, 168 bp, Escherichia coli
atgatcgacccgcgcacacctgagggtcgcatgactctccgttaccgtggctaccggactgaagtcatcctgaaggagcttggtctagacccggaagatgagacccgccagcaccaatcacgagatgagctaatagcccaactggtcgctatgaaactgtctgcctaa

SEQ ID NO: 11294 - DNA, 510 bp, Escherichia coli
atgtctagcaaagctagtgcgttattcaacaacaatgactggaaactccatgtcaccgacatcaatctctacgaaaacactgtgagtctggacggtcagtcctacccactgtccttcgctattaagaccctgattccgggctacctgtcaggactgcctgccaccagccgcgagtccatggaattactggaagctctggctgaagctggcgtgaccattggaaacttcttcagcaatgacctgatgaccgcctaccaacgtcgccagcagaacaagcgagccgaggctgagcgtatcgctaaagagcagcgcattcaggctgagcgtatgcgtgaagagaacatgaccgatgcagagtggcagaaagagctacagcgccgcaaacaggtcaaagctgagcgccggacctatggtgagaacctccgcagtgctacccattccgctggtcgctcccgtgccgctattgtcgctgacattgagtcaggcggtaactggatggacagcctctaa

SEQ ID NO: 11295 - DNA, 990 bp, Escherichia coli
atgaccatgattaaagatagctatcagttcggcattgagccagtacgtatcaccgacaccgacaacattcaggttaacgaaggtctgccaactaacgctgacccacaggtctatgccctccagttagctaagacggttaaggctatgctgaacggtgtacttaaagacgctcaggataacattccgttccctgtagaagtcctgcctacccgcaatagcctgcctaccccaatcatcgcccacactctgtctgaccgctctgtggtcgtccctgtacgcggtggtgagcgacctgaagtcgtgaccgctccgtctggtcaggagattgtggtagagcctattgagcaagctatcctcgcgtctcaccagaccaagctatgggacgtcaagtcttccactggtttcactcagggtacgctccagcaggacgctatgaacatctgtgagaatgtggtccgtaccatcaacgctcgcatggttgacgttctggagtcctccaagctgctgaagaccgtagagctgccagtcctgactggaagcctgaccactaaggcagacgctatcatggacgctctgtttgagaacaccgagtcctctttcggctctgaagtgtctgattacggcatcatcgcccatgagtcccaactgaaagcgctgtcccgtctggctgctaaacagggcttctctggtgaagacgctatcgtggatatgctgggtaccgacatcgcgtattacaacggtgaggacaaaggtgtgttcatgctggctaaacgcttcacggccctgagcttcggctgcctccgtcacgacggtgagaatattacggtcgtcctttcacgtgatggcgactctcagtcccacgacttggaaatcctcggtaaagtgttcgttgtcgctgaagctgctacgaccgtcaagatgggcactggctcagctactgccgtcctgcctgtagtcaaacgcctgaagttcaccaagaccgaagcgtaa

SEQ ID NO: 11296 - DNA, 156 bp, Escherichia coli
atgtctatgacttccgcagacctgaagtccctcctgactctggtctataaactcgtgttcctctctgtgggtctctacatggtcctctctggtcgactcggtgtggatgtgttcgacactctgtctaaggctgtgggtggacttctaggtccttag

SEQ ID NO: 11297 - DNA, 1458 bp, Escherichia coli
atgtccaaaaatgaacgaatggtgggcatcagccgcagaacactcgttaaatctaccgcgataggttctctggcgctggctgcaggcggtttttctttgccgtttaccctgcgcaatgcagcagcagcggtacaacaggcccgcgaaaaagtggtctggggtgcctgttccgtcaactgtggtagccgctgtgcacttcgtctacatgttaaagataatgaagtgacctgggtggaaactgacaataccggcagcgatgagtacggcaaccatcaggtacgcgcctgtttgcgcggtcgctccatccgccggcgtattaatcatcccgatcgcttgaattacccaatgaaacgcgtgggcaaacgcggcgaaggcaaattcgaacggattagctgggatgaagccctggatactatcgccagtagcctgaagaaaaccgtcgaacaatatggcaatgaggctgtatatattcagtactcttcggggatcgttggcggcaatatgacccgctcttcgccatcagcctcggcggtcaaacgcctgatgaactgctacggcggttcactcaaccagtatggctcctacagcactgcgcaaatttcctgtgccatgccctacacctacggcagtaatgatggcaacagcaccacggatattgaaaacagcaagctggtcgtgatgtttggtaacaacccggcagaaacccgcatgagcggtggtggcatcacttatcttcttgaaaaagcgcgcgagaaatcgaacgccaaaatgattgttatcgatccgcgatataccgatacggctgccggtcgtgaagacgaatggctccctattcgcccgggcaccgatgccgcgctggttgcgggtattgcctgggtattgattaacgaaaatctcgttgatcaaccttttctcgataaatactgcgtcggctatgacgaaaaaaccttacccgcagatgcacccaaaaatggtcactataaagcctatattcttggtgaaggtgacgataaaacagcgaaaacgccgcagtgggcttcgcaaattaccggtatcccggaggaccgtatcatcaaactggcgcgtgaaattggcacagcaaaacccgcttatatctgccagggctgggggccacaacgccaggcaaacggcgaactgactgcacgcgctattgctatgttacctattttgacgggcaatgtcggcatcagcggcggaaatagtggcgcgcgtgaatcgacctataccattaccatagaacgcctgccggtgctggataatccggtcaaaacgtcaatctcctgcttcagctggacagatgctatcgatcatggtccgcaaatgacggcaatccgcgacggcgtccgcggcaaagataaactggatgtgcccattaagttcatctggaactacaaggacttgaagcggacccttagtaggcctgaggtcctgcattga

SEQ ID NO: 11298 - DNA, 519 bp, Escherichia coli
gtgaacattaatagagataaaattgtacaacttgtagataccgatactattgaaaacctgacatccgcgttgagtcaaagacttatcgcggatcaattacgcttaactaccgccgaatcatgcaccggcggtaagttggctagcgccctgtgtgcagctgaagatacacccaaattttacggtgcaggctttgttactttcaccgatcaggcaaagatgaaaatcctcagcgtaagccagcaatctcttgaacgatattctgcggtgagtgagaaagtggcagcagaaatggcaaccggtgccatagagcgtgcggatgctgatgtcagtattgccattaccggctacggcggaccggagggcggtgaagatggtacgccagcgggtaccgtctggtttgcgtggcatattaaaggccagaactacactgcggttatgcattttgctggcgactgcgaaacggtattagctttagcggtgaggtttgccctcgcccagctgctgcaattactgctataa

SEQ ID NO: 11299 - DNA, 393 bp, Escherichia coli
atgaaatttcaggccattgtattagcaagttttcttgtcatgccttatgcgttggcagatgaccagggcggtttaaaacaggatgcagcgccaccgccgcctcatgcaatagaagatggctatcgcggaaccgatgatgcaaaaaaaatgaccgttgatttcgcaaaaaccatgcacgatggcgcttcggtttcactacgcggtaatttgatttctcacaaaggagaggaccgttacgtttttcgcgataagagcggtgaaattaatgtcgttattcctgcggccgtctttgatggacgagaagttcagccggaccagatgatcaacattagtggcagtctggataagaaaagcgcgccggccgtcgttcgggtcactcatttgcagaaataa

SEQ ID NO: 11300 - DNA, 591 bp, Escherichia coli
atggctcttccgccagaccgcacagacaggggcgcggaacgttacctgaaggatgactggcacggcctgcaactttttgccattgatggcgcacagttcaggacacctgataaacccgagctgcgtgaatattatgggtctgccaacacatccactaagcggcagaacgcctacccggttatgcgtctggtggccttaatgaacctgggaagtcacattctgctgaatgccgtgaccgcaccttaccggcagagcgaaactgtgctggcccactccatgctcgccaccatcccggataactctattacgttgtttgataaacttttttacagcgaagacctgctgctgacgctgaaccagaagggttgtaaccgccactggctactgcctgcgtggaagaatatcgcatcagaaatgatagagctgggaaacacggcgtcaccagggaccatcccgaaacgactggagcatcttcggggtgctctggaagtggtgttcataacaaaacgcccccgaccatcaaggccgaggtcggttaagatatcaaaaacccgttatcctgtgaaacatagtgccgctcctcttaagtga

SEQ ID NO: 11301 - DNA, 231 bp, Escherichia coli
atgcgaccgttcgccgccgtcgtttaccgggggacatggttatctggatggtggtgcaatgagccaattaccgatgttgttcgccgtctgaacctgagcgcggatggcgaagcggggatgaacctgctggcccgcagcgctgtcacccaggcgcgtcagcgcgtgggggccgccccagtggaatggctcttccgccagaccgcacagacaggggcgcggaacgttacctga

SEQ ID NO: 11302 - DNA, 186 bp, Escherichia coli
atgccacttctcaatgatctgctcgatttcagtgaccatccgcttatgcctccgccctctgcacaactatttgcagaacaccttcccaccgagtggatacaacactgcctgacgctttctgctcatgcgaccgttcgccgccgtcgtttaccgggggacatggttatctggatggtggtgcaatga

SEQ ID NO: 11303 - DNA, 207 bp, Escherichia coli
atgaccattctgttattgcatagagtagttaacatgaagcggagtagaacggaagtggggcgctggcgcatgcagcgtcaggctagccgacgtaaatcgcgttggcttgaggggcaatcgcgccgaaatatgcgtatccacagcatcaggaagtgcattctaaacaaacagcgtaactcgttattgtttgcgatctacaatatctaa

SEQ ID NO: 11304 - DNA, 567 bp, Escherichia coli
atgtttaaaggacaaaaaacattggccgcactggccgtatctctgctgttcactgcacctgtttatgctgctgatgaaggttctggcgaaattcactttaagggggaggttattgaagcaccttgtgaaattcatccagaagatattgataaaaacatagatcttgggcaagtcacgacaacccatataaaccgggagcatcatagcaataaagtggccgtcgacattcgcttgatcaactgtgatctgcctgcttctgacaacggtagcggaatgccggtatccaaagttggcgtaaccttcgatagcacggctaagacaactggtgctacgcctttgttgagcaacaccagtgcaggcgaagcaactggggtcggtgtacgactgatggacaaaaatgacggtaacatcgtattaggttcagccgcgccagatcttgacctggatgcaagctcatcagaacagacgctgaactttttcgcctggatggaacaaattgataatgcagtcgatgtcacggcaggtgaagtaaccgctaacgcaacctacgtgctggattataaataa

SEQ ID NO: 11305 - DNA, 1062 bp, Escherichia coli
atgagtgctggcaagggattgttgctcgtcatctgcctgttatttctgccgttgaagtctgcaatggcgctgaactgctattttggtacatctggtggcgcagtagaaaaatcagaagcgattcaaccgtttgctgtaccaggcaatgccaaacccggtgataagatctgggaatctgacgatattaaaattcccgtctattgtgacaacaataccaacggcaactttgaaagcgagcatgtctacgcctgggtaaacccctatccgggggtgcaggatcgttattatcaactcggcgtgacatacaacggtgtcgattacgatgccagtctgggaaaaagtcgcatcgacactaaccagtgtatcgacagtaagaacattgatatttatacccctgagcagatcatcgcgatgggatggcagaacaaaatttgctcgggcgatcccgctaatattcatatgtcgcgtacctttctcgctcgcatgcggttatacgtcaaaatacgagaaatgccgccgcatgattatcaaagtacgcttagcgactatatcgtcgtgcaatttgacggtgccggtagcgttaacgaagaccctactgcccaaaacctgaaatatcatattactggtctggaaaacattcgcgtgctggattgcagcgtcaatttttccatttcaccggaaacacaggtgattgattttggtaaatttaatttgctggatatacgtcgccacacaatgtcgaaaacgttcagtattaaaacgaccaagagccaaaacgatcaatgcaccgacggatttaaagtcagttcctccttttataccgaagaaacgttggttgaagaagataaagcattgttgattggtaatggtctgaagctacgtttactggatgaaaacgcctcgccttataccttcaataaatatgctgaatacgccgatttcaccagtgacatgttggtctacgaaaaaacctatacggctgaactttcgtccattccaggcacccccatcgaggctggccccttcgatacagtggtgctttttaagattaactataactga

SEQ ID NO: 11306 - DNA, 132 bp, Escherichia coli
atgttgcaacgtaaaactttacgtaaattaacatggttaacatttatgccactattgtttgtaaattcatatttcgtaatgcttctgaatttttcgtgtgatggttttaaatactatggtgtttactcttga

SEQ ID NO: 11307 - DNA, 219 bp, Escherichia coli
atggttcaaaacaaaacagataaaactttaaaacttattcgcttatcagaagtaataaggaaaaccgggttcggcaaaacgtggatttataaacttatcagcgcggggaaattccccaaacaaataaaaatcggtgacagagctgttgctttcattgaaagcgaagttgatgagtggatttataaagctataactgcttctcgtaatacatctaactaa

SEQ ID NO: 11308 - DNA, 864 bp, Escherichia coli
atgactacacaaaaggaaatggaagaaatcaggactgcattatcttggtttgatgtacgccgatatgatggcctgaaagacctcaccctagaacaaatctatgcagagcttgaaagacggatgttggcttacaaaacaaggcaacaatgggaaacagcaggcaaagataatcaaatgcaagctatataccatgatgccaaaatccgatgtggtgatgtgatacttcaatcagactggatttcaggcaatcacagactgtcacatagctatgctgtaagaccaatgagcagagttcaattgttcaactatgggcgggctatgtatcggctggagaattctgagcaaacagaccctgttgcagtgagttctgactacatctctgagtatctgaaacaaggtggcatgaatcctgccaacaaaatactggttgaaattgacttggaagaagccagcagcgacgatctcgcagaacacctgaaggtgctgattgctctatggcaaaagcagcttaaaacggcaaaaccaccaaaacgaacttttcggtttggtcataagacttttcaaagaatacttgattacaaagtcatccctttgatggatttgatctcatgggaacagctctacaacgaaggtaagaacatacctttcaacatcttagctgacattctacatggtactggtgggattcggagccgtgataacatcaaagatactgattatgattacgcgaaaagttatcttgataacgatgagtacttcaaggttttaaatgatttttatattaaaaacaatatgttaaaggactggaagatcactgacgtgataacatttaacgataaagccacggataaaaacaaaaagtaa

SEQ ID NO: 11309 - DNA, 159 bp, Escherichia coli
atgatgttgtttgcgaaatttttattcccgttcgtccggtttagttggtcactatctcttattgagttttatccttgcctgatactatttaatcagtatcaggcaaggtattcagtgaataatggcgttgaatatttcaacaccattattctttattag

SEQ ID NO: 11310 - DNA, 4257 bp, Escherichia coli
atgtcacattataaaacaggtcataaacaaccacgatttcgttattcagttctggcccgctgcgtggcgtgggcaaatatctctgttcaggttctttttccactcgctgtcacctttaccccagtaatggcggcacgtgcgcagcatgcggttcagccacggttgagcatgggaaatactacggtaactgctgataataacgtggagaaaaatgtcgcgtcgtttgccgcaaatgccgggacatttttaagcagtcagccagatagcgatgcgacacgtaactttattaccggaatggccacagctaaagctaaccaggaaatacaggagtggctcgggaaatatggtactgcgcgcgtcaaattgaatgtcgataaagatttctcgctgaaggattcttcgctggaaatgctttatccgatttatgatacgccgacaaatatgttgttcactcagggggcaatacatcgtacagacgatcgtactcagtcaaatattggttttggctggcgtcatttttcaggaaatgactggatggcgggggtgaatacttttatcgatcatgatttatcccgtagtcatacccgcattggtgttggtgcggaatactggcgcgattatctgaaactgagcgccaatggttatattcgggcttctggctggaaaaaatcgccggatattgaggattatcaggaacgcccggcgaatggctgggatattcgtgctgagggctatttacccgcctggccgcagcttggcgcaagcctgatgtatgaacagtattatggcgatgaagtcgggctgtttggtaaagataagcgccagaaagacccgcatgctatttctgccgaggtgacctatacgccagtgcctcttctgacactgagcgccgggcataagcagggcaagagtggtgagaatgacactcgctttggcctggaagttaattatcggattggcgaacctctggcgaaacaactcgatacagacagcattcgcgagcgtcgggtactggcaggcagccgctatgacctggttgagcgtaataacaacatcgttcttgagtaccgcaaatctgaagtgatccgtattgctctgcctgaacgtattgaaggtaagggtggtcagacactttccctggggcttgtggtcagcaaagcaactcacggactgaaaaatgtgcagtgggaagcgccgtcattactggctgtgggtggcaaaattaccggtcagggtagtcagtggcaagtaacgctcccggcttatcgtccaggcaaagacaattattatgcgatttctgcggttgcctacgataacaaaggcaatgcctcaaaacgcgtgcagacagaggtggtcattaccggagcaggtatgagcgccgatcgcacggcgttaacgcttgacggtcagagccgtattcaaatgcttgctaacggtaatgagcaaagaccgctggtgctgtctctgcgcgacgccgaggggcagccagtcacgggcatgaaagatcagatcaagactgaactagccttcaaaccggctggaaatattgtgactcgttccctgaaggccactaaatcacaggcaaagccaacactgggtgagttcaccgaaactgaagcaggggtgtatcagtctgtctttactaccggaacgcagtcaggtgaggcaacgattactgttagcgttgatggcatgagcaaaaccgtcactgcagaactgcgggccacgatgatggatgtggcaaactccaccctgagcgctaacgagccgtcaggtgatgtggttgctgatggtcagcaagcctatacgttgacgttgactgcggtggactccgagggtaatccggtgacgggagaagccagccgcttgcgatttgttccgcaagacactaatggtgtaaccgttggtgccatttcggaaataaaaccaggcgtttacagcgccacggtttcttcgacccgtgccggaaacgttgttgtgcgtgctttcagcgagcagtatcagctgggcacattacaacaaacgctgaagtttgttgccggtccgcttgatgcagcacattcgtccatcaccctgaatcctgataaaccggtggttggcggtacagttacggcaatctggacggcaaaagatgcctatgacaaccctgtgaccagcctcacgccggaagcgccgtcattagcgggtgccgctgctgtaggttctacggcatctggctggacaaataatggtgatgggacgtggactgcgcagattactctcggctctacggcgggtgaattagaagttatgccgaagctaaatggacaggatgcggcagcaaatgcggcaaaagtaaccgtggtggctgatgcgttatcttcaaaccagtcgaaagtctctgtcgcagaagatcacgtaaaagccggcgaaagcacaaccgtgacgcttattgcaaaagatgcacatggcaacactatcagtggtctttcgttgtcggcaagtttgacggggaccgcctctgaaggggcgaccgtttccagttggaccgaaaaaggtgactgttcctatgttgctacgttaactacaggcggaaagacgggcgagcttcgtgtcatgccgctcttcaacggccagccagcagccaccgaagccgcgcagttgacggtcatcgccggagagatgtcatcagcgaactctacgcttgttgcggacaataaggctccgaccgtcaaaatgacgacggaactcaccttcaccgtgaaggatgcgtacgggaacccggtcaccgggctgaagccagatgcaccagtgtttagcggtgccgccagcacggggagtgagcgtccttcagcaggaaactggacagagaaaggtaatggggtctacgtggcgaccttaacgctgggatctgccgcgggtcagttgtctgtgatgccgcgagtgaacggccaaaatgccgttgctcagccactggtgctgaacgttgcaggtgacgcatctaaggctgagattcgtgatatgacagtgaaggttaataaccaactggctaatggacagtctgctaaccagataaccctgaccgtcgtggacagctatggtaacccgttgcaggggcaagaagttacgctgactttaccgcagggtgtgaccagcaagacggggaatacagtaacaaccaatgcggcagggaaagtggacattgagcttatgtcaacggttgcgggggaacacagcatcacggcctcagtgaataatgctcagaagacggttacggtgaaattcaaggcggatttcagtaccggtcaggcgaccctggaggttgatggcagcacgccaaaagtggcaaacgacaatgatgcctttacgctgacggcaacggttaaggatcaatacggcaaccttctgcctggcgctgtggtcgtctttaatctgcctcggggcgtcaaaccgcttgcagacggtaatatcatggtgaacgccgacaaggagggtaaagcggaactgaaagtggtctccgtgactgccggaacgtatgagatcacggcgtcggcaggaaatgaccagccttcgaatgcgcagtctgtaacgtttgtggccgataagactacggcgaccatctccagtattgaggtgattggcaaccgtgcagtggcggatggcaaaaccaaacagacgtataaagttacggtgactgatgccaataacaacctgttgaaggatagcgacgtgacgctgactgccagctcggaaaatttagttctggatcctaaagggacggcgaaaactaatgagcaaggacaggctgttttcaccggctctaccactatcgcagcgacatatacactcacggcgaaagtggaacaggccaacggtcaggtatcgacgaaaactgctgaatctaaattcgtcgcggatgataaaaacgcggtgctcgccgcatctccagaacgtgtagattctctggtggcggacgggaagactactgcaacaatgacggttaccctgatggcgggagtcaatcccgtaggaggaagtatgtgggtcgacattgaggctccggaaggagtgacggagaaggattatcaattcctgccgtcgaaggctgaccatttctcaggtgggaaaatcacgcgtacatttagtaccagcaagccaggtgtctatacgttcacattcaacgcactgacgtatggcgggtacgaaatgacgcctgtgaaggtgacaattaacgccgttgctgcagagactgaaaatggcgaggaggagatgccataa

SEQ ID NO: 11311 - DNA, 957 bp, Escherichia coli
atgaaggcgtttacctatgaacgagtgaataccccagccgaggcggcacttagcgctcagcgcgtacccggcgcaaaatttatcgcgggcgggaccaatctgctggacctgatgaagctggaaattgaaacgcccacccaccttatcgatgtgaacggcctcgggctcgataagattgaagtgaccgacgcgggtgggctgcgcatcggcgcactggtacggaacaccgacctggcggctcacgagcgcgtgcgtcgtgattacgcggtactctcccgcgccctgctcgctggcgcgtctggtcagttacgtaatcaggcaaccaccgcaggtaatctgctccagcgcacgcgctgcccctatttttacgacaccaatcagccctgcaataagcgcctgcccgggagcggctgcgcggcgcttgaaggctttagccgtcagcacgcggtggtaggcgtaagcgaagcctgcattgccacccatccgagcgatatggcggtcgcaatgcggttgctggatgcggtggtggaaaccatcacgccggagggaaagactcgcagtatcacactggctgatttttatcaccctccgggaaaaacgccgcacattgaaaccgccctgcttcccggtgagcttatcgttgcggtgacgttacctccaccgctcggcggaaaacatatctaccgtaaggtgcgcgatcgcgcctcctacgcctttgccctggtatcggtcgcggcgattattcagcctgacggcagcgggcgcgtcgcgctgggcggagtagcacataagccctggcgcattgaggctgcgaatgctcagctatcccagggggcgcaggccgtatatgacacgctgttcgccagcgcccatcccaccgctgaaaacacctttaaactcctgttggcgaagcgaacgcttgcctccgtactggctgaagcgagggcacaggcatga

SEQ ID NO: 11312 - DNA, 411 bp, Escherichia coli
atgcctgcccccgtcgtcctgatccttgcggccgggcgtggagagcgctttctcgcctccgggggaaatacccataagtgtatcggctggcgtcagtccccggaggttgcgccttatcgctggccatttgaagaaaacgggagaactttcgaccttgcgattgaaccgcagattacgactaatgatctgcgtctgatgttgaggctggctcttgccggcggaggaataacaattgccactcaggaaactttcaggccatatattgaaagcggtaagcttgtatcgctgcttgatgactttcttccacaatttccgggcttctatctgtatttcccacagcgtcgcaatattgcaccaaagctccgcgccctgattgactacgtcaaagaatggcggcagcaattggcttaa

SEQ ID NO: 11313 - DNA, 360 bp, Escherichia coli
atgagaatgaccagccgcaaaaaagagatacttagctactttgaaccggataacctcgaatgggtgactggtgagattggtgcgccgccgttcgatgtgtcgggtgtggcctacctgcttcatggcatggtgtcgttcgataagcgtcaccagctcgaatcaacccggcgcacactggaaagcatggttgctggtggactgcttgagcgggtgacagtgtatgaatcgcgccagatacggcgcggcggtgatactaacgcaacggtcgtgcgctacggtttacccggtcagtgcgctgttatgcgcgatactggcggcgctgacaacgcaatatcaggtgaatacatgcgggtcagttaa

SEQ ID NO: 11314 - DNA, 543 bp, Escherichia coli
atgtaccagctaaagataaccatccgagacagcaaaccacctatatggcggcgtgtgctggttccagagcaaatcccctttagtaaacttcatgccgtgatccagttagcttttggctggaatgacgaacacctgtatatgttcgagaaagggcgtaaaggtgatccaggtagcgagtatcgcgtatggggtgaggatgaaagcatgggtaacgcggcaatcacgccactatgggcggcgctccagaatgagggtgacaagctggtttacacgtatgactttggcgactggtgggattgcgtcattgtgctggagaagcaaacacacgatacgagtaatcagcccattagctgcctgcgtgggaaaggcaccaccccggcggaaaactcaggcggcttgcatggttacaatgaattgctattacaggccagagagtctgataatcctgagcaggccgagatccacaatttcctgatgctggatattgaacgccgggtttacgacctgagccgcatcaacgacagattgcaggctattaactga

SEQ ID NO: 11315 - DNA, 282 bp, Escherichia coli
atgataagggacaggaaagctgaagagctggagtcaaaagggctataccggagagctgccgcacgatgggtggaagtcatgctgttatgcaccgaggacgatgatcgggaatggataaagcgccgccgtgaaacgtgtctggagaacgtgaagcgcccgcccgtgaaggttgaggaatttggcgacctgcataaagctgttaccgaaacgcaacaccgcatggggatagcgcaaccgaacggtaacgccttccggttaaatggcggcaagaggcaaaggtag

SEQ ID NO: 11316 - DNA, 261 bp, Escherichia coli
atgcgacaaacgttaagtgacattgcctacacattcggggcgggatttcaaatccgctcccagttgatggggggcgttacagtacgcgcatatccgctttatgtgaaacaggaagatttttctgatatcactgccacagcaaaacaccaatttcgtgaccagtacgcgcgcgaggggtatcagttgcaaaaaattttgcaactacgtccgaccagtacgcacacgatggcgggggataccataaaactgttctctacatga

SEQ ID NO: 11317 - DNA, 699 bp, Escherichia coli
atgattaaaaatcttcttttaatattatccctgtcattattggctggatgcgtacaaaaaccgttagtaacggtcaatgctttatcttccgggcaatctgtcggtaagaagttcttgatcatccccgcaagccaagaactttggaacaccaaacagattgaatacactcaaatagctacggtagtagccgccagtttatcaagccaaggatatacacaagttaaagatgaaaaattggctgaccaggtaattctcttgaactttttgagaagcggggccatttcaaatactcgtaatgtaaccatcccaatatacgggcaaactggtgtgagctcagcaacaacgtacggaaactcgaacaccacgttcaatagttatggtggtggctacggtacagctaataccactggaacggcaacaacagtttatacgcctacttatggaattactggcgcgtataacacaactgtgacggacacgttctacggcgcaggggtgatactccagtcgtttgatgccaaggcttatctcaataataggcagattaatatgttatggaaagttggtagctcagtcgtctcgcaacagtctgatggaattgctgattacaaggggttggcgagaatagccgctagctatgccgggaaaaatacagaaggtgatataacttttaatgttgaccctaaagcaccaaattaa

SEQ ID NO: 11318 - DNA, 2055 bp, Escherichia coli
atggaatatctttcgccaggactgaaagctgcgccagagcagatggccagagggattgctaatataccgtttgatgtaatggacgcaggcgtgggggtagtcaatgcggcgcaatcagccggagcatgggcagctcagaagcttggtgtgggtgatggcacatacacgcccatatcacctgtctttcgcccagtagaccaacctacagatccatacgcgcaggctggtgagcagctagcaccttaccttattacaggattaggtgcaggaaaggcagctaccgcagcttcttcagttgccaacgctccacgtgctgaacgtgcggccacaaaggtggctagtatgttggcagaaaacctgccaggtacattggtgaacgcccaaaagaacgggcagatcagcccagaagacctagcaaaagagacaggtattggcctagcaggatcgctaggagcacgcgctttaataaagagcggacagacagccagtgacgtaatgcgagatgtattgcggagtaatacaaatcaatcaggccatgtgttaggggcagcaaatactctggaaaccgccaatgatgtatcgaaagcagcgcgttctgccgtaggccgagagcatatcgcatcgcaggcatcaaacgtcagagatgatgtcgctaaggcggcgaaaatcactggtattaatatcaacaccctgacgcctggaatgcgctcaggtagtcgtggaattgcccaagcagaaggtgttctggcatcaactcctgggaatgttcaggatgctcaccttacggccttcaatgaaatatcctcaaagttgaataagcagttgtctgatttcggtgctgagtctggaagcgcatcagaaaaaagcgcagcaattaaagagcgcatcatcgcgagcctcagtgatatgaaaacagcagagaatatggcatgggcagaactgcgaagcacgatgccacgcgaaaggatgaaaatgagtaatgggatggctgtcgtccaagcagaaaaagcagccaatgttccactcagcccggagatgaaacagtttcaggctgccaacaaccaaggtggcggcataaccttcgacgggatgaaggcatggcgtgctaagtttgctgatgctgaacaagcaaacacccgggcaggtaaggccaatgccgcccggattgccggagaaatgcgcagagctatcactgatgacatgcgcatcatggctgaaaaaggaaacttcctcacagaatggcagaaagctaacgatctctctaaaagttacattatcgccaaacaaaatgccgaatctgtttttggtcgagatctcgcatcagacgctatggtaagaaaaggtgccgatacgcttaaggcatccgcaaacactggaactggagcttttcaccgtcttatctccgcgctgccggaagcagaacgccaaccagcaatagcatctattcttcagcatgctgtggcgcagggagagaagggaggaatcggtgaagagtctggtatccagtattttgccaagctcatgacccagcagaatgtaaacgccatcagtcgtcatgcgccagatctcggtagaatgatgaaagagttcggtgtactcgctaaagccagcaccagaccgcagcgatacgtagagcgcacgggaagaacaactgaggctctcaaaacgctcgattcaggccttccaaagatcgtcggcgtgattatgaacggagttcaacagtcaggtgcgatcgctggaggctttggcggtggtgtaattggttcgattagtggtttggttgctggtggcgcgctgagaaatactgtggctaagattggggcgacaagaagtggtaggtatgcgatagagaaagccgttcaggaagctacaaaagcagtgcgcgcaggggcatcaccagcagcgatcgccgcagcagagaaacgattttcggccaataaaattgccatgaaagcaattcgtgatgccgttggggctgaagaactcgtgaaactgacaagggccgggattgtagctaccctcagtggcatgaaagatgttagcgaatgggaatag

SEQ ID NO: 11319 - DNA, 1383 bp, Escherichia coli
atggagatgtattttaaaagaatgaaagatgagtggaccggacttgtcgaacaggcagatccgcccattcgtgctaaagccgcggaaattgccgttgcgcatgctcattatctgagtatcgagttttatcgaattgtccgcatcgacccgcatgccgaagaattcttgagtaatgaacaagttgagcggcagttgaagagtgcgatggaacgctggattattaacgtgctttctgcccaggttgacgatgtcgaaaggctaatacaaatccagcataccgtcgcggaagtgcatgcccgcataggaattccggtagaaattgtcgagatggggtttcgggtgctgaaaaaaatcctctatccggtgatcttctcttcggattattccgccgcagaaaaacttcaggtctaccatttctcgattaacagtattgatatcgcgatggaagtgatgactcgcgcgtttacctttagtgacagtagtgcctcaaaggaagatgaaaactatcgtatcttctcgttactggaaaacgccgaagaagaaaaagaacggcaaatagcctcaatactttcatgggaaatagatattatctataaaatcctgctggattctgatttaggcagtagtttgcctttaagccaggctgattttggcctgtggtttaaccataaaggtcgacattattttagtggtattgccgaagtaggccatatctcccgtctgattcaggatttcgacggtattttcaatcaaaccatgcgtaacaccagaaatttgaataacagaagtctgcgggtgaaatttttattacagataagaaataccgtatcgcaaattattaccttgctgcgtgaattgtttgaagaagtatcgcgccacgaagtcggtatggatgtactgacgaaattacttaaccgccgtttcctaccgactatcttcaaacgcgaaattgcccatgccaaccggaccggtacaccgctgtcagtgctgattattgacgttgataaattcaaagagatcaacgatacgtggggccataacactggtgatgaaattctgcgtaaagtctctcaggccttttatgacaacgtccgcagtagtgattatgttttccgctacgggggcgatgaatttatcattgttttgactgaagcttctgaaaacgaaacgttacgtaccgcagaacgtattcgcagtcgggtggagaaaaccaaactgaaagccgcaaacggcgaagatattgccctctcactttccatcggtgccgccatgtttaatggtcatcctgactatgagcgcctcattcaaatagccgatgaagctctgtatatcgccaaaagacgaggtagaaaccgtgttgaactctggaaagccagtctttag

SEQ ID NO: 11320 - DNA, 489 bp, Escherichia coli
atgacccaacccgttctggacattcaacaactgcatttgagtttccccggttttaacggtgatgttcacgcgctcaacaatgtgtccttgcagattaaccgcggtgaaattgtcggtctggtgggagaatccggctcaggtaaatcagtcaccgcaatgctgattatgcgtctgctaccgacgggcagttattgcgtacatcgggggcagatttccctgctgggagaagatgttcttaacgcgcgggaaaaacagcttcgtcagtggcgcggcgcacgagtggcgatgatctttcaggaaccgatgaccgccctcaatccgacacgtcgaataggtcttcagatgatggacgtgatccgccatcatcaaccaataagtcgtcgggaagccagagctaaagcgattgacctgctggaagagatgcaaatcccggatgccgtggaagttatgtcgcgctatccgtttgagctttcaggtggtatgcgctag

SEQ ID NO: 11321 - DNA, 747 bp, Escherichia coli
atgacaacggataacacgaacacgacacgtaacgattcactggctgcacggaccgatacctggttgcagtcatttctggtctggtcacccggacagcgggatatcatcaaaacggtggcactggtgctgatggtactggaccacatcaatctgatattccagctgaagcaggaatggatgtttctggccgggcgaggagcctttccgctgtttgccctggtgtgggggctgaatctgtcccgtcatgcgcatatccggcaaccggccattaaccggctgtggggatggggaattattgcccagttcgcatattatctggcaggctttccctggtatgaggggaatatcctgtttgcctttgcagtggcggcacaggtgctgacatggtgtgaaacgcgcagtgggtggcgtacagcagcggccattcttctgatggccctgtgggggcctttgtccggcaccagttacggcattgccgggctgctgatgctggcagtcagccaccggctgtaccgggcggaagacagagcggaacgtctggcgctggtcgcctgcctgctggctgttattccggcgcttaaccttgccaccagtgatgcagcggcggtggctggtcttgtgatgacggtgctgaccgttggtctggtgtcgtgtgcaggaaaatcattaccccgtttctggcccggggattttttcccggtattctacgcctgtcatctggctgtgctgggcgttctggcgctgtga

SEQ ID NO: 11322 - DNA, 1452 bp, Escherichia coli; identical to SEQ ID NO: 7543

SEQ ID NO: 11323 - DNA, 156 bp, Escherichia coli
atggaaaaacttacaacggaactacactccttaagtgagatggaccgaagacatgtagtctctattttagccgaaatagctaatggctatgatgattttaatgacatgttgatttatttagaattttacccgaatcataagattctgatatcttaa

SEQ ID NO: 11324 - DNA, 5340 bp, Escherichia coli
gtgattcctgaactggaaccatccaaaaacgtttctgttccgttagacgaaatagagcaaatacctgatctggatctaaaagataaaaatgataataaaattaaagggataagccctgagcgcttttatgcgcttacgcactcccccgaagcgcgttacatacgtgaaatgttggttagccaacccaatccaatgaaactggatgagatgacgcagcggttaaatgcgctgacaaaacagcattacagccagcaggaagtactgcgttggatcgatgtctgttcagggactcaacctaatgcaaaggatcccgcatttcttaaagtcagggcgcatatcttccagcgtaatacccaaggaatatgggcttgtgttgataaagattgcagattaaagcacggtacaccgctcgaaaaaggctggccctttggctatgtgtatgtgaaccagcgacaaaattgtgactgtggaagccctgtatacgaagttgcattctgtaatgattgtaatgagcctcatcttctggcgcaggacaaaaagggcaaacttgtccaatgggaaaataaaggtggcgatgagttctccttgcaggatgaagtacctgttgaacatgacactacagaggaaaaagtcgaaaaagagaacggtttcctgcctccgttgattattgccgcaggagagaccagcgagacaggctataccctacaacgcctcgaccaccagacgcgccgtattggcgttattaacaatgacagcattccgctgattattaatgatgttgaacaggtttgtagcgccagtggctgtggctacagaggcatgagtgggaaacagcccttccggcgtgcactattaggtgggccattttacgttactaatatcgtgcccaccgttcttgagtattgtcaggactttaccagtgatgaaggcaaagagggcgtcggaccagattcgttgccagggcgaggacgtcgactcattacctttacggacagtcgacaaggtacagctcgaatggcggtgcgtatgcagcaagaagcagaacgcagtctcttacgcggaagcgtagtcgaaattctgagctggcatcaacggacgcaaacgtccacggcgccgaatgccaatgccgatctggaaaaattagcggccagggcaaagcaagcccgtgagcaggcagaagaatatcgaagctggggaatgccagaccaggcgaaattgtcacaagcacaggctgaacagcttgaacaggcttatcaggctgcaaccggtggaaaagcagcaactaccctggtatcccgcacctggacagaaatggttaacgagcttaaagataaagccgatatccgtggcccggtactgaaatataaccactatttgcagcctgaagtgtttaataaaaacggcgggccactaaagctttcggaaatgttgttgttccgggaattcatgcgtcgccctaaacggactaacagcctggaaacacaggggctggttcaggttggttaccaggggctggagaaaatacataagagccccttgcactggcaggaaaaaggattaacgctggatgactggcgcgattttctcaaggttacgttggatctttatgttcgcgaaagcaacttcacacagctggatgatgagctgaaaaactggattggtagccgtttttcatcaaaattcgtccgtaacccggaatcaaaagatcctgaagataatcagaacagacgctggcctcaaattcgtaatggcaacgtatcccatcgtttagcgaagttactgatgctgggggctggattcaaaaccgtcaatacggcgactattgatattatcaatacatggctgaaagaagcatgggcccaacttaccggaccacttgcagtactgaaacccgatggcaaccgtttttatttaccgaaagagcatatgactttttctttaatcacggatgcctggatttgcccggtaaccaataaaatcctggatacggcttttaaaggcttaaccccttatctgcccacccatatttcgttcgagcatcttacccaggcgcaatatgacacttttgtcgcgcagaaagtcaccatgccggaaatctggaagctggatcgttcacaggaagactacgcagagggtctggcaaaagcacgagactgggtcaacaatgatccgctgatcgcacaattgcggtcggaaaacgtctggacagacatcaacgatcgtgtagtggaaggcggtttctactatcgcactgccgagcactctgcccagcagtcgtcagaacgcctgcaaagctatgaaaagatgttcaagaacgggcaactaaatgttctcaactgttccaccaccatggaaatgggggttgatattgggggcattactgcggtggtaatgaacaacgttccgccacatccggccaactatttacagcgcgccgggcgagccgggcgtagtaaagaatcacgcgcgatctcttataccctatgcaaaggtaacccacacgaccagcaggtttttgccaacccactctggccatttgaaaccatgatcccggcacccatggtcgcgatgaactccgcccgactggtgcaacgtcacgtcaatgcattattactgtctgactttttatgtaacgttattggcgaaaccgataaagagaaaaccagcctcgatagcctctggtttttcggtgaagatgacgggcagtcaaaatgcgaacgctttaaagtctggctggaacgcccggttcttgatatcgacacggcgctggaacggctggtgaaaggtacggcgttgcatggcgcaagagccgaacatctgcgggataaaacaatcaatgcgatcaccttcctgcaacagcggtggctctccgtttatcgcgatctcgtgacccaggagcgtgagtcgcagccgcaaacgccttatcgtaagcgcatagagctggagaagaaacggcactgtggcgagtatctgctgcgcgatctggctgccagaaccttcctgccgggatacggtttcccgacagatgtagtgacgtttgataacttcacgatggaagattatatccgcgaaaaatcgcagaaaagtcgtgataaaaaggaccgtgaagataacgtctcccgttataaaggattaccttcccgtaacctcggtgttgccattcgtgaatatgcaccgggagcagagatcattcttgatggtcgtgtcttccgctctgccggtgtctcactgcactggcacaacattaatgctgataccaatgaagcccagcgtctggattgcgcctggcgctgtcacaaatgcgggaccattggctatgaagaggggatgagcagttccgggatgctcttttgctccaacagcgcctgcggcgaaaaaataaccatggataatcgccgtcaggtgttgcagcctgccgggtttgtcaccgatgcacacgctccggtaacgaacaatattgaaaccatgaaattcgtcccggttgtccccgcgtgggtctttgttaaagcagagcccgtaccgttgcctaacccgctaatgggttatatggcttctggggctgatgggcatgttttccagcaaagtttgggggaaggtggacacggttatgcattgtgtctgagctgtggccgtgcggagtcgatgctgaatgaaaatgatgcaccgaaaagtatggaagctcactatccaccgcgtccgggtaaagcggaccgcgacagccagaatcatcgtctgatttgccccggttcgacggcactcatgaagaacgtcaccctgggcgcactggcgcgcaccgatgtctttgaaatggttctgcgcaaaccgcaaaacggcgagtatctgccagataacacagaagaggggcggattgtcgctatgactctggcggttgctctgcgtcaggcgctggcaggcgttctgggtatctccgccgcagaactcggctattctgtacgtccggtcagactggaggatgggcaatcggtattagccgttcagctttatgatgtgatcagcggtggtgctggttttgcctccagcgcaccggtacatattgaagctatattgcagggaatggtgaaacagttaggctgccgccattgtgatactgcatgcagtgaatgtctgcttgattcccagactcgccacgatcacgatttgctggatcgcaaagtggcgctggcttggcttggcgatgacttcacgtattacatcggtttaccggatgaagagacattctcgctgccggatgcccgctactgccctggcgctattggcgatacgattcgccgggcgattaacgaaggcgctgaaaagctcaccctgtggatgactggcgcgcccaatgagtgggatttatacgcccgtcagttccgcgcggctattcagagctatcggctaaaagacaacgtcgaggtcgatcttgttattcctgcgggagtggatgacccagacctgttgcatgaactatcgcaatttactgcgctgggtgtgcggttgtgccatgttgagcaggagctgcaattaccgattgttgcccaggtcacctttgccgatcgcgtgatgacgctggcctctcgcagtcagcaggcaacgattccggggccggagtggcacctgaatgacgaactggtggtgcgtagtctcggttatcaaacggtagaactgaacgagtttattctgcccgctaaagccgccaacgctgtcgagcgggtcaaagacattcagatccacaaacagttgaatggaccactttcgcagtttgggcaacgcttctgggacgtgctgtttaacgaccatgaagaagcgcagtcactgatgaaaaacacgcgaattaccggcgttcactataccgatcgctatctgcaaaacccggttgcgctggcgttgttgggatcaattctgaaaccgctaaaaacaaagctgaccgatggcgctgaagtggcgctggatacgctgtttaaagataaagatcgccccggtaaccggcctttccatgactggatgagcatagcggattttcaggatttcgctgatcagtggtttgctgctgcgctgggcaggccgatagaactgacggtgttcgattcgccgcgcgatatccctcaccatcgtaaactgacggtgacttttgaggatggtcaggtattgaagatccgcttcgatcaggggatgggctactggcgcatcaactttgcatcgcaatggcattactttgatttccgcgatgacgtttctttccagttagtcaaaatggctcaggcctgcaaggaagggaatgtggccaacagcgaagagagctgggcaacggatgtgctggtggaggtgatcgcctcctga

SEQ ID NO: 11325 - DNA, 1047 bp, Escherichia coli
gtggaacagcccgtgatacctgtccgtaatatctattacatgcttacctatgcatggggttatttacaggaaattaagcaggccgaccttgaagccattcccggtaacaatcttcttgatatcctggggtatgtattaaataaaggggttttacagctttcacgccgagggcttgagcttgattacaatcctaataccgagatcattcctggcatcaaagggcgaatagagtttgctaaaacaatacgcggcttccatcttaatcatgggaaaaccgtcagtacttttgatctgcttaatgaagatacgctggctaaccgaattataaaaagcacattagccatgttaattaagcatgaaaagttaaactcaaccatcagagatgaagctcgttcactttatagaaaattaccgggcattagcactcttcatttaactccgcagcatttcagctatctgaatggcggaaagaacacgcgttattataaatttgttatcagcgtctgtaagttcatcgtcaataattctatcccaggtcaaaacaaaggacactaccgtttctatgattttgaaagaaacgaaaaagagatgtcattactttatcaaaagtttctttttgaattttgccgccgtgaattaacgtctgcaaatacaacccgctcttatttaaaatgggatgcatcgagcatatcggatcagtcacttaatttgttacctcgaatggaaactgacatcaccattcgctcatcagaaaaaatacttatcgttgacgccaaatactataagagcattttttcacgacgaatgggctcagaaaaatttcactctcaaaatctttatcaactgatgaattacttatggtcgttaaaacctgaaaatggcgaaaacatagggggtttattaatatacccccacgtagacaccgcagtgaaacatcgttataaaattaatagcttcgatattggcctgtgtaccgtcaatttaggtcaggaatggccgtgtatacatcaagaattactcgccattttcgatgaatatctcaaataa

SEQ ID NO: 11326 - DNA, 1398 bp, Escherichia coli
atgaggaaggcacatcttatggaatcaattcaagcctggattgaaaaatttattgagcaagcacagcaaaaaagttcacaatccaccaaagattatccaacgtcttaccgtaacctgcgagtaaaagtgagtttcggttatggcaattttacatctattccctggtttgcatttctgggagaaggtcaggaagtttctaacggtatatatcccgttattctctattataaagattttgatgagttggttttggcttatggtataagcgacacgaataaaccacatgcccaatggcagttctcttcagacatacctaaaacaatcgcagagtatttccagacaacttcaggtgtttatcctaaaaaatacggacagtcctattacgcctgttcccaaaaagtctcacagggtcttgattatacccggtttgcctccatgctggacaacataatcaacgactataaattaatatttaattctggcaagagtgttattccacctatgtcaaaaactgaatcatactgtctggaagatgcgttaaatgatttgtttatccctgaaaccacgatagagacgatactcaaacgattaaccatcaaaaaaaatattatcctccaggggccgcccggcgttggaaaaacctttgttgcacgccgtctggcttacctgctgacaggagaaaaggctccgcaacgcgtcaatatggttcagttccatcaatcttatagctatgaggattttatacagggctatcgtccgaatggcgtcggcttccgacgtaaagacggcatattttacaatttttgtcagcaagctaaagagcagccagagaaaaagtatgtttttattatagatgaaatcaatcgtgccaatctcagtaaagtatttggcgaagtgatgatgttaatggaacatgataaacgaggtgaaaactggtctgttcccttaacctattccgaaaacgatgaagaacgattctatgtcccggagaatgtttatattatcggtttaatgaatactgccgatcgctctctggccgttgttgattatgccctgcgcagacgattttctttcatagatattgagcctggttttgatacaccacagttccgtaattttttactgaataaaaaagcagaaccttcatttgttgagtctttatgccaaaaaatgaatgagttaaaccaggaaatcagcaaagaggccactatccttgggaaaggattccgcattgggcatagttacttctgctccgggttggaagatggcacctctcctgatacgcaatggcttaaggaaattgtgatgacggatatcgcccctttactcgaagaatatttctttgatgacccctataaacaacagatatgggccgacaaattattaggtgactcatag

SEQ ID NO: 11327 - DNA, 1425 bp, Escherichia coli
atgagtttcaactcaacatcaaaagaattaattgagcaaaatatcaatgggttactttcaatccatgatagctggttacgtatttcaatggattccgtagcaaacatcacaaacggttttgcttttaagtcgtcagaatttaataatcgtaaagatggtgtaccattaattagaattcgtgatgttctaaaaggtaatacatcgacttattactcgggtcaaattcctgagggatattgggtatatcccgaagacttaatcgtgggaatggatggtgattttaatgcaactatatggtgctcagaaccagctctgttaaatcaacgagtatgtaaaattgaagttcaggaagacaaatacaataaaaggtttttctatcacgccttaccaggatatttatccgcaatcaatgcaaatacgtcctcggttactgtaaagcatctttcttccaggacacttcaagataccctacttccgttgccaccacttgccgagcaaaaaatcatcgctgaaaaactcgatacgctgctggcgcaggtagacagcaccaaagcacgccttgagcaaatcccacaaatcctgaaacgttttcgtcaggcggtgttggctgcggcagtaactggtaggttgaccaaagaagataaagattttataacaaaaaaagttgaattagataactacaaaatccttattccagaagactggagtgaaacaattttgaataacattatcaatacacaaagaccattatgttatggtgtggtgcaacctggagatgatataaaagacggtatagaattaattcgtgtttgtgatattaacgatggtgaagtagatttaaatcatcttcgtaaaatttcaaaggaaatagatttacaatataagcgttccaaagtacgaaagaatgacattcttgtaacaattgttggggctataggtagaataggtattgttagagaagatataaatgttaatatcgctcgtgccgttgccagaatatctcctgaatataagattattgttcctatgtttctccatatatggttaagttcaccagttatgcaaacatggctagttcagtcatctaaggaggtcgccagaaagacattaaatttaaaagatcttaaaaatgcatttgtccctttaccgtctatagaagaacaacacgaaatcgttcgccgcgtcgagcaactcttcgcctacgccgactccatagaaaaacaggtcaacaacgccttagcccgcgtcaacaacctgacgcaatccatcctggcaaaagcgttccgtggtgaactcaccgcccagtggcgggccgaaaacccggatttaatcagcggagaaaacagcgccgctgcgttgctggagaaaatcaaagctgagcgcgcagccagcgggggtaaaaaagcctcgcgtaaaaagttctga

SEQ ID NO: 11328 - DNA, 843 bp, Escherichia coli
atggctaggggtaggcgtctcaaatcctatttggattatgaaaatgcgctaggtgacggcataggagtgggctatggccaaagttatcagccctggcttagagctcaggacgttaaatcccgtggaaaccgttcgatagtctttggccttaagacgtttcgaaaccatcatctcctttcttctgtcgaaagtaactttttctatctggctgagtttaatgactcggtgattgatatccgggaacaattcccactctttcctctccggcttacccaacaaatagcaaatcatctacattttcaacatcctatggtgaggggagtaagaggagtacctgtcgaagttctgaatgttatgacaaccgattttttactgaccttgagaactcctgaaggcggacttcgatacaaagctatagcagtaaaacataacgagagcatacctgaacgcgaagcccaaaaacttgaaatagagaggatgttttggcagttgattgatgttgagtttcaaatttatgttggctcggaactcaataacgtcgtcggtaaaaacatttgctgggctacttctgtattaagagatggttctgaattttatgataaatatcctcttgataaaatcctatggaagcttaaaccagatgtttatcccatagtaggactacgtgcaatgatttcatcaatctttggggtagatgcacaagaagcgatgatgttattgcaggcaatgattggattaaaaatgataaatgttgatttatcatatccaatactcgaaaccggtctgataaagataatttccaatgaccactatataggactgaacgcaaatggatattattag

SEQ ID NO: 11329 - DNA, 2124 bp, Escherichia coli
atggatattattaggaattcagtctggctctctcaaggcactgatttgcttgcagagggactttaccgtgttttggattttgacagaaaggtcgatttgttaattttgtttaaaataaaatcagaaagaacgggtaagccaatccctttctcattttcaatgtttaaatattatattgaatcaaatagcataacttgtaaagattatatatatccttcatatatgttagtagatgagaaagaattaacagataaagacagaggaaggcgagatgaaaattacaatatcattaaagatcttgtagatgacagaatgtttctgttcgactatgcattacataaaaagtcgcaccttttaatggattactcaagaaataaaaaaatatcacaatatactatcagaacgcttctggcgttgtattggcgacatgggcaggatatttatgcattgctacccgcattctcgaactgtggcgccgctgggaaaagtagaatcaaacatgaaattaaacttgggaattccaaaaaaaacagagcattacctaatgaacgatcacgtgttttcattcttaatgaaagagatataaataatattagaaaatctctcattacgtatcattataaagttaacggagatacgataaagaaaacattagagagacatattgatttgtattttagggatgaaattaaaacagcaaacctagaaaatagagctccatatgttccttctttaaaacaattttcatactggaataaaaaactcttcactaaagatttctcgataaataagaagaacacgaaaaaagaaatagacctcaaaatgcgggcgcttttaggtagtgtggctaatacaactgttttgccgggtgatgttttcgaaatagactcaactgtcgctgatgtacatcttatttcgagtttaaacagacgaaaagtcattgggcgtcctactatttatacagtggtggatcgtgcaacaagaatgattgttggccttcatgtttctttataccatgcttcatggcgagccgcccgacaagcgttagcaaattgctttatgccaaaaaaagaatattgtagattatttggaatctctattactgatgatgattggccttgttctcacattccattaacattgatgtgtgacaacggggagatgattggtcttaaacctcaggaagagatgacccccctgacaaaacttgagtttgcgccagtcggtagaggcgacagaaaaagcattgttgaacgctgtttcggcattctgaatgatgaggttattcataggcttattggaacaacacgaaggggaaagattgttaaaggagagccaacaccgcaatccagggcttgtttaacgattcaggaggtcacgtctttactgattcgggagatacttgcacataatcagagaacgtatgaggaactggcttatatcaatcccttactgattgaaaatgatctcgtaatatcaccaaaaaatagttggatgataagcttaaagcacgggagattcagcgcaagagccgttggggccgacgaagtgatcgcacgattgttaatccctgtgaacgctaacattaccgccggtgggattcagtacaataatcttttttatgaatgtgatcctgaaattgcatcaggtgtcagagtatttggaagaaccacttgtgaagcaagaatagatgacaattgcgtagattatatatatgtaagatttgacaaaaatagcattttcaaaaaacattacctacttaagaaaagagatgtatttaaagggaaagctcatcttgatacagatgtaatggctgattgggtagatactcaaaaagaaattaatttatttactctggattcgctcagcaatatcaataataaagatgaatttaacaggaaaggtaacgaaagattaaatgaaatatacgaatctcgccgggtacatggtaaagatattaaaaagaacaggaaaaatgaacttgattcattagggcgaactcatgttgctaatggaagatctgaacccctacttccttcatccagtaatgttctgcttttgcctggccgggaggagaaacaaagatggttaaaaggtaagaagaagactgaggacgcagaataa

SEQ ID NO: 11330 - DNA, 1449 bp, Escherichia coli
atgaatcttatacggcgcgtttcagcgatatataaagaacaggagttacctgagtatcgtggcaatcccttaattgaagcacttcctgaagcgcttacggaagatgaagtacttctggaaatgagttatttccccgaaattgacgaaaaaatccgctggactgccccggcgaatgttagagagcagtatgtcgaacgtataaagaaattccgttgccctcaaaccaatcttatccaggcttataagatgatcttacgggcacttagggaaagctatgcagctcgtaatcctttaaaaagcggaacaattcaatatcttcattactatggaaatgagcgtcctgatattgagccagaaagtggatattttaaatcccaggctgaaactattacgatagttggaatgagtggttctggaaaaactaccatgattgagcaagtcatggatcatttccctcagattatagaacacagcagctataaaggagtttttcccggcttcagtaagcaaattgtatgggtaaagattaattgtccatacaattcaagtgtgagagacctttgtgaagagattttacaaaaattagatgatgcaattggtattgaacgaactacacctgagattagaaatggtgctctggctcgccagattgcacaaagaattaaatcatcatttttgggtatccttgttattgatgaaatgcagaggcttaaattttcaagaaccgggggtgagagtaagttgattgattttttacatgaaattgtagattccatgggggtatctatggttttttgtggaaatcatccttttgacgagacgctgacaaagaaaatgagaattgccaggcgggcagagtctggtggttacatgaaaattaagaatgttagatacgattcacaagactggcaatcgtttattcattatttatggccattacaatggacaaatgttgaaactccattaaatgatgagttaaacgaaaaattattcattttatctaaaggcaatattggattggctcagatgatttatcggggggcacaattaaaggttatcggtagcggcaatgaaatcatcactggcgcagtcttgtcggcctctgtaccggtactcgtgagtcatacggaggaatataaggatactccactcccgggggccgcgactgaagatgaggaagctaaatggctctctgcatctaatgagggtgatgcttcggctaaaatcatggcagagaagtccctaaagtctttgatccctggggatatagacaggccacagcacaaggaattcgtaggaaaaatagacgaggttttgcgcaatttcgacgagaaaatactgtctcttgaccacgatcttgttatcaacagaacagctgaaaagaaaaatacctacgatgctcttcagcgttgcgggcttataaatatagatccacttaataaattgtaa

SEQ ID NO: 11331 - DNA, 762 bp, Escherichia coli
atgagaatgttgcctgttttgcctgatgaatccttgttcagccggttttgtcggacaactaccgtgtacggtatgtccccatcttctctgttaacgatcattttcaacaaacctgatatgaacgtccatccaattctcaattcaggattaaaggctatttctcttcatacatccgaaagtgcagatcagctctggcatgaacagactttactccctctttttgcctgggcactaccaatcagtcgtaatgaaattatggatttcaacacgacccctgccaggcttaatcgattgtgccgccttagtaatttttcactagggcagcgcacactattgaagttttgcccggtttgcgctcgtgaagatacttttcattatggtgttacttattggcatctggcgcatcagcttcatggggttacaacctgccatcggcatccggtagcgcttgaaagcatccatgtcccttcttcaccgcacatacgtattggactgatgcctcctgtttcgtatacagaacaacttagcaatgagatagacttcgattttgctaagttttgttatgagtccctaaatataatcagaagaaaagatattacacaccccaattacatggatgtacttaaaaagttgaatttattatcattggatggaaatttaaagaaaaatgtattctacgcacatgtttatgctaagtgccagttatttggggagggttcatcgggacttataccaacatccctaactagactggccccctga

SEQ ID NO: 11332 - DNA, 1242 bp, Escherichia coli
atgaaatggtttaacaccctaagccacaaccgttggctggaacaggaaaccgaccgcatctttgattttggtaaaaattccgtagtgccgactggttttggctggttaggcaataaagggcaaatcaaagaagagatgggcacccatctgtggatcaccgctcgtatgttgcacgtttattccgttgctgcggcgatgggtcgacctggcgcttactcgttggttgatcacggtatcaaagccatgaacggcgcactgcgtgataaaaaatatggcggctggtatgcctgcgtgaatgacgagggcgtggtggatgcctccaaacagggctatcaacacttctttgctctgctgggtgccgccagcgccgtcacaacgggtcacccggaagcgcgcaagctgctcgattacaccattgaaattatcgagaaatatttctggagcgaagaagagcagatgtgcctggaatcctgggacgaagccttcagcaaaaccgaagagtaccgcggcggcaatgccaatatgcacgcggtggaagctttcttgattgtttatgacgtcactcacgacaaaaaatggctggatcgcgcgattcgcgtggcttccgtgattatccacgacgtcgccagaaataatcattatcgcgttaacgaacacttcgatacccagtggaatccgctgccggattacaacaaagataacccggcgcatcgcttccgcgcgttcggaggtacaccaggccactggatcgaatggggccgtttaatgctgcacatccatgctgccctggaagcccgttgcgaacaaccaccagcatggctgctagaagatgccaaaggtctgtttaacgccaccgtgcgcgatgcctgggcacccgatggcgcggacgggattgtttataccgttgactgggaaggaaaaccggtggtccgcgaacgtgtacgttggcctatcgtcgaagcaatgggtacggcctacgcgctctacaccgtcactggcgatcgccagtatgaaacctggtatcaaacatggtgggagtactgcattaagtacctgatggactatgaaaatggttcctggtggcaggagctggatgcggacaataaggtcaccaccaaagtctgggacggcaaacaggatatttatcacctgctgcattgcctggtgatcccgcgtatcccgttagcgcccggcatggctccagcggttgcagcgggtctgctggatattaatgcgaaataa

SEQ ID NO: 11333 - DNA, 144 bp, Escherichia coli
atgattcgtgttgcttgtgtaggtataaccgtgatggatcgcatctattacgtggaagggttaccgacggagagcggtaaatacgtggcgagaaattatacggaagttggtggcgtgaaccgccccgggaatcctggagactaa

SEQ ID NO: 11334 - DNA, 336 bp, Escherichia coli
atgtggctcgctgaacagcgggctccactcggtcaccccgttttcctgcaatatcgtgccgaggatgctttcgatgtcctcattctggaagatacggaagttctggcgcagccctgtgcgccacagcggcgggcataccttcatgctgtacagcttctggtttttgtcgttctcccccagttcaaaccaggtcaccacacctttcacccggcgctgtacgtcatcgccctgccatatcgtcaggtaggccattttgtcgaggatctgctggaattcaagggagagaaactgctggctgaccagagagagatcgagggaaaaaagcgaagagagtga

SEQ ID NO: 11335 - DNA, 2766 bp, Escherichia coli
atgatccagattgatcttcccccgctggtaaaacggctgaacctgttctcccgccaggcgctggagatggccgcctctgaatgtatgagtcagcaggcagcggaaattaccgtcagccatgtgctcattcagatgctcgccatgccacgcagtgacctgcgggttattacccgccagggcgatattggcatggaagagttgcgccaggcgctgacggtagagaactacacaaccgcccgttctgcggacagctacccggcgttttccccgatgctggttgagtggcttaaagagggctggctgctggcgtcggctgagatgcagcacagcgaactgcgcggcggcgtgttgctgctggccctgctgcattcgccgctgcgttatataccgcctgctgccgcccggctgttgaccggcattaaccgtgaccgtctgcaacaggactttgtgcagtggacacaggagtcggcggaatcagtcgtgccggatgcagacggtaaaggcgcaggcacaatgacggacgcctctgacaccctgcttgcccgctatgccaaaaacatgaccgcagacgcccgtaacggcaggcttgacccggtactgtgccgcgaccacgaaatcgacctgatgatcgacattctctgccgccgccgtaaaaacaacccggtggtggtgggcgaagcgggcgtgggcaaaagcgcactgattgaagggctggcgctgcgcatcgtggcaggccaggtgccggacaagctgaaaaacaccgatatcatgacccttgacttgggcgcattgcaggccggggcgtcggtgaagggtgaattcgaaaaacgtttcaaagggctgatggcggaggtcatttcctccccggtgccggtcattctgtttatcgacgaagcacataccctgattggcgcgggcaaccagcagggcgggctggatatctccaacctgctcaaaccggcgctggcgcgcggcgagctgaaaaccatcgccgccaccacctggagcgagtacaaaaaatacttcgaaaaagatgccgccctgtcgcgccgcttccagttggtgaaggtcagcgaacccaacgctgccgaagccaccattattctgcgcggtctgtcggcggtctatgaacagtctcacggcgtgctgattgatgatgacgccttgcaggccgctgcgacattaagcgagcgttatctctccgggcgtcagttaccggacaaagcgattgatgtgctggataccgcctgcgcccgtgtggccatcaacctgtcgtcgccgccgaagcaaatctcggcgctgaccactctgagccaccagcaggaggcggaaattcgccagcttgagcgcgagcttcgcatcggactgcgtaccgacacatcacggatgacagaggtgctggtgcagtatgatgaaacgctgacggcgctggatgaactggaagcggcctggcaccagcagcagacgctggtccgggagattatcgcgctgcgccagcagttactgggcgtggcagaggacgatgcggcgccgttgccggacgcagataccgtggaggatacgcagccagagtcagagtcagaacaggataataccggtgccgtaccggctgatgaggccgacagagaacaaccggaagagaccgctgaaacagtttccccggtacagcggctggcccagctcactgccgaactggacgccctgcataacgaccggttgctggtctccccgcacgtcgataaaaaacagattgcggcggtgattgccgaatggaccggcgtgccgctcaaccgcctgtcacagaatgaaatgtcggtcatcaccgacctgacgaaatggctgggtgacaccatcaaaggccaggacctggcgattgccagcctgcataagcatctactgaccgcacgcgccgacctgcgtcgtccgggacgcccgctcggtgcgttcctgctggctggccccagcggtgtgggtaaaaccgaaaccgtcctgcaactggcagagctgctctacggcggtcgccagtacctgaccaccatcaatatgtccgaattccaggagaaacacaccgtctcgcggctgattggttcgcctccgggctacgttggctacggtgaaggcggcgtactgaccgaagcgattcgtcagaaaccctactcggtagtactgctcgatgaagtggaaaaagcgcacccggatgtgctcaacctgttctaccaggcgttcgataagggcgaaatggcagacggtgaaggccgcctgattgactgcaaaaatatcgtcttcttcctgacgtccaacctcggctaccaggtaatagtcgagcatgccgatgacccggaaaccatgcaggaagtactgtatccggtgctggccgacttcttcaaacctgccctgctggcgcgtatggaagtggtgccgtatctgccgctgtcgaaagagacgctcgccaccattatcgccggaaaactggcccgtctggataacgtgctgcgcagtcgctttggtgcagaagtggtcattgaaccagaagtgacggacgaaatcatgagccgcgtcacccgcgcggaaaacggcgcgaggatgctggaatcggtcatcgatggcgacatgctaccgccgctctcgctgctgctgttgcagaaaatggcggctaacacggcgattgcccggattcggttgtcggcagtggacggcgcatttacggcagacgtggaagatgctcagaacgacgagtccgtcacaaaggatgaaacggttttatga

SEQ ID NO: 11336 - DNA, 1353 bp, Escherichia coli
atgaatagtaacgtactgacacaaactatcgttaccggcagtgacccgcgcgggctgccggaattcagcgccatccgcgaggaaataaacaaagccagccacccgtcacagcctgagctgaactggaaactggtggagtcgctggcgctggcgatttttaaagccaacggtgtggatttacacaccgccacctactatacgcttgcccggacacggacacagggactggcgggattctgcgaaggtgcggaactgctggcggcaatggtaagccacgactgggataagttctggccgcagggcggcccggcgcgtactgaaatgctggactggtttaactcccgaaccggcaatattctgcgtcagcaaatctcctttgcggaatccgacctaccactgatctaccgcacagagcgggcattgcagcttatctgcgataagctccagcaggtggaactgaagcgcgttccgcgcgtggagaatctgctctattttatgcagaacacgcgtaaacggcttgaaccccagctgaagagtaacactgagaacgccgcacagaccacggtcagaacgctgatttatgccccggaaacacaggcatcttccacaccagaagcggtagtgcctcccctgcccggcctgcctgagatgaaagtggaagtgcgcagtctgacagagaatcccccacaggccagtgtgataaagcaaggcagtacggtaagagggtttatcgcagggatcgcctgttcagtggctgtcgcctcagcattgtggtggtggcaggtctatccggtgcagcagcaactgttacaggttaacgacaccgctcagggcgcagcaacggtgtggatggcctcacctgaactcgaaaactatgagcgcaggctgcaacaacttcttgatacctccccggtacagccgctggaaaccgggatgcagatgatgcgtgttgccgacagtcgctggccggaaagcctgcaacagcaacaggcctcgacacaatggaatgaggcactcaaaacccgcgcacagagtagcccgcagttgcgtggctggttgcagacccgccaggacttacatgcttttgcagatctagtgatgcagcgcgagaaagagggactaaccctttcctatatcaaaaatgtcatctggcaggcggagcggggactggggcaggaaacacccgttgagtctctgttgacgcagtaccatgatgcccgtgcgcagaagcagaatacagatgcgctggaaaaacaaattaatgagcgactcgaaggcgtgttaagccgctggctgctgctgaagaataacgtcatgccagaggcggcaaccggtaccacggccgaaaaataa

SEQ ID NO: 11337 - DNA, 915 bp, Escherichia coli
atggctggtttaaggaataacaacaacacacagaatgcacagtgggctgattatgtgggtgacattcttcggggggctcagccgataaaccagctagtacctcagcacccttatcttaacgacgtcccactcattgatgagttaaggcatcagaacactcatcatgttattcccttgacacttgatgttgcaaaaaaaatactcagcccaataacatcatttgattacattcattttatcactacacatccttcaggtataaaagatacactcgcctggttagttaacgcgggtaaattaatgactgagtttgatgacaatgggaaaattatatttaaccttaatgccttaaagtatacaaaagcaagttactttgaaatacttggagagaaatatataaaaatcacaacatccagcccctggcttttagaaaagctcggtaaatatattttctcttcacgagcgcctcaagttctggaactcgctattggctggcgaggagctttatctgaatcaataaaaggagttaagttctgtatctggttttcagtagcctggagaaccatagaatttattatgagttcagagcgagatctggttaattttcttggcgatttttcaatggatgtggccaaagcagttatagccggtggtgttgcaaccgctattggaagtctggcttcttttgcctgtgttagctttggctttccagtaattcttgtcggaggagcaattttactgacagggatagtgtgtacagttgttttaaatgaaatcgatgctcaatgccatttatcagaaaaattaaaatatgcaattagagatggactaaaacggcaacaggaacttgataaatggaaaagggaaaacatgactccatttatgtatgttcttaacactccacccgtgatatga

SEQ ID NO: 11338 - DNA, 843 bp, Escherichia coli
atgtcaaatacataccagaaaagaaaggcaagtaaagagtatggtttatataatcaatgtaagaaactaaatgatgatgaattatttcgcttacttgatgatcacaattccttgaaaaggatttcatctgccagagtattacagttaagaggtgggcaagacgctgttagattggcaattgagttctgctctgataaaaattatatccgtagagatatcggagcatttatactcgggcaaataaaaatttgcaaaaaatgcgaagataatgtttttaatattttgaacaatatggcattgaatgataagagcgcttgcgttcgagctacggcaatcgagtcaacggctcagcgatgcaagaaaaacccaatttattcacctaaaatagtagaacaatctcaaattactgcttttgataaatcgactaatgtcagacgtgctacagcatttgctatttctgttatcaatgataaagcaacaattccactattgattaatctgttaaaagatccaaatggagatgtcagaaactgggccgcatttgcaataaatatcaataaatatgataatagtgatattagggattgttttgtggagatgcttcaggataaaaatgaggaagtccgtattgaagcaataatcggactttcctacagaaaagataaaagggttttatctgttttatgcgatgagttaaaaaaaaatactgtttatgatgatatcattgaagctgcgggtgaattaggtgataaaacgctacttcctgttttagatactatgttgtacaagtttgatgacaatgaaattataacttccgctattgataagctgaagcgttcatag

SEQ ID NO: 11339 - DNA, 939 bp, Escherichia coli
atgctcgaccggctggaaagtgaaatcctggctgaccgggtgagtgaggaaagccgccgctggctggcatcgtgcggcctgaccgtggagcagatgaaaaaccagatggacccggtgtacacgccggcgcgaaaaatccacctgtaccactgcgaccatcgcggcctgccgctggcgctcatcagcacggaaggggcaacagcgtggtgcgcagaatatgatgaatggggcaacctgctgagtgatgagaacccgcatcatctgcagcagctcattcgcctgccgggtcagcagtatgatgaggagtccggcctgtattacaaccgccaccgctattatgacccgctgctggggcggtatatcactcaggatccgattggactgaaggggggatggaatttttatcagtatccgttgaatccggtcataaatgtagatccgcaaggtttggttgatataaatttataccccgaaagtgatcttatccattctgtagctgatgagattaatatcccaggcgttttcacaatcggggggcatggtacccccacatctattgaatccgcaacgcgcagtatcatgacagctaaagatctagcatatctaattaaatttgatgggaattataaagatgggatgacagtttggttattttcttgtaatacaggtaaaggacaaaattcatttgctagccaattagctaaagagttacatacaaatgtaataggacctgacacgctatggacgtggtgggggcgaggaactaatggtaagttaaaaatggatacagtgctaacagcaccaacgaaccttaattcaaataaggatctaatggctataacaacaaaagaccttggtaattggataacatatgggccatctgggcaccccatttctaatatgcaaggtacgccagaaaaacccagtgatataagatag

SEQ ID NO: 11340 - DNA, 1218 bp, Escherichia coli
atgttaacagcctcgctggcgctacgtaataaagaaaagtggaaaccgtactggaataaagcgttggtattcctctttattgcaacctttttccttgatggtataacccgttataaacacatcatatctatactaatgattattacggtaatctatcaagtttctcgtgctccgggaacatttaaagtactctataaaaataatcttttttatagtgtcctggcactatcactcattcttttatatgctacttttatatcacctgatctgaaaatcagttttaaagaattcagtaatacggtacttaaaggatttttggcctatagtttacttatacctgcattattaaaagatgaagataatgaaagcattggtaaaattgtactatactcattagttaccggacttggcttacgttgtcttgttgaacttattctttatattcaggattataataaaggaataatgccattttccacctatgaacaccgtagtatttccgattcaatggtgtttctgtttccagcattattaaacctttggcttatcaagaaaacctcttataaaatagcattcgtaatttttagtgcagttttcttatttctgctattaggaacgctgtctcgtggtgcatggctggcagtattcatagtgactctgctatggttaatcttaaatcgtcagtggaaattattgatgctgacttccatcgttatttctgttgccgcagtgggtgtatttacctataaaggtgatcatgctggtaaagacaggcttatttataaacttcaacagaccgacagttcttctcgctataccaatggtactcaaggtacggcgtggacattaattatggaaaatcctcttaagggatatggctacggcgatgatatttaccatgcaatatataataagcgtgttgtagattttccgtcatggaagttcaggcaatccattgggccacacaacgttgttttgtcaatttggtttgcagcgggtttggctggactactcgctttactttatctgtatggctctattatcaaagagacagctaatgcaacgtttaaaacagttgtcgtcactccttataatggtcaattactactatttttaacgcttgtaagcttttatattattcgaggtaacttcgaggaagttgatctcaaaccaattggcttgattgttggtttactgttagcaatgcggaataaataa

SEQ ID NO: 11341 - DNA, 1143 bp, Escherichia coli
atgattaaaaaaataatatttaccgtcacaccaatattttctataccgccaaaaggagctgcagcggttgaaacatggatttatcaggtcgcaaaaagactttcgattccagtaactatcgcctgtattcgaaacgaaggttacccaacctacacaaaagtaaatgatcactgtgatattcactacattggttttagtcgagtctataaacgacttttccaaaagtggactcgacttgatcctgtgccatattctcagcgtattttaaatacccaacctaaaaacactgatccgaaagactctgttattgttatccacaatagcatgaagctgtataaacagattcgtagcagaagccctcacgcgcagctagttatgcatcttcataatgctttcgagccaggtgagttagacaaaaatgcaaagataattgttcctagccagtttcttttcgatttctattcggaaaaaatgcctgatgcaaatattgctattgtgcctaatggtttttgttctgaatcgtatgaacaaaataatactgaagatttgaggcagaaactgaacattgatgcaaatgataccgtgttattatttgcaggaaggatatcaccagataaaggttgcctgatgcttatggaggcttttaatcagctgaataagatacaagataacctcaaactggtgattgtcggagatccttttgccagtaaaaaaggcgaaaaagctgaatatcagaaaaaagttctggatgcagcgaaagctattggagcgcaatgcattatggcgggtggacagcctccagagcagatgcataactattaccgtttagcagatttagttgttgttccttctcaggtagaagaagctttttgtatggtagctgttgaagcgatggcggcaggtaaaccagtgcttgccagtcaaaaaggtggaattagtgagtttgttctggaaggaattacaggctatcaccttgcagagcctatgacatctgaaagtattctcgcggatattaagcgcgttttggcggatgctgacagagctcaaattgctaaaaatgcccgaaattttgttttctcaaaatatagctgggaacatgttactcagcgttttgaagcacaaatacaagactggtttggttaa

SEQ ID NO: 11342 - DNA, 315 bp, Escherichia coli
atggatgacaccagccgggacccggcaataaccgaagatgaaatcagggcgctgcaattttctgccggggatgtagcggaaatagagcagacgattctctcttttgtcgatgcctgccacacccgtaaagtggcgatggtggtgggtagcaccattaacaccctcaaagatcgcgatggtaaacggtggggaaacctgccggatatttattgcgcttatcttatccgatgtctggtttttcgcggggaattagtgggatacggcgatttgtttcgtatgcgctatagcgaaattaagcgaccggttaccttatga

SEQ ID NO: 11343 - DNA, 921 bp, Escherichia coli
atgacaaacttcacgaccagcacgccgcatgatgcattatttaaaacctttctcacgcaccctgacactgcgcgggattttatggagattcacttacctaaagatttacgtgaactgtgcgatctcgatagcttaaaactggaatccgccagctttgtcgatgaaaaattgcgggcgctacactccgatattttatggtcggtaaagacccgcgaaggcgatggctatatctatgtggtgattgaacatcagagccgcgaggacattcatatggcctttcgcctgatgcgctattccatggcggtgatgcagcgccatatagagcatgataaacgccagccgctaccgttggtcatcccgatgctattttatcacggtagccgtagtccttacccctggtccctgtgctggctggacgaatttgccgacccgactaccgcacggaagctttataacgccgtgttcccgctggtggatgttactgtcgtgccagacgacgagattgtgcagcatcgcagagtcgccctgttggagttgatccaaaagcatattcgccagcgcgatctgatggggcttatcgatcaactggtagtattactggttacagagtgtgctaatgacagccagataactgcgctgttaaattacattttactgactggcgatgaagcgcgttttaatgagtttatcagtgaacttacccgtcgaatgccacaacacagggagcgaataatgacgattgcagagcgaattcataatgatggatatataaaaggggagcagcgcattcttcgattgttgttgcagaatggggcggatcctgaatggatacaaaagattaccggactttcggcagagcaaatgcaggcattaaggcagcccttgcctgagcgtgagcgctattcatggctcaagagctaa

SEQ ID NO: 11344 - DNA, 2304 bp, Escherichia coli
ttgctacaggtcggtgtattaggcacgggtgaactgaatattaccaccggaggtatagttaaagcgcgtgatacacagatagctctcaatgacaaaagtaagggcgacgtgagggtggatgggcagaactctcttcttgaaacattcaatatgtacgtagggacatctggtacgggtacgttaaccctgacgaataacggtacgctgaatgtcgaaggtggagaagtttacttaggtgtttttgagcctgctgtaggaacgctaaacattggtgctgctcacggtgaggcggcggcagatgccggatttatcaccaatgcgacgaaagtggagtttggtcttggcgaaggcgtttttgtctttaatcataccaataacagtgatgccggctaccaggtcgatatgctgattacaggtgacgataaagacggaaaagtgatccatgatgcaggccatacggtgttcaatgcagggaatacttatagcggtaaaacgctggtcaatgacggcctcctgaccattgcgtctcatacggcagatggggtaacgggcatggggtcgagtgaagtaaccattgcaaaccccggtacgctcgacattctcgcatcaacgaacagtgcaggagattacacgctgaccaatgcgctcaaaggcgatggcttgatgcgagtgcagctgtcatcctccgacaagatgtttggctttacccatgcaacagggactgaattcgccggtgttgcccaactgaaagacagtaccttcactctggaacgcgacaacaccgctgcgcttactcacgcgatgttgcagtctgacagtgaaaataccacatcggtaaaagttggagagcaatccattggtggactggccatgaatggaggtaccatcattttcgatacggatattcctgctgcgacgctcgcggagggatatatcagcgtcgatacgctggttgtcggcgcgggtgactacacctggaaaggccgtaactatcaggtaaacgggacgggcgacgtgcttatcgacgtgcctaaaccgtggaatgatcccatggcgaataaccctctgacgacgctcaatttgctggaacacgacgatagccatgtcggcgttcaactggtgaaggcgcaaacggttattgggtcgggtggctcattaacgttacgtgatttacagggcgacgaggtggaagcggacaaaacgttacacattgcgcaaaacggaacggtggtcgccgagggtgattatggattccgcctcacgaccgcaccaggtaatggtttgtacgttaactatgggctgaaagcgctgaacatccatggtgggcaaaagctgacgttagccgaacatggcggagcctatggcgcaacggccgatatgtcggcaaaaatcggtggtgaaggggatctggcaatcaatacggtgcgacaggtttcgctttccaacggtcagaacgactatcagggggcaacctacgttcagatggggacattacgtaccgatgcggatggtgcacttggcaacacccgggaactgaacatcagcaacgcggccatcgtcgatcttaatggatcgacgcagacggtagagacattcaccgggcagatgggttcgactgttttgttcaaagagggggcgctgacggtaaataaaggtgggatcagtcagggtgaactgacaggtggcggaaacctgaatgttacagggggaacgctggctatcgaggggcttaatgcacgctacaatgcgttaaccagcattagcccaaatgcggaagtcagcctcgataatactcaggggttaggcagaggaaatattgccaatgacggtctgttaacgctaaaaaacgtgactggcgaactgcgtaatagcataagcgggaagggtatcgtgagcgcaaccgccaggacagatgtagagttggatggcgataatagccgctttgtggggcaatatacccggaaagacggaacgcgcattgaaacggaaggcgacggaaatgtgcaaacgcgacttggggtgaaaacctacctgaacagccatcaccagcgtgacgatggtaaacagcgtgagttccagccttacattgaagcgaactggatcaacaatagcaaagtctacgccgtgaagatgaatggtcaaaccgtaggccgtgaaggtgcgcgtaatctcggtgaagtacgtaccggggttgaggcgaaagtaaataacaaccttagcctgtgggggaatgtcggtgtgcaactaggtgataaaggctatagcgatactcagggcatgctgggagtgaaatatagctggtaa

SEQ ID NO: 11345 - DNA, 423 bp, Escherichia coli; identical to SEQ ID NO: 10874

SEQ ID NO: 11346 - DNA, 1713 bp, Escherichia coli; identical to SEQ ID NO: 10868

SEQ ID NO: 11347 - DNA, 288 bp, Escherichia coli; identical to SEQ ID NO: 10867

SEQ ID NO: 11348 - DNA, 1026 bp, Escherichia coli
atggctatttctgcatatattggcatacccggctcaggaaaaagttatgaagccgtttgcaatgtcattattccagcatttaccagcggccggagagttgtgacgaacatttatggtttacaaaaagataaaatcaccgaacgttatcctgatgcaacgggagaaattattgttgtggataatgatgatgtgcttaaagcagatttctttccttttaaaggtggggaagggagtttttgccagtttggtgatttaattgttattgatgaagcatggcgaatcttcggtagcgataaggatatgacggctgagaagaaatcatttattgctgaacatcgtcattttacgcaccctgaaacgggtattagctgtgatttggttattgtaaatcagtcactttctaatattgctcgctttctgaaagacaaaatagaaacaacttaccggatgcgcaagctgaaagcgttaggcctgaataatcattactgcattgacgtatattcaggccacaaaatctataaaagcaacctcgtcaccagttatcgcaataaatataaccctgatatttttgaactttacaaaagctatgaaggaaataacggtaatgaaaagcagacagataaacgccagagcatctggaattctggcaaagtcaggttctttcttgtgctttttccattgatgtttatcgggtcaggctggctgatttactcatttttcagcacgtttggccgaagcgatccctctccagatttgactacaacagatgtacgtgatgcggccatgtttcgttcttccgctgttactccagcatcagatactccctcagaaccagctgaaccgccactttcaaccgagtggcgtatatcagggagaatgaccagtgaaggcagggcgtttgtgattcttgttaacggtgccggtgttttgcgtgccgttcctgcatccagttttaattacaaagggatgttgatgagcggaattattgatggtgagcgtgtgacgctttatacggggaaaaaataa

SEQ ID NO: 11349 - DNA, 249 bp, Escherichia coli
atgtctgtaaaaaataaggcgcgtgaccgacttcccggtggccgccttaagtcttatcgtcgtgtaggttcacattttgccagttgtgccagatggtttgataaatcgccgtcctggtatcgcaatatgatgatgaccaggcctgagcgccgtgaagtcagaaggcttctcaatcaggtaatgcgtggtcatgatgctgacggcattgcttttccggtcagtcatcgtccgtttgtttattggtggtga

SEQ ID NO: 11350 - DNA, 1209 bp, Escherichia coli
atgaaacttgcattaatcattgatgattatttgccccatagcacacgagttggggctaaaatgtttcatgagttaggcctggaattgctgggcaaaggccatgatgtaactgtaattacgcctgacatcactttacaagcaatctattctgttagtatgattgatggtataaaggtttggcgtttcaaaagtggacctttaaaggatataggtaaggctaagcgtgccataaatgaaactcttttatcttttcgtgcatggcgtgcattaaagcacctcattcaacatgatacatttgatggtatcgtttattattccccctctattttttggggagacttggttaaaaaaataaaacagcgatgccagtgcccaagctatctggtcctaagggatatgtttccacagtgggtcattgatgcaggtatgttgaaagccggttcgccaattgaaaaatatttcaggtattttgaaaaaaaatcatatcaacaggctgaccggattgggttaatgtctgataagaatcttgagatatttcgtcaggctaataaaggttatccatgtgaagttttacgtaattgggcctcaatgactcctgtgtgtgccagcgatgattataattcccttcgccaaaaatacgatctaaaagataaagtcatttttttttatggaggtaatattgggcatgctcaggatatgacaaacttattgcgccttgcgcgcaatatgatgcgttatcatgatgctcatttcctgtttatagggcagggtgatgaagttgacctgattaattctcttgctgcagaatggaatttaactaatttcactcatctaccttcagtgaaccaggaagagtttaaattaattttatctgaagttgatgttggcctgttctccctttcgtctcgccattcttcacataatttcccggggaaattactagggtatatggttcaatcaatcccgatccttgggagcgtgaatggcggtaatgatctgatggatgtaattaataagcacagggccgggttcattcatgttaatggtgaagatgataaactgttcgaatctgcacaattgcttcttgcagattcggctttaagaaagcagttaggtcagaacgctaatgtgttgttaaaatctcaattttcggttgaatcggcggcacatactatcgaagtccgactggaggcaggagaatgcgtttag

SEQ ID NO: 11351 - DNA, 372 bp, Escherichia coli
atggttttgaattataatttgcaggatgttgttagttttattggtcgaattccgagagccgatgtttattctctcttgataaaatcaaaagctcttcttttcccaagtaaattagaaacttatggtttaccattaaaagaggcgcggcaactaggtgtatttattgtcgcatcgaagttagattacgcaactgaagtattggagggatacgaatataaaagattatgctcgccagatagtgctaaagaatgggcttcggctataaaggaaattatagaaaataagattgatgtcggaaatacagtcactagagataatattaaagagagcgatttgttttctgattttattaaaagtaaaataatggagtga

SEQ ID NO: 11352 - DNA, 573 bp, Escherichia coli
atgcaaaaacttgaaaaccggtgtgatctgctgctcacccagcatcagaaatggatggcaagtgtaacccggtttattgtcgctcacggaatgggctctccgcatcttcatggttatcatcgcctgaccctggcccacttttttctgccggaaaaaggcaccatcatctcggtggcaccacagggactctatcaggtagtcaacccggcaacgccaccgttcattcctgccattcaggaagggttaatgaccagcattcagactcatgaaatcatgttacttacacattttaacctaggtggtgttttactcagtgaactacatcgtctgggagaaagccgactggcaaacaggctgaacagtctgctccggcgttttgacgatcgcgatctctaccacaccctgatatggctgtgctggtatgatctgatgtgcgcccactccatgcagccctggactgaagagttaaagcataaatcacacgcagaacttgaaagctgggctgtggcgcgcaaacgggaaaagcgcgagcttgaactgatgattgacgagtacctgttatacgcctgttga

SEQ ID NO: 11353 - DNA, 570 bp, Escherichia coli; identical to SEQ ID NO: 7147

SEQ ID NO: 11354 - DNA, 384 bp, Escherichia coli; identical to SEQ ID NO: 7148

SEQ ID NO: 11355 - DNA, 411 bp, Escherichia coli
atgaacggtataaaaacggggctggggatcacgccgggtgagcacattatcagtgccgacgctgcgctcagcaggaagatccggcattgtttctgcctttcctgtcgtggccgcttgattttgcagacagatgctcagggggcgtggtttgagcacgatttacatgccctgagcgagcaacagaaggcggactgtgtggtcctgaatccggaaaagtcccacccttacattgaggatatggcgatgtttttatcgccattaccagtcgtgctggagtggcattgtgtgatgtgcgacaagttttttcccgggaagaagttctgtgaggcctgtggtacggggatttattgcagagcggtatgtacaaagtatgtttacaggtaccggtcagatttgctgctggacccctga

SEQ ID NO: 11356 - DNA, 678 bp, Escherichia coli
atgctgacccaaaacggcgtcccgatgagccgttatcgtgccggacggctgatgaaatacctgaacctgagcagttgtcagcccggaaaacatcaatacaaaaatgcctgtcaggagcatacgtgtttgccgaatctgctcgagcgtcagttcgctgtaccggagccagacagggtatggtgcggagatattacgtatatctgggcaggaaatcgctggtgctatctggcggtcgtcatggatctttttgcccgcagggttatcggctggagcctgtcagcgaatgccgatactgcactgataagcagtgccttgcggatggcgtatgaggtgcgtggtcagccgcgggacgtcatgttccatagcgaccagggaagtcagtatacaggactgaaatatcaacagcttctctggcgttacaggataaagcaaagtgtcagccgacggggaaactgctgggataacagtcctatggaacgcttcttccgcagtctgaaaacagaatgggtgccgacggatggttacgtaggcaaggacgaggcccggcaacaaattagcggttatatcctgaattattacaatagcgtcaggcctcaccattacaacggtgggttgacgccggaagaatcagagaacagataccgtttttactgtaaaaccgtggccaatattacttga

SEQ ID NO: 11357 - DNA, 882 bp, Escherichia coli
atggcgtcgccggaggtggcccgggattttgtctcgctgcatcttccggaggaataccgtcagttgtgtgatttatcgacgctgcggctggagccctgtacgtttgtggaccaggacctgaagcagtatgcgtgtgatgcactgttcagtatgaagaccgtcagcggtgaggatggttatgtctactgccttgtggagcaccagagtaccgaaaacgcgtatatggcgttcagaatgctcaggtatgcggtggctgcgatgcagcgacacgttgaggcgcataaggtacttccgctggtgataccggtgctgttctaccacggtgagcgcagtccgtatccgtacagcatgaactggctggatggcttttctgacccggatattgcggctaaaatctacaccagagcgttccatctggtggatgtgacggtgatggatgacgatgaaattatgcatcaccgccgtctgggggccctgacgctgctgatgaagcacagccgcagccgtgaccttatgttacagatggacaggctggttcagctgatacaggactccctgaatgaagaactggcacaggtactgtttcactatctgctgaatggcagtgaacatgtgacggtgacgtttttgcagacgctggcgcagcgtctgccccagcacgaggacaacattatgacactggctgaacgcattgagcagaaaggtattgccaagggcattgagcgaggactggcacaggggattgagcagggtaaactggaagggaagctggaagggaagctggaaactgcctgcaatatgctgaatgccggaatggaccgtcagacggtgctgcagatgaccgggctttcaaatgaccagctgaatatgctgaaacactga

SEQ ID NO: 11358 - DNA, 483 bp, Escherichia coli
atgaaaaaattagcgatcatggtcgcgaccagcactatcctcgcgatgagctcctcgcatgcagcgttcacagctagtggtaacaccggtacaacaaaactcaccgttaccgaacagtgccaagtgatggtcaccggatccgccagcaccaagacgcgcggagaactcatcgatggggcccgtgtgggagccctgagccttaacgcgagagggtgtaacaccgagcatgcagcgctgcgcgctcaagcagacaactaccacaatggcaagatcgtactgctacgtgaagaccaacaagcgcggataaatgtgcgcttggtggcatccgatgggagccaatggactaacgacggcgcaaccacataccgcgacgctgccggggactggggcgggagcttgtacgtagtcgtggacggggacaatactagcaaccaggccgggtcctacacgctgaacatggacggtggctactgggtgagttga

SEQ ID NO: 11359 - DNA, 375 bp, Escherichia coli
atgaaacatcggccaccgggaagctatactgtcgataaattaaacggaatcaagaggaactatggaaaactgggttatgaggggctggaatctcagtgcgttgatgctgacaggctcgaaaagcgaataaaggacattctcagtgtggtaagtcgcgcaccaagggaaagaattcccgtatcctgcccacccggagtgagacaaaaggtgcttatcgttgcatatttcagtgataaaatttcagccgataaaattatggctccccataagaaaaataacatcgaaaggactaaacagtttaacgggctctggtcttacaggctacgactgaaacaaatcattctggacaaaaaaagaaacagggcatcggtgtaa

SEQ ID NO: 11360 - DNA, 336 bp, Escherichia coli
atgccagatacacgatggacgcttgagcaaaaaagacaacatgttggcgcatggcgggccagtggactttcccggatggcgtactgcgaacagcacaatatcccccataaatccatgcgctactggccgaaagatatcgcccgggccgacaggaaggcgcatggacccgccttcatcccggtcagcgtatccggacttccggagagtcgggggacaactgcgactgcccccgctgacgaaccggtttcgttatatctgcccggtggtatccgactgtgctgccgggcagcgcaactggctgatgtattcagggcgcttcgccatgctgacacctga

SEQ ID NO: 11361 - DNA, 756 bp, Escherichia coli
atgagtgataacctgttaaacaaactgacccaactgaaactcccggcgatggccgggagcctgatacggcagcgggaaacgcctcagacctacgacgaactgtcgttcgaggaaaggctgacgctgctggttgatgacgagcttctgagcagggaaaacagccgtgtggcacggttgagaaaaaatgccggcctgaaatatcaggcaacaccggaagggctgcgctatccggcctcaagaggtctgcgggctgaacagatgagggaactgctgaacgaccactacataacccacaggaaaaacctgctgataaccggtccgacaggatgtggcaagagctggatagccaatgcgctgggcgaacaggcatgtcgacagaaacacagcgtccggtactgtagaaccgggcgattactggaacaactggctcagggacgtgttgatggcagctggctgaaatatctgaaacagttgcaaaaaatacaggttctaatcctggacgatctggggctggaacagttaagtaacgcccagtgtaatgaccttctggagctcatagaggatcgttacggacaaagcagcacgatagtggtaagtcagttcccggtagataaatggcatggtctgatggagaacccaacaacagcagatgccatcctggacagactggtacataactcacaccgggtggtccttcagggagagtcactgaggaaaaatcccccggtagtggaaagcagcgaagaaacgcgttaa

SEQ ID NO: 11362 - DNA, 951 bp, Escherichia coli
atggaagaaaagcctgacccgattttccatgctgattcatatggttaccgaccaggcaaatcagctcatgacgctctgaaacaatgtgccatccggtgctggcgttatagctggatactggaagtggacatcagtgcgttttttgaccatgtgagacatgatctggtgctcaaagctctggaacaccacgggatgcctaaatgggtcatcctgtactgtcgacgctggatggaagcgccaatgcagagttgtgaaaatggagaattaataacccgaacacgaggcactccgcagggcggggtcattagtccgctacttgctaacttgttccttcactatgcatttgatttgtggatggaaagagaatatcggggggtaccgtttgagaggtacgctgacgatattgtagtacattgttcacgaatgagtgatgcaacaaggctgaagaacaggttatcggagcgcttctcggaagtcgggctgatcctgaatgcagggaaaacgaatatcgcctacattgacacgtttaaaaggagaaacgtcgcaacgagtttcacctttctcggatatgacttcaaagtgcgtacgctgaagaatttcaaaggcgaactgtaccgaaaatgcatgccgggtgcgtcaaatgcagcaatgcgcaaaataacagaaacaatcaagaagtggcgtatacatcgctcaacagctgagagtttgctggattttgcgaggcgctacaatgcgatagtgagaggctggatcgagtactacggaaagttctggtccagaaatttcaactatcgactgtggagtgcaatgcagtcacgtctgctcaagtggatgcagtctaaatacagactttcgaaccggagggctcagcgaaagctgacgctggtaaggaaggagtatccgaagctatttgtccactggtatttactacgtgcatcgaatgagtga

SEQ ID NO: 11363 - DNA, 138 bp, Escherichia coli
atgcaactggatacgttgtgtaagcagatctgctgtggcttcatcattctcatcattaacgaccgtgaacagcgagcgcgcagttttaaccacggtctccaggcccagaacaagattctcaatcatgttttttgctga

SEQ ID NO: 11364 - DNA, 351 bp, Escherichia coli
atgcccgtgaatgaagacacaaaacgtcagatcgatatgaaaaatgcggccctgggggcagctgatgtccttcggggactggccaacagcgaccggctattgttgatgtgtcagttaagcctgggggaagcgaatgtgaccgagctggaagcggcggtcggtatcactcagccgaccctgtctcagcagctcggtgtcatgcgtcgcctgaagctggtcgagacccgacgggcaggtaaaatggtatattaccgtatcggtgataatcggatcatgacgttgttaaataccttatatgatctctactgcccgcaggcaggaactggtaaaggaagcaataacaacgaataa

SEQ ID NO: 11365 - DNA, 1659 bp, Escherichia coli
atgaaaatagtgattgttggtggtgttgccggcggtgcatccgctgcagccagggctcgtcggttatcagaggatgtcagtattgttgtgtttgaacggggaagcgatgtctctttcgccaactgtggattaccttatcatataggcggaaaaattcctttaaggcggtcactgattctgaaaaccccggaggattttaaatcccgctttaacatagacgtccgtatatgtcatgaagtgacgtcattagacccgattaataaaacggtgacagttaaaaatctgacttcaggggagatctatagtgaagaatgggatcgtctgctcctcagtaccggtgcagctccggttgtcccccccttgcccgggctacaggaagagggcgtctttacactccgaaatcttactgacatggatgctatcctagggtggattgagcaacataacgtcactcacaccacgcttgtcggggggggatttatcgggcttgaagtgatggaggctctgagcgaacaagggattagcgtgaccttgcttgagatgggggaacaggttatggctccggttgatcctgaaatggcatctgccctgcatcaggaaatccgcagtcatggcgtggatctgcgtctcagaacggcgctcaccgaggtacagcggacagagacgggattccgcgttgcactgtctgacggtggatttctgcagaccgacatggttattctcgccatcggggtaaaacctgagaacagccttgccacaggcgccgggctcgcagtgggtaaacggggaggcataagcgtcaatgcctgtatgcagacaagtatccctggcatctacgccgtgggggatgcagttgaaacacctgatcttgtctttcaggaacctgctattgttcctctggcagggcctgccaaccgccagggacggattgctgctgataacatgctcgatcatcacagtctttaccacggcagtcaggggacatctatttgtaagatattttcgctgagtattggcagcgtcggggcgaatgaaaagcaactgaaagctcatggcacccgatacgagaaggtttacgtccatgccgctgatcatgccggttactacccgggggcaacaatgatcagtctgaaactactgttcagccccgataccggtagaattctaggggctcaggcatcagggaaaaaaggtgttgataaacgcatcgatgtcctatctgtcgcacagcgcgcggagcttacagtcaacgatctcgaacatcttgagctgacttatgctccaccttttaacagtgcaagggacgtcgttaaccaggctggtatggtagcgacaaatgtaatgaaaggagatactgtcatctgtcatgtcagcgatgtgttacaacgggaaccgggcagttattgtttacttgatattcgttctcctgcagaactgaaacaatttggtgaatatcctggcgcgctatccatccctcttgattccctgcgggagaatcttgataagttgcctgaagataaagagattattatagggtgtcagagtggcctgcggggacatgtagcataccgtatgcttcaggcccacggcttccggacatataatctgagtggtggctttataacctggcaggcggttatggaatcaatgagtcaataa

SEQ ID NO: 11366 - DNA, 162 bp, Escherichia coli
atggcacctcatcttccagattcattgaaaacatattatatgggtaagagtaaactgaccgccgtatgtagccattatgccagtattggtaacgtaggtgcccccctatctatatctatatctatttttgtaaaaccggaggtaacagaccagacggtttaa

SEQ ID NO: 11367 - DNA, 246 bp, Escherichia coli
atgtttatcgtggaatcgtatgctgtcgccataataatgtgttttattaccatgatttgctggggttcatgggcgaatacaactaaacttgtcagcaataaaaatgggagtttcctctattctattgggattattcaattggattattgctgtgttctttgttatttgccttcacgctgggttctatgggcgaagccggtcgcagttttatacctgatattcagcaggcgagcagcagtagtctga

SEQ ID NO: 11368 - DNA, 369 bp, Escherichia coli
atgaaagataacaacacaaccgccaccccagaagcctggaaaatgcgttttctggccaacgggacatccggcacatggttttacactgacgacattgcagtcactgacgcgcggcttcgcgcgcacccggatgatgtggaggttatccctctctgccggatacagccccgccagcattcccatgaacaacatattgaagaactccgcgcagccctggcccggatgctgcatatgcatcatatgatgctggaaaccacgcattacagggaaaacatcaccgatgcccgttgtatccgtgaaatgcatgaagctccattacaggcgctcaatattctggtcagatacccgcataaaaaggacgaggtgtga

SEQ ID NO: 11369 - DNA, 216 bp, Escherichia coli
atgtggctactgattttctggctttcatctccctttaatgtctcttccggtgatgcccggcagcccacactggcggtgcacagcctggcatttcataccgaacgggcctgtcgcgatgcattgcgcgccattaaaaaggagaatgttggcgaattttctctgcggggcgtttgtgtttctgacggaaatacgaaggaggaggctgagaactcatga

SEQ ID NO: 11370 - DNA, 273 bp, Escherichia coli
atgacggatattactgacagacatacacttcgccgtatgtcctggtcggaactcttcacggcagcacaggaagcggaatttcagcgtgattacgagcgtgccagaatagtgtggtcattcgccttacatgttgcaacaaccacgattaacaaaaatctggccatagctcatattcgacgctgcgatactttgttgcataaatcaaaaacagtacccggaaacaacacggggggccggtcagtgtgcctgagaccccaacatccccggagatga

SEQ ID NO: 11371 - DNA, 1035 bp, Escherichia coli
atgcgtaaacataacgaaccttccctggaggcagaacgcgatgcgttgcgggaggaagtcgcccgactgaatcaggaaatacgccgccggcagatggagctggatattctgaaaaaggcggaggaaatcataaaaaaagacccgggcatcagtatcagtcacctgaacaacagagaaaaaacaaagatcgctgatgccctgagacaaacatatcccctgacagaattactgcatgttctgggccttacccgtagcagttatttttatcaccgggctgcactgaaagccggtgataaatacgccacgatacgtacgatgctgacagatatatttaacagtaattaccagtgttatggctatcgtcgcctgcatgcgatgctcaggcatgagggggggcggctatcagaaaaggttgtacgcagacttatggtggaggaacagcttgtcgtcagccgtaaccgtcgtcgtcgctacagctcatattgcggagaaatcggaccggctccggataaccttatcgccagagattttaaggcggagcaacctaatcagaaatggctgacagatatcacggagttccaactccctgcaggtaaagtctggctgtcaccggtggtggactgcttcgatggaaaagttattagctggtctctcagtacacgccccgatgctgagctggtcaacactatgctggatagcgctgtcgaaacgttaaatgctggcgaacgaccggtgatacacagtgacagaggtgggcattatcgctggccaggctggctggaaagagtgaatgcagcaggtcttattcgctcaatgtcccgtaaaggatgttcacctgataatgccgcatgcgaaggttttttcggcagactgaaaacggaaatgtattatgggcgtaaatggtcgggcatcacgccagaaaagttcatgcagcatgtagatgcttacatcagatggtataacgagcggcgtataaaattatcgctgggtgcagtcagccctgaaatgtaccgccaacaatgtgggctggcataa

SEQ ID NO: 11372 - DNA, 462 bp, Escherichia coli; identical to SEQ ID NO: 6061

SEQ ID NO: 11373 - DNA, 141 bp, Escherichia coli
atgtcagaagaaaataaagaaaatggatttaatcatgtcaaaacattcaccaaaattatatttattttttctgtattagtttttaatgataacgaatataaaattaccgatgccgccgtcaatttatttatccagatttaa

SEQ ID NO: 11374 - DNA, 648 bp, Escherichia coli
atgtctaactttatcaatattcatgttctgatctctcacagcccttcatgtctgaaccgcgacgatatgaacatgcagaaagacgctattttcggcggcaaaagacgagtaagaatttcaagtcaaagccttaaacgtgcgatgcgtaaaagtggttattacgcacaaaatattggtgaatccagtctcagaaccattcatcttgcacaattacgtgatgttcttcggcaaaaacttggtgaacgttttgaccaaaaaatcatcgataagacattagcgctgctctccggtaaatcagttgatgaagccgaaaagatttctgccgatgcggttactccctgggttgtgggagaaatagcctggttctgtgagcaggttgcaaaagcagaggctgataatctggatgataaaaagctgctcaaagttcttaaggaagatattgccgccatacgtgtgaatttacagcagggtgttgatattgcgcttagtggaagaatggcaaccagcggcatgatgactgagttgggaaaagttgatggtgcaatgtccattgcgcatgcgatcactactcatcaggttgattctgatattgactggttcaccgctgttgaaccgccccgggtttcctggagagtattttatctgtga

SEQ ID NO: 11375 - DNA, 183 bp, Escherichia coli
atgggaaaaaatgatgtcaatcagattgctgacaacgtgcgcgttgttcatgccggatgcggcgtgaacgccttatccggcctacaaagtcgtataaattcaatgtattgcagtttattggtaggcctgataagcgcagcgcatcaggcaatcttacgcttgtcatcagtctcatgcccataa

SEQ ID NO: 11376 - DNA, 825 bp, Escherichia coli
atgcaaaacattactcagtcctggtttgtccagggaatgatcaaagccaccaccgacgcctggctgaaaggctgggatgagcgcaacggcggcaacctgacgctacgcctggatgacgccgatatcgcaccatatcacgacaatttccaccaacaaccgcgctatatcccgctcagccagcccatgcctttactggcaaatacaccgtttattgtcaccggctcgggcaaattcttccgtaacgtccagcttgatcctgcggctaacttaggcatcgtaaaagtcgacagcgacggcgcgggctaccacattctttgggggttaaccaacgaagccgtccccacttccgaacttccggctcacttcctttcccactgcgagcgcattaaagccaccaacggcaaagatcgggtgatcatgcactgccacgccaccaacctgatcgccctcacctatgtacttgaaaacgacaccgcggtcttcactcgccaactgtgggaaggcagcaccgagtgtctggtggtattcccggatggcgttggcattttgccgtggatggtgcccgacacggacgaaatcggccaggcgaccgcacaagagatgcaaaaacattcgctggtgttgtggcccttccacggcgtcttcggcagcggaccgacgctggatgaaaccttcggtttaatcgacaccgcagaaaaatcagcacaagtattagtgaaggtttattcgatgggcggcatgaaacagaccatcagccgtgaagagttgatagcgctcggcaagcgtttcggcgttacgccactcgccagtgcgctggcgctgtaa

SEQ ID NO: 11377 - DNA, 510 bp, Escherichia coli
atgaaaaaatggatgttagcaatctgcctgatgtttataaatgggatctgcgaagccgccgattgctttgatcttgcaggtcgggattacaaaatagacccggatttactgagagcgatatcatggaaagaatcccgttaccgggttaatgccatcggtattaatccggtaacgggatatggcagcggactgatgcaggtagattcccagcattttaacgaactggcccgctatggaattaagccggaacatctgacaacagatccctgcatgaacatttataccggtgcttattatctggcaatagcctttaaaaaatggggcgtctcctgggaggccgttggtgcatacaatgccggattcaggaagaccgaacgccagaaccagagacgtcttgcctacgcatcagaggtttaccggatttatacctggataaagagcagtaaaggcatccgggttccgaccacgaagaaatcactttcccaaattaacagtgtgcagaaaaattaa

SEQ ID NO: 11378 - DNA, 822 bp, Escherichia coli; identical to SEQ ID NO: 8707

SEQ ID NO: 11379 - DNA, 426 bp, Escherichia coli
atgcaatatgcgaaacctgtcactctgaacgttgaagagtgtgaccgtctctcctttctgccttacctgtttggcaacgattttctgtatgccgaggcgtatgtgtacgcgctggcgcaaaaaatgatgccggaatatcagggaggcttctggcatttcatccgcctgccggacggtggcggttacatgatgccggatggcgaccgttttcatctggtcaacggtgaaaactggtttgaccgcactgtgagtgctgatgccgcaggtatcatcctgacttcccttgtgattaaccgccagttgtggctgtaccacgacagcggggatgcgggactgacacacctttaccggatgcgcgatgcgcagttgtggagccacatcgaatttcaccccgaatgcaatgcgatttacgcggcacttgactga

SEQ ID NO: 11380 - DNA, 927 bp, Escherichia coli
atgccaaactggtgctcgaatcgtatgtatttttctggtgaaccggcacagatcgctgagattaaacgactggccagcggtgcagtcacaccgttttatcgccgcgccacaaatgaaggtattcagctgtttctggccggaagtgccggacttctgcagaccactgaagatgtgcggtttgaaccatgccccggactgacggctgccggacgtggtgttttatcgccggagaatatcacgttcacccgctggctgaagcacctgcaggacggtgtactgctggatgagcaaaactgcctgatgctgcatgaactctggctgcagagcggtactggacagcgtcgctgggaagggttaccggatgatgtcagggaaactatcactgtgcatttcaccgcaaaaagaggtgactggtgtgacatctggggtaacgaggatgtatcggtgtggtggaaccgtctgtgtgacaacgtactgtcggaaaaaaccatgccgtttgacctgctgacggttttgccgacccgcctggatattgaagtgaatggctttaacggcggtgttctgaacggtgttccttctgcatatcactggtatacagaacggtatggcgtgaagtggccttgtgggtatgacctgaatatcagcagtcagggggaaaacttcattcaggtagatttcgacacgccgtggtgtcagccggaaagcgacgttgttgcagaattaagccgccgtttcggctgcacgctggagcactggtacgccgaacagggctgcaatttctgtggctggcagttgtatgagcgcggagagcttgttgatgtgctgtggggggaactggaatggtcttccccgacagatgacgatgagctgccggaagtcaccggacctgcgtggatagtcgacaatgtggcgcattatggcggatga

SEQ ID NO: 11381 - DNA, 372 bp, Escherichia coli
gtgctggatgcactggagcaggcgttatgggcccgtcgaccgtccggcacggtccatcacagtgataaaggttctcagtatgtatcgctggcctacacacagcggcttaaggaagccggattactggcatcaacaggaagtacaggcgactcgtatgacaacgcgatggcggagagcatcaatggtctttacaaagcggaggtaatacaccgtaagagctggaaaaaccgtgcagaagtggaactggccacactcacgtgggtggactggtataacaatcgacgattgctggaaaggctgggccatactcctccggcagaagcagaaaaagcttattatgcttccatcggaaacgatgatctggcagcctga

SEQ ID NO: 11382 - DNA, 555 bp, Escherichia coli
atggcgacatggcaacttggcgggctgcctagcatggcaccgcaaaatgataatgctcctcgttcttccgttcctcagcctgtgcagtatcagcagcagccaaacgtaggtttaatggcgctacaggggctaagaggcgttgctgagattaatcagcaggcgcaaatttcccagcagctaaaagaatatcaggcacggttgggtagtgcggtagctaataatgatcgtgttggcgtgcataagttaatggcccagtatccccagtttatggctgattctcaaaaacagatgggattcattgatgctgagcaaaatcggcagaccgctgacgctgccatgaatctgcgtcttgcgtcacaaactggagatccactgaccatgcagaaggccattctgaaccgccccgggtttcctggagagtgttttatctgtgaactcaggctgccagatcatcgtttccgatggaagcataataagctttttctgcttctgccggaggagtatggcccagcctttccagcaatcgtcgattgttataccagtccacccacgtga

SEQ ID NO: 11383 - DNA, 204 bp, Escherichia coli
atggctaattacaattcattaattcgtctctctgaagttcaaaggcgaactggttatagcaaagcatggatttatcgtcttattagtcaggggaggttccctaaacaggtaaaaattggaagtcgggcaattgcttttgttgagtctgaaatagatgaatggattgagaagtgtatattagaatctagagacgaggtggcctga

SEQ ID NO: 11384 - DNA, 1215 bp, Escherichia coli
gtgaaactcaatgcccgtcaaatagacacagccaagccaaaagagaaggcttacaagctggccgatggtggcggtttgtatctcttggtaaaacctaatggaggtaaatactggcgacttaaatatcgtgtagatggtaaagagaagctattggcactaggtgtgtatcctgaggttactctagccgatgctcgggcaaaacgtgaagatgcgaaaagaggtatcgctggtggtatcgatccgatggaagcgaaacgagaggaaaagattgcccgggaaacgcagttaaacaacaccttcaaagatattgcccttgagtggcacagcagcaaattaaaaaaatggtctgctggttatgcttcagacatcctcgaagccttcaacaaagatgtgttcccttacattggcaaaaaaccaatcgccgaaatcaaaccacttgaacttctgaatgtgctgcggcgcatcgaggggcgcggtgctacagaaaaagccaaaaaagtgaggcagcggtgcggggaagttttccgctatgcaatagtcactggtcgcgcagagtataaccctgcaccagaccttactagcgcgatgcaaggccatgaatctaatcattaccctttccttacagctaaagaattacctgattttttcaaggcattgtccagttactcaggaagcgcattggttgttatggcggctcgtctactgattatcaccggcttgcggactggcgaactacgtggcgcattatgggatgaaattgatttcaacaaggctatctgggagatacccgcttcacgtatgaaaatgcggcggcctcatattgtgccattgtctgatcaggctctttcgcttattgggaagattagagaaataacaggcaattaccctcttatgtttcccgggcgcaatgatccaaggaaaacaatgagtgaggccagcataaaccaagtgtttaagcgcattggctacgctggacgtgtaactggtcatgggttccggcacactatgagtacgattttgcatgagcagggctataacaccgcgtggatagaaacgcagctcgctcacgttgataagaactcaattcgtggcacatacaaccatgcgcaatatctggatggaaggcgggagatgcttcaatggtatgccgactatatggattctctcgagcatggcggaaatgtggtgcatatggtgtttgaaaaacacgcatga

SEQ ID NO: 11385 - DNA, 1056 bp, Escherichia coli
atgaaaaagagcactctggcattagtggtgatgggcattgtggcatctgcatctgtacaggctgcagaaatatataataaagacggtaataaactggatgtctatggcaaagttaaagccatgcattatatgcgtgataacgccagtaaagatggcgaccagagttatatccgttttggttttaaaggcgaaacacaaattaacgatcaactgactggttatggtcgttgggaagcagagtttgccggtaataaagcagagagtgatactgcacagcaaaaaacgcgtctcgcttttgccgggttgaaatataaagatttgggttctttcgattatggtcgtaacctgggggcgttgtatgacgtggaagcctggaccgatatgttcccggaatttggtggcgattcctcggcgcagaccgacaactttatgaccaaacgcgccagcggtctggcgacgtatcggaacaccgacttcttcggcgttatcgatggcctgaacttaaccctgcaatatcaaggaaaaaacgaaaaccgcgacgttaaaaagcaaaacggcgatggcttcggcacgtcattgacatatgactttggcggcagcgatttctccattagtggggcctataccaactcagatcgcaccaacgagcagaacctgcaaagccgtggcacaggcaagcgtgcagaagcatgggcaacaggtctgaaatacgatgccaataatatttatctggcaactttctattctgaaacacgcaaaatgacgccaataactggcggctttgccaataagacacagaactttgaagcggtcgctcaataccagtttgactttggtctgcgtccatcgctgggttatgtcttatcgaaagggaaagatattgaaggtatcggtgatgaagatctggtcaattatatcgacgtcggtgctacgtattatttcaacaaaaatatgtcagcgtttgttgattataaaatcaaccaactggatagcgataacaaattgaatattaataatgatgatattgtcgcggttggcatgacgtatcagttttaa

SEQ ID NO: 11386 - DNA, 786 bp, Escherichia coli
atgttgggtcgtattagaactttctttcatgacttgcaggaatggggatggatacctgtacgattcagcccagaaagagttttcagggcaccgcgtagcttgacttccctggttggaccagagcctcgtattgtggctgatgatatgtggtgtaaattacttcacgccggacagaacctgcaggagtcggatttaccaaactgtgttgcatatccttatttttatccactggagatggtcagagcactcagcgttctctggttatttggaggcctcagacgtgatgaaattctacgtatgcagtgtgggtgtatccgctggcaacagccagaagaaaataatgtatcccgtatctgtctgatagatgtacccgttagcaagacttacgcagcattcacaaagccagttgaccctattatcggggaatatatcgaacaatgggaacttgtctgtaacccccaccccctccaggaagattctaaaacaggtgaaagcgtccgttttttgttcatgcacagggggaaacgggtacacagtagttatattaataattcgctaatccctttgctatgcagaaaggcaggtatacctgagcaggatgccagaggtaaaatcaccagccatcgggcaagagccactatagccagtcagctttacaacgccagggaaccacttgatatttttgagctacagaaatggttggggcattcttcacctgaatctacccgacattatgtcgaaattacaccgacgaggttggcaggatcactggataaagctggttga

SEQ ID NO: 11387 - DNA, 912 bp, Escherichia coli
atgatgcaatctgaacatacagcgccttgtccgacaacatcactcagtcttcctgccctactttgggatacccgaccggagatctctgaaagcgagcttgcggcactggatacattggtcgaccacttccagcaaggaggtaaaaactggtcacctgatatacaaaaacggctttcccgccttcttttaccactacgcgacacgctaacaaaaatgcatgcggccaaggccccctacaattcatctattcacgatatagtcctggagatgcagcgcatccggaaaacatactgggcctggacacaagaagagtggttagaagttatttgcaacagcgaaggggaatttcgtcgacggtttggagccagaggcaactgtcggcaatatgttatagcgttagcatggttgctatgtgggtttgagcggctggaacactgtggcatattctatcaatatcggctctgtcttaaggtttttggccgacagagcaccgattttgccgtcagccagcttgacaatatgatgcaggttctgggatatgtgcctcgtgatagtcggaacaacggcatcagaaatgccatgtgtatggcaatgcttctgcaaagggatgctcaactagaccatatcaccgtgaccacgttgcaacagattgctgcaacgtgcccggattacctccgggaagcctcagctactctatcgcgtatactggctgcatcagggactattgaggaagggtttgattaccgaataacacaacgtcgccgtcctccccgcgaatataatgcaacagccgatgtaccaactaaatggctggtatggtgcaaacggtggcgtgctacctcagtacttcgcccttcatctattttgtccggttggtacgttttgctaaagtgtggtcagctggttagctga

SEQ ID NO: 11388 - DNA, 999 bp, Escherichia coli
gtgcacaagaaactgctggatgcgctgcctttcctgtcggccgatccttcagcttgccggtgggtgtgcctgcaggaggacctgctgtgtgctccaaacaccattgatgcctatgcccgtggcgtcaatgactggctcgctttctgtcactctgttgccctgacggctgctgtcgctggacgtgatacggtcgcactctatgtccgcagcctgcataccggtcgccagctggccgctgccactatccgccaccggctgacggtggtacgactgtacaacgattggctttgtgaggaggggatacgggagagaaatcctgtcagacgaggtgtctggaaaaacggagggaaaggaaaagctggtatagtgccgttgcagcggcggctaccgtggatcccggatgatgcggagtggttgcgctttcttgaggtagccggacaagctgatatccgtactcgttttatgctggcactggcctacgactgcggattacgcagagaagaactttgcacagtagctaccggagatattgacccttctcaacgcttgctcactgtgcgcgctgagcataccaaaaaccgctttggtcgggttgtgccctattctcctgtgacgggggaactctacacagcatggctcactgaacgtcgtatgctaagctcatctcgcggtccgttgtttctctcacgctctccgcgtaatcgggcagaacctattagcaactggacttggtcaaaagtagttcgcggtttagctattaaggctgatcttccactcatcagcacccacacattccgacatctttgtctgacagaactggcacgcgtggggtgggacatccacgaaattgctgcattcgctggccaccgtcgtatccagtcaactctgctctatattcatctcagcgcacgtgatctgagtagtcgtttcaattacacggtcgcatccttgcatacttgccgccttactgtactacaacagcaggatccttctccatga

SEQ ID NO: 11389 - DNA, 1122 bp, Escherichia coli
atgggagtaccgtggtttcagctgaagtcggtgaaatttccggagccggtcatcgccttctccagtaattacgcgctatacgcatcgatgtcgaacagggttatgtctcatctcgaggagctggtgccgggcgtggagcagtacagtattgatgagatgtttctcgacgtgcggggtattggcagctgcatcgatttcgaggatttcggccggcagctgcgtgaacacgtcaggaacgggactggcctgactatcggtgtcggaatggggccaaccaaaacactagcaaagtcagcacagtgggcttccaaagagtggccacagtttggtggcgtgctggcgttaacgctaggcaatatccgccgtacggaaaaactgctgtcactgcagccggtggaggaaatctggggggtaggccgcaggatctcaaagaagctgaacacaatggggataacaactgcactgcagctggcgcgcgcgacccctgtatttatcaggaaaaacttcaatgtggttctggagagaacggtccgggaactcaccggagaaagctgtatttcactggaggaagcaccgccccccaaacagcagatagtctgcagcaggagctttggggaacgtgtcacaacttatgaagccatgcgacaggcagtttgtcagtacgctgagcgtgcagctgaaaagctgcgcggcgagcgtcagttctgcaggcatattgccgtgtttgtgaaaacatcgccgttcgccgtaaatgagccctactacggtaatctggccagtgaaaaactgctcatccccacgcaggatacacaggacatcattgccgctgccgtcagagctctggacaggatctgggtggatggtcaccgttacgcaaaggcaggctgtatgctgaacgatttcgctcctgacggggtttcgctgttgaacctgttcgatgatactctgctccgaagcaacagcaatcagctaatgaaagttgtggacggtattaatcattcaggactcggaaaagtgtggtttgcgggccgggggattgcatctgaatggcaaatgaaacgggagatgctttcaccagcctatacaactcgctggtctgaactaccagtagcgaaattatga

SEQ ID NO: 11390 - DNA, 972 bp, Escherichia coli
atgaggaaagttttagctcgtggccgagttcttggcaacagcaattcagaatttgcgcgaatgcttgaaagcgatggcgatgtgaaaacctttactctcaaatctggtaaacaggccaaatttgtgaaaacggttgtgctaagcggtgagatcgaatcgaagacatttgttgattcatctgttaatggtcgcgaccaggcaatgttatcccctgagtcagtcagtgacatttcccgtaccataaaactgcagcagtttttccccgctattgggagagaggtcaacgggcgaattgagatcctggacggcacacgtcgccgggcagcctgcatttataacaatgttaaattcgaaatacttgttacaaaggacgatattgaactgtcagatgcacgacaactggcaaaagacatacaaaccgcacgtgagcatagcttgcgtgagctgggaaaacgactcgaagttacgtatggaaccagtatgacgaaggaagagattgctcaggcagaaaatctctctcctgcgaaagtgactcgtgcgtttcaggccgcagcagtgccagatgaaatggttgcagttttccctgtgataaatgatatttcgttgtcggattatcattttttactgaaactagctgaagaagcaaacaacaagcaaagatcagtaacagaactgatggaaaaagttcagcatcggttgaagaccatgccagattatccggcaattgataaaagcaaaattctggctgttatcagagctgagagcaaatcgctgatagttcgcccgacccgcacggttcaaactgagaagctgagagaattttcagatcgcaaccaatttgcaagaaagaaaattgattcaaagaaacgacttgttgtttatgagttttcccgcatttccgctgaggcacagtcggagatagatgaggcaataaaacgtattctggaaagacttcctgagtcaagtgagtaa

SEQ ID NO: 11391 - DNA, 732 bp, Escherichia coli
atgggcgagttaaaaacaacccatacgataatgacaatgacaataagtaccgcgaaaaaatcagtcaacattagtcaatccaatgaactgacagaagcagcttactacttgccgttgcaagccaagagggtgctatggttatgcctcattcagtgctatccactgaaagatgatcctgattcggtatcgccagtattcacagttcttgttgctgattatcaaaagtatttcaaagtgtctgttgatacagcgtcatctgatgttaaaaagggcgtcactgcactggctgaaagtagtgttgtgttttatcccaaagacggagagtttgacgagatcaaacggccctggctggctgaggctgggctaaaaaaagggcgcggaaaatggcaaattgaatttaattacaaagtcatgccctatctgatgggactgaccagccagttcaccacgtattcactctatgactgcggaaaaataaacagtgttagggtcattcgactgtatgaaagcctgtgccagtaccgttccagcggagtatgggttactactcaggaatggctgtcagagcgattcatgcttcctgaatcgcaaagatcaaacttcgctgaaatgaagagaacgtttatcaatccggcactgaaaaagataaacgcaaatacaccacttaaagccgcaatgacacagaatgaagatggcaggttagtcttcaccattgttgattcgaaaaactaa

SEQ ID NO: 11392 - DNA, 270 bp, Escherichia coli
atggatgaaaaagtatactttcgcctcagctatgaaacgatgaccggcgatacggaagacttcattaacgcatgtattgaacgggcaaaccgtgcggactgcaacgataccgatgcggagattgcccgcgcacgcagcaccattgaactctggtactgtctggcactcgcggggcgtgccccagacgacgtcgccgacagggatcatctgcggttcaccgaaatgctcctgcgcgccccgacagcagaacaacgcgcatgtcagctgtaa

SEQ ID NO: 11393 - DNA, 597 bp, Escherichia coli
atgtcagctgtaacctcccgtgggccgtcgccgctgcaacgacgggtgctgattgtgctggctgcccttgatgaaaaacggcctggccccgtgctgactcgggacatagaacgggtgctggagcgaagcggggaagccccggtctacggaccaaacctgcgcgcctcctgccggcgcatggaagcatcaggctggcttcgcacactgcgcgccccgaatctgcagctggctgtcgaactgacggacgccggccgggccgtggcacagcctctgctgctggcagaacaggaccgcctccgggcaaaacagcgcgcggcagaagtcgtcgtactgccgctggtcccggcatcaggtctgcccgcagacggcacttctgccactgatctggcggtggagctgaacggcatgacgtatcaggcctgccgtggggattttgtggtacgtctcgacggcagcacctgtctgcagttatggaacagagaaggcaaggtggtacgccgggagggcgatccgctggaagtggcgcagtggctgcaggcctgtcatgatgccggaataaaagttcgtgtacaggttaatgaaagtatcaccccgtaa

SEQ ID NO: 11394 - DNA, 348 bp, Escherichia coli
atgaaagcggatatatctgtaaagtattttctgaaaagcctgataccaggtttcattattcttacagttttttatctgggatggaaagataaccaggaaaattcaagaatgttttatgcgttcatcggatgcattatcagctccattacttttcctttttcaatgaagataatacagaaaatggtaataaggtttacagggaaagaagtctggcaaaaagacttctttactaatccagttggcggaagcttaactgtaatatttgaattattctgtttcgttatatcagttcctgtagttgccatttacttaatatttatattctgcaaaaccctttcaggaaaatga

SEQ ID NO: 11395 - DNA, 189 bp, Escherichia coli
atgaaaaaacaatctaaagaagtgaaaacctctggctctgaacatcgtgaaattatgatagaaattgatgcctctaaatcgacgaacggtaccggtggaggctccatcattgaagggtcatacactgtctatcgctgcgatggcggaagtgtcccctcgcgtccttttggccccccattctgtccttaa

SEQ ID NO: 11396 - DNA, 1116 bp, Escherichia coli
atgtctttgggggataaatttacatctggataccgtgggattaatgccttcaatagtggcgtgataaaacttcttgttgccagagaaaatgactggattgaagaaaaacttagtgccattttaactcaatcacctcgtattgatttcgaaccactcattgcgagtatagtttttgggcgtactgaggggaaaacttcattatttaaaaatgtggaatgtattgttcctggttgcagttttaaaattgaccacacgcacaatggtgcatccgtaagtgaatatattgactggaatgcaatttcatataagacattaccgcacgacccggcagagattctttttcagtctgtatctgaagtcgtcaacagaaatcaaggcggatactttgttgtgcgcctgtctggtggcatggactctactggcattcttctctcactaatggaggcagttgatgtaagcagaattattgccataacttatcggtaccttatggggacaagcaatcaagatgaagtatcagcaaggcatttatgtaaaatatttggaatcaggcaaataataattgattttgaacctcattcattatttcataggcttccttcaccagtgcctcctgttctaaatatgagaacaataaattttaaagtttatgaagaggaaagaaagcgtatcggaagtatctgtggagataattataccctgtttgatgggcatgggggggaccatgtattttgtgagaaaatcccgtttggaataataaaagagttatttttccatgggagtttgttaacctcatgccgtaagttattacagatagctcgccttcatggcataaatatgaaagatgtcttattaatgcatactaatagtatgcattatcttataactgaagcacagtgttatttttccaaagatgttataaaaaaccttcactatgacagaaaaacagtaagtgaagaaagaaagtcagcccttcaggaggctattcttgataatgggacgagcctgacgctgagtcttacggaaaacgatatattcccttttacagaccagaggatgataggctatggtctgaaactcagagttgaggagtcatttgatactacatcaaaatga

SEQ ID NO: 11397 - DNA, 684 bp, Escherichia coli
atgacttcattctactttaagccgaatatacatcatgtcaatattaataatgaaataactatccttgatgagatatctgatcgttatatccttctttcagaaaagcaatcaattctcttaaaagagtatatgagtgatggttctcataattatgtcggtgatacaatgaacctggaaggtataatttctaaggagtcgggtactcctttggcaaagagtactccgtctcctcagggggttggtatattgacctggaacagttatgtcagcactcggttgggtattgccagttttttttatatctctgaagcaataatgagaatgattcttgtccgaaaacgtctccagtcaaagggttttcaccattgccttgagcattgtcgttgtgcgcttagccagaagagttttccgtacatttccctgaaagataaattaattattgggcagaagttgagccagagtattaaaattgcggcaccgtttatcccgggcaaggttaaatgccttgagttttcacttgttttgttcgacatgttagtgtcaagaaaaatcagtcccacattatttattggattccagcgctatgattttctttctcatgcatggctggaaattgataatgaagtggttgcagaccaagataacctgaaaacaaaacttacaccaataattagagtgggataa

SEQ ID NO: 11398 - DNA, 1725 bp, Escherichia coli
atgaaaataaaaaatgtcatttgtgaattaaaatcaggggcaagtgcttactcttcggcctacaagctcatacgctcactgtatcccgcattcacattttcttttatcggtgtgtccattctctttattctggcttcggttcttggtgcattacttccttatctgctcaaaaagacagcggaggcgtatactttctctgaagggatattatctgcatttttcctgatcacaatgacctacgccgtcagctggacagtgaccgaagtactgaagaatatcagaggcattttttctgcgggaattctggcacaagcagatgcagcactaaccagtaacacgatggagattttactttctattagtttccggaaacaaaaggaatttgagccggcggtcctggctgcaaatattgatcgtggcgcgcaatcattcagtgcgctgacattatctgttttctggacactactcccaattactgtagaaatcagtatggctgtttattttctttatcagagtctgggttttacttattcacttattttctcaatttctgttataggtatgatttttcttgccttcagcatagcgatctttagtcgtcatatccataccgatataatgaatactcagaatggggtgtattcttatacgattgagcgacttgccatgccgttggatatccgaattaattcagctcatgcaaaagaaagagttcttcgccaggaaattcttaatcagtatgttaatacaattaagctgaccaataaaaaaatgggctttttactgtcactacaggcagtagctgtaggcgtattgcttgctatatccgtactggttctggttttttttaaaaaagcgtctcatattggaactggtgactttattatgattgtgggctatattagcatgctaacatttcagttgcgcacaatagccggagccagcattgacattcaacgccagattgtgtacctgaaaattcttctggaatataacagtatgcatcccgaaggggttatccctgatacagtaagctcccgcagcactgagcgtatttttgatgtgcgtaatcttggagcttttgctgacggcagactcctctttaataatgtgagcttcaggatccatgaaggtgaaatgtttgcactttctgcgccttcaggttttggtaaatccacaattctgcaatatttactcggtcttgataccccaactgagggcgatatttatttccgaggataccggattaacacagagttgagtgcgtctatcctggaggacgttgctgttgtgcctcaaaaagccgttctggtgcagggaactattcgtgataatattctgtatggaaccgatgacattcttcccgatgatgaactgttttgcatcctgaattcattggggttaattaaagaggactgcggagaacatttccttgctttcctagaccgggatattaatcctctgggtagtggtttgagtggtggagagatccagcgattatgcatagcccgcgccctagcccgtaagaaaaagattatcgtacttgatgaacccacggcctctattggcgaagaactcgcgataaagatcattacctatatccggcagcattgccctaccgttattattacaactcataatccacgaattctggagctcgccgatcatttttttgatggtatgtcaaagtcttgcgtcattgctggagaaggcagagaccaataa

SEQ ID NO: 11399 - DNA, 387 bp, Escherichia coli
atgaaattcgttagttcacaggaagtgattgagtttcatgaccgcttgatttcgcgtgatggtggcgtggcgggtatgccagaacccggtcgcgctgacgcgatcattcatcgtgttttgaacatgtatcattatgaaggtgtgacagatattatggatctggctgccgtgtatttagttgctattgctcgtggtcacattttcaacgatgcaaataagcgaacagccttgtttgttgcacaggtttttttaaaacggaatggtgtacatattattagttcacgtatttcgtttgatgaaatgcaaattatcgctttgaatgctgcaacaggagaatataactggaagatggtttctgaccatcttaaagccattattctaaattag

SEQ ID NO: 11400 - DNA, 225 bp, Escherichia coli
atgtttacatgtaactatagccatgctcgcgataacctggcctcgttgctcgagctggcggttgatgaaaatcagcctgttgagattcagcgccgtaaaggtggcgcggctgtactagttgataaagacgcttttgaacgataccgtaaagcggctcttgatgctgagtttgctgagatcatgcaaagtcatgggacggcctatacggagctttctaagcgatga

SEQ ID NO: 11401 - DNA, 717 bp, Escherichia coli
atgaacaatgtaaaattactgattgccggaagtgccttttttgccatgtcagcgcaagccgctgatagagtatcaattgacgttaaggtgactctggaagctgcagcttgtactccaatactaagcaacggcggagttgttaacttcggtagtcattcagtcaatagactttcaacgcagcactacacacagattggaacacgtaatattaatatgactataacttgcgaatccgctaccggcattgcgattaccgctcgtgatacacgaatggatagtatgaccaccggaaaagatagtgggggtcagagtggtgtaaaatataccttaaatggcggaggttatattagccagacaacgcgcttattcggcttagggaaaacaaaagataataaaaatatcggtagttatgccgtgttaattgatagcaacaacattagtgccagcaatggtagccagacgttagctgtatcaatagcaggtgcagatgccgtcataacagggcaaaaaagagcatggcaaacgctcaccgcttatccgcttgcagtcgatcaaagctattattacacctttgtaaaaccaggtgaaacaaccccaactcctgtaacgaacgccattataccgcttcaggtgagcgcatctatcgcgaatgatttaggcggttcagaaaaaatcgaacttgatgggaaagctgtgataagcgtagtctacttgtga

SEQ ID NO: 11402 - DNA, 546 bp, Escherichia coli
atgaaacggataataacaggatgcctgctgctgaacttcgccatggccgctcaggcagagtgtaatatctccagtagcatacaaaatatcgactatggcaaacgaagtgctgccatgcgccaagttgaccggggtaaaacaacacaattagcagacagaacaatcacgctggtaatgcaatgcgatcaggacgctcatattcgtgttcagttgaataccgctaatatttccaacaacggatttggatttggcccgaatggttcattaaatctgatcgccagcgatgcattttcaggtagtaacaatctcgacctggcgttagccagtggcaaaaatgacaatccgggcagcacaggaacagcatcaattagtacttcccccaataattggctggtgtttatgcaaaatggtcaagaagtggtaattgatagcggtaaaagcgttagcctcacactgacaatggctccagcttttaaggatgaaggggaactaaccgacatgacagatattacaggcaatctgacggtcctggtggaggcaaaatga

SEQ ID NO: 11403 - DNA, 1050 bp, Escherichia coli
gtgtctggaaatataggggcaaatccaagcacttatgcgcttggtttaaactggtctaactccattctgggtggtttcaacatcagtggctataaaacatatagttacgacggtgacaatgactcaagcaaccttaatattaactggaacaaagcgttcaaacacgccacggtttccgtcaactggcagcatcaacttagtgcttcagaaaataatgaagacgatggtgatctgttctacgtcaacatcagtattccatttggcagatcaaacaccgccacactgtatactcgccatgacgatcataaaacccactatggtactggtgtcatgggagtcgtctcagatgagatgtcctactatgtgaatgctgaacgagatcacgacgaacgtgaaacgagcttgaacggcagtatcagttccaatctccattacacccaagtcagccttgccgcaggagcaagcggcagtgatagccgtacttacaacggtacgatgtcaggtggtattgccgtacatgatcagggagtgaccttttcaccgtggactatcaatgacactttcgccatcgcaaaaatggataacaatattgcaggtgtcagaattacatctcaggcaggcccagtatggacagattttcggggtaatgccgtcattccatcaatccagccgtggcgaacatcaggagttgagatcgataccgccagcttgccaaaaaatgtcgatatcggtaacggcacaaaaatgatcaaacaaggccgtggtgcagtagggaaagtcggattcagtgcgataacacaacgccgtgcattactcaatatcacactttccgacggcaaaaaactgcccagaggcgttgcgattgaagatagtgaaggcaactatctgacaacatcagtggatgacggtgttgtattcctcaataacatcaaaccggacatggtgctagatataaaagatgagcagcaatcatgccgtattcaccttacattcccagaagatgcaccaaaagatgtgttctatgagacagcaacaggagagtgccaatga

SEQ ID NO: 11404 - DNA, 279 bp, Escherichia coli
atggataaaaagcaaattgaggccctgcaatctattattgaagaacaagatgaagctatcaggattctttcatatcgcactgatatgatactaaatatgctttctgcattaacggctgcgcttggtggtacaaaaacaaacgtataccgcgaagttgttattcaacagatagataaatttgaaaaaaccataccaggtattaatgctcatcttgcagaacaagagaaagaccatgctcttatggcaatttcttcagtagctctcccgaaagttgagtag

SEQ ID NO: 11405 - DNA, 402 bp, Escherichia coli
atggaatttaaagatttaccaatgccattccaggaaatggcagcgaatgtggttcgctctcaactggcgactcttgacctgagtactgtagaaaaggaaaccatcgatactatatccggtaacgtgcgtcgtgcctttataggtctgtatgaagagaagcgcctattcggcggacagaattcgcctgaaaacaagaatcaagcaaatgatgagaagctgaaacacattatcgccttacttttggaagacgcaaaacgtctacagcaactggaaccaaatgcaggcacagaggcccgcatttggattgccatgaaatcactcaaatgtgaaagcagtgattatttcaaaacaacaattaaaactactcaactttcgggagagctactgaagaaattgccataa

SEQ ID NO: 11406 - DNA, 1041 bp, Escherichia coli
atggctaacgcctggctcagattatggcatgacatgccaaatgaccctaagtggcgaacaattgccagggtgtcagggcagccaattgcaacagtgatggcagtgtatatccaccttctggtgagcgcgtcacgaaatgtcacgacatgtcacggcgtgtcactacgtggtcacattgatgtcacgacggaagatttagcaagtgcgcttgatgtgacggaagaagtaattgattcaattttacaggcaatgcaggggcgggtacttgatggagatttaatcaccggatgggaaaaacgccaggtactgaaagaggacaatggcaacgtttcacaaaccgcgaaatccccggcagagcgcaagagagcgcagcgcgagagggaaaaattacgaaaacagaatgaggggtgtcacgacgagtcacgcatatgtcacgacatgtcacgacgagtcacgacagataaagatacagataaagaattaaaccccacacataacgcgcacgtgcgcgagagtgctccgaccagtgagtcgagtggtacgccgttgcaggcagcagaacctgcatccctggatggactgagcgaacccatcgggaaatttccgatggtcgatgactggcatccgtcgccggattttcgacgacgggctgcgttgtgggggatggctttgccggagccggaatttacacctgctgaacttgccgctttccgggactactgggcagcggaggggaaagttttcacgcaggttcagtgggagcagaaattcgcccgtcacgtaaatcacgtcagggcgcaggttaagccagtcagcaagggggtaaaccatgcagcagcaccaggtggcaccgcatcacgggcagttcaggaaattcgggcagcacgtgagcagtgggaacgtgaaaacggatttatcagcgacggaaacggtctggaagctgtgggaactcatgggggaggtttattcgaaccgctggacccagaagaacggggccgcaccttcgaagctctggattgcacagattggcgcgatgactga

SEQ ID NO: 11407 - DNA, 423 bp, Escherichia coli; identical to SEQ ID NO: 8048

SEQ ID NO: 11408 - DNA, 213 bp, Escherichia coli
atgtctcacaaatgtaggttagcctcttacgtgccgaaaggcaaggggaagcaggctatgaagcagcaaaaggcgatgttaatcgccctgatcgtcatctgtttaaccgtcattgtgacggcactggtaacgaggaaagacctctgcgaggtacgaatccgaaccggccagacggaggtcgctgtcttcacagcttacgaacctgaggagtaa

SEQ ID NO: 11409 - DNA, 1047 bp, Escherichia coli
gtgcgggtattacttcgacctgttctggtaccggaactcgggctggtgatcgttaagccgggccgtgaatccatgccggtattccacaatacccgggtactggtggagccggaaccgaaaagcatgcgtaatctgccgtccggggtcgttcctgccgttcgccagccgctggcggaggataaatcattactgccatttttcagcgacgaacgagtgattcgtgctgctggtggcgctggcgcattgtctgattggttactgcgccatgttaaatcctgccagtggccacacggcgattatcaccacagtgaaaccgtcattcaccgttatggtaccggcgcaatggtgttgtgctggcactgcgacaaccagctgcgcgaccagacctccgaatcactcgggcaacttgctcaccaaaacctgtctgcatggatgattgacgtcatacgccatgcaatgaatggctcgcaggaacgggaattatcgctggctgaattatcctggtgggcggtccgcaatcaggtggcggacgcgctaccggaagcggtattacgtcgttcgctggggttgcgtgcggaaaaaatccgctcaatgtaccgtgaaagcgacatcgtaccgggagagcagaccgccaccagcatactgaagcagcgcacaaaaaatcttgcgccgctgcctcacgcccaccagcaaaacccgccacaggaagagacggtggtcagcattgccgttgatcctgagtctccggaatctttcatgaaacgacctaaacgtcgccgctgggttaacgagaaatacacacgctgggtgaagacacagccgtgtgcgtgttgtggtaagccagccgacgatccccatcacctgattggtcatggtcagggcggaatggggacaaaatctcacgatattttcacgctaccgctgtgtcgggagcatcacaacgagcttcatgcggatcctctggcgttcgaagaaaagcatggttctcaggttgatttaatttttcgttttcttgatcacgcctttgcaactggcgtgcttgggtaa

SEQ ID NO: 11410 - DNA, 360 bp, Escherichia coli
atgctcatagatttggttttaccttacccgccgacggtgaacacttactggcgacgccgtggcagcacatattttatctcggaggagggaaagcgttatcgccgggctgtggcgcttattgttcgccagcagcggctgaaattaagcctgtccggaaggctggcgataaaggtgattgcagagccaccggataagcgccgccgcgatctggacaatatcctgaaggcaccactggatgcgctgacgcatgccggactacttatagacgacgagcagtttgatgaaatcaatattgtgcgcggtcagctcgttcctggtgggcggctggggataaaaatcacagaactggagtgcgcatga

SEQ ID NO: 11411 - DNA, 690 bp, Escherichia coli
atgaataaccagtatttacagtttgtgcgtgagcagctcattatcgccaccgctgatttgagtggggcaacaaaaggtcagcttgaagcctggcaggagaatgccatgttcgatacagggcgttacaggcgtaaaaaaatccggtaccgcgatgaagtgaccggaaaaatgataacgcgggataatccaccaatcccgggaaaacaatcgctggcgaaggggacgtcaattcctctggtcagtcaggttgctttttctacatcatcatggcggcgggctgttttgtctcttgaagaacatcataaagcctggttgttgtggtgttacagcggaaatacttgctgggagtatcagatcgcgataacgcagtgggcatggacagaatttaagactcactctggtaccaggaaaattgcagggaagacacaggaacgcctgaaaaaattaatctggctggctgcacaggatgtcaggagatgggttataggacatgatatctaccagcaacaggagcttgcccgtctgtgtgggattaagcctgacaactggagccacaattatgtgagctactggcgtgaaatactcgacatttttatgaacctcgataccgaatctctgatttgcactgtgaaaaggagatctcaacaaaaagcggcatttttgcagcgagatattgcaaaagtcaattag

SEQ ID NO: 11412 - DNA, 765 bp, Escherichia coli
atggaagaacagcacggtaattactttataaaacgaattcagttgattggaagaggggcatttggctttgttgaacacgttaaggtttacaacctcaataaaggtgaatgcggggattatgctagaaaggttttagcacccgaaaaaccagagcttttggcgcaaatagagcagtttagaaggcgttttaaaagggaggttgtgtatcaatcacattgcgtacatagcaatattgttcctatttatttgtgcgatttgtttgttgagaatccatggttcattatggataaagcagaatgtgatcttgagcacgaaataacgaacaaccttcttacaacagatcaaaaaatttcaatagtgaaaatggtattagatggtgtagcttacatccatgccaaaggctatttacacagagatataaaaccctttaatgttttgcgatttagcgacggaacatacaaggtgtctgattttggtctggtaaaagatacgaatcccgaaggggataccactaaattgaccgagatcggtacccgtatgggaagtacaagatatatggctcccgagattttatataatgcagagtattcagttaagactgatgtttatgctgtgggacggttaattgaagacttaaatttagatgataaaaaaataaagcctatcatagctaagtgcacaaggatggataaagatgatagatatcagacaatagatgatgtggcgtttgattttgcgcattcttttttaaggagtgagtcatga

SEQ ID NO: 11413 - DNA, 744 bp, Escherichia coli
atgattcagctgatagcgacttcatcattctcgtatccaaaagaaccaggtagggtcaacgaagattcattgcttcctccaaaaattgtaggagacggcatcttatttgccgtagctgatggtgtaggttcatactctggtgccagttatgcttcatccatggcaatcgctgaactttcagcattgacaagtttatcttttgatgcagttccgaatgtatttgctgaagttaagcgaaaagttatgtcgttagctgaagttaatgatgagttcgataaagctgctactacacttaccttttgttatgtttgtgatagcggaattattattggtcatattggtgattgtcgcttgtattgcattggagaaaagaaagcatatcaattgacgaaggacgataccagacatcagatgttaattgatcagaatatttttaaacccagagatttgaagaataaaccgggaaaaaatatcttaacgactgccatagcctcaaatgttgatatggaatacgactgtgattttatcccgtggaaagatttgcctggtattaacgggttgtatcatctgtgtatcatgtctgatggagttcataacgtttgggaaaaacgccccagatttacatcaaatactatgagtaatagtcagaagttttctaatggtattttgcgtcgtatagagagagccggacctgatgatgacttttctttagtaagtataatggtgcgtgtgacgtcagattag

SEQ ID NO: 11414 - DNA, 270 bp, Escherichia coli
gtgacagcgcaggtgccgtataccgatgtctggacgcataaaccggtgcagttctatcccgggaaacatccgtgcgaaaaaccggcagaaatgctgcagcagataatcagcgcaagcagtcgtccgggagacctggttgcagatttttttatgggctcaggttcaacggtaaaagcggcactggcgctcgggcgtcgtgcgattggcgttgaactggagaccggacgttttgagcagacagtcagggaagttcaggatttaatcgtttga

SEQ ID NO: 11415 - DNA, 405 bp, Escherichia coli
atggctacatacggcggtcagtttacgcttaccctgatccgttcactgatcgacagcggtaaagactacgtggtgagcatgctggattcgctgggtaaactggctggcgcgaaaaccgaagcgaaaggcgcatatcctggctggcagccggacgctaattctccggtgatgcatctggtacgtgaaacctatcagcgcctgttcaacaagacgccgaacatccagattatccacgcgggcctggaatgtggtctgttcaaaaaaccgtatccggaaatggacatggtttctatcggaccaactatcaccggtccacactctccggatgagcaagttcacatcgaaagcgtaggtcattactggacactgctgactgaactgctgaaagaaattccggcgaagtaa

SEQ ID NO: 11416 - DNA, 435 bp, Escherichia coli
gtgttcgacggtgagctgagttttgccctgaaactggcgcgtgagatggggcgacccgactggcgcgccatgcttgccgggatgtcatccacggagtatgccgactggcaccgcttttacagtacccattattttcatgatgttctgctggatatgcacttttccgggctgacgtacaccgtactcagcctgtttttcagcgatccggatatgcatccgctggatttcagtctgctgaaccggcgcgaggctgacgaagagcctgaagatgatgtgctgatgcagaaagcggcagggcttgccggaggcgttcgttttggcccggacgggaatgaagttatccccgcttccccggatgtggcggacatgacggaggatgacgtaatgctgatgacagtatcagaagggatcgcaggaggagtccggtatggctga

SEQ ID NO: 11417 - DNA, 1053 bp, Escherichia coli
gtgaacatatatatcgggtggcttttcaaattaatccctttgattatgggcttaatttgtatcgcgttaggtggctttgtgctggaaagttcagggcaaagcgagtatttcgtcgcgggtcatgtgctgatttctctggcggccatatgcctggcattattcactaccgcatttattatcatttcgcagctcacgcgcggcgttaatacgttttacaatacattgttccccattattggctatgcggggtcaattatcaccatgatatggggttgggcactgttagcaggcaatgatgtgatggcagacgagtttgtcgccggccatgttattttcggcgttggtatgattgccgcctgtgtatcgacggtggcagcgtcatccggtcactttctgctcattcccaaaaatgcagcggggagcaagagcgacggaacaccggtacaggcttattcttcattaatcggtaactgcctcattgccgttcccgttttactcaccctgctcggtttcatttggtctattacgctgttacgtagtgctgacataactccgcattatgtcgcgggtcacgtattgcttgggttaaccgcaatctgtgcctgtctaattggccttgttgccacaattgtccatcaaacacgtaatacgttttcaactaaagaacactggctgtggtgttattgggttatttttctcggctcaatcacggtactgcaggggatatacgtcttagtcagttccgatgcaagcgcccgactggctcccggcattattcttatttgcctcggaatgatctgttacagcatattctcaaaagtctggctactggcactggtatggagacgtacctgttcgttagccaacagaataccgatgattcccgtcttcacctgcctgttttgccttttcctggcatcgtttcttgcggaaatggcgcagaccgacatgggatattttattccttcgcgagttctggtcggtttgggagcggtatgctttacgttgttctcaatcgtttcaatattagaagcgggttctgctaaaaaataa

SEQ ID NO: 11418 - DNA, 1608 bp, Escherichia coli
atgaaagcaattgacaatcagattagaaacatctcttcaagccatcaagataagcattcagataaagttaacagtcatcaacaccatggcaaggttgataaaacacatcgtgcaaagatagttgaatttgataaactggataatgattcgcaaatagataacgattttggcctgcatatcatctatttcctgcaacatggtcactggaaggtaaatgatcgtagtcaccagatggagaaagtatggttttataatagtgaaccttctatagatattcaagaatataatagattcgccgacaatactactgatacgtttatctttacaattataccagacaataaccatgtgttaaaattatcgtctcccattaccgttactgttgagtgtaagggcggttattattttattaattcctctggagataaatcagatataatttataaagttgatgggctttctatcatagcgagaaatttctttactcttcttagtggtaatttcaaacctgactggcgttgggatgtctctaaagagacgtttactaaggaaaagtttgatagctatgttaaatctgtgttttcaaaaatagacttctataaacagtgtggtgtgattaacccacaaaatgccaacacggcttattttggcgatacagatggaagagtaggcgctgtactttatgcattgctcgtttcagggcatataggcatcagggaaaagggttggagtttattatgtgaattattaaaacacgaagagatggcttcatctgcatacaaacataaaaataataaagtgctctacgatttattaaatacgagagacatgatcttgaatgagttgcatcaacatgtttttttaaaggacgatgcgataaccccttgtatcccccttggggatcatacaggcgatagatttagtactatttttggtgataaatatatccttactttgctaaattctatgcgaaatatggagggtaataaagatagccgtattaataaaaatgtcgtcgttctggctggaaatcatgaaatcaattttaatggtaactatactgcacgactagcaaatcataaactctctgccggtgatacgtataacttaattaaaacgctcgatgtttgtaattatgactcagaaaggcaagttttaaccagtcatcacggaataataagagatgaagaaaaaaaatgttattgtctcggtgctttgcaggttccatttaatcagatgaaaaatcctactgatcctgaggaattagccaatatttttaataaaaaacataaaaaacacatggatgatcctctattccatctaatccgaagcaatactttgaaacccacacctgtatatgctaattattttgataacactactgatttcagaccagcacgtgaacgtatcttcatatgtggggagacactcaaaggtgaagaccccagcaaatacattagacaaaaatatgggcatcatgggcccggggtagatcataatcaacaatttgataatggtattatggggctaaattccctgaaggaagcacgtgataaaaataataaaataatttattcctcagggcttagttgttttcaaccacattaa

SEQ ID NO: 11419 - DNA, 1623 bp, Escherichia coli
atgaaaattggaactgtggcaggcactaacgacagtacaacgacaatcgcaacaaatgatatggtgcaagagcatgttaccaacttcactaaagaactgtttgggtatattgcaaatggtataggtgatgatatatcaagtattgccaggacaatgctcggtgaggttgtggaaaaaatagatgattggcaaatagaacggttccaacaatctattcaagatgacaaaatttcatttaccatacaaacggatcattcagaaaaatatagtatgctatcgggcatgcgtgctcatattctacgtaggaataataattatcagtttattgtgacaattaatagcaaaaattacggttgctctcttgataataccgatgttaattggtgcagtattgtttatttacttaataatatgacagtaaatgataatgctaatgatgttgcagttactgagtcgtacaaacccatctggaactggaaaatatcgcaatataatgtatctgatattaaattcgaaacaatgataaaaccccagttcgctgacagaatctatttctccaattgtttacccgttgatcccacaagtaccagaccaacctattttggtgataccgatggctcagtcggtgcagttttgttcgcgcttttcgcaacgggacatttgggaatcatggctgaaggagaaaatttccttagccagttgcttaatatagaagatgaagttctcaacgtattgctaagggagaactttaatgagcaacttaacactaatgttaatacaataatcagtatcctgaacagaagagacattattttagaaagtcttcagccttatttagttattaataaagacgctgtgacgccatgtacgtttctgggcgaccaaaccggcgatcgatttagcaatatctgtggtgatcaatttatcatcgatttgttaaaacgcataatgagtatcaatgaaaatgttcatgtattagctggaaatcatgaaacgaattgcaatggtaactatatgcagaactttacgcgtatgaaaccactcgatgaggatacctactctgggataaaagattatcctgtatgtttctatgaccccaaatacaaaataatggcaaatcatcatgggataacttttgatgatcagcgaaaacgttacattataggaccgataacagtctctattgatgaaatgaccaatgctctcgatccggtcgaattagcggcaattatcaataaaaagcatcatgctataattaatggcaaaaagtttaaaactagccgggctatctcttgtcgatcctttaatcgttatttttctgtttcgacagattacagacctaaacttgaagcactattagcatgttcacaaatgttaggtataaatcaagttgttgcacataacggaaatggtggaagagaacgcataggcgaaacggggacagttttaggtcttaacgcccgtgacagtaaacatgctggaagaatgttcagcatgcataattgccaaattaaccctggtgcagggcctgagataaccactccctggaagtcttaccagcatgaaaaaaacagaaatggacttatgcctttgattagaaggcgcacaatgttacagctctga

SEQ ID NO: 11420 - DNA, 891 bp, Escherichia coli
atggctatggttgaaatgcaaaccactgcggcgctggctgaatctcgccgcaaaatgcaggcgcgtcgccgcctcaaaaaccgtattgcgctgacgctctcgatggcgacgatggccttcggcctgttctggctgatctggattttaatgtccaccatcactcgcggtatcgacggtatgtcgctggcgctgttcactgaaatgacgccgccgcccaatacggaaggtggtggtctggcgaacgctctggcgggtagcgggctgttaattttgtgggccacggtattcggtacgccgctgggcattatggcggggatttatctggcggaatatggtcgtaaatcctggctggcagaagtgattcgcttcattaacgacattctgctctctgcgccgtcgattgtggttggtctgtttgtttacaccattgtggtggcgcagatggagcacttctccggctgggcgggcgtgattgccctggcgttgttgcaggtgccgattgttatccgcaccaccgagaacatgctgaaactggtgccgtacagcctgcgtgaagcggcttatgcgctgggtacaccgaagtggaagatgatctctgcgattacgctgaaagcgtcggtgtccgggattatgaccggtatcctgctggcgattgcccgtattgctggtgaaaccgcgccgctgctgtttaccgcgctctccaaccagttctggagcacggacatgatgcagccgatcgccaacctgccggtgacgatctttaagtttgcgatgagcccgtttgcggaatggcagcaattggcctgggccggggtattgatcattaccctgtgcgtactgctgctgaacattctggcgcgcgttgtttttgcgaagaataaacacggttga

SEQ ID NO: 11421 - DNA, 282 bp, Escherichia coli
atggtgaattaccgtcttatatcactggcgctgacaaacagggatattgcgacaattcacagcaatatcgtgcaggaatacaacacccttaaagggtatagctggaaatggctgggtggggtgtcagtggcttttctggttatgttctgtgtgctcggatggggaatgaaaacaatactcgacaggaactacaacgccacagcggcggtgtatcagaaagttgtgacactggaagataaactggtggagaaacctgtcacggggaagagccggaaaaactga

SEQ ID NO: 11422 - DNA, 336 bp, Escherichia coli
atgcggctcgctgaacagcggactccattcggtcaccccgttttcctgcaacatcgtgccgaggatgcttttgatgtcctcgttctggaagatacggaagttctggcgcagaccggcacgccacagcggcgggtgcaccttcatgctgtacagcatctggtttttgtcgttctccccgagttcaaaccaggtcaccacgcctttcacccggcgctgtacttcatcgccctgccatatcgtcaggtaggccattttgtccagcacctgcgcaaattcaagggagagaaactgctggctgaccagggagagatcgagggaaaagagcgaagagagtga

SEQ ID NO: 11423 - DNA, 450 bp, Escherichia coli
atgaatcagtcgctcacccttgcttttttgattgccgccggaattggtctggttgtccagaacacgctgatggtgcgcatcacccagacctcctctaccattctcatcgccatgttgctgaactcactggtggggattgtgctctttgtttctattttatggtttaaacaaggcatggcggggtttggcgaactggtgtccagcgtgcgctggtggacacttatacctggcttgctgggatcgttttttgtcttcgccagtatcagcggatatcagaatgtgggagcggcgacaactattgctgtactggtcgccagtcagctgattggcggtctgatgctggatatcttccgcagtcatggcgtaccactacgggcgttgttcggcccaatttgtggcgcaattttacttgtggttggcgcctggttggtagccagacgctcattttaa

SEQ ID NO: 11424 - DNA, 276 bp, Escherichia coli
atggggtatgacacaacccaggatgtctgtggtcatggattccgggcgatggcatgtagtgcattaatagaatcaggtttgtggtcccgcgatgctgtggaacgccagatgagccatcaggagcgtaatggtgtacgtgctgcgtatatccataaagccgaacatctggaagaacgtcgacttatgctacagtggtgggcagattttctggatgcgaacagagaacaatgtatcagcccgtttgaatatgcaaagattaacaatccattaaaatag

SEQ ID NO: 11425 - DNA, 981 bp, Escherichia coli
atgagtcatcaacttaccttcgccgacagtgaattcagcagtaagcgccgtcagaccagaaaagagattttcttgtcccgcatggagcagattctgccatggcaaaacatggtggaagtcatcgagccgttttaccccaaggctggtaatggccggcgaccttatccgctggaaaccatgctacgcattcactgcatgcagcattggtacaacctgagcgatggcgcgatggaagatgctctgtacgaaatcgcctccatgcgtctgtttgcccggttatccctggatagcgccttgccggaccgcaccaccatcatgaatttccgccacctgctggagcagcatcaactggcccgccaattgttcaagaccatcaatcgctggctggccgaagcaggcgtcatgatgactcaaggcaccttggtcgatgccaccatcattgaggcacccagctcgaccaagaacaaagagcagcaacgcgatccggagatgcatcagaccaagaaaggcaatcagtggcactttggcatgaaggcccacattggtgtcgatgccaagagtggcctgacccacagcctagtcaccaccgcggccaacgagcatgacctcaatcagctgggtaatctgctgcatggagaggagcaatttgtctcagccgatgccggctaccaaggggcgccacagcgcgaggagctggccgaggtggatgtggactggctgatcgccgagcgccccggcaaggtaagaaccttgaaacagcatccacgcaagaacaaaacggccatcaacatcgaatacatgaaagccagcatccgggccaaggtggagcacccatttcgcatcatcaagcgacagttcggcttcgtgaaagccagatacaaggggttgctgaaaaacgataaccaactggcgatgttattcacgctggccaacctgtttcgggcggaccaaatgatacgtcagtgggagagatctcactaa

SEQ ID NO: 11426 - DNA, 393 bp, Escherichia coli
atgctcagtcctgataatgtcttcatcgcgattaaacctgttgacatgcgccggggcatcgacacactgacgcagtatatacaggatgaactccggtcgacatggcatgagggagccgccttcgtctttgttaacaaagaccgttcgcgtatcaaagttctccggtgggataaacacggggtgtggttgtgtacccgccgtcttcacaaaggcagcttccgctggccacgtgcaaatgatgctgcctggcacctcactcccgacgagtttaactggctgattgccggtgttgactggcagcaggttaagggacatggcctgacgaaatgggtctggcaaaatgaacctgaactgcgccctgaaaacacgcaaaacacactgctaactcactga

SEQ ID NO: 11427 - DNA, 330 bp, Escherichia coli
atgtcaaaaccccgatggaccattgaacagaaaaggcagcacgttgctgcctggcgcgccagtggtcttacacgtcagcaatactgtgaactcaacgatattcccttcacatcacttcgcgaatggccgcaggatgtcgcaaaagctgaacgccgggcaaatgaaccgaccgttcttcccgttcatattgcgccaccactgcatgctgatgtaccacagcccgtcacgaatgagccagtcacgctcttccttcccggcggagtacggatgtgctgtcagccgtcacaacttaccgatgtcttcagggcgctcaaatatgctcagtcctga

SEQ ID NO: 11428 - DNA, 276 bp, Escherichia coli
gtggattataccaccagttttgaactgccttttcgtctgcttttaacccgcacgtcacagctgattgctgtgctttgggaagaatgggatatcagccagaaaaatgtggtgtttaacgataaacgctttggttgcgtgtatagcctgaaggccagtctttccggcgtgcggatacattccggtatcatctgtctcaccgtattcgccggatggttgggaatgaaatacatcatcgccttggcagcagattgcccggaaagtgaaagcgctccgtga

SEQ ID NO: 11429 - DNA, 1872 bp, Escherichia coli
atgaaactacattttgaatctgaccttacctatcagcaaaacgccattacttcggtctgtgatttatttgaagggcaagagaaatgggagagcgaaatgactgtgctggccccagctcagggcgcactctcatttgaagccgcaacaggttcaatgcctgtaaacccacagatacccgaagatgatgttctgctgaaaaacctgaacaaggttcagttgaagaatcagcttccaccttcacctgtgctcgacagccatgattttactgtcgagatggaaacagggacaggtaaaacgtatgtttatcttcgcaccatgctggagctgaataaacgttatggcatgagcaaatttatcattgtggttccttccattgccatcaaggaaggcgtttataaaacactacaaatcactgaagaacattttaaaagcctctatgcgggaattccatacgaatactatctgtatgactcgtctaaacctgcggatgtgcgaaattttgcaaccagctctgttatgcagatcatggtaatgacagttggtgcgattaacaaaaaagacgttaataagctctatcagtccagtgaaaaaacaaccgttgacgatctggataagccaattgatctgatacgtgctacacgcccaattattattgtagatgaaccgcaaagtgttgatggtggcttaaatggtgcgggtaaaaccgcacttgatgctatgcacccaatgttcaccttacgctattcagcgacacatgtgcataaacatcatatggtgtatcgcctcgatgccattgatgcttacaatcagaaactggtcaaacaaattgaagttgccgggcttgaagtccagaatgcaagcaatagcccctatgtaaaactggtcagtattaacagtaagaagaatagcattagcgcgactgttattgttgatatagccgataaaaaagggggcgtgaatcgttctgagattaccgtgtatgacggtacggcacttgatgacgaaacggggcgtgatatttatcagggatacaggataagcgagatccgcacgggcaaagacggttatctgacgctggaaacgccttctaatacctactatatgcaagttggtgatgtcgtgggtgatattgacccgatgctcatccagcgtcatatgattaggcgtacaattcgtgaacatcttgataaagaacttcgcctgaattcccagcaaatcaaggttctcaccctgttcttcattgataaggttgatttctatcgccagactaatgaagaaggacttcgtgaaccgggtgaatatgctcgtatctttgaagaagaatatctaaaagcgatcaaaagcccagcatataaagatttgctcccttctcatccagaacatgctaaagacgttcatgatggttatttctccattgataaaaaaggtggatgggctgaaacaaccgaaagcaataatgcaggccgcgaaaatgcggaacgcggttataacctcatcatgaaaaataaagagaagcttttgagtttctcgaatccggtgaggtttattttttcacactctgctttgaaagaaggctgggataaccccaatgtattccagatctgtagccttcgagagatgggaagtgaacgagaacgtcgtcaaacattagggcgtggtcttcgcctgtgtgttaaccaagaaggtgaacgtgttcgtgatgacagcattaacattctgactgtcgttgccagtgaaaattacgaagcctacgctgaacgattacagtctgaaattgagagcgaaacgggtatccgttttggtatcatcgaaaaagatgcgtttgcccatctgatctttgatcctacccacgtaatatggacacaggcctaa

SEQ ID NO: 11430 - DNA, 1977 bp, Escherichia coli
atgaaaaaaataacttctgatatgacagaactacaatcaatgaatatcactgaagataatatcagcaaacttaactctttgtttcctgaagcatttaatgaaaacggtattgattttgacgttttaaaacagctcttgggtgaaaatgtagacgacaaagaagagcgctatggcctgaactggcatggtaagcgtcaggctcgtcagcttgctcttaccccttcccgtggcacattacgtccatgtaaagatgaaagcgttgattgggataacactaaaaacgtcatgatcgaaggtgataaccttgaagtgttgaagcttcttcaaaaaagctacgctggaaaagttaagcttatttacatcgatccgccttataataccgggaaagattttgtgtatccagataacttccaagataacatgaaaaattatcttgaaatcactggacaaactgaagatggaaatcgcttaagcacaaatacagaaaccagtggacgttatcacactgattggctaaatatgatgtaccctcgcctaaaattagcaagaaacttacttgccaactctggttttatttttatatcgattgatgaaaatgaacttcacaacctatgtggcatatgctttgagatttttggagaagaaaatttcatatcccttattgctaatactaacaatccaaaaggacggtctgacgataaattcatagcaacagctcatgaatatatattagtaatggcgaagaacattaactatgcaaaaacctatggctttgagcctgacgataaaataacaaagagatataataagacagacgaaaacggtgaaatattccgtgacatagatttacgtaaaactggtgatgctgaccgtagagaagatcgaccagatatgttttactatttttactatgatcaaaaaacaaacgaactatttatatctagagaccagaaaaaaaatgatttaattgaaattaaaccaattagagatgatggtactgatggacgatggcgatggggttttgatacagctaaatcgaaaattgatagtgtttatgctaagttcatgcccacaaaaaaaacgtggggaatcatggagaaagactatttatcaaaaagagatgcaataaaggctacctcttcatggacacataaagatgtaaatagtgaaagaggtagtgaacaatttattgagctgggattcgaaaaagaagttttttcaagaccaaaacctttgggtactcttttacgtatagtagaaatagctacacacccaaatgaaaaaggtatagcacttgatttttttgggggatcaggtacttttggtcatgccgttttcatggccaatgcaacaaagaatagaaagataaattttatcattacgcaactaccagaaccagttgttccagaaacaaaggagcagattgttgctgcaagcttcttaaataaaaatggaatgccattaaaaatttctgaaataactaaagaacgccttcgccgagcaggtaaaaaagttcgtgaagacaatccagaatggaaaggtgatgttggctttcgtgtgtttaaacttgatacatctaacatccgtccgtgggaagcgactgctgataccctttcacaacagattgatgcctatgtaagtccaatcctcgaaggccgtagtgaagaagatttactcacagagttgatgcttaagcgtggcattgacctgagtgtagacattgaaacccgtcagtttgatggattaaccgtttcttgcgttgacggtggcaaattgtttacctgctttgctaaacaaatccctgcatcttcagtagaagaactgaccaaggggatcatcgactggcataagagtttaaaagttgggaaagatacggtctgctatttccttgatgatgcgtttgaaaataacgtcgctaaaacaaatctttgcgccattctggaacaacacggcctgactaacctgcacagcctgtaa

SEQ ID NO: 11431 - DNA, 372 bp, Escherichia coli; identical to SEQ ID NO: 11381

SEQ ID NO: 11432 - DNA, 1170 bp, Escherichia coli; identical to SEQ ID NO: 5939

SEQ ID NO: 11433 - DNA, 654 bp, Escherichia coli
atgggacgctggcttgctggcaggctcatgaaagagctggggctggtcagctgtcagcagccgactcaccggtataaacgtggtggtcatgaacatgttgctatccctaactaccttgaaaggcagttcgccgtgaccgagccaaatcaggtgtggtgcggtgatgtgacctatatctggacgggtaagcgccgggcgtacctcgccgttgttctcgacctgttcgcaagaaaaccagtgggctgggccatgtcgttctcgccggacagcaggctcaccatgaaagcgctggaaatggcatgggaaacccgtggtaagcccggcggggtgatgttccacagcgatcagggcagtcattatacgagcaggcagttccggcagttattgtggcgataccagatcagacagagtatgagccggcgcggaaactgctgggataacagcccaatggaacgcttcttcaggagtctgaagaacgaatggatgccggtggtgggttacgtaagcttcagcgaggcagctcacgccataacggactatatcgttggatattacagcgcactaagaccgcacgaatataacggtgggttacccccaaacgaatcggaaaatcgatactggaaaaactctaacgcggtggccagtttttgttga

SEQ ID NO: 11434 - DNA, 1059 bp, Escherichia coli
gtgccgacgtggttgcaggcatggtacatccgcgacgaaacctattcggcggctcttgcggatttagtcaacgctcaattccgccaccccttcgcagcctactggggcaacggcaccacatcgtcatcggacggccagaacttcaaggccggcggtcgtggccaggctgccggccaagtgaacctaaagtacggtcaggagccgggtgtgcagttctatacccacatatccgaccagtacgctccttttcacaccaaggtcatcaatgccactgtgcgagacgctacacacgtcctggacgggctgctgtatcacgaatcagacctgcgtatcgaggagcactacaccgacacggcgggcttcaccgatcacttgtttgcactgatgcacctgttgggctttcgcttcgccccgcgaatccgcgacctggccgacaaacgcctgtatgtccacggcgatgccaaacattatccgactctcgccagtctgatcggcggcaacatcaacgtgaagcatattcgcgcccattgggatgaaatcctgcggctggccgcctcgatcaaacagggcacggtgacggcctcgctgatgctcagaaagctcggcagttacccgcgccagaacggcctagcggtggccttgcgcgaactggggcgtatcgagcgcacgctgtttgcgctcgactggatgcaaaatgtcgaactgcgccgccgtgtgcaaattggcctgaacaagggcgaagcgaagaacgcgctggcccgagccgtgtttctgaaccggctcggtgaaatccgtgaccgtagttttgaaaatcagtgctaccgcgcgagcggtctcaacttagtggtggcggcaatcattctgtggaacacagtctacctagaatgggcggtcaaagcgctgcgtgacacgggcaagaacattgacgagcgattattatcgcatctttcgccattgggctgggagcacatcaatcttaccggtgactacatctggcaccagaacaagcaggttgagcaaggcaagttccgaccattacgaatgcctggtgaggcttag

SEQ ID NO: 11435 - DNA, 1191 bp, Escherichia coli
gtggtggcaagtgaactgcacggcgagcagccgcaggcggtgccgggacgcagtggttcaggaaccacgctgaataaccactttgcggtaataccggcagaccggacatggcggccacagccgttgctgaaaccgctggtggacggcccgcagagcgccgtcgtgacgggaccggcaggcgaggaaatcttctgtgatgaacatggccgcgtgcgggtgaaatttaactgggaccgttataacccgtcaaaccaggacagttcatgctggatccgtgtggcacaggcgtgggcaggcaccggattcggtaacctggcgataccgcgtgtgggtcaggaggtgattgtggacttcctcaacggcgatccggaccagccgatcattatggggcgcacctaccaccaggaaaaccgcacacccggcagcctgccgggaacaaagacgcagatgaccattcgttcgaaaacctataagggcagcgggtttaatgaactgaagtttgacgatgcgacagggaaagaacaggtctacatccacgcgcagaagaacatgaacaccgaggtgctgaataaccgcaccactgatgtgataaacaaccatgccgaaaaaataggtaacaaccaggcgatcaccgttaccaataaccagatccagaacattggcgttaatcagatacagacgattggtgtcaaccaggtggaaacggtgggtagtaaccagattatcaaagtgggatcaaaccaggttgaaaaggtggggatcattcgtgcgctgacggtgggtgtggcttaccagacgacggtaggcggcattatgaatacctcggtggcgttgttgcagtcctcacaggtagggctgcataaatcactgatggtgggaatgggctacagcgtcaatgtggggaataacgtcaccttctcggtgggcaagacgatgaaggaaaacaccggacaaacagcagtttattctgccggtgagcatcttgaactctgctgtggtaaggcaaggctggtgctgacgaaggacggaagcatatttctcaacggtacgcacattcatctggaaggggagtcggatgtgaacggtgatgcgccagtgattaactggaactgtggtgccacacaacctgtaccggatgcgcctgtgccgaaagatttaccccccggaatgccggatatgcggcaattttga

SEQ ID NO: 11436 - DNA, 4233 bp, Escherichia coli
atgggcggcggaaaaccggcggcgcggcagggtgacatgacccgcaagggactggatattgtgcagggttcagcaggggtgctgataggtgcgccaaccggtgtggcctgctcggtgtgtcccacaaaaaaggacagtccgaactatggcagcccggtgaacccgctactcggtgcgaaggttctgcctgttgaaaccgacctggcactgcccggcccgctgccgtttattcttttccgcgcctacagcagctaccggaccaggacgcccgcgccagtgggcgtgtttggtcccggctggaaagcgcccttcgatatccgcttacaggttcatgagcgggaactgatactcaacgacagcggcggcaggagcattcactttgagtcgctgtttcccggcgagataagctacagccgcagcgagtcgttctggctggcaaggggcggagtgctgaaacaacacaaaggccatccgcttgcgcggctctggcgggcgttgccggaagcggtccgtctgagtccacacacctatatgatggctgtcagcacaaccgggcagtggctgatactcggctggccggagcgtgtgccggaggcggacgaggtgccgccgccggagccgcccgcataccgggtgctgacgggcgtggtggacggcttcgggcggacgctgactttccaccgggcggcggagggtgacgtggcgggcgcggtgacgggggtgacggacggtgcgggccgctgttttcacctggtgctgagcacacaggcgcagcgggcagaagccttccgtaaacagcgcgagtcttccttatcttctccagccggtccccgttctgcttcctcttctcaggttttccccgacacgctgcccgccggtacagagtacggtgccgataacggtatccggctggaggcggtgtggctgacacacgacccggcatacccggatgaacagccgactgcgccgctggcgcgctacacgtacacggccagcggagaactgcgggcggtgtatgaccgcagcgggacgcaggttcgcgggtttacttatgatgcggagcacgccgggcggatggtggcgcaccattatgcggggaggccggagagccgctaccggtatgatgataccggtcgggtgacggagcaggtcaacccggaggggctggactaccgctttgagtacggagagagccgggtaatcatcacggacagcctgaaccggcgggaggtgctgtacacggaaggcgagggtggcctgaagcgggtggtgaagaaggagcatgccgacgggagcatcacccgcagcgagtatgatgaggcggggaggctgaaggcgcagacggatgcggcggggcggcggacggagtaccggctgcatatggcgtctggaaagctgacttcagtgatactgccggacggcaggacggtgcggtatggctataacagccagttgcaactgacttcagtgacatatccggatggtttacgcagcagccggaaatatgaccgtcagggccgactggcagaagagacctcgcgcaacggtaacattacgcgctggttttatgatttttcccgcagtggcctgccctgtgcggtggaagacggaaccggggtgaggcggagaataacgcgaaaccgttacggtcaactgctggcctttacggactgctcggggtacacgacgcggtatgagtacgaccagtacggtcaacaaatcgccgttcaccgggaagaaggcatcagcacttacagcagttataacccgcgtggccaactgatcagtcggaaggatgcgcaggggcgtgaaacccgttatgagtacagcgctgcaggcgacctgacagcaacgatatcaccggacggtaaacgcagcgccaccgaatatgataaacgtgggcgtccggtgagtgtgacggaaggtggactgacgcgcagcatggggtatgacgccgccgggcgcatcaccgtgctgactaacgagaacggcagccagtccacgttccggtatgacccggtggacaggctgacggagcagcgcggctttgacggccggacgcaacgttaccagtatgacctgaccggaaaactcacgcagagtgaagacgaggggcttatcaccctctggcattacgatgcgtcagaccgtatcacccggcgcacggtgaacggtgaaccggcggagcagtggcagtatgacgaccacggctggctgacagaaatcagccacctgagtgaaggccaccgtgtggcggtccactacggctatgacgataaaggccgcctgacgggcgaacggcagacggtggagaacccggagacgggggagatgctgtgggagcatgagacggggcatgcgtacagcgaacaggggctggcgacccgtcaggagccggacggtctgccgccggtggagtggctgacgtatggcagcggttatcttgcggggatgaagctgggcggaacaccgctggtcgagtacacgcgggacaggctgcaccgtgagacggcccgcagcttcggcggggaggcatatgaacttgccaccgcctggaataccagcggccagctccggagcaggcacctgaaccttccgcagcttgaccgtgactacgactggaacgacaacggacagctaatccgcatcagcggcccgcaggagagccgggagtaccgttacagcgacacgggaaggctgacgggcgtccacaccacggcggcgaacctggatatcgatatcccgtatgcgacggacccggcaggaaaccggctgccggacccggaactgcacccggacagcacgctcacggcatggccggataaccgcatcgcggaagatgcgcactatgtctaccgccacgatgaatacggcaggctggcggagaagacggaccgcatcccggaaggggtgatacggatgcacgacgagcggacccaccactaccactacgacagccagcaccgcctggtgttctacacgcggatacagcacggcgaaccacaggtggagagccggtacctctatgacccgctgggccgccggacgggaaaacgggtatggcggcgggagcgtgacctgacggggtggatgtcgctgtcgcgtaaaccggaggtgacatggtacgggtgggacggtgacaggctgacgacgatacagaccggcaccacgcgtatccagacggtataccagccggggagcttcacgccgctcctgagaatcgaaacagagaatggcgaacaggcgaaggcgcggcaccggagcctggcggaggtgttgcaggaggacacgggtgtgacgctaccggcggagctggcggtgatgctgggaaggctggagcgggagctgcgtgcgggagcggtgagtgcggagagtgaggcatggcttgcgcagtgcgggctgacggcggaacagatggccgcgcagatggaggatgcatacatcccggagcggaggctgcatctttaccactgtgaccaccgtggactgccgcaggcgctcatcaccccggaaggcgaaacggcgtggtgcggggagtatgacgagtgggggaaccagcttaatgaggagaacccgcatcacctgtaccagccgtaccgtttgccggggcagcagtatgatgaggagtcgggactgtattacaaccgtcaccggtactacgatccgttgcaggggcggtatatcacccaggatccgatagggttgaaggggggaataaatctatacacgtatccactggtaccaatacgttacactgatccactggggttagaacgagttataagtgtatatgggcctcccgctccagaccgggcaggtgctgaaactcctcttgttcttactgatatgactggaggagtgactatttattatgatcctgaaacaggtgattcaatgacttttgatagtagcaatagaattgatcgtcgttctcaacgtggtgctggtgatccatatacaggtgaagtcgttggttgtgagacaaatgaatcaggaatatcggcagcatatggcacaacgaagatctatactacagatactagagcaagatggctacatggtgggggatcatcgttgcgcgatccttatgctcctcgacaaggctggaaaccaactatgggatgtacccgtgcacagaatgaagatgtagatgagttgtgtaagaaagtgacaagttggatgtattcgcatcctggagagagaattagatatgaacgttttaagacacgttaa

SEQ ID NO: 11437 - DNA, 219 bp, Escherichia coli
atgaacgttttaagacacgttaatgcgattaacatgggagtgtgcattctaatttgggttattggatgtgcaaatgctaaagttcttaaacgatgtatattacccgctcctgatggtggcgtagaaaaactatcaaaacccaacttacatggagtaattaaaaaagttgatttgaacacaaatgaagcggaaattaaaataaaagagggggggcagtga

SEQ ID NO: 11438 - DNA, 384 bp, Escherichia coli
atgcgtgatattcagatggttcttgaacgctggggcgcatgggcggcaaataatcatgaagatgtgacctggtcgtccattgccgccggttttaagggattaattccttcaaaagtaaaatctcgcccgcaatgttgtgacgatgacgctatgatcatttgcgggtgcatggcccgtctgaaaaagaacaacagcgatttacacgatttattagtagattattatgtatgtggtatgacattcatgtcactggcaagtaagcattgctgctcggatggttatatcgggaaaaggttacagaaggctgagggcataattgaagggatgttaatggcattagatatccagttagagatggatatcgttgttaataactctaattaa

SEQ ID NO: 11439 - DNA, 1083 bp, Escherichia coli
atgaaaaaattaacagtggcaatttctgctgtagctgcatcagtactgatggcgatgtctgctcaggcagctgaaatttataataaagacagtaacaagctggatctgtacgggaaagttaatgctaagcactacttctcctctaatgatgcagatgatggtgatactacttatgcccgtcttggcttcaaaggtgaaacccaaatcaacgatcaactgactggtttcggtcagtgggaatatgaattcaaaggcaaccgcgctgaatctcaaggttcttccaaagacaaaacccgtcttgcatttgcaggcctgaaatttggtgattacggctcaatcgattacggccgtaactacggtgtagcatacgacatcggtgcgtggactgacgttctgccagaattcggtggtgatacctggacccaaacagatgtgttcatgactggtcgcactactggtgttgcaacttatcgtaacaacgacttctttggtctggtcgatggcctgaactttgctgctcagtatcagggtaaaaatgaccgcactgacgtaactgaagccaatggtgatggtttcggtttctccactacttatgagtatgaaggattcggcgtgggtgcaacctatgctaaatcagatcgcactgacggtcaggtcgcctatggtaagagcaaattcaatgcctccggcaaaaatgcggaagtatgggctgcaggcctgaaatatgatgcgaacaatatctatctggctaccacatattctgaaactcagaatatgaccgtttttggtaataaccatattgcaaacaaagcacaaaactttgaagcagtagcacaatatcagtttgacttcggtctgcgcccatctgttgcttaccttcagtcaaaaggtaaagaccttggtgttcatggtgaccgagacttagtcaagtatgtcgatgtcggtgctacttactactttaataaaaacatgtccacttttgttgattacaaaatcaacttaattgacgatagtaagtttaccaaaacagctgatattgataccgacgacatcgtcgctgtaggtctggtttaccagttctaa

SEQ ID NO: 11440 - DNA, 216 bp, Escherichia coli
atgaaatccatggataagttaacaacgggtgtcgcctatggcacctcagcaggtagtgccgggtactggtttttacagctgctagataaagtcacgccctcacagtgggcggcaattggagtgctgggtagcctggtatttggcctgctgacgtacctgacaaacctttatttcaagattaaagaagataagcgcaaggctgcgagaggtgaataa

SEQ ID NO: 11441 - DNA, 498 bp, Escherichia coli
atgcctccatcattacgaaaagccgttgctgctgctattggtggcggagcaattgctatagcatcagtgttaattactggcccaagtggtaacgatggtctggaaggtgtcagctacataccatacaaagatattgttggtgtatggactgtatgtcacgggcatacaggaaaagacatcatgctcggtaaaacgtataccaaagcagaatgcaaagcactcttgaataaagaccttgccactgtcgccagacaaattaacccgtacatcaaagtcgatataccggaaacaacgcgcggcgctctttactcattcgtttacaacgtgggtgctggcaatttcagaacatcgacgcttcttcgcaaaataaaccagggcgatatcaaaggcgcatgtgatcagctacgtcgctggacatatgctggcggtaagcaatggaaaggtctcatgactcgtcgtgagattgagcgtgaaatctgtttgtggggtcagcaatga

SEQ ID NO: 11442 - DNA, 861 bp, Escherichia coli; identical to SEQ ID NO: 5314

SEQ ID NO: 11443 - DNA, 558 bp, Escherichia coli; identical to SEQ ID NO: 7707

SEQ ID NO: 11444 - DNA, 2562 bp, Escherichia coli
atgcccgttgactttctgaccactgagcagactgaaagctatggcagattcaccggtgaaccggatgagcttcagctggcacgatattttcaccttgatgaagcagacaaggaatttatcggaaaaagcagaggtgatcacaaccgtctgggcattgccctgcaaattggatgtgtccgttttctgggcaccttcctcaccgatatgaatcatattccttccggcgtccggcattttaccgccagacagctcgggattcgtgatatcaccgttcttgcagaatacggtcagagggaaaatacccgccgtgagcatgcagcgctgatacgtcagcactatcagtatcgtgaatttgcctggccctggacatttcgccttacccgtcttttatatacccggagctggataagcaacgaacgtcctggcctgcttttcgatctggcgacagggtggcttatgcaacatcgtattattctccccggagccactacgctgacccggttgatttcagaggtaagggaaaaggcgacgttgcgcctgtggaacaaactggcactgataccgtcagccgaacagcgttcacagctggagatgctgctggggccaactgattgcagccgcctgtctttactggaatcactgaaaaagggccctgtgaccatcagtggtccggcgtttaatgaagcaattgaacgctggaaaactctgaacgattttggcctgcatgctgaaaacctgagtacactcccggctgtgcgcctgaaaaatctcgcacgttatgctggtatgacttcggtgttcaatattgccaggatgtcaccgcagaaaaggatggcggttctggttgcctttgtccttgcatgggaaacgctggcgctggatgatgcattggacgttctggacgccatgctggccgttatcatccgtgacgccagaaagattgggcagaaaaaacggctccgctcgctgaaggatctggataaatctgcattggcgctcgccagcgcatgttcgtacctgctgaaagaagaaacaccggacgaatcgattcgtgctgaggtgttcagctacatcccaaggcaaaagctggctgaaatcatcacgcttgtccgtgaaattgcccggccctcagacgataattttcatgaagaaatggtggagcagtacgggcgcgttcgtcgtttcctgccccatctgctgaataccgttaaattttcatccgcacctgccggggttaccactctgaatgcctgtgactacctcagccgggagttcagctcacggcggcagttttttgacgacgcaccaacggaaattatcagtcggtcatggaaacggctggtgattaacaaggaaaaacatatcacccgcaggggatacacgctctgctttctcagtaaactgcaggatagtctgaggcggagggatgtctacgttaccggcagtaaccggtggggagatcctcgtgcaagattactacagggtgctgactggcaggcaaaccggattaaggtttatcgttctttggggcacccgacagacccgcaggaagcaataaaatctctgggtcatcagcttgatagtcgttacagacaggttgctgcacgtctttgcgaaaatgaggctgtcgaactcgatgtttctggcccgaagccccggttgacaatttctcccctcgccagtcttgatgagccggacagtctgaaacgactgagcaaaatgatcagtgatctactccctccggtggatttaacggagttgctgctcgaaattaacgcccataccggatttgctgatgagtttttccatgctagtgaagccagtgccagagttgatgatctgcccgtcagcatcagcgccgtgctgatggctgaagcctgcaatatcggtctggaaccactgatcagatcaaatgttcctgcactgacccgacaccggctgaactggacaaaagcgaactatctgcgggctgaaactatcaccagcgctaatgccagactggttgattttcaggcaacgctgccactggcacagatatggggtggaggagaagtggcatctgcagatggaatgcgctttgttacgccagtcagaacaatcaatgccggaccgaaccgcaaatactttggtaataacagagggatcacctggtacaactttgtgtccgatcagtattccggctttcatggcatcgttataccggggacgctgagggactctatctttgtgctggaaggtcttctggaacaggagaccgggctgaatccaaccgaaattatgaccgatacagcaggtgccagcgaacttgtctttggccttttctggctgctgggataccagttttctccacgcctggctgatgccggtgcttcggttttctggcgaatggaccatgatgccgactatggcgtgctgaatgatattgccagagggcaatcagatccccgaaaaatagtccttcagtgggacgaaatgatccggaccgctggctccctgaagctgggcaaagtacaggtttcagtactggtccgttcattgctgaaaagtgtaagcgtaaactga

SEQ ID NO: 11445 - DNA, 408 bp, Escherichia coli
atggcaacagaccattaccgtgataacgcgattacctacaaagcgcagcgcgataacaaagccagtgaactgaagctggcgaacgcaaccattactgatatgcaggtgcgccagcgcgatgttgctgcgctcgatgcaaaatactcgagggaattagccgatgcgagagctgaaaatgaaactcttcgcgctgacgttgccgctggtcgtaagcgcctgcgtatcaacgccacctgtccaggtcccgtgcgtgaagccaccggcaccgcccgcgtggataatgcaaccggcccccaactggcagacaccgctgaacgggattatttcactctcagagaacggttgatgctgatgcagaagcagctggaaggggcgcaggactatatccgcactcagtgcctgaaatag

SEQ ID NO: 11446 - DNA, 147 bp, Escherichia coli
atgaaaaacggccttgaactgaaagcgcctgtaactgatgacatcagcagagcactggcttttgccattaagtgggtggcggtcggtgttgctgtgtccccgatgctgtatgggctggcaaaactggtcattgcgttgaaatcgtga

SEQ ID NO: 11447 - DNA, 270 bp, Escherichia coli
atgtcagaaatcacatccctggtcactgctgaggcagtgaaggaagtcctgcgctctgaagaagtcctgagcgcactgaaacagaaactccgccagaaccttgagtcgcgtcttgatgcagaagtggatgccattctggatgagctgctgggcgtaccagcggttccggagccggaaggcattgcggatgacagtactgtttcagatggcgtcgggtctcagcctgacggtagtgaagagcctcagcctgacggcgaaatgatgatgtaa

SEQ ID NO: 11448 - DNA, 183 bp, Escherichia coli
atgacatttctgaaccagttaatgctgtacttctgtacggcagtctgtgttatgtatcttctttcgggtgggtacagggcagtgcgcgatttctggcgcaggcagattgataaaagggccgctgagagaatcagcgccagtcagtcagccggaagcaaacccgaagatccgctcattccgtag

SEQ ID NO: 11449 - DNA, 1788 bp, Escherichia coli
gtgaagccgtcggatggagaaggcgcagttatcagcaccaccagcaacccggagtattactttgttgttgccctggccgggcagtcaaacggtatggcgtatggtgaagggcttccactgccggagacatatgaccgtccggacccgcgtattaaacagctggcgcgtcgcagcactgtcacgccgagtggtgcgtcctgtaactacaatgacattattcctgcggaccactgcctgcatgatgttcaggatttgagtaagttttcacacccgaaagccagtgcagctcagtatggatgcgtggggcagggattacatatcgcgaagaaattgttgccgtttattccggcgaatgccggtattcttctggttccgtgctgccgtggtggttctgcatttttggcgggcgatgaaggtaccttcagcgaatccaccggcgcaagcgagacctcggcacgctggggtgtagataagccactgtacaaggacctgcttacccgtactcaggccgcactgaaggccaaccctaaaaatattctgcttgcagtggtctggatgcagggcgagtttgatttgaaacagggtgcatacgccactcagccggggctgtttgattccatggtggaaaaatatcgttctgacctgtcggaattcggaggtcagtgtctcgggggctctccgtcatcagttccctggatttgtggcgacacgacctactactggaagcagacttattcttcgcaatacgatgcggtgtatggtgcatataagacgaaatccgcaaaaaaaatcttctttgtgccgtttatgacggatgaaaacgggcgaaatgtgggtaccaacgagccgtcagaagatccggatgttgcggatattgggtattacggagccggtggtcgaacggacgccaaaacctggacgacggctgaccgtaaaacgcattttggatcatgggcacgtcgtgggattatttccgaccgtctggcaacggcgattcttgtgcatgccgggagaaccgctgaattcattaccggaaaacagcctgatacggtgaagcccaccggaccttccggtgaaggtacggagagagagccggaaggtccggtcagtaaccgacccctgatgagtctgctggcgtccggcgaagacctggcatcacagggctggcgctattatcacaaaccggcgagcggagacaatgttaacaaaaacattgctgaagcggtggtcagtgatgcgggggctacgggaggtaaggccctgcaactgaataaaccggaaaaccacatctggtttctggagcatgatgcagccgggcagggggcagagttgctgaagaaaggaggacgtgtgagcgtacggtttaagttgccgggttcactggtgccgaatcagtttgccctgggcatttactggcagttgtcgtccctgccggagggagtgacgctggcagaggaaggcaacgacatgctgatgtccttcttcctgcagacggatgcgacgaacctgaacgcgatgcaccacaagaagccgaatgcgaagctggatacgttcggggtctttgataacggatggcacacactggcttttgagtttgccggaaacaacagcattcaggtgacgccggtactggatgagaaacgggggacgccgttcacactggtgaaatctccggcatcaggggcggcggacaaactgcaactgacaggcatatcaaaggcggcgacatatacgctgctgattgacagtgtgaaggtggaagtgaacaacgcggatgccgcggcatga

SEQ ID NO: 11450 - DNA, 177 bp, Escherichia coli
atggcatttaaacactatgacgtggtcagggcggcatcgccgtcagaccttgcgaaacgactgacacaaaaactgaaggaggggtggcagccatttggcagtccggtggccatcacgccttataccctgatgcaggccattgcggcggaaggtgatgtcacccacctgtggtggtga

SEQ ID NO: 11451 - DNA, 279 bp, Escherichia coli
gtgacggcgcaggtgccgtataccgatgtctggacgcataaaccggtgcagttctatcccgggaaacatccgtgcgaaaaaccggcagaaatgctgcaacagataatcagcgcaagcagtcgtccgggtgacctggttgcagatttttttatggggtcaggttcaacagttaaagctgcactggcactgggccgtcgtgctacaggcgttgagctggagactgaacgttttgagcagacggtcagggaagttcaggatttagtcagtcagaacggatga

SEQ ID NO: 11452 - DNA, 432 bp, Escherichia coli
atgaaaaatatcgtattagcatccttgctgggctttggcttaatttcttcggcctgggccactgaaaccgtgaatatccatgagcgggtcaacaatgcacaggcacctgctcaccagatgcagtctgctgcggctcctgtcgggatccaggggactgcacctcgtatggccggtatggaccagcatgaacaggccattattgctcatgaaaccatgacgaacgggtcggcggatgcgcaccagaaaatggtggaaagtcatcagaggatgatgggaagtcagaccgtttcccctaccgggccgtcgaagtcattagcagcaatgaatgagcatgaaagagctgcagttgcccatgaatttatgaataacggtcagtctggcccacatcaggccatggccgaagcgcatcgtcgcatgctcagtgcaggctga

SEQ ID NO: 11453 - DNA, 351 bp, Escherichia coli
atgaaagccagaaacactttatttgcagtattaatgttatccctgccagcgatttcagcagaacattcagaaatgaaaatgactgatatgtctacctcggcttcgtcacaggaatatatggctggcatgaaagacatgcatgacaaaatgatggctgccgtaaatgagtccgatcccgacaaggcttttgcgaaaggcatggtagcgcaccatgaaggggcaatagcaatggctgagaccgagctcaaatacggaaaagatccgaaaatgagaaagctcgcgcaggacatcattaaagctcaaaaaggtgaaattgagcagatgaataaatggcttgatagtcaaaagtaa

SEQ ID NO: 11454 - DNA, 1827 bp, Escherichia coli
atgcggctcagaaaattaaaactgaaaaacttcagaggctacagaaactctactgaaatcattattgatgaaagcatgacgggtattgtcggtcgtaatgactttgggaaatcaacgcttctggaagcgctggctattttttttgaaacagaaggaatgaaggctgacaagaatgacatgaactgtttcagcctaagagaaggggacggccgttttgaaatagcctgtgaatttgatgacctgcccgattttatcatgatcgacgacagggtgcagaccacgctcgcctcagaacatctgctgaatgaggacggcaattttgaaatcgtcaaaacgtttaaagcaacgacctcaggaaaaccggagcagacctgcatccgctgcatccacccggatgaggagcccctgagaaatttactgggcatgaaaatttctgagctcaaggcggtgggaaaagaagttgaaaaaaatgtggcggataaacgcactgcatcgttatggcgtcaggccatcagggaagccgcagccccctatacctgttcggaaattatgctggatgtcgataaagagttcggaaccgacacaaaatcattatggggtaagatcctcgatttgctgcccacgtatgcgattttcaaagccgacagggaaagcagcgacggggattccgaagctaaaaaccccttacagcaggccgtaaaagacgctcaggctgcgctgcaggacaaaattacagcgctggaaaatgagattcaggacagcgtcctggatgtcgcacagagaacgctggataaattacgtgaaatggcccccgaactcgccagtgaactgactccacgatttaaggagaaacccaagtggaccttcaatttcaccctggacggggaaaatggcatccccatcaataagcgcggcagcgggataaggaggcttatcctgttgaatttttttcgggctgaggctgaaaagaatgtcgcggggacgcccagaaatgtgatttatgccatagaggagcctgaaacgtcacagcatccgaactatcagatgatgctgatgaaagcgttactggcactggcaggccagccgcaccgtcagattatcgtcaccacccatgtcccggcgctggccggattaatccctgtcgaaggcgtacgttatgttacccgaaatgaggcgggtgaacccgtagtaaaaatgccggatgacgcagtgctgaaggaagccactgaaagcctgggggtgctgccagagaccggtatggaaagggcgcaggggattgttctggtagagggaaagtcggatgttactttcctgaggcatgcggccagttcattaaaacagtcaggtgcgctgccagcctctctggaggacgtgaaaatagtgccagtcctcataggagggtgtggtagcgtcaaacactgggttacattgaatctggccaaagatctggggcttccctggtgcgtatttctggactccgatattgggggagaccctgcacaggttctgtccatccagaagcgtaaaaaagaagtagaggaggccggtaaggtatttttcgctacgcgcaaacgtgagatagaaaactatctgtgcccggatcttatcgaggaaattactggtgtagccgtcacgtttacggacacctgtgacgctaaaaaaataatcggccgggctgtgggaatgaaacccgataatgtactagataaattctggcctcagatgacatcagaaagaatcatctcaagatcaacctatcatgacggaacgcaggagagaagcgagctggttgagatcctgagcgacattgtatccatgacgagataa

SEQ ID NO: 11455 - DNA, 300 bp, Escherichia coli
atgaacactcaatacgctttgaagactttgaatcagttacgtcctgttttaatcggctttcgcaaagccaatggactgacgcaaaaagatgtttctgaacgtttgggtataacacagcaaacttatgcccgactagaggccaaccctgcaagtgcgggttttgagcgtttgtttagggtgttcagcgtccttggagtggagatcgtactttcatccagggaaccattgtcagatgcaaagcccgaatacggagctatgcacaattattcttcacttccagccaggcgggagaaatggtga

SEQ ID NO: 11456 - DNA, 927 bp, Escherichia coli
atggtttacgaaaatgaattgtggcacagttttcttctgcgttcacagataatgtataacttatccaattgcaggaacataatatcaaagcatggcgcactaaggtacgatgcctttcctcgtttcgaactgattgatatgtacaaattgcatagcttgcaggatatatatgacattcttgccactagaaatggttatatactaacttccaatatagtgtcgttatcttctggtgtttacgggtattttaacgctgttgaagatgcctgtcggaaaaattttcacataactaattcatatccattggtaaacatctcaaacattcgttactgtcacaaatgtattgttgaagatatacactctaaaggcattggttatctgcgtcatagatggttgtttgaatctaaatgtgcagttcatagtaccagtttatatgaggtttgttttgataactatttgaatgcagtgaaaggacttagtgacttaattataagtggaataaatcctcatggttattgttcccttgtggttgacgtttcaaaccctttcaaaaatccagtgtatatattaccatgtgcacgtaataaaattttaaaatggatttcggacaataaaaatatgctgatttactttctctttgatctcttcaaatgtaagtcgcattcaagtttatctaaggttatcgaagtcaagataatgcatgatagatatatttctgcggtgttcaagatgttaagtgaagttaatttttgtaatttcaactcatttatttctgatatttttgaggacgtaagttatgcctctatcggacttgatgattattctgttaatgtgcattttctcaggctaagggctgcagattgtaaattttgccagttgaatggtaaatatttttgctcactttacaatgtaaaacttcttcgctaa

SEQ ID NO: 11457 - DNA, 852 bp, Escherichia coli
gtgtgggaagcggtactgacgcatccggacgtggaatatcacacctccaccaacgtcgtggatattcgcgagacggaagacgatgtcaccgtgtttgacgatcgcggcaatagctggaccggcgatattctgattggctgtgacggcgtgaagtcagtggtgcgccagagcttattgggcgatgcgccgcgtgtcaccggacatgttgtctaccgtgcggttatcgattgtgccgatatgccggaagatttgcgcattaacgcaccggtactgtgggcggggccgcactgtcacctggtgcattaccctttgcgcggcggcacgcagtataacctggtggtgacattccacagccgccagcaggaagagtggggcgtgaaggatggcagtaaagaggaagtgctctcttactttgaggggattcacccgcgtccgcgccagatgctggataaaccgacttcatggcgacgctggtcaactgccgaccgtgaaccagtcgcgaaatggggcactaaccgcattacgctggtgggcgatgcagcccatccagtggcgcaatatatggcgcaaggtgcctgtatggcgctggaagacgcggtaacgctgggtaaggcgctggcgcagtgtgagggtgatgcggcgcaagcctttgcgctgtatgagtcggtacgtattccgcgcaccgcgcgtattgtctggtcgacccgtgagatgggacgggtttatcacgccgcgggagtagaacgccaggttcgtaacctgctgtggaaagggaaatcgcaggcagagttttatcgcggcatggagtggctgtacggctggaaagaagataactgtctgcaaccacgctga

SEQ ID NO: 11458 - DNA, 141 bp, Escherichia coli
atgcccccacacaaaatccgccaggagtggctggcgctggacgagaccgcagaagtcatcctacagcacagcatcacgttgcaatccgccgaccttatccgccattcttttatttggcgcaaccgcagtatctgtctgtga

SEQ ID NO: 11459 - DNA, 1158 bp, Escherichia coli
atggctgttatatggttctatctgtcaaacatagatagattagatattttctttgatactgtaagcctcagttcagccataggtatcatttttgtttttataatagtatcgttttctgggtttagcttagtaattttcatttcctcttttattctaatcctcatttacacattacatgaagataatttcaaaaattatccaagcataccacatcgaatttccactgtttgttatctaaatagcttgtttatatgctgtagtataattgttggctactatatttactatctttatggatggaatggttattccataagtatcaccggttttgtattgatgcttgcttttagttattttgtatcctattttaatctatttaaaacaaagagatttagttggcataaatctgataactatgagaaattaccaagaaaaccaggattgttatgttttttacccttgcaatttatgactcccgggatcgttcaaatattacctatgttatttctgcttacccaacttgattttagtgaggagacaagtgatttggttgaaatgctaatgctccttgccttaacagcagctattgttactattggcattctgcctggtgccatacatcttaatgagcgcagaaatggtgataaattcactggattcatagttgttttaatatgcataccagttgtaattactgtattcagtatgtggtatcgccctatcccaaatatgatcattaatatggtaatgagtctctcaggcattagtgactggagaacgcatcagtattatatcgaaaataaaactcattctcatagtatgtttaatggcttaatctggaatactcggcactatacagaaatccccgagagatttttcatcaccggggtcagtacatttaccttaggagatataaagctggtatgcccaactgaaataacagaagcaagaaaagagagtttgaaatttaccattaatgatatcaatgagtatgagcaaaaagggaaacagttaaaggcagtagccatgaaatgcattccttttaataagaacgatattcatacctgggattcgccattatctgaaccgatctattacgaaaaagtcaaacagaccatagataactcgatgttaaaaattctccataccctgaaatga

SEQ ID NO: 11460 - DNA, 159 bp, Escherichia coli
atggattccgcagggagtgctgattattattcactggcagcagacagcgatgtgtgtgcaggcattcagggggatgttgtcagcagaagggtgcgtatagcagattgttgttatacatggcgtatgaagtattaccagtcatgcggagtagtgtggtga

SEQ ID NO: 11461 - DNA, 288 bp, Escherichia coli
atgactagtctaaaaactagtattaagactatcacttatttaagtgatattggttgtctggagattcagggggccagtctaaacggcgctaagggtgtgctatccggtgaattttcagaaactacgtttataagctgcccggaatgctttggtgatgatgattgcgaaacttgtgacggcagcggaagaatcgaaatcaaggttccagtcagttggacaactatcaaaactatttgggctaaagggtgtgagtacttttcaatagtagcaccgcagcaagatgggtga

SEQ ID NO: 11462 - DNA, 243 bp, Escherichia coli
atgttcaaacgctgcatcaccaagtgtggaagcacacctgacatccaagcttttattaatgaagatggtaagcttgttgttgagaggagtggtccttttattagcaaacaacttatcattacctctccagcggagatggccggggaatggatagtttctgaaccagaggagttgcacatcccgcttccttatggccctcagggactgatttataaccgttatgttcagaaggaggcgggttga

SEQ ID NO: 11463 - DNA, 1071 bp, Escherichia coli
atgggaagaaggcgaagtcatgagcgccgggatttaccccctaacctttatataagaaacaatggatattactgctacagggacccaaggacgggtaaagagtttggattaggccgagacaggcgaatcgcaatcactgaagctatacaggccaacattgagttattttcaggacacaaacacaagcctctgacagcgagaatcaacagtgataattccgttacgttacattcatggcttgatcgctacgaaaaaatcctggccagcagaggaatcaagcagaagacactcataaattacatgagcaaaattaaagcaataaggaggggtctgcctgatgctccacttgaagacatcaccacaaaagaaattgcggcaatgctcaatggatacatagacgagggcaaggcggcgtcagccaagttaatcagatcaacactgagcgatgcattccgagaggcaatagctgaaggccatataacaacaaaccctgtcgctgccactcgcgcagcaaaatcagaggtaaggagatcaagacttacggctgacgaatacctgaaaatttatcaagcagcagaatcatcaccatgttggctcagacttgcaatggaactggctgttgttaccgggcaacgagttggtgatttatgcgaaatgaagtggtctgatatcgtagatggatatctttatgtcgagcaaagcaaaacaggcgtaaaaattgccatcccaacagcattgcatgttgatgctctcggaatatcaatgaaggaaacacttgataaatgcaaagagattcttggcggagaaaccataattgcatctactcgtcgcgaaccgctttcatccggcacagtatcaaggtattttatgcgcgcacgaaaagcatcaggtctttccttcgaaggggatccgcctacctttcacgagttgcgcagtttgtctgcaagactctatgagaagcagataagcgataagtttgctcaacatcttctcgggcataagtcggacaccatggcatcacagtatcgtgatgacagaggcagggagtgggacaaaattgaaatcaaataa

SEQ ID NO: 11464 - DNA, 372 bp, Escherichia coli; identical to SEQ ID NO: 11381

SEQ ID NO: 11465 - DNA, 279 bp, Escherichia coli
atggacgagactggtattaccattggggatcgtgtcgacattctttacgacaaagaagaaaaccagtggatgattaagaaaattagtgaaggtggctttggtgtgtctgggcaaaaaaacaagcacggcggttactcatcgtgtgctgttagattgaccttgcgaccaggttttcctcgcctttctgaggatgaagaggacaacaagaagctactttccgatgattcattcactcagctaagtgaaggtgtaatcgtcttcaggctggatgatgaatag

SEQ ID NO: 11466 - DNA, 135 bp, Escherichia coli
atgggcggcattatgttcataaacttgcattctaataaagaaaaaatcgtttcttttgagggatgtgaacacgacattttctattctgataggtgcgatgctattggctttggtctcttaagtttatgtttttaa

SEQ ID NO: 11467 - DNA, 564 bp, Escherichia coli
atgcacgctttatcaatactaccttcagttgcccgcgctaacctggcaactaaattctcgtctcatttgaaggtgatcgagctcttcaacacgatgcaggattcccaagttgttgtcttgtcatcactgatcgaaggccatcacctcaccagttctggtaacagtgtcaaagccgactttgaggtcactcgcttaccggcgattatcgagatgttagagaaaaaatattttttccctattcgtcatctaaatgtatctgttaaatctgtaactacaggaaggatgactggacaaactgtctatttcatagagcctgaacacatcgagcaacttctcgctgatcctgagcttgtgtttgctaatcaggaaaggagcctcttctttcgttctctcgaaaaagaagggaaaaatctcggcaagcttatcgagaaaaaaggtagtgtttctcaagccgtcttaagccttctacatcacgcctacaaagataaacctctttctgacgagatgtggaaggagatagaagataagttcacccatatgctggatgaattgagcgcggcgtaa

SEQ ID NO: 11468 - DNA, 462 bp, Escherichia coli
atgagcaaacaggattacatacagttaagaacccttacagaccagttttatgctgataacaaaggcctacaagaggctctcgacggcagtaatgatggaaaagtaagaggctacggaatcgtagttattgatctcaacggattggtgttcgggatacccttacgaagccatttaaaccataaatttggattcgtttcggagcgatcagaaggtgttaagaaaggactggattacaccaaagcgttgctaattaagaaagaagagtatgtatcgcgagcctataagataccaactcctgaatttacccatatcaatgataacaaagaaaaaatacaagaagatttcaacaaattcgtaaacagatacatagaagcgaacgtcaagaaagatgaaaacatactcagaaactatcgttactctacgctgaaaaactatcacaaagaattaggtttagaagactaa

SEQ ID NO: 11469 - DNA, 234 bp, Escherichia coli
atgagcgaatatttcagaatacttcagggactgcctgacggtccttttacccgcaaacaggccgaagccgttgccgcacagtaccggaacgtctttatcgaggatgaccacggcgaacagtttcgcctggttgtccgtaataacggaacaatggtctggcgtacctggaattttgaggacggtgccgggtactggatgaaccatgtcatccgtgatttcgggatccttaagtaa

SEQ ID NO: 11470 - DNA, 528 bp, Escherichia coli; identical to SEQ ID NO: 5333

SEQ ID NO: 11471 - DNA, 309 bp, Escherichia coli
atgcaacaggatttagtcagggttgaaatgccagctaggtactgccaggcagacgaagagtggattcagcagcagttacaggggctgcctccgtcactgagacggaaggtcgccctgaaatatgcggaggtatacgaaatcacttttgacgctgagcctgtttcattccgcaaggagaacagagcaaggcacgaagcaaacacaaggctccgcttgtttgtgagaaatcagggcagagctttacaggggtatacaactcagccgcccctggcaggaacgcaatcgcgctcctcattgtttcgggtttaa

SEQ ID NO: 11472 - DNA, 243 bp, Escherichia coli
atgaggctctctttagataatttgagggttggtgaaactttagataccgcttcctcaattctttcagccattgcaactgaggggcgcctaaaacccagagccatctggttcaggtatgcaacgctagtcccagataactgtgccagccgcctccattcatccgcgctcatgactcctctgattgagagcaatacactggacataaaaaaccccatactgtattggttattagcaacgtgctaa

SEQ ID NO: 11473 - DNA, 456 bp, Escherichia coli
atggaaatcaaagatattcgcttaaaaaatctacagacggtaatccaacgcagcggcttaacccagacagatctggcgttaaaatgtgagatatcaccctcacttataagccaaataatgactaagcgcagaaatatgggaactgctctcgctagaaaactcgaggggcgactgagcctatcagaaggatggtttgacatcccccactcattgctggattccccatggcatctagctaaaatgagggaaaagactggtgagaccactattgatgaacagcaactaactaaaagagagactcgacttattgagttattcagacaaatgcctgaaagcgaaaaagacaggataatcagtgagttatctgaaaagaaacgtaattttgacaaactacttgatgagctaatggctgttaaagcatcaagaatgccgatcgacaaagacgaaaatgaataa

SEQ ID NO: 11474 - DNA, 444 bp, Escherichia coli
atgttaaatgataaacatgactcttattccgtaaactctctgttgatttgtgctcaagcggcactattaggcggtaccgcttcaaaccatgacgtcatcaacctcttagatgttgcacaagacatcatctcttcaactatgaattcctttacagatagtagcgctcccggcgctaatgttgatttatttaccaaagaagttagcgctagtaattccccagcattatctttcggtcaacgtattctccaagcgcgtaaatcagcaagtcttcaacaacatcatattgccagcggtgctggagtgactgttcaggctgtttcgttatgggaaaatgactcagcaattcctacttgcgacaaaattatcccattggcaaatcttcttggctgcgatccaatgtggttactgactggtgcttataaacaaaatcaggaggaagcataa

SEQ ID NO: 11475 - DNA, 336 bp, Escherichia coli
atgttgagcgcatttgtcataggtgcatattctgcatattggctatggaataataatcaaccgaagccatttttcaaggattacaagactgttgcggaaattaatggctgccattttaatgtaacagaagatacaattgatgggttgaaagagttcgataaatataaaacacggatactggattcggggattaactgtaaaaaacatccgtggttatacttccctcttgcaaaatcctcaccggggatgattgttatggcatgcaataaaaactataaccaacatgaagtggcaaactgtttaaccctgtcttaccgtgaggttaatcgtgattga

SEQ ID NO: 11476 - DNA, 483 bp, Escherichia coli
gtgattgattataaaaaaaacttattatttattttagtttttatcagtgggtttattctcttcactgtctattcttacactgcagaaaaaatgatatataacgaaacatgcactgcaaattgggtaatttttaatgaccagggacgagcaaatcttaccatcgactttatgtataacaaaaaaaataaaacaggaactgttgcgttgagtggaacctggcaacaaggtaacagagaaagtaaatcaatacggcgaaatattgaatacacatggattgaaaactatgacacagcccatttaacatcaaagaaagttaataagtttgagattatggatcaagttgatgatgatagacttgcacaacttattcctgatttttatgtctttccagaaaaaagtgtaagctataatatactaaagcaaggtaagcatgcttttattttgagcattggtaacagagcaataatgcattgtgcaaggtaa

SEQ ID NO: 11477 - DNA, 141 bp, Escherichia coli
atggatttgcaccagatgttgttgatacatgatattttacattgcaaggagatgtctaaaatgaaagatgttgatcaaatctttgatgctttagactgccatatactgcgagaatatttaattttattgttttatgattaa

SEQ ID NO: 11478 - DNA, 492 bp, Escherichia coli
atgagcacagaaacaattgaaatattcaataatagtgatgaatgggcaaatcaactaaaacacgcattatcgaaaggagaaaatctggcattactacatggtttaactcctgatatccttgatagaatatatgcatatgcattcgactaccatgaaaagggtaatataacggacgcagaaatttattataaattcttgtgcatttatgcgttcgaaaatcatgagtatctaaaagattttgcatcagtatgtcagcccaaaaagaaatatcaacaagcatatgacctttacaaactaagttacaattacttcccgtatgatgactattcagttatttatcgtatgggtcaatgtcagattggggctaaaaatatcgataacgcaatgcaatgtttctatcacattattaacaattgtgaggatgatagtgttaagagtaaagcgcaggcatatattgaactcttaaacgataattcagaagataatggctaa

SEQ ID NO: 11479 - DNA, 297 bp, Escherichia coli
atgaacgcttattacattcaggatcgtcttgaggctcagagctgggcgcgtcactaccagcagatcgcccatgaagagaaagaggcagaactggcagacgacatggaaaaaggcctgccccagcacctgtttgaatcgctatgcatcgatcatttgcaacgccacggggccagcaaaaaagccattacccgtgcgtttgatgacgatgttgagtttcaggagcgcatggcagaacacatccggtacatggttgaaaccattgctcaccaccaggttgatattgattcagaggtataa

SEQ ID NO: 11480 - DNA, 756 bp, Escherichia coli
atgattcactaccacggtgggcctattactcctgatacgtgcgcaatgagagcatggaaagggcgacatgcgtttatcagttttgcgcattcaggccagatcaatctcgcggctgaatactgtcagtcgttcgcgctggacaacggtgcattcaccgcctggaaagcagctggcaaaaacaaaatcgactggagcgattactacgagtttgttgctcgctggaagaatcacccaagattcgattttgccattatcccggatgttattgatggcggagaggaggaaaatgatgcgcttctgaatgagtggcctcacggaaaactagctggcgttccagtgtggcacatgaatgaaagtgacgagcgatttattcatttgtgcaatgagtttccgcgagtggctatcggtagttgtggcgactatgacgtaaagcgcccaactcttgcggtagccagaatgaaagacctgattcgtcacattgttgatgggcatggtcagctggttacgaaactacatggattgcgcatgttaaatccgctgatattcacaaaattacccttagccagcgcagatagtacgaacgtcgctcgaaacatcggtattgataaagcctggtctggggcttatgcacctgcaagtaaagagacacgcgcagcattaatggtagaacggattgaggcacacaatagccctggttctcttgcgtattgtgaacaacgcgaccgctttgaaatgcaattgcaactagcagtttaa

SEQ ID NO: 11481 - DNA, 330 bp, Escherichia coli
atgattgccaaccctactcacattgcaatagggatatactttaagccacatctttcacctattccattgatttctgtaagagaaactaatgaggtagccttagccgtaaggaaatatgcaaaggaaatcggaataccaattatcacagataaaaaattagcacgaaaaatttatgctacccatcgtcgctacgattatgttagcttcgaaaatatagatgaaatattacgtcttctgctgtggcttgaagatgtggagaatgctggacaacctgttccagatgaacagctctcttcagaagataaattcattgaaggtgaatcaaaataa

SEQ ID NO: 11482 - DNA, 768 bp, Escherichia coli
atgggtgaggcgatactctatcagttgcatagtctgctggctgctacagcgctctgtttttgccgattggcacccactttctatttgttaccatttttcgccagtgggaatataccaacagtagtccgtcatccaataataatagtggtatcatgtgcattagttcagcattaccactatgaattattgaacttaaatgaaatcgatattgctttgttcgctgccagagaaattatcatagggctgtttattgcatgcttattagcatccccgttttggattttccttgctataggtagctttatcgataaccaacgcggtgcaacattaagtagtactttggatccggctacaggtgtcgatacctcggaattagcaagattatttaaccttttctctgctgcggtttatcttactaaaggtggaatgaactttattctggaaactctttggcaaagttataatttatggccttcaggcaattttaattttcctaaattagagcctttattctcatatattaataacataatgactcatactatcgtttacgcaagccccgtgattgccgttatgctgggcggtgaggctgtcctgggattgctggcacgttatgcttcacaactaaatgcttttgccatttcactgactgtcaaaagtgcgctggcatttttaatattaattatttattttggcccaatactggctgaacgagtaatgccgttatcctttttcccagaacaattgcaactatacattgagaaatag

SEQ ID NO: 11483 - DNA, 948 bp, Escherichia coli
atgttcggtctgaggaaagtaaatcgaaacactcatacgtttgaaaccacttttcaaaattggaaagaaaatggcgaagatgttgcattattaatgcccgaatttagtgctaaatggctaccgatagcagaagagagtggcagctggtctggatgggtattgcttggagaaatatttcccttaatttcatctgagctcgctgggatggctttaatgccagaaatggaaaggttaataggggaatgcctcagtttatccagttccccgttaaatctaaagcatcctgaactaaaatataatcgtttgcgcgtaggtaaagtatttgatggagtattgagccctgctcaaccactaataagaatatggacaggggaattgaatctttggttagataaagtcacagtctgccaatacggaaacgctccagcgttagacaaaaaatcgttatattgctccattcattttgtaattggatttagtaaaacatgttacagaagtcttgttgatattgaagttggtgatgttttattaatctcaaataatttggcttatgcggttatttataatacaaaaatttgtgatttaatttatccagaggagttaaaaatggctgatcattttgagtacgaggaagattttgaaacagatgattttgatatcaaaaaaaacgagagtgagatttatgatgaaaatgacgatcagatgattaatagttttgaagacttgcctgtaaaaattgagtttgttcttggtaagaaaataatgaatctatatgaaatagacgaactctgtgcaaaaagaataatatctctgctttctgaatctgagaaaaatatagaaatacgtgtaaatggcgcgctaactggctatggcgaacttgttgaagtggatgataaattgggcgtagagattcattcttggttatcagggcataataatgtcaaatag

SEQ ID NO: 11484 - DNA, 153 bp, Escherichia coli
atggcacttcccgaaagctataactatatccacaagtcgggaactttgcatgaagcgccaagccctatcattccgctaaattggtcgaaagcttcaatgactctcatgttgaaagagatgtccaaccttatcaatgatgagggaattaaatag

SEQ ID NO: 11485 - DNA, 1818 bp, Escherichia coli
atgtattcaagtagcagaaaaaggtgcccgaaaaccaaatgggctttgaaacttcttactgccgcatttttagcagcgagtcccgcggcgaagagtgctgttaataacgcctatgatgcattgattattgaagctcgcaagggtaatactcagccagctttgtcatggtttgcactaaaatcagcactcagcaataaccaaattgctgactggttacagattgccttatgggccgggcaagataaacaggttattaccgtttacaaccgctaccgtcatcagcaattaccagcgcgtggttatgcagctgtcgccgtcgcttatcgtaacctgcaacaatggcaaaactcgcttacactgtggcaaaaggcgctctctctggagccgcaaaataaggattatcaacggggacaaattttaaccctggcagatgctggtcactatgatactgcgctggttaaacttaagcagcttaactctggagcaccggacaaagccaatttactcgcagaagcctatatctataaactggcggggcgtcatcaggatgaattacgggcgatgacagagtcattacctgaaaatgcatctacgcaacaatatcccacagaatacgtgcaggcattacgtaataatcaacttgctgccgcgattgacgatgccaatttaacgccagatattcgcgctgatattcatgccgaactggtcagactgtcgtttatgcctacgcgcagtgaaagtgaacgttatgccattgccgatcgcgccctcgcccaatacgctgcattagaaattctgtggcacgataacccagaccgcactgcccagtaccagcgtattcaggttgatcatcttggcgcgttattaactcgcgatcgttataaagacgttatttctcactatcagcgattaaaaaagacggggcaaattattccgccctgggggcaatattgggttgcatcggcttatctcaaagatcatcagccgaaaaaagcacagtcaataatgaccgagctcttttatcacaaggagaccattgccccggatttatccgatgaagaacttgcggatctcttttacagccacctggagagtgaaaattatccgggcgcgctaactgtcacccaacataccattaatacttcgccgcctttccttcggttaatgggcacgcctacgagcatcccgaatgatacctggttacaggggcattcgtttctctcaaccgtagcaaaatatagtaatgatcttcctcaggctgaaatgacagccagagagcttgcttataacgcaccaggaaatcagggactgcgcattgattacgcgagtgtgttacaagcccgcggttggcctcgtgcagcagaaaatgaattaaaaaaagcagaagtgatcgagccacgtaatattaatctggaggttgaacaagcctggacagcattaacgttacaagaatggcagcaggcagctgtcttaacgcacgatgttgtcgaacgtgaaccgcaagatcccggcgttgtacgattaaaacgtgcggttgatgtacataatcttgcagagcttcgtatcgctggctcaacaggaattgatgccgaaggcccggatagtggtaaacatgatgtcgacttaaccaccatcgtttattcaccaccgctgaaggataactggcgcggttttgctggattcggttatgccgatggacaatttagcgaaggaaaagggattgttcgcgactggatttgcccctatatttccagacacctgttatcacttaacccattactggcttgctgccgtagatattcccgtggcgagcgataa

SEQ ID NO: 11486 - DNA, 213 bp, Escherichia coli
atgaatggattcagaaacagttcacggaacggtcaggtctggcgctggcagcgtgccggaagccgggccgttattctggaggtcagtggacgctggatggaagcggcagaagcatggcgacgggctgccggtgttgcgccccggacagactggcagcagtttgcccgaaaaagggctgaacactgccaccggcgcagccggggaagggtgtaa

SEQ ID NO: 11487 - DNA, 294 bp, Escherichia coli
atgataacgttgcgtccgcccgtcaaagccgccctgctgtaccagccggtccagcgcatcgtagctgaagtcgctgtggctgccgttctcgttagtcagactgatgacacgtccggcagcatcgtactccatactgcgcgtcagcccgccctgcgtggtgctgaccgcctttccccacgcatcgtactgtgtctcgctccggttgccgtccggggtaatgacggcagtcaggtcgcctgcggcgttgtattcataccgcgtttcacggccctgtgcgtctttcaccgaggttaa

SEQ ID NO: 11488 - DNA, 1023 bp, Escherichia coli
atgcgggttctcctcattaagctggttgccccattcatcatattccgcgctccacgccgtattgccgtcttcgctgataagcgccagcggcagtccccggtggtcgcagtgataaagatgagcttttcgcgccggtgtgtattccggctccacctgtctggccagttgctccaccgtcagcccgcactgcgcaagccacgcccggctttcactgctcacgcggtctgcccggatttcttcctccagcctgtccagcagccgcaccagttcagccgggaacaccacgccgtggccgttctcactcccttcctgctggagcgtctctgccaggctgcgccgctgcgctttttcccgctcgccgttctctgtctcgacccggatgagcggcgtgaagcttcccggctcgtataccgtctggatacgtgtggtgtcagtctgcaccgtcgtcagcctgtctccgtcccagccataccacgtcacctccggtttacgcgacagcgacatccaccccgtcaggtcacgctcccgccgccagacccgttttgccattcgccgtcccagcgggtcgtagaggtagcggctctcgaccagtggctcgccatgctgtatccgcgtgtagaacaccaggcggtgctggctgtcgtagtggtagtggtgggtccgctcgtcgtccgtccgtatcacacccgccgggatgcggtccgtcttctccgtcagcctgccgtattcatcgtggcggtagacatagtgcgcatcctccgcgatgcggttatccggccacactgtgagtgtactgtccgggtgcagctccgggtccggcagccggttgcccgccgggtccgtggcatacgggatgcggatgtccaggtctggtgcgagggtgcgcacactctccagcctgcccgtggcgctgtagccgtattcccgcgtctgtcgcgggccgctgatgcgcaccaggtcgccgttgtcattccacccgtagtcacggtcatacaccaggctgttcaggtgctggctctgtaa

SEQ ID NO: 11489 - DNA, 2007 bp, Escherichia coli
atggctaacggttggacaggtaatatattaagagtcaatctcacgacaggaaatattaccctcgaagattccagtaagtttaaaagttttgtcggtggcatgggcttcggctacaaaattatgtatgacgaagtaccgccaggcacgaaacctttcgatgaagcgaataaattagtctttgctaccggcccattaactggatctggtgccccctgtagttctcgcgtaaatatcacctcactttctacttttaccaaaggaaatttagtcgtcgatgcccatatgggtggcttttttgcagcgcaaatgaaattcgctggatacgacgtcattattatcgaagggaaggcgaaatcaccggtatggctgaagattaaagatgacaaagttagcctggaaaaagccgatttcttatggggaaaagggacgcgcgcaacgacggaagaaatttgtcgattgaccagtccggaaacctgtgtggcggctattggtcaggctggggaaaaccttgttcctctctctggcatgttgaatagccgtaaccacagcggcggtgcgggaactggcgcaataatgggttcgaaaaacctgaaagcgattgcggttgaagggacgaaaggggtcaacattgccgatcgtcaggagatgaagcgtctcaatgattacatgatgactgaacttattggtgcgaataacaaccatgtcgtgccaagtacgccacaatcgtgggcagagtattcagatcccaagtcacgctggacagcacgtaaagggctgttttggggcgcggctgaaggtggtccgattgaaacgggtgaaattccgccaggcaatcagaatacggtcggctttcgtacctataaatccgtttttgacttaggaccggcggcagagaaatacacagtaaaaatgagcggctgccactcttgcccgatccgttgtatgacccaaatgaatattcctcgggtgaaagagtttggcgtgcccagcacaggtggtaacacttgtgtagcaaactttgtccataccaccatcttcccgaacgggccgaaagattttgaagataaagacgatggtcgtgtgattggtaacctggtgggtctgaatttgttcgatgactacggcctatggtgtaactacgggcagttgcatcgcgactttacttattgttacagcaaaggtgtgttcaagcgtgttctgccagctgaagagtatgcagaaattcgctgggatcaactggaagcgggtgacgttaacttcattaaagatttttactaccgtctggcgcatcgtgtgggtgagctgagtcacctggctgatggttcatatgccatcgcagaacgctggaatttgggtgaagagtactggggctacgcgaaaaataaactctggtcgccgtttggctatccggttcaccatgccaatgaagcgtcagcgcaggtcggttccattgttaactgtatgttcaaccgtgactgcatgacgcatacccatatcaactttattggttccggcttgccattgaaactgcaacgtgaagtggcgaaagaactttttggttctgaagatgcttacgatgaaaccaaaaactacacgccaatcaatgacgcaaaaattaaatatgcaaagtggtcgctgttgcgggtctgtttgcataacgccgtcaccctgtgcaactgggtctggccaatgaccgtttcgccgctgaaaagccgtaattaccggggcgatctggcgcttgaagccaaattcttcaaagcgatcaccggcgaagagatgactcaggaaaaattagatttagctgcagagcgtatttttacgttgcatcgtgcctacacggtaaaactgatgcaaaccaaagatatgcgtaatgaacacgatcttatctgttcctgggtattcgacaaggatccgcagatcccggtctttactgaaggtactgacaaaatggatcgtgacgatatgcatgaaccgccccgggtttcctggagagtgttttatctgtga

SEQ ID NO: 11490 - DNA, 351 bp, Escherichia coli
atgaataaaaaatatgaactggttgttaaggggataaataattacggggataaggttactgttactgtgaagccggaaggtgacgggcaagcgtcgctgttgttgccagatgtggcgattagtcttgaccgtactgaaggtgccacgctggagttttacgaagctgaggcgaaaaagcaggcgaagcagtttttcatggatgttgctgccgggttatgtgaatggaacgaaccgttgccggaaaagcgccccgtaattttagaggcgcaggatgtgttgataacctacaaaggaaagctaccgggaagaattactggttctctgaagactccaccggaatcacaaccttaa

SEQ ID NO: 11491 - DNA, 534 bp, Escherichia coli
atgaacgcaaaaatcagatacggcctgtcggctgccgttctggcgctgattgccgcaggtgcgcctgcgcctgacattctcgaccagtttctggatgaaaaggaaggtaaccacaccacggcataccgtgatggtgcgggtatctggactatctgccgcggtgccatcctggtggatggcaaacctgtcgttccgggcatgaagttgtcgaaggaaaaatgcgaccaggttaacgccattgagcgtgataaagcgctggcatgggtggagaaaaacatcagagtgccattgagtgaaccccagaaagcggggatcgcgtcattctgtccgtacaacattggtcccggtaagtgtttcccgtcgacgttttataaacgaattaatgcaggtgatcgcaggggagcgtgtgaggcgattcgctggtggattaaggacggtggcagagactgccgtatccgctcaaataactgttatggtcaggtatcccgtcgtgaccaggagagcgcgctggcgtgctggggaatcgacagataa

SEQ ID NO: 11492 - DNA, 438 bp, Escherichia coli
atgaaccgcgtactgtgcgtggtcatcattgccctgctggtggcctgtggtgcgcttagtctggggctgaatcattaccgtgataacgccatgacctacaaagagcagcgcgataaagccacatccatcatcgctgatatgcagaagcgtcaacgtgatgtagcagaactcgacgccagatacacaaaggagcttgctgatgctaacgcgactatcgaaagtctccgtgctgatgtttctgctggtcgtaagcgcctgcaagtcgccgccacctgtgcaaagtcaacgaccggagccagcagcatgggcgatggagaaagcccaagacttacagcagatgctgaactcaattattaccgtctccgaagtggaatcgacaagataaccgcgcaggttaactacctgcaggaatacatcaggacgcaatgcctgaaataa

SEQ ID NO: 11493 - DNA, 522 bp, Escherichia coli
atgaatatcgtgccacttaattacaaaggtgaaattgtcagtttcaacactgatggttggatcaacgtcacaggtgttgctgagagatttggaaaacgcattgataactggatgcgtttggcagaaacgcttgaatacgttcgtgctttagacgaagcgttgaccgggaaagaatctcaaattttacatccctcacaatcgaggtatgtaaaaaccagcaaggcacgaaaggacaggggtggtggtacgtggctacatccaaaactttcagttgcatttgcccgttggtgtgatgctcgttttgctgtgtggtgcgacctgcacattgatagtctgcttcgcggtgaactgactgagcagcagaaatatgagcaagcatgtcgcattcgcgatgaccggaaatcaaaagccagcaatggggcaagagagatggctcgctggcgatgggataagccggttattgaagcaaatgttgagtactggcgcgagcaactgcagttgactctcgatatcgcgtgctga

SEQ ID NO: 11494 - DNA, 378 bp, Escherichia coli
atgaaaacattacccgacacgcatgtacgggaggcatcgcgctgcccgtctcccgtcaccatctggcagatactgctgtcccgactgctggaccagcactacggcctcacactgaatgacacaccgtttgccgatgaacgtgtgattgagcagcatattgaggcaggcatttcactgtgcgatgcggtgaactttctcgtggaaaaatacgcactggtacgaaccgaccagccgggattcagcgcatgtccccgctctcagttaatcaacagcattgatattctccgggctcgcagggcgaccggcctgatgacccgcgacaattacagaacggtaaataacattacccgggggaagcatccggaggcgaaacaatga

SEQ ID NO: 11495 - DNA, 402 bp, Escherichia coli
atgtttattgagtctcagtttgaacttacttatggacggattggaggtagtaaacaaaatctggctaatcaaaccgttattgataacaaggattataatgtacttgtcggtcgtactggtgttgattttgccagaaaactcactggtaaggactggtcaatagtagcaaagatagacacaagttaccagtttgatatattgaatgataatcaaactattctcagtgatgcttataacgagacaaccgtcaaattcgggcatgacagccgagtacttgttggagctcgccttgcatttgagcttggcaaaaacacccgtgttggcatcgactatgagcgttcatttggcggtaaatacaatatcgataatgagctgaacttaaaagtacgctattcattttaa

SEQ ID NO: 11496 - DNA, 330 bp, Escherichia coli
atgaatttatacttaagattaaaacaggtggatttatcattaggtaaatggattgatggaaaagacaagattagtcaattaataatacttaacacgatgaggatcctgttatttactgtttgcatttatatcattgggttcgttgattttaatttctaccatatagctgaaaatattatatctaatatatacagaatagatatttacattgttcatggcataatgataatgccactattagctatatctgcattcttcatgtttagtgtttcatttatattctattatttattaaagagatgttttatgttgtgctatccaaaaaaataa

SEQ ID NO: 11497 - DNA, 420 bp, Escherichia coli
atgaaagattgttttatttcgaatgacacttcatttaacggaactttcaaatgcggtggtaatataattattgaggggcatgttgagggcgatgttatttgtgataatcttgttaaaattgagagtggggggtacatcagaggggaggttcgtggtcagcaagtgctgatcaatggaaaagtcgaaggcaaatgttatgctgctagattgtctgtcttgtctaaaggcattatgtatggagatattttttctgacgaaatttcaattgaaaaaggggggagttttatcgggtgttcacaattaatggatccgtcatcaacaaaaatagaacatgcaattgaggagaacgatactgatagcgagttatttataactgatattcagtcaacgcttatacctgaagataactcgataaagtaa

SEQ ID NO: 11498 - DNA, 366 bp, Escherichia coli
atgtcccgttcagctaaaccccgtaaacgaaaacctgcccctcaaagaagcaaacttccccgctatgtcgtgaagcttcacgacgatgacttctttgacgaagaagacgcagaagctctgcgctttgataattttgacgatgccgttgagtgctgcgcagacctgaatattcccttctttgtggatgccggaaacaaaaagctggtcttctggtttgtacgtgttgatgacgaagggtatcctgaaatagcccgctgcacggagcgggagtttgcgaccattcttgccggtatcagcgccggcggcatgtactgcccggagtgtggcacggttcactggccggacggagtccccccgcccttctga

SEQ ID NO: 11499 - DNA, 1188 bp, Escherichia coli
atgcttccccgttttgccgacatttttcagcagggaaaccgctggctaaactggctggagaaacaaccggaaggttcagtgcgtccggtagtcattgagtctgtgacaaaaatcatggcctgcgggaccacgctgatggggtacacacagtggtgctgttcatctccggactgcagccacataaaaaaggtctgcttccggtgtaaaagtcgctcctgcccgcactgcggagtgaaggctggcgcacagtggatacagtatctgctgaatctggttcccgactgtccgtggcagcatattgtgttcacacttccctgccagtactggtccctggtgttccacaaccggtggttactggcagagatgagccgcattgctgcggatgtgatacaggaaatctgccgccaggcagatgtggtgccgggaatattcacggtcatccacacatggggacgtgaccagcagtggcatccgcacattcacctgtcgacaacgaccggcggcgtgacatcagaccacacctggaaaaaccttcatttttacgcccgtaaggtgatgagtatgtggcgttaccggataacgcggttactgtcacggaaatatccggacctggtgataccggatgcgctggcagcagaaggaagcagtaaacgggactggaatcgcttcctggacagtcattaccggcggggctggaatgtcaacgtatcccgggtgatggataacgccacacatgtggcggtgtacttcggctcttacctgaaaaaaccgccggtgccgatgagccgtctggagcactatgctggtcaggatgaaattggtctgcgttacaacagtcaccggacaaaacgggaagaatacctggtgatgagtggtgatgagtttatggaaaggttctcctggcatgtggcggataaggggttccatatggtgaggtactacggtttcctgagtccggtgaagcgccggttactggaagatgttgtgtacgtcataacggagacggtgagaaagacggcgatgcaaatcaggtggagagggatgtatcagcggttactgaaggttgacccgctgaagtgcatcctgtgcggaggtcagatgcgttttacggggctgaagcggggctaccgtctgacagagctggtcctgatgcatgagccactggcgcaacagcgggtgtgcggctga

SEQ ID NO: 11500 - DNA, 765 bp, Escherichia coli
atgaacggcctgaagggcatcatcgaatcaggctcactgtgggcgacgcacttttcctttctcaatgacagtaatgagctgactcacggcatgaactgccttgagaatgccctgcagtacctgagggacgactttaacccgaaaacccttaagttcatcgaacaggcactgacgcacttcagaatgcaccgggcagctcacgtctataacctttcgttctgtctcgaacccgacctgttaagccagtggcggggttatgggagctctcagggcgtgtgcctggaatttgatgatgaagagctgcttgcctcgctggaattaactcattatcaggtgtttaaaaaccgggtactctataccaaagaggattccacggttgaagcccggaacgaaatcctcgccttctttcgtcagccacatgttcaggcggcaataaatgcagatgtaatgcatgagatgattcaggcaaccagactggcacacagcctgccgccttttttcaagaatgacggtttcaaagaggagccggagttcaggatggtaatccttccggacagcccttttgagggtgtcaattttcgtgtcaatgacagcggtctggcaccatatctgatcattaaagcaaaagacaagctgccactgacaaacgtcagaattggtccccgcagtaacagagcaatgatgatggacgggatttcattcctgttgcagagcagggggtataccagtacacggatttcgtttactgagacgccgttccggtaa

SEQ ID NO: 11501 - DNA, 1104 bp, Escherichia coli
gtgggtattgccggttcacatgagatttgggctgaactacagaccgaaggttatctggaaaaatcgggaaaaatcactaaaaccctgaaagaaactcttctcgatggcacttttgctgttagcgaaaggttccttcctcttcaggagcaaattgaagctatcctgcgtaaatcagcaggacgactcaatataaataatgctgatgagcgtaaagtaatcaaataccggaaagaggtcttaaacagccctgaattcgaagcgttatggcagcgcatttgccaaaaaacactgtatcgtctggcatttgatgaagatgaattgatcaaatcatgtacaaaatcactttctgaaatgcagcctgtagcaaaagcaatggtcagtttcagcaaagcaacaatcaaacaaagtcaatctggacttgatgtcaaagctcagtctaatgggacaacaagcgctgttatagatgttgcagagcagccactgccagatattcttggtgttctacaggaaaaaaccggacttacaagacgcagtttaagcaccatcctgaaagagagtggaagactcgctgattttgctaaaaatccacagcagtttatcagtgaagctataggccgaatcaactactgcaaacgcctgtcaattgttgatggtattaaatattatccactaaaaggagaggtgtatgcgcaaagtctctttatggataaagagctaacaggatatgcccgtaatctttttgaaacctcgtctaagtcagtttacgaatacgttcctaaagattctgaagtcgaaagccgtttcgctcaggaactcgaagaacaggatgaagttaagctttatgtgaagcttcccggttggtttaaaattccgacgccactgggaacctacaatcctgactgggccttagttattgaagacaatggtgaagaacatatttactttgttgtagaaacaaaaagtaaacacattggtcttggtaatgaagaagatgcgaaaattacttgtggaacagctcatttcagtgctttaaaagaagaaaacactaatgcagcaaaatatatcagagcgacaaatcttacagaagtaataagcagcatttga

SEQ ID NO: 11502 - DNA, 1236 bp, Escherichia coli
atgaagcaaatcggtgaagctgttaacggatatattaatatcaaatatgataagttatcaacgttatcaaatgcagcaggaacaggaactgatccgggaccaagaacatgttctggttctgtttgtgaaattaattaccagacattgattaatgaggggctattaccttctacatttataggtgtcaatgcaaacaaatcttcctataagatcttgttaaggcgtggtggtatcagtcccaattatgttattaatggtctgataacaacaacagttccttggagtgagggtaataagataagatatgatctgttaggtaaagcaatgcaaactgctgggattgatagtggtatgacaagttcatcagccactgctagcggttatggtaggcaatggaaagaaacttcttctaattttaataatattactatggctggacaattaacttatagggtaggatataatagtgctttatattctgttttccttcgtcgtgacggaacattgccaatgacaggagaactaaacatgggaggaaataacatatcaaatgccaaggatattacagcgtctggaatgatatcatctggaacattaaaatccacagggttaacagatataggaggacaattattagttactggaacctccttgcttaagggtgctgtatcaactaatggtagtttaactgttgatggaataactactttgaaaaacagtttaacagcttcgggaaatattacttcatcacaaaaaatacagggggtagaattagcttctacaggaagaacaagcgtaggtgaatatttacaaataaatggcacggcgactgaaaatactgtatgtgcgccaaatggtttacaaggaagggatactaaaggtatgctgttatcttgtgtgaatggtaaatggcaaagtggagcagcaaatagtctttctatgtatgctttatcagatagttcttgtatttcagtgaatgctttaactggttcatgctcttgccaaacaggaacaaaagctatttcaatggttcaaattaaaggtacgccgggagtccctgctgtccccggaacacgccgtccagatcctgaatcacaaagaagacatgatgcgtgcatgcatgctagtggtggtcaacaggcatcatgtcctcctgtaacatatataactacaccgggaactccagctatacccggaacccccggatatggaatttatgcttgtgttaaaaaataa

SEQ ID NO: 11503 - DNA, 747 bp, Escherichia coli
gtgagtattcaaagtttgcttgattatatttcagtgacccctgatatacgacaacaaggaaaggttaaacataaattatctgctattttgtttctcaccgtatgtgcagtaattgcaggtgccgatgagtggcaggaaattgaagattttggacatgaaagacttgaatggctaaagaaatatggtgattttgataatggcattccggtcgatgacaccattgcacgcgttgtgagtaacattgacagtttggcctttgaaaagatgtttattgaatggatgcaggagtgccatgaaatcactgatggtgaaattatagcaatagatggaaagaccataagaggctcctttgataagggaaaaagaaaaggagcaatccatatggtgagtgcattctcgaacgaaaatggtgttgtactggggcaggtgaaaacggaagccaaaagtaatgagattacagccattccagagttgcttaacctactgtatttaaagaaaaatttgataaccattgatgctatgggctgtcagaaagatatcgcttcgaagatcaaagataaaaaagcagattatcttctggcagtaaaaggcaatcaggggaaattacatcatgcattcgaggaaaaatttcctgtaaatgtgttttctaattataaaggcgattcgtttagtacgcaggagataagtcatggaagaaaagaaacacgtttgcatattgtcagtaacgtaacgcctgaacttttgtga

SEQ ID NO: 11504 - DNA, 483 bp, Escherichia coli
atgcttcaaattattagaggcaaacttgtcatttttttaattaccctttgtttatttgttgtttaccttgggtttgataacaattcaaattctgacatcgtattttatggacataaaacaccaaagagcgttgagatatatctttctgaaaaaaatattatttataaaataattaatgaccaaaaaattagtagagggaatggtcattttataagtataatggttaataattacaggacgcactgtggagtggttgatataaatcttaattttttcaatgatattctttatagcgtgcgattaaaaaacattagtaaactggagaatatggagttctgcgctacaaaacaacgggtgtattttagtgataaaaacaagaaggctagttataaaataattaattatggagactattatgatgttgattattatgataacaatttgaaaaatgaagtttttgactggattggtaaatggtcataa

SEQ ID NO: 11505 - DNA, 501 bp, Escherichia coli
atgtatcagtatccgttgaatcccatacaagtgatagacccaatggggttagatgcgattgagaatatgacatcaggtggactaatttatgccgtatctggtgtacctggattgattgctgcaaacagcattactaacagtgcttaccagttcggttatgatatggatgctattgttggcggagctcataatggggccgccgatgcaatgagacattgttacttgatgtgtcgaatgactaagacatttggatcaacaatagctgacgtgataggtaaaaatcatgaggcggcaggggatagacaaggtcagccagctaaagaaagaatcatggatcttaaaaataacactgtcggtattgcttgtggcgatttttctgccaaatgtagcgatgcatgtattgaaaaatataacactgggcaactcttcgggttagatggtataaaagcagataatccaataaaagcaaagcaagggagttcagatgcttcaaattattag

SEQ ID NO: 11506 - DNA, 1755 bp, Escherichia coli
atgatccagcgcaccaaccagattaaagaaaatcttggttatcttgagactgcatggaaagctgtcgcagactccgcaaaatgggcatgggattccatgctggatattggccgtgaggcctcccttgatcaaaaaatctcagatgttctccgtcaaattgatgaaatagaaaaaaatacccgacccggagttttcgggttaggtggcattggagatggcggagctcaaaataaaaggctggcacgattaaagcagcaattgggcgtacttcaagcagaaaaaattgctcaggacgtactaaattcatcaataaacgattacaacaagcgacaacaggaaggaattgaactcagacagagagcagatgccttttcaaaacaatatcagacccgggagcagcagagagctagtgaacttgcaaaactggaaaaactaaagagtcagtattcaaaggaagaatataataatcttatcgctcaaataaatgagcgttataaagatccaaagcaaccaaaggcgaaaggttattcggatgatgctgcccaacgaatgattgatcatctgaatcaacagaatgcgttactaagttcacaaactgaattaaccgttaaattaagttcctctgaacaggaactggttaagtggcgtcagcagattgccgacctggagtcacgaccgtcatcgaaattaaccaaggatcagaaatcgcttctcttacaccgggaagaaataaccgcgttgatggagaaaaatgttgcgattgaaaaaaataacaggctaatcaaggaatcagccgaaatagctgcatggcgtgattcattgcaggcttcgattgataatcgtcaacaggggtatgatattcagattgctggttatggggttggcgataaaaatcagcaacgccagcaggaattactgcggattgaacgtgaatataacaatcagcgtctgcaacttgaacgtgactatgcagataaatcccgtgggatgtcaaatcatgtttttcaggagaaaatgcaggctctgaatgatgctctggaacgagaaaaagaaattgtcagacagaaaaacgagcagctcgatattcaggcaggagactgggttagtggtgcctcccagggattcaataactggctggatgacactaaggatatcagtgagcagataaaatcaaccacgactcagatgtttgatggaatgaccgatgcgctgggtgattttgtcacgacaggcaaagcaaattttcgttctttcgctacttccgtgatttcggatcttagtcgaatagcattaaaggcttcaattactgggattttcgacagcattagtaacagttcttctggggggattttaggaactatcgggagtgctattagtaaatttattccgaatgcaaagggcggtgtttatgagtctccgtcattgaacacgtattcgaacggtatttatgattccccgcaattttttgcttttgcaagaggggctggtgtttttggtgaggctggtccggaagccattatgccattaacacgaacttccgatggttctcttggtgtcagagctgttaatagtaaaagtggtaatggaggcggagatattacctatgcccctgtataccaaatcactattcaaaatgacggccagaatggagagattggccctcaggcaataaaagcacttatggggatggttgatcagcgggtgcagggcaatctgttaaatatgcgacgtgatgggggaatgttaagtggctaa

SEQ ID NO: 11507 - DNA, 405 bp, Escherichia coli
atgagtgaaactctcaaggcactgaataatattcgtacacttcgcgcacaggctcgtgaaactgatctggaaacgctggaagagatgctggaaaaactctctgttatcgttgatgagcgccgtgaggaagaacaggcaatactcaaggaacaagaacaacgtcaggctaagcttgaagccttccgccagaaactgttagaagatggtatcgatcctgctgaactacttttagcggttggttcatctcagcctaaagcaaaatcaccccgtgctccacgcccggctaaatacaaatatacagatgaaaacggtaatgaacagacttggacgggtcagggccgtactcctaaagtgatcgctgctgctattgaagcaggtaaaacactggaagacttcgcaatctga

SEQ ID NO: 11508 - DNA, 381 bp, Escherichia coli
atggaaaaagttaagatgagcaaaaaagataaaacgatgatatttgctatatcagtgacattaatgttatacgtaaacaggatttacgggatggcaagtgtaaatgatgaagatgttatgacttttgtaaaagaagaggatgctgttgattcactgttacgtactcaaatgttagaaatcattaatggtttcgattattacaaaggtctttatggttcgggtaaagaaaaaaaggagcatatagatatggcagagctattggagagagtaacattttattatgacctttatatcagggatatgttgataagaaatctggaaaaaggacaatccttagttgataatggagtgctcgactgggatctggacataaatagataa

SEQ ID NO: 11509 - DNA, 291 bp, Escherichia coli
atgactaaaaatattgaaagtaaaaatacatctactgagttgttctatgatcttgcaaagcgttcttttgaagcgagctggaaaacaatgcaggatatgtgtagtgatagcatttcgcatcttgtcgatgatgctgattttatgagcgcatttatacggctcactattaatcatatttgtcataactttgagaagtttactacacaagaaggaaatcaaggacaccttacagaggtcaactttgaagaggttgcagaacggcttgtgcgtaatgcttgggtgttttgctaa

SEQ ID NO: 11510 - DNA, 312 bp, Escherichia coli
atgaataaagatctgaaaaaagaagcaaacaagatattactgcatttatctaaacaatgctttgaattgcgtgtgagttctgttattcagaaccatcctgaacaagtagaacaactcaagcatgaagaagcttttatgatgaatacttataaggacagtattaaagtagcaaaacagatgttccctaaagtcgtaaggaatacattctttgatgtaaagttatcaccaaggctcattgataacgattttatattgaaagcattaaaggcatttcataaacaaatggattttatgaaagattttcaaaagtag

SEQ ID NO: 11511 - DNA, 1986 bp, Escherichia coli
atgcgggatttaataaaatcccagccggtctatgagatccagtattacggcaaaaccttccggatgaacgctgcccaggtactgcatgataaatatatgatctggtgcggagagcagctatggtctgcattcgttctggcgtctgtcgtggccctggttatttgcctgatcaccttctttgttgtctcctggattctggggcatcaggggaaacagcagagtgaaaatgaggtgaccggcgggcgtcagctgacggataacccgaaagaagtggcccggatgctgaaaaaagacggcaaggactccgatatccggattggcgacctgccgattatccgggattccgaaatccagaacttctgtctgcacggcacggtcggggccggtaagtcggaggttatccgtcgtctggccaactacgcccgtcagcgcggtgatatggtggtgatttatgaccgttcaggggaatttgttaaaagttactatgatccctccatcgataaaatcctgaatccgctggatgcccgctgtgccgcatgggatttgtggaaggagtgcctgacacagccggattttgataataccgcgaacacgctgatccctatgggtacaaaagaggacccgttctggcagggttcaggacgtaccatttttgcggaagcggcgtacctgatgcgtaatgaccccaaccgcagctacagcaaactggtggacacactgctttccatcaaaattgaaaaactgcgtaccttcctgcgtaattcaccggcagccaacctggtggaagagaaaattgagaaaacggcgatttccatccgtgctgtgctgaccaactacgtgaaagccatccgttacctgcaggggattgagcataacggtgagtcttttaccatccgtgactggatgcgtggtgtccgggaagatcagaaaaacggctggctgtttatttcgtcgaacgccgacacccatgcctccctgaagccggtgatctccatgtggctgtccattgccattcgtggtctgctggcaatgggagaaaaccgtaaccgtcgtgtgtggtttttctgtgacgagttacccacgttacacaaactgccggacctggtggagatcctgccggaagcccgtaagttcggtggctgttatgtgtttggtatccagtcctatgcccagctggaagatatctacggtgagaaagcggcggccacgctgtttgacgtcatgaacacccgtgcctttttccgttctcccagccataagattgcagagttcgctgccggtgaaattggtgagaaagagcacctgaaagccagcgagcagtattcctacggtgctgacccggtacgtgacggggtatcgaccggtaaggatatggagcgtcagacgctggtcagttattccgacattcagtctctgccggatctgacctgctatgtcactctgcccggaccgtatccggcagtcaaactctctctgaaatatcaggcacgaccgaaggtcgctccggagtttattccgcgtgacatcaacccggaaatggagaaccgtctgagtgccgtacttgctgcaagggaagcagaaggtcgccagatggccagcctcttcgaaccggaggttgcctccggagaaggcgtgactcaggctgaacagccacaacagccacaacagccacaacagccacaacagccacaacagccacaacagccagtgtcttctgtcatcaatgataagaagtcagatgcaggtgtgagtgttccggcaggggggatcgagcaggagctgaacatgaaaccggaagaagagatggaacagcaactgccacccgggatcagtgaatccggtgaagtggtggatatggccgcttatgaggcgtggcaacaggaaaatcatccggacatccagcagcagatgcagcgtcgtgaagaggtgaacattaatgtgcaccgggagcgcggggaggatgttgagccgggagatgatttctga

SEQ ID NO: 11512 - DNA, 186 bp, Escherichia coli
atggatgaatatattgtcatcaatcaatctaataataagtgctataatgttaacgaactagtatttgatgttttaatgtattcaactgaaataaaaaacaataagttggaaaagaaatatggatttgatgacattcaaatccaaaacgtattagataaaatatatggtaagctaaatgaatcatga

SEQ ID NO: 11513 - DNA, 147 bp, Escherichia coli
atgaatgttaacgagcaacaaactgtagacaactacgagattgatatctgtgagtttgaggaagtaaaggatattgatcctgtatccaaaagaaagactcttggatgttgggggcctagcccagatgatgggtataaccaatgttaa

SEQ ID NO: 11514 - DNA, 276 bp, Escherichia coli
atggaaaacaatacaatccagtgtccgttttgcctgaaagagagccagcgcggtgtgcatgtttgtactggctgcatggcgacggttctgtatggaaccttccccggctggtatgctttcattgttatagtattgaccttcggcctgtctattctgatcggaatgtctacaggtatggcgggagctactatcagcctaccgataattgcggctgttgggtttgtcgcaggtaaggcgatcttctctgataatgttgtgtttaggagaaggatgtag

SEQ ID NO: 11515 - DNA, 798 bp, Escherichia coli
atgcatgagctggaagtcctgctgagtcgcctgaaaatggagcatctgagttatcacgttgaaagcctgctggaacaggcagctaaaaaagagctgaactaccgggagttcctgtgcatggcgctacagcaggaatggaacggcaggcatcagcgcggtatggagtccaggctgaagcaggctcgtctgccgtgggtcaaaacgctggagcagttcgactttaccttccagccgggcatcgaccgtaaggttgtccgggaactggctggtctgacgttcgtggagcgcagcgaaaacgtgatcctgctgggacctcctggtgtcggaaaaactcatctggccatagctcttggcgtgaaagcggtggatgcgggacatcgggtactgtttatgccactggacagactgatcgcgacactgatgaaagcgaaacaggaaaaccggctggagcgtcagctgcagcaactgagttatgcccgggtgttgatcctggatgaaataggctatctgccgatgaacagagaggaagccagcctgttcttccggctactgaaccgtcgatatgaaaaagcgagcatcatactgacgtcaaacaaagggttcgcagactggggagaaatgttcggagatcacgtgctggcaacagcgatactggatcggttgctacatcactcaaccacgctgaatatcaaaggagagagttaccggttaaaagagaaacgtaaagctggagtgctgaccaaaaacacaacgccaatcagtgatgatgaaatggtgaaaagcggacagcatcagtaa

SEQ ID NO: 11516 - DNA, 900 bp, Escherichia coli
atgctgagcagagaggacttttacatgataaagcaaatgcgccagcagggcgcgtacattgtcgatattgcgactcagattggttgctctgaacggacggtcagacgctacctcaaataccctgaaccgccagccagaaagacccgccacaaaatggttaagctgaaaccgtttatggattacatcgacatgcgcctggcagagaatgtctggaatagtgaggttatcttcgcggagattaaggcaatgggttatacgggcggacgttccatgctgcgttactacatccagcccaaacgtaaaatgcgtccgtcaaaaagaacagttcgcttcgaaactcagcctggataccagctccagcacgactggggcgaagttgaggtggaggttgccgggcaacggtgcaaagttaactttgcggttaatacgctggggttctcccgccgcttccatgtcttcgccgcaccaaaacaggatgctgagcatacctacgaatcactggttcgcgccttccgctacttcggtggttgtgtgaaaacggtgctggttgataaccagaaggctgcggtgctgaagaataacaacgggaaagtcgtgttcaactccggattcctgttgctggccgaccactataacttcctgccacgggcatgccgtccacgcagggccagaacaaaaggtaaggttgagcggatggtgaaatacctcaaggagaacttcttcgttcggtaccgcaggttcgacagcttcactcatgttaatcaacaactggagcaatggatagccgatgtggctgacaaacgggaacttcgccagttcaaagaaacgccggaacagcgcttcgcgctggagcaggaacatctgcagccgttaccggatacggacttcgataccagttaa

SEQ ID NO: 11517 - DNA, 1455 bp, Escherichia coli
atggcagcagtaaaaatctcaggtgtgctgaaagatggtgcgggaaaaccaatacagaactgcactattcaactgaaggcaaagcgtaacagcaccacggtactggtgaacacggtggcctctgaaaatccggatgaagccgggcgttacagcatggatgttgagtatggccagtacagcgttatcctgcttgttgaaggttttccgccttcacatgccggaaccattaccgtctatgaaggctccagaccaggtacgctgaatgattttctcggtgccatgacggaagatgatgtcatgccggaggcattgcgtcgttttgaggcaatggtggaagaagtggcacgcaacgccgaagccgcctctcagagcgcagcggcggcaaagaaatccgaaactgcagcggcatcatcgaagaacgcggcgaaaacctcagaaacgaatgcagctaatagtgcacaggcggcagcgacctcaaagactgcatcggcaaactccgcgacagcagccaaaaaatcagaaaccaacgcgaaaaacagtgagacagccgcaaagacgagcgaaaccaacgcaaagtccagccagacggcagcgaaaaccagcgaaacgaatgccaaagccagtgaagccaacgcaaaggtgagcgaaacagcggcggcgaactcggcgaaagcatcggcagcaagccagacggcagcaaaagcaagtgaagatgctgccagagaatacgcaaaccagacagcagagccgtacagatatgttttacagccgctgccggatgtgtggataccctttaatgattcgctggatatgattacgggctattctccgggttataaaaaagtgaagattggtgataatgtggttcaggttgccagtgataaacaggttaatttcagtcgcgcatcaacggcaacatatatcaacaaatctggcgaactgaaaacggcggaaattaatgagccacgatttgaaaaagaaggtttattgattgaaggtcagcgaaccaactacatgttgaattcagcaactccagcttcttggggtaaatctgcaaatatgaatgtcgctgaggttggaactgatagttttggttttacttatggaaagtttgtttgtaatgaatcattaattgggcaaagtacaacccttaatatggcagtagtttcaacctcgggggctgtcgatgtatcaggcgataataagtgtgtgacgacatcgtgcagatttaaaacggatttggaactcctgttaaggatcaggtttgaagccttcgatggcagcgcttcatctaatcttggatatgccattgttaatacgcggtctttattggttgaaatcaccggtgtagctgccgacaggctcaccgcacgagttaacaaagatgaagctacgggctggatttttgtagaggcaacgattcaagcaagtaaagaaactagactggccccctga

SEQ ID NO: 11518 - DNA, 1482 bp, Escherichia coli
atggctatttttcatcttgattttaaaattgtgaaacgttcagaaggtaggtcttccgttgcgaaggctgcctatcatgctcgtacacgtataacagatgaaagaacaggtgatacgtatgattatagccgccgtaccgatttatatgggcatttcatattagctccagttaatgcaccggaacatatcataaaagactctacagcattgtggaatgaagttgaacgggtcgagcgtcagcaaaatggtcaaacatctcgttatttcgatgttgctattcccaccgagttaaacaatgacgacaagaaaaaacttgtccttgagtattgtcagaaaaatttcgttgataaaggcatgattgccgatatcgcttttcatgatcttgatagcgataacccacacgctcacgttatgttgacattaaaaaccataggccctgaaggttttggtaaaaaagaaagaagctggaatgacagaaaaatgtctgtcctttggcgtgaatcatgggcatctatggctaacagctaccttgctgctgctggttcgtcagaacgtattgatcatcgttcccttcaggcccagcatgaagaggcattagaaaaagcggcggttgctctggataatgaagaaaaagcactatggcttgctaaagccgcagaaacaaaccgccctgcaatgaaacgtatccacagtgccaaatggcgtagtaaggctgctcaggagcaaagggccgcagaacaggctgttcgtgatgcagctaaacaggaagctgttgaagtctataagacattcagtgaacttgaccttgaaattgttcttgatgtcagaagctttacgattacacatcttgctgaaccagaagaggtcattcttctcgactccccaaaagcagaaaaacaacaaccggctcttggagcacctgaaccatacagaaggccagtcgtaaaatcttaccgcgatccaaacaaatccagtaaggttggtatggctgaagaagaaactcctgttctaattgctcctgagccaaaaaaatccactaaactgaaaatcccttattctcaacataccagagcgagtaaacgcgctcctgttaaaagtaagaggaagcaggttaaatcccatcatcgtggcatatttaggcgtttaaccacctatatcgtcgattttttcaaagagaaatttatctgggccaagaaggaacctgtccctattcccgttgatgctgaacacgataagtgtattgctgaaaactatgtctttgatgaagtgctgggtgtctatattccacgctctacacatgaaagacgagtcagatttaacagtgatgactacaggccaacacctgatgaggtcagacgttttccacgtcgtccggttagcccaaaacagtctgataggaaactagactatataccaacactagtagcagacagaaaaaagccaatacctaaattgaaaccaccgggttattataacgattaa

SEQ ID NO: 11519 - DNA, 330 bp, Escherichia coli
atgaaccagcgagaatcccatagagaaatcttttgtaagcgtttgaaagaagcgcgtacggctgctggtttgtctcaaaagaagctgggcattgctgccgggatcgacgaatttgtagcaagcactcgtatcaaccgatacgaaaaaggagttcatgaagcggatattcatactgcacaaaaattagcagaaacgttaaatgtgcctttagcatatttctacgtggaagatgatgaacttgctactatcgtgatgaattatgaaaatttatctgaagacaataaaaaaacaataataaaaattattgataaaaataatattacgaagtaa

SEQ ID NO: 11520 - DNA, 555 bp, Escherichia coli
atgaagagaatcttacttgtggctgcaatggccttaacaggatgccaacagctcaatgatggcgtgagtaaagtcaatggggcaatcagctcttctttgtcttcagtaggtaaagcgctgaatggaagtaccgccactcaaaatcttggtccagcatcaccagtatcaggtctgggtgctgtctgcaaagactatgaagaaaacgcaatggcagcagaaaagaaatggacaggcaaaaggatctctatcagcaatgccacagttctggaagttactaagggcagaagtgcaagcgatatgatgacgggtatgcccaaatcagccccccactattacctgctctttaaaactgccgatacaagctactgcggcggtatggtttggctggattactactctggtattgatgatgccgttcttacttacaagaaaggccagaaagtcagcgttactggaacggtaaacaatttcgaagttcgtggatttgccacagtaaacaatgccgatatgccagttcgtctggttgttctgagaaacggcactatcaatcattaa

SEQ ID NO: 11521 - DNA, 486 bp, Escherichia coli
atgcgtcaatttttagccattgctggccttgctgtgttgctatcaggctgcggtgaaaaaggcgattttgagaaagcgatcaacgcgaaaatttcacaatcaaagctgtgctactcactgcagaacaatgactttgcattcaataaaggttttcctataaaggttaatcatggctaccgttctgcaggatacaatgttagtgatgaaatccttaaaggacttgctgaacaagggttgctcactgtttcacaacaggcaaatggctttagcagtgtcgatgttctggaagtaacagacaaagggcaaaatgttgagttttggaaccgggcagaaggtgcgtgtattggtcatcgtgaagttgatgaagtgaaggaatggactgagccgggcaacggtaatcagcaggttgttcatgttagttatacatggaagttggcggatgttccttcatgggtggataaaaaagcattcgcaaacgtcaagtga

SEQ ID NO: 11522 - DNA, 1422 bp, Escherichia coli
gtgagcgaaacagcggctgcgaactcagcgaaagcatcggcagcaagccagacggcagctaaagcaagcgaagatgcagccagagagtacgcaagccaggctgcggagccgtataaatatgtcttacagccgctgcctgatgtgtggataccatttaacgattcgctggatatgattacgggcttttcgccatcatataaaaaaattgttattggtgacgatgaaataacgatgcctggcgacaagattgttaagtttaaacgtgcatcgaaagcaacctatattaacaaatctggtgtgctgacagaggctgccattgacgagccacgatttgaacgtgatggcctgcttattgaggggcaaagaacaaactacatgctcaattcggaaagccctgccagttgggggcgatcgtcaaatatggatgtgcccgaaacagggacggataattttggttttacctatggaaagtttgtctgcaacgattctctgattgggcaaacctcagccattaatatggcatcaattgctgcaacaaagtcagttgatgtctcaggcgataataaacacgtgacaacctcatgtcgttttaaaacagaactgcaggtaaggttgcgtatccggtttgataaatatgacggtagcgcaacaacttttcttggtgatgcgtatattgacacacaaacgcttgaaattaatatgacaggcggtgctgcctcaaggattacagcgagagtcagaaaggacgaagctaccggatggatttttgcagaggcaacaattcaggcaattgatggggagttaaaaataggctctcagatacagtattctcctaagcagagcggggcaaccgtatctggtgactatatttatctggccaccccacaagtagaagatgggccttgtgtatcatcttttattatatcaggagcgacggcggcgacccgcgcaagcgatatagttacagttccaattaagaataatctttataatcttccttttacggttctttgtgaggtacataagaactggtataaaacgccaaatgcagcgccacgtgtttttgataccggcggtcatcaaaccggagcggctattattcttggcttcggtcgttcaacagattacgacggatttccttattgcgatattggaggagctaacagacgggtaaacgaaaacgcatcgcttgaaaaaatggttatggggatgcgtgtaaagtcagagcagtctacgtgctcagtaagtaacgggcatatatccagcgaaacaaaaaccacatggtcctgtattcagaacaccgcaattatccgtattggaggccagactacagccgggttgcgtcatttatttggtcatgtcaggaatttcagaatatggcacaaggcattgactgatgctcaggtgggggagtcaatctaa

SEQ ID NO: 11523 - DNA, 267 bp, Escherichia coli; identical to SEQ ID NO: 6058

SEQ ID NO: 11524 - DNA, 1041 bp, Escherichia coli
atggctacatcgacagtaattcctgatgacatcaaaacgctaaaatccgacgttagcaaattaaaaaacgatcaaggaagctacgcaacaaaattatatgtagacagcaaagatgaaatcgttggtgactggtctgtttcatggtatcagcaggtattgccaactagcggagctatatttgggagaaaactccgctcaactcacaggacggcaggtgttgaggatgcgtattgcgaactatacctcaaaaaatggatagacagtccaggtaacgcaatggcgcgccttaacctgaacgataacgggacaaacatttgctgggactttaccaacctttatggcggtacgatgatttttcccggtgacagcggatacctcaaaatgggtaactgccttatgtcatacagcaagcgtggaagtaacgcgcttattaaatttgattacaccgacacattacagatcaaatatgccaatcatgggtcaaccatgacattaaacacacagggaaccgcttatgctggtgttactgctcaattgtggggcaactccagccgtcctgttgtttatgaagtcggtgttgatggtggcgcttatatgttctatgcgcagaaaaataccgataacacctatatgttaagcgttaatggtgcatgtcatgccaccgcatttaaccagcattccgaccgggatctgaaagacaacattcaggtgatcgataatgcaaccgaccgcatccgtaaaatgaacggctatacatacacgcttaaagaaaacggtatgccctatgctggtgtcattgcacaggaagctctggaagcaatcccagaagttgtaggttccgcaatgaaatatcaggacggtgcgagcggatcggaaggtgaagaaggtgaacgttattacacagtagattattctggtgttactggcttgcttgttcaggtagccagagagtcagacgacagaataacagcactgaaagaagaaaacgcagaattaagacaaagattatctgcaattgaggcggcgcttgcgtctaaataa

SEQ ID NO: 11525 - DNA, 882 bp, Escherichia coli
gtggcggcctatgtctccccgatcgttgaaggaaaagtgcttcgccatcgcggtggtgaaacccgcgtgttacgtccgggctacgtcaagcccaaacacgaatttaattaccagcaggcggttgagcgccttcctggtgaagatccggctcagctgaacgacccggcctaccgtcgtctgcgtatcattaccgataacctcaaacaggaagagcacgccattgtccaggtggaagaaatgcaggcggtgaatgccgtgctgtatggcaaatacaccatggaaggggatcagtttgatactgtcgaggtggatttcgggcgctctgaaggaaataacattgagcaggctgacggtaaaaaatggtctgagcaggaccgtgatacgtttgatccgacgcatgatattgacctctactgcgatcaggccagcggccttgtgaatatcgccattatggacggtacggtctggcgtctgctgaatggctttaagctgttccgcgaaaaactggatacccgtcgcggctcaaattcacaactcgaaacggcagtgaaagatctgggcgcagtggtgtccttcaaggggtattacggcgatctggccattgtggtggcgaaaacgtcttatgtggcagaggacggtaccgaaaaacgttatctgccggagggcatgctggtgctggggaatacggcggcagaggggattcgttgctatggtgccattaaggatgcacaggcgttgtctgaaggagtggtggcttcttcccgttacccgaaacactggctgaccgtgggcgatccgtcctgtgaattcaccatgacgcagtccgctccgctgatggtgctgccggatccggatgagtttgtggtggtacaggtgaaataa

SEQ ID NO: 11526 - DNA, 384 bp, Escherichia coli
atggcaacaaaagaagaaaatctgaatcgtcttcgtcaactggctggcctgctggggcgcgaggcggatatgtcggggagtgctgcggatattgctcaacgtgtgtctgagtgggaagaggagcttgctgtttccccggagggcattatgcactctgatgagagcggggctgatcaaaatcacacagacgatggtgagcagttgaacaacacggatgctccggatgatgttaaagccgtccgggtacggaagtgcctgcaagtaatggggtattgcccggagacaggtcgtcccgttgagctggcgttacggggtatgcgtgttctggtgccatcatcactggcaacggccatgatacagcacggaacggctgaatatgcgtga

SEQ ID NO: 11527 - DNA, 957 bp, Escherichia coli
atgaaagatttaacatctgctaccattgaaattataacatcatgtaattttaaatgtccgcattgttatcttgataataaaacctcattaggattaaatgtgaacgaatggaaaaacgtgataactaaattaatgctaaaaggatgcaggaaattaattattactggaggtgagcctcttctttataaagacttcatttcattatatacattcattcatcagcagggaatcgatatttcactctttactaatgcgagtttaatgactgaaaaacattttgaactattcggaaaatacccaccaagttctgtttctgtctctatatatggcaaagataatagagagcttcgtagcttttctaaaaataaaagagccagccttcataggataatgtcgaatatatccagattagaacagttaggcattacaatatacaaaggtttaaccctatgtaaatcaatatctgtatcttcatcagatctagctttcttttcggaaaacaaaattgagataaacacataccttattccatcattaaactatcaaaataatttagaagagaggttggaaccgaatgaaattgttaagattgaaaatgatcttgcaatggaacggaaaattaaagatggtaatataccaatggataatttagactattttaagaaatgctcagggggttattcgagtttgtttgttgatcagtttggtcgcgcatctatttgtgctgtatacagaaagaagcaatataatattattgacggaaacattaatgatgtatgggcagagctaaactctatcagtgaacatttccataaaatatattatgatagtaagtgtggtcaatgtgttttaaacgctgcatgtaggaattgccctgcatatatggacttggaacatgggggatataaaaacaaatatctctgtgatttagctaatgcacgaataaataatggctga

SEQ ID NO: 11528 - DNA, 468 bp, Escherichia coli
atgtatgatgccataattttcccacaaaaagatttaatgagaggtaaactatctcaaagagctagtattgatgatattattaactttgagcatagtaatccagaaactgtaagtttctggaggaaatcaatatctaatatgacttcacaagcatgtattaaatgtggtggtggcattaatagcctttcaatagatgctggaggatatgcatctatatgttctttatatgtggaagataaaattagttttttgagtaatgatgagaaaaccataaggaaatacttgaaagattcacataataaaatgcaaagttattatatcaatagcaaatgctctacatgtgatcaaaaatccatttgcagatggtgtgcggcatatgccaatttggaacatggaaattcatcagaaccgatagattttatgtgcgagttagcacaacgcagaatttctgcgtttacggaggtataa

SEQ ID NO: 11529 - DNA, 282 bp, Escherichia coli
atgctgaaagagttggttgaacgcacgccaggttatcatggatggcagcaggaattctggctcgcgcattgtggcgatttctgtgtttttatcggctatgtgggctggaatgatataaaagatcgcctcgatgaatttgccaaccttgaagaagattgtgagaatttcggtattagaaattctgatctagctaaatgcctgcaaaagggtggtcattgtcagggttatctcttccgctgtctccactgcggcaagctgagactgtggggtgatttttcgtag

SEQ ID NO: 11530 - DNA, 360 bp, Escherichia coli
gtggtgctgggattaggtgcagatggtcatttttgtggcaatttgccgaatacgacccatttccatgagcaaaccgtggagttcccgatccagggagagatggttgatattgtggcgcatggcgagttgggcggcgacttttcgttagtgcctgacagctacgtgacgatggggccgaaaagcatcatggcggcgaaaaacttgctgataattgtcagcggcgcgggtaaagcgcaggcactgaaaaatgttctgcaaggtccggttaccgaagatgttccagcttccgtgttgcagctgcatccttcgctgatggtaatcgctgataaagccgctgccgcagaattagcactcggttaa

SEQ ID NO: 11531 - DNA, 1329 bp, Escherichia coli
atgcacattggacaggctcttgatctggtatcccgttacgattctctgcgtaacccactgacttctctgggggattacctcgaccccgaactcatctctcgttgccttgccgaatcaggtactgtaacgctacgcaagcgccgtcttcccctcgaaatgatggtctggtgtattgttggcatggcgcttgagcgtaaagaacctcttcaccagattgtgaatcgcctggacatcatgctgccgggcaatcgccccttcgttgcccccagtgccgttattcaggcccgccagcgcctgggaagtgaggctgtccgccgcgtgttcacgaaaacagcgcagctctggcataacgccacgccgcatccgcactggtgcggcctgaccctgctggccatcgatggtgtgttctggcgcacaccggatacaccagagaacgatgcagccttcccccgccagacacatgccgggaacccggcgctctacccgcaggtcaaaatggtctgccagatggaactgaccagccatctgctgacggctgcagccttcggcacgatgaagaacagcgaaaatgagcttgctgagcaacttatagaacaaaccggcgataacactctgacgttaatggataaaggttattactcactgggactgttaaatgcctggagcctggcgggagaacaccgccactggatgatacctctcagaaagggagcgcaatatgaagagatcagaaaactgggtaaaggcgatcatctggtgaagctgaaaaccagcccgcaggcacgaaaaaagtggccgggactgggaaatgaagtgactgcccgcctgctgaccgtgacgcgcaaaggaaaagtctgccatctgctgacgtcgatgacggacgccatgcgcttccccggaggagaaatgggggatctgtacagtcatcgctgggaaatcgaactgggatacagggagataaaacagacgatgcaacggagcaggctgacgctgagaagtaaaaagccggagcttgtggagcaagagctgtggggtgtcttactggcttataatctggtgagatatcagatgattaaaatggcggaacatctgaaaggttactggccgaatcaactgagtttctcagaatcatgcggaatggtgatgagaatgctgatgacattgcagggcgcttcaccgggacgtataccggagctgatgcgcgatcttgcaagtatgggacaacttgtgaaattaccgacaagaagggaaagggccttcccgagagtggtaaaggagaggccctggaaataccccacagccccgaaaaagagccagtcagttgcttaa

SEQ ID NO: 11532 - DNA, 315 bp, Escherichia coli
gtgattaataaaatacaagcggctgaaaatgtaactgataacacgtcaaaaaaattaaaaaaagaaaagcaacatagtggtggaaggttgcagcgagtgtcattaacggaaaagcgatttcttgatgacgctgttcatgcagcggctagagttaaagggaaaagattaacagcagaggagcgaaggaaagtattatgtgtagcaagagagcaaatacgttctcaacgtaaggctgagcagattaaaaatgaaagaaataaagaaaggtttgaagcagagtttgaatggaaaaaaccagtgtcatttcgtcgttaa

SEQ ID NO: 11533 - DNA, 516 bp, Escherichia coli
atggggaaattgaaaacaaaaaatcttaaggaaagtgagtttataagatatatagaaactcatccagttttttcagagtctttatgtaagaagcatggggtttctgttgtatcactaggttattccctttatgtccatagtaatcatttttttctggagaatggttatgtgtcagatgatattcattatgacatggttaaaaataacttaatcatcatgaaaccaactcttaaacgattttataaaagaacaaggcaggtagattataatgattatacttttatgtcggggattaaagagcatcaagactattgtatgttattaacgctttgttgctatcattggattgccgatatgttcactgtctataatcatagtaaagggagtgatatagtcgttgacgttgccaatgagcttttacaaagaagcattgactacttttcaattgaacatcaaaacgtagttgaatgttttaatgagttaaaacataagttcccacattatagaaagcgataa

SEQ ID NO: 11534 - DNA, 324 bp, Escherichia coli
atggatgacatatcagaaaagcaaaaaaacagaactaagccacgtattaaaaagacattagaacagcagttggcttcagctcagatgcgtttaaatcgcttacaacataaatccaagcaagaaactaaacagattgaaactcgtcagaagatcattctaggtgcagaagttgctaaagcattagattgtgatgttttcacggttgataaggaactggttttaggaatgctgttggagaccccaaatctacatcctgacgataaggtgagatttagaaaaaatgggttgttatttctggctagcattaaaggtagaaaaacttaa

SEQ ID NO: 11535 - DNA, 141 bp, Escherichia coli
atggtcatctggagcttacaggtggccattcgtgggacagtatccctgacagcctacaaaacgcaattgaagaacgcgaggcatcgtcttaacgaggcaccgaggcgtcgcattcttcagatggttcaacccttaagttag

SEQ ID NO: 11536 - DNA, 1113 bp, Escherichia coli
atgaattactctcacgataactggtcagcaattctggcccatattggtaagcccgaagaactggatacttcggcacgtaatgccggggctctaacccgccgccgcgaaattcgtgatgctgcaactctgctacgtctggggctggcttacggccccggggggatgtcattacgtgaagtcactgcatgggctcagctccatgacgttgcaacattatctgacgtggctctcctgaagcggctgcggaatgccgccgactggtttggcatacttgccgcacaaacacttgctgtacgcgccgcagttacgggttgtacaagcggaaagagattgcgtcttgtcgatggaacagcaatcagtgcgcccgggggcggcagcgctgaatggcgactacatatgggatatgatcctcatacctgtcagttcactgattttgagctaaccgacagcagagacgctgaacggctggaccgatttgcgcaaacggcagacgagatacgcattgctgaccggggattcggttcgcgtcccgaatgtatccgctcacttgcttttggagaagctgattatatcgtccgggttcactggcgaggattgcgctggttaactgcagaaggaatgcgctttgacatgatgggttttctgcgcgggctggattgcggtaagaacggtgaaaccactgtaatgataggcaattcaggtaataaaaaagccggagctccctttccggcacgtctcattgccgtatcacttcctcccgaaaaagcattaatcagtaaaacccgactgctcagcgagaatcgtcgaaaaggacgagtagttcaggcggaaacgctggaagcagcgggccatgtgctattgctaacatcattaccggaagatgaatattcagcagagcaagtggctgattgttaccgtctgcgatggcaaattgaactggcttttaagcggctcaaaagtttgctgcacctggatgctttgcgtgcaaaggaacctgaactcgcgaaagcgtggatatttgctaatctactcgccgcatttttaattgacgacataatccagccatcgctggatttcccccccagaagtgccggatccgaaaagaagaactaa

SEQ ID NO: 11537 - DNA, 222 bp, Escherichia coli
atgcaatgtgcttgtggtggcgaaacaaaagatagtatgtcaataagtaaattacatgacctcagatgggaatttgtgatctgtaaatcatgtgggagaatagatatggatatattatttgattattccagaacaaagataatacttaaaggttatcaggcaaggttgttttatagagagcagacaataaatagtaaaaattcaaatgaggatgaagaatga

SEQ ID NO: 11538 - DNA, 1200 bp, Escherichia coli
ttgcccttaattacgctaccttatttaacaagatgcttggggttttatcaatatggtgtattgaatactgccatcaatattatactatacatcatcttggttattgattttggatttaatttaagcgccacaagagaaatatcacagaaaaaaaataactttgtagcggtatctaaaatatttacagatgtgatttttgcaaaaattatactttttttcggtgtgcttgtttttactttcctcatacttaaactaattcccgactatcaagatgtaacaagattggtttattttatgttacctcaagtcctatcttcgatattattcccactgtggttatatcaagggtatgaaaaaattggatatgctgcatttataaacgttcttggaaaatgtataacaatcccattgctattaatctttgtacaaaatagcaaagatgtaacaaatgctgcaattatattaagttggtcttctttagttcccttattaatttattatatacgtagtaatcttccgcgaacaaagttttatacctcaaggtgtagattcaagtacttaaatagaacattagctaatgcactggtcgtttttattggttccattgctgtaaacctgtatactttaagcacaccattagtattaagtatagttagtgattttgatcaagttggttattttgttgcagctgataaaataagggctgcatttattggcgtttttttaattgtagggcaggcgatttatcctagagcaagtgccctgtataatgaagatataattgcgtataataaatttgtcataagcattatattttaccaaattatagtatgtacgttctctgctatagccttttattacttcatgccagaggtggcaccaattattttgagtcaaaacaaattaaacgtagaagagttatctgttataattaaattgatgtcgccaatgattattttgatacctctttcggtgatattagctaactgcgtacttttgcctcaaaggaaaaataaacaatacgctttagtgcctattattacagtcataattcatatgagttactctataattttgtgtgaaaagttaggtgcgctaggggcaagttacgcaatacttctcacagaaattattagttgtgctttactagcatattttacattcaaagatagactaattcagctcaatccagccagataa

SEQ ID NO: 11539 - DNA, 1251 bp, Escherichia coli
atgattacgggcttttcgccatcatataaaaaaattgttattggtgacgatgaaataacgatgcctggcgacaagattgttaagtttaaacgtgcatcgaaagcaacctatattaacaaatctggtgtgctgacagaggctgccattgacgagccacgatttgaacgtgatggcctgcttattgaggggcaaagaacaaactacatgctcaattcggaaagccctgccagttgggggcgatcgtcaaatatggatgtgcccgaaacagggacggataattttggttttacctatggaaagtttgtctgcaacgattctctgattgggcaaacctcagccattaatatggcatcaattgctgcaacaaagtcagttgatgtctcaggcgataataaacacgtgacaacctcatgtcgttttaaaacagaactgcaggtaaggttgcgtatccggtttgataaatatgacggtagcgcaacaacttttcttggtgatgcgtatattgatacacaaacgcttgaaattaatatgacaggcggtgctgcctcaaggattacagcgagagtcagaaaggacgaagctaccggatggatttttgcagaggcaacaattcaggcaattgatggggagttaaaaataggctctcagatacagtattctcctaagcagagcggggcaaccgtatctggtgactatatttatctggccaccccacaagtagaagatgggccttgtgtatcatcttttattatatcaggagcgacggcggcgacccgcgcaagcgatatagttacagttccaattaagaataatctttataatcttccttttacggttctttgtgaggtacataagaactggtataaaacgccaaatgcagcgccacgtgtttttgataccggcggtcatcaaaccggagcggctattattcttggcttcggtcgttcaacagattacgacggatgtccttattgcgatattggaggagctaacagacgggtaaacgaaaacgcatcgcttgaaaaaatggttatggggatgcgtgtaaagtcagagcagtctacgtgctcagtaagtaacgggcatatatccagcgaaacaaaaaccacatggtcctgtattcagaacaccgcaattatccgtattggaggccagactacagccgggttgcgtcatttatttggtcatgtcaggaatttcagaatatggcacaaggcattgactgatgctcaggtgggggagtcaatctaa

SEQ ID NO: 11540 - DNA, 507 bp, Escherichia coli
atggcctttttattgaataaaagtgatatggcctcctccatcggtatctctgttcaggcatttgataaatggggcgttcctcctgttgaacgtcgggggagggaagttttatatgacgttaaaactgtactggagatagatcgcgagcggcgacaacacaatcagagaacacctgatgacgggggagaactggaggaaaggctgcttcgggccagagctgaactgacagaagaacaggctgtagctcaaaaacttaaaaatcaggtaaccgaaggtaagctcatcgattcagacttctgcgttttcgccctcagcaaactggcgatggcattgtccagtacgcttgattccattccgttatccatgcagcgacagttcccggatttaacgccacgtcatattgaccatctgaaaacccttattgcaaagggcgcaaatcagtgtgcgcgggcaggggataaattaccggatttgctggatgaatatatcagagcaacaactgaataa

SEQ ID NO: 11541 - DNA, 867 bp, Escherichia coli
atgaagtatgtctttattgaaaaacatcaggctgagttcagcatcaaagcaatgtgccgcgtgctccgggtggcccgcagcggctggtatacgtggtgtcagcggcggacaaggataagcacgcgtcagcagttccgccaacactgcgacagcgttgtcctcgcggcttttacccggtcaaaacagcgttacggtgccccacgcctgacggatgaactgcgtgctcagggttacccctttaacgtaaaaaccgtggcggcaagcctgcgccgtcagggactgagggcaaaggcctcccggaagttcagcccggtcagctaccgcgcacacggcctgcctgtgtcagaaaatctgttggagcaggatttttacgccagtggcccgaaccagaagtgggcaggagacatcacgtacttacgtacagatgaaggctggctgtatctggcagtggtcattgacctgtggtcacgtgccgttattggctggtcaatgtcgccacgcatgacggcgcaactggcctgcgatgccctgcagatggcgctgtggcggcgtaagaggccccggaacgttatcgttcacacggaccgtggaggccagtactgttcagcagattatcaggcgcaactgaagcggcataatctgcgtggaagtatgagcgcaaaaggttgctgctacgataatgcctgcgtggaaagcttctttcattcgctgaaagtggaatgtatccatggagaacactttatcagccgggaaataatgcgggcaacggtgtttaattatatcgaatgtgattacaatcggtggcggcggcacagttggtgtggcggcctcagtccggaacaatttgaaaacaagaacctcgcttag

SEQ ID NO: 11542 - DNA, 333 bp, Escherichia coli
atgtcagtaagcaatatgccacctattgatagagctgagcaatcaactgctcatgaaatacagcaagcgaaagtgattgatttaaatgaccgggttctcaatcttgacaacccggatgataaaatgatctccgcttttgctaactatgctgtacaaactgaaaattggcagcaaaatgcgttacaagcattaacgtctgataaaaaaggattaactcctgaaaaattattagtcttgcaggatcatgtgcttaattataatgtcgaggtttcattggtgggaacattagcaagaaaaattgtcgctgcagttgagacgttgacccgctcatga

SEQ ID NO: 11543 - DNA, 240 bp, Escherichia coli
atggcagattggaatggttatattatggacatcagcaaacaatttgatcagggcgttgatgatctgaaccagcaagttgaaaaagcgttggaggatttagcaaccaatccttccgacccgaaattccttgccgaatatcaaagtgcattagctgagtatacattatatcgaaatgcgcaatctaacgttgtaaaagcgtataaagatcttgattcggcaatcatacaaaacttccgctaa

SEQ ID NO: 11544 - DNA, 327 bp, Escherichia coli
atgccatatgccagcaatataagtattgcggtattagatgataatgtattggaaagtcaggctattgaaacgttgtcagcgataggtctttcttatgaaaaatataaaacagctaacaatgtgtatttcaatatcattggtacgttaagtgacagtgaattaaataaaattaataactatgttgacgaatattataaacaatggggtaaacaatatgtaagatttaatgtgaatttgaaaaatcaggacacaaataatagttcatttagctacggagataaccgattcgagaagtctcaaggtagcaagtggacatttcaggaataa

SEQ ID NO: 11545 - DNA, 537 bp, Escherichia coli
gtgatcgctgagatatttcagggaggctttgtagtcttccagcaacagttcagcaaagtccatttcgaagccgcgacgacacataatgcgcatcaccacgatgtcggtggcttcaccgccgagagtgaaggccggaacctgccagccgcgcagacgcagacgttcagagaggtcatacagggtgtatcccggatcttcaccatctttcagtttgaagcaaaccgccgggatgccttcgtccgggcgacccgtacagatgaactcatacggccccagtttggcgatttcatccgccagataagcggcaacctggtaagaggcgttctgtactttggtatagccttcacgaccgaggcgcaggaattcatagtactgtgcaattacctgacccgccgggcgggagaagttgatggcaaaagtaccaatttgaccacccaggtagtcaacgttgaacaccagttcctgcggcagcgcttcttcgtcacgccagataacccagccgcagcccagcggagccagaccgaatttatggcctga

SEQ ID NO: 11546 - DNA, 459 bp, Escherichia coli
atggggaacgaaaagagcttagcgcacacccgatggaactgtaaatatcacatagtttttgcgccaaaataccgaagacaggtgttctacagagagaagcgtagagcaataggcagtattttgagaaagctgtgtgagtggaaaagtgtacggattctggaagctgaatgctgtgcagatcatatccatatgcttgtggagatcccgcccaaaatgagcgtatccggctttatgggatatctgaaagggaaaagcagtctgatgctttacgagcagtttggtgatttgaaattcaaatacaggaacagggagttctggtgcagagggtactacgtcgatacggtgggtaagaacacggcgaagatacaggattacataaagcaccagcttgaagaggataaaatgggagagcagttatcgattccctatccgggcagcccgtttacgggccgtaagtaa

SEQ ID NO: 11547 - DNA, 435 bp, Escherichia coli
atggtccctgatggccaccgctccggtgcccgggagtcccgggggaaagctttgcccactgttttaacgagatcgccttcaatctggttcgcggacagttttcccagaacccggcagttctcgttaatcgtgacgttgttgagcgtcccggagttcgcattcacgttaccgctgatatcggcatttttcgccgtcagccgcccgtccggtgtcagggaaaatgccggaggattaccgccgctggtaatggtgggggccgtcaggcgcttcaggaacacgtcgttcatgaatatctggttgccctgcgccacaaacatcggcgtttcattcccgtttgccgggtcaataaacgcgatacggttagcggcaaccaggaactggctcagtttgccttcctccgtatcctccatgctgaggccaagccccgcgacataa

SEQ ID NO: 11548 - DNA, 570 bp, Escherichia coli
atgatagaaaataagatacaaactgaagtaaagaaatcacgaagaggtctcccacgtcatactaaaaacccatttcttaatgatacaaatctacatacaaaaactggtattagacgtattacaacaggaaaagaccgcttagcattagtgaatgaaaatacgggagagcacgttggcaatggtggcttctttcaggctatggaagtagataagacacagtttgttaaactttatgttgatggcgtatcggctattgaaggattgtcttcatctggtaagaaagtcttcaagattctttatcttgctatcagagataataaggatactgatactattttaatgtcatatgatattgtagatcaagatatcgtgaagatatcgagaacgacctatttcaagggcatgaaagaacttgctgataagaaatttatcgcagagactatggtacagaactattactttattaatccagactatatgtttaatggtgatcgcttgacgtttatgaaaacatattatctttccagcagtaactctaataaacccagtaacaataaggtgaaaaaatga

SEQ ID NO: 11549 - DNA, 480 bp, Escherichia coli
atgaaaaccgtttctcagaatacccccacaatttattcagctacaacaccagagaataatccgcctcagttggttgccagcctcgtccctgatgaacagcgcatcagcttctggccgcagcattttggcctcattccacagtgggtgaccctggagccccgtgtcttcggctggatggaccgtctgtgcgaagactactgcggtggtatctggaatctgtacaccctgaacaacggcggggcatttatggcacccgaaccggatgacgatgatgacgaaacatgggtactgttcaatgccatgaacggtaaccgcgcagaaatgagcccggaagccgccggtattgccgcctgtctgatgacgtacagtcatcatgcctgtcgtacggagaattatgccatgacggtccattattaccggttgcgggattacgccctgcagcatccggaatgcagcgccattatgcgcatcatcgactga

SEQ ID NO: 11550 - DNA, 141 bp, Escherichia coli
atgctgaaaggcgggatttccggtcgcagtgcaaaaggaaaacgtatccatacccgggccattcacagcattgataccgacattaagctcaatcgcgcattgtgggtgatggcagaaacgatgctggagagcctgcgctga

SEQ ID NO: 11551 - DNA, 294 bp, Escherichia coli
atgtcattagtaggatataatagtaaaatcataataaccatcgcgctgatatcgttgctctctgcatgcaccagagaaaattcattaaaggagaatcaaaataaaagaagtggcgaatcccaagcgatagtagatgcaagacagttctttagcgaacacccggaatatatatctacagcagaactggagcaaaagctatatcgcgaatttgcacaggttactacagttccagcttataaagagatgagtatgtatcaattgcttgtcatttcacaagatcatttaactcattaa

SEQ ID NO: 11552 - DNA, 501 bp, Escherichia coli
atgcaagtcttttccagtgatgtctacttcactgtagtcactaatgcattattagcatcccaaaaagaatattacagcgatttagttgcgttggttgatcttgggcattcattcgttgttattgatgagcatcaacatcgaaatctcaaaccaaatacagaacctgtaaacatccttttaagcaacaatttcatcaggatcaataagaatattagattatctgatttaacgcatttcctgatttcgaatcttcatacacaaaatgtgtattccacacaagaagcacttacccatgatgatatagatatcctgcggttatgtgtttcttactcgttaaaacaagtagccattattaaaggaattgattataaaacagtatcatatcacaaaataagagccctaaataaacttaacataaaaggtactgttgagttgtttatagcactctgtgaatgggataaacattattttaaactccaatcttgcgtaagagaaagttga

SEQ ID NO: 11553 - DNA, 396 bp, Escherichia coli
atggtcgcagtggtacaggtggatttttcgcgccggcgtgtacaccgggtccatctggttttgcatctgctccacggtcaggccgcacgatgccagccagcggcggctttcctcactcacccggtcagccaggatttcactttccagccggtcgagcatctgcaccagcaccggcgggaacaccacactgccaccgtcttcgccgccggactgctgaagggcatccgccaggctgcggcgctgcgttttcgccagctcaccggtggcagtttcgaccctgatgagtggcgtgaagctccccggctgataaatcgtctggatgcggctcctgtcgttctgtatcgtggtcagccggtcgccgtcccagccgtaccaggtcacttgcggtttccgtga

SEQ ID NO: 11554 - DNA, 819 bp, Escherichia coli; identical to SEQ ID NO: 6059

SEQ ID NO: 11555 - DNA, 444 bp, Escherichia coli
atgggggccgaactcgtaaaatgggttaaatcgcataagatagatgctcatattattacatttgtagcaaagatgccgtatattgattcaataaaattgcttgaagcaggtgcgaaaggatgcgtatggaaaaccagtcacccggcgaaactaaatcgtgctattgattcgattagtaatggttacacttattttgatagtgtacatatggattgtgaaaaaatatcttccaggtattcctctgataatcaacttacaaatcgtgagtcagaaatattacaactcatagctgatggtaaaacaaacaaagaaatcgctaatttcttgcagttaagcaggaaaacagtcgaaactcatagactcaatatcatgaagaaattagatgttcacagtggtatcgagttgatcaaaacagctttacgtatgggtgtttgcactatataa

SEQ ID NO: 11556 - DNA, 156 bp, Escherichia coli
atgggaaaaattaaaattgtagtttcagatcagcagccgtttatgattgatgggataattggatttctcggacattatcctgatttatatgaggttgttgggggctataaagatctgaagaaagctatagcggagtgtaacaaatctacagcctaa

SEQ ID NO: 11557 - DNA, 345 bp, Escherichia coli
atgtacagtctggtcgccgccggcataaaccacagtggtatttgccgttccttcagctctcacaatctggcgaccgtttttattgatggttgtgcgtacggcatccccgcgaacaaactgcccggtatcaccgttttctgcatccggtcccccttccgccccggtattaacaacggtatccgttgccactgtaccgggcttgacgacctgccagcccttatcattaatgacggttcctgtggctatcgccccctcatgcatccactgttcgccaccattcagcgtggtgttcactgcccgtccctgaaggctctgtccgcctccggcactgataaccgtgtctga

SEQ ID NO: 11558 - DNA, 756 bp, Escherichia coli
atgaaccttcagctcgccgttctgatttatggtggtgttaccggcagtaccacctgccttaacaacctgccagcccccctcgttaattaccgtgttcagcgcaagtccgtatttgtgcacatactggtttcctccctccagccgggtgttatgtgcctctccgtgtaccgtctggtcaccgccggcgtaaatgagggtgtcccgtgccatccccgaagaccagataacctgccggccatttttattgatggtggtggattcagccgtccctccgaccatctgaccgctggacacattttcagactccggaccaccttctgcaccggtgttgacgatggttccggttgcctgcccgccatgtttaatggtctggtagccagactggttaatcaccgttccggatgcactgccgcctgcatgtatccattgttcaccaccgttaaggacagtaccgtaagcctgcccgcgcagattctgtcctccaccggcactgataaccgtatccgtggcactgccacctgccatgacatcctgcagaccgtttgcggtgaccgtggtgtttctggcagtgccaccccgggctatctgctgaccgccggtgttgtcatcagagtccggccccagctcaagcccggtactgacagtcacgccatcagctgttccggatacaaactggttgtcatggtttaccagtgttccgccattcactgtttcacccgggtgcacaacgatgtcagcagccagcaccgggagtga

SEQ ID NO: 11559 - DNA, 282 bp, Escherichia coli
gtggcattcagcggcgctaagcatgagagagagcatactgatatttactcctcatgccgtctgatagtgcggaaaaacggtgctgaaatttataaccgtaccgcgctggataatacgctgatttacagtggcgttattgatatgcctgccggtcacggtcacatgacgctggagttttcggtgtcagcatggctggtaaatggctggtatcccacagcaagtatcagcgatttgctggttgttgtgatgaagaaagccactgcaggcatcacgattagctga

SEQ ID NO: 11560 - DNA, 369 bp, Escherichia coli
gtgtcagacacactccccgggacaacacttcccgacgacaatcacgaccgcccctggtgggggctgccctgcacagtgacgccctgtttcggggcacgtctggtgcaggagggtaaccgcctgcattaccttgccgaccgcgccggtatcagaggcctgttcagcgatgcagatgcgtaccacctggaccaggcctttccgctgctgatgaaacaactggaactcatgctcaccagcggtgaactgaatccccgccatcagcataccgtcacgctgtatgcgaaaggtctgacctgcaaagctgacaccctcggtagcggtggttacgtttatctggctgtttatccgacgcccgaaacgaaaaagtaa

SEQ ID NO: 11561 - DNA, 141 bp, Escherichia coli; identical to SEQ ID NO: 6191

SEQ ID NO: 11562 - DNA, 648 bp, Escherichia coli
atggcagcgacgcacacactccctctggcgtcaccgggcatggcacgcatctgcctttacggggatttgcaacgatttggccaccgcatcgaccttcgtgtgaaaacgggagccgaagctatccgggcgctggccacgcagctcccggcgtttcgtcagaaactgaatgagggctggtatcaggtgcgcattgccgggcgtgatgcaggcgaaaacgaattatctgcccgtcttaatgagccgctggcaaatggtgccgtgatccacatcgtgccgcgtctggcgggagctaaaagtggcggtgtgtttcaggtggtgctgggggcggcgctgattgcggtggcatggtggaaccctgtgggctggctgggtgccgcggctgtatcgggcatgtatgcggcaggggccagtatgatcctgggtggtgtggcccagatgctggcaccgaaagcccggacgcccacagcgaccagcacggataacggtaagcagaacacctatttctcatcactggataacatggttgcccagggcaatgttctgcctgttctgtacggtgaaatgcgcgtggggtctcgtgtggtttctcaggagatcagcacggcagatgaaggggacggtggtcaggttgtggtgattggccgctga

SEQ ID NO: 11563 - DNA, 222 bp, Escherichia coli
atgaaaattatcacccgtggtgaagccatgcgtattcaccaacaacatccggcatcccgtctttttcctttctgtaccggcaaataccgctggcacggcagcactgaagcgtataccggtcgtgaagtgcaggatattcccggtgtgctggccgtgtttgctgaacgccataaggacagttttggcccgtatgtccggctgatgagcgtcaccctgaactga

SEQ ID NO: 11564 - DNA, 201 bp, Escherichia coli
atggtgatacgcaaaaagaagtgctgggactgtggaaacgcgattactcataatactgtgtgttgcccgtattgtggttctgtcgaccccttcggctattaccggaatacagaccgtatcgttaccatactgctggcactgattattgtggtcctgctgactactgtcagcgtcagtgtgtatatactgtgtagctggtga

SEQ ID NO: 11565 - DNA, 564 bp, Escherichia coli
atgaaaaaaacagtattaattaaaaacaaaaaaagtaaaaaaggtttctctcttttagagctattacttgttttaggtattatcgcagccttagttgtagcggcttttatagtatatcctaaagtacaggcatcacagagagcacaggctgaaagtaataacatagcaacgatacaggctggtgttaaagcgctctatacatcagcatccagttttactggattaaataactctgttgctgttcaggcgaagatattcccggataatatgttgagtggttcaggatcagccgctaagcctataaatgcttttaaaggaaatgttgtcgtggcatcagccgatacagggccttccgcagcaacaggctcttcatttaccatcacttatgaaaatgttccggcagccgaatgtactaaaataataacagcagcagcagggaatttttacatagcacaagttggtggtgctactgtcaaagaagcaggtggaacacttaatgtagcagcaacagcagcggcttgttctgacgctaatagcaataaactagtgtttacgtccatataa

SEQ ID NO: 11566 - DNA, 312 bp, Escherichia coli; identical to SEQ ID NO: 6177

SEQ ID NO: 11567 - DNA, 219 bp, Escherichia coli
atgactaatccaatcggtatcaataatttatctcaaagttcaaatatagcgaatgcaacgggtgatgaagtcgtatcattagataaacacatcaacaccagtgctactgatacagatcaaatacaagcatttatagtttcaacatggatggcgccttttcaaaatgatatgtattcagaagataatcctatctcaccttactataaaattgagtggtag

SEQ ID NO: 11568 - DNA, 384 bp, Escherichia coli; identical to SEQ ID NO: 11526

SEQ ID NO: 11569 - DNA, 537 bp, Escherichia coli
gtggcagaagcagccgccgcgcttgcagaactggctgcggcactctcgctttgggccgctgcatcctggctgcttttcgccgcagtttcactggctttggcattcgtttcgctggtcttcgctgccgtctggctggactttgcgttagtttcactcgtcttcgcagctttctggctgttagccgcagcagttgctgatccagctgctgaagtcgcagaaccggctgccgcgctctcgctttgggctgctgcaacctggctgttttttgccgcagtttcactggctttggcattcgtttcgctggttttcgctgccgtctggctggactttgcgttggtttcgctcgtctttgcggctgtctcgctatttttcgcgttggtttctgattttttggctgctgtcgcggagttttctgatgcagtctgtgaggtcgctgccgcctgtgcactattagctgcattcgtttctgaggttttcgccgcgttcttcgatgatgccgctgcagtttcggatttctttgccgccgctgcgctctga

SEQ ID NO: 11570 - DNA, 312 bp, Escherichia coli
atgctgggccgtcgtccggacagcatactcaaagccggtcagcatcggtatcagcgggcatttatccagcgattaaataatgggcgctggcatgttatgcaacgtcttccccaggccagatatgaggagggcaatgacgacaagggaaggaaaaagcgtaatcgccttcccattcaggtggtgaaaatcccgatggcggccccactgaaacaggcgtttgatgagaatgttgaccgtatccggcgtgaacgcctgcccggagaactggcatccgcgctgaaacaacaactgaggattgcgataaaacgatga

SEQ ID NO: 11571 - DNA, 372 bp, Escherichia coli; identical to SEQ ID NO: 11381

SEQ ID NO: 11572 - DNA, 312 bp, Escherichia coli; identical to SEQ ID NO: 9190

SEQ ID NO: 11573 - DNA, 279 bp, Escherichia coli
atgacggtctccctcgttgcccggcaacatggtgtagcagccagccagttatttctctggcgtaagcaataccaggaaggaagtcttactgctgtcgccgccggagaacaggttgttcctgcctctgaacttgctgccgccatgaagcagattaaagaactccagcgcctgctcggcaagaaaacgatggaaaatgaactcctcaaagaagccgttgaatatggacgggcaaaaaagtggatagcgcacgcgcccttattgcccggggatggggagtaa

SEQ ID NO: 11574 - DNA, 180 bp, Escherichia coli
atggtacgaatccgcgtcgctgaaccgccctctgataccggcgcggtcggcaaggtaatgcaaccggttgccttcctgtaccagacgggcaccaaaacagggcgtcacggtgcagggcagtccccaccaggtacggtcgttattgtcgtcgggaagcgttgtcccggggagtgtgtctga

SEQ ID NO: 11575 - DNA, 222 bp, Escherichia coli
atgaaaatcatcacccgtggtgaagccatgcgtattcaccaacaacatccgacatcccgtctttttccgttctgtaccggtaaataccgctggcacggcagtgctgaagcgtataccggtcgtgaagtgcaggatattcccggtgtgctggccgtgtttgctgaacgccgtaaggacagttttggtccgtatgtccggctgatgagcgtcaccctgaactga

SEQ ID NO: 11576 - DNA, 594 bp, Escherichia coli
atggttacctggacccaaatgtatatgccgatgggaggactggggctatccgctctggtcgccctgatcccaataatattcttcttcgttgcactcgcggtattacgtctgaaaggacatgtcgctggagcaataacccttatattatctattctgattgcgatattcgcctttaaaatgccgattgatatggcatttgctgctgcgggctatggctttatttatggtttatggcctattgcgtggattattgtcgcggcggtattcctgtataaattaaccgttgccagcggccagttcgatattatccgcagctcggttatctccatcaccgacgatcagcgtttgcaggtgttactgattggtttctcctttggtgcgctgctggaaggggcggctggctttggcgcaccggtggcgattaccggtgctctactggtgggcctgggcttcaaaccgctatacgcggcggggctgtgtctgattgccaacactgcgccggtggcgtttggtgcgttgggtgtgccaattctggtcgccggtcaggtaacgggaatcgatccgttcgacattggcgcaatggcgggacgttag

SEQ ID NO: 11577 - DNA, 405 bp, Escherichia coli; identical to SEQ ID NO: 1309

SEQ ID NO: 11578 - DNA, 2142 bp, Escherichia coli
atggctatgttcacaccttcattctcaggactcaaaggtcgggcgctcttttcactgctttttgcggcaccgatgattcatgcaacagactctgtaacgaccaaagatggcgaaacaatcactgttacagcagatgcaaataccgcaactgaggcaaccgatggttatcaacctctgagcacctccacggcgacattaaccgatatgccgatgctggatatcccgcaggtggtcaatacggttagcgatcaggttctggaaaaccagaatgcgacaacgctggatgaggcgctttataacgtcagtaacgtggtacagaccaatacattaggcgggactcaggatgcttttgtacgccgtgggtttggcgcaaaccgggatggctccatcatgaccaacggtctgcgaaccgtacttcctcgtagtttcaacgccgcaacagagcgtgtggaagtgctaaaaggcccggcctccacgctgtatggcattctcgatcctggcggactgattaacgtcgtgaccaagcgcccggaaaaaacattccatggttcggtttcagccacctcctccagttttggtggcggcactgggcaacttgatatcacaggtcccattgaaggcactcagctggcgtatcgccttaccggggaagtgcaggatgaagattactggcgaaacttcggtaaagagcgcagtacatttattgccccgtcactcacctggtttggtgataatgcaacagtaaccatgctctattcccatcgggactataaaactccgttcgatcgtggaacgattttcgaccttacgacgaaacagcccgtaaacgttgatcgaaaaatacgttttgacgaaccgtttaatattacagatggtcagtccgatctggcgcaactcaacgcagaatatcatcttaatagccagtggacagcgcgctttgattacagctacagccaggataaatacagcgataatcaggcgcgtgttaccgcgtatgatgcaacgacaggaacactgacacggcgtgttgatgcaactcagggatctacccagcgtatgcatgctactcgtgcggatctgcaagggaatgttgatattgccggattctataatgagattctgggtggggtgtcatatgaatattatgatcttctgcgtacagatatgattcgctgtaaaaaagctaaagatttcaatatctacaaccctgtttatggtaataccagcaaatgtacaacggtttcggcgtcggacagtgatcagacgatcaaacaggagagctactcagcgtatgcacaggacgcactctatctgaccgataactggattgccgtcgccgggatccgctatcagtattacacgcagtatgcgggtaaaggccgtccttttaatgtcaatactgacagccgcgatgaacaatggactcccaaactggggttggtctacaaactgacgccatcggtatccttatttgccaattattcgcaaacatttatgccgcagtcgtcaattgccagctacattggcgatcttccaccagaatcatctaatgcttacgaagtcggggcaaaattcgagctattcgatggtatcaccgcagatattgcgctgtttgatatccataaacgtaatgtgttgtataccgaaagtgttggtgatgaaaccattgccaaaacggcaggccgtgttcgttcaagaggggtagaagtcgaccttgcgggagcattaactgaaaacattaatatcattgccagctacggctataccgatgctaaggttctggaagatcctgattatgcaggtaaaccattgccgaatattcctcgtcataccggttcgctattcctgacctatgacattcataacatgcctggcaataacacactgacgtttggcggtggtggacatggcgtaagccgtcgttcggcaaccaatggggctgactattatctgccaggctattttgttgccgatgccttcgccgcatacaaaatgaaattgcagtatccggtcacactgcaattaaacgtcaaaaacctgtttgataaaacgtattacacctcttccatcgccacaaataatctggggaatcagattggcgatccgcgtgaagtgcaattcacggtgaaaatggaattttga

SEQ ID NO: 11579 - DNA, 1332 bp, Escherichia coli
atgaaacttacaataaatgaaaagataggttttggtgctggtgatatggctatcgcgatagtaatgatgtctttggccatgatcatcacttatttttacacggatgtatttggtctgaaacccgtcgacttaggtattctgttattttctgtacgtatccttgatgctgtgattgatccagttgtgggaacaatgacagacagaacgaatacacgttggggaaaatatcggccgtggttgctttttatgtcaataccgtttgggataagcatttggttgatgttcaccacacctaataccgattattcagttaagcttttatgggcctgggctacctatgtgttacttaccttgacctatacgttaatcgctattccttatgtttcattaatcagcgttatcacggatgatccacaagagcgattgagcgccaatggttatcgttttgttatgacaaaaattgccatgttcgccgtaacaattattgttcctttatctgcaatgtatcttgggaagaataacgtacaactgggttatcaaatagcaatgggggcaatgggaattctggcaacgtgtttatgcctgtattgtttttttagcgtgagagagcgcatctaccatccaaaacccagtctcggtatggccgcgcagtttcggttactgatcaaaaatgatcaatggctcattttgggcgctgtaattgcgatcattatgtttggcgggattattcgtaactctgtcgctgcatattatgcaaaatattacctgaatggtggggatgctttaatttcaccgtttttaacttcaggcgtgatcgcctctgttctggctatgatcgcttgcacctggcttactcgactctacgacaaaataaaaatatttcgttatacccaattactggcgttcgtggtgggtggtgcgatgtatttcgtgcaaccaaattctatagtgttagcttttacattttatattgtggtgacctttctgactgatattcagcttcccatttattgggcatccattgctgagtcagtggattatggtgaaatgaaaacggggcaacgtgtttctggactggcatttggcgggattctcttttttcaaaagtttggtatgggactggcgggagggtttatcggaatcgctttagcgtttatggactatcaacctggcgtagaacaaacaccacaggcgttgtgggggatctgcctgttaatgacgatcattcccgcgatacttaacctgattaccggactcatcatgagattttatctgattaataatgaatattacgaacagattaaggtgtgtttacagcctaaaaatatatga

SEQ ID NO: 11580 - DNA, 753 bp, Escherichia coli
atgataaaaatttataaagccagtaaaggtcagctaaagcatcgtgaaatctttgatgaaataaagaaaaaagtagataacggtgaatggaaagaaggcaaagccataccgacagaaagggaattgtcagaatattatttaagtagcagaacaactattcgaaaggcaatagaaagtcttaaacaacgcggctacctgcatagtgtccacgggcaaggaacatttgtattgccttctcgtagtagagaaaatcatttattgcatagttttaccgacgatattaaagctcgaggtggtataccagcacagaatattcttgagataggctatgttcctgtcagtgatgttatcagaaaaaatctcgacctggatatccatatccaaaccgtattctgtataaaacgcgttcgctatatgggaagtacccccctgggtattcagacatcatggcttgcattaaatgacaggcaagaaataacccaagaagatctgctggcgacgggttcgctctatattttactggaagaaaaactcgctattaaacctttagaagcaacagaaattatctctgcccggcttccctcgccccttgagcgtcaattactggaactgactgccgatgatgtcgtattaagttgtacccgcgtcacgttatccgtggaacgcaaaccaatggagtatgtagagatggtgtatcccgcaagccggtactcctacaaagcacgaattacaaaagacagttttagcgtgtaa

SEQ ID NO: 11581 - DNA, 1077 bp, Escherichia coli
gtgaacaaaatagaacaagctgtaatttataacaaaatattaggttctttagcctgcgcaggtatgggcgatgcattaggcgcagcgactgaactctacagcattgatgaaataaaagctcaatggggaggttttttaaatgcctttgtttctcctcctgccgatacattcgctggctcattaaatggtattgcgggacttatcaccgacgattccagccaaatgtatgtgttttcagaagggttaattgaggctggatttgataacttcaccaataatgactggttagcttgtcttctgcgttgggccgatatgcagccctacgcaaattataaaggccccacaacagaacaaatcgtcaaggcactaaaagaaggtagaccaacaaacaccattgggcgtattggaacatcttctcgtcaggcacccaatgtcggcaccacgaatggcgcaggaatgcgtgtagcccctgcaggattgatctggccaggcaagaaagaaaaagcgtgtcacctggcgctaataacttgcctaccttcgcatgacaccaatattgcgattgccagcgcttgcgccatcgctgcggcgacatcacaagctatgttaccagaagcttcgctcacatcattactggacgccgcaatctggggagcgaattacggcgaacgcctggccaaacaatatgcacgatgtgtcgcagggccatctatcgccatgcgcatccaacttgcagcggacatcgccagacgagccaatgacctggagtcttgtctgcgagaaatggaaggtttggttggtaactctgttgccgcccatgaatccattcctgcggcaatcggtctattgctgtactgcaaaggagaaccctgggaaaccattcatgcctgcgccaatattggcaatgacaccgatagcatcgctacgatggcaggcgcaattgcaggggcatggcgcggttttgatgcgctccctgaagataaatatgcctttttccgcgccgtaaataataaagatttcgatattgaagcgatcgcatcgggtctgacattgcttgcattagaggcacaggagaaataa

SEQ ID NO: 11582 - DNA, 999 bp, Escherichia coli
atgaacatgccagcccgtactcctgttatgccattagcgcaaactcgtgaggaaataaatgctacggcggcatcgttacgccatttggcagctatctggggtgaatgtttttctacttttcagctcgataaacgtgctgttgaacgcgtctgtatagtgggatcgggcgactcctggacggtggcactatgtgccgccgcctggctggggaaatacacacatctgttttgttacgcattgcaaacgtgggattttcttcagactgatttaacccgttatcagaaagaaacgttaatcattattctcagtgcaagtggcagaccatcaatgaccgttgacgccctctgccacgcagtatgctcaaacgcgcaagtgctgggtgtgacgaattgccctggaacaccattttgcgcaataacagaaaacatgctctatacatgggcgaataagcagggtattccaacgcaaagtagtagcgtcacactttatgccctcctgcgcttagcgcaaaaattatgtccaggcttaacaccactgcagattgaagatgatttggaagggaaatttagccagattaatcagcactggcagcaaaagaagcgccatttttaccaacaaaaagagataacgtttcttgggagtggcttaagttggggactggcaatatcggggagcaatttactttcttgcggcccacagattcgtgcgacagcccttccactggaagaattttatcattcattacgcttacatcaggctggtgtcggtcagcattatattttactaccagccacatcctgcgagtccccattttaccttgcaacccaaaaagcaattgttgaacagggagcgacagcagaattaatcagttttatacctgacgccagtgagtccaacaatttatttctggtcatgcagtggttatatgaaatgtgctggtatttaagttgtgattatgtcgacgcaggcgggcaacgcgttagccatagggagaaataa

SEQ ID NO: 11583 - DNA, 915 bp, Escherichia coli
atgaagaaatttgatgtcgccgctttaggcagtggaaatatagatatttttttatctatcccgtcactccccactcgtggcggtaaagttgtcgggacacgtctgggtgaacaagctggcggcacagtcgccaacagtgcctgtgcgatgggacaactgggtctcaatgtggtatctgtttcatgtgtgggcaatgatcattcagcctcgatcattcttgatggatttaaaaaatatcatgtaaattgtgatttcgttcaggtaattccggaattgattgccaataccgcgattatctttattgatgaattaggtgaaaaaacgttggtttactcgcctggtagtgatcatgagtgggataaagaaaaagccctgcaggcaattgcgcaaagccgttatttttatacgatgccagcagatatcgagaaatttcgtatgctggccgaatattcccgtagccagatgacaaaagttgtcgttgatattgagcctcatatcattgcaacacctgaacaccttgccagaattttacaccttgctgatattgcgatatttaattatgacggttttattcgtggctatgcaacagagccagattttacacttctgcatgatatacaagacgagtatcaacttgacgctgtcgtggttacgctggatgttaggggagtaattgcagtcaaaggcaatgagcaagtaaaaataggtagttatacaattcccgttattgataccacaggcgctggagatacttttaatggtgcatttgtttatagcttaataaaaaatatgcccttaattgaagcactaaaatttgcttctgccacagcagcaataaatattactgcattaggtgccagaggtcatctgccgacaccatcggaggttaatctttttctttcacaacacgactaa

SEQ ID NO: 11584 - DNA, 1125 bp, Escherichia coli
atgaaaataagatatgccgctatttttctggcattaccgctgttatgcacaacagcgcaggcaaacagttttcttcattatgctggggagtttaacttccggacgggagaaaagcagaacaatgtcacaatcgcggggctatcagccatcacatttgatgcaaaaaaaaatattttctatgctattaacgatagcagaaacaataataaagaaggagatgccagtctttatacactaaaaatacaggtatcatccaggggcattgagcaagtgaattttctcaaccagcgtccactgcttgatgcaaaacagcaacctttcgtgaccaatacggtggatgccgaaggtctggccctgacacacaatggtaaatcattactctggagttcggagttaggtgctccactgcgtctgagcactctcgatggcgtaatggagaaagattttacgtctttatttcctgctcgctttaatattagttctgacaaagagagcagcaatggtattcgcagcggcaacgcctgggagggcctgacagttacaccagatggaaaatcactttttatcgccgttgaaagcagccttaaacaggatgggcctattgcaagtccaataaattcaggcacatcacgcttactgcaattttctatagatgcagacggtcgaccttcaaagcaattgcatgaatatctctatattactgatcctgttccgcaagtgagtaagttcggtattaatgataatggcgtatccgaggtcatggcgctgaatgatcaccaattgttggtcatcgaacgttccggcagaaacgtcagtgctgggttcaatgactgggattactctgtcagagtttatatggtcgatttaactgctgccagcgatatcaagaatattgacagtctgcaagattggtccaataaatccacgttacaacccgtcagtaaaaaattattaattgattttgctgattacacttcctctgcggattgtattgaaggggtaaccttcggtcctctgattgatgggcatacatcgttaatatttgtatctgataataatttccagccccatcaacagacgaaattttatctattcattgataaggaaaacaaacttaaaatttaa

SEQ ID NO: 11585 - DNA, 696 bp, Escherichia coli
atgttatcctgcctgtcacctacactagtctgtgcagaacagccgcatggatttattgattatcgtcatgagtatcttgatgatactcgcacccacgcggaccgcgttgaatttggtacattttttagtaatggtatcggtttgatgggagaattacgctataacaccgatgaaggtgataaagataagtgggacccctcacaatttggcaataacggaacaggattatctgttgtttaccgctttaagccgctggatgacaaaaaattctggttagaacccatgttctggcttgataccacgcaatattggtcaacttacgaatatggtctttctgcgggttatgacttcagcaaagaatggaaagtttcgggtcggtttcgttatgacatggataaagccaccgataaatccaaaggttatggcaacgatgatcgtaataaccgccgttacgatgtgtggatcgactatcgaccacaaaaaaccaacttccaatatcagttaaacctggtctattacaataatggttatttaacctggaatgatggccataaaaactataccgcatcatttaaagtagggtacaaaatgggatcgtggataccctatatgagtattgcggattataaaggtgtggataaaacatcaagtaatcgccaaatccgctggcgctggggtctgacttatactttctaa

SEQ ID NO: 11586 - DNA, 870 bp, Escherichia coli
atgaataataaatttaaaatcattctctggatgatgctctctgctctgcctgctttatcttacgcacaggtaaaaaatatagttactggcgaatatagtgcggtcagtaaaattatcacagaaaaggaaactctctatccatccgataagatattattggtttttgacattgataacacgttattaacgagtggcactcgcattggcggtgatatctggtatcaatggcaaaccgataaattgcctttaaagccggatgactcgcaaaaagttccttgcctgtatgaaaatacaatcagtatgctttacgaacttagccctatgcagcttaccgagccacagttaccgacaatgttaaaacagtggcaacaaaagcataccgcttttgctctgacatcccgtgcaccggatactctctttccgacattgcgggaattaaagcgaaacggcattgatttttcgtcttccgcactcaggaagaaagaggatactttgccaccctttgaaaaagggaaactcaaacggtcatggctgtacagccagggggtatttttttcttccgggcaagataaaggcgtaattctcgattatatgctggataaaatggggaacaaatatgacgcgattgtttttatcgatgacgggcaagcaaacattcatgcgatgacgaagatgttctctaaggataaatggtcctctacggattttaccattattcactataccagagtggaggatgagcttattaaacaacaaggtgcagtaataacaactgcacaagcagaaaaaatggctatggactggaaaactctggctggttcgctggcaacactatttccagatcgtaataaactgtgcccaataaaataa

SEQ ID NO: 11587 - DNA, 630 bp, Escherichia coli
atgcttaagccagacaacctgcccgttacatttggcaaaaacgatgtagaaattattgcacgagaaacactttatcgcggctttttttcattagatctttatagatttcgtcatcgtctattcaacgggcaaatgagtcatgaggtacggcgggaaatttttgagcgcggtcacgccgcagtcttgctaccctttgacccagtgcgtgatgaagttgtgctgattgagcagattcggattgccgcgtacgacaccagcgaaaccccctggctactggagatggttgccgggatgattgaagagggtgaaagtgtggaagatgttgcccgtcgcgaagcgattgaagaggcgggactgatagtcaaacggaccaaaccggtgttaagtttcctggcaagcccggggggcaccagtgagcgttcgtcaattatggtgggcgaagtggacgccacgaccgcaagcggtattcacggtctggctgatgaaaacgaagatattcgcgttcatgtggtaagccgggaacaggcataccagtgggtagaagaggggaaaatcgacaacgcagcgtcggtcatcgctttgcaatggctgcagctgcatcatcaagcgttaaaaaatgagtgggcataa

SEQ ID NO: 11588 - DNA, 687 bp, Escherichia coli
atggttcagcgattgctgttcttcgttctgaccatcctggttgttaaacgtatattatcccttccgcttcgcctgcttattgccgtaccatttgtgttactgactgcggcagatatgagtattagcctttattcatggtgtatctttggtacaactttcaatgatggatttgcgattagtgtgctgcagagtgatccggatgaagttgtcaaaatgctgggaatgtatatcccttatctatgtgcttttacctttttatcccttctttttttggcagtaataataaaatatgatgtttccttgccgacaaaaaaagtgacaggaatattattgctgattgtcatttcgggcagtttattttccgcttgtcaatttgcttataaagatgcaaaaaataaagaggcgttcagtccatatatactagcgtcgcgatttgctacctatacgccgtttttcaatctcaattattttgctttagcagcgaaagagcatcaaagattactctcaattgcaaacacggtgccgtattttcaactatcagtcagggatacaggtattgatacctacgtgttgattgtgggggagtctgtacgtgtcgacaatatgtctttgtatggattacacgctctacgacaccgcaagtcgaagcacaaagaaagcagatcaaactgtttaatcaagcaataa

SEQ ID NO: 11589 - DNA, 234 bp, Escherichia coli
atgcaatttttcacatccagcgatactgtaatgttatgtgcgaagacctgcgatcgctgtggtcgccatgcgaagacggtggtagatgacattgagttcaatgagtttctgtctgttaatcacttagctggatacggttcaatttttggtgacagtaatcgcttaaaactggatttatgccaacattgcctgaaagacgtcctgggccagtggattacggtctgtgaccaatga

SEQ ID NO: 11590 - DNA, 309 bp, Escherichia coli
atggattcttatgggattttatctgctctggcagaacgaacgattacagcggaagaagcaaaaacaatgacacttgcagccagaagttcttcggctcaggtaaatgaagcatcacttgctctgttactgattgataatactctggatgcgatcaaagcagctgccagtgaagggaaaggatacactttacttccttcttatgagatttctttaaaagccattgatttagcagaagaatttttaaggaaacaatgcggctatgttattgataaccagaatggcgtaaggacggtctattggtttatatga

SEQ ID NO: 11591 - DNA, 1266 bp, Escherichia coli
atgcgctctgttattgttgcttttttatttgcctgttcattctgcgtttctgctgaaactgttaatttaaacaattcatctgttcgctcatttgttcagtggtattcttcaaaaactggcaagcctgttattgttaatcctgatattaaaggaaacgtaaccgtatttaatgctgatgttaatccaacaaatattgatgatttctttaagtctgttctgaatgctaacggttttgtcatgctttctggcaatcctgcggtagtctctttgccgtctaaattaccttcacagatggtttcggattccgatgattctgataaccagtcttatgatacttttccttctgagccatcttaccagccagtacctgtggcgcttacggtcagaaattttaagctgacaaaagttagatcgtccgatgttcagcaactgattaaaatttatcttgattctaatggtggtggtaatgtcgtggattatccaggcaataactcgctgattgtttctgcgcctgacgagctgctgccggttctgtccgattttatcaattctgtggatgttgcccgcgatcaggttctcattcagtcgctgatgtttgaaaccagcttgtctgatggcgttgatttatcgtttgcggcaggttctgcatccggtcataaggttgcggggggctttaatacttctgcactgggtagcgctctttctacggcgggcggttcttttggtatttttgatggtaacgtgttggcgctgtctctgcgtgctgtccagagtaattcacgctctaaggtgatttcaacgccgcgtattcttactcagtctggtcagactggttacatttccgtaggtaagaatgtgccgtttatcaccggaaaggtaacgggcgaatctgccggggtaaataatccgtttcagactatcgagcgtcatgatgttggcgtttctctcaaggtaacgcctgttgtcatgggtaacgggcaactagttctgactatcgacactcgcgctgattcaatcagcaatgatgatcaggcatccgatattattactaatcagcgccagattcagacgacagtccagattaaggatggtcagacgttgttattgggggggcttatcgattcatcgtttagcaatgctgagcgttcagttccagttataagtaaaattcctcttataggctggattttcagtagcaaggcagacagcaatgaacagcgtattatgtatattttgcttacagcacatatcattcgtccactttga

SEQ ID NO: 11592 - DNA, 1095 bp, Escherichia coli
atggcggttcatgtagtaacaggcaaattaggctcaggcaagacacttgttagtgtttccagaatacaggaaagacttgctaagggttgtcctgttgccactaatcttgatcttaaattgcataatatgcctatggttgggcgttatgcgaaaaaaacgcgcgttattcgcattcctgacaagccttcattaaatgatttacttgctattggtattgggaatacatcttacgatgaatcccgtaatggcctccttgtacttgatgaatgtggtacttggtttaattcccgctcatggggtgataaagacagacaacctgttattgactggtttttacatgccagaaaattaggctgggatattatatttttgattcaggatatttcgataatggataagcaagctcgtctggcgcttgctgagcatgttgtttattgtcgccgttcagataaattaaacattccttttgttggctccattatgaatttggtttcaggggcgcgattttctttaccaaaggtacactttggcattgtcaaatatggtgataacgttaattcaattactgttgataaatggatatacaccggaaaatcattatattccgcctacaatacaaaacaggtttttactgataactatccgcatggtgcttattcgcttttgccaccatttatcacgcacggtcaattttctgttcacagaggatttaattattatatgcgcctcacgaaaatttattttcgcaaatcgaaccgtcttatattaatgctttcttttttggcgctggggcttgcgcttggtttctggctccagtctggaaagaatgttgatgaaatctccgctattaaatctgcttatgctgaacaggcgagggcggtaacgcctgattcgtccagtgacttaccccgactttctattaattctttttcacaacttggctttgacgtttccgttacgtttgttgatgcaaaaggtacgaaatatcagtattttgatttgattaaagatggttattccgttgatattaaagatgcctgtcgtgttgttattagaaaaggccgttatttacagactgttatctgtcaggagtaa

SEQ ID NO: 11593 - DNA, 342 bp, Escherichia coli
atgcctttattattaggtattcctgcattgttgcgttttcttattggtcttgttcctttgtttattggctatgtggcgagttttttagctcgacttgctaccagaacaggattaatcgcctttgcattggtcgcattaattacaacaactgttacgcttttaatgcagtaccttgctgaggtcatgtataacggtttacctgctgatttctcccatttaatggcgtctgtattgcctgaccattttcaggcgtgtgttaacgttattatggttactcgtatcagtgtttttgttttcgatttaaaacaaaaatttcttgattatgcaaacagggtgatttaa

SEQ ID NO: 11594 - DNA, 1296 bp, Escherichia coli
atgaaaaggaaaatattaattctttccgctgtcctcatttctcctttttcacatgctgagtcatgggaaagcattactaaatccacttatcaaagctctgcctacgctgaaagtaagcaaataaccaatcaggatggctctaagtcaacggtttactatattgatgctgctatgcaggcctccgcttgtcagggtgctaaatccagtgctcagagtgtatttactcaggttaaaccaacttatgagggtatctggcctgattctgaattccgtcttgtttttactggtgattgtacttacagcgattcaccagggcagaaggataaatattggtctttaacggcttatattgttggtgatattcagcgttctgttcctgatgaaaaacctactgacccgacaccagaagaaatttgtgaagcgaagccgccagaagaaggtgtatttaataatgttgattcatatgatggtggtcgttatatctactataacggctgtgaatatgaggctactggtgtcattgtttgtcagggtgatggtactgtttgcgctgcaacatggaagcctacaggtactgtagctgacccctctgataaaccctcaaccccccaaaatggtggtggtgagtctggcggtggtgagtctggcggtggtgagtctggcggtggtgagtccggtggcggtagttctggcggtggtgagtccggtggcggtagttctggcggtggtgagtccggtggcggtagttctggcggtggctttagtggttccagtctttctaaaggtgatattcagtctgctatcgaaggtgcttcacccaaaatagccagcgatattcatgataaattaacggagaaagacacttcatcagatgataaaaaaaatgccgatgaacaaactaggaataatataaatcgtcttgacgattccattaacaatcttacgcggggggctggccgttttgctgacccttcaggtggtgattctcgttatggaaagggcgactctgaattagatggcgcttctactttggctgattctgaattgggaattgaaaaggattctcacggtgctttatgggaagcatttttaaataaaggtgctatgctgcctaatttacccaatggtaacggctgctctgattttattatttttcccggagaggtttatcagattgatattggttgcgataaattactgactattaaagatgttctttcatgggttttttattgccttacgttctggtatgtctttacttctttaacttcattgcttcgcaaagggggtgagtga

SEQ ID NO: 11595 - DNA, 243 bp, Escherichia coli
atgaaaattctgtctactgttaaatataaagttgctctggcttcaactgcgctttttgtttctgcaagttcttttgcggctgaaggcgctacaggtggtactgattatgcaggtcaggcaatggatgctttgttgactcaggcaaatgatctcattggtaaagtatggcctgttgttgtggctgtggttggcgctgggcttgccattcgtattttcaaaaaattctcttcaaaagcggtttga

SEQ ID NO: 11596 - DNA, 318 bp, Escherichia coli
atgtctaattatggtcttttcgttaagggtaaaatgttgggagcccgccaacgtaataaagttaatggtcagggctattataatgaaattggtattggccttgaaatacctgatggttttggtggtacaaagcaggatcaaattattattcgagtttctcagactctcgttaacgcaggtctaatgaaccaggcgaatgctttcattgggaaattagttcaaattcctgtctatgtccgtgcgtggtcaatggagggtagggaaggtgtaacttataatgtttcttccgatggtggcatcgcagagatcaaaggttaa

SEQ ID NO: 11597 - DNA, 1053 bp, Escherichia coli
gtgatcgattggcttaccgggattttcccttgcacacacaaaccgcttccggcggggagtgttgtcagcgttgatgctgacggtgcaattgagtgggaaaccgttaagcgactgactgttcgcggctcgcatgaagcaacgatgaaagtacgatcgataggatctaatggcgaaggtaaagcgacacatttgtacattgatggtaatccgtccaagtttttgcaggggcattctgttgttgggtcggatgatatacaagggctcatgttgacggtctatgccaggattttatccttattgaatattcctcatgatttagcgtcttataaagctgttatagcaggtcagtataaaatttcacgtgttgacattaattacatgtattcattatctacgctagaaaatgtcagatcatggctttatgccgccgaatttaaagctaaaacacgccatggtcgcgcatgtgggaaaggcggtacagtttatttaggtaaaaactcccgtcgatggagtctgaaattttattcaaaatatgatgaacacgtttcgggtaaaaaagggcaccagatagccgaagattttgtacgagccgggttactggactggacgaaagataaattacgtattgaattaacattaagaacaactgagcttattgatttaaatttaacgcttggcgctaactggaatatgaaaacaccacgtcaattattctctgaatatgtagggagaatagaaatgaatcagaatgctattttaagtgatgaaaaaataacgaaactgccaagaaaaatacagtcaacttatttactttggaaacaaggggctaacatgaaagaaatgttacctcataacactttttatcgccatagaagagaattgctttcgttcggtatcgatattaatttctattgtgattcaccagactctaataacgttgttccgctaataagaacgctggaagccaagccagtggaaatccccttatggatttatgagaaaggttttattttcgattacaaccgtatttcgcacgccagtagctggcattaa

SEQ ID NO: 11598 - DNA, 183 bp, Escherichia coli
atggcaaagcgcacgacttataacgtgacggaagaaagaaaaatgaaactagaacgactggctataaatgccagtgtaaaactaggaaaaacaattacatggacagagattttaggttatctgattgataactactctaaagatgcagcagaagatctcatgtctgccaaacaaaaggattaa

SEQ ID NO: 11599 - DNA, 276 bp, Escherichia coli
atgttatcttttcaggttttcctttttaaaaaagcattagaggaagaattagatataatcaaatggcatccaacaaatgaacaattggaggagatgttcaatgagataaaaaaactcagtggcaatgaaagcatcactgaagttgaaaatatcgttcatcgaatttacaaaaaaccgattacaagaatgatttgtaatggattgaatacatcgaaagcaagttcgctattggcaaaaattcaatcccagtcaaataacactcaacaaaaaagatag

SEQ ID NO: 11600 - DNA, 693 bp, Escherichia coli
atggatgttcacggtatcattgataatcaaaaaaaagaaattgagcgtttatatgaaaaatatactgagtcattagagtgttacctatctggtaaatgtgattttgataccgtgaattcatgtggagacagttttttcggctatttagaacactgcgctgcacataacagaacagtagatgaattaaataatactcaatggaatcaatggcttgcagaaacatgcattgatgttcttcaccttatcttagctcattacaaaaaatatagagaggtaatgaatgataatagtattaaaccaagctccactgcttttgcttcaatgcaaaggatagtaaaagcccatgacaaacgttctgcaaaagaaataaggaatcttttcgttaatgaagatatgccagtatatggatttgacaataaaggaaaagaaaaattgacaaaagcacacgagagaatagcggcatttagctttggcattttacttgttattctttttataataatcgcaatatttatacctaatccaacgaactttcaatacactttctttcgaataattctttcagcagcagttgctggggtagtctcatttatacccgggtttatagaagtcaaaatatcaaactgggtaagagcaggtggagcattagctgtatttgtgattgtctattacgtggctcccgcagcattatga

SEQ ID NO: 11601 - DNA, 1440 bp, Escherichia coli
atgtcaggatttaaagaagattttttatggggcggtgcggtagccgcacatcaattggaaggtggctggaatgaaggaggaaaaggcatcagtatcgctgatgtaatgactgctggcgctcacggggtgccgcgtgaagtgacagaaggcgttatcgacggacttaattatcccaatcatgaagcaattgatttttatcatcgctataaaacagatattcagttatttgccgggatgggattcaaatgctttcgaacttccattgcctggacacgaatctttccgcaaggtgacgaacaggagccgaatgaagagggtttacaattttatgatgatctcttcgatgaatgcctgaagcagggaatggaacctgtggtgacgctttcgcattttgagatgccttatcatctggtgacaaaatatggtggctggcgaaaccgtaaactgatcgacttttttatccacttcgcatcaacggtcttcacgcgctataaagaaaaagtaaagtactggatgacgtttaacgaaatcaataatcaggtgaatttcagcgaaagcctgtgtccatttactaattccggtatcttgtattcgccagaggaagatctcaatgagcgcgaacaaataatgtaccaggcggtacattatgagttagttgccagtgccctggcggtacagactggaaaactgatcaatcctgaatttaatatcggctgtatgattgctatgtgccccatctatcctctgacgtgtgcacccaacgatatgatgatggccacgaaagcgatgcatcgtcgttactggtttactgatgttcatgctcgtggatattatccgcaacatatgctgaattactttgcaaggaaaggattcaacctcgatatcacaccagatgataacgcgattcttgccagaggttgtgtcgactttatcggctttagctactacatgtcttttacgacgcaattttcgccagataatccgcaactggattatgttgaaccacgagatttggtcagcaacccttatatcgatacatccgaatggggatggcaaattgatccggcagggctacgttattcactcaactggttctgggatcatttccagttgccgctgtttattgtcgaaaatggatttggtgcggttgaccagagacaagctgacggcacggtgaacgatcactatcgcattgattacttttcctcccatattcgggaaatgaaaaaagccgtagttgaagatggtgttgacttaattggctacaccccgtggggttgcattgacctggtttctgccggaacaggagaaatgaaaaaacgctacggaatgatttatgtcgataaagacaacgaagggaagggaacgctggaacggatacgtaaagcatcgttttactggtatcgggatctcatcgccaacaatggcgaaaatatatga

SEQ ID NO: 11602 - DNA, 312 bp, Escherichia coli
atgtgtgcaacaaaacgcaccgtaataagaccggcctggatctggaatacatggaatcagacggggcttgaattaggctggtttaagcaacagaacaaaactcagcagggggtaacgctaaatgaatcggcttataaaacgacactctggcatgcattgaaagtgggtgaaagtattttaggttcacgaccagaaattcgcttctacgggacgtatatcaatattctggataacgaattatcgaattttaagtttaatgagaacagcaaagacgagtttatggccggcatccaggcggaagtctggtggtaa

SEQ ID NO: 11603 - DNA, 891 bp, Escherichia coli
atgatcaagaagacaacggaaattgatgccatcttgttaaatctcaataaggctatcgatgcccactaccagtggctggtaagtatgtttcacagcgtggtcgcgagagatgccagtaagccagaaataacggataaccattcttatggactgtgccagtttggtcggtggattgatcatctggggccactcgataacgatgaattaccttatgttcggctaatggattctgcccatcaacatatgcataactgtggtcgggaattaatgctggctattgttgaaaatcactggcaggacgcgcatttcgacgcttttcaggaagggttgctttcttttactgcggcattaaccgattacaaaatttatttgctgacgatccgtagcagtatggatgttctgacgggattgccgggtcgtcgggttcttgatgaatccttcgatcatcagttacgcaatgctgaacctctgaatctttatttaatgttgttggatatagaccgatttaaattggttaatgatacctacgggcatttaatcggcgatgtagtattacgcaccctcgcaacttacttagccagttggacgcgcgattacgaaacggtttatcgctacgggggcgaagaatttatcattattgtcaaagcgactaatgatgaagaagcatgtcgtgcaggtgtcagaatttgccagttagtcgataaccatgccatcacacattctgaagggcatatcaacattaccgtgactgctggtgtgagtcgtgcatttcctgaagagcctctggatgtggtcattggaagagcggacagggcaatgtatgagggtaagcaaaccggaagaaatcgctgcatgtttattgacgaacaaaatgtgattaaccgagtttaa

SEQ ID NO: 11604 - DNA, 894 bp, Escherichia coli
atgaatattgaacttcgtcatctgcgttactttgtcgctgttgcagaagagctgcatttcgggcgtgccgctgcccgcctgaatatttcgcaaccacctctaagtcagcagattcaggcgctggagcaacaaattggtgcccgactgctggcacggaccaatcgcagtgtattgctgacggaagcaggaaaacagtttcttgtagatagtcggcaaatcctgtctatggtggatgatgctgccgctcgcgctgaaaggctgcatcagggcgaagcgggggagttgcgcattggttttacttcgtccgctccttttattcgggcggtgtccgatacgttatcgctgtttcgccgtgattatcccgatgtccatttacaaacccgcgaaatgaacactcgcgagcaaatcgctccgctcattgaaggaacgctggatatgggattgctgcgtaacacagcgttaccggagacgcttgaacacgcagtcatcgtccatgaaccgcttatggcgatgatcccgcacgatcatcccctggcaaataacccgagtgtaacgctggctgaactggcgaaagaaccctttgtcttttttgatccgcacgtcggaacagggctgtatgacgatattctcgggctgatgagacgttacaatttgacgcccgtcatcactcaggaggtgggtgaggcaatgaccatcatcggtctggtttccgctggtctgggtgtttcaattttgcctgcgtcatttaaacgtgttcagctcaacgaaatgcgctgggtgccgattgctgaagaggatgcggtttctgaaatgtggttggtctggccgaaacatcatgaacaaagtccggctgcgcgtaactttcgtattcatctgctgaatgctctcaggtga

SEQ ID NO: 11605 - DNA, 450 bp, Escherichia coli
gtgtctgacgagagcgacgacaaaacagaagcccccacacctcaccgactagaaaaagcgcgggaagaggggcaaatcccgcgttcccgcgaactgacttcactgctgattttgctggtgggcgttagtgttatctggtttggcggtgtgtcgctggcccgtcgattgtcgggcatgctctccgcagggctgcattttgatcacagtattatcaatgacccgaatctgatcctcgggcagattattctgctgatcagagaagccatgctggcgctgctaccgctgattagcggcgtggtgctggtggcgattatttctccggttatgctggggggctggtatttagcggaaaatccttgcagccgaagttttccaaactcaacccgctaccgggcattaaacggatgttctcggcacagactggcgcggagttgcttaaggcaattttga

SEQ ID NO: 11606 - DNA, 1248 bp, Escherichia coli
atggcactgaatattccattcagaaatgcgtactatcgttttgcatccagttactcatttctcttttttatttcctggtcgctgtggtggtcattatacgctatttggctgaaaggacatctagggttgacagggacggaattaggtacactttattcggtcaaccagtttaccagcattctatttatgatgttctacggcatcgttcaggataaactcggtctgaagaaaccgctcatctggtgtatgagtttcatcttggtcttgaccggaccgtttatgatttacgtttatgaaccgttactgcaaagcaatttttctgtaggtttaattctgggggcgctcttttttggtctggggtatctggcgggatgcggtttgcttgacagcttcaccgaaaaaatggcgcgaaattttcatttcgaatatggaacagcgcgcgcctggggatcttttggctatgctattggcgcattctttgctggcatattttttagtatcagtccccatatcaacttctggttggtctctctatttggcgctgtatttatgatgatcaacatgcgttttaaagagcaggaacaccagtgcgtagcggcggatgtgggaggggtaaaaaaagaggattttatcgcagttttcaaggatcgaaacttctgggttttcgtcatatttattgtggggacgtggtctttctataacatttttgatcaacaactctttcctgtcttttatgcaggtttattcgaatcccacgatgtaggaacgcgcctgtatggttatctcaactcattccaggtggtactcgaagcgctgtgcatggcgattattcctttctttgtgaatcgggtagggccaaaaaatgcattacttatcggtgttgtgattatggcgttgcgtatcctttcctgcgcgctattcgttaacccctggattatttcattagtgaagctgttacatgccattgaggttccactttgtgtcatatccgtcttcaaatacagcgtggcaaattttgataagcgcctgtcgtcgacgatctttctgattggttttcaaattgccagttcgttggggattgtgctgctttcaacgccgactgggatactctttgaccacgcaggctaccagacggtttttttcgcaatttcgggtattgtctgcctgatgttgctatttggcattttcttcctgagtaaaaaacgtgagcaaatagtgatggaaacgccagtaccttcagcaatataa

SEQ ID NO: 11607 - DNA, 1212 bp, Escherichia coli
atgattgtgcgcatactgctgctgtttatcgctctgttcacctttggtgcgcaggcgcaggctatcaaggaaagctatgcctttgccgtactgggcgaaccccggtacgcatttaatttcaaccattttgattatgtgaaccccgccgcgccaaaaggtgggcaaataacgttgtctgccctcggcaccttcgataatttcaaccgctatgcactgcgcggcaatccgggcgcacgcaccgagcagctgtacgacacgctatttacgacttccgatgacgaaccaggcagttattacccgctgattgctgaaagcgcacgctatgctgacgattattcctgggtggaggtcgctattaatccacgcgcccgttttcatgatggttcgcccattactgcccgcgatgtagagtttacttttcaaaaatttatgaccgaaggcgtgccgcaatttcgtctggtctacaaaggcaccaccgtcaaagccattgcgccgttaaccgtgcgcattgagttagctaaacccggcaaagaagatatgctgagtctgttttcgctgccggtatttccagaaaagtactggaaagatcacaaacttagcgacccgctcgccacgcctccgcttgccagtggtccgtaccgcattacgtcctggaaaatggggcaaaatattgtctattcccgcgtgaaagattactgggcagcaaacttaccggtaaaccgtggacgctggaatttcgacaccattcgctacgattattacctcgatgataatgtcgcctttgaagcgtttaaagcaggtgcctttgatttgcgtatggaaaacgacgccaaaaactgggccacgcgctataccggtaaaaatttcgataaaaaatacatcatcaaagatgagcaaaagaacgaatcagcccaggatacgcgctggctggcgtttaatatccaacgtccggtattcagcgatcgccgggtgcgggaagcgatcactctcgcctttgactttgaatggatgaacaaagcgttgttttacaatgcctggagtcgcacgaacagttattttcagaataccgaatacgcggccagaaattaccccgacgccgcggagctggtgcttctggcaccaatgaaaaaagatctaccgccagaagtcttcacgcaaatctaccagccgccggtatccaaaggcgatggctacgatcgtgacaaccgttaa

SEQ ID NO: 11608 - DNA, 1089 bp, Escherichia coli
atgtcaccgcagaataatcatctgcagcgtccgcctgccgctgtgttatacgccgatgaactggcaaaattaaaaaaaaatgatcacgcaccttgcccgcccggttggcagttaagtttgcctgcggcccgtgcttttatccttggcgatagcgcgcaaaatattagccgtaaagtggtgattagtccctccgctgtcgaacgtatgttagtcactcttgccaccgggcgcggtttgatgttggtgggggaacctggcaccgcaaaatctctcctgtctgaattactggcaaccgctattagcggcgatgccgggttaaccatccagggcggcgcatctactactgaagatcaaatcaagtacggctggaactacgccctgcttatcaaccatggtccgtcaacggaagcactggtccctgccccgctttaccagggaatgcgcgacggcaaaatcgtccgttttgaagagataacgcgtacaccgctggaagtacaagactgtctgttaggtatgctttctgacagggtgatgacggtgccggaactcaccggtgaagccagtcagctctatgcgcgggaaggctttaatattattgccactgccaatacgcgcgatcgcggcgtgaatgaaatgagtgccgcgctaaagcgtcgcttcgattttgaaactgtctttccgattatggatttcgcccaggagctggagcttgtcgccagtgcttcggcgcgtttgctggcccatagcggcattccgcataaagtgcctgacgcggtactggagttactggtccgcacctttcgcgatctgcgtgccaacggcgaaaagaaaacgtcaatggatacactgacagcgattatgtccaccgctgaagccgtgaacgtggcccacgcggtgggcgtccgcgcctggtttttagcgaatcgcgcaggtgagccggccgatctggtggactgtattgccggaaccatcgtcaaagataacgaagaagatcgcgcgcgcctgcgccgttacttcgaacaacgtgttgctacacataaagaagctcactggcaggcttattatcaagctcgccaccgcctgccgtga

SEQ ID NO: 11609 - DNA, 324 bp, Escherichia coli
gtggtgctattctcccttgcgggtttgctgaacggcgtgtttgccaaaacgttcgatgacatcagcctggtgccaacctttgtgttaacgccactcacgtatttgggcggggtgttttactccctgactttgttgccgccgttctggcaagggctgtcgcacctgaacccaatcgtttatatgatcagtggtttccgctacggcttcctcggtatcaatgatgttccgctggtcactacctttggcgtactggtggtctttattgtggcgttttatttgatctgttggtcgctgatccaacgtggacgtggtttgcgtagctaa

SEQ ID NO: 11610 - DNA, 1230 bp, Escherichia coli; identical to SEQ ID NO: 3782

SEQ ID NO: 11611 - DNA, 189 bp, Escherichia coli
atgaatacaactccctcacagcgattaggttttttgcatcacatcaggctggttccgttatttgcctgcattcttggcggtatcttagttctattcgcattaagttctgctctggctggctatttcctctggcaggccgatcgcgatcagcgtgatgttactgcggagattgagattcggaccggttag

SEQ ID NO: 11612 - DNA, 531 bp, Escherichia coli
atgggaaataaatactcaaggttacaaatcagcattcactggctggtctttttgctggttatcgtagcgtattgcgcaatggagtttcgtggtttcttcccacgtagcgatcggcccctcatcaacatgattcatgtttcctgtggcatctcaattctcgtactgatggtggttcgtcttttgttaaggctgaaatgcccaaccccgccgattatacctaagccaaaaccgatgatgacgggactggcgcatttgggccatttggtgatttatctcctgtttattgcgctgccagtgattggtttggtgatgatgtataaccggggcaacccgtggtttgcgtttggtttgacgatgccttacgcttcagaggccaatttcgagcgggttgatagcttaaagtcgtggcatgaaacgctggcgaatctgggatattttgtcatcgggttgcacgctgcggctgcactggcacaccactatttctggaaggacaacacacttctacgcatgatgccgcgtaaacgttcctga

SEQ ID NO: 11613 - DNA, 336 bp, Escherichia coli
atggctcagctttcgttacaacatattcaaaagatctacgataaccaggtgcatgtggtgaaggacttcaacctggaaattgccgataaagagttcatcgtatttgtcggcccgtcgggctgcggtaaatcgaccaccctgcgtatgattgccgggcttgaggagatcagcggcggtgatctgttgatcgacggcaaacgaatgaatgacgttccagccaaagcacgcaatatcgcgatggtgttccagaactacgcgctgtatccgcatatgacggtctacgacaacatggcgtttggcctgaagatgcaaaaaaatcgccagagaggtgattga

SEQ ID NO: 11614 - DNA, 183 bp, Escherichia coli
atgcgccgcgcattcgactattacgtttcgctcaccggcgttctgtcgccatcatacaacggcactttgcgaaagcggcggatcaaataccacaaatatgcgccgcctaacgaagcccataccatcccggttgcgcaattcgatgcggcaatgaaaattttgcaggatgcgctgagagattaa

SEQ ID NO: 11615 - DNA, 1185 bp, Escherichia coli
gtgtctaaagaaaaatttgaacgtacaaaaccgcacgttaacgttggtactatcggccacgttgaccacggtaaaactactctgaccgctgcaatcaccaccgtactggctaaaacctacggcggtgctgctcgtgcattcgaccagatcgataacgcgccggaagaaaaagctcgtggtatcaccatcaacacttctcacgttgaatacgacaccccgacccgtcactacgcacacgtagactgcccggggcacgccgactatgttaaaaatatgatcaccggtgctgctcagatggatggcgcgatcctggtagttgctgcgactgacggcccgatgccgcagactcgtgagcatatcctgctgggtcgtcaggtaggcgttccgtacatcatcgtgttcctgaacaaatgcgacatggttgatgacgaagagctgctggaactggttgaaatggaagttcgtgaacttctgtctcagtacgacttcccgggcgacgacactccgatcgttcgtggttctgctctgaaagcgctggaaggcgacgcagagtgggaagcgaaaatcctggaactggctggcttcctggattcttacattccggaaccagagcgtgcgattgacaagccgttcctgctgccgatcgaagacgtattctccatctccggtcgtggtaccgttgttaccggtcgtgtagaacgcggtatcatcaaagttggtgaagaagttgaaatcgttggtatcaaagagactcagaagtctacctgtactggcgttgaaatgttccgcaaactgctggacgaaggccgtgctggtgagaacgtaggtgttctgctgcgtggtatcaaacgtgaagaaatcgaacgtggtcaggtactggctaagccgggcaccatcaagccgcacaccaagttcgaatctgaagtgtacattctgtccaaagatgaaggcggtcgtcatactccgttcttcaaaggctaccgtccgcagttctacttccgtactactgacgtgactggtaccatcgaactgccggaaggcgtagagatggtaatgccgggcgacaacatcaaaatggttgttaccctgatccacccgatcgcgatggacgacggtctgcgtttcgcaatccgtgaaggcggccgtaccgttggcgcgggcgttgttgctaaagttctgagctaa

SEQ ID NO: 11616 - DNA, 744 bp, Escherichia coli
atggcgctgttgctggtgacggtgacgctttccatgatgaccacgccgctgctgatgaagctggtcgataaatggctatcccgccagtttaacggaccggaagaagaagacgaaaaaccatgggtcaacgatgataaaccgcaggtcattgtcgtgggctttgggcgttttggtcaggtgattggtcgtttgctgatggcaaataaaatgcgcattactgtactggagcgggatatcagtgccgttaacctgatgcgcaaatatggctacaaagtttattacggcgacgccacgcaggtagatcttttacgttctgcgggtgcagaggccgctgagtctatcgtcattacctgtaacgagccggaagacactatgaagctggtggaaatatgccagcagcactttccgcatttgcatattcttgcgcgagcgcgcggacgtgtggaagcgcatgagttattacaggcaggggtgacgcagttttcccgtgaaacattctccagtgcgttagagctggggcgcaagacgctggtcacgcttggcatgcatccgcatcaggcgcagcgcgcgcaactgcattttcgccgcctggatatgcgaatgctgcgggagttaatcccgatgcatgctgataccgtacaaatttctcgcgccagggaagcccgacgtgaactggaagagattttccagcgtgaaatgcaacaagaacgacgccagctggacggctgggatgaatttgagtag

SEQ ID NO: 11617 - DNA, 741 bp, Escherichia coli
atgaccactattaccaaagaacgtattgaattgttcattaaaaatccgcttgaaaacgggcttactcgtggcgaacaaatggaactagcacgaattgcactggcatcactggaacgcgaacagattcgccacgagcatgccaaatggtctgactccacatttggctgcgttggccccattggtccactgaaacacctctcaaaagaggcactggaagccgcagccgaaccagacgatcttagcgagtgggctgatatgcagtttctgttgtgggatgcacagcgccgtgctggcatcagcgatgctgaaattaccgttgctatggaagataaattgaagatcaacatggagcgccagtggcctgagccaaaagatggtgagcctcgcttgcacattaaagaacccggcaactctccggtaattccggatggtttatccacggtatgcgctgaggcttatcaggttgtaggagttatggcagatgcgcttggtgtattcggtgatgcagcagtacagaaagttctggataacctgtcacagcaaaaacttgttcacagagatgtgctgccgttctcgcttccggtaactccggatggttgggttatggttcctaaacaggtaacgccggaaatcagcaacgcgataaacgttgtgggtcaacgctgtacatgcggaaattgctctcagcggttgtgggatttattactcgacgccacacagcaaggagttaaccgtggctaa

SEQ ID NO: 11618 - DNA, 321 bp, Escherichia coli
atgaagctgttttatcagtacgagcagcgtttcggtatgcgttcctccagcctgctgaatgtgattggctccaacaccattgctatctataccacccatcgcattctggtagaaatattcagcttaagcctgattccgcaaatgaacgcggtacgctggtcgccgcaagtcgaactgacgctcctgctgatttacccctttgtcagtttgttgatttgtactgttgcgggcttgctggtaagaaaactttcacagcgcgcattcagcgatctgttgttctccccgccttctctgcccgctaccgtcagttactcccgctaa

SEQ ID NO: 11619 - DNA, 825 bp, Escherichia coli
gtgccgtttcgcagcaataatcccctcacgcgcgacgaatttctgtcgcgctttttcccgcagtttcatcccgtaacgacgtttaatcgagggcttagtggcgggagttttctcattgaacatcagggccagcgttttgttgtgcgtcagccgcacgatcctgatgcgccgcagtccgcgttcttgcgccagtatcgggctttatcacaactacccgcatgcattgcaccgaagccgcatttatatctccgtgactggatggtggttgactatctgcccggcgaggtaaaaacgtatttgccggataccaacgaactggcaggcttgctgtattatctacatcaacaaccgcgttttggctggcgaataacgctgttgccgttactggaactgtactggcagcaaagcgatccggcgcggcggacagtgggttggctgcgaatgttaaaacgtctgcgtaaagcgcgggaaccacggcttttacgcttaagtccattgcatatggatgtccacgccggaaatttagtgcatagcgcgtcagggttaaaactcatcgactgggagtatgccggagatggtgatatcgcgctggaactggcggcggtgtgggtggaaaatactgaccagcatcggcaattggtcaatgactatgccactcgcgcgaagatttatccggcgcaattatggcgtcaggtcaggcgatggtttccctggctgctgatgctcaaagcagggtggtttgagtaccgctggcgacaaaccggcgatcaacaatttatcaggctggccgatgacacctggcggcagctattaataaaacaataa

SEQ ID NO: 11620 - DNA, 444 bp, Escherichia coli
atgctttcgacacaatttaacagggataatcaacatcaagccatcatcaaaccgtcactccttgccggttgcatagcactggcactattaccttccgccgcttttgctgcaccagccactgaagaaacggtgattgttgagggttcagccacagccccagatgatggcgaaaatgattacaacgtaacgtctacctctgcgggtacaaaaatgcagatgactcaacgtgatattcctcagtcggtcactattgttagccagcagcggatggaagatcagcagttacaaacgctgggcgaagtgatggaaaacacgctggggatcagcaaaagtcaggcggattccagatcgataactatatggttgatggtatccccacctattttgaatcgcgctggaatctgggcgacgcactttctgatatggcactgtttgaacgcgtag

SEQ ID NO: 11621 - DNA, 294 bp, Escherichia coli
atgaaaatatcggagaaacttcgcgcaatccgcaaagctgagggattaacgcaaaaaaaattttgcgaacttagcggattagcacttagctcattgaaaaattacgaagggggacataaagagcctggactacaaatcgtaaagcaagtggtaaacacgcctctgtttaaaaaatatacactgtggattatgacagatgaggttgcgccagaagccgggcagatttccccggtcgtcgcacactctgggcaagaagaaacaacctcgtcacactcagaccgcaaaactggctaa

SEQ ID NO: 11622 - DNA, 273 bp, Escherichia coli
atggacgcaaacaactatgtaattcagtatccgattgacgcggtacaccctgataagttcgcagaattgctcggaaaaccgcgtactgcggttgttgaaatgattaaagctaataagctgccggttgttgagtttcgtgatccaaacaaaccaaatgctcgcgcaggcgacaagctggttttcattcctgagttcaatcgcggtgtgcatgaggcgttttataaccgaccggttgaacagcgtgatgcatggcttttgtggatggggttgtga

SEQ ID NO: 11623 - DNA, 198 bp, Escherichia coli
atggcttttgtggatggggttgtgattatgaatgagccgcgttgtattgctcagttactgcgtaacgaaagccccagggcgattgacttcaccatcacccacggtaaggggcgtaagggaatcattatccgcaccaaaaaacagagtccgttaaaaaaggctctgacctttctgaaaagccggagggtatggaaatga

SEQ ID NO: 11624 - DNA, 456 bp, Escherichia coli
atgatggcaaaaattcacgaggtaaagctgcacgcaaaatatttcgaccttgtgctggaaggaaagaaacgcgcagagtttaggaaaaatgaccgtaattatgagcacggggacacgttgattttgcatgaatgggtgcagggtgtgtatacggggcgaaaggttgaagcccggataacagatgttactgacctgtcagactggctggaagattatgtcttgctaagtattgagctgcttaatacaggcgcatatgagattgtgaactggaaagaacttagtgagcgtggtctggtattcagaattaatcatgaaattatgcatcagctcggccttgctgttatgtatgaaccagagacggggatgtctggcggggcaatggttgccacggatggagcatggaactattcagatgaacagatggagcgtgcacagcaaaacgggtggcttggataa

SEQ ID NO: 11625 - DNA, 732 bp, Escherichia coli
atggatactataatcgcttttctatcactcgcttttttcgttgctttcttcatcgggttaatcaagccatcactggtgcgaatgccaaaccgcaaacgtgcaagtgcggtttatctcggaggaggttttgtattgagcataattggttcaatactctatccaacagaaaaaagccagccagttgataaaactgaaacatcaaccgttgcagaacacaaagtccaaaaaacattcgaatatggggaaaaaacactcaaggaatatcggaacgagtcaaagaaaacacgacacgatattgtgaatagttacattgattttaaggaagttccagccaccgcgtcagatgcgttttatgcctgcatgagtgagtatacatttaccaaagatgatgagttgaaactcggtgatgttcttgggtggtgctttaatgattatgaaaatgacccgaattcactaaacaataaaatcaatcttgatacatttcagagtaattttagtggttgggatggttcttatcgtccattggaaaaactaattaaagataatatgaacgatgattcatcttataaacatgtgtcaacggtatatcatctggttttgaataaagacccgtacgctattgtgaaaactacgtttcgcggtactaatgcttatggtggagtggttaagcagactatagctgcgcgcgtcgacatacgaacgggagaggttgtatcaatattagataattga

SEQ ID NO: 11626 - DNA, 981 bp, Escherichia coli
atggttttctgcactcatataaatatgaactttttaggtgatgtaatggaatatcaactggatttacaagagaatgctattgatagttttaatgaagctttagcaaagtatgagttagggcagagaggagaattgcggcaatataaatttgctatcttgcatttgtcacattttcttgagctggtgttgaagttatatattgttacagtagatgaaaatttactgtattccgattgctataaacaaatagctacaagagcaaagcgagaatcaatcagtcttttagacgcatataataaaattatcgaggatggcgttgatttaggaaggttcattgaagggaaatctaggccatatacgataaccttagatcaggcactaaactttgctaagtgtgagaaatgtggcataactggggttgattttgtagatattgatttttgtaatgatatagcttggataaagaatttaagaaatgatattgagcattatcaattcagacttactcctaaagacgcgcgcttgtgtattggacgcctggtccggggggtagctgagtttattgatatcttcgatctttttaatcttgaagatgaagtcggtgcagataacttacagatatttcaaactttagctgatgaatactctcataggctctctgaagccaagaaagaagttgaagaaagagaggctgaagctttttatggggttaggcataaattttatgaattggtcgattggaaagtttatgaatgtcctgagtgttctaacgacacaatgattccctctgatgagtcttctacgggttacaaatgcactttttgtcagaatgaagatagtgatgatattgatgttgcttgcgattgttgtggtgcgcaggctcccagcagcgaaatgagcatttggccaatggatgatggtgatgttgagtatcgttgttactactgttcagggcagtatcaggcagataaagacttttaa

SEQ ID NO: 11627 - DNA, 531 bp, Escherichia coli
atgagtgattcgcgactgctgccgaccggctcatcaccgcttgaagttgccgccgcaaaagcctgtgcggaaattgaaaaaacgccggtcagtattcgtgagctgtggaacccggacacctgtccggcaaatctgctgccgtggctggcgtgggcgttttcggtcgacaggtgggatgaaaagtggccggaagcaacaaaacgcgccgttatccgcgatgcgtatttcattcactgccataagggcactataggcgcaatccggcgtgtggtggagccgctcggctatctcattaacgtaaaggaatggtgggagacaaacgacccgcccggaacctttcgccttgatatcggtgtgctggaaagcggcatcacggaggagatgtatctggaaatggaacggcttattgccgatgccaaacccgcaagtcgccaccttatcggtctgaacattatccaggacattcccggctgtctgtatacaggcggtgtggtctgtgatggtgatgttattactgtttatcccggataa

SEQ ID NO: 11628 - DNA, 528 bp, Escherichia coli
atgcagcatttaaaaaatattactgcgggtaatccaaaaactgttgcccaatatcaactgacaaaaaattttgatgttatctggttatggtccgaagagggaaaaaactggtatgaggaagtaagtaattttcaggaagacacgataaagattgtttacgacgagaataatataattgtcggcatcaccagagatgcttcaacgcttaaccctgaaggttttagcgttgtcgaggttcctgatattaccgccaaccgacgtgctgatgactcaggtaaatggatgtttaaggatggtgctgtgattaagcggatttatacggcagacgaacagcagcaactggcagaatcacaaaaggccgcgttactttccgaagcggaaagcgttattcagccactggagcgcgctgtcaggctgaacatggcaacagatgaggagcgtagccgactggaagcatgggaacgctacagtgttctggtcagccgtgtggatcctgcaaatcctgaatggccggaaataccgcaataa

SEQ ID NO: 11629 - DNA, 759 bp, Escherichia coli
ttgaatgtcattggtcgcacagactctcgctttggcccaagactgactaacgacctctaccctgaatatactgtagcaggaagaaaagactggtttgatttttatggttatgttgatctaccgaaattctttggcgtcggcagtcactatgatgttgggatctgggatgaaggctcaccactatttacggaaatagaacctcggttttccattgacaaattgaccggattaaatcttgcgttcggcccatttaaagaatggttcattgcaaacaactatgtctatgatatgggtgacaaccagtcatcccggcaaagtacatggtatatggggcttggtacagatatcgacacgggtctaccaattaagctttctgccaatatatacgccaagtatcagtggcaaaactatggtgccgctaatgaaaatgaatgggacggatatcgattcaaaataaaatatagcatccctcttacaaatttattcggagggcgattggtatacaatagttttactaactttgattttggctccgatcttgcggacaagtcacacaataataaacgaaccagtaatgctattgcttcaagccatatcctttcccttctatatgaacactggaaatttgcatttacactacgttattttcacaacggtggacaatggaatgcgggagagaaggttaacttcggagatggtccatttgaattaaaaaatacaggatggggaacctatactactattggttatcaattttaa

SEQ ID NO: 11630 - DNA, 1020 bp, Escherichia coli
atgaaaacagcgcagcgtactttatttgccgcaacattgctgactattttttcgacctcagttatggcgcaggatgtcacgattatttataccaatgatcttcacgctcatgtggattcctataaagtaccgtatgtcgcagacggaaaacgcgacattggtggctttgccaatatatccacgttagtaaaacaagagaaagccaaaaataaagccaccttttattttgatgctggagactattttaccgggccatatatcagcagcctgacaaagggcgaagcaataattgatattatgaataccatgccttttgacgcagtatcaatcggtaatcatgagtttgaccatggctgggataatgccctccgacaattaagcaaagcgaatttccctgttttattaggcaatgtttatcataaagagagtgagaaacccttctggaacaagccctacaccatcctggaaaaagatggcatcaagattggtattgttgggctacacggcgtatttgcatttaatgacacggtctcggagctctctctccagggactcgataatgacaataataaccgatttgataaatcttccgcgaccctcaagaatcaggggattgaagcacgtgatgaagtgaagtatttgcagcattatatcgacgagttacgtgataaggttgacctcaccgtggcgctggttcatgaaggcgtaccggcgcgtcagtccagcattggcaatacagatgttagacgtgcgctggataaagatattcagaccgcaagcaaggtgaaaggattggatattctgattaccgggcatgcccacgtcggaacgccagaaccaatcaaagtcggcaacaccttaatcctttcgactgacagtggcggtatcgatattggtaaattaatccttgatgtcaaccctacagctcggactcataaagtgaagagctttgagctgaaaacggtttatgccgatgaatggatacccgatccaaccacacaaaaagttatcaatggctga

SEQ ID NO: 11631 - DNA, 1554 bp, Escherichia coli
atgaaaattaaaatacttgctgcgggtatcgcattaacactgccgttctgggcttgcgctaaagatgtcactatcatttataccaacgacctccatgcgcatgtagaaccttataaagtgccgtggatcgctgacggtaaacgggatattggcggctgggcaaatatcactacgctggttaagcaagaaaaagcaaaaaataaagcgacatggttttttgatgcgggcgactattttaccgggccatatatcagcagcctgaccaaaggtaaggctattatcgatattatgaatactatgccgtttgatgccgtcacaataggcaaccatgaatttgaccacggctgggacaacacattattacagttgagccaggcaaaattccctattgtgcagggcaatattttttatcagaacagcagtaaatcattctgggataagccatataccatcatcgaaaaagacggtgtgaaaataggcgttataggtttgcacggagtatttgcctttaatgatacggtatctgctgccacgcgcgtgggtattgaagcgcgcgatgaaattaaatggctacaacgttatatcgatgaactcaaaggcaaggttgatttgaccgtcgccctgatccacgaaggtgttccagcccgccagtccagtatgggaggcacagatgtgcgtcgcgcgttggataaagatattcagacggcaagtcaggtgaaagggctggatattttgatcaccggacatgcacatgtgggtacgccggaaccgattaaagtcggcaatacgctcatcctctccactgacagcggcgggattgatgtgggcaaactggttctcgactacaaagagaagccgcataattttacggtgaaaaacttcgagcttaaaaccatttacgctgacgagtggaagcccgatcagcaaacgaaacaggtgatcgacggctggaataaaaagcttgatgaagtggtgcaacaaacggtggcgcaatcgccggttgaattaaaacgtgcctatggtgaatcggcttccctcgggaacctggcggctgacgctttactggcagcagcgggtaaaaatacccaactggcgttaacaaactctggtggtatccgcaatgagatccccgcaggggcgattacgatgggcggcgtcatcagtacgttcccgttccccaacgaactggtgacgatggaactcacgggtaaacaattacgcagtctgatggaacacggcgcaagtttaagcaatggcgttttacaggtatcgaaaggcctggaaatgaagtacgacagcagcaagccggttggtcagcgggtaatcacactgactctgaatggcaaacccattgaagatgcgacggtttatcacattgccactcagagtttccttgctgatggtggagatggttttaccgcctttaccgaagggaaagcgcgtaacacaacgggcggttattacgtttatcacgcggtggttgattacttcaaagcgggcaacaccattacggatgaacagctcaacggtatgcgcgtgaaggatatcaaataa

SEQ ID NO: 11632 - DNA, 315 bp, Escherichia coli; identical to SEQ ID NO: 1771

SEQ ID NO: 11633 - DNA, 1188 bp, Escherichia coli
atggctctaaccgatatacagatcaaacgtgcaaaaccacaagacaagccatacacattgaacgatggacaaggtctgtcattgcttatcaatcccgatggctcgaaaggctggcgtttccgtttccggtttgcagggaaagcgcggttaatgtcatttggcagctacgatttagtaagcctcgcagaagcacgtgaaaagcgtgatatcgcccgtaagcaggttgctaatggcattgacccggtagaggaacgcaaagctttaagactcgcccaaaagctatcaacagaaaattctttcgaagcaatatgtcgagaatggcataccaacaaagctgaccgctggactgtggcctatcgagaagaaattattaagacattcgagcaggatgtcttcccgttcattggtaaacgtcctatcagtgaaatcaaaccattagaactgcttgaagtattgcgacgaatagagaaacgaggagcactagagaagaccagaaaagtgcgccaaagatgcggtgaggtctttcgttatgcaatcataactggccgagctgaatacaatccagcacctgatttagctatcgctctggccgttcctaagcaaaaacaccacccatttttatctgccgaagagttgccttattttattcgagatctggaagcgtataccggcagcatcatcacaaaaaatgcaacaaagatagttatgcttaccggtgtacgaacccaagagatgcgctttgctacatgggatgaggttgatcttgaaaaaggtatatgggaaatcccagcagaaagaatgaaaatgcgcagaacccatcttgtgccattatcaacgcaggtaacagaattattcaagcaactgaaacctatcacgggacattacccttacatttttattggcagaaataaccgcagtaaaccgatctcgaaagaaagcgtttcacaagtaattgagctgcttggttataaaggacgggctactggtcatggatttcggcattctatgtcgaccatacttcatgagcaaggatttgatagtgcctggattgaaatgcaattagctcatgttgacaaaaataatattcgaggtacctataatcatgctcagtatatagaaaaaagaagatatatgttgcagtggtatgctgacagaatacttccccctttatccaaaactccattataa

SEQ ID NO: 11634 - DNA, 528 bp, Escherichia coli
atgtatatgaaagataaaactcgagagcgtctcaaatatcttcacatcattccattagctgctattgtttgggccagttttgcatatcgctctgatattaaaagtcaggatttagacccattaatttctattttacagaatgtttctgtaatggtttttactattatgggaatatggatagcatatctataccctaatgcaatattgaggattacgcagccatcaaaagtggatgctattttttcagatgaggatagtgagcgagtcaagatcattgttggtgttgtggtactatccgcaatagtgttatctcttcttttaataggagttgttttaaagccgttcatcattaaatcttggctgtttattcatattccaagtttttttgttgcaattggtatattttttttgctaatgttgagctatttacagcttatagctctctatattgtgattgcatctaatgttaattttataattgaactaaaaaataaaaaaaacaaacatgatctcaataggagattgtaa

SEQ ID NO: 11635 - DNA, 1161 bp, Escherichia coli
atgttcatcacacatcttcttctggttagattttctctaaaatcgaagcattcaacttcaactaatggtgcgcaaatgagcgaaggactggtcacttttttcaaatataaacaattaggattccataagagaggtgattcatattatgagccgttgatgatggccgatatgctggagtccttacatacttggttctcaagtaggacttcattggcagatacattactttgggatgacaatactcccgggtattcttcaaggaaaaaagtttacttgaagggaattgagcgtaacgagagcacaggcgattatgttgtaattttatggcgagcaattggaaatgggaatggagtttatggtattcgctctgactctgccttaagtgatgatcgtttgtacagtgctgatgaagagttagatggtgaaaatgttatatggggtgagcccgcttattattggtttgttccctctttaaatatttttgcatcaataaaattccatagttcaatttcagatacagaactgatgaataaatatcttcgtgatttcatgacactacatagtaatattaggccaaaacgtcgagaaatgaaggaaggtaaaaatggaaattatttaagtatatcttttatttctgcttcgggtgacaatttgtggcttaggatatatagtgaacaatatacaaaattaacaaatgaagccgacttggatagaattgctaaccagataacgcacttcgtcaaacgggatgtcattagcgcatcagttcagccagatgctggctggacaaggtattttagaggtcttccattcatttctagcgaggtaacaagagatactagaaagattgaattaaccatagaagcctctcctacaggagaagagttgcgttctatttttgaaacgtacaatgaagaatataatgttagtgctggtgattgggccaacttaggttttagaaaagaaggtgtagggggaacatgttggttaaacgagttcgttgtaaggaatacattattagttagtgatgtaggtcagtatgatgattcagggttttatacgactagtagaattctgaatgctttgcacttaactagagataatctactagctgcctttacaacaagttctccgaactccgaagaacaggcgaattcttga

SEQ ID NO: 11636 - DNA, 2334 bp, Escherichia coli
atgaaaatgaacgtaaccgccaccgtcagccatgcgctcggccactggccgcgtattctcccggcgctggggattcaggtgctgaaaaaccgtcatcagccctgtccggtctgtggcgggagtgaccgcttccgttttgatgacagggaggggcgcggcacctggtactgcaatcagtgtggtgccggtgacggcctgaaactggttgaaaaggtgtttggtgtctccccgtccgacgcggccacaaaggtggctgccgtgaccggcagcctgcccccggctgacccggcagtgacggctgccgccgttgctgaaacagacgctgcccggaagaacgctgccgcactggcacaaaccctgatggcaaaaacccgtcccggaaccggtaacgcctacctgacccgcaagggctttcccggccgggaatgccggatgctgaccggcacacacagagccggtggcgtgagctggcgcgccggtgaccttgtggtgccactgtatgacgacagcggcgaactggttaaccttcagttaatcagtgctgacggccgtaagcgcaccctgaaaggcggacaggtcaggggcacctgtcacatccttgaaggacagaatcaggccggaaaacgtctgtggatagcggagggatacgcgaccgcacttaccgtgcatcacctgaccggtgaaacggtgatggtggcgctttcttccgtgaatctcctttctctggccagccttgcccggcagaagcatccggcctgtcagattgtccttgccgcagaccgtgacctcagcggtgacggccagaaaaaagccgccgcagccgcagatgcgtgtgaaggtgttgttgccctgccgccggtcttcggtgactggaatgatgccttcacgcagtacggcggggaagccacccgtaaggccatttatgatgccatccggccaccggctgaaagcccgttcgacaccatgagcgaagcagagttttccgccatgagtaccagcgaaaaggccatgcgtatctatgagcattacggcgaggcgctcgcggtcgatgccaacggccagcttctgtcccgctatgaaaatggtgtctggaaggtgctgccgccacaggactttgcccgggatgtggccgggctgtttcagcgtctgcgcgcgccgttctcctccgggaaggtggcctccgtggtggacaccctgaagctgattattccgcagcaggaagccccctcccgccgcctgattggctttcgtaacggcgtgctcgacacgcagaacggcacgttccacccgcacagtccgtcacactggatgcgtaccctgtgcgatgtggatttcaccccgccggtggaaggggaaacgctggaaacccacgctcccgcgttctggcgctggcttgaccgtgccgccggtggtcgtgcggaaaaacgcgacgtgattctggccgcactgtttatggtgctggcaaaccgctacgactggcagctctttctggaggtgaccggtcccggcggcagcggcaaaagtatcatggccgaaatcgccaccctgctggccggggaggataacgccacgtcggccaccatcgagacgctggaatccccgcgtgaacgtgccgcgttaactggcttctcactgatacgcctgccggaccaggaaaaatggagcggcgacggtgccggactcaaggccatcactggcggcgatgcggtgtccgttgacccgaaataccgggatgcgtactccacgcacatcccggcggtgattctggccgtgaacaataacccgatgcgcttcaccgaccgcagcggcggtgtgtcacgccggcgggtgattattcacttcccggaacagatagccccgcaggagcgcgacccgcagcttaaggacaaaatcacccgcgagctggcggtcatcgtgcgtcacctgatgcagaaattcagcgacccgatgctcgcccggtcactgcttcagtcccagcagaactcagacgaggcactgaacatcaaacgggatgccgacccgacgtttgattttatcggctatctggaaaccctgccgcagaccagcggcatgtatatggggaacgccagtatcatcccgcgtaattaccgtaaatacctctatcacgcctatctggcctacatggaggcaaacggctaccggaatgtactcagtctgaaaatgttcgggctggggctgccggtgatgctgaaggaatacggactgaattacgagaagcgccataccaaacaggggatacagaccaacctgacgctgaaagaggaaagctacggcgactggctgccaaaatgtgacgaccctgcgacaacctga

SEQ ID NO: 11637 - DNA, 924 bp, Escherichia coli
atgggttccaccagaaaggggatgctgaacgttctgattgccgccgtgttgtggggaagttcaggggtctgcgcgcaatacatcatggagcaaagccagatgtcgtcgcagtttttgactatgacgcgtttgatattcgccggtttgattctgctgacgctatcatttattcatggtgataaaatcttttctattattaacaatcacaaagatgccattagcctactgattttttccgtggttggcgcgctaaccgtacagctcacttttttgctaaccatcgaaaaatcgaacgcagccacggcaacggtgctgcaattcctctcaccgactattatcgtcgcctggttctcactggtgcgtaaatcccgcccgggcattctggttttctgcgctattttgacatcgctgatcgggacttttttattggtgacacacggtaatccgacgtcattatcgatctctcctgccgcgttattctgggggattgcctcggcatttgctgctgcattctataccacctatccctcaacgctgattgcccgctatggcacgttaccggtcgtcggctggagtatgctgattggcggtctgatcctgctgcccttttatgccagacaagggacaaactttgtcgttaacggcagtttgattctggcgtttttttatttggtggtcattggtacgtccctgacatttagtctgtacctgaaaggagcacaattaattggcggtccaaaagccagcattttaagctgtgcagaaccattaagtagcgcgctgctctctttgttgttgctggggatcaccttcacattgccggactggctgggaacgctgctgattctgtcatcggtgattttgatttcaatggattcccgccgccgcgccagaaaaataaatcgtccggcgcggcatgagtga

SEQ ID NO: 11638 - DNA, 1950 bp, Escherichia coli
atggtggcagccgttgtcctggtgttcgtttttattttttgcaccgttttgctgttccatctggtccagcagaatcgctataacacggctacgcaactggaaagcattgctcgctctgtccgcgaacccttatcttctgccattttgaaaggcgatattcccgaagcggaagctattcttgccagcattaaaccggcaggcgtggtcagccgtgccgatgtagtgctgcctaaccagttccaggcgctgcgtaaaagttttattccagagcgtccggtgccggtaatggttactcgcctgtttgagctaccggtgcaaatctcgctgggcgtttactcgctggaacgtccggcaaacccgcagccaattgcctatctggtgttacaggcggattccttccgcatgtataagttcgtgatgagcaccctctcaacgttagtgaccatttacttacttttgtcgttaatattgacggtggcgattagctggtgcattaaccgcctgattttgcatccgttacgcaatattgctcgcgaacttaacgccatcccaccccaggagcttgttggtcaccaactggcattaccgcgtctgcatcaggacgatgaaatcggtatgttggtgcgcagttacaacctcaaccagcaattgctgcagcgccattatgaagaacagaacgaaaatgcgatgcgcttcccggtgtcggatttgccgaacaaagccttgctgatggagatgctggagcaggtggtggcgcgtaaacaaactaccgcgctgatgatcatcacctgtgaaaccctgcgtgatactgcgggtgtgctgaaagaggcgcaacgagaaattctgctgctgacgctggtggaaaaactcaaatcggtactgtcgccacgcatgatcctcgcgcagattagcggttatgactttgctgtcattgccaacggtgtacaggaaccgtggcacgctatcacattaggtcagcaagtgctcactatcattagcgagcgcctgccgattgaacgtattcaactccgtccgcactgtagcattggcgtggcgatgttctacggcgatctcaccgccgaacagctttacagtcgcgctatttctgcggcatttaccgctcgccataaaggcaaaaatcagattcagttctttgatccgcagcagatggaagccgcccagaagcggttgacggaagagagcgatatccttaatgcactggaaaatcatcagtttgcgatttggttacagccacaggtcgagatgaccagcggtaaactggtcagtgcggaagtgttactgcgtatccagcaaccggatggcagttgggacctgcccgatggcttaatcgatcgcattgagtgctgtgggctgatggttaccgtcggtcactgggtgctggaagagtcctgtcgattgcttgctgcctggcaagagcgcggcattatgctgcccttgtcggtaaacctctcagcgctgcaactgatgcatccaaatatggtggcggatatgctggaactgttaacccgctatcgcattcagccgggaacactgattctggaagtgacagaaagccgacgtattgacgatcctcatgctgcggtggcaatcctccgtccgctgcgcaatgccggagttcgggtggcgctggatgatttcggcatgggctacgcagggctgcgtcagctgcagcatatgaaatcgttgccaatcgacgtactgaaaatcgacaaaatgtttgttgaaggtttgccggaagatagcagcatgattgctgcaattatcatgctggcgcagagcctgaacctacaaatgattgccgaaggcgtggagactgaagcacaacgcgactggctggcaaaagcgggcgttggtattgcccagggcttcctttttgctcgcccactccctattgaaatcttcgaagagagttacctggaagaaaagtaa

SEQ ID NO: 11639 - DNA, 1497 bp, Escherichia coli
atgacgcaatactggctggggttagattgtggcggtagctggctgaaagccgggctgtatgaccgagaaggccgggaggcgggcgtgcagcgcctgccgctgtgcgcatcaagtccacagccaggctgggcagagcgcgacatggcagaactgtggcaatgttgcactgctgtcattcgcgccctgcttacccattccggcgtcagcggggaacaaattgtcggtatcggcatctccgcgcagggaaagggcttatttctacttgataaaaacgacaaaccgctcggtaacgccattttgtcctcggatcgccgggcgatggaaatcgttcgtcgctggcagaaagatggcatcccggaaaaactctatccgctgacccgacaaaccttatggaccgggcatccggtgtcgctgttacgctggctgaaagagcacgaaccagaacgctacgcgcaaattggctgcgtgatgatgacgcacgactacctgcgctggtgtttaaccggcgtcaaaggttgcgaagagagcaatatttctgagtccaatctctacaacatgagtcgcggggaatatgacccgtgccttaccgactggctggggattgctgaaatcaatcacgccctgccgcctgttgtcggatctgccgaaatctgcggggaaatcaccgctcagacagccgtactgaccggtctgaaagcgggtacccccgttgtcggcggcctgtttgatgtggtttccaccgcactctgcgccgggctcgaagacgaattcaccctcaatgcggtgatggggacctgggcggtgaccagcggcataacccacggtttacgtgacggtgaagcgcatccgtatgtctatggtcgctacgttaacgatggtcaatttatcgttcacgaagccagccccacctcttccggcaatctcgaatggtttaccgcacagtggggagaaatctcatttgctgagattaatcaggccgtagccagtttgccgaaagccggtggcgatctctttttcctgccgttcctgtacggcagcaacgccggactcgaaatgaccagcggtttctacgggatgcaggccattcacacccgtgcacacctcttacaggctatctatgaaggggtggtgttcagccatatgacccatctcaaccggatgcgcgaacgttttactgatgtgcacaccctgcgcgtcactggcggcccggcgcactccgatgtctggatgcaaatgctggcggacgtcagcggtctgcgtatcgagctgccgcaggtggaagaaaccggctgctttggtgcggcacttgccgcccgcgtcggtaccggggtttatcgcgatttcagcgaagcccaacgtgacttacagcacccggtacgcaccctgcagccggatatggccgcgcatcagctttaccaacaaaaataccaacgctatcaacatctcattgccgcacttcagggttatcacacccgcatcaaggagcacacattatga

SEQ ID NO: 11640 - DNA, 1080 bp, Escherichia coli
gtggcgttatcagatgcgttaattacagtaaatcaagccgaacggggcggtgaaaacgcgttgagaggcttttcatatcaagcctcttgggggataaattatttacttgagaaacaaaaagaaaaggagaaatatttatttctatttgaatatcatgacgatattcttgtattgaattcatctgtttctccgactagtgctgagtttatccaagttaaaacaaaaaaagatggtaaatggacactcgcagcaatagtgaacgcaacaaaagctaaacctaaatcatttgttgcaaaactatatgaccatttctatcaattcgttggtcacgaaatttatatggttctgttatcgaatgctggattcgatttcttaaatgataataacgaaaaaggtagtgatcttaataatgagcataaggaaattataattagtaaggttcaagagcagctaaatactaaaaaagaagttcctcttgataaaataaaatttaaaacatctgatcttagtttgttagatcctaactcacatttatacgggaaagttgcagtttttttgaattcttactttggggatgatcatggtattaattcaacagcattcactaaattattaatcaataagtgtaatgagaaggttagtgttgcttctagtgatatcaaaacttttgaagatttagtactaaagaaaggtatatcttcagaatttgtaactgatttattatctggactcattgcaagcataaaaataacgccaaaatgggaacaggtttgtatgttgcttggtactttctcagatccttatgaggggattaaattacaatcagtttttacacgcatatcaataaaagtgctcaatgtcaattcaatatactatctttattttctggaatttcaatcggctctaaagagtatagagcattatcgtgagatacctgttcgagacctcttctttacactcgaaaaaacaattgcagcgggggacggggatttctctttattaaatcaagaagagaaatttatgattgctatatatgcaattataaagttgacttttgaggatgtttcttatgaagaataa

SEQ ID NO: 11641 - DNA, 2415 bp, Escherichia coli
atgagtcatgccgatatgaacaactgctgcggctttaacgaggctgccgcagcattctcatggaacagcccgaaaaaggccattaacccttatctggacccggcggaagttgcgccggtttctacgctttcaaacctgatcactctgtacgctgccgataacgagcaggaacagttgcgccgcgaggcactgagtgatcaggtctgggagcgttatttctttaatgaatcacgtgatcctgtccagcgcgaaatggagcaggataagctcattagccgggcaaagctggcgcatgagcagcagcgttttaattcagacatggtcattctggcggacgtcaacgcccagccttcccatatcagcaagccgctgatgcaacgtattgaatacttcagcagcctgggcaggccaaaggcttattcccgctatttacgtgagacgattaagccatgtctggaacgactggagcatgtacgcgacagtcagctatctgcatcttttcgctttatggcaagccatgaagggctggacggcctgctgatcctgcctgaaatgagtcaggatcaggtgaaacgcctgtccaccctggtagctgcgcatatgagtatgtgccttgatgcagcttgtggtgatttgtatgccaccgatgacgttaagccagaagaaatccgcaagacatgggaaaaggtggcagcggaaaccctgcgtctggatgtcatcccacctgcgtttgagcaactccgtcggaaaagaaaccgccgtaaacccgtgccctatgaactcattccgggttcgctggcgcgtatgttgtgcgccgactggtggtatcggaaattatggaagatgcgttgcgaatggcgggaagagcagttgcgcgctgtttgcctggtcagcaaaaaagcatctccttatgtcagctatgaagccgtgatgcataaacgtgagcagcgccgtaagtcgctggagtttttccgttctcatgaactggtgaacgaagacggcgacacgctggacatggaggatgtggtaaacgccagcagcagcaaccctgcgcatcgccgcaatgagatgatggcctgtgttaaaggtctggagcttatcgcggaaatgcgcggtgactgcgccgttttctacactatcacctgtccatcgcgtttccattccacgctaaataacggcagaccaaacccgacctggacaaacgcgacggtaagacaaagcagcgattatctggtcggcatgtttgctgcatttcgtaaggcgatgcacaaagccgggttgcgctggtatggcgtgcgggtggctgagccgcatcatgatggcacagttcactggcacctgttgtgtttcatgcgcaaaaaagaccgccgtgccatcactgcattactgcgtaagtttgccattcgtgaagaccgcgaggagctgggcaataacactgggccgcgctttaagtctgagttgattaacccgcgcaaaggaacgccgacaagctacatcgcgaaatatatcagtaagaacattgacggtcgtggtctggctggcgagatcagcaaggaaacgggtaaatctctgcgtgataacgctgaatacgtgaatgcctgggcgtctctgcatcgtgttcagcaattccgcttctttggtattccggggcgtcaggcttaccgtgaacttcgcttgctggctggtcaggcggcaaggcaacagggtgacaaaaaagcaggtgcgccggtactggataacccgcgtcttgatgccattctggctgctgctgatgctggttgttttgccacctacatcatgaagcagggcggcgtactggttccccgtaaatatcacctcatcagaaccgcttatgaaatcaacgaagagccgaccgcctatggcgatcacggcattcgtatttatggcatctggtcacccattgcagagggcaagatctgcactcatgcagtgaagtggaaaatggttcgtaaagccgttgacgttcaggaggcggcagccgaccagggcgcttgcgccccttggactcgtggcaataactgtccccttgctgaaaatttgaaccaacaagggaaagacaaatcagctgatggggataccaggacggacattacccgcatggatgacaaggagttgcacgattacctgcacagtatgagcaaaaaagagcgccgggaactggctgcaaggttacgccaggtgaaaccgaaacggcgtaaagactacaaacagcgaattacagaccatcagcgacagcagctcatctatgaactgaagtccagaggatttgatggcagcgagaaagaggtcgatttactccttcgcggcggcagtattccgtcaggagcaggcctgcgtatcttctatcggaaccagcgtttgcaggaagatgataagtggcgaaacctgtattaa

SEQ ID NO: 11642 - DNA, 225 bp, Escherichia coli
atgtatgcggcagaaagtgaagtggtttatcagtttcgttacagaggggagagttattcagtacctgaagatgatttgctctgttgctatccgtcattgtcgggcgatggcagttactttttcacgttaaaggatgggacgtttttacggggagagcaggttaaagagacgatacgaaaaaatgtatctcctcttgagcgttaccgtaagaacaaagaacgatag

SEQ ID NO: 11643 - DNA, 420 bp, Escherichia coli
atgcttcagggtagccaacctgtaagccaaacttacaacttgccagaattaatcgaaggcatggaagtttccattgatgtaagcacttgtgatgctgatttaggtaatcgctatttcggcaccgtcaccgaggcgttagaacttgatacagccaagaatggttacatcctcctggttcaggacgcagagccaaacttcgatgtaaatggcaactctccgggaactccggatagttggataagctgtagtgagcgaatgccccctcaagatgattggattttaatttattcaaagcacggcgagtatatggcaggacaggtgcaaggggaatacgtggagttgagcgacggcactttatcgtggttagggaacgtcttgttctggatgacgttgccagaacctccgaagggggcgaaatga

SEQ ID NO: 11644 - DNA, 261 bp, Escherichia coli
atgatggatgtaaaagagaaggttttgcaggtgatgcgttcccgggctgccctgcaagataaagctctcggcggggaatatccattcacgatagcaacctggaatctgcggttggcaatggagaaggaatttcctgatgaagaatggcgttcggcagatttgcgcaaaattcttatggagctggctaaagacggagcagtatccaaagatacctatgccagccggattggtcaggcggtatggagactggaggtgcggtaa

SEQ ID NO: 11645 - DNA, 282 bp, Escherichia coli
atggctaacctgcaacttgccgtcaaaggtgaatacttcgatgccatgattcgtggagagaaaacggaagagtatcgcctgtgtaatgactactggaataagcgaattatgttccgggagtatgaccgcctgattatcacaaagggatatccgaagcgcgacgattccagccgaagaattgacgtcccgtatgacggatatgaaatcaagacaatcacacatccgcacttcggtgataaaccggtaaaggtgttcgcgataaaggtaaatattgatggctaa

SEQ ID NO: 11646 - DNA, 423 bp, Escherichia coli
atgaagacaattgatatgttggctaagtatctaaatgaatggccattaaaatattctcgtatcgttcaggctgaagactgcgttttttatggcgtttttgctggtaatgaaatgcattacgaagtaattcagagtgagggactgaccgggttaactcttagcgaagaccatggtactagcgttacgttccatgactggataacagcacaacgttctgaaatggaaaaaggcgatgtgtttgatatttctcgctctgtatacgccaaagaaaaaagtgatgatgattacatgcgcgaaaacttatacaacatgaagttacaatgcctggctgaagtgcttagtaaaagatctttacttgatgtggttggtgctgagcaggacgccaaggcaatcaacgccgcattcgataaaataaccttctaa

SEQ ID NO: 11647 - DNA, 540 bp, Escherichia coli
atgtgtaacccagccatcgctttggttgccgtcacagtggcatccacagccgcgtcaatgtacagccagagcaagcaggcaaaataccagtcagccatagctgatcggaatgctgaaattgctgaagttcaggcacaggattcaatcaatcgtgggaatattgaagcggatcagcgtcgtcgtgaaatgcgtcaacgctcaggcactgcggcggccactatgggggctaccggtgcggaattaagtagcggaacagctcttgacgtttttgcggataatgctcagttcggcactcttgatgcgttaacgacagtgaataatgctcagcgtgaggcatatgggtatcaggttcagggaatgaatgctcaggcacagggggctgctgctcagtcggctgctaaatcatcgatgaccagcactttgttaacggcaccactaaaagcatacggtgcataccagatgggcggcggaacgtggagcccgttctctcagaaggctgcgccgatttctgctgctgttggcactccaaccggtcgataa

SEQ ID NO: 11648 - DNA, 546 bp, Escherichia coli
atgagttcgtctgcgtcgcagaatgataaaaatcaaattgtcagatataagggtcgagtattgcatacgcaaaatttctcggccctttgtgcatctgatcttgagctgaagaaagtatctgatgcctttacccagtattggaaaacgggataccatccatctcttggtaaagatgctgcatttgctcgtccgacagaaatgcttaaactaaatgtcaggcatactcatgtcgataaccaagactatattccagaagatagtgataaaaaacacactggtaaaaaatcatcttgggatgcatggaaaaatatagcgtctgtgcaagtaaaatgcataccaacaagtgattgctttttagtttattcggtaaatcacaatcgtgatgcgctggttatgttttttgttgacgcagatgcccacaacataactgagcaagaagagtttaaagaggcagcaatcactatcagttatcaattctttgagaaaacaaaaacagaaccaatgcctttagaagaagatcttttttctgataaatggaaggaataa

SEQ ID NO: 11649 - DNA, 180 bp, Escherichia coli
atgcgaaacgaaaaattgcagatgcgtagagcgcaagctgccgcaagacgttctttcaatggaagcgtagagtgcgtaaaagttactatgacaaaagatcacgcaagtcgcgtatcccgcgctttctttgattctcgtaacaataaggaaaattatgagttcgtctgcgtcgcagaatga

SEQ ID NO: 11650 - DNA, 2757 bp, Escherichia coli
atgacggtctcaaccgaagttgaccacaacgaatacactggtaacggcgctacgacatcatttccgtataccttccgtattttcaaaaaatccgacctggttgttcaggtgtctgacctgaacgggaacgtaacagaattggttctggataccggttatacggtaactggggcgggcacttatagtggcggttctgttgttcttccgtctccgcttgctgctggatggcgaattacgatagatcgtgtgcttgatgtagtgcaggagacagaccttcgcaatcagggtaaatttttccccgaagtgcatgaagatgcttttgactacctgacgatgctgatccagcaatgttttgggtggttcagacgtgcattgatgaaaccatctttgcttgcaaaatattacgatgcaaagcaaaacagaatatctaaccttgctgatccatcacttgagcaggacgctgtaaataatcgctcaatgcgtaattatgtcgatgctgcaatcgccggagttattggtggttttggttggtttattcagtatggttctggagcagtataccgaacgttccaggataagatgcgggataacgttaacgctcttgattttgttccgtttgagcaaagatatgctgcattaaattttgaagttgatgcgtctgaatggttaattaatgcgataaattctggtgcaagtgtcgttagaatacctgcaggtaaatggatgatttctaagaatatagatgtgcctcctggagtttcattaattggtgatggaattgattactgggatacatatagaccagcgcctgaaagattattaaaaagttggagtaaaggaacccatcttgtatttactggtgatggagaaaaaaacaaatatttttttaacatctctaatgaaagaccagttaaaattgttgaagggatatcttgtaagttcactgagtttacaaatgaagattctgtaggtgttactcctgctacaccaaaagccatgagcgtagctgttagtatcaacagggcatcacagttacgcaatctgagaataatggtaagtaaaaatggtattgaaggatacaataaccctgattcttattcattgggtgataactgggatatagggttgcatgtatacgatagctgtgattcagttattgataacgtacagattgtcggctattggagggtaaaaggactactactgacagaaaatgacgggagcctttcaatgaagggaaatcctgaaaaaacgcactttaataacgtttatgtccagtcagggatcgcgataaggaatagccctcagattgatcttgtaagtaatactgaaagctcagtgacatttaaacataaaaagtcgatgagaataacttcagttaaacagtttaaaattgctggcagtgaatcagtatatacgtattcagatgcatcatttgatggagctaacatcacactatctggtatttctcctgaaatacaaggtacaataagtgtaatcaggtttccgtcaattggtaataattttagcgggactgtttttgagaatacagtagccactactcttgatcatacatcaggtaagccatcagaatactttggccttcctgcatcctttgcattagaggttgatggtttccctgttcgtaatttaaggtttgataaattcaaagctcaaacaacatttgataaaggaaattgcatttttggtgattgccgtgatgttaaaataacatcatctgagtttgaaaatggaattatgattgcgtataaccagaccgagactcagggttatacaggaaatcttagattttttgcttctgatcttcagagcagcgttaacacaagtgagtttaaaccaagagacgcatttgtagacaatagacaaataaaaacggagtttactgatggttcgttcattataaagaactggaggcctacagatacaaaaatacaatggtcgtctggagcagatgctattgttcttagagagtcacctgacgaacaatcagacggaaatatttacgggtatcacattgatggtaaaagatggattaatgttagtggatataacaaagatataaatatttcatcaagaaacttaagcgtaaaaaaccatggtgatgactctgcagttattaatatattcggcgactctggaaatattgccattaaaggtaatttttcaccaattattgataacagcaaatctcttggtgcaccatcatttagatgggcacaggtttattctgcgaacggttcgataaacacatcagatggtagagaaaaaagtgaaccgattagtacaagtgagctcagcttgtatatgtctcgtggttatgaaggtgatgcaattctggatgcatggggagatatcaggattgtagcttttcgctggcttgatgccgtcagggaaaagggagatggtgcccgctggcattttggtgttatagcacaacaagtgagagacactttcctcgcgcatgggattgatggaaccagatttggccttctctgttacgatgaatgggatgataaatacgcgccagtgatggcggtaaggatgatcactaaagttgtggatggcgtcgaaattgagatggaagaagaatacgaaacagaagagcgaactctggtttgcaaggctggaaataggtggggtatccgtactgaccagtgtttatggcttgagtcagcttatttgcgtagaagaatcgaaaaaatagaatcacgtcttgcaatgcttgaaagtagctaa

SEQ ID NO: 11651 - DNA, 234 bp, Escherichia coli
atgacgagagatagcgttcggtctaaagaagaaggtgaaaagattattagattccttcgagttatgtctgctgctgttgaatatttcggcagtaaaacaaaagctaaagagtggttggataaaccttctcgtgctttatcttataaaaagcctatcgagttaatatcttctgaatcaggagcacagactgtattgaatttaatagggcatatgtcttatggagtatactcttga

SEQ ID NO: 11652 - DNA, 498 bp, Escherichia coli
atgtcacgtaactgtgaatctccaaaaggaacattagtaatagatctatcaacaaagaacaaggagataatatcgcaagctgctgcaatggagcaaatcgacttaaacgattatatagtcaaccagctattacttaattcgctaagagttatatttggaagtggtaatgttacaagtgatgacataaggaatattgataacattatcaaaaattctccctcaccagacgaagatatgcttaatgcgatttcgatgtataatgaaacctttaaagaattaattaaacctgaaagattagataaaagagataaagcttcaaagagaaaaccatcctatggtaaggcagcccgagataatttagctaaaggagtacctatttattacacaacaggaggaataccgaaagggctaataataaaagaatacccctctgggaagaaagaattagtagatttctcctctggtaaagaggtatatatcaaggattacaaaggatga

SEQ ID NO: 11653 - DNA, 885 bp, Escherichia coli
gtgaaaaatgtttatgcaaatctcgatgagattaaaataaacatagataagcttttaacctattgtaacgataatccttcgcctaaaaacaagagttattatttcaactttatttctcatcttgcagagactgattgccgtaaggtagatgataatcccctagttatctcatacaggcaaccctacaaaacagctaaggtaggagggcgttcttttgaaaatggtacaggctttcagggattaccaaaaggaatgaagtggggatgccttgaagaaggatataactatgacattaaaagttgtcagcttgaaattctgcgcgatgagttaacaaagattggtgtatcagatgagaacctccatatccttgaaactaaatatatcgccaaggtattaaaaataagcgagggtttagttaagcaatttagatattctgctgtgtttagtgcaggtcatgtaaatttaagccgtaaaagcaagactgtacagcttctgtataagtcctatggtgaaatcaaaacccggcgaatacttcttcgctggcgaacattgttggaaccgcttaaatatgatcttaatgaattaatcgattattatttgtctacgggtaaaacaaaccgctatggcctatgtgtgagaaatgcagtcggacagatcttcaactgtacttacaaagatcctgcggcgaagataaggtggcgctctgatgtcatgcgacgcaagcttctcgctcatatgctacaaggcgaagagagtagggctgtatatgattttgttgccgcacactctggtatttgtgctttagagcatgatggattcgtttctcgccgcaagctcaagaaaggtgactggaaacatccatatcttaagctcgttatgaaatag

SEQ ID NO: 11654 - DNA, 261 bp, Escherichia coli
atgacattgattaccgcaatgacagcagagagcgcaagaagctttttcttgaagcacaagagctattgtagttttgcacttcctgcttattttgactttgcgcctcttctgctcgcagtgaaaaatgctctcgaacaaaagcaaaacggtattaatgatatcggttacaaaaaagcatgcgatttcgataatgttaactattgtcacgaacggtgcaatagtgatccacacccaacgcctgaaatcagatccagggggtaa

SEQ ID NO: 11655 - DNA, 3852 bp, Escherichia coli
gtggcgatctttgacattgagaaagatgaattactccgactcaccgatagtcaacttgaagagttgactgctcgtcttgctgaggcagaggtagcagctcatggccacagtcccgcatgggttaattggtctggttccatcaatgcaccagacggaggaattgacgttcatgttcaggttcctatcgacaaactaagtacagggtttatcgagaggcccgacacgatctttcaggccaagaagccttcgatgagtgcgtccgcgatcaagaatgaaatggaaactgaacaaggattactaccgttaatctctgagcaagtttctaaaagaggaggatacgtaattgtctgcctcagtgatgattgttctcctatttctaagatgaaacgcctgcaagcaatgcaggaagcagttaaggatgagccaaataatggcaatatccatctcgacttctttgatcgctcgaaactgactcaatggttacgccagcatccgtcagttatgttgtgggtaaaagggatactcggacagggatattcaggctggcagccatacggtgcgtggagtaatcctcccaatggcgtcgtagacactctaatcttagctcctggagtcacggtcactcttccatcagggcaagggcagaagcttagcattgaagatgctatcaatccgatgcgagaactaatccgttctactaaaaaagctattcgcataacaggattgtctggtgtaggtaagactcggatcgttcaggcactttttgatgaatcggttggatctgaccctctagatagaacctctgtaatctatgttgatacaggtgctgacccagccccctcggcaacggctatgctggagcggcttattgtcgaagatcgacgagctattatgatcctcgataattgcccatcagcactacactctttattggcaggtaagatatcagccgtaggtaacaaggtaagacttattaccatcgaatacgatattagggacgataaaccgcaaacaaccgaggtaatccgcatagaggcgtttggaccggaggtagctgaacagcttttgattcgtcgcttcccccgtataggccatcacaatgcccgtagaatagcagcgtttgctgatgggaatgcacgtgtatccttggcaatagcagagagggtagaagagggtgaaagtctagctcaattgtctgatgcacagttgtttaaccgcctttttgagcagcgtaatgatcccgatgatgatctgcgggaacaagctgaaatattgtccttagtgtattccttctccatctcaaccagtgaaggcgggattaacgaattggaggcgttaggctcactcggcgggtactcctacaggcagttattcaaaacagttactaatttactgaaccgtcacgttatccagaaaagagctaattggcgggctgttctacctcatgctattgcaaacaagctagctgcatcggcacttgatagcatccccgttcatgaactcagagacacctttgaagctcccggtcgccaacgtttattaatatcattcgcacaccggctaggattgctccatgaacacgctgtagcgaaagaaatcgttgaagcgtggcttcaaccaggagatttgcttggacgaggaactgagttggatgatgcatcaatacaaatgttggcatacatcggtccggttgcgcctgaaacacttctcaacaggattgaagaagagcttacttcatctgactttaaaggtatggaacggcgttacagtctacgacggacaactatgttcaatctcctgcaatcgttggcatatgaaccggaaacttttgaacgttgcgtcaggctgctaattcatgcggtagattatgaggttgaaaacaacaaccatgactctgtacggggtaagatcaagaggctttatcagccatacctgtctggtacacaggcctctttagaccagcgccttgcaattttgaaacaatgcctttcatcagacgtcgttggacgcaaagaattgggccttatgatgctttcaacagccctcagcggcccaccttggacggggttcggggctaatgagtttggtgcacgaccaagagattatggttttcaaccaacctatgaagaacttgttgaatggcgtagtgcattcattgaagttgcggttaatgcaggaacttgcggaattcctgcggttgaggaaactgcgcggcagcttttagcgagggcttttcgatcaatatggcgtcaagaggctgccaggacaatgctcattgatgctgctcacaaattacattcttactatccgtgggttgaaggatggaaggccgttcgttcaacgatatattttgattacaccaagcgcagagatatcgaagatttagagccgttgccaagcgatcttgtcgctctggagagtgagttagaaccacatgacttggttccggaaataatggcttatgtattaagtaacggacgcgattatttggcatttagtgccgatacttctcctgatgaacctaataagttcgctaatcttaggacataccttgactctaaagcttatcaattggggcaggatttcgcgtcatctcagcatacgcttgatgagttggggcctaatctgttcttggtgggggggatgccctaccgtgttaaatttggtcaaggtttagcaagaggggcacttgacctacgggagtgttggcaacaactcgttgcttatttggatatacaaaccggttctcaaaaggattttgcagttatccgtggctttatcgacgagacagatactattgattcaatattagcccaagaatttctcgatcaatgtgtgcgtcatcctgagttgcgatacggaattgtttatttacatccttggcgagaattcactgaaactgacttggatcgctgtttggctcttttagatgaccccgacatcatgccgtcaatgtatggacaaattctttggggagaccaatacgctcatttgccagagccgcgcattgttgatcttgctcacaggcttttaagtatgccaaatggcgatgatgttattttggaagctttaagcatgaagttaagtgaccagaaagacggttcgagtactcttggctttgatctgcttcaaataggattgaaagctgcaatccagaggttcaaaagagagcacaatgattccgctgggggaatggattacggcatggaatgtgttgttggtgccatattgcgtctcgaaggcaacgaggcggggaagttagagtggttaaatacgatctttgctgttgttgatgaacagtatggctgtattcattcgtttgaagacactataaagatgactgcggcatcaatgccagaagcgttcctctctcgtatttttgaagggacagaagaacagcaacaacgacgtattcattttatccattatgatgatgtgacagagtcccctatcgcgaatatcgacgtgaatgtattgatcgaatggtgtcttactcgaaacgatattaatgtatgggcacctctcgcaaagggtatccgcctttggtctgtgggggatgatttggataaggtcacaatgcaggtttcagcgattcgcttccttgaagcagctcctgtgccaaaggccgtactggaagaattcgcttatcgcgtaacaccgacatcttggtggggaagtcgagttaacgtaatgcaacccagagcaaatactattagtagattaatagagcatgagcgtacagatattgctgcggcagctagaattgtttccgagaaattaaacgattggatagaacatgaaaagttgcaagagcagcaggaggatgagatgcgcgaacaacgcttcgaataa

SEQ ID NO: 11656 - DNA, 750 bp, Escherichia coli
gtgtctgaaaaacaacctaataaacctctaaccgctcgcggtatagataccatgaagctcggcatgactctggcagatacgggcgaaaatagaggccttcgtgttacgcgtggaaaaatgggaatctgcacatttttctaccgctataccagtccaataacaggtaaagataaacagatcttgataggccattatcctgtgaccactctggctgatgcccgcgttaggttacacgaactgaagataatcagaaagcaggggcgatgtcccagaactgagctggatgaggaaaagaagcagcttaaactcgaaaagcagaaagttaagcagaagcctgtaacagtcaaagatgtagtcgagttatatctgacggagaggattgaggaccgtaaagactctgatggtaagctgatccgtggcgcacgcaaagttaaaggccagaaagagtgccggagaactctggaaggcgatgccatcagagtgctggggcatatggaagctatggctgttacgcgtaaggatgtggtggagttggttaacagtattgttgaacgaggagcaagagttcaggcgggtaatgtaatgcgagagttgagtttagcctacgacttcgcgattgcccgacaatgcttagatgaacactttgttaatcctgcaatgttggctaaatcaagcattcggcaagccagaacaaaagtgacctgtaaccgtcgtgctcgttttctgagtgaaaaggaactatcacagtaa

SEQ ID NO: 11657 - DNA, 498 bp, Escherichia coli
atgatgccagttagctgttacctctgcattttcttaaacgttggtttgggagaaggtgctccagctattggcgttccgttcttctggccctccgctgcaatgccaaatactgtaatcgacagctggtccggtatggtgtttttgaagttcaacggggcgaaattttctgcctctgattaccctgtgctggcgaaagtgtttccttcgctggtattacctgaagcccgcggtgatttcattcgtatctgggatgacgggcgaggtgcagatggtggtcgcgaattattaagctggcaggaagctacaaacttttctcagtttgccgggaatataggcggaggtgcgggacacgcaattaactttcatgatggcatcgccggaaatcagccaggattttcacgatttaatttcaccagtaactctgtgggtgatggtgtgaattttgttgctgtcagaccgcgaaatattgcatttaactttctggtgagggctaaataa

SEQ ID NO: 11658 - DNA, 429 bp, Escherichia coli
atgtacgtatggagcgctaaagcaaatggctttttccccatatcggagaaagaaaaatttgaggcatcaggtctgtggcctgatgatggtgtaatagtcagtgaggaagaacataaaaagttatttatggatattccaccaggaaaacagattggaacactgaatggaaaaccagcactgatagatattcctcagccgaccaaaaaggaattaatagctattgctgaagttaaaaaatcccaattacgggaaaaagctgacagtgaaatatcctggcgtcaggatgctgttgatgctgatatcgcaactgatgaagaaacttcaactctcaccgaatggaagaaataccgtgtgctgctgatgcgtgttgatacttcaacagcacccgatattgaatggcctacgcctccggcagttcaggccagatga

SEQ ID NO: 11659 - DNA, 258 bp, Escherichia coli
atgcagggcgaaaagcagcagccatatttttttaaccctggtatgactgttgaacagcttgaagactggctggagcagcaaaagcttcatctaagccgctataaccgtctggtaaaagaaaaagcagagcttgaagaacggctcagtgatatttctgtggaaattgaacgaatgtctgctggtggttttaacggaaagttgagtttcccctgggagtcaagttcgcttctgagaaatcatcaacagggtagtatttga

SEQ ID NO: 11660 - DNA, 351 bp, Escherichia coli
atgccgccacgaaccccgaaagcctgccgtgttcgcggctgccgccataccactactgacccttcaggctactgcgaaagccacaaaagcgaaggctggaagcaatacaaacctggacaatcccgtcatcagcgcggctacggttcgaagtgggacagtatccgcgcgcgtgttctgaagcgtgacaaaggcctgtgtcagttatgtctgcgtgctggtgtggtgcgtgaggcgaaaactgttgaccacatcatccctaaagcgcatggcggcactgatgctgacagtaatctgcagagtctgtgctggccgtgtcataaggcgaagacggcccgtgaacggttaaagtga

SEQ ID NO: 11661 - DNA, 603 bp, Escherichia coli
atgaatgaccgtgaaatccgttgttacagcggtgaggtgcgtgctgagcggcatgacgataacccggcgcacattatcggttatggatcggtgtttgactgtcgttctgagctgatattcggttcattccgcgaaatcatccggcccggcgcttttgacgatgtgcttggtgatgatgtacgcgcactgtttaaccacgatcctaattttattcttgggcgtagtgcagcaggcacgctgaatctttcagttgatgagcgcggattacgctatgacatccaggctccggagacacagaccattcgtgatctggtgctggccccgatgcaacgtggagatattaaccagtcatctttcgctttccgtgtcgcccgtgacggtgaggagtggtatcaggatgaggacggggttgttattcgcgagataacccgcttttcccgtctgctggatgtcagtcctgtgacatatcctgcctatcaggaggctgactcggctgttcgctccatgaaagcatggaaggaggcgcgcaacagtggcgcgctacagaaagccattaatcaacgtatggcgcgtgaacgcgtcctgacccttcttaacgcgtaa

SEQ ID NO: 11662 - DNA, 1230 bp, Escherichia coli
atgaaactgcatgaactgaaacagaaacgtaatactatcgcaactgacatgcgcgccctgaatgaaaaaattggtgataacgcatggacggaagagcagcgcactgagtggaacaaagcaaaatccgaactggaagcgcttgatgaacgaattgcacgcgaagaagaactgcgtcgtcaggatcaggcgtacattgaaagcaatgaggaagagcagcgtcagaatcttgatccggaaaacaatccgcaacaggatgagaaacgagctcaggtttttgataagtggatgcgtcacggtgccagtgagctgacatcagaagaacgaaaggcgttgcgtgaacttcgtgcccagggtgtagctcaggatgaaaagggcggatataccgtaccagaaacattcctggcgaaagttgttgagaagatgaaatcctacggtggcatcgccagtgtggcgcagattctgaccacttctgacggtcgcactatggagtgggcaacagctgatggtacttccgaagttggtgttctgctgggcgaaaatgaagaagccggtgaagaagacaccgatttcggtatgggaagtcttggggcgctcaaaatgacatcgaaaatcattcgtgtgtctaatgagttgctgcaggacagcgcgatcgatatggaagcttatcttgcccgtcgcattgctgaacgtattggtcgtggtgaagcccgttatctgattcagggaactggtgctggtacgcctaaacaacccaaagggctggtcgcatctgtgaccggcacaacacagactgccgcggcaaatacggtgaagtggcaggaaattctggctctgaaacacagcattgatcctgcatatcgtcgcgggccgaaattccgcctggcgtttaacgataatacgctgaaactgatcagtgagatggaagacggtcagggacgccctttatggttgccggatattgttggtgtggcacctgcttcagtgttgaatgtaccgtatgtcattgatcaggaaattgatgatatcggggcgggtaaaaaattcatgttctgtggtgactttgatcgcttcattatccgtcgtgtgcgatacatgattcttaaacgtctggttgagcgttacgcggaatatgatcagaccggttttctggccttccatcgttttgactgtatcctggaagacacctctgccattaaagcgctggtggggaaaggtagcgttggtggttga

SEQ ID NO: 11663 - DNA, 495 bp, Escherichia coli
atgcgtatctttgtgttttttatatctgcacttttatcttttaacttggcagcggaagagtgtaagttcagctttaatgagtcagaattaatctcttctataggtattgcaccagttaagcaagagatagtaaaggatgaaggaataactaagcgtcaatatgaattcaggagagaattgtcttttgaagaaatgcttggcgatgatgctgatgaaaaatatgagccgcagttttatatatctgtttataatccatcatgtccacaaaaggttattatttggtttttcaaagacaataaaaacacacaaactttaagtaatgaggtccttgctggtagagcattcaagtatttaactggtgttaatgaaagtatttttgaaaataaaatgaaaaagttttcaaaggtacagtcatttgaatcctttgatgaaaggacggactctaaatttataaagagtggtaatgtttattccattgatgttcaactcagatag

SEQ ID NO: 11664 - DNA, 483 bp, Escherichia coli
atgacaactaaaaatgaagacaagactcttccggagccgccccgcattcatggttttatctgggatgtaaataatgtgcggctgctggcttatgcactccagactgaatatcaggaaagtggcatgtggcctgagaatggtattgatgtttctgatgaggtatcagccgaatttaccggacagccaccggaaggaaaaactattggtgtgggggatgacgggatgcctgcttgggtggatataccaccaccaacacatgaggaacagattgctgcagccgaactggaaaagcagcaattgattaatcaggctaacaattatatgaacagtaaacaatggcctggtaaagcggctattggtcgtctgaaaggtgaggaactgtctcaatataatttgtggctggattatcttgacgcactggaaatggtcgatacttccggcgctccggatattcagtggccggaagaaccagacacaatgtaa

SEQ ID NO: 11665 - DNA, 681 bp, Escherichia coli
atgagcaaatacaccgaactaatcacgaactaccacgccaccaaacctaaatttcttgcacatgttgatctgatgacccggccgcttattgatgttgcggctgccaccagagggctgattactgcatttgatattgactctgcggttggtgtgcaacttgacattctgggattgtggatcggacgtagccgtgttgtcagccagcttatttcaggtgtctatttcagctgggataccgacgggcttggatatgatcagggtgtatggcaggggccatacgatcctgattccggatacatgtacctcagcgatgaaacttatcgtgtcatccttaaagcgaagattgcgattaataactgggacggacggaatgattcgcttccggcaattcttgacgcggcaacagcaggatccggactgcgaatgcagatagtcgataaccaggacatgacgatatcggtctgggtctttcctgatactgatatttcagatgtatcgcgtgagttaattgcggcaattaaacaggggtatctcacagtaaaagccgccggggtatgggcgggtggcattgaaacaccttcggtggaaaccccatcggaaggctcaaaattttttggttttgatatggataacgaattcatcagtggttttgatgtaggagcatggggagtattactctga

SEQ ID NO: 11666 - DNA, 1200 bp, Escherichia coli
atggctctgaaccttgattctctcggtttatctgcaaaggtaaccgcggaggggatcagtgcgcctgattatcagacgatactcagcaccctgattagctattttcagcagatttatggcagtgatgcctacctcgaaccggacagcaaagacggccagatggtggctctgatggcgctggcgattcatgatgccaataatatggcgataactgtctacaactgtttttcaccagcaaccggctatggggctgcactgaccagtaacgtgaaaataaatggtatttcacgtaaaggcgcgacgaactctacggttgatttgcttcttacaggaactgccggaacaaccatcattaatggcagcgtgaaagacagtaataatgtgatatggcgtttgcctgcttcagtggtggtcggcgtggatggtacagtgatggtgaccgcaacatgttccgtcagtggtgcagtggcggcgctggctggaactatcactgaaataaatacgccaacccgtggctgggtttcggtaaccaatcctgctgcggctactgtgggcactccggcagaaactgatgcggagttacgtatccgccagtcgcaaagtgttgcgttgccatcaataaccccatttgaagcactgaatggtgctgtttctaatgttaccggtgtaacccgccacaaactctatgaaaacgataatggttcggaggacggtaacgggttaccgccacactctgttgctgtaattgtggatggcggtgatgtgacggatattgctcaggctatcagagggaataaaggccaggggacagccactcacggtacaacatccgttacggttccggataaatacggcaatccccatgtaatcaaattttcgcgttccagtgatgtgcctgtttatgcccggattaaattaaaagtttttacgggttatacctcacagatagggcagcagatccagcaggctatttccgactatatcaatagtctgatgattggtgattcggtccttttaagtcgcatttactcaccggcgaatcttggcgtggtgagtggcgggaatgcacgctattacgatattcaggaactgacgattgggaaatccccgggggctttgtcgtcatcaaacattgatatcagatacaacgaatctgcgtcctgtaccccggaaaatatcgttataacggtggagtcatga

SEQ ID NO: 11667 - DNA, 354 bp, Escherichia coli
atgcgatacagacgtgaagacgccgatggcgattacacctttggcagcggtgatgacacctggctgattaactcaccggaggccgtggcgcaggcggtaaaaacgcgattcgaattgtggtatgggcaatggtttctcgacaccaccgaggggactccgtggatccagtccgtactcggtaagcagaagccggaaacctacaacctggcgatccgtaagcgcatcctcgaaacgcagggcgttaaatcaatcctctctttcaatacgacggtggataccacgacccgacgtgtcatgttttccgctgaaatcgacactctttatggaataacgactgttacatcggaggcgtaa

SEQ ID NO: 11668 - DNA, 753 bp, Escherichia coli
atggcagtatctgaccagacccgcagcggcgaccttgccgaaacattcaaatctgaaagggaaacaacaaagaaccagatccgtgtcgccttgcctggcattattcagtcattcgatcctgatgcggtgacggcagttgtgcagcctgctatccgttcggttgaaaaggataatgacggcaagcgcattaccaaaaattacccattgctggtggatgtgccagtggtattcccgcgcggcggaggatgcacgctaacgttcccagttaaagccggtgatgaatgtttggtgatttttgccgatcgttgtattgatttctggtggcagagcggcgggatacaggagccggtcgatgacagaatgcatgatttatcggatgcgttttgtattgtcggtccccagtcgcaggcaaggaagattagcggtattaataccagtgccacacagttgcgtagtgatgacggcagcacctattttgagcttaatcctgataccaggaaaattaaaattgtcgctccgggtggtcttgatgtggttgcccctctggctgatttttctgagaaagtaaccattcatggcctgttaacctggatgggtggcatggtggggtctgtggtttctggtgtggcttcaaaaatcactggtgctgttgagtttttgggtagcgtgaaggctaacggcaagccaattgatgatacgcacactcatggtggtgttcagcgcggtggaagcaataccgacggagtaaactga

SEQ ID NO: 11669 - DNA, 726 bp, Escherichia coli
gtgagcaggcttgcgataaccacaatcgtattttctctttttttaacttcatgtagttgggatcctaatggtgctaaagctcaggaaaaatggctatcccaaaaaaatgaagaaaaacaagcgtacgataagcaagttgaggagagccagaaaagcaggcttcaaatacagcgcgaagaaaagtctcaatttgaagtttcacatccagaggttatcgttgatggtgttgggaacgagcttacaagtaagggtgcagaatctttgcgagatgcgtacaacagcattccattcgtaactcgttatccgggaaccacggaccctaacaaagtttatacctatgtcggtgactacaaattaaatttgcaactggttaacacatctgtgctttctcagatcgcagattgcaaacgcatttcagcgtatgccgatgttgatattaatcgtacttgcttcaatcaaattggaaatgatttgagtttgtttgcatctgtaattaaagacaaaaatattaccggaattgcaaaaaaagcagctctacgagattcaacttacggaaccaaaattgattttggtcatgctgcgcgtttagcaaaaatgcatgccactttatgccaaaagcagggcggtaaaggatttgtcaaaatgtcgactgtagctgtgccttgcggctcttcaggcgatgtaattaactatcgaagcgccggtaagatggggcttataaactga

SEQ ID NO: 11670 - DNA, 1065 bp, Escherichia coli
atgtcacagaactggatgagacatttcgagctgcagcttgtggacgggaacggtcagggaattgagctaagtgattttaaagtcacctttacgatcgactggttcaacatcagcagcgcgtcccgggtagggactatcaaaatttataacctctcggcagatactgtgaaccgaatcaccgggcaggagttttcgaaagtgcgtctgattgccggttacgacggtatcgcgccggaggtgtcggcaagcgacgtcgggaccgtgcgggaagttgacgcggcggacgtgggtcagagtgatggccgcaactacggactgattttcagcggtgaaattcgctactcggtcacaggaaaagacagtccggttgattcctacgtcctgattcaggcagcagatactgatctggcttttgccaccagtataacctcacagacgctggctgccggttacacggtcgctgatgtaaaccgtgcgctgatgaaagacttcgaagccaaaggcgcgaccgaaggcctgacgcctgaaatgcctgctactgtattcccccgggggcgggtactctttggcatgacgcggcatctaatggataacgtagccgggcaatgtggcgcaacatggcaattcgtggacggtcagcgccagatggtggcgaataacgaatatgttcatgaagcgattgtgctcaacagcgctaccgggcttattggcatgccgcagcagactatcggtaacggcgtaaacgtccgcgcgcttattaatccgaacatccgggttaacggacttattcagctggatcaggcttccgtgtatcgtaccgccttgtcgaacaacgatattgcgatggctggtggtcagatcaccgaccagaacacggatggaaatatcacgctaagcggcaccacatcgcagcctgccagcatcgcaacggatggcgtttatattgtgcgcgggattatgtacactggcgacacaaggggccaggcgtggtacatggatatgatgtgctttgctcgaggtgctagtgatattcctagccagtcagcgatgaatcgaggtgcataa

SEQ ID NO: 11671 - DNA, 303 bp, Escherichia coli
atgacaattcaggaaattccgctgacagcggacaaccagcagttcagcatcgtcctgggtggtgtcacctggcggattagcatcatatggcgcgatctgtactggattatggacctgcagaacgacaggggggagccggtaatctccggtattcctctcgtcactggtgctgacctgctggcgcagtacgcctgtatggggcttggttttaagctggtggtggtctgtgatgacaacacacaggattaccccacaaaaactgacctgggcggtcgcagccatttactggtatcaacggagtaa

SEQ ID NO: 11672 - DNA, 588 bp, Escherichia coli
gtggatattctctctacactttttcatcagcagagcagaaaaataggaatgattgttcccagtgttgttatttcagagaagcatacagatatgcttgaaataacagagcatccggtagaggtcggggccgctgtcgctgatcatgcctataaaaaaccgtcagaagtggtgatggaggttggtttcgccggtggcggcgcattgctggattttgccagtaacctgacggctaccagcctgctcggcctgagtcctcagcagacgtatcaggagctactggatctgcaggaaagccgtatccccttcgatgtggtaaccggtaaacggctgtacagcaacatgttgatccgggcgctggaagtgacgacggacaagacaaccgaaaacgtcctgtccgccgtcctcaccctgagggaggtcattatctcccggacacagcagattaccgtcgcggataaaaccaacatgaaggaaggggccagcacgtcggcggtacagaacagcggcaacaaaaccacaaaacctccagatacttcactgctgaaaagcatcacgggtaacgtggcgtcattactggggggcggctaa

SEQ ID NO: 11673 - DNA, 1989 bp, Escherichia coli
atgaacgctgaaactattaaagatttcctcgtctcgcttggcttcagtgtggatgatgcaggagcgaaaaagttcggttctgtcctcgccggtacaactgcaaatgtcatcaaaatggggctggctgttgaaggagctgcgctgtccgtggtggccttcacggctaagatcgcctccggcctggataatctttactgggcgtcacagcgcaccggcgcgacagtccagggaattcagtctattggctatgcggtttcgcaggttggcggcagcgtggacgctgcgcgatcttctctggaaagcctctcccggtttattcgtaacaatcccggtgcagaaggctttctgaatcgcctgggcgtacagacccgtgatgccagcggtaacatgcgtgacatggccgctatttttacgggcgttggacagaaactcagcagcatgccgtattaccgggctaaccagtatgcgcagatgctgggcattgacgaaaatacccttatggcgatgcgccggggtgtgggtggcttctccgggcagtacagcgcaatggcgaaagctatcggcttcaatgctgacgaggcggccagaagctccaacaaatttatgacctccctgcgtgagtttggcgcgatggcaggcatggcccgtgacaaaatcggctctaatcttgcgggggggcttgcgggttcgctggacaccctgcgccgccatatcctggacaacttccctcgtatcgagcagaccctgacgaaagccataaaaggcattctggcgctcggggatattattgggcggctgttcttcagactgattgaggggacatcaggccttatcacctggtggcaatcgctggataagcaaacgcgggagttgatctcgctgtttggcgcactgacgattgcgctgcgcattctgaacagtacgttctggatgtcgccgattggcctcattaccgcgctggcggcgggtattgccctcctgtgggaggactatcagacctggaaggaaggcggcgacagcctgattgactggggcaagtggaaaccggaggtcgatgccgcgctgaagatggttcgtgaccttaaaacgaccgttaacgacctggtgaaagcgctggcgaaactgctcaatattgaccccaaatcatggtccctgaagtgggatttcagcaacttcatcgaccagatgggcgaattcagcaaaatgctgaacatgatcgctgacctgctcaacgctatcaaagatggccgctgggctgatgccgtcagcatcggcaaacagatacttaatcagggcagcgaaaatccgtcagcgatgccgatggttacagacagcgctaacagtactgccgactggattaaagagcactggggattcgatccccgcagtgtgggccggacggtacgcggctggtttggtgatgatgagccggaacaacatgcacaggctacgaaacgaggagaacggaataacaatccgggaaaccttaattttgctggtcaggcaggggcttctcttgaacgcccgggcgggcgatttgccagatttgaaactgcctttgatggattacgggctcttgctcgtcagttaatgctgtacgccggacggggaataaacagtgtggagaaaattatctctacctgggcacctgcgtctgataataacaacacaactgcgtatatcagggctgtatcgcaacgactgggagtggatccccgggctgccctgaatatgagcgatccgcaaaccatgtcagcattgatgagcagcattatccagcatgagaatggaagaaatatctattctcgggagctgattaataaggctgccgtggcgggaattagtggcaaagtgacagaggttaaccagcaaaatacctaccacatttacggtggcggagatccgcacgctgtcggtaatgaggttgcacgtcggcaacagtctgcaaatgctcaggtcatgcgaagtaatcaggtgagggtgggttag

SEQ ID NO: 11674 - DNA, 453 bp, Escherichia coli
atggaattcgaaattaaaggcgtgaaatatcgcacggcaaaactcagcgtttttgaccagctgaaagtgacccgcaaacttctgccggtgctggcaggaatgatgtcagatttcgggagtattcgctcccgtttgcctgctgacggcaaaatcgacaccgtgaaattcgaacagttaaaaccggtgtttgaaaccatgctcccgcgtatcgctgaggaactgtcttccctgaccgaagatgacaccgatgcgattattcatccctgtcttgcggtggtatcgcggcgtcatatggacggatgggtgccggtatttacccagggtgaactgatgtttgatgatattgacctgctggtcatgctgcaactggtggcgcgggtggtcgccgattcgctgggaaattttttgcctacaccccttaccagcacgacgcagagcctgcaacagggctga

SEQ ID NO: 11675 - DNA, 441 bp, Escherichia coli
atgtctacctattcttttatggatgtcactgcgacgctgaccgggccgaccggttcgattgacctcgggtacggttcggcaagttctgaggaggggattgtggttgcgatgggcggtcctaaaaacaccatgaccatcggtgctgatggcgaagtgatgcacagcctccatgcagataaaagcgggacgataaccgttaaccttctgaagacatcaccgacaaataaaaaattgtcgctggcgtataacgcacagagccagtcttctgccacatgggggaataacgttatcgtgatccgcaacaaggtcagcggcgacatcatcacggcacgcagtgttgcgttccagaaacaaccggataacgccaacgctaaaaccggtaatacgatgccgtgggtgtttgactgcggcaagattgaccaggttctcggggagttttaa

SEQ ID NO: 11676 - DNA, 1146 bp, Escherichia coli
atggcacagggcttgcctgtatcaaacgttgttaatgttgatgtgatcatgtcgccgcgtgcagcatcagggcgaaattttggtgcattactcattctcggcccgtccacaatcattccggtaagtgagcgcattcgtcgttattctgccgcggaagatattggaaaagattttggcgtggaatcaccagaatataaagctgcgcaggtgtttttctcacaatcaccgaaacctcaggaggtttttgtcggtcgttgggtgaaaacgaagggagacagcgaacaggccacgcctgagacgctggagcaggctgtgaatgccatgcttgattatacttcatggtatggactggggattgcagacgatgaagatattccggatgcagactggctgaaagtggctgcggcgatcgaatcctcttctgtaagccgtattctggcgattacgacaagcgatgagaaatgcctgcagactgcatccagagatgatttggcatcaaaactgaaaaccgccggatattcatgcagttttattcagtattcatcgggtaataaatacgctgcgttatctgcatttggccgggcattcacggttaatttcaatggcagtaataccgcgattacgctcaagtttaagcaggagccgggggtcgggtatgaaacactgacagtcagccaggcatcggcacttgatgcaaaaaactgcaatgtgttcgtgtactaccagaatgatacagctatcctccagcagggagtgatggctaacggcgatttctttgatgaacgccacggcctggactggttacagaattatgtgcagaccagcctctataacctgctttataccagcaccacgaaagttccccagactgaagccggtattacccgactgttatcaaatgttgaaaaatcactggatcaggccgttcagaatggactgattgctccgggcgtatggaacggtggcgacctgggtcagttgtcatcaggtgacacgctgcccaaaggttattacgtatacgcccagccgctggatgaacaggcacaatcagaacgtgaagcccgtaaggctccggtgattcaggctgcaataaaacttgcaggcgcggttcattacgctgacgtacagattaacgttgttcgctaa

SEQ ID NO: 11677 - DNA, 549 bp, Escherichia coli
ttgagcaataacaccagtacagagcgcggatggttaataccaaccagtggcgatccggattatgacgaagcgctcgacaggctgttaagccagtggatgcgtaacgtttccggtctgtctgccgggatggttcgcccgcgctggcagaaagagcagccgccactgctaccggttgaaacgaactggtgtgcgtttggggttatcggatggtcaggtgatgacagtccggcattcaccagacagaccgatgatggctctcagctctggcggcatgaaacgattgagtgtatggcttcgttttatggaccggcggggatggtgtatgcgtcccggtttcgtgacggtatatctgtgccgcagaacaatgcagcactgaatgcgctggggctgtctcttggcgattacacaggtctgactcccttccctgaacttattaatcagcaatgggtccgccgctacgatatgacggtgtgcctgcgccggaaggttgtgcgcgagtacggtattaaatcgctggtggaagcaccagtcatctttttcggagattaa

SEQ ID NO: 11678 - DNA, 390 bp, Escherichia coli
atgccgactcttgatgtaacagatgtgctttttgaccccgatttttgcgacttcaatttgtgggtaacacgccgagtgcaaacggtggatgaggacgggatcggcagcgacagtgaagttaaaaagcagtttgtcggagtcgtaactgttgatcgctctctggaaaaccgccgtatgcaggcagggcaggtaatcagcggtgcaattctgattgtgacgactgagcgactgacgcagggacagactggccgtgatgccgatatcgtgacgtatcagggccgtgattatcgtgtgaccttcgtcgacccgtatacagcttatggggccggattcgttcaggcgcattgtgagttgatgccgtttgatggaggaactccggttgagcaataa

SEQ ID NO: 11679 - DNA, 555 bp, Escherichia coli
atgagtttcaaaagtggtgtaacaacgagggtggataacgctaaggccattctggatgcgctcaggtcgttaaccaaaaaagatgtgctggtcggcatcccttcggaagacagcgggcgggatgatgttccgtttggtaatgcgggcatcggttacctcaacgaatacggctcaccagagcagaacatcccgccacgacctcacctggtccccggcgttaaatcggcagaagagcagacggtgccgcagctcaaaaccgcggcacaggctgctcttgatggtaatgctgcgggagcagaacgcgcactcaaccgtgccggaacgctggctgctaatggcgtcaggcgttacatgactattaccggctttacgccgcttgctgacagcactgttgaagcccgggctcgtcgggggcgcaagggggcaacactggaacttgcccggcgtgttgctggcgaatctcccggaaccgatctggcgaaaccattaattgacaccgggcaatatcgcagagctattacccatgtagtgagggataaagatgccgactcttga

SEQ ID NO: 11680 - DNA, 420 bp, Escherichia coli
atggggctaaagatgccaaagaatcaaagtctgccagcggtaagtgattttcgccgcgacttcccgcagtttgctgacccggcaaaatatcccgacgcccaaatcgggttccgtctgaatctggccgatgaactgctgagtgaaaacgtcaccggcaaaaagttgtttccgtactttgccggattgttcgttgcgcactacatgacgctctgggcggcagacagcagagcgatgctggctggtggtccgggcggttcaaccaatggtgttcagtcctcaaagtccgttgacaaggtaagcgtcagctatgacaccagcgcgacgctgaatcctgatgcaggtttctggaataacacccgatatggcgctgaattttatcagttgatcacgatgttcggtgcaggcggtcgccagctatga

SEQ ID NO: 11681 - DNA, 369 bp, Escherichia coli
atggcgaaagaaaagctggttaccatccatgttcacaccccgtttacgctgacgctcggcgatcagtcaaaacaggagtttggccggggacggcataacgtaccggaagaggtcgcgtcgcactggttcacccaggcgcactctgagctttccgaaagcgtgattagcgacaccgatgatctgcaacccattatcgacggcctgcaagcgcagattgccgacaaagataagctgattgccgatctgaaagatgcattgctcaaactgcaggagcagaacgacagcctgcaggcgcagattactgccgcccggactggcggtaatggggctaaagatgccaaagaatcaaagtctgccagcggtaagtga

SEQ ID NO: 11682 - DNA, 942 bp, Escherichia coli
atgattacttttgatcaggcaaccgttgacagctctggtgcctttctcatcggggagctggagcgactcgaccagacgctgaacctgccactggtggggtacacctggacccgcgatattcagttgcgtgaagatgtctctatcgcagatgacatttccagctggacgaataccagcttcgccgctgcgggtactggtgcaaatccgaatggcaaaaactgggtaggcaaagactcaaccgctattgctggcgtgaacgtggataccggcaaatccggtaacccgctgaacctgtgggggatggaacttggctggacggtcatagaattgcaggctgctcagcaggtcggccgcccgattgatacgcagaagtatgacgggatgcaactgaaatggcagatggataacgatgaacaggtatatgttggcgattccgcattaaacctgaaaggccttgttaccctggacggcgtgcctgtcaacaacgctgccaaaacgtgggcaacctcaacaccggacgaaatccgcgcaagcattaaccaggtgctgtctgatgcgtgggccgcttctggttactctgtggtcccgcgtgatttgctgatcccgcctgaacagtttgctctgttgtccagcatcatcgtttcatctgcgggtaaccagtccctgttgacgtaccttcagaccaacaccatcagctatcaccagaacggtgttccgctgaatatccgcgcggttaaatggctgaaaggccgtggtgtggggaataaggatcgcatggttgcgtacaccaacgataaaaaatacgtccgctacccgctggttccgcttcagagcgtgccggtgcagtatcgcggcctgtatcagatcgtcacttactacggcaagctgggtgcagtcgagccagtgtataaagaaactctgtcctatgtggacggtatctga

SEQ ID NO: 11683 - DNA, 507 bp, Escherichia coli
atgaataatgtatttctgtaccggatgcctgttggtattgccggggctgtctctcgcccgcaggacttaaccgtcgaaccggtggtccttaaatccgataacgccttcgctgcctatgggctggctggtaaatacgatgatgacggttttttcgtgccgctggcagatggtgataccgcagacaaggtgaaggggatctacgtgcgcccttatccgaccacgtcgcagccggacatggttcgccaggtgggaacaggcaagaacttcccgggcgacgccatgaagcgtggctacgtgaccgttaatctcggttctgattttgatgccagcactatcaaaaaaggcgacccggtatacgttgtcgtctccactgatgaatccatcaaagtgccgctgggtggattcatgtccacgtcagtcagtggcaaaaatgtggtgctgaccaacgctgaattcacaggtgccggtgatgctaacggcaatgcagaaatttcctggaagatttaa

SEQ ID NO: 11684 - DNA, 1221 bp, Escherichia coli
atgaaatattttttcaatacccggctgggggaaacccgctatcagctggctgacggctcgttgctgtgcagagacgtgccgataggacgaacaggtaagcagctctatggtgctgatgacctgccaaaactgaaacccgataagttcggtgaaatagtcgtcacgcgttctcctgagcaggtattccatccggccacgcttgcctcattcgaagggatgagcatcacgattctgcatcctgaagatgaaaacgggaatgtgcggctggtaaatcccgagaactggaaagagcttgctgtcgggcacctccagaatgtccggcgcgggacgggtgagcagtctgatttgatgctggctgaccttatcgtcaaagacgaaaacgccattcagcttatcgaagatggcctgcgcgaagtgtcgtgcggctatgacgcggagtacgagcagaccgagccaggtaaagctgagcaggtcgatattaccggaaaccatgtggctcttgtccctaaaggcagagccggaaatcgttgtgcaattggagacagagacacaatggcaaatcaaaagaaaaactggtggaaccgcatgcgtgcggccatcaagacaggagatgccgacaccatgaacgaactggtggagtcggctcccgcatcggttacaggagatgagggggatttgccgcagggcgttaatctcaatatcaacctgtccccgcagcaaccactaccggacaaagcaccagagatggggggaggcccaaccggcgacagtgatgatgacctcaaaacattactgaaagccctgctggctaagctggaaggaaatgccacgggcgataacgataataagcctgacgataatccgaccggtgacggcgaggacgatgaagaggaaaccacgattactggtgactcagcctggcgtgccgaagttattgttccgggtatcgatctgagccgtaagatgaaaccgaccgcgttcaaacgcgaggttctggcttccgctgacaaaacgctggttcgccagatagtcggtgatgcggatatccgcaaattgccgaaacaatcggtcgacatggcgtttaatgccgtgtctgagattgccaaagggcgaaacacccgcgccaccaccggcgatgcacagcgcctaaacatgggcatgaccagtatcgcttccctgaacaaacaaaacgctgaattctgggcaaaccgtaaagggtaa

SEQ ID NO: 11685 - DNA, 450 bp, Escherichia coli
gtgggccaggtgatgcaatccatcatcgccgaacaggtcaagtacatcaaatcgctccccctcgaggcggctgacagggtgtacgacatccagaatcgggcgacagaagctgttgtgaccggtgggagagcagaatattttgctaaagaaatagccgcatcgggtgatatagcaaagtccagagctgacctgattgcccgtactgaacttggacgtgcaaccggcgcgctggatcaggcgcgtgcgctgtcaattggttcgaatggttatatctggcgtacagccgaagatggtgacgtcaggcattctcatcgggaaatggaaggtaaatttgtcgaatggggcaaacctccaacgcttgacggcatgacaggtcacgctggcgagctcccgaattgtcgctgttataaagaaatcgtttttcccacctcccaatcttatcccgcctga

SEQ ID NO: 11686 - DNA, 1467 bp, Escherichia coli
atggcacgaaacaaacaagccctgcggcgaactgcgcaggccacagctgatggttatgagaattttattgcccgcgtagggatgcagacacctaaccagcactcagcatccacctaccgggctaatttcaccagtcgtaaccgcatgctggtggaatggtcctatcgttcatcctggatcatcggcgaagcagtcgatgctatcccggatgatatgacccgcaaaggcattcgcatcacgtcggaaattgatgcaaaagatcgtggcattctcgaatcacaactggatgagttgcaaatctgggatgcgctgaatgacgtgctgaaatggtcgcgcctctacggcggcgcggtgggtttcatcatgattgaggggcaggcaccaatgaccccgctgcgacccgaaaccatcggtaagggcaagtttaaggggattctcccgctcgaccgctggatgatcgacccggtactgacccgccgcattaaagatatggggccggacctgggtaaacctgagttttacgatgtggtgaccacagcaacgggaattcctgcctggcgcattcatcacagtcgcctgattcgctttgatggcgtcacgctgccatttcagcagaagatgaccgagaacgaatggggaatgtcggttgtagagcgtatctgggatcgtcttaccgcgttcgacagcgctactgtcggcgcggcgcagctggtctacaaggcgcatctgcgcacctacagcgtggagaagctacgcgagcttatcgcacttggtggtcctgcgtatgaagcgttgctgaagaatatcgacctgattcgacagttccagagcaatgaaggtatgacactcatggactcgcgggataagtttgaaacgcatcagtacagcttcagtggtctggatgacatcctttcgcagtttgcagaacagattagtggcgctgttggtatcccactggtgcggttgttcggacagtccccgaaaggattttctaccggcgatgcagaccttgccaactattacgaccgggtaagctcgttacaggagaggcgtttacgtcttccggtgcggcggatactggacatcatgcatcgttcggagcttggcaagccgctgccggacgatttcacgtttgagtttaacccgctctggcaaatgtctgatgtcgatcgctcaacggtggcgttaaacactaccaacgcaatcagtacggcgctgggtgatggtctgatgacactgaaagccgctatgactgatttgcgcgaaaattctgacgtaaccggcatcggggcatccattaccgacgaggacatcgagaatgccgaagatgaagcgccgcccggcatcggcgaatctgatgacgaaccgcaggaaccgtcaggcggaaatccgctatcgaaccagcctacgcaggatagcgcgggcggtcggagacatcgtaaatggtcgctacgatggttcaaatga

SEQ ID NO: 11687 - DNA, 1623 bp, Escherichia coli
atgccgttaccattccccttcgattttaaacatcctgattaccagatggtttttgaatggcggatggaacgcctacagcgcattcgccagaatcctgaaatattgcccgtattgaagcagttttaccgaaccaatccggctcagttcatcatcgactggggcatgacaacggacccgcgtaatattgattatggcctgccggtgaccattccgtttttactcttccctaagcaggaggagtggatccactggattatggaacgctggggcaatcgggagaatggtattaccgaaaaatcccgtgaaatggggctcagttggaccgcgatcggactggcctgctcgctttgtctcttcaacaaagaaatggttatcggtttcggctcccgtaaagaggaatacgtcgacagcaccggtgacccgaaagcattgttctggaaggcacgcaagttcgtggaaacgctacctgtagagtttcgcggttcgtggagcgagaagaagcacgcgccatatatgcgtgttgagtttcctgaaactggtgccgttatcaaaggcgaggctggcgataatattggtcgtggtgaccgtaccacgctttatctggttgatgaggctgcattccttcagcgtcctctgctgattgatgcggcgttgtcacaaacgacgcgttgccgtatcgacctgagttcagttaacggcatggctaacccgttcgctcagaagcgtcatggcgggaagataccggtattcacattccactggcgggatgatcctcgcaaggatgaagagtggtatcgcagggaatgcgagaaaatcgataatccggtggtggtggcacaggaacttgatctgaactacagcgcatcagcggaaggcgttctgattccatccgaatgggtacaggctgccgttgatgcgcatatcaaactgggtatccagccaacaggcaaacgacttggcgcgatggatgtcgccgacgaaggcagggacaaaaatgccttttccacccgtcatggcttcctcctggaaaatgtgcgggaatggtccggtgtgggcagcgacatttatcagtccgtcgagaaggttttcggcttttgcgaacaggacaacctcgaagagtttcgctttgacgaggacgggctgggcgctggcgttcgcggcgatgcacgcgctatcaacgaactgcgtaacgctgcgcgtcgaccgtcaatacttgccacaccgtttcgaggtagtggcgcggtatttgatccggatgatgaagctgttcgcggggacaacgggcaagccgcacgtctgaacaaggacttcttcgctaacgccaaagcccagagctggtggcggttacgtaaactttttcagaatacctggcgcgccgtggttgaaggtatggcttacaacccggacgaaatcatctcaatcagcagtagcatggcactcaaagataaactcatcatcgagctttcgcagccgacctattccattaatggtgtgggaaaaatcgttattgataaacagcctgatggaacccgatcgccaaaccttgccgactcggtgatgatcaactatgccccaatgaattcagccctgaacatctgggagctgctagggagacaggcctga

SEQ ID NO: 11688 - DNA, 573 bp, Escherichia coli
atgactaagaagctgaaagcaaaacacgaggtgttttgtcgcgagtttcttgtcgatctgaatgctacacaagcagctattcgcgcaggctacgtctccaggcgagcacatgttacgggggctgaactatacggtaaacctgagatacgcgcccgtattaacgagctaaagcaggagcgtattgatcaactgggcattgatgctaattatgtgctgatgcgactggttgagatcgacaggctcgatgtggctgacatcctggaggacgatttaagtattaagcctctgtctgcgtggccggaatcgtggcgtcggtacctgagtggatttaacctcgctgaaatgtttgaggggcgaggagatgacagagaaatggtcgggatccttaaaaagattaagtggcctgataaggttaaaaaccttgagttgcttgggcgtcatgtttctgttcaggcgtttaaagacaacgtcaaaaatgaagtgactggcgctgatggaggacccgtcagaacagaaattaccaacttaacgccggagcaggctgcagaggcgtatagaaaaatgatgggctaa

SEQ ID NO: 11689 - DNA, 525 bp, Escherichia coli
atgaagctgacttataagattgtcatcgcggcatttttcttctctgcctttggggcgctcgtctggtctgcaaaccattaccacagcaagtatcaggcagaaaagttgcgggctgataaagcggaaggtgaagctgaatatcaagggaaagtgatagctaatcaggcattaaacttcaatcgttttaaccagatagcagaaaacgcaagccgattaaattctctggtcgacatcggtcacgagaagacagtcatcaaataccgtgaggttctgctccgtgaaaagaactgtgatttccctgttcctgttgatattgctgtcgggttgctcaactacgcgaaccgtttacgcgccagcgcattgcacgccgattccggggacattgactcagccggtgatcgtgccactaccaccagaacgttgacatattgccaggctgttctgtggattaacccactgttggcagccatcgagaaggcgaataaccagttggctggtgtccgacaaatagaacagtcccggtaa

SEQ ID NO: 11690 - DNA, 477 bp, Escherichia coli
atgcagacactaaattcccaacgcaaagctttcctggatatggtggcatggtcagaaggaacggataacgggcgacaaccgacacgtaatcacggttatgacgttatcgtcggaggtgagttgttcactgattactccgatcaccctcgcaaacttgtcacgctaaacccgaagcttaaatcaacagccgcaggccggtatcagcttctttcacgctggtgggatgcctaccgcaagcagcttggcctgaaagatttttcgccagaaagtcaggacgctgtggcgctgcagcagattaaagagcgtggcgctttaccgatgattgaccgtggcgatattcgtcaggcaatcgaccgttgcagcaatatctgggcgtcgttacctggtgcaggttacggtcagtatgaacataaaatcggtgacctgatttccaggtttaaagatgctggtggggtggtaaatgaagctgacttataa

SEQ ID NO: 11691 - DNA, 342 bp, Escherichia coli
atgaaaatgcacaatgctcctcattcctggcctgacttactggaactcttacaaagttggtggcgtggagatacgccgttgggcgcagtggttatgtcaattgttatggctggcttgcgcattgcctattttggcggtggcggcggctggaaacgaaaaacgcttgagattttgctctgtggtgctctgacgctgacctttgcatccgctcttgagtatgttggatggcctaaatctctttctgttgccattggtggtggtgttgggctgatcggtgtcgatgctattcgtggggctgcaatgcgagtaatcggtaacaagtttggtggctctaaggagtaa

SEQ ID NO: 11692 - DNA, 342 bp, Escherichia coli
atggctctgatcagcgttcgcaacagatttgaaagcttcatggaacagaggtacccagacctgtcgttgcaggtcaaaggtaatattggcgcatcaatgaaggctcaacttggcatcaggattgaacgagaattgtacagtgaagatgttacttactgtgattcagcagttcagttgatgtggacactctttcaggcaggtgttctggccgaacgaagagctaccagcgttacgcttcctgcgctgaaggcaaagccggatagcttctacgatgcgggttataacgaaggtattcaggactgtcgtaaacatctgacggcatcaggcatcaaggtaagataa

SEQ ID NO: 11693 - DNA, 423 bp, Escherichia coli
atgcgtaatattcaacaggttttagagcgctggggtggctgggcagcgagtgaaggtggtagcgtctactttcctcctgttgcagccgggtttaagaatctgctacccgcgacgcagtctggaaggctgaaatgcagtgacaatgacggtcttatcatcaactccgctatgagctgcctgaagaaaaaagatccgtatctgtgcacgctccttgagtggcattacgtccaggccatgcccgtgcgggcgatgggtgagaagctcggcgtatctcacacccacgttctgaagaggcttcaggcggcagagggatttattgacggttgcttagccatgctggatgtggtgctcgaaatggatcagtcggttcagtcaaagcctcaggctatcaggactttgcgtaggagctgctcggcggcataa

SEQ ID NO: 11694 - DNA, 2187 bp, Escherichia coli
atgtccgatagcaaaccatggggagctacgcctgatgagtggtttcatttcgacctggtattggggcggactgctcatcttctcccagttgtatgtaaccccagtgcgaccatatcccctgatagtaaattgaaagcgttgggtaagacgccgagtcgctataaccgggaccgccaggtcacaggtattgctcaatggaccgggcatgttgttactgagcatgattttgcccgctggtcgaatgaaccggattatggcatctgcgtgcgtacaggccatggctggctggcgctggactgcgatagcgaagatgaagacattcaggcagatattcgcaaaacacttgtgcaacttctgggtgagtcgccgccgcgacgctggcgagcaaacagtaataagtgtctgtatctgctggccgttgatggtgatttccgtaagcgtatccatcgcctggcgggggatatgggcattatcgagttgctggcgaacgggcagcagttcgttgcctgtggtacgcacagcagcggcgcgcgtattgaatgggacggtggtttgccggatgaacctccggctattacaggtgagcagcttgaaacgctgtggcagcgcctggctgaacaactccctgtgtcggtaaccaccgaagcgggcaacacgaagatgcgcgaccgttcagcattcacgcccggcgcgacggatgatacagctgaatatcttgatgccaatggctggacgctgctggatggcgcaaacggtgaacgatatatccgctgtccgtttgaagacggccacagtagcggaggcgatccaacaagcacagtttattttcctgcgggaaccgcaggctttgagcaggggcattttaaatgcctgcatgccagttgcgcgcatcgtgatgacggagatttcctgaatgccatcgggatccgcaacgacgatttcgaagatctgaccagcatcgaagtggcggaacctttaccgctgcctgctttcgagcgtgataaatgggggcgtatcgaggcaaccatcagcaatgcagccaaagcagtagtacgctctgattttgtggacatcgatattcgctttgaccagttccgcgacgaaatcatgtttgccccggcaggatccggacaatggcgggcattcaccgatgcggattatgcgcgcctgcgcatcacgatggaaaagcggggatttaaacctgttggccgtgaacttattcgcgatgtggtgttacttgcagccgatgaacaaccattcgattcagcgatcacctggctgaacggactggagtgggatggcgtgccgcgcatcgaatgtttctaccatacgcacttcggtaccgccgacacgccttatacccgtgcggtgtctatgtacatgtggaccgcgttggcggggcgagtactggagccaggcatcaaagcggatatggtgccgatcctcgttggtccgcagggctgcggtaagtcttccggagtggaggcactgagccctgatcctgcgttttttactgaaatctcttttgccgaaaaagacgatgatctcgctcgaaaaatgcgtggtcggctggtggcagagattggtgaactgcgcggacttaataccaaagagctggagtcaatcaaagcgtttgtgacgcgtactcacgaaaactggatcccgaaataccgggagttcgccacccagtttcctcgtcgcctggtgttcgttggtaccactaatgaggacgaattccttgcggacaagactggtaaccgtcgctggctccccgtggaagtgtcgaaagtcgacgtgaaagcgataaaaagagatctccttttactttgggctgaggctcgtgaggtgtttcagcgtctggggggtatccagttccgtgaggctgaacaactggcagcgagtgtccatgaacagtacaccatcaaggatgcttggcttgaaacggtagagaaatggctcgacacgcccgacctgatgactaatgaacttccgcgaaattgcgaatttttacgcgcaagtgatgttttgcgtgatgcgattgggctaaatcctgaccgcatcggaaaacgcgaagaaatgcgaattagtaatgttttgcaaaattgcgggtataagcgtgcccaaaggcgaattggggggaaaaaatgcaaggtttgggaaccgctggaaccacgcggaaccacctag

SEQ ID NO: 11695 - DNA, 201 bp, Escherichia coli
atgtccggactaacaccacaagagatggtcaaaagcttgattgattcagggtatacccaaaaccaaattgccgaaattgcaggcgtgaagcagtcttctattagtcggcttcttaccggggttcattctgaccctcgcttttctacagtacgtgcgatagaaaaactttttcaggaagtgacagctagacaaaaggtgtaa

SEQ ID NO: 11696 - DNA, 675 bp, Escherichia coli
atgattgatactaccgatatcctttctcaaaacatcaagtacctgatggacaaagccaagataagctcgataactgagctggcacgtcggttacagctgaaccaaccaacgctacacaggctggtatcaggagaggtgaaagatccgaaatacgcaacgttaaagcagatcgccgactacttccacgtgtcaccaatagacttggcagaaaggagccttcaagaaatggagaaagaggacgcgacaggtataaaaacgtatatttctcttaggtttaataaagtacctgttttgggaaacactcagctaggcgttggaggactttggagcgacacccaatattcagtaggtagcagtgatggtttcatatactggccgacaaaggatgaagatgcatacgccctgaaatgtgttggtgattcaatgatgcctagaatcaaagagggggagttcgtaatcgtcgaacccaaccacgactacactcctggtgatgaagtacttgtggttacccgggaaggtgaggtcatggttaaaaccttcttgttcgaacgcgatggcctgttccatctaatgtctgtaaatgaagatcatccaccagtcagagtaccacgcgaaaacattgaaaaaatccattacgtggcggggatcgccaaatccgcgctacgtatgtactaa

SEQ ID NO: 11697 - DNA, 525 bp, Escherichia coli
atgtctgaagaaaaaggacttgtacggcgtataactgaggcggccactagtgctggtggtgctttgaaaggtgctgttgatttagcaaaagaagttaatgcgttgcaggtggattacaatgttaaaagtaaaactatcgatctacttgataaactaattgatgcgcgtactggacaattcgcactaacggagcttttgaacgaagctaaacagcgcattgttgaactcgaatcccttctggaaaagaaacaggattgggatagtgagaaaatgaactatgaaatgtaccacccgattaccaatacggtggtctatgtactgaagcctactgacgatcctgagttcaagcctcattatctttgtactacatgctatgagtcgggtatgaagtctatacttcaataccatacttctaatgccgcttataaaattctcaagtgtcataaatgctccgctgaatataaatttccccgaaatatagaagtcagtggcaaaactcctgcaccgttacaacctgccagatga

SEQ ID NO: 11698 - DNA, 150 bp, Escherichia coli
atgaaacctgaatacctccatcgactgacggggcgcgatgttctccgttatcgccgtaaaaacttcgatttgatgaccggtctggccgttgccactgcgctcggtctgatcatcactttcattctccttgtagcgaggaccacagtatga

SEQ ID NO: 11699 - DNA, 903 bp, Escherichia coli
atgagtttagaaaccagtctcgaacttaataatcaacttctggcacaacataatgcgctgcttgaacgtcttatccgcacaatggcatcaggcattgttatgcatcctgacacgatttcacgagtgcaggaatgtcgggatacagcaactgaaactgaaaatatgtcagcggcaatgacactggatgatctggagttcagcgacgttatcgcactggctggtttctacccggtagccacccctatcacagaagacatgctgcaacgtgctgttgcctaccgtgatgctgaaggcgataaacgagtagttcagattgatgctctcgacagcgcattgcagggcgtcaaacgagccagggcgctgcttaaacctgctctcctggacctgtcccgtaacatccttaagttctgggacgacctgccaaccatcggcgagcgacgtgtttttgccgagcagctacttgatgcacctgcggatgggcgtgatgaagttaagccgaaaaaggccagtaacaaagatggagaacgcacggggccgttttacgtcaaaaatgtatccggcacagcagccagtgaactccacaccttacgcaagttgaacgagatgctgaaaaaaggccatatcgagatcaaccgtgttgagtaccttcagctgcaagaagaatttgcacgcagagacgcagcaaattccagccagaatcatgacgccaaagatgaccatacaattgatttcgcggcactacgcaaacaagctgaagggttgatcctccagttagcaaaagggggttaccgggcagaagctattgcaattctggaaaaacagggagccaggaaacttggtgaagtaacggatgaaaatctcgctgaagtaatcaccctggctgaaaaagcactggagggttaa

SEQ ID NO: 11700 - DNA, 1302 bp, Escherichia coli
atgccagacgttcatgcacaactttctccatcatcagcgcatcgatggatgcgctgcccaggaagtctggcgctggaggccacacaaccggataaagaaacaacttttgcaatcgagggcactgcagcgcacgcgcttgctgaaaaagttctacgaaacaggcaaagctacccggaacactacgccggatgcaatgtttctatgtttctcggctcatacccccttcgcgaaaatcctgatgatacatctggcccacaggtggatgatgaaatggtcgaagccgttggccggtatgttgatacggtctggactcttgcacagaataatgaactattggttgaacaacgtgttgatttctcacatataacgggtgtggaagaatctttcggaactgccgacggcataatcattgctggtagcgaattacaaatccacgacctgaaatatggcaaaggcgtccgcattgatgcagaacaaaatgagcaactacaactgtatgctctgggtgcgctcgaacaattcagcatgctgtatgactttgagactgtaagattatttattcaccagccaaggctcaaccacgtttcagaatggtcgttaaccgtacaggaacttcagtctttcggtgaacgggcactggaggccgcaaccagtgcgatccttgttctcaatattgctgaatgcgaaggcattgagacactaccgctggaaaacttcatacctggagaaaaacagtgccgcttctgtaaagcaaaagctatttgcactgcccagaaaatgcagcatttacaaacagcggccagcgattttgaagatctgacaaagcctgtcagcgaaataatcaccaatgccagcgcacgtgtacctctgttaaccattgagcagcttgcagagatctatagccaggccgactttattgaatcctggctaaaggcagtacgagaccgggttcacaatgaactcaatgccggacatccggtaccggggtttaaactggtaacaggaaaacaaggtaaccgggcctggagtgatgaagaggcagctcgcgcacttctgaaggaccagttcaggtacaaaactgaagaagtattcgactttaaacttattagccccacaaaagccgaaaaacttatcaaaaaggccagtccgcgccgttggtcaaaagtcgaggcactgataacacgagctgatggtaaacccaccatcgttcccgagtcagacccacgccccgcactcaatatcaaccctgtaaatgatttcgacgacgtatccgacgatacgctaaccgcagacctcatctga

SEQ ID NO: 11701 - DNA, 549 bp, Escherichia coli
atgaaactgaagctgaacaatgttcgtctggccttcccgtctctgtttgaagctaaaactgtaaacggcgaaggcgatccacgtttctccgcagtatttttaatgtcacccaaacacccacaactggaagaaatccgtaaagctatgaagcaggtagcgaaggaaaaatggggagagaagtgggagcccatttataaccaactggagaaaaaactcaatctgtgcctgcatgatggtgatgaaaaagcagagtatgaaggcttccccggcaatttcttcctgaatgctgctaacaaagcgcgcccagctgttcttgatcgcgatcgttcgccacttattcaggctgatggacgtccctatgcagggtgctatgtaaacgccgttatcgatatctgggcacaggacaataatttcggtaaacgcattaatgcctcactcggcggagtccagttcctgcgagacggcgatgcatttgctggcggcggagtggcaagcgctgacgatttcgacgatatcagcgaaggtgctgatgctgaagcactaatttaa

SEQ ID NO: 11702 - DNA, 639 bp, Escherichia coli
atgtcacagcccgtattaactaatcaccttaaaactcaaatcatcaataacgcacttgagaaagcgggtatccccaaacgtaaatcagcactacgagctgctcgtgttgaatgggccgaacgtgttcggcttgcagctatcgggggcgtagagaaagaagctgaaatattaaaaaatataaaaaaaatagaaacactggtatcaaaattccccgaagcattaaaaaccgccaataacattatcagggaagagtgttacatgtgtctgaatctggcaggttctcgggttaccgtctatttcaacggtaactaccgaggatatgaattagggtcaccagaccatattcacaaaatcgcgccgggggaatttacccttctggcaaatgaccctctagttacagagtgttacgggtttgatacactttatgagcagatacagagcgatgagtcagacattcgacagaatgtcagcgctgcactcagtaaagtgcgcacagttaagcgcctgctggaagagtggcctgaagctaaagaacttctgccagccgatgcaccatctgctccgcttccgccagctatacgacgcgaaactctcaacgaaatgatcggcctcccttctgacgaaggggtagatgcttaa

SEQ ID NO: 11703 - DNA, 270 bp, Escherichia coli
gtgtttagctttggtatcggaatactttcattgataggtattattgctttccccattctttatattttagggagaatagttcgggctggtggcgcatggctcgaacgtgaagaaggtcctaaggatcgtgttcttcccaaaattataatttttgcgcttattgggttctttcttgggtgtttggctcagcctgtatgggacagcatttcggtatgtagagactatggcaatccaatagggaaatgtctttttaaattcaatgaattttaa

SEQ ID NO: 11704 - DNA, 2064 bp, Escherichia coli
atgtccaatatactatggggtgacctagaaacctattgcgaaatccctattacgaacggtacccatgcgtatgccgaaggcgttgaagtgatgctgttcgcatgggctatcaacgacgagcccgtaaacgtgtgggatatcactgccggtggtggtattccacacggcttatacgaagcaatcgcagcccctgaaaccctgctttattttcataactctcacttcgaccgcaccgtcctgcgttatgcaatgccgcgcctggcaccgccagtcgaacgttggcgcgacacaatggtgcaggcgctggcgcacggtctcccggggtctctgggggaactctgcgaagtactaggcgtcccgcaagacaaagcgaaggacaaagaaggtaaagcgctgatccagctgttctgtaagccacgcccgaaaaacagcaaactgcgccgggccaccagcaaaacccacccggaagaatggcggcgctttgttgcttacgccggactggatatcgaggcaatgcgcgaagtctataaacgtctgccgaagtggaattatcaggggacagaactggcgctctggcatcgtgatcagcagatcaacgaccggggcgtctgcatggacattcaactcgcgcgcgctgcgatcgaagcggtagaccaggagcaaaagcgcctggcaaagcgtacacaggaaatgactgatggcgaagtgcaggcagcaacacaacgggacgcgttgattaagcacatcgttgaatcctacggtgtggagctaccagacatgcaacgcagtactctggaacgtcgtattgccgaccccgatttaccatctgccgtgaaagaactgctggctatccgactgcaggccagtactaccagcaccagtaaatacaaggcactgatgaaaggcgtaagccacgacgggcgcttacgcggtacgctacagttctgcggggcgtcacgtaccggtcgttgggccggacggctattccagccccagaaccttccccgcccttcactaaaacaggaacaaatagacgaaggcatcgaagcactgaaagccggatgtgcagacctgctgtttgacaatatcatggaactaaccagttcagcgttacgtggctgcattatcgcgccaacaggcaaaaagctggtggtaagtgacttgtcgaacattgaaggccgtatgctggcatggctggcgggagaagaatggaaactgaatgcattcagagagtacgacgccggaacgggtccggacttatataagctggcgtatgcaaaagctttcgatattgcaccagatgatgttgataaacacatgcgtcagatcggtaaagtcatggaactcggtctgggttatggtggtggtgtgtcggccttcatcacttttgcactggtttacggtctcgatctcgacgagctggcgaacgccgcactaccaaacattccccgcgatgttatccgcgaggcgaaaagctggtacgacgaatcggttaaacgcaagtcaacctacgggctttctgaacgggtatttatcgcctgcgactcacttaaacgtctctggcgccgggcgcatcccgcgacctgtgatttctggtacgaactggagcgcaccgtccgcactgcaatcgccacaccgcaaaaaacattgtattgcggttatcttaaaatccgccgcgatggcgcgtggctgcgcatacagctaccatccggacgcgctgtatgctacccgtctccggttatcgaaaaagggaatatcacctacatgggggttaactcttattcgcgtaaatggcaacgactcaaaacctacggcggaaagctggtggagaacatcacccaagcggccgcccgcgacattctggccggaaacatgccgcttatcgaagatgccggttacagcattgtgctgacggtacacgacgaggtgatcaccgaagcacctgacacagaagatttcaacgataaagcgctttccgcacttctctccactaaccccgaatgggcgcccgatatcccactgaacgctggcggttttgaggcgtaccactaccgtaaggattaa

SEQ ID NO: 11705 - DNA, 216 bp, Escherichia coli
atgtcatttaaataccgggacaatccactttattacagggctgcaagggaagctttgcgacttgaacaatccggcgaatatgaccgggcagcggaggtctgggcaaaagccaaccgcgaatcacatcacgaactgaatcaggaatggagtgaacgcagatctgatttttgcctgatgcagaacatgcgtgaaaagcgtaaggcggtcgaagaatga

SEQ ID NO: 11706 - DNA, 300 bp, Escherichia coli
atgatcgtttacgttgccgggccgatgagcggttacgagcaatttaaccgcccggcctttcattccgcagcaaagaggctaacggacaagggatatgttgtgcttaaccccgcaactttacccaatggtttgacacaggctcagtacatggacatctgcctcgcaatgcttcgctgtgccgatacgatttatatgctcaaagagtgggagtactctgctggcgcacgtgcagaaaacgcgttggcagagaaactggaattgaatgtgctttttgaagagtgggattcagatggcctatga

SEQ ID NO: 11707 - DNA, 294 bp, Escherichia coli
atggcctatgaacgtgaaagccttatcgaaaagcacctcgtcgctgaagtgaaaaaagctggcggagtggcctttaagtttgtatctcccggtcgccgctcggtaccggatcgcattgtcctgctacccggcggtcgcatcgtctttgtcgaatgcaaagcgccaggcaaaccaccacggcctgaccagttacgcgagcacgaacggctgcgtgcgctgggctttaccgtggtggtattagatagcaaaaatctggaggggatattgtgcggggagcctattacaacgaaatag

SEQ ID NO: 11708 - DNA, 852 bp, Escherichia coli
atgtcgcaccagacgacttgcgcggattcacacagtgccatttcttcgccgggatcggcgtctggtcttatgctctgcgtctggccggatggccggataacaaaccggtctggacaggaagttgcccgtgccagcctttcagctcggctggtaaaggcgctgggtttgatgacgagcggcacctatggccagcactattccacctcatcagcgagcgacgccctaagctggtatttggcgaacaggttgcgggagtcaatgcctggttcgatcttgtacaaactgacgtggaagcagtggactacgcctttgggcttgtcccgtttccggctgcgggcgtcggtgccccgcatatccgagatagagcgtattgggtggccgacgccagcggcgagcgatcacagcggtggcgaaagcgcctcaatagcattgaggaagatgtctggagatcgtcgaccgtccggcaacacgctacacagctccctgcggaattttgctcacctggcggggtggtacaccccaacctgcaacacaaacccacagccggagacaaaacgcggtctagaaaccttagcgggactatccagattagcgggatggccgacagtgacgacgatcgacaacaaccaagttcgtgccgagggcgcagcggccaatcataccgaacggggaacgaccctcggcggcgctgcgagaatctgcggcccaatacgattaacggcttctgggatggtgctgactggctcctctgccgggatggtcgctggcggccagttgaatccggcacatgcccgttggctaatgggattacctccagagtgggacgactgcgcgcctacggcaacgcgatag

SEQ ID NO: 11709 - DNA, 321 bp, Escherichia coli
atggctactttgttaacatcagggttaactgttccggagtattacaaaaatggtggagtgctcgactttgaactggatgctttagaggtgggcgggaattgcactgattttgaaaattacccttcactggtaaacattctttctaaaggtttcgagcttcctgctacatctatggttagcgatccaaaatttttagccccaatactagtttatggggacttctggacaaaacttcatgcttatacttatgccatgggcggctccgttgtatataagcaattaccttctggacggtatcatgccagatgtgagtggcattaa

SEQ ID NO: 11710 - DNA, 1395 bp, Escherichia coli
atgcccaaagttttcacgcctcgcccctaccaagatctaattatcaaccacgaaatcgacattcaccgctgcaacatctgggcagggatggggatgggtaaaaccgtagcgacactcaccacgctggaagatcttttcatggcgggctcagagacacagcccgcgctggtcctcgcgccgctacgcgttgcagcaagcacatggccggatgaagcgctgaaatgggggcatctgcgcaatatcgaggtgcagccgattgttggtaacgccaaagcgcgctctgcagcgctggcgaacagcaacgcgagcgtgttcaccatcaactacgataaccttgtctggctggttgaggaattgggagaacgatggccgttcggtactgtcattccagatgaaagcacccggctaaaatccttccggctgcgaggtggtggtaagcgcgctgcggcgctgggcaaagtggcgcacaagtatgtccggcgctggataaatctcaccggtacgccagcaccgaacggcctggtagatttgtggggacaatcatggtttgtggaccaggggcaacgtctcgggcgcacttacggcgcgtttacctcacgctggtttaattcgatacagtttccggggcagagctggaccaaactggagccttttgctcactcacagggtgaaatacagcgagcgttagccgatgtgaccctctcgctggatgcggccgactggttcgatatcaaagaccccatccataacgtaatccgcgtggatatgccgccgaaggcccgtcagcagtatcgtgaaatggaaaaggaaatgttcctcgagctgaatggcgaaggcatcgaagcaccgaacgccgcggcaaagacactgaagtgtctgcaaatcgccagtggcgcagtatacacagacgacaccggaagttggtcagaactgcatgacaccaaactgcaggcgctggacagcatactgaccgaagcagctggcgcacctgtgctggttgcttatcactggaaacacgatcttgaacgcttgcttaaagcattccctcgcggtcgtcacctcgaccaggatccacagacactgcgcgactggaattccggaaagattcctgttctctttgcacacccagccagcgcgggccacggcctgaacatgcaggacggcggaaatatactggtatttttctcacactggtgggacctggagcagtatcagcaaattattgaacgtatcggccctaccagacagatacaggccggacacaatcgtccggtatttattcaccacattattgctgccgacactatggacgaaatggtgatggagcggcgcaactcaaaacgaacagtgcaggacatcctgctcgatgccatgaaaaagagaggtatagcatga

SEQ ID NO: 11711 - DNA, 201 bp, Escherichia coli
atgagcgagaaacccgacgatttactcaccccggatgaagtatgccaaaagttaggtattacacagaaaacgctatgtgagtggaatattaagcatcgtcatagggctatcctggcaccaattcgtttcagtgcaaaagtagttcgttatgagcgccgaaatgtcgacgcttttattcaaaagtgtcgcagccggtattaa

SEQ ID NO: 11712 - DNA, 1398 bp, Escherichia coli
atgccgcgcactgtaacacataatccggatagccccaataatgacgatgttttagccgcttctgaaaaatgggacgcctgtaaacccccctataccagcgcacacatgaaaatctgtgttgctgccgccaaaatcatcctcgctgcttccggcgtggctcgccgttccaaatatgaaaaagagaactatctccgtatcgatttcagcaaagccggtaaggttacattttacgccgagtttccaaaaaagatgggcctcaaaggtaaaaagctcggcgagtggccggagctcgctatccagctggcgcgcgaaaaagcactaggtatggctgacggtggactgcgggcagagtccgtacatgcagcgctggaaatgtaccgggatgacctcaaagccaaagtagcccgtcagaagctgagcccggacagtttcacaacctacggggtgcgtatcgaccggattaaatcaacgttcggcgagcgcgaggtgttcagcgacgtaacatacagtcggctggtggaagtgctggacgagtggatcgccactcgctcgaacaataacgccctggagttgtttgccgagctccgtcggttctggaagttctgcgcacctactctttgcaacggccgcaatgttgccgccagtctgccagatgattatgtttcctcccgcgtacagaagcctacccccacacggctttttaccgatattgaatcaatcgcccgactctggctcaatgttgctgcctgcacctctgtacaccagaagaatgctgttcgcttcatgatcatcactggtgttcgtccgattaatgtccataacctgcgctgggactacgttcacgaggaggctggtgaaattgtttatccggaaggggttatcggcatgcgaggggctatgaaaacacaaaaggctttccgcctgccgataacgcctgagatccggcggattatcgacgagcagaaagcctggcgtgattcagttcctgagtgcaacagggattatgtatttttgcagccacgtaatccaatgcagccattttcaaaacgatcactggataagctagtgaaaacatacagcccggatggggctgtaaaaggaataaaacatgatgggactgttaaagggaaagacggtgcatttaatacgatgtgccgtaaattccttaagagcaatgttattgccttgatgaaggaaagaggctattcccgatcagaccgaagggaaatcagcctcctttgccttcaccactccagcaagtcagatgacccgatggcagaacattacgacttttctgatgagatattacaggaagagattgcgttaaagcgcgaagctttcgaggcgcacgagcggagcatacttgcgcaggtggcattgctacggcggcgaggttaa

SEQ ID NO: 11713 - DNA, 423 bp, Escherichia coli
atgaactcactacgttattttgattttggcactgcccgccccgttttattattaattgcccgtatcgccgtggtcttaattttcattatttttggttttcccaaaatgatgggctttgacggtacggtccaatatatggcctcgctgggcgcgccaatgccgatgctggcagcgattattgcggtagttatggaagtgcccgccgcgatattaatcatacttggctttttcacccgtccgctggcggtgctgtttattttctacacgctgggaactgcggtgattggtcatcattactgggatatgactggcgatgcggttgggccaaatatgattaatttctggaagaatatcagcattgctggcgcattcctgctgctggcaattaccgggccgggggcaatttctctcgatcggcgttag

SEQ ID NO: 11714 - DNA, 1023 bp, Escherichia coli
atgtctatcaatgcacttaaggcagcggctaccggtaaccaagttgcacatcataatgagaaaccaacaactctggccggacttctggcagacccaaaaattaaagctcagatggctttggtacttccaaagcacatgacagcagaccgtctggcgcgcatagcaaccacagagatccgaaaggttccaaaacttgcatcatgcgaccaagccagcttcctgggggcaattatgcaatgtgcccaattgggtcttgaaccaggcggagctcttggacacgcttacctgataccgttcgacaaacgccagaaagtaaatggaagatgggaaaccgtatctacagaagcacagctgattatcggctatcgcggaatgattgaccttgcccgccgctcagggcagatcctgagcatctcggctcgtaccgtacatacaaacgacaaattcagctactcatacggcctggaagaaacgctcgagcatttaccttgcgaaacaggtgaccgcggagaactaacgcacgtttacgccgttgcccgactgaaagatggcggtgtccaatttgaagttatgagccgggcagacgttgagaaagttcgtgcactgagcaaagccggtagcagtggcccatgggttgatcacttcgatgagatggctaaaaaaacagtaattcgccgactgttcaaatatcttcctgtttctattgaaatgcagaaggctgttgttatggatgagcgcgctgaagctggacttagccaagataacgcagctgttatcactggtgaatattccgtagttgacgatgagcgtcaacacctatcgccaatttcagattcagaacgagaagaagctcgagaatatatcatcgcgatacttaatagcctggatccatctgctgaagatgcaaaaacgatgttcaagcgcgctgaaaatgaaattaacaccatggctgacaagctcggtgatgaatatcaccaaaaattcatgatgacgcttaacgatatgcgtccagaattcgagtaa

SEQ ID NO: 11715 - DNA, 900 bp, Escherichia coli
atgatgcggaacgctggaatcatggatagaagaaaatacatcggaggaagcgatgttgcagggattcttggaattagcccatggcgcaccccgcttgaggtttatctggataaggtccagccacgtgtcaaaccagtagacccaagcaagcagaaagttttcacgcgtggccagcgtatggagccatacgtaatagacctgctttctgaggaaacagggatggaaatcgttcatcgcggaaaccgctatatccaccgtgattacgattttattgcagctgagatcgatgcagaagcagcgtcaggagagaacattgagatcaaaacagttagcccgttcaaagccaaagaatggggagaaatccagacagatgcaattcctgtgcattacacggcccaggccatgcatgggttgatggttacaaacaaacaggtatgcgttttcggtgtgcttatcggtggcgacgacttccgaatctatcgggttgagcgtgatgaagaaactatccaggcgatcttagaaaaagaaatcgctttctgggaccgagtgaaaaatcttaacccgccggaagctaccagcgtaagcgatgtatcgctgatgtttgagaaagatgccgggacaagtatcgaggctgacggaaaggcactcgcactattcaacgatctacgagacatgaagtcacgcagaaaatcactggaagaagaaatagctatatcagaagagaagctgaagatgtacatgcaagagcattcagtcctgaccctggacggaaagccgctctgcacatggaaatctcagatcagcaacagattcgaccagaagctattccagtcagtacaccctgagttattcgaaaaattcaaaacaacaacgacacaacgcgtcttcagaatgaagtaa

SEQ ID NO: 11716 - DNA, 471 bp, Escherichia coli
  misc_feature (384)..(393): n is a, c, g, or t
atgaaaagtatccaggacgtccgcaggcaaaatctcaacgacttgatcgaccgtgaattcaatggtgttcagacgcggatggcagaaaaacttggaactcaggcaaatctggtaaaccgctgggctcttggcaagaaggttatcggcgaccaggttgcgcgaaaaattgaagctgccgccaataaaccacgtaactggcttgatatcgatcgctcgctttctcaggagggttttcagcctgtcggaccaagcgacattggtcagctggcggctcacaacctggaacgctggatgagcgaaagccgcgacctttcaacacaaggaaaacttcaccgcgcatccggcgtcgcccaggtgacaatcagccgcctgttaaacaatgannnnnnnnnnacaatgaagtcagcgtttccatttccaccctggagaatgttgcatccgcattcgggcgtcacggctatgaattactga

SEQ ID NO: 11717 - DNA, 786 bp, Escherichia coli
gtgagcaagattgattatcaggcgttgcgtaaggcagcacaaaactatcaatcgactctggcgtggtatcaggaaaagccagacagtccaaacgctgaacaggattgtgatgcagctttagcggcgtttaagcgagaaatccgtcatcgggaagtggacattatcgccgggctgttggatgagctggacgaaaaacagcaatacatcaaactccgcgaccaggagaacgaggatattgcgctaacggtagggaagctgagagttgagcttgaggagacaaaatcaaaactcaacgagcagcgtgtgtattacgagggagtaatcgcggatggaagtaagcgcatagcagagttgcagacaaaatctgcaccagattcgtttggcatcatcggtgaaaatattcgaacacaggacaatcatataacgtcagaccctatgttttgtgtgtatcaaaagcgcgaaatcgttgttgatgctgattatgactatgaccggattgtctgggttgatgaagatggcaatgaagccaataaactccaaagtcgtcgtctcgaactacttcatgaaaactttcgggagccaccagaaaaatggcggcgcgttgctgtgaaagatattgatgaattcgttacctgctgttttaccgaacagggttgtaaagactacctggcagccaatggtcacaatcttcgcttgccatttatatatgtaaaaagcggtttcaggaacgctgaatatatcggcataagaaactggcttgctggcattcgcatcaaaggagagtga

SEQ ID NO: 11718 - DNA, 1284 bp, Escherichia coli
gtgtcgaataacgctttacaaacaattattaacgcccggttacccggcaaagaggggctgtggcagattcatcttcacgacggaaaaatcagcgccattgatacgcaatctggtgtgatgcccgtaactgaaaacagcctggatgccgaacaaggtttagttttaccgccgtttgtggagccgcatattcacctggacaccacgcaaaccgccggacaaccgaactggaatcagtccggcacgctgtttgaaggcattgaacgctgggccgagcgcaaagcgttattaacccatgacgatgtgaaacaacgcgcctggcaaacgctgaaatggcagattgccaacggcattcagcatgtgcgtacccatgtcgatgtctccgacgcaacgctgactgcgttgaaagcgatgctggaagtgaaacaggaagttgcgccgtggattgatctgcaaatcgtcgccttcccgcaggaagggattttgtcgtatcccaacggtgaagcgttgctggaagaggcgttacgcttaggggcagacgttgttggggcgattccgcattttgaatttacccgtgaatatggcgtggagtcgctgcataaaaccttcgccctggcgcaaaaatacgaccgtctcatcgatgttcactgtgacgagattgatgatgagcaatcacgctttgtcgaaaccgttgctgccctggcgcaccgtgaaggcatgggcgcgcgagtcaccgccagccatactacggcaatgcactcctataacggggcgtatacttcgcgcctgtttcgtttgctgaaaatgtccggtattaactttgtcgccaacccgttggtcaatattcatctgcaaggacgtttcgatacgtatccaaaacgtcgcggcatcacgcgcgttaaagagatgctggagtccggcattaacgtctgctttggtcacgatgatgtcttcgatccgtggtatccgctgggaacggcgaatatgctgcaagtgctgcatatggggctgcatgtttgccagctgatgggctacgggcagattaacgacggcctgaatttaatcacccaccacagcgccaggacgttgaatttgcaggattacggcattgccgccggaaacagcgccaacctgattatcctgccggctgaaaatgggtttgatgcgctgcgccgtcaggttccggtacgttattcggtacgtggcggcaaggtgattgccagcacacaaccggcacaaaccaccgtatatctggagcagccagaagccatcgattacaaacggtaa

SEQ ID NO: 11719 - DNA, 672 bp, Escherichia coli
atgcaatcggcgaggcaaccccgggtgcagctaatgcggatgcgaccttcaaggttcagtatcaataacctacccaggttcagggacgtcattacgggcagggatgcccacccttgtgcgatcaaaataacgatgaaaaggaagagattatttctgttagcgtcgttgctgccaatgtttgctctggccggaaataaatggaataccacgctgcccggcggaaatatgcaatttcagggcgtcattattgcggaagcttgccggattgaagccggtgataaacaaatgacggtcaatatggggcaaatcagcagtaaccggtttcatgcggtaggggaagatagctcaccggtgccttttgttattcatttacgggaatgtagcacggtggtgagtgaacgtgtgggtgtggcgtttcacggtgtcgcggatggtaaaaatccggatgtgctttccgtgggagaggggccagggatagccaccaatattggcgtagcgttgtttgatgatgaaggaaacctcgtaccgattaaccgtcctccagcaaactggaaacggctttactcaggctctacgtcgctacatttcatcgccaaatatcgtgctaccgggcgtcgggttactggcggcatcgccaatgcccaggcctggttctctttaacctatcagtaa

SEQ ID NO: 11720 - DNA, 399 bp, Escherichia coli
  misc_feature (361)..(370): n is a, c, g, or t
atgtcatatctgaatttaagactttaccagcgaaacacacaatgcttgcatattcgtaagcatcgtttggctggtttttttgtccgactctttgttgcctgtgcttttgccgcacaggcacctttgtcatctgccgaactctattttaacccgcgttttttagcggatgatccccaggctgtggctgatttatcgcgttttgaaaatgggcaagaattaccgccagggacgtatcgtgttgatatctatttgaataatggttatatggcaacgcgtgatgtcacatttaatacgggcgacagcgaacaagggattgttccctgcctgacacgcgcgcaacttgccagtatggggctgaatnnnnnnnnnngtctccggtatgaatctgctggcggatga

SEQ ID NO: 11721 - DNA, 921 bp, Escherichia coli
atgacaaactttacgaccagcacgccgcatgacgcattatttaaatcctttctcacacactctgacaccgcgcgggattttatggagatccacttacccaaagatttacgtgaactgtgcgatctcgatagcttaaaactggaatccgccagctttgtcgatgaaaaattgcgggcgctacattccgatattctgtggtcggtaaagacccgtgaaggcgatggctatatttatgtagtgattgaacatcagagccgtgaggatattcatatggcctttcgtctgatgcgatattccatggcggtgatgcagcgccatatcgaacatgataaacgccggcagctaccactggtcatcccgatgctgttttatcacggtagccgtagcccttatccctggtctttgtgctggctggacgaatttgccgacccaactaccgcacggaagctttataccgccgcgttcccgctggtggatatcactgtcgtgccagacgacgagattgtgcagcatcgcagagtcgccctgttggagttgatccaaaagcatattcgccagcgcgatctgatggggcttattgaccaactggtagtattactggttacagagtgtgctaatgacagccagataactgcgctgttaaattacattttactgactggtgatgaagcgcgttttaatgagtttatcagtgaaattacccgtcgactgccacaacaaagggagcgaataatgacgattgcagagcgaattcataatgatggatatataaaaggggaacagcgcattcttcgattgtttttgcagaatggggtagatcctgaatggatacaaaagattaccggactttcggcagagcaaatacaggcattagagcagcccttgcctgagcgtgagccttattcatggctcaagagctaa

SEQ ID NO: 11722 - DNA, 2433 bp, Escherichia coli
atggcggaactgaacctaagtaacctgacggaagcagacatcattaccaaatgcgttatgccagccattctcaatgcaggctgggacaacacaacgcaaatcagacaggaggtcaaactccgggacggtaaagtcatcgtacgtggtaaagttgcggcacgcagaacggtaaaatctgctgacatcgtgctgtatcacaaaccaggcattcccttagccgtgattgaagcaaaagccaacaaacatgaaattggcaaagggatgcaacagggcattgaatatgcgcgcctgctggacgttccttttgtttttgccaccaacggggatggctttatcttccgcgatgccaccgcagccgaaggtgaatgccttgaaaagcaaataacgctggatgacttcccctcccccgctgaactctggcaaaaattctgcctctggaaaggatacacacaagctcagcttccggtgattactcaggactattacgacgatggcagcggtaaatcgccacgttattaccagcttcaggcaatcaacaaaaccattgaagccgtctccaacgggcaaaaccgcgttctgctggtcatggcgaccggaacagggaaaacctacaccgcattccagatcatctggcgcctgtggaaatcaaaaaataaaaaacgcattttgttccttgccgatcgcaacattctggtcgaccaaaccaaaaataatgatttccagccatttggtacggcaatgaccaaagtcagcggacgcaccattgatcccgcttatgaaattcacctcgcgctctatcaggctataactggcccggaggaagaccaaaaagcgtttaaacaagtcgcaccagatttcttcgatctgatcgtgatcgacgaatgccatcgcggcagcgcatccgaagacagcgcctggcgagagatccttgattatttcagttccgccacccaaattggcttaaccgccacgccaaaagagacgcatgaagtctccagcacggattacttcggcgatccggtttacgtctactcactaaaagaagggatcgaagacggcttcctcgccccttataaagttgtccgtgttgatattgatgttgatctgcaaggctggcgcccaaccaaagggcaaactgacttaaacggcgaagtgatcgacgatcgtatctataaccagaaagatttcgatcgcacgatggtaatcgacgaacgcacagaactggttgccagaaccattaccgactacctcaagcgcaccaacccgatggataaaaccatcgtcttctgtaacgacatcgatcatgcagaacgtatgcgccgcgccctggtgaatctcaacccggagcaggtgaaaaagaacgacaaatacgtcatgaaaatcaccggcgatgatgaaattggcaaagctcagttggataacttcatcaacccgaaaaaagcgtacccggttatcgcgaccacttcagaactgatgaccactggtgtggatgctaaaacctgcaaactggtagtactggaccagaacatccagtcgatgaccaaattcaagcaaattatcggtcgtggtacacgcatcgacgaacgttacggcaaactctggtttaccatcctcgactttaaaaaagccaccgaactgtttgccgatgagcgtttcgatggcattcccgaaaaagtcatggataccacaccagaggatatcgccgatccagaatctgattttgaagagaaactcgaagaaatcagcgaacatgacgacgaacaggtaacaggcgttgatgaaccgcctgcgccaccataccaggttaccgataccgatgatgttggcccacttccggaagaagacgagaagaaaatccgcaagtttcacgtcaatggcgtggcggtgggtgttattgcgcagcgtgttcagtattacgatgccgacggtaaactggttaccgaatcttttaaagattacacccgcaaaacactgctcaaagaatatgcctcgctggatgactttacccgcaagtggcaagacgccgatcgcaaagaagcgatcattcacgagctggaacaacaggggatcatctgggaagtactggcagaagaagtcggtaaagatctcgacccgttcgacatgctttgccacgtagtgtatggtcagccgccgttaacccgcaaagagcgcgccgagaacgtgcgcaagcggaactacttcacaaaatactctgaagcagcgcaagccgtgctcgataatctgctggataaatacgccgatgcgggcgtacaggagatcgaaagtattcaggtgctgaaacttaaaccattcgacagcatgggcaccctaccggagattattaaaaccggatttggcgaccgtaacgggtataatcaggcgctcagcgagctggaaaacgaaatctaccaattaccgccccgctctgcttaa

SEQ ID NO: 11723 - DNA, 204 bp, Escherichia coli
atgaatactgctgttgccctcactctgactgtttttcttaatactggcgaacctgttgatgtggttactggtatatatggttcaatgaaagaatgtatggctgccgcagcagaacagaaaattcctggtaactgttatccggtcgagaaagttattcgcatggataataacgaaatcccggcaggattaaaaacagcgccgtaa

SEQ ID NO: 11724 - DNA, 888 bp, Escherichia coli
atggcccgtcttgcagactacagcaatgacgagggcgtgtcatggcctgccattgaaactatccggcgtcagatcggtgcaagaagtgaatccacagtgaaatcggctattgcagaactggcgaaagagggctggctgacgaaggaagagcgtaaggtcggtgggcgtaatgtaagcaatatctatcggcttaatgtggaaaaactcgaagcagctgcggcggcggcgcgtgagtcatataaaccgaaaagaaaaattagcccggcaaaaaatgacccgttaacagttgacccgtcaaatattgacccctcaacggttgacccgtcaaattttgatggatcaactgttgataaaaaactgccgattaggggggcgatgattgaccccgatccgtcagtattaaaacctgatccgtcagataaaagatcttcttgtccggacgcttcgcaaccggacccgcagacggctgaacaggattttttaacccgacaccctgacgcggttgtgttcagtgcgaaaaaacgccagtggggaagtcaggaagatttggtgtgcgcacagtggatctggggacgaatcgtgagtctttacgagcaggcggccagctatgatggcgagatcactagaccgaaagaacccaactggacagcatgggccaatgacgttcgcacaatgcggatgctggatggcagaactcacagacaaatttgtgaaatgtttgggcgtctccagcgggattcgttctgggtaaaaaacatcatgagtccggcaaaactccgggaaaaatgggatgaactggttatccgcctggggcgttcgcctgcgcagcgttgcgtgaatcacatttctgaaccggacactgaaataccgccgggattcagggggtga

SEQ ID NO: 11725 - DNA, 747 bp, Escherichia coli; identical to SEQ ID NO: 7054

SEQ ID NO: 11726 - DNA, 366 bp, Escherichia coli; identical to SEQ ID NO: 5913

SEQ ID NO: 11727 - DNA, 216 bp, Escherichia coli
atgaaatccatggacaaaatttcaacgggcattgcctacggcacctccgcaggcagtgctggctactggtttttacagtggcttgatcaggtcagtccgtcacagtgggctgcgattggtgtactggggagtctggttctgggcttcctgacttatctgacaaatctgtacttcaaaatcagagaagacaagcgtaaggctgcacggggagagtaa

SEQ ID NO: 11728 - DNA, 273 bp, Escherichia coli
gtgaatggcaactatccggtaactccggatggttgggttatggtgccgaagagactaacagccgagaacggcgctaagggggtgctatccggtgaattttcagaaactacgtttataagctgccaggaatgctttggcgatgatgattgcgatacctgtgacgggagcggacgtattgaaattaaagtgccagtcacgtggtcgaccataaaatctatctgggataaaggtatcgagtattttgcagcaaaaccatcacaagaggtgaagtga

SEQ ID NO: 11729 - DNA, 573 bp, Escherichia coli
atgaacaacttaatgatcgaccttgagacgatggggaaaaataaggatgcaccgatcgtttccattggcgcggtgttcttcactccagaaaccggagacatcggacaagaattctatacggttgttagcctggaaagtgctatggggcaaggagctacacctgacggcgacaccatcctgtggtggttgaaacaaagccctgaagcacgagctgcaatctgtattgatgatactttgtcgatcagcgatgctctctcagaactaaaccatttcattaaccggcacgcagacaatacgaaatatttaaaagtctggggtaacggggccaccttcgacaacgtaattttacgtggagcttatgagcgagcaggacaaatctgcccatgggcgtactggaatgatcacgatgtacgcacgatcgttacgcttgggcgttccatcggattcgaccccaaaatggacatacctttcgatggagaacggcacaacgccctggctgatgctcgtcatcaggcaaaatatgtttccgctatctggcagaaattaattcctgccaccagcacagaattatga

SEQ ID NO: 11730 - DNA, 435 bp, Escherichia coli
atgcatctagaagtctctattaatccagaaactagagctgaattttttgatgaagtttttctcaaattcccggagctagagtcttctatcattgatgatttcaagagatacaaagcaactggtgagcttccgcattatttcggtagggacgttgcgtatactcagccttatggtgcttttcgggctgggttgatgcatatccatctttgtctaccgccaaacaagtttcccgagaaacttccacaaccagatagggtctgcaagaaaggtgatcctgataatgatgcttgtcttgtgtatgtccaaggtgagctttatgagaataaatattcactcattgctattatgtatcccgatgcacatgaaaaagcaagaaaacatgatgtgatgagctatctggcgcgaattgcccagaattataaagatgaaaactaa

SEQ ID NO: 11731 - DNA, 540 bp, Escherichia coli
atgaatccgtttaacgccattacttttgctgcattgtgcgggcctctggcttgtcctgctgctatggcgcaggagttcatcatccagccagcccctgtgattgctaaaccttttgagtactctccttctgttgaggaattctcacgcaaaatggaagagggtaaggagatcttgcaaaagttaacaattgcagcagatgactactatatctgtttgattgatcttaatagccaagatgctcgcgagtttgtttccaaaaacgggacagatacgacagaggcatgcgaaatgttcctgcgtgcttttgaagaagaagtgaagcgtacaattgaatctcctctgcctgaatttatcaggtcagaactgaaggtttactggcgtcatattgccaaagctcgctcatctgtcactcgccttaacaattacataaagagcatatttaaagaaactgttacttttagcgggcgcgcggatcttgctggaattgcagcactagctagtcacacatcaaataagctaaaatcgatgcaatttcactaa

SEQ ID NO: 11732 - DNA, 585 bp, Escherichia coli
atgacaataagcaccaaacatctgatccagcagcgtggtatcaaacagttgctcgaccgcgtcccagttgaaatgcaactccccagccaactcgatcacctggtgatcgagccacacctgcggtgtttgggtaatattggcgtccggacacagagtaaaacgggttgtgtcccgagggtcttgcgcagtcgtctccccgtcgatatccaacatactagtgaataccaccggcatcggcgcatggaaacgaccgctatggatcagcgcctcgctggcgcggatcccactgaaacgacgatgttcgagatcttcccacagttgcacctgaatacgctgagcgttgtgggcataagagtgctggctgtcgtaacaaacattcagcaagctgacagcggtaaaatcaccaataactgcctctgcgttggggtaaccctgcgggcggttgaacaacgtcagattgagcgtaaacgtcgggctaaggctccaacgtgccagcacttggctaaagactgtcaacaacaatgccgtcttggtgatacgtgtgcgttgggccagcgcgctcagcactccccagttgtgggctga

SEQ ID NO: 11733 - DNA, 333 bp, Escherichia coli
atgggaaaggctgcgagggagatccagcatattcaccaagttttcaaacggcagttgctggcgcccctgcgtctctttcacgctggccttcacacgctggagcgcctcgcgccctacctcaaccccattaaaatcggtgtagataaccgcagtgctggcataataaccaatgctactctgcaattccgggcgaatgcgccccgatactggcatgcctatcaccaatcgctgttgctgagcgtaacgcatcagcaccagttggaaggcagtcagcatcagcacgaacggcgttgtttcctgcgtgcgggctacgtgtttcaacgcgaggcttaa

SEQ ID NO: 11734 - DNA, 2145 bp, Escherichia coli
atgagttttaacgcaaaggatatgacccagggcggtcagattgcgtccatgcgtatccgcatgttcagccagatcgccaatatcatgctttactgcctgtttatttttttctggatactcgttggtctgattttatgggtaaaaataagctggcagacgtttgtgaacggctgtatttactggtggtgtaccacgctggaaggcatgcgggatttaatcaagtcccagccagtatatgagatccagtattacggcaaaaccttccggatgaacgctgcccaggtactgcatgataaatatatgatctggtgcggagagcagctatggtccgcattcgttctggccacagttgtggcactggttatttgcctgatcaccttctttgttgtctcctggattctggggcgtcagggtaaacaacagagcgaaaatgaagtcacaggtggtcgtcagctgacagacaatccgaaagacgttgcccggatgctgaaaaaagacggcaaggactccgatatccggattggcgacctgccgattatccgggattccgaaatccagaacttctgtctgcacggcacggtcggggccggtaagtcggaggttattcgtcgtctggccaactatgcccgtcagcgcggtgatatggtggtgatttatgaccgttcaggggaatttgttaaaagttactatgatccctccatcgataaaatcctgaatccgctggatgcccgctgtgccgcatgggatttgtggaaggagtgcctgacacagccggattttgataataccgcaaatactctgatccctatgggtacaaaagaggacccgttctggcagggttcaggacgtaccatttttgcggaagcggcgtacctgatgcgtaatgaccccaaccgcagctacagcaaactggtggacacactgctttccatcaaaattgaaaaactgcgtaccttcctgcgtaattcaccggcggccaacctggtggaagagaaaattgagaaaacggcgatttccatccgtgctgtgctgaccaactacgtgaaagccatccgttacctgcaggggattgagcataacggtgatcccttcaccatccgtgactggatgcgtggtgtccgggaagatcagaaaaacggctggctgtttatttcgtcgaacgccgacacccatgcctccctgaagcctgtgatctccatgtggctgtccattgccattcgtggtctgctggcaatgggagaaaaccgtaaccgtcgtgtgtggtttttctgtgatgagttacccacgttacacaaactgccggatctggtggagatcctgccggaagcccgtaagttcggtggctgttatgtgtttggtatccagtcctatgcccagctggaagatatctacggtgagaaagcggcggccacgctgtttgacgtcatgaacacccgtgcttttttccgttccccgagccataagattgcagagttcgctgccggtgagattggtgagaaagagcacctgaaagccagcgagcagtattcctacggtgctgacccggtacgtgacggggtatcgaccggtaaggatatggagcgtcagacgctggtcagttattccgacattcagtctctgccggatctgacctgctatgtcactctgcccggaccgtatccggcagtcaaactctctctgaaatatcaggcacgaccgaaggtcgctccggagtttattccgcgtgacatcaacccggaaatggagaaccgtctgagtgccgtacttgccgcaagggaagcagaaggtcgtcagatggccagcctctttgaaccggaggttgcctccggagaagatgtgactcaggctgaacagccacaacagcctgtgtcttctgtcatcaatgataagaagtcagatgcaggtgtgagtgttccggcaggggggatcgagcaggagctgaaaatgaaaccggaagaagagatggaacagcaactgccacccgggatcagtgaatccggtgaagtggtggatatggccgcttatgaggcatggcaacaggaaaatcatccggacatccagcagcatatgcagcgtcgtgaagaggtgaacattaatgtgcaccgggagcgcggggaggatgttgagccgggagatgatttctga

SEQ ID NO: 11735 - DNA, 1440 bp, Escherichia coli
atgggtaactatcatatcggggatggtgaatgtagatttagagtcgtgtgttcttcaccagatgtatgtgaagtaggaggttacaaggttccttttgacagttaccagactttagatagtgaaagacagtacagttcaacggtatgggcgcgtggatgcagagctttaaatgttggttcagtgattgctggaactcaaagtaatgccggtaaaggtgtcatatccggtacatctcaaggaacgggtgactgtgttattttaacgggaagtccgactgtaacaatagaagggaaacctgttgcttatcatggttcagttgttgggattaataaccacaactgccttggtaaattgtataccaaaataaaatcaccaatgatttctgtcattgatagaacttttaattatgaaaggactgctgaagtaatacacgatttactgcttctgaaggatctcctctctgttggtaatatttttgacggagatatttcacctgaggttaaaaatgatttatttcaaataaaagatcctgaccaatcatggggggagtttttttcaataaagaatatcagagaatctctcaggaatggtattgaaggagataaatctcagatcagagaatggtttggagagaacacacttactcaaatggggaatggagcaatcaccactttacatggtgtggcggatttagccttagttacattcgatgctctgttagatacggcaacggcaacggttgcttgcccgataggcgaagatgggttatgtgaacaggcaaatataaatttaaatgaaaaagaacaggctttatttaatattagtaattcattgataaatgggcaagcatgggatgcacttaaaaaaatgataatggatacaaataatggtgatcagattgctctggagcattttgccagctttttatggggctttatgatacccgcaaaaataccagaagaaaatatctctgggaaagtatttgtagagccagtagttttagaaggtggtgctggtggcaattggacagtatttgatgaggttttagattcaaatgtaataaagcaattgactttaacaggctgtggagcggcctgtggggaaatgttgcttagggataggtatatttttgtcacgcaaaatgtaattggaacagaattaacatctatgacgtcgctggcaaacaagcttaataaatttgatgtcggctgggaagggaatgcagtgaacgaatctagtttatatgccctcagtaatactggttcatggggagcaatgatgtgggattctggaagtaaagtagggcattgggtacttgttaagggtgttgatgatgctgggaatgtgataatatatgatccatatcaagggagtcgatatctgatgactgaacaggaatttaaggaggtatggaatgggcatagtgtttacaaaccataa

SEQ ID NO: 11736 - DNA, 1638 bp, Escherichia coli
atggtaactcggacaatgcaacaaaagtatcagtatgatcgtgttttatccggcgaactccacccattccctggcatatacgaggcggtttccgaacaaatccttttgctcatttttaaagcacgtcaactatatcaggatccagaatatcgcccctggtttgaagaacagcacagagtactctctgcattacgtgccaatacagagctcctgagaatctttagagaacaaagaagcgctgaagaaccaaagcttactattgaagagtctacctccccccaacccactccttctgctcttacagatgcgcttaatgtgatgtgccatttatacaatggttttgatgaaggaaatatcagtctgaaaacctggggggcgatgcaagaggtacagacaacatcaacctttatcagcccaggaccgagaacctggaaaacacctgaactggcaaagtttgtaggagatgatttatttaatattctgactgaatgtaaggcctggagttcaccaattccagcagaaacccgacaggggtattgccatcaggatctgtctgttgcacactcctgcacctcagagttactggcacacatgaatcaatatcatgaaattgatgaatcagcaatacttgccagagttattggtataacagttaacggattctacaagaaaaataatacagactttccagaatggctatccccctttaaagaggaacataaaatattcagagattgtccggagcaaaataccggggatgtaatcagacggaaagaacaactgttgaaaacaggacgtacagaattcgtgaataatttgtgtcgggtcgccaactggtatgaaattgagtcaatatacgatgaatacgtccgtctttatgccaatgaaatcattgactggttcaacaaaaccatggagtattttaaaccaacagattttatccgatatacatggaaattcgcaacagttactccggataaagatacagaaaccgggcatacaactgcatgggaaaaggattattgccagataaccatacaacgtgatgaacttctgaggttgattcacactaatacccttcaggatgcagtaatttatctttgtcattgtctgcaggagaaatacaagaaatcatcccagaatgagacagagtttccaagaataaaacctccggcatcagagagtgaaattaatataacagataattttgaatttcattctcttctggagctcagtaaagataatgagaagcggctggaaacatttcaaaaatggtatgaaaaaaataaagttttgttagaaagtcataaacaaaaacgaacagagaagattgacgttgccgtacgacttgtagggctgaaagcctatgatctgcatgaagggattccggataggccaaaacgaaaagttaaagatggcataaatgaagacatcaaagccgataccagtttacgcctgtcaaagacaaatataagtgatacgtcgctaaaccgttatcgccgcactgttaaggagattatcaataacgaaatcgacgtattcctgttggaacagaagaaaaaaaataaaagatttccctacagtgaagatagagatgtgattcgacctttatggggaaaatgcctgaccgggcagtag

SEQ ID NO: 11737 - DNA, 228 bp, Escherichia coli
atgtggcttccattaacagatgaacagcgtctggtcattttgaaagcttatgggattgaatgcgacagactggtacgtgaaaaggaacgatatgagatcacgtcaatttctcgtacacaagcgtggaaacttgaacgggagggaacatttccaccacgtaagtctatcggaaagaaatcttgcggatggttgttaagtgaccttctctgctggatacagaccagatga

SEQ ID NO: 11738 - DNA, 228 bp, Escherichia coli
atgtcttacatcaaaccggatactccgtatccagtatatgcgcaaccatcaatgactggaaatgcaataattgaaactcaacacaatgaaaaagcatctctggctatgactacaacatcattattaacagcgatgtcaattgcctgtcagaatcagattgacgtgtgcagccccggaaatttacgtggggccgttaatatttacactatggttctggctgattcctga

SEQ ID NO: 11739 - DNA, 564 bp, Escherichia coli
atgtataatgctaatcccaattacgaaatggacttcatgattctgaaagacgtgaatgaacacatggaaggtctgtttcaacgtttttctaaactgttacctttcagaattgattttgcctacaggaaagacacgcccagttttggtcattcctgtaggcacagtatgtgtattgaaatgcaccgcttacttagtgaaacccaaacgatgctggcgggatattactgggtaatggaatatacgtcaaacaagggacttcatattcattttatcggctacctggatgggcaacgtcacaagaaatcttatcggatatccaggcaactgggagatatctggaggcggatcacggaaggggaggggtattttcacctgtgcagggctaaagacaaatacccggtgcgtatcgatcacgtgattcactatagtgataagtctgcggtagacgacttacgttacgcccttagctacctggctaaacaggatcagaaagaacacggtattattctgggccgtagcaggcttcctgaaaaaagtaaccggggccgaccacgacataactga

SEQ ID NO: 11740 - DNA, 1287 bp, Escherichia coli
atgtttactgaagaagaaaaaatccgcgccattgagctttatttcaaatatggtaagaagctggctcccgtcgtacgcgaactgggctacccttcgaaaagaaatctgcgtcgttggagacgctcatgggaagcaggtggtggcgcaaaagaatccattcgtcataagcaccgttactccgatgagcaaaaacaggttgccggtgaacattatcttaaccacggctgctgcctggcgtttaccagcagagccctgggttatccctgcactgatgtgctcgctcgctgggttaatgaactttatcccgacagacgacgtatatttaccagtaaggccaacccggttgtgccctttgaaccagaagtcaaacgtcaggctgtcatggcactctgtacacgacaagtatcagccagtgaaatcgccaggcgtattggtgtcagtcgtgcggtattgtataaatggaaagatgaaattatcggcaacagtgcttaccagactatgcgtaaacataacgaaccttccctggaggcagaacgcgatgcgttgcgggaggaagtcgcccgactgaatcaggaaatacgccgccggcagatggagctggatattctgaaaaaggcggaggaaatcataaaaaaagacccgggcatcagtatcagtcacctgaacaacagagaaaaaacaaagatcgctgatgccctgagacaaacatatcccctgacagaattactgcatgttctgggccttgcccgtagcggttatttttatcaccgggctgcactgaaagccggtgataaatacgccacgatacgtacgatgctgacagatatctttaacagtaattaccagtgttatggctatcgtcgcctgcatgcgatgctcaggcatgaggggggtcggctatcagaaaaggttgtacgcagacttatggtggaggaacagcttgtcgtcagccgtaaccgtcgtcgccgctacagctcatattgcggagaaatcggaccggctccggataaccttatcgccagagattttaaggcggagcaacctaatcagaaatggctgacagatatcacggagttccagctccctgcaggtaaagtctggctatcaccggtggtggactgcttcgatggaaaagttgtgagctggtctctcagtacacgccccgatgctgaactgatcaacactatgctggatagcgctgtcgaaacgttaaatgctggcgaacgaccggtgatacacagtgacagaggtggcattatcgctggccaggctggctggaaagagtga

SEQ ID NO: 11741 - DNA, 627 bp, Escherichia coli
atgttgcaacgctaccaagacgagaatgactggttttctatacatgacctagacacctggagcgtgacggaccgcctcatcaataagatacaaaaggaaagcgatcaagaatctttcgacttcctgtccacacagtttaaaaacggtcaggcctggtactggatagcagaatatatgcgtcatctgctgtggcagcacggaagagttggagacagagcagtacatgagcagcaaaagtggataccatcttttcaactcgactccttatgtgaaactctggcacatcgtctgaatgggaaagtgatcaccgaccaactagccagtttccctcagttaaacggttatatctggacatggcgtgatatcagtggcgttgaaacagttaggacctgggttcaggaacaaatccgggatgatgaagcctttttgaaactactgttacaattgtgttatcacggaatcagctctgcagaaggacgtttcaccgccctgaaactgagtgacctagctgactttttcggggaaccagaccagatcagagaacgcattgaaaacatcaggaaagcaggcccactggctgaaatggctaagcaggttgagacgtcgattaaacgaaataggttttag

SEQ ID NO: 11742 - DNA, 252 bp, Escherichia coli
atggaatggcagccggcgcagtattacagccgggttatcatgaatccgccgttcagccacgggcaggatatccggcatatcctgcgggctttttccctgttgcgtccaggtggcgtgctggtcgccgtgtgtctcaacgggccacgccagcaggagaagctgttacggttttctgacgtccacgaggagctgccgcgcggcacgtttgcttataccgatgtcccgacgatgattattcgtctgcgtgcctga

SEQ ID NO: 11743 - DNA, 162 bp, Escherichia coli
atgaaaagacagaagcccacagcagaacgtccgcgtaatgaaaggggcggcgcgtcagcgcggcccctttcagcgccaccggcgcgcggtcttttcccggtgcgggcagacgggcttttattctcccgtctgcccggcgtcatcaggcacgcagacgaataa

SEQ ID NO: 11744 - DNA, 603 bp, Escherichia coli
ttgacgttttgcggggacctgccgtttgttccctccggtattcaccatcacctgtttgagaaccttcgccgcaaggggcatcactgccacggccggaaacgactgtccgggggcagaccgcaaaagtttttgcctgcttttgggcaaaaacttttgcgggatgtacatttcacccctggactggcggagacggttgtggctgtctttgcccccggcgacaggggcttaaacaggtgtatggcaccggacacaacaacgggcaggcacccgccgcaacgacgaagagcgcgtgcgcgaaacggcgttgccccttacatcccggcggccttttgccgggatgccaggagcgcaggccacggcgcgacagaggcggcgcgaccgttccggtcgctgcaagcccgggttttgcgtcagggatggaagcccgccagggcggagacagctccgctggctccgttcacgacagcccgccccgccagggggacgcccaagaaaggcacaggcaggagaacaacaaaacagacagtaatcagagcagcaggaaaaagaagaacagtagcaggaacaaaaacatcccaggaaacaggagaatcacagggatga

SEQ ID NO: 11745 - DNA, 282 bp, Escherichia coli
atgagtacccgaaatatccacgttaacactgtgtcgtacacgattcttgttgccgggaggaaaaaaaatacccgagaagagtgggacgtcctggaattcagcagcctgactgagctgaaaaaatatcgcaaaagccacccggaaaagatggccttcagctatagctacgcgctcagtcagggggtggatacgaagttccgccatatcaacgttgcggaagccgatcacttcaaacagtttctgcgtcagattgagcgtgtcaattcgaaagtttttttttga

SEQ ID NO: 11746 - DNA, 243 bp, Escherichia coli
atgggatatatcacatatgttacagatcaacgacccggtgaatcagatatcctgagcgggaatgcttttgctgatctggagattcgtgattctgatgggcatattctgctgaaaatgcctgctcctgaaagcggctggacacatgaaagcctcagtcttgttcagccacagaaggtgcgggacggggaagaagcatttgatgcttatctgaatggtatgtggatcggatcgacagaagtctga

SEQ ID NO: 11747 - DNA, 453 bp, Escherichia coli
atgaccaaaattcttcttattggattactcactctttcatctcatgttattgctcaggactgttttgaactggctggtagagattacaaaatcgatcccgatttactgagagcgatttcatggcatgaatcccgtaacagggttaatgctatcggcattaaccctgttacgggatatggctccggcctgatgcaaatcgactcccagcattttaaggaactgtcccgttatggaatagaaccggaacacctggtaacagatccttgcatgaatatttataccggtgcgtattacctggcaatagcgttcaaaaaatggggagtaacatggagagcggtcggcgcttacaatgctggttttcgcaacacagaggaacaggatcggcgcaggaaaacttatgcagaaaaaatacagaacatttatcgaaatataaaaaacaagcaagggcaatga

SEQ ID NO: 11748 - DNA, 378 bp, Escherichia coli
atgccacgcatacaaacttttgtcagtaatcaggttcgtgaagaaattgaatctctggtaacagaaaggaggcaagagggggcgacggaaaacgatgctacggtatcgtctgttacttcaatgctcatagaactcggtctcagagtatacagaattcagagagaaaagaaggaaggtggttttaatcagatggagtacaacaagattatgatggataacatagccagagtcagggcaatgtgttcagagataatgaagatgagtgcattaagtcatgaagttataagcaatggtaattttgataatgaagtgatgaaaagatcgataactaaatttgcagaagatcaggtacggattttctttccagaagaggagtga

SEQ ID NO: 11749 - DNA, 276 bp, Escherichia coli
atggttatcattaatcctatatttatgtctaaattaagcaagatctttcctgaaataagtacacaaaaaatagaggttttgacattttttgtttacgggatgagtacaaaagacattgcttactacaaaggggtaagtgtccaggccgtatccaaaaacttacgtgaattatgtgatgtgtatgctgtacctactacagatatgcttaaaactgtctacacggtaaggctcgatctctataaccaccttcggtttagttatgaagagtgcccttaa

SEQ ID NO: 11750 - DNA, 189 bp, Escherichia coli
atgaggagtgacgatgtgaatgttgttcggcctgtcagaaagcaggtacatgtatttttggatatgacaacttatgaacagttaaagaaaagcgcgattttttcgaagatgaagattggaaagatggctgaacaaattatcagttcttatttcgaggaagaagataataaaaattataacgtcggttaa

SEQ ID NO: 11751 - DNA, 360 bp, Escherichia coli
atgaatttatccttatctaaaggcggctgccccgcgtctgtaaaaaaccgtgcatggcattattgccagatggcatggcgtggagtgtgtaaccaaaaagcactgtcccgtctggctgcgttctctccgctgctgttactggggatggggcagatggcccatgccactgacctgctggcgggaggcaaggacgatgtaaaagcgacctttggtgccgactcatttgtcatcatgtgtatttatatcgctgaaatcgttatcggtgttgcgacgtatatccgaaccaagaacctgctgattctgctgggactcgtcgtggttattgtcttcaccaccgttggcctgacattcgtcagctga

SEQ ID NO: 11752 - DNA, 306 bp, Escherichia coli
atgtcgggaaacgatttagaaaaattccgtttcccgaaaactctgtcagagcagaaccgaattatcggactgccacttgatgaagccatccccgcagctgtgttagtgctgtggggatttttcgccaagaaatatgtatttggtctgattattgcgacagtggtctggcagctaatccgggcggcaaaacgcggaaagagttcccgctggttatataactggtgttactggcatctgcctgttgaattatttcgggttgtctaccgcgttattcccgactccagttacaggaaatggataaagtaa

SEQ ID NO: 11753 - DNA, 564 bp, Escherichia coli
atggaaataagcgctcgtaactcatccaccaaaattattgccattattattctgtcactcacggctctggtctttattctggggtttgctgttacctggctggcggtgactaacagaacactcattcatgagcagcgtacggtcgtcaccccgatgacctataacgcgcctttcgcggtatctgaaacaaaagcggataccgagtttttccggatgatgacgctgtccttcctggccctgcgtcttaacgtctcccccgaaactgtagattccaaccacgcttttctgatgtcttttgtcgaaccagaagtcagggaggaatttaaaaaagttctgcaggaagaggccgcacagataaaggccagtgatgtgaattccacattctacaccacggaaatcaaagtctatcccgttgacggacgcgtggatgtcaggggcgtgctgaaaatgtggatcggcaactcaaaacccaccacggaattaaaaaactatcgtctccgccttaagtacgccggtggctttacccgcattggccgtttctatgaggtaaccaatgaaaaataa

SEQ ID NO: 11754 - DNA, 741 bp, Escherichia coli
atgaaaaataactttccggcgctgctattgggcactgccatgatggtcacttcgcccgggactgtatatgcacagtctcctgccacactcagctttccgcagggggggcagttccggctcagtatcagtaataccgatcccaatatgattttcattccgggagataaagtcacggccatcacagcccagaacggcatgctggcagataaacgactgacgtctgccggcggggtgctgttcacctccgtggcgagccggaccttcacgttgtatgtggaaactgccctgggacaaaccttctcggtcgtggccacacccgtcaaaggtgaggggcgagtctaccgactgatgagcgcagaaccgccgtcgcggcccgaaacccgccagtgggaaaccgcccaggcttacgaaaaactgctcatcgcactcacccggtctgtgctgaccgacaaaatgcctgatggctatggcgaggtgaaaccgcttgcagacggtatcaacgtaccgggtggtttttccgccacgccgaagaaagcatgggcgggcgaccagttacgggtcgatcgttatgaactgcgcaatgccagtacgtggggagtggctctgcgtgagcaggacttctggaagcccggtgttcgtgccgtcatgtttgacagcaatgcacagaccctgatgggcgggggacggctgactgtcaccgttatccgtgaaaacggggagggaacagatggccaacgttaa

SEQ ID NO: 11755 - DNA, 1365 bp, Escherichia coli
atggccaacgttaacaaaatcgttcgtcgtcgtcagctcgctctgtttatcgcgcttgtgctgggtattggtgcgggtggggcaggaacctggatggtatccgagatgaacctgaagaaagccccgccggcaaaagcaccaaagggcgaacctgcgccggatatgaccggggtggttaatcagtcctttgacaataaagtccagcgttccgccattgcggaagcccagcgtctgaacaaggaaacgcaggctgaaattaaaaagctgcgtacagaaatgggaattatcgggcgtgacctgaaaggctctcaggaacgtatccgtgagctggaagatgaaaataaactcctgcagacacaaatcgaagccgggaagaattttgactctctcagtgctgaaccgctgccaggggcactcgcctcacagggaaaacctgcagcacaggccggtgatattcctcccccgaccactttctggcccgccggtggcggacaggcacctgccgcaccggtgatgactccggttcagcgtccgggaatgatggacagccaggaattcacgctgccggacaccactccgcaaaagccccgtttcccgtggatttcctccggcagttttgccgaagccattgtggtggaaggcgctgatgccaatgcctctgtcaccggcgataaaaataccgtcccgatgcagcttcgcctgaccggcaaagttcagatgcctaacgatcaggaattcgatctaaccgggtgttttgtgactctcgaagcctggggggatgtttccagtgaacgggccatcgtccgtacccgctccatcagctgcaagctgggtgatgacaatatcgaccagaagattgccggtcatgtgtcctttatgggcaagaacggcatcaagggcgaagtggtcatgcgtaacggtcaaatcctgctgtatgcggggggctctggctttcttgatggtatcgggaagggtattgagaaagcctcttccacaaccgtgggcgttggggccactgccagtatgagtgccggtgaaatcggtcaggccgggttcggtggcggtgtcagctctgcggctaaaacactctcggattactacatcaaacgtgctgaacagtaccacccggttattccgattggtgcgggtaatgaagtcaccctggttttccaggatggcttccagcttgaaacgctggaagaagcccgcgcgaaagtggctgcacgcaaaaaacaaaatcaaccgtcagcctcatctgcgcctgctgccatgcccggcaacacgacggacatgcttaaacacctgcaggacttcaggctgggggacaccgtcgacccggccacaggcctggttgtcacgcagtaa

SEQ ID NO: 11756 - DNA, 225 bp, Escherichia coli
atggccgacgtactggaccatttacagatgcaggaagacctgctgaaccggctgcatattcaggctgcccggcagttgctcataaggggtggggaaagcctctgcgagtgtgaatgctgtggcaacgacattcctctcaaacgccagcaaacgatacctggtgtacgaacctgcacggaatgccagcgggtactggaaatccggcaaaaacactacatgaggtga

SEQ ID NO: 11757 - DNA, 600 bp, Escherichia coli
atgaacagatacacctttctgctggcaggcggcgtcctgctgttgtccggctgtgccggcgttaaaagcagtttcgactgcgatgccacaacatctgatacctgcatgaccatgacgaaagccaatcaactggcacgggacaaggcggcaaaaaatacgggaaagcaggctgcgggcgggctgccttccctggttaatctcccgaccacttctgcggcggtgcatccgtcagcatcccgctccgctgccagcagctcttccggtgtgcaggtaaccagcgacagaccgacagtatcaggcagcatagctgcgggtacaaacacgactgctgcaacgtcaacactgacgccccgtccggttgtcgaaacgccggtacccgctgcttcacgtccggctgtatccgggggcaatctggcaccctcatgccagagcgtgcgttgtgataatcccggcactgtacacccacagcgcagccgggatcgcatcgctaccgtatggatcgccccctgggtggacagcgataacgctttccatcagcccggtcgggtctcctttgtggttacccctgccgaatggcttcttccgtctcgcataaactaa

SEQ ID NO: 11758 - DNA, 2592 bp, Escherichia coli
gtgaaaaaatttctgagcgtgctggagaacctcacgaatgctttccggatgccggatggtgcatctgagatgacgcgcaatctggccagcctggattttccgcagctgaccagcgtcctgccgtatcgcgactatgaccgtgactccgggctgtttgtgaaccgcagtacggttggttttctgctgcgggcggaaccccttatcggtgctaacgaacagattgtgtatgtgctggaagatctcatcaaaagtaagttgccgcgtaagacgccgatttccttccacctggtatccagcaaactgattggcgatcagcttgatcgcggcctgtctgagttccgctggcaggggaagcgtgcggataaatttaaccgtatcacacgggcgtattaccggcgtgcagcgcagcagcagttcaacagtccgacgggcttgccgctgaccttaagggactaccgtctgtatatctcctactgcgtgaaagccaggaaacgcacagcggcagtaatgacggaggttgcccacacactgaaagttcttcgttcttcactggatgcagcaaaaattttcacacagacggcagatgctcaggaactggccacgctggttcacgggatgctgaatgcccgtcatgatcagttgtatccggacgacgtacgtgtcggcaaatttgatgaactgcatcagcgctgtattgatcagcgtatcggcatcgatgtccgtcctgacgatgtgcgtatcagcctggctgacaggcagggcagtgtgaccacaacacgggctatgaactttatgctggagaataacccggacatgttcatgctgtggatgggcggcgataacctctctaacctgctcagccctgatctgaccattgccagcccgttcgtcatcaccatggtaatggaggccgaggaccaggtggcaacgcaaggggaggccacgcgcaagtatctcgaccgggacaaaaaagctaaatccccctatgccacactgtttcccggtgtggccaaacaggcccaggagtggaaggacattcgtgagcgtctcaacagcaaccagacctgcattgtccgctattactacaacatcaccacgttctgtccggacacggatgaggacgcgctggtctgtgagcagcaggtcattaatacgttcaagaagaatggcatagagctgttttccccgacctatatgcagttccgtaactggatagcgatgatccctttcattcatgcggaagggctgtgggaagacatcaaaatgggcggagccacctgccgggctgagagtattcaggctgtgaatctgctgccggtagtggccgacaaccgtctgtgtcagggggggctgctgacgccgtcctaccgtaatcagctggcgttccttgatatctacggggacgggatgggcaacaccaactacaacatggcggtgaccggcacttccggagccggtaaaaccggtctggttcagcctattctgcgcagcgtgctggactccggtggtatcgcctgggtgtttgacatgggggacggctacaagtcgttctgtgaaaacgtcggcgggacatatcttgacggtaagtcactcaagttcaacccgtttgccaacatctctaacatcaatgaatccggggaacgtatccgtgaccagctggcggtactggcaagtcccaacggtacgctggatgaagtccaccacagcctgctgttgcgcggggttcaggaggcctgggaagaacacaaggaaaccgcccgtattgaccatgtcgtccataagctgacggctatccgtgagcatgataaataccagaattcgccgggcatcaccaaccgactggatgaaattatcgagctactcgggaaatattgttcctgggggatttacggcgaatatttcaacagcgacgagccgtcactgactgacgatgcccgctttatcgtcctggagctgggcggcctgcaggacaagcctgatctgctggttgcggtgatgttctccctcatcatctacatcgaggacaagatgtaccgcacgcctcgcagcctgaagaagtgctgcaccatcgacgaaggctggaagctgctcaacttcaaaaatgagaaagtcggtcagttcattgagaccggctaccgtaccgtgcgtcgtcaccgtggcgcgttcatcaccatcagccagaacatcaaggactttgatgccgatgatgcctccggcgcggcaaaagccgcctggggtaactctgccttcaaggtggttctcaagcaggatgcgtcggaattcaaacagtacaaccagaaccgccctaaccagttcagcgagctggagcgcagcgttatctctaaattcggggatgccaaagaccagtggttctcctcctttatgctgcgcatcaatgatacctgcagtttccatcgtctctttgtcgacccgctcagccgggcgatgttcagttcgaaaggtgatgacttcgaatttatccgccagtgccgggaacagaacatggatatccatgacgccgtctaccagctggcacaacgcaacttccctgatgagatgcgcgaactggaagcgcttgcggaggcagcatga

SEQ ID NO: 11759 - DNA, 465 bp, Escherichia coli
atgaccacagagcaaaaacttaactcagcaccgtctgaatcctctgtttctgctgagtcattcagaaaaggggggaatattaatgttaaagggagccggcgggagcaacgccctcgacgctgtctgcgtaatctgctgctggtcgccgctactgttctgtgcgttaacgcggcggtcacttctctgctgattagctggcgtacaccgacggttgtgtcttttgatatgaagggcacggtcgatcagttcaccgaccaggcggggacacagtccctgaatgaggcgcagatgagcgtcctgacagaacgctttatgcagacacttagcacagaacttcaggaataccagcgcgatcacaacgtccttatcctggtgacgccggcggtggtcagcggtgcggcagacattaccggtgaaattcagtctgcagtggcacaaaaaatggccgccggaggggggcagtaa

SEQ ID NO: 11760 - DNA, 636 bp, Escherichia coli
atgtaccgacgtctgctcatactgcttgccctgtccggcatggtacaggcaaaaaacctgggcacatggggggagatgtaccccattgccgagcaggacatgctgaccaccattcagacccggctgaaagcaatggaggccagtggtgagatggcccgggagcaggaagcattcaaacagcgtgtcatagaaaacaccctgcgtcctaagccggtggaagggctgacgttggcgcaggaaaacaccacgcactatatcgatccatcgctgacagtcagtgaagatctgaaagaccatcaggggcgggtgtttgcccgtaagggacaggtgattaatccgcttgatacggtgccctttaccgacacgctgtattttattgatgcggataatccgcagcagctggcgtggatgaagaagcagaatcccggcacactgacgtaccgcgtcatactggtcaatggggatgttcgagaagcgaccaatgccctgaatacacgcatttacttcgatcaggatggctcgctcagccggaagtttgaactcaaaaccatcccggcccgtgtgacgctggctgaagatcgtcgccgtctgcgggtggattcgtttgcactggatgtgccggaggtgaagccatga

SEQ ID NO: 11761 - DNA, 987 bp, Escherichia coli
atgaaccgttatgtaacaggactggcgctgatgttgttatgcctgaccgggacggccagagccgcttcgtctgaatgtgaaggcaattttgtcaatccaataacggatatctgctgggagtgtatttttccggtaaccattggcaatgttccggtcgccaaaggacgtcagccggatacgccgaatccttccatgccgatccagttttgcccgatgggcattttataccgggtggggctggccattggttactgggagccgatggcgctgacggatgtgacacgctccccttactgcatggtgaatctggggggctttaatatcaatattggtaatgtgggcagcggcagtggtggtcaggaaagccgcgctaaaccgggggccttctaccatgttcactggtacaaatacccattgacctactggctgaacattatcacgtcgatgggctgcctgcagggtggcgacctggatattggttatctgtcggaacttgatcccatgtgggacagcagctctctcagcatgattatccagccggaagcgattctttttggcaacatcatcgcccagggagcctgtgccgctgatgccgtggccagtctggtgagtaaacccatcgacgcccttttctggtgtgccggcagtcagggcagtatgtacccgtttaacggctatgtttctaacgaattcagtccgttacagacgtcactgttactcagtgagcgcatggcgttcaagcttcaccgccagggcatgatcatgaacagcatcggtgaaaacagggctgtctgctttgaatatccatccccgatcatccccaaaagccgctggcgatatcacatggtcaacaagtatcccgatgccggacagtgtcatccgctggggcgtagcgtaacccgctgggaagcgggcaagaacatgcccaatgaccggcgtaactttgggtatctcttctggcgtaagcgcaactgcgtctttctgtaa

SEQ ID NO: 11762 - DNA, 369 bp, Escherichia coli
atggtcgtgagtaaaaaaaagtatgactttctgctcgcccgctacgaacaggccgcctcccgtgctgacctgctggagcgccagcaggcagagctgaacggcgcgctacagaaaaatggcgggccgttcaaatgtattctggagtgccgggaagcggcgatggcgctgtcatcgtcaggtagtgaacaggtatggctgacactggagcgtctggcgtttgtggacagatggataagcggtctgcttccggtactgagacggcagatgtcagtccgggaacgacgcatgtgggaggagatgctggacattcgttctgcggatcgcgcctacggtatggcacaccgcccgtcacaggaggaaacgcgatga

SEQ ID NO: 11763 - DNA, 615 bp, Escherichia coli
atgaaacgagtaatggtatcgctggccctgcttctggtcagcgggggcggcatggcgaataatcatacggagaaccgtcagtttatccatgagcagctgcaactggaccgtcagcgatttcagtctctgcaaaccccggaattcctgaagcagacccgtccggtggcaccgcaggagcagtcgtttctcgacgcgcaggcacagcagttccggcaatccatgcagcccggggaacgcccggtgaatacggccctggtgtttgtgtccttctcgatgccggcggaggagttgaagcagcgcgtaaaggatgcggcacaactcaatattccggtggttatccggggaatggttaacggcgatatgcgggcgacggctaatgccgttgccggtcttgtgaaagagagcaataccggtggggtacagatagatccgacgacgtttcgtaaatacaacattaccgccgtgccggtgctggttgtagcctgtggtaatcaggatgagaaagtcgatcgtctgcagggggatcttacgctgcatcaggccctgaagcgggtggcagaagagggcgactgtgctgacaccgccaggagcctgcttggtgaggagggagaatga

SEQ ID NO: 11764 - DNA, 1839 bp, Escherichia coli
atgaaacgataccttcctttactgatgctggcggcatctttctgcctggtacagccgcttgtcgcaaatgagcagtttaaccagggaatgaatctgagtagccagaataagggacagggggccagtgccattcaggggtttaatcctgcggaggtcatccccggttataccgactcgccgccggaaagtgggtattacggtggtgtgacatcttccggtgtggatatggcaggccccggttcggctgcgctgaatacatcagaagccggtaaaacgatcacggagtccattcttaatacgccaccggataacaagccgtcgctggatgcaccatttatttcagaagggctggccatgaaggacaaggccgagaccattactggtggaggatttgatggttgtgtggatcaggttgctggcttcacggaaatcaccacacaccagtgcctgcgggacacgaaaattgaacagtactgtacccgtacagcgaccatcagtgggtactatgaggatacgacagaaatcaaacagatagtgattgaatcttcctcgattcggttcactgaaaagaacaattctttttctggtgaatttaaggtcagcactggagggaaagtgatcgctgccagcgcggtttactcctggaataagaaacttgcttacggcaacgatcactggttcatgagagtgaccacgccatttggtttaatttcaatggatgattctgaggggagcgtcacgctgagttccgggctgaatataacagatgggcagtcattgccgttttccataacgaatagacgcaacaaacctacagtgtcttccatctggtatagctcaaatatgaagtaccgtttcaccattacgctgacgattcaggttccttccagaaaatgggtacctgaggttgtctggacagaaagctgcccgttcagcaagtctgaaggtgcaatgaccggatctcagtgtgtagagccaggaggcacccggaccgtcgttgttgacggaaaaacctacagcatccaccaggactgctggaagtggcaggacacatatctgacacagaccgaaaccgagggaacctgcggtgagtatatgaagaaccctgcctgtacggttgtacgaagtcagtgtgccgatacggtggatggtttttgtgtcagccagcaggtcacctactcctgtgagcgtaaaaaagagggaaacggccagatttgcggcggggagttcttctgcaaagacggcagttgtgcccaggcgcagacagggaccagcaatatgtttggtcaggcagtgtcagcgctggcggcagtggctgctgccggagaggatgtggcggaactgaacggcgagaatgtcagggcattcactggcgaagccaaatcctgcaagaagtttgctgccgggtttaacaattgctgtaaggattctggctggggccaggatatcgggctgtccagttgcagcagtgatgaaaaggcactgggtaaggctaaagagaaaaaactgacggtctatgtcggggaatactgcagcaaaaaagtgctgggggtatgtctggagaagaaacgcggttactgcgtatttgattccaaactggcccgtattgtccaggagcagggccgccgtggccagctgggcattggtttcggcagtggcaaatctccggactgtcggggcatcacggtggatgaactgcagaagctggactttggcgtgatgaacttcagcgatttctatgatgatcttaatgccggtagcgatatcccggaagaccaggccttgctgaagaaagcacaggacattatcgctgaaaagatgaaggagaacgcgccatga

SEQ ID NO: 11765 - DNA, 780 bp, Escherichia coli
atgagagctgtcgccggtgtgcttgttcttcttgccactgcatcactgcatgcggctcccgacgatgtactggtccccaactatgcccgggaagaaggctggcagtggtacaacccgaatgcggaagagattcaaccggagcctgcgccagagccgacccttcaggaacgtctggccagcatgacgccatctgagcagaaaaaggtcctgcagcaggcgacccgtgaagcgctggatacggccattctgtatccgtctgcggagaacttccgccgttttatgatactccagaatttctggactgaccgggcgacagattttacccaaacatcaaagctggcgcgcctgaaatatccggaactcgactacaacgtgaagcgtagtcactacaacggttctgtggaagcgcgtcttaccgaagagagaaaggttcagaatgcggtcatccgtcaggtggcacagcgctatggcctgttcttcttctaccggggaaataatgccgtcgacaacctgatggccggtgtcatccgcgcgttctgcgaagaccggggcattacacttatggccgtgagtgtggacggtaaaatcagcgaccagctgccgcagagccgtccggacagcgggcaggctgagcagatgcgcgccacgcatttcccggcgacttttctggtcgatccgaaaacgcaccagtggcagcctcttgcatggggatttatgagccacgatgacctggaccgccagatggtcaacgttcttacccattttaaacctgactattga

SEQ ID NO: 11766 - DNA, 588 bp, Escherichia coli
atgcttattctcgtattgcgaaccgccattatgatggcggcgatgctgtccggctgtctgcaggccgggacactggatgatatccgtgcactggaagccggaaaaaacggacgtagcgctcctgcactggatggggtgcgtcttcctgagagcaacacaccaccatcaccaggactcagcgaaaagacgtcgcccgtctggtatccgctgagtgacgggcggcgggtgaatctgcaggactggaaactggtgctgtttatgcagtcgacctgtcagtactgccgccagtttgcgccggtgctgaagtcactgtcgcagcagaacggtctcagtgtcttcccggtaagccttgacggaaaaggggatgccgaatttcccgatgtgcttccggccactccggatgtgatggtggagtttttccagagcggcgtgccggtagccaccccaaccacttttctgaccaacgttaacacgatggaaacctggcctctgctgcagggcgccgcagaggccggagaggtccgtaaacgtctcgatgacgtactgcgtatggccctggaccgtcaggctttacaaaaaacacaatga

SEQ ID NO: 11767 - DNA, 534 bp, Escherichia coli
atgactgctgaaaataaattcccggcttctgcagatgctctggaccgtactctgcgtatcctttcagaggccggatgctttgaagggcgtgaggatatcgtgttttttttagtcgggcagggatatcaggttgaatgtctcaacaaggacagtatcgatattatcagtccgatgaatgaaaaatatcgcctgtatggaacgttatatagtgcaggtaatagtaagatctttaacatattacagaggaggttatggggagggttctggctggccttgcttgccgcctttgtgtcacgctttctgtggtcagctgtctttgaagcgatcacttcccccgctcagagtgagttctggctgtctttgcctgaagatgtacgcactgacctgaatatgtgggggtatcttattcctccggtgtttatttcagtgtccgtcaccttctttgtgatgttaacgctgattagcgttgtccagtacctgaaggtatttattttcggacgtttccctctttatttacgaaagggggagcaatga

SEQ ID NO: 11768 - DNA, 1368 bp, Escherichia coli
atgaaaactttcctgagacagtcatttctctcgctgctcattggcactgcgttgtgcacgtccgccagtgccgggctgcaggatgacatgaattcgttttttaacaatatgagctatgccagcaacgccacctcagcgaaagcatggcagggacaggcggcacgctatgtaaccggcggttcgttctatgcccgcacaggaaacaaaaatatccagctgatatccatcagcctgccgtccatcaacgccggatgtggcgggattgatgtctatcttgggtctttctcctttattaactccgaccagattatggcgtttgtgaaacagacgatggctaacgcggcggggtactttttcgaccttgcactggaaactaccgtgcctgagttgaaagcggcaaaagacttcctgcagaagatggctgctgaccttaaccgtttcaatatgtccagttgccaggcggcaaaagcgatggtcgacagcgtggcgtcgctgtggggggaaagtcagcagaacgtctgccagtctgtcgccggtcagaataacgtgttctcggactgggtctcctcccgtcagggctgcacatccggcgggaaatacgaaagcgtcacgaacaaggctaccggcgcagaaaaagatcaggtcctgaaggatatcaacctgatgtgggatgctctcagcaacagtacgctcagcagcaatgcagagttacgccagtttgccatgagcatcagcggttcggtgattttcggcagtaacggggaaatgcgaatcctgtcttcgctggcatcagaccgcagcctgttgagtgcgatgatgagtggtggcagcgccaaagtgtacgtctgtgataaccagaacaaatgtctgtcaccctccctgaataacgtgaccatttcggagtcaaaatctctgatccgcatggtgcgggacacgctgaccagcatagaaaataaagccattacggacacaccattgacggagagagagaagcagttcatcaacagcacctccattcccatcctgtcctggatagtggatcagtcatccctgagtgtttcgcagtccctgtttgctcagctgacggattacatcgccgtcgatatttatctgcagtatctggaagctgtcatgaaggtggtcaatggttcactggctaccaaagactatccgggggccaatatgaatgaactgaaaaatggcctggcagatgcgcgccaggcgctcaactcactgcgtatggaggttcagattaaggaaaatgcgcttatttctgcacaacagcaaatccgttttatccgccagcaggtctcctcaaaaatgagcgatcgcgtactcggtaactatcagttcagcagggtgaattaa

SEQ ID NO: 11769 - DNA, 2889 bp, Escherichia coli
atggccattgataccatttatacgattgccggcggagcgtggtttcaggatacgctcaatggcgtggcatcgtttctcgacagccgtgcgggcgatgcgctgattgcgatggccaccgccgtgtcagttatagtcggcgctgcaacctatatccggacccgtaatattatggacctggtcaagtgggccggattttatgttctggtcattgccgttttgattggcgataaacgaagcgttcagattattgacctgtctgagcctgcccggatttatcaggtggataatgttcctgcaggtctggctgcgcccgccagtatgattacccggatcggtgccggtatggcacagacgtacgataccatttttgcccgccctgacgcgctgacctacagtaaaaccgggatgcttttcggtgcgcagctggctgcagggagcagtgatttccggttctctgagccggagattcagcgtatgttctctgattacgtccataactgcgtggtgggcgatattatgctgaacaacaagtacaccatcggggagctgatgaatgcggccgacccttatgcactgatcttcagccgtccgagcccgctgcgtgggctctacgataaaaatcgcaattttctgacctgcgaacaggctgccaccagaataaacacggattccggggatatttccggggcgaatacgtccccatttctgcaacagatcctgaatacgttacatggtttcactgatcaggtgtttggtcagacgaatggtgcgcaatctgcgctgttcactgaaatgctgggggacagctataactattttcatcgtacttccctgacatccacggagatcatccgaaagaatgtgataatgaacggtctgcgcagcggactggagagtttttccgcactgagcggggatacggcagggctggtgaatgtagccacgcagacctcaatggcaaaaatgcgactgtcacaggcgaccagtgcgtcgattgcggctaacacactgccggtgatgtacagcgtactgttgggcatgacaatagcgcttttccctgtactgattgtgcttgcggtggtgagttctctgtcctggaccattattaaaggctatgtctataccatcgcctatctgcagatgtggcccatcctgttctctatcctgaaccatgccatgaacttctatctgcagggtaagctcagtggcacagcagtaacgctggctaattttgaccaggtacagaatacctactcggatattggcacaaccgccggctggctggcgctgtccatcccgtttatcgcctggggtatggtgaaaggtctgggacaggtggtatcgcaggcaggtaactatctggggcagaccctgcagtctgcctccacgcaatcgtcgtctcagaccattgacggtaactggcactacaacaatatgacaaccgggaacgtacagggtaacaagtgggacaccaactacagccatcgtgaaggccatatgaccagtcagctggagagcggggcgatgaagacgctgacgagctccggacagtcggtttacaacaccacagaagcgatttcaaaactgccggtcgatattgcgctgggtaaaaccgcaacgagcagctggcagcagcaacagcgtgatgccatgagcgaagcgcaaagcctcactaacagcctgtcgcagacatccagcctggccgcgtcgcagatgagccagtggagtcagcagcggggcaacagcgacaccaccgtggcgggcagtgacatctcgagcagcagtaatctgaccaaagcgctgaataccattcagtcgattggtaaccgctatgcccgcgatgaaaatgtcagtctggctgaagccgtgagagaagccgcgacaaaaagtcaggatatgagttttggtgcaggtggaagcgcccaggtttcatttgatacagaccgtcacattctcggtaaaattggcgggctggcaacaggacttaaaggttctgctgaagggcatctcaagacggattatacaggccgaagtggctcctcgcacgggaccagttccgatctgacccggcagggcgggaccagtaaagggttcagtgctcaggagcttaaggattttcgcgatgcgatggatgtggtggcctccagtcgtgtcactgacagtggcagccacacggacaatgcgtcagcttccctggccagccagttgtcgtccaccttctccagcctgaagagtcaggcatcgcagtataatgatgctgttacccgtagccatgagtatgcccagctggccagctacgcagagaacaacagcgctaacattaaccagaactactcgcaggagtttgtcgggtatgtcaccagccagcgtccgggagaggctgaccagctgctttctgacactgccagcccggaagtgcgggcagaacgcgaaagactggtacaggcctttgtggaagagcgcatgaagccgcagttgttacagcaatttgagcagaacaaagctcgtaccggagagggaatggggagtgtgtcttcttcctctggtggcggtgatctggaaagtgaatatcaggtgcagcaaatgcaaatggaatacagggccaacgaaagcggcgtgagacaacagggcgatgtcagtggtgatgtggctgacagacgtcgtcacgctgaatcgcaggtccatgatgaaaaaaatactgtgatctcatccggcaatataccgaaggaagaatacaaccgcttgcagagtgagcatgaacagggtaataagaatttcaatgtagcaaaggcagcggagaatgaacggcaaacaacattacctgatgaacataaaggtaaatatagtcttgataaagtgatggatgagatgaagaaaaataatcagtga

SEQ ID NO: 11770 - DNA, 579 bp, Escherichia coli
atgaagcgtagcgaggtggagaaggatgttttttttatccttgaatctctaaaagaaaaggattatgagataccatcgaacaaaaggatattgggtgttttgtttagaaaaatatggctggtatatgtattacagttaattatggtaactcttgactgttatttgtatttttctgatgagggtgacattccctatttttttcataaattcatggggttgttgttactttcatctggatctatgctgttttttacgctggcttttgtaggcagtatgtatagtcctgttagcatgtctctagtgataggtaaggaggtaatggaaaaatcagtgttaatgcagattctgtctaaaaaaattagattttatagcaaatttcttttgctatttaatacgctgattggtctgttctttctgtactttcatgaggcggccgttgtagcattaggtttatcgtggtttgggtcatttattttctgtgtgattattcttcaaggttccatgtctagatatatgacgccgtcggcgatagataccattgctaaaattaagacgattatttcatcgggtactaaataa

SEQ ID NO: 11771 - DNA, 738 bp, Escherichia coli
atgaagaaaaatatgaagctaatggcaatgactgccgtactatcctctgtgttagtcctctctggttgtggcgcgatgaacacagcaatcaagaaacgtaatcttgaagtgaaaacccagatgagtgaaaccatctggcttgaaccgtcctcgcagaaaaccgtatatcttcagataaagaatacctccgacaaagacatgtccggtctgcaggcgaaagtgactaaggcacttcaggataaagggtataccgtgacatccgcgccggaaagcgcgtattactggatacaggccaatgtcctcaaagccgataaaatggatttgcgtacagcccagggattcctgagtcaggggtatcagggggcagcaatgggggcggcgttaggggcaggtattacggcctataactccaactctgcgggggcaacattaggtgtgggccttgctgccggtctcgtgggaatggccgctgatgcgatggttgaagatattaactacaccatggtcacggatattcagatttctgaaaaaacgaatgccactgtccagaccgataatgtagctgcactgaaacaaggaacatccggatataaggttcagaccagtacgcagacaggtaatcagcataaataccagacgcgtattgtctcttccgctaataaagttaatctcaagtttgaagaagctaaacctgttcttgaagatcaactggcgaaatcagttgctaatatcctgtaa

SEQ ID NO: 11772 - DNA, 2250 bp, Escherichia coli
atgagtctgaatcctcgcgacttaacgcagggtggtcaggttgcttttatgcgcctgaaaatgttcctgcaaataaataacctgatttcttattatgtcatcatggggacagtgttatttggtattgccgtcctgctgatgcgaataagcatacagaatctgaccaacggtattatttactggtttgtccgggtgatgtcaccttttacggataaaatggtcagtcagcctgtctataccatccgttattacgaacataagctgcagtacagcgctcgccagatattaagtgacaattacaccgtatattgcgggcagttgctgaagcaggaactgatcattgccggttgtgccacgctgcttgtcgcctttgtggccacatttgccgcgtactggtatctcgggcgtaccggtcgccagcagagtgaggatgaaatcatcggggggcgcgccctcagtgagtcaccaaaagaagtcgccaggatgatgaaaaaacgcggagaagcatctgatatccgtatcgatgacctgccgctgaagctgaattctgaaatccagaacttcgccatgcacgggacagtcggctccgggaagtcccagttaatgcgtaagatcctgaagcagctgcgtgaccggggagacctggtgattatttatgataagggctgcacttttgttgaagacttctatgacgaatcgcgggaccaggtgcttaacgcaaaggatgcccgttgccctaactgggacatgtgggaggagtgccgggacatctccgaactggagaatgcggcaacaacgttaatccccgccagtagtggtgaagacccgttctggcagggcagtgcgcgtactatttttgcagaaggcgcagagcgcatgcgccaggacaaagaccgtagctataacaaatttctacgtactcttctggccataaaactggaccagctgcggaccttccttgccggtacccctgcctccacactggttgacggcaagattgagaaaacagctatctccatccgaagtgtgctgaccaactatgtcaaggcaatgcgatacctgcagggtatcgatcgtgcgggacgggagaaattcaccatccgggaatggatgaagggccaggccgataaatcgaagaatggctggttgttcatcacttctgatgagcagaatcatgagtcgctcaagccattgatttccatgtggctcagtattgccgccaccagtctgctggcgatgggggaaaatcgtcaacgtcgcgtctggtttttctatgacgagctgccctcactgcacaaactgcccacgctgccacgcattattgccgaagcgcgtaagtttggcggctgttttgtgctgggttttcagaactttgctcagatggaagaaatctacggcccgaaagcggcggcggggctgtttgacctgctgaataccaagttcttcttccgctccccgagcgccccgattgcgaagtttgtggaggaggatatcggggaaacccgccgtctgaagttcagcgaacagaccagctttggccatgaacaggtgcgtgacggtatctcgtttggcaaggaagaagaacgcgtcagtatcatcagctactccgacgtgcagtcactgaacgacctgcagtgttttgtcactctgccgggaagttatccggtagtgaaactgacaatgaagtatgaggcgatgcctaaagtggctgattctctgctgttgcgggacgtgcagacgagtctcgatcagacgattgaggatgaaattcaccgccgcagtgaagaagaacggcacaggtttgctggcctgttcgaaggggaatcgttaattcaggctgttccgggcggtgcgtatattccggagggtaatctgtcgaatacgccccctccttctgccgacctggtggcggctgttcttgcggaagcgaacacgtctcctgagacgcgcacattacagacagaagacgctgccggcgatgcagataccgaaaacacgggttccactgctgttgcagcggaaggtggctccacctccaccggaggaactgagcgggatattgagcaggatttaccacaggatattcctccgggcctgaacagcgatggtgaagtcgtggattccgaagcgtatgaggactgggttcaggcttcacatcagacccgcgatatgacccgcagggaagaggtcaacatcaatcatgcgacagataaagcgcgtgattttgatgacgacagggaggtgttctga

SEQ ID NO: 11773 - DNA, 5301 bp, Escherichia coli
atgctctccatttcttccattaaaggtgatgcgggctactacagtcatgaagacaactactacgccagcggttcactggactcccgctggatgggggagggtgcggagaagctgggactgaagggggaagtcgccagcgccgatatggatgctgtgcgtcagggtaaacttccggacggttcagatctctcccgtatggtaaatggtgtgaataagcaccgcagcggctacgacctgacgttttctgcccccaaaagtgtctccgtcatggcgctggtcggggaagaccgacgctttattgaggcgcataaccgggctgtagcggtggtgatgcaggaggttgagaagctggtcagcgcgcgcattacagaagaggggaaaacggaaacagtactgaccggcaacatggtggccgcactctataaccatgatacgtcccgtgaccttgatccacagttgcatacccacgctctggtctttaacgccacgttcgctgatgaaaaatggcggtcgctggccagtgatacccgcatgaaaacggggttctccgagaatctgtatgccaccaagatagcgctgggaaatctgtatcgttctgctttacgtgaagatattgagtccatgggatttgaaactgttacagccggaaagaatggtctgtgggagctgaaggatgtccctgtcgatgttttttcctcacgcagtcaggctatccgggaggccgccggcccggacgcgtccgccaaatcccgcgacgttgccgcgctcgatacccgtcaggccaaagcctgggccgacccggagctgctgaaagctgactggcgccggcggctggccgatgaaaaatttgatatcgatggctacatcaggcaggcgcaggcgcgcgtggaggttcctggtactgttgcaggtggacatagcggtatacatgcaccggacctgtcgggaggcgcgtcttccggcgagattgctgacgagcagatgcggaaagctgtcagcgacacgatttcggcgttgtcggagaaaaaggtccagttcacctggtcggagatgctggccggtacggtcaaccgtctgccttccgcacccggtctgtttgagcaggcccgggccggcatcgatgccgcgattgaagggcagcgtcttatccctctggaccgtgagaaggggatattcacctctgatatccacctgctgaatgaactcagcgtccatcagctggcgcgcacggccattcaggaacagaccgtgctgctctttcctgaacgggcacaggagcgcgatataccggcaggtgatgctgtctctgttctgacgcaggacaaaagcccggtggccattctcagtggtcgcggaggcgcgcaggccctgcgtgagcgcacggaagacgtggccatgatggcccgttcacagggccgtgaggtgatggtgattgcagccgacggtcgcagtggccagtttctgtcagaaagtccgcatctggcaggccatgtaatgctgcgctcgcagatgaatgcagacaccgtattgccggtgcagggcacggtcatcgttgaccgcgcggagcggctgtcgctgaaagagacggtgctgctgcaggaaaaggcgctcagtgccggggcacaactgatattcatggatacagagaaccggcagggaacggggaatgccctgtctgtgctgaaagaagccggtatcccgcagtaccggttttatggcacacaactgccggaggtgcgactggtcagcgaggcggacaagcgaagtcgttatggccagctggcacaggactatgtgcgcctgtcggcggaagggcgggatgtcgtggcccaggtgaccggtgcccgggagcagcagcaactgacggatatcatccgcgacgcacgtcgtgaagccggggagctgggcagggagcagatgacaatccgggtgctggagcctgtgtggctggacagcaaaacccgtcatcagcgcgataattaccgcgccgggatggtgatggagcagtgggacgctgagaagaaaatgatgacacgtcacaccattgaccgtgtggctgaggccaccaacagcctggttctgctgggagaagacggcagtcgcctgacgctgaaggtctcgcagcttgacggcagctggagcctgtaccgcagccggacgctggcagtttcagagggagaccgcctcagggcgctgggtcgtgagctgaagggggccatcaaagcgaaggagcagttcacggtgactgctctggaaaacggtgcgatacggttgcgcagtggtgagcgggagttgcgcctgcccactgagcgggccgtgaagctggcccatgattatgtggagggagccggggcgggtaccagcgcatcacgcacggtactggccgcggtcgggccacgagcactgaataaacaggtcctgaacgcgctggcgcagagcggcggtgacatccggatttatacgccactggaaaccggacaggctgcacgtaaagtggagagcgtgtctgccgtccggcttgccagtgaccaggtccgccagtcgaccggcgagacaaatcttgataccgccatacaggccagccgggagcggctgatgtcggatgcagagcaggcagtgaatctggccatcccacgcgcgcagcagggacaggtacacctcagtgaaattgccctgttgtcagaggcggtaaaatccggccagccgctggctgatgtccggactgaaatcgcccggcaggtgggtagcggggaactgattcagctggattcggttgccggggtgggaaaccgcgtcctggtaccgcgggtggcgtatgagatggaaaagagcatcatccgccatattgccgagggtaaggatgccgtgcagcccctgatggcgctgacgccggcttcggtactgtcaggcctgacagcaggtcagcgggaagccacacgaacggtactggagaataccgaccgctttatggccattcagggctacgccggcgtagggaaaaccacccagtttcgggcggtgatgggtgccctgaacacgctgtctgaatctgtccgaccgcaggttatcggtctgggacccacgcaccgggccgtgcatgagatgcgtgaagcaggcgtggatgcccgcacactggccagttttctgagcgaaacccgtcaggccattcagggcggggaaacgccggattttcgtaacgtcctgttcctgactgatgaaagctcgatggtgggtaaccgtgatatggctgagctttatcagctggttgctgcagggggcgggcgaatggtctccagtggggacaccgcgcagttgcaggctatttccactggtcagccgttccgtctggtacaacagcgcagtgccatcgatacggtggtgatgcaggagattgtccgccagacacctgcgttgcgtccggcgattgaaagcatcatctcaggccaggtggatacatccctgcgccaggtggatgacgtcagcccacagcaggtcccgcgtcaggccggggcatgggttccggaaaagtccgttatggaaatccgtaagccggagaaagagccggagccggagcagggccggactgcagcacaggaggctttgaagccggagcagttgtcaccggcgggtaccgacatcattgcagccatccgggatgactggatggggcgtaccccggaggcacagcagcagacgctgattatggcagagctcaacgctgaccggcatgccatcaatgaggccattcatgtcgcccggcatgagaagggagataccggcgcagaagaacgtacgttcaccgtgctggagccgctccgggtgccagacaacgccctgcgtgcggctgaaacctttgcggagtacatcggcgccgtggccatgatgaacgagcgctactggactgtggcagaggtggatacgcaggacgccgtggtcacgctgcgtaacgctgacggggagtcagtgctgctctctcctcagcagaacactgcacaggatatttccctcttcacaccccgcgatctgacgataagtcagggggaccgtgtgcgctttacccgctcggacaccgaccgcggctacgtggccaacagcctgtgggaggtagccgggttcactgacgaaggggccatccgctttcgccagggagatcaggagaaaattgtcgatccgcaggccatgacggaggaccgtcatattgacctcgcctacgccctgacagtctatggcgtacagggagccagcgagcgttttgctattgccctgaccggcaccgaaggcggcaggaagagaatggcgtccctggaatccacctatgtgacgttgtcacgcgcaaaagagcatgtccaggtctacacggacaaccttgaggactggcagcaacaggtccggcagactgacggcggcaaaaccgcccacgacctgctgcacgagaaaagtgatcgcgagtccgacaccggtaaccgcctgctggccaccgcctcgcggctggataaaacggcgctgggccgccgggtgctggcggaaaacggtctggagggtgagacgatggcccgcttcattgctgccggtaaaaagtacccgtcaccatatgtggccctgccagtctggacccgtcacgggaaagaggcaggggcgctgctgacggaaattcgtattgaggatgacggaatgcgcgtggtgctcagcgaagaatcccggctgcgtggcggagaagatgcgcagtttgccggactgcaggccagccggaatggtcagacactgatagctgacagtgcggacgccgcactgcggctggcgcaggaaaacccggagagtggggtggtgatacgcctgcacggcgaagagcgcctgctcaatgccgcgcggctgaccgggggacgtatcacagagcctgacgagttgagtcgggcattgcgtaacgtggcggacgccgaaacggcggcaaaagcggaagaccccattacgctgcctccagatgagcagcagaagctggcggaggtgcaggagaaagccgcccgtgaactggcggaacaggcccggcgtgagctgctgtcggtggcaccacagaaagatgaagataaacgtgatccgctgttatctgccgatgatgaacgctgcctgcgtgacggtacagaacaggaaagccgggaactggatgaggctgtccgggaagcggttgccggtggtcgtggtgcccgccagcaggtacgtgaacagatgcagcgtactgaacgtgagtgggtggtgaagatgccggaaaaagagatagagctggaaaagacgctcggtggcgactga

SEQ ID NO: 11774 - DNA, 567 bp, Escherichia coli
atgtttattgcattcattattattgtcattcttctgggcgggtttgtgctcctgctccgtcaggccggtcgtgcagcgcatccacttctgcagtcattgcggtcaaggggtatacggcctggtgcagcagagctgttgctgtgcagcaggccatcatttgtcagtgccggccggttaatgaccgaacgggagcagcgctttctgcgccggctggacagggtgacagatacccgccagtggcggttatgtccgcaggttcgtgtggccgatatcgtcagagtggcgcccgaccggaagtccggcagccgtgaatggtggcagttatttcgcctggtgtcacagtggcactgcgatgtggttatcacggaccgtgccgggcgcatcattgcagcggttgagctggacgaccggtctcatcaggaaccgaaacgtcagcggcgtgacctgctgctggaagaggtgctgaaacaggcgggtatcccgctgttgcgtggcgataatgaacagcaactggcggcgcgtgtcagggcgcacctttgcgcacagcgtccggaggccgcggcatga

SEQ ID NO: 11775 - DNA, 732 bp, Escherichia coli
atgaatcagggtaaatccgttgctgtgcaacctgtcaggccggtcctgaatttctccgcgctgcagcgcgatgtcatccggatggtggcgtttgtggcgatggtgggggaccacatagctactgcctttcagctggatatgcccttactgaacatggacgggcgctgtgcttttcccctgtttgcgctggtctgtggctgcaacatggcgggtaaaaccttacgtcagcacagcctgaaccgcctgtggctgatggcactcctggcacagccgggttactggctggccttccgggatgtcggccttgcgtggtggcaactgaatatcctgttcacctttgctgttgtcatgcaggtggctcttttcctgcagtctgctactgcccgtaatggtgttgcggccttcacggcactgatggggtatataccattcagttctgccagttacggcatccccggtctgctgatgcttgccggagcgctgctggtctggcaggtcagggacacgctgcgtcccgccctgtttgctgtctggctgttgctggttgccctggttaatgcccgacacggtgatgtgatgatgttttccggcgtgattctgacgctgacggtgctgttctgtgtccacgggctggtaccggcttccggacgacgtctgcaggcaggacgctggtttgcgccagcgtataccattcatctgttttttattggctttctggtcagagtcctctga

SEQ ID NO: 11776 - DNA, 285 bp, Escherichia coli
atgaatggattcagaaaccattcacgaagaagtcaggtctggcgttatcggtgtgtcggaaaccgtgccgtccggctggaggtcagggaactctgggcagaggctgcggatgtatggtggctggctgctcatattgctccccgtactggctggcagcagtttgcgtggcagagagcagaatactgccaacggcgcagcaggggtaaggccggacatccaccacgttcttcaggaggtagtggatgtccggcgaaaatcaaagaacatacacgtcaggagggctga

SEQ ID NO: 11777 - DNA, 996 bp, Escherichia coli
atgagttggtttagcgatatatatggttttgaggaatcaacttacgccagaactcaggctaatttctacatcgatggtcccttgcttcataccagggaccagtcatcccgtacctttcatgccggtatactgactctgccgagtctggctgaaatacggaaggccgtttgtagcctgaaggtaagtggaggtgaaaggataaagctaagtagtttggtgaccgacgcttatgaacttcatcggtgtccggaggcgaatcgcgcaataatccaggttgccagtcagtttaacctcctggaaatgccgaacgaacacactacaccggagaagggaatcaccaactatcagtatgattatacgcaggggcccgcatgtgcaatggcctgtgctgccgctacggtgtttcgtaactatctggtcccggttggttcgcagagggggcagactcaaaactgtcaactcaacgctctggcggacatggacagagccattggcattagggggatcagaatgcaaaatggctacgctcttctgcaaccggatacggtgctcgccatcagcaaacatattgaggcgatggatgaactttcgcgtgatgaggtgaggcagaagctccgtgtcggggttcattctgacacggaagtgacaattccgggtgtaccgaaggagcagcgcgttactcaggttctttgcgctgctttaccggttgcttatcactattccccacgaagggactggggtccttttgcgactttagtgcttgaggcctgttatgaagcaaccctgctggctgcggtgctaaattatcacgacacaggtaatcccagagtctatctgactctggttggtggaggcgctttcggtaatgatctcagctggattgtctctgctcttaggcgtgctcttaacctggtcagtaatcatccgcttgatgtgcgtttggtgaataatcgtaaggttcctgtagagatagagtcgttgatccgggaattttga

SEQ ID NO: 11778 - DNA, 987 bp, Escherichia coli
atgtcttctgtttctacatcgggttctggcgcacctaagtcgtcattcagcttcgggcgtatctgggatcagtacggcatgctggtggtgtttgcggtgctttttatcgcctgtgccatttttgtcccaaattttgccaccttcattaatatgaaaggattgggcctggcaatttctatgtcggggatggtggcgtgtggcatgttgttctgccttgcttccggtgactttgacctttctgtcgcctccgtaattgcctgtgcgggtgtcaccactgcggtggttatcaacctgactgaaagcctgtggattggcgtggcagcgggtttgttgctgggcgttctctgtggcctggtcaatggctttgttatcgccaaactgaaaataaatgccctcatcacgactctggcaacgatgcagattgttcgaggtctggcgtacatcatttcagacggtaaagcggtcggtatcgaagatgaaagcttctttgcccttggttacgccaactggtttggtctgcctgcgccaatctggctcaccgtcgcgtgtttgatcatctttggcttgctgctgaataaaaccacctttggtcgtaataccctggcgattggcgggaacgaagaggctgcgcgtctggcgggtgtaccggttgttcgcaccaaaattattatctttgttctctctggcctggtatcagcgatagccggaattattctggcttcacgtatgaccagtgggcagccaatgacgtcgattggctatgagctgattgtgatctccgcctgcgttttaggtggcgtttctctgaaaggcggcatcggaaaaatctcatatgtggtggcgggtatcttaattttaggcaccgtggaaaacgccatgaacctgcttaatatttctcctttcgcacagtacgtagttcgcggcttaatcctgctggcagcggtgattttcgaccgttacaagcaaaaagcgaaacgcactgtctga

SEQ ID NO: 11779 - DNA, 507 bp, Escherichia coli
atgcaaaaatctattgggcaaccaagtgataacgaggaaactgagttcgaggaagttgaggaagagctaagtaacgagattatccaaaacccagatgcatttactcgcgtgcttgaccgaccagaaattcaggaaattgttgttgctcatcacgcattccagggaccacttccaccaccttatcttcttcgtgggtatcaggatattttacctgatgcccctgaacggattttccagttgacggaaaaagagtttgctcaccgccaaaaaatggaagaaaaggcccttgatggagcgataaaccgggataaacgaggacaattttatggtctttctgcgactctttttacagtaacatgtgcaaccatattggggctaactggtcacgaaattttggcaggaacagtgatcggtactgttgtcgcagttgcgggtatttttgttcttcgaaaaaaaccaagcactaaaagcaaatctaaaaacgacaataaccacgatgaagaatag

SEQ ID NO: 11780 - DNA, 327 bp, Escherichia coli
atgagcagaagatatgtcaaggagctggctatagagtctggcacccctttgggtatcgttcctagctccaactatgccaaggctttaaaccgtgactctgtcgtcaaagttatatcaaaagacatgaatatggtcggaaacgatctcaggcggtcagaaagccgtgtttatgctgaatacatagtaaagaatgggaaaaaaattgcagcgccggcgggcggaaagtgggcaatagtgacagggaaaaactcaaatgcaagaggaaaatcagaagctaaaggaatgtccttcgacaaatatgcaaaaatctattgggcaaccaagtga

SEQ ID NO: 11781 - DNA, 849 bp, Escherichia coli
atgaacggcttacttcgtatccgtcagcgttaccaggggcttgcccagagtgataaaaaactggcggattatctgctgctacaacctgatacggcgcgccatttaagctctcagcaactggccaacgaagccggagtcagtcagtccagcgtcgtgaagttcgcgcaaaaactcggctataaaggttttccggcactaaagttggcgttgagtgaagcgctggcaagccagccggaatctccctccgtgcccattcataaccaaatccgcggtgatgatccgttacggctggtcggcgaaaaactgattaaagaaaatactgccgctatgtacgcaacgctaaacgttaatactgaagagaaactgcatgaatgcgtaacaatgttgcgctctgcgcggcggataattctgaccggtattggcgcttcgggtctggtggcgcaaaactttgcctggaagctgatgaagattggcttcaatgctgccgcagtgcgcgatatgcatgcgctactcgctacagtacaggcgtcgtcccctgacgatctgttattagccatttcctacaccggtgtacgacgcgagttaaacctggcggcagatgagatgctgcgagtgggcggaaaagtgctggctattaccggctttactcccaatgccctgcaacagcgtgcttctcattgcctgtataccattgccgaagaacaagcgacaaacagtgcttcaatctctgcttgtcacgcgcagggaatgttaacggatttgctgttcattgcgctgattcagcaggatctggaactggcaccagaacgtattcgtcatagcgaagcgctggtgaaaaaactggtctga

SEQ ID NO: 11782 - DNA, 1470 bp, Escherichia coli
atgtctacgagaagagaagtcattctttcctggttgcgtgagaaacgtcagacctggcgtctgtgctatttgttgggtgaggctggaagtggaaaaacctggctggcgcagcaactacaaaaagataaacatcgccgtgtgattactttaagcctcgttgtttcctggcaaggtaaggccgcatggatcgttaccgacgataacgcggctgaacagggctgccgtgacagcgcctggacgcgagatgagatggcgggtcaattactgcatgcacttcatcgaactgatagtcgctgccctcttattattattgaaaatgctcacctgaatcaccgccgcatacttgatgatctccaacgcgcgatatctcttattcctgacggtcaatttttgctgatcggcagacccgatcgaaaagttgaacgtgattttaaaaaacagggcattgaacttgtctcgacaggtcgtctgacggagcacgagcttaaggcaagcatccttgaaggtcagaatattgaccagcccgatctccttttaaccgccagagttctgaaacggatagctttattatgtcggggagatcgcagaaagctggcgcttgccggcgaaacaattagcttattacagcaagccgagcagacccgcgttttcactgcaaaacaatggcgaatgatttaccgcgtattaggtgataagcgcccccggaaaatgcagcttgccgtggtgatgagtggaaccattctcgcacttacctgtggttggctactgctgtcctctttcacagctccgttacccgttcctgcgtggctgatacccgtaacgccagtagttaaacaagatatgactaaggatattgctcatgtggtgatgcgcgatagtgaggcgctaagcgtgttatacggcgtatgggggtacgaggttccagccgattcggcctggtgcgatcaggcagtaagagcggggctggtatgtaaaagtgggaacgcttctttacaaacattggtagatcagaatttgccctggatcgcatcgcttaaagtcggggacaaaaaattgcctgttgtggtcgttcgcgtcggtgatgctaccgttgatgtactcgtagggcagcaaacctggacgctgacacataaatggtttgagttggtatggacgggtgattatcttctgttgtggaaaatgtcgccggaaggggagagtaccattacgcgtgatagcagcgaggaagagattctctggctggaaacgatgttaaaccgcgcattgcatatttcgacagaatcttcggcagagtggcgtcccttgttggtagaaaaaataaagcaatttcaaaaaagccatcacttgaaaactgacggtgttgttggcttttcaacgttagtacatctctggcaggtggcgggggagagtgcctacttatatcgggatgaagcaaatatttccccagaaacaacagtgaaggggaaatga

SEQ ID NO: 11783 - DNA, 735 bp, Escherichia coli
gtgaaagtcatcattgttgaagacgaattcctggcacaacaggaactgagctggctaattaaagagcacagccagatggagattgtcggcacctttgacgacggtctggacgtgttgaagtttttgcagcataaccgcgttgacgccatttttctggatatcaatattccgtcgctggatggtgtgttgctggcgcaaaacatcagccagttcgcccataaaccgtttattgtgttcatcaccgcgtggaaagaacatgcggtagaagcgtttgaactggaggcgtttgactatattctcaaaccgtatcaggagtcacgcattaccgggatgctgcaaaaactggaagcagcctggcaacaacagcagaccagcagtacgcctgccacgacggtaacgcgtgagaatgacaccattaatctggtgaaagatgagcgaatcatcgtcacgccaattaacgatatctattacgccgaagcgcacgagaaaatgacctttgtctatacgcgacgtgaatcctacgtaatgccgatgaacattaccgagttttgcagcaagctgccgccgtcgcattttttccgctgccatcgctcattttgtgtcaatctgaacaaaatacgcgaaatcgaaccgtggtttaataacacctacattctgcggctgaaagatctggattttgaagtgccggtcagccgcagcaaagttaaagaattccgccagttaatgcatctgtaa

SEQ ID NO: 11784 - DNA, 204 bp, Escherichia coli; identical to SEQ ID NO: 8890

SEQ ID NO: 11785 - DNA, 822 bp, Escherichia coli
atgcgattagcaagtcgttttggttatgctgcaaaccagatacgtcgtgaccgtccactgacacatgaagagctgatgcaccatgtgccggggattttcggggaagagaaacacacgtcccgaagccagaactatacgtacatccccaccatcaccgtactggaaagcctgcagcgggaaggctttcagccattcttcgcctgccagacccgtgtgcgcgacccgggccgccggggatacaccaaacacatgctgcgtctgcggcgggccggagagataaacggagagcatgtccctgaaattattctgctcaactctcatgacggtacctccagctaccagatgctgccgggttacttcaggttcgtctgccagaacggctgcgtctgtggtcagtctctgggggaagtgcgtgttccacaccggggagacgtagtggagaaagttattgaaggggcttacgaggtggtgggcgtgtttgaccggatagaggagaagcgtgatgccatgcagtcgctggtcctgccgccaccggcacgccaggcgctggcacaggcggcactgacttaccgttatggtgacgaacatcagcccgtcaccaccgccgacattctgacgccacgacgccgggaggattacggtaaggacctgtggagtgcttatcagaccatccaggagaatatgctgaaaggcgggatttccggtcgcagtgcaaaaggaaaacgtatccatacccgggccattcacagcattgataccgacattaagctcaaccgtgcattgtgggtgatggcagaaacgatgctggagagcctgcgctga

SEQ ID NO: 11786 - DNA, 147 bp, Escherichia coli; identical to SEQ ID NO: 8534

SEQ ID NO: 11787 - DNA, 222 bp, Escherichia coli
atgaaaatcatcacccgtggtgaagccatgcgtattcaccgtcagcatccggcatcccgtctttttccgttctgcaccggtaagtaccgctggcacggcagtgctgagacgtataccggtcgtgaagtacaggatattcccggtgtgctggccgtgtttgctgaacgccgtaaggacagttttggcccgtatgtccggctgatgagcgtcactctgaactga

SEQ ID NO: 11788 - DNA, 1380 bp, Escherichia coli
gtggggcttatcagtgacataggcagtcaggtggcggatattgcgcgtacacagggagaactgaatgcgttgaaggccgcgaaggaagcaaccggcgaaacacttcctgctaatgcaacagagaaacaacgtcaggaatatcttgcgaaactgcgtgacacgcaggcttacaggaatgaaatggcgaagtatggtaccggcagtgaaattcagcggggtatccaggccgcgacagccgcgcttcagggactggcgggtggtaatttagcgggtgctctggccggagcttctgcaccggaactggcgcatctgctgaaatcaacagaaaaagacccggcagtaaacgccattgctcacgccattctgggcggtacagtagcggcaatgcagggtaataatgttgctgctggtgcagcaggcgcagcaacgggagagctggcagccagagcgattgccggaatgctgtatccgggagtgaagcagtcagacctcagtgaagagcagaagcagacgataagtacgctggcaactgtgtcagcagggctggccggcggtctaaccggaaacagcaccgcatcagcagcagtgggagcacagagcgggaagaatgctgttgagaataactacctgagcgtgtctgaaaagacagaacttgagatagcaaaacagacgcttaaaaacagtaaagatccggcagagcgtgaaaaggcacagcagaaatatgatgcattgcttgaaaaagatattgccagtgataaggaggttattgctgcctgtagtaatggtaatgcgagtagttcagcgtgtgccagcgcaagactgaaagttattgcgtcgaaagaagggtacgaagatggcccttataactcgaaatacagccagcaatacgctgatgcgtatggtcagatagtcaatctcctcgatatcaccagtgttgatgcacagaatcagcagcaggtgaaaaacgccatgattaactatttcatggtcaccaaaggggtggatcgtcagaccgcagaaagctacaccgaaacaacgcagggcttggagatcattgcggcttcggtaacgcctcttatagggcaagctgcatcaaataaattaagctaccttggtattgggaaaaagatatcctttgatggtgatttttatactgtagatggaatgaaattcagcaaaagttattatgagaaattatgggagcaaggcagacctgcgccattcgtgcaagcaagagaagtgttgaatagcaatccaaaaattgagccggatcctagaggcgcacctggctacttaagatatgaaggtgcaggtcttgaaatgatctataacccgaaaacgggacaagttggtcatattcaaccagtcaaggttaaataa

SEQ ID NO: 11789 - DNA, 270 bp, Escherichia coli
atgtttacaaatttaggtattgcagggttggttccaaaatttatatatgattactttccaacaaaattaagaggattagggaccggtcttatttataacttaggggcaactggaggaatggccgcacctgtattagctacatacatttctagatattatggcttaggtgtttcattattcattgttacggttgcattctctgccttattaattttgttagttggttttgatattccaggtaaaatttataaactatccgtggctaaataa

SEQ ID NO: 11790 - DNA, 213 bp, Escherichia coli
atgttggtgatcgtgaacaaagctgagttttacgctaccgtagatctttctgctgatgacctgaaggaactgctggcagaatggcagcattactataactgggaacgtcctcatagcgctcacaacggtaaaactccgatggaacactactttgaacttgctgagaaaattgaaacgatgtctatgaatcacacaaatgacataacattatga

SEQ ID NO: 11791 - DNA, 222 bp, Escherichia coli
atggactggtccggcagccggtactcgctgctgttcgaattgttcgtgctctcatggctaaaaatcagcaccgttgatgccgtcaggaaacaacttaaaattagctggaatgccgttgacggcattatgactcgtgtggttaagcgcggtctgtcccggatgaaaaagcctttattagcacgtcatatgaatgtagacgaagtcgcctttaaaaaggtatag

SEQ ID NO: 11792 - DNA, 1953 bp, Escherichia coli
atgaagggactcaataaaatcacctgctgcttgctggcagcactactcatgccttgtgcaggacacgctgagaacgaacaatacggcgctaacttcaataacgccgatatccgccagttcgtggaaatagtgggtcagcatcttggcaaaacgatcctgatcgacccttcggtacagggaaccatttccgtacgcagtaatgatacgtttagccaacaggagtactaccagttctttttaagtattcttgatctttacggttattccgtgatcacactggacaatggttttctgaaagtggtgcgctcagctaatgtaaaaacatcgccagggatgattgctgacagttctcgtccaggcgtaggtgatgagttggtcacccgaatcgtaccgcttgagaacgttcctgctcgtgaccttgctcccctgctccgccagatgatggatgcgggtagcgtcggtaatgttgtgcattatgaaccctccaacgttcttattctgaccggtcgtgcctccaccattaataaactgattgaagtcataaagcgcgttgatgtcatcggcacagagaagcagcaaattattcatctggaatatgcatcagcggaagatctcgccgagattcttaatcaattaatcagcgaaagccacggtaaaagccagatgcctgccctcctttccgcgaagattgtggcggataagcgaaccaactctcttatcatcagcgggccggaaaaagcacgccagcgcataacttcattactgaaaagccttgatgtagaagagagcgaggaaggaaatacccgggtctattacctgaaatatgctaaagccacgaatctggtggaagtgctaaccggtgtttccgaaaagctgaaagatgaaaaagggaattcgcgtaagccttcttctacttctgcgatggataatgtggccattaccgccgatgaacagaccaactcgttggtcattaccgctgaccagtccgtccaggagaaactcgccacggtaattgcgcgtctggatattcgccgtgcacaggtgctggttgaggcaatcatcgtcgaagttcaggatggaaatggactcaacctcggcgtgcaatgggcgaataaaaacgttggcgcacagcaatttaccaatacgggattaccggtttttaacgctgcgcaaggtgtagctgattataaaaagaatggcgggatcaccagcgcgaatcctgcctgggatatgtttagcgcctacaatggcatggctgcaggcttcttcaatggcgactggggcgtattgttgactgcgctggccagtaacaataaaaatgacatcctcgccaccccgagcatcgtaacgctggataataaactcgcgtccttcaacgttggtcaggatgtgccggtgctatccggctctcagaccacttctggggataacgtctttaatactgtcgaacgcaaaacggtgggcacaaaactcaaagtcactccgcaggtcaatgaaggcgacgcggtactgctcgaaatagagcaggaggtttccagcgttgactcttcgtctaattcgacgctcggcccgacatttaacacccgtactattcaaaacgccgtgctggttaaaaccggtgaaacggtggtcctgggcggattgctggatgatttttctaaagagcaagtgtcaaaggttcctctgcttggcgatattcctttagtgggacaactcttccgctatacctcgaccgagcgcgctaaacgcaacctgatggtatttatccgcccgacgattatccgtgacgatgatgtttatcgctcactgtcaaaagagaaatacacccgctaccgtcaggagcaacagctgcgaatcgacgggaaatcaaaagcgctggttggctcggaagatttgccggtgctgaatgagaacacgttcaacagtcacgcccctgcgccatcgtcacggtga

SEQ ID NO: 11793 - DNA, 1482 bp, Escherichia coli
atgagaattcactcaccgtaccccgccagttgggcgctggcacaacgaattggttatctctattcagagggcgagattatttatctcgccgatacgccattcgaacggttactcgatattcaacgtcaagttggccagtgccagaccatgaccagcttgtcacaggctgattttgaagcccgactggaagcggtgttccatcagaataccggtgagtcgcaacagattgcgcaggatatcgatcaatccgtcgatcttctctcgctttcggaagagatgcccgcaaatgaagatctcctgaatgaagattcagcggcaccggttatccgcttgatcaatgctattttgagtgaggccatcaaagaaaccgcctccgatatccacattgaaacctatgaaaaaacaatgtcgatccgttttcgcatcgacggcgttttgcggacaattttacagcccaacaaaaaactggcggcactgcttatctcccgaattaaggtcatggctcgtcttgatatcgccgaaaaacgtattccacaggatggaagaatcagtttgcgtatcgggcgacgtaacatagatgtccgcgtatccacactgccatccatctatggtgaacgcgctgtgctccgcctgctggataaaaacagcctccagctttcattgaacaacctggggatgacggcagcggataaacaggatttagaaaatctcattcagcttccgcacggtattatcctggtaacagggccgacaggctccggtaaaagcaccacgctctacgccattctttcggcgcttaatacccctggccgtaatattctgacggtagaagatcccgtggaatatgaactggaaggcataggacaaacgcaggtgaatacccgcgtggatatgtctttcgctcgcggcctgcgcgccatacttcgccaggacccggatgtcgtcatggtgggggagattcgtgatacagaaaccgcgcaaattgcggttcaggcctcgctcacaggccatctggtactctcaacactccacactaacagtgcatcaggcgcagtcacccggctacgcgacatgggcgtcgaatcattcctgctttcgtcttcactggcagggattatcgcgcaacgtctggttcgtcgtctgtgtccgcaatgtcgacaattcacgcccgtatcgccccagcaagcgcagatgtttaaatatcatcagctcgcggtgacgacaattggcactcccgtaggctgccctcattgccatcaatccggctaccaggggcgcatggcgatccacgaaatgatggtggtgacgccggaattgcgggccgctattcatgaaaatgtggatgaacaagcactggagcgactggtccggcaacaacacaatgccttaatcaaaaatggcctgcaaaaagtgatacgcggtgacacctcctgggatgaggttatgcgcgtcgccagtgccacgctggagaacgaagcatga

SEQ ID NO: 11794 - DNA, 750 bp, Escherichia coli
atgctcaaaaacattgctgttcttgcagatgagaaaagcaagattgaggaaaatattcctaaattgaatcaaaagctagaagagtcaagggctgcttcagaggcgttgcaggcgctgattttagaaactcaatcggaaataacgcttcatgatgttattaaatctgccgcataccatgaaattgaatctacttttatttcacagttagatgagttattcgttgagattggtcgaaaagaaggcgagttgacagaattacaagaagaattagaagtatacaatgataagaaaagaactgttaaaataaatgactgtttcaaagagtatttcgctaaagctcttaaagagcttggtgtcgaaaatacaaaggtaggtggccttagtagttataataatattactaagggtaagactggtagtcgaggtcctcgaggtatatttgcatttcactacgcgctgcttagtgttatgaaaagcaactcttcagttgagaatatgcctatagtaatagactctccaaagcaacaagatttggatccagagcatacgcataagcttataaaactatgcttggatgggttttcccttacaaatcagattattattggaactgttggttatgagagtttcatggatggttttaatagcatcaaacttgaaaataaatatcatcttttaaatgatgaacattatgataatgtttattctcaattaatgccattgtttgaacgggtgatactttcaagatga

SEQ ID NO: 11795 - DNA, 741 bp, Escherichia coli
atgtcaggggcagttaacagtatactggaggtgaaatcaggcagaacagaatatatcctctcaccggtttttgagcctgtatggaatcagaccgggaaaatatttgcttttgaaatgctctcggatatccgttcagcaaaagacgggaggaaaatctgcgcatctgtttttttcagaagtgtacctccggatattcagtacaaaatactcatcagtcagttgaagactgcggaaacgcttcataaatggtgtctgcagaagaaaataatgctgagtgtcaatatttcccgggtggtagccctgtatctgagaaaacatggcatcccggggcggccgggaacacatatcaggcttgaggtcagtgaggactttccggcagtggcgttaaaacccggtgatgaccccctgttacgttttttgtcagaacgtttcaccctctggctggatgatttcggctcaggaaatgcaggcttaatgtggggactgtccgggatgtttgaacgggtaaaaataagtcatgagttttttcattatgccctgaaaaacaggagtgcaatgccgcttctccatgctgtggcagacactgttgcctgtcataaccggggcgtgatacttgaaggtgttgaaaatgaagcgttgttccgtattgccagagacatgaatgtccagggctgtcagggatggctctacaggcgtgtgggagctgatgaattatccgcgattactgagctgcatggataa

SEQ ID NO: 11796 - DNA, 546 bp, Escherichia coli
atgaagttaaaattcatctccatggctgtattttcagccctgaccttgggtgttgcgacaaatgcgtctgctgtcaccacggttaatggtggtacagttcattttaagggggaagttgttgatgctgcatgtgctgtaaacactaattcagcaaatcaaacggttttgctggggcaagttcgttcagctaagttggcgaatgatggagagaagagttcccctgttggatttagtattgaacttaatgactgtagttctgcaactgccgggcatgcatcaattatctttgcaggaaatgttattgctacacacaatgatgtgctgtctctacagaatagtgctgcaggtagtgcaacaaatgtaggtattcagatattggatcatacaggtactgcagttcaatttgacggagtgactgcatctacacaatttacattaacagatggcaccaataaaattcctttccaggcagtttattatgcaacaggtaagtcaacgcctggtattgccaacgccgacgccacctttaaagttcagtaccagtaa

SEQ ID NO: 11797 - DNA, 1029 bp, Escherichia coli
atgggattgtttacgacccgccagttactcggttataccgaacaaaaagttaaatttcgtgcgctgtttctggagctgtttttccgccgtacggtgaatttccataccgaagaggtgatgctggacaaaattaccggaaaaacgccggtggcggcctatgtctccccggttgttgaaggaaaagtgctgcgtcatcgtggtggtgaaacccgcgtgttgcgtccgggctacgtcaagccgaaacacgaatttaattaccagcaggcggttgagcgccttcctggtgaagatccatctcaactgaacgatccggcttaccgccgtctgcgtatcattaccgataacctcaaacaggaagagcacgcgattgtccaggtggaagaaatgcaggcggtaaatgctgtgttgtatggcaaatacaccatggaaggagaccagttcgagaaaattgaggtcgattttggcaggtcgacgaagaataacatcactcagggtagtggtaaggagtggtcaaaacaggatcgtgacacgttcgatcctacacatgatattgacctctactgcgacctggccagcggtcttgtgaatattgccattatggacggtaccgtctggcgtctgctgaatggttttaagctgtttcgcgaaaaactggatacccgtcgcggttcaaattcacaactcgaaacggcagtgaaagatctgggcgcagtggtgtccttcaaggggtattacggcgatctggccattgtggtggcgaaaacgtcttatatagcagaagacggtatcgaaaaacgttatcttccagatggcatgctggtcctggggaatactgctgcagatgggatccgttgttacggtgccattcaggatgctcaggcgttgtccgaaggtgtggtggcctcttcccgttatccgaaacactggctgacggtaggggatcccgcccgtgaatttaccatgacgcagtccgcgccgctgatggtgttgccggacccggatgagtttgtggtggtacaggtgaaataa

SEQ ID NO: 11798 - DNA, 4131 bp, Escherichia coli
atgaataaaatatacgctctaaaatattgttatattactaacacagtaaaggttgtctctgaactagcccgaagggtatgtaaagggagtacccgcagaggaaaaagactttcagtacttacctctctggcactatctgcattactcccaaccgttgctggtgcatcaacggttggtggcaacaatccttaccagacataccgcgactttgcagaaaacaaagggcagtttcaggctggcgcaacaaacattcctatttttaataataaaggggaattagtaggacatcttgataaagcgcccatggttgattttagcagtgtgaatgtaagctcaaatcccggcgttgcaacattaattaacccgcaatatatagccagtgtaaaacataataaaggatatcagagcgtcagcttcggtgatggtcagaacagttaccatattgtggatcgtaatgaacacagttcatctgatctccacacaccaagacttgataagctcgtaactgaggttgctccggctaccgtaaccagctcatcaacagctgatatattgaacccttcaaaatactcggcattctacagggctggttcgggaagtcagtatattcaggatagtcagggtaagcgacattgggtaacaggtgggtatggttatctgacaggaggaatactcccgacatcattcttttatcacggctcagacggcattcagctgtatatggggggcaacatacatgatcatagcatcctgccctcttttggagaggccggcgacagtggttctccattatttggctggaatacggccaaagggcagtgggaactggtcggtgtttactcgggagtaggaggggggaccaatttgatatattctcttattcctcagagttttctctcacagatctattcagaggataatgacgctcccgtcttttttaatgcctcatccggcgcccccctgcaatggaaatttgacagcagcaccggcactggctctctgaaacagggttccgatgaatatgccatgcacgggcaaaaaggttctgacctgaacgcaggtaaaaatctgacattcctgggacataatggtcagattgacctggaaaactctgtcacgcagggtgccggttcactgacatttactgatgactacactgtcaccacttcaaacggaagtacctggaccggggccggtattattgtggacaaggatgcctccgtaaactggcaggttaatggtgtgaaaggtgacaacctgcataaaatcggcgaaggaaccctggttgtacagggaaccggtgttaatgagggcggcctgaaagtcggggatgggaccgttgtcctcaatcagcaggctgacagttcaggacacgttcaggcattcagtagcgtgaatattgccagcggccgcccgacagtcgtgctggcagacaaccagcaggttaatccggacaatatatcctggggctaccgggggggtgttctggatgttaacgggaatgacctgacatttcataagctgaatgccgccgattatggcgcaactctcggtaacagcagtgataaaacggctaatatcactctggattatcagacgcatccggcagacgtaaaagttaatgaatggtcatcatcaaacaggggaacagtaggttcattatatatttataataatccctatactcataccgtcgattattttatcctgaaaacaagtagttatggctggttccctaccggtcaggtcagtaacgagcactgggaatatgtcggacatgaccagaacagtgcacaggcgctgcttgcaaacagaattaataataaagggtatctgtatcatggcaagttgctgggaaatattaatttctcaaataaagcaaccccgggtacaaccggcgcattggttatggacggctcagcgaatatgtccggtacatttactcaggaaaacggtcgtctgaccattcagggccacccggttatccatgcttcaacgtctcagagtattgcaaatacagtctcgtctctgggcgacaattccgttctgacacagcccacctcatttacacaggatgactgggagaacaggacgttcagctttggttcgctcgtgttaaaagatacagactttggtctgggccgcaatgccacactgaacacaaccatccaggcagataactccagcgtcacgctgggcgacagtcgggtatttatcgacaaaaaagatggccagggaacagcctttacccttgaagaaggcacatctgttgcaactaaagatgcagataaaagtgtcttcaacggcaccgtcaacctggataatcagtcagtgctgaatatcaatgatatattcaatggcggaatacaggcgaacaacagtaccgtgaatatctcctcagacagtgccattctggggaactcaacgctgaccagtaccgccctgaatctgaacaagggagcaaatgctctggccagtcagagttttgtttctgacggtccagtgaatatttctgatgccaccctgagtctgaacagccgtcctgatgaggtatctcacacacttttacctgtatacgattatgccggttcatggaacctgaagggagacgatgcccgcctgaacgtggggccgtacagtatgttgtcaggtaatatcaatgttcaggataaagggactgtcaccctcggaggggaaggggaactgagtcctgacctgactcttcagaatcagatgttgtacagcctgtttaacgggtaccgcaatacctggagcgggagcctgaatgcaccggatgccaccgtcagcatgacagacacccagtggtcgatgaacggaaactccacggcaggaaatatgaaacttaaccggacaatagtcggttttaacgggggaacatcatcgttcacgacactgacaacagataatctggacgcggttcagtcagcatttgtcatgcgtacagaccttaacaaggcagacaaactggtgataaacaagtcggcaacaggtcatgacaacagcatctgggttaacttcctgaaaaaaccctctgacaaggacacgcttgatattccactggtcagcgcacctgaagcgacagctgataatctgttcagggcatcaacacgggttgtgggattcagtgatgtcacccccacccttagtgtcagaaaagaggacgggaaaaaagagtgggtcctcgatggttaccaggttgcacgtaacgacggccagggtaaggctgccgccacattcatgcacatcagctataacaacttcatcactgaagttaacaacctgaacaaacgcatgggcgatttgagggatattaacggcgaagccggtacgtgggtgcgtctgctgaacggttccggctctgctgatggcggtttcactgaccactataccctgctgcagatgggggctgaccgtaagcacgaactgggaagtatggacctgtttaccggcgtgatggccacctacactgacacagatgcgtcagcaggcctgtacagcggtaaaacaaaatcatggggtggtggtttctatgccagtggtctgttccggtccggcgcttactttgatttgattgccaaatatattcacaatgaaaacaaatatgacctgaactttgccggagctggtaaacagaacttccgcagccattcactgtatgcaggtgcagaagtcggataccgttatcatctgacagatacgacgtttgttgaacctcaggcggaactggtctggggaagactgcagggccaaacatttaactggaacgacagtggaatggatgtctcaatgcgtcgtaacagcgttaatcctctggtaggcagaaccggcgttgtttccggtaaaaccttcagtggtaaggactggagtctgacagcccgtgccggcctgcattatgagttcgatctgacggacagtgctgacgttcacctgaaggatgcagcgggagaacatcagattaatgggagaaaagacggtcgtatgctttacggtgtggggttaaatgcccggtttggcgacaatacgcgtctggggctggaagttgaacgctctgcattcggtaaatacaacacagatgatgcgataaacgctaacattcgttattcattctga

SEQ ID NO: 11799 - DNA, 1320 bp, Escherichia coli
atgacttttactattacacaagacagacaattggcttcattgaccgttactaaagaagaaaaagaaatcttatttgctgtaaaatctaaagctgggggaggactctttatacgcgttcgttatggtagcgacaataaaagctggatttatcgttatcgaatagctcaaaagccagctaaattaacactaggtagttaccctgccatgggattagctcaagctcgtaaagctcatgcggatgcaattgaattagtaagaaaaggtatagatcctcgtcatattagaaaaaatgaaaaacaaaaaaatgaacaaatgattatttactctgaattatggaaagattggatagaattcagaaagacaagcaaaccaattagcaccagaacccttgcagattatgaagggacttatcaccgccaccttgaaaaagcattaggaaaccttcgcattgacgaacttaccaaaagcgttatttttgaacatctcagtaatgtaagaaaaaccagttctgaagcagttcgtaaaggattaattattctaaatatgactcttgatcatgccaacttacagggtatgcttgagcataacccagcacgactgctcaaaccagcaatgtttggtgcatcgatgaataaacctcgcgagcgatggcttcctgagaatgaactccggatgctatggaaggctttggatgatgctactgttggaggaggctccattgcatctggtggctatggaatttcctctagtgtggtattatctcattctgtcgcaaatgcactccgtttgattattttcacaggagtgcgccgctctgaagcggcacaaatgcgctgggatcaaattaatggagagcgttggaccataccagccactaaaaatgggaaaagccatattgttactttacatccgtatatgctttctttaataaaaacacaacgtgaattcactgaaggtgcatatgtttttggttctactagcaaacctgactttcccatcacaaatgacgctctgactcgcgcgttagaaagggttcgctctaagtatctagccgaacttactccattttctcctcatgatctgcgtagaagtgttgcgactggatgcgctgaataccttgatgctccagagcgcctaatagagttactgttaaatcatgtacccaaagaccgtttaatacgaacatatcaagtcggacaacaagctgaaaaattaaaaaatttatttatagaatgggggaattttattatgaataacgtcattactgtgcagcagaatgctccggataatgttattcatataaaatttgggaacagatga

SEQ ID NO: 11800 - DNA, 825 bp, Escherichia coli
gtggtcaacggacatacggacgttatcggctcaaccagtatccgccacattctggctgtacgacagagtacattgctgcaaatcgacacacttatccggcaactggctgaaatctcagcaatgacagtaagtattggcggtaaaactgcactggactgggccatgaaacaggattttcgctgcggtttctggctgatggagaaacctgaaatcgcaatgaaagccatcacccggaatctcgatcgcgaactctggcgtgacctgatgcaacgttccgggatgctttccttaatggatgcacaggcccgtgagacatggtaccggtcactggagtacgataatgtcccggaaatcagtgaagcaaacattctgaacacatttaaacaactgcaccagaataaggatgaggtgtttgagcgaggggtgatcaacgtcttcaggggactgaactggaattacaaaaccaatttaccctgcaaatttggcagtaaaattatcgtcaacaatctggtgagatgggaccggtggggatttcatattgtcaccggacagcaggctgaccgggttgctgacctggaaaggatgctgcacctgttcagcggctggcccatccccgacaaccgggaaaatatcatcatccgtctggatgaccacattcagtccgctcagggtcaggagtgctatgaatatgaagatgagatgttcagcatcagatactttaagaagggctccgcgcacatcacgttcagaaaaccggaactgattgatcggctaaatgacatcattgcgaagtattatccagaaataatcccatacaatatctaa

SEQ ID NO: 11801 - DNA, 369 bp, Escherichia coli
gtgtcagacgcactctccgggacaatgcttcccgacgacaatcacgaccgcccctggtgggggctgccctgcaccgtgacgccctgtttcggggcacgtctggtgcaggagggtaaccgcctgcattaccttgccgaccgcgccggtatcagaggcctgttcagcgatgcagatgcgtaccacctggaccaggcctttccgctgctgatgaaacaactggaactcatgctcaccagcggtgaactgaatccccgccatcagcataccgtcacgctgtatgcaaaaggtctgacctgcaaagctgacactctcggtagcggtggttacgtttatctggctgtttatccgacgcccgaaacgaaaaagtaa

SEQ ID NO: 11802 - DNA, 1254 bp, Escherichia coli; identical to SEQ ID NO: 64

SEQ ID NO: 11803 - DNA, 447 bp, Escherichia coli
atggggaagatgcttttatccggattggatctatcgcgatggtgcgagtaccacttgatgcaatggagcctgtcgaggcagatgacgagtaacagagctcggtatctcaatcaggacctgattgtcctggttcgatgccgaaaaccagtgatttttcgtgttggtatctgtgttggtataggatggtgttgtttattattaacaattttaaatcatgaggttaaatcgcatgttcgagtccggccttcgaccacaccgtatgcaaatcgagtcgctcaagagcggctttttttgtgtctgaaatcacccatatccgtgcagtatataggcctgccagaaaagcagttcagtattcttcattttgtagtcgatggtcccaagtttgctctggctggaagctgcatcgtccacattacgtgggcagggtggtttcgctatgctacttga

SEQ ID NO: 11804 - DNA, 2037 bp, Escherichia coli
atggaaaaagtttatgataccactagaattagtaatcttgctaacgacccgaaacagttttgttcttttttttgtgagtacataaaaagagatgatattagtatagatatcgccttggatgtgctgagaatatcttccatctattataatagattttcagttcagactgaagttgagtataacaatacattcaaaaaatgtattaatgagctagtaaactcatttcctgataacattgaactaatctctgagttcgagagtcaatgtaaaattatgcatgatataaataattctttctttgcggctacaaaatgtgctggtatttggcgtaaaaatacaaaaaaatcacatgcattaatacttaatctcatcatgttttgtgagatgtttttatcatcattatcatccttggttgtggtcaatgatcctaaaaaaatgaagaggatttttccattatttatcgtttctgaaaatattaatattcatgctgaacctgatatcgaatattttcgagttatcgatagggcatttgatgaggtagccaattacaccggaagaatattttcttatttacggactcatgggccattgaaactaacttcttgtgtgaataaacaaaccttgctttcaatgggagggtaccttaatgagtggaatgtttttgactcattaagcagagtaagagactttttcagactaagtagtgcagtatttacaaaattggataataacatttactctcttgaggttgatagtttttgtttataccgagattatgagattgcaagaaatagactaatgatgagagcgtcacatctatatagcgaagttcatgaatttagtaacaaacattttcatctaaatagttgggtaaaggatcatatgccatcttacttaaattctgatggcgtttttagctcatttcatctaagcgagttggaaaatatgtctcctgatgaccttcatgaagaatatgggaatatatcattatttaattgggtgcacgcttatcaatgtttagtcgagttatctaaagaagaaatgagcaaaagattttcatcgacaaaacctatacccctacagttggatcgctggctgatcataaaaagccgtgagagttggttatcattctttcaacgtaaggggattgcagcagatgcagcaaaaaaactgatagattattttaccttcaattcaaaatcacatgatcttaatgattgcccatttattccctgtatggacggtttatgcttaatgcctgcattaatagcaaatagctcagtgactcgctctctaatgtcattatttggttccaaaaaaatttctcaagcaagtaaagggcgatttcatgagcaacaatttataaaacgagttcgtgatgcggggattaaagcttctccaattgatgctcatgctaattatcagtgtgattgcgtgattctcctggatgattgtttgatttttacagaactaaaatcaaatggtcaaccaatatattatggtaagtactatcagcaagtgtgtaacatcgttggagatagctcattaatacatgatcataataataaatttatgcgttcttattttcaacaaataaatcgaatttctgaacattatcttaatcatcttgatgtgatcattaaagaattcgaactaccatcaacatggcaacccaaaggtgtgtataagcttattgttactacaactatgctcggtgggaaatatcatgtggatgatacatatgtagcggataaatatgcattatctagtttttttcaacgaatacctggagtgatatatcaaacaaatgaaaatggaaaaatggcgaaaaatatcattgatgggtttgagtgttgcgaaggggaaatcactatcgataagtttatagattatctttcctctttgcccagtattaatgctgtacgtaaaaatataaaaaaattaacttatagtgttcgatttaatgaaaaattagtccatcacccttattatgattcttgggcttttggtccatatattcgtaagggaaatgattag

SEQ ID NO: 11805 - DNA, 351 bp, Escherichia coli
gtggatcactattgcaccgttcgtgacagtaatggtcagatatcaatcctgattccgattgaaatgctacgaagtgcttatattgagcgcggcctacatccaaaaaatctggcaaggactgtagaagactctgccaccatatttgaaccaattctgccctggactgccgcgggtgcctacatggcaggtacacttggcgttgctacattaagctatcttccgtgggctattctctgctggagtggcattttctttgcgacgctgtgggggttcacaggctttggtatcgctcgactgtccaaagaaaagcagcaacagctcatgatggaaaccataaatgaaagcaaatag

SEQ ID NO: 11806 - DNA, 354 bp, Escherichia coli
gtggctgatttcgataacctgttcgatgctgccattgcctgcgccgatgaaacgatacgcgggtacatgggaacgtcagccaccatgacatccggtgagcagtccggtgctgtgatacgtggtgtttttgatgaccctgaaaatatcagctatgccggacagggcgtgcgcgttgaaggctccagcccgtccctgtttgtccggactgatgatgtgcggcagctgcggcgcggcgacacgctgatcatcggtgaggaaaacttctggatagaccggatttcgccggatgatggcggaagctgtcatctctggcttggtcggggcgtaccgcctgccgttaaccgtcgccgctga

SEQ ID NO: 11807 - DNA, 618 bp, Escherichia coli
gtgagcgagattgattatcaggcgttgcgtaaggcagcacaaaactatcaatcgacgctggcgtggtatgaggccatcacggataacccaaatgctgagcaggattgtagcgaagcagtggcggcgtttaagtgtcaaattcgtcatcgggaaatggatattatcgccgatctgctggatgaactggacgaaaaacagcattacatcaaactccgcgatcaggaaaacgaggaaattgcgctaacggtagggaaactgcgtgttgagcttgaggaagcaaaatcaaaactcaacgagcaacgcgagtattacgaaggtgttatctcggatgggagtaagcgtattgcagaactggaagcacgggaaataaaaccagccaaaggtgaagttcttgtcgttgtctctggttttactggttgcgggaaaagcgccattgccggggaaatagaaattgcgatgaaagctattggtgtgccggttcaatggactaatggcgatgcagaaaagcatatgaccggcgctgactggctgacagcgattgagatgtacaaaccaactgtgcgcatcgtggaagttaatgtgccacgcgtcgctggcatccgcatcaaaggagagtga

SEQ ID NO: 11808 - DNA, 537 bp, Escherichia coli
atgtcatttattaaaactttttccgggaagcatttttattatgacaagataaataaagacgacatcgtgattaacgatatcgcagtttccctttcaaatatctgtcgctttgcaggacatctttcacacttctacagtgtcgcccagcatgcggtgctttgcagcaaactggtgccgcaggaatttgcttttgaagcgttaatgcatgatgcaacagaagcatattgccaggacatccccgcgccactgaaacgacttcttcctgactataaacggatggaagaaaaaatagacgccgtaatccgtgagaaatacgggttacccccagttatgagtacgcccgtgaaatatgccgatcttatcatgctggcaaccgaacgccgcgatctcgggcttgatgatggctctttctggcctgtactggaaggcatcccggcaacagagatgttcaaagttattccactgtcaccaggccatgcctacgggatgtttatggaacgttttaacgagttatcggagttacgcaaatgcgcatga

SEQ ID NO: 11809 - DNA, 192 bp, Escherichia coli
atgaccaaagaagaaaaaattctttatttattccaactatcggttaagactcacactgcatatcagactgctgccatgacatcagataaaaattacagtacgtcagaaaacccgatagacgacataagcaagctttacgataagttcgaagcactactcgataaaaagtttgctgaggctgggcttgagtga

SEQ ID NO: 11810 - DNA, 993 bp, Escherichia coli
atgagcctgttaatgacatcccagcccattgtgataaatcgtgatcttgcatgccgtattggtctgaatgaggcaattgtgttgcagcagcttcattactggctgaatgaaacgaattcaggcactgagcatggcggaattcgctgggtttataacacgacagaacagtggctggagcagtttccgttctggtcagagtccactctgaaacgcacatttgcaagcctgaaatcacttggggttttgcgtcgcgagcaactcaataaatcgaagcgtgacatgaccaacttctacacgatcaactatgaaagtgagcttttagaagaggtcaaagtgaacgaatccatcaggtcaaaatgcacttctccatcgggtcaaagtgacctgatggatgggcgcaaaatgatacgatccattggttcaaaacgacacgctgtcatcgggtcaaaatggcccaatgatcttacagagaatacaacagagattactacagagaataaaacctcttctcgtccggacgcttcgcaaccggacacgcagacggctgaacaggagtttttaactcgccatcctgatgcggttgtattcagtcctaaaaagcgccagtggggaacgcaggatgatttgacctgcgcacagtggctctggaaaaaaatcatcgccctgtacgagcaggccgccgaatgtgacggcgaggtggttcgtcccaaagaacctaactggacagcctgggcaaacgaaattcgcctgatgtgtgtgcaggatggtcgtactcacaaacaaatctgcgagatgtacagccgcgtcagccgcgatccgttctggtgccgtaacgtgctcagtccgtcgaagctgcgggaaaaatgggatgagctttccctgcgcttatcgccgtccgtcagcacatacacagaaaaacgcgaagacccgtatttcaaatccagttacgacaacgtggactacagccagatcccggcaggattcagggggtga

SEQ ID NO: 11811 - DNA, 393 bp, Escherichia coli
atgaaattattccacggcacttataaaaaaacagcaccaataatcaaacttggtgagttcgcaatgtctggcaataacgtttttgatgggttgttttccagcccggagcgcgatattgccgccagccacggaaatgctgtattcatataccatgttgatgacgataaaatagctaaatcctgcgatcttgatgctcgctttcaagaggtttatgccttcttacgtaacgaactggatactgctgacgtagaggaaatagctgatcgcgtcatgtgggataacaattcagatatcgaagatttcgctgatattctctcgccacgcctcggcagcgatattagtggagcatactcatgggaattggggaattgcaacgcctgcgtggtcgtgtag

SEQ ID NO: 11812 - DNA, 252 bp, Escherichia coli
atgatgttcagcggcttcgcccaggtattttctttcgccccccttctatgccctgcaggacattgtataaatataactctgccatacacgttcgtaagcggccctcacggcccgactgcgggtaaatccttcaaccgcgtacagcacattttcattgctgacagaccgtatagccttgcaggacaggaggaactggagaattctaatgcgggaattcattttattcacctttactttgtggattcacaatga

SEQ ID NO: 11813 - DNA, 450 bp, Escherichia coli
atggttaaatttccaggtgaagttatgagttcgtccgctgctgtaaccgttataactggtgttcttgtttttgttggtggtcagctcattgtaaagagcgcgattgaaccttatatagaattcaagaagcaattaggaaaaatatcaaatctgttattatctaaccaagctaaattagctaatccttgtgctgttgaaatatctgaaatcatccatgagttgaaatatgccgcagctcagttaatggcgaagcattcagccttacctttctatatcaaaaaattccatatcggattccgccttgtgccatcaacgtctgaaattattggttcggcgcaaaaattgaatttgatagcatcaatacatgaaggtaaaagcaaggaaagctcatatgagcacatagccgagattggacgtatgctcaaaatcccaaccacgtattctctttaa

SEQ ID NO: 11814 - DNA, 828 bp, Escherichia coli
atgaatgctcaagattatactgatattataagtctttgtgacaaagcaattgatatgttagacgacttttttttatctaaatgtgaaatggatttgagactggtaaaaaatgttgcatttatttttatggatgaaagaaaaattagaacagatgttttagattcgatccccatcccaatgagagcggatttttcacgatgtgttaatcatattaataatgtatgctcatacaccgtttacccgagaaaaaactcggagaccgaggctatctataattgcatttcttatataaaagaagtaattaaccatctaattgaaaaaatcaacacgaataaaaaacatattacagttttttattcatggcagctttcaactcctggaaaatacaataactattttattagagattgtttgcaggcagcgataaaagaaattaatcaattaatccctatcgaagaacgcgatcagaatcacaatattgaagttgatagtgacactcaaggtacatctgggtcaccgcatatattcaatacaattttgaataaaattgacacagcaactctttttattgtcgatatatcaataacatctaaaaaaacatgtaattctaatgtcatgttagaacttggttatgcaataaaaacgttgggcttcaataatataattatgatatttaatacagcgttgggaagtttggatgatttgccttttgatctacgatcacaaagggtttccacatactcttttaaagaaggtgatgataaaaaacaggcgactaaatacctaactagtctgctaaaacaagcaatcagcactgctctccaatag

SEQ ID NO: 11815 - DNA, 273 bp, Escherichia coli
ttgctgaatatacgcgagagcgtactgttgcccggctctatgtctgaaatgcatttttttttactgataggtatttcttctattcacagtgacagggtcattctggctatgaaggactatctggtaggtgggcactcccgtaaggaggtctgcgagaaataccagatgaataatgggtatttcagtacaacactggggagacttatacggctgaatgctcttgcagcaaggcttgcaccttattatacagatgagtcgtcggcatttgactaa

SEQ ID NO: 11816 - DNA, 552 bp, Escherichia coli
atgattaagtcggttattgccggtgcggtagctatggcagtggtgtcttttggtgtaaatgctgctccaactactccacaggggcagggtagagtaacctttaacggaactgttgttgatgctccatgcagcatttctcagaaatcagctgatcagtctattgattttggacaactttcaaaaagttttcttgcaaatgatggtcaatccaagccaatgaacttggatattgaattagttaattgtgacattactgcctttaaaaatggtaatgctaaaactgggagcgttaagttagcttttacaggcccaacagttagtggtcatcctagtgagttagctactaacggcggtacgggcacagctattatgattcaggctgcgggtaaaaacgttcccttcgatggtacggagggggacgctaatctcctgaaagatggtgataatgtactgcattatacagctgttgttaagaaatcatctgatggtaatgctcaaattactgaaggtgctttttctgcagtcgcaacctttaatttaagttaccagtaa

SEQ ID NO: 11817 - DNA, 501 bp, Escherichia coli
atgtcccttcctgaatactggggagaagaacacgtatggtgggatggcagggctacttttcatggtgaggttgtcagacctgcctgtactctggcgatggaagacgcctggcagattattgatatgggggaaaccccggtacgggatttacagaatggtttctccggacctgaaagaaaattcagcctccggctcaggaattgtgaatttaacagtcagggtgggaaccttttctctgattcccggataagggtgactttcgatggcgtccggggtgaaacgccggataagtttaatttatccggtcaggcaaaaggaattaatctgcagatagctgatgccaggggaaatattgcccgggcagggaaagtaatgcctgcaataccattgacgggtaatgaagaagcgctggattacaccctcagaattgtgagaaacggaaaaaaacttgaagccggaaattattttgctgtgctgggattccgggtcgattatgagtga

SEQ ID NO: 11818 - DNA, 582 bp, Escherichia coli
atggttgtgaataaaacaacagcagtactgtatcttattgcactgtcgctgagtggtttcatccatactttcctgcgggctgaagagcggggtatatacgatgacgtctttactgcagatgagttgcatcattaccggataaatgaacgggggggacgcaccggaagcctggcagtcagtggtgcactgctgtcctcaccctgcacgctggtgagtaatgaggtgccgttaagcctccggccggagaatcactctgcgtcagccggagcacctctgatgctgaggctggcaggatgtggggacggtggtgcacttcagcccggaaaacggggcgttgcgatgacagtctccggctcactggtaaccggtcccggaagcggaagtgctttacttcctgaccgtaagctatccggctgtgaccatcttgttatacacgatggtgatacctttttactgtgccggcctgaccggcggcaggaggagatgctggccgcctggaggaaaagggcgacacaggagggtgagtattctgatgccaggagcaatccggccatgctgcgtctgagcataaaatatgagtaa

SEQ ID NO: 11819 - DNA, 621 bp, Escherichia coli
atgagcacttttaccgacaaagaactgattaaagaaatcaaagagcgtatcagcagtttggatgtgcgagacaatgttgagcgccgtgcttatgaaattgctctggcatcgctggaagaggatccggtggcatggctgcattcagaaaatggcttaggtattccggcaataacgaggagtaaaaacattgctgacagttggttatcaaagggttggtatgttcagccgctatatatagccaagccagtgccgatggtgccagatgctcgtccgtctttaaataatggcatagtcggctttgatgaaggctggaacgcctgccgcgcctccatgcttaatggtgccgaacctgtaagccagacttataagttgaacgagctgtcgggcaactctccggtaactccggatggttggataagctgtagtgagcgaatgccgaacgataaacagtatgtttggtgttggggtaagtcttacggctggactgagtgcgataccttcgaagggtattacgattgttcgagaaacaaatggtgggcagttactgacaatggggaagaaccggcatcgaaagtaacccactggatgccgctaccggagccgccgcaggaggtgaagtaa

SEQ ID NO: 11820 - DNA, 720 bp, Escherichia coli
atgtcaaagttaaaaaatgaaccattagtaagggtatcagaagaagacggaatagaaataaggaagatccaatatccagataatacgatagaaagagtttataagcagaaaggtgtaatattaccacgaatacctttaaaaggccgctttgtagaacaatatgtggccttacagttgctggataaagatcttcggaatgttattggttgggagaatataataaaaaacatttgtaataacattaatagagaacaacactttatttatcctgatttagaaaagaatctaatattaaagtctttatttatatcaaaagttgttacttacggtaagtgttttacagaggcgaaagggcgtcgattcacattgcagagaaagcatgtgccagaaaaatacagagatttacatgattctattatgaatgttagacataactttgctgcccataaaggtgaatttgaatatgatcaatgcggcttggttttaatattgccggggaccaagaaaaaaaggtgctatcatattttttcagaactcaatcaaataaattacggtaataatgaggaagatgatgaacgtttttttatgttatatgattcactgcgtaaagtcattaaagaaaaacgagataaattaattgaaaaaatatacgctgaaaagattcatactcaaacaatggagtattggttgagccgaacaggaaaagaaacagagatttaa

SEQ ID NO: 11821 - DNA, 297 bp, Escherichia coli
atggaaagaacaagttacagcaaactatcacagcgtgacgttgatcgcgcagaaacagatttacttatcaatctgtcagctattacccagcgcggtctggcaaagatgattggctgtcatgaatcgaagataagcagaacggactggagatttattgcttcggtcttgtgtgctttcggaatggcatcagacatcagtccgattagcagggcttttaagtatgcgcttgatggactcaccaataaaaaacgcccggcggcaaccgagcgttctgaacaaatccagatggaattctga

SEQ ID NO: 11822 - DNA, 1485 bp, Escherichia coli
atgtcattcggtcagccttgtgatgagtttcccctgagttcgctgcctccactcattcgtgatgccgttattgaagctcagcaaattacgcaggctccccttgggcttgtggcagcgtctgccctgggcgctgtttcacttgtctgccagaatctgattgatgtctgcagactgaatacactgcgggggccggtctctctttttttcctgacgcttgccgagtccggagaacgaaaaaccgcagtggacaaattattaatgaagcccctgtaccagcaggagatgcagttatattccagatacaaaagtgaactggctgtctggaaaaacaaggaagagcttttaaaggctcagaaaaaagcattgttgtcaaaactgaataaagaactccgcaaaggcgcggatgagtcagaaaccctcagacaactggaagtacttcagaaaaacagtgcggaagaacctgtgaggtataaattcatttttaatgatgccacgactgcggcaattaagaatcagctttgtggtaaatggcgttcagtgggtattatgtcagatgaagccggtattatatttgatggatataccctgtctgagttgccttttattaacaaaatgtgggatggctctgtattgtctgtggacagaaagaatgaacccgaacagatgattgaaaatgccagaatgacgttatccctcatggtgcaacccggtctttttgaccgatatatggagcgaaaaggttctgttgccagggacagtggttttcttgcccgttgtcttatcagtaaacctgcaaccacgcaggggaaacgctttattaacggagctgtgattccgggaggatcattaacggcatttcatgaacgattaatggaactggccagaggcagtattgaaaaatccagtgaggatgaacggtattgtctgcatttttcgcctgaagcgcaaaaaatatttattgagcactataatgttctggagcaggatttatccccttccggacccttaagcccgtttcggggacatgtttcaaaaaaaacagaaaacattgcaagaattgcagcgttatttcagtatttcagctatggtgaagggaaaatctctgccgatatcatgacgtctgctgtcgtaataagttcgtggtacacagatgaatataaaaaattatttgcgttacctgatgaatctgaactgcagcagaaggacgccgaggagctgttcgactggctcattgaggagtgccgcggagaatgcccgccccgtgtcaggaaaaattatattctccagtgtggcccgggccggttcagaaacaggaaaaaactgaacgcattgctgaacattcttgaatctcagttcaggctttctgtcgtgccggaaggaaaaaccatgtatgttctgcttccccagatagccagtttaaagttgtctgatgtctctggtatttttacctcgggttatcactacaataagctgagagcgaagtaa

SEQ ID NO: 11823 - DNA, 570 bp, Escherichia coli; identical to SEQ ID NO: 4021

SEQ ID NO: 11824 - DNA, 237 bp, Escherichia coli
atgagcctgtttgcccgcggtaatactgacattaccggcagtggagccgatggtgctggcactctgactctgcgttgtcccggcctcgcgccggtcgtgcgttgtcttactgctgccaatggtgaaaccaataccgccggtacccatcagaccggatttcttcgtttccttaaagcgccaggacgtatctgtactggtggcagcaagaacatcaacatggttacccgccgccagtga

SEQ ID NO: 11825 - DNA, 435 bp, Escherichia coli
gtgttcgacggtgagctgagttttgccctgaaactggcgcgtgagatggggcgacccgactggcgcgccatgcttgccgggatgtcatccacagagtatgccgactggcaccgtttttacagtacccattattttcatgatgttctgctggatatgcacttttccgggctgacgtacaccgtgctcagcctgtttttcagcgatccggatatgcatccgctggatttcagtctgctgaaccggtgtgaggctgacgaagagcctgaagatgatgtgctgatgcagaaagcggcagggcttgccggaggcgtccgctttggtccggacgggaataaagttatccccgcttccccggatgtggcggacatgacggaggatgacgtaatgctgatgacagtatcagaagggatcgcaggaggagtccggtatggctga

SEQ ID NO: 11826 - DNA, 423 bp, Escherichia coli
atgttcctgaaaaccgaatcatttgaatataacggcgtgaccgtcacgctttctgaactgtcagccctgcagcgtattgagcatctcgccctgatgaaacggcaggcagaacaggcggagtccgacagtaaccggaagtttactgtggaagacgtcatcagaaccggcgcttttgtggtggcgatgtctctgtggcataaccatccgaagaagacgcagatgccgtccatgaatgaagccgttaaacagattgagcaggaagtgcttaccacctggcccacagaggcaatttctcatgctgaaaacgtggtgtaccggctgtccggtatgtatgagtttgtggtgaatgatactcctgaacaggcagatgacgccgggcctgcagagcctgtttctgcgggaaagtgttcgacggtgagctga

SEQ ID NO: 11827 - DNA, 363 bp, Escherichia coli
atggttaaactggatttgcaaccagtagcctctgttgcccgtattgcccggggacacgatatcaatgataacctcctgttcaaatggctcagactctggcagaacgaagggcgtatatcgcagcgtcttccggtaacaacctcttctggcgctggcgttgaattattacctgtagagataacgcctgatgagccgaaagaaccgatggcgactcttcccccgcttttatccactccttcacagagcacagccagtgccagttcctgtaaagtggagttccgtcacggtaaaatgacgctggaaaatccttcaccagagctgctcacggtgttgatccgtgaactgagcgggaggggacgatga

SEQ ID NO: 11828 - DNA, 888 bp, Escherichia coli
atgcaaatgagaaactttattgattattcattgttaaaaaatcttgatctcgttatcaagcaaaaagggttttacagagcggcccgaattcttggtatttcacaatcggcaatatctcagaaaataaaaaaacttgaaaatcagtgcggtgttcagttaattactcgtacttcacctccacatttaactgattatggtcagaaattagcaggactgctatatcatgttaatatattcgagcatgatgtattgaaccttgatgcaaataaaagcattgtgaccattccgatcgcagtgaattctgacacgctggcaacatggctaattcctgccttgtgtgtttttttaaaaaatccatctataagactggatataaaagtggatgatgaaaataaaaaccttaagcgtctgttaaaaggagaggttgtaggttgtatcagttctcagccgcaggcaatcattggcgggctatgtgattatgttgggtctctcgattatattttttgtgcaacaccagagttttattccagatatttcagccagggcgtatcaaaggaaaatttattaaaggccccgattgtatcctttaatcatgatacagatatgcatcataaatttttgcagcaatattttgggttggtgccaggaacgctacaaagtcatattgtatcttcctcagaagcatatgtcacaatgttattacaacacctggcatgttgtatgatacctaaacaacaaataagctttgaacttgcttccggtaaaattataaatctgagtccagagtttgagcaaaaggtgaagctttactggcacagatattcacctgaaagtattacaatgcaagcactcagcagtgctttgattaacaataatatattgatataa

SEQ ID NO: 11829 - DNA, 1497 bp, Escherichia coli
atgtcaacagataccaatgattcaacaaatgagttatatgtcagaaaacaaaagttaagacaacttcgcgcccgaacgcctgttgtatttcccaatgactttagacggcagcataattctgttgaattatctgaacagtatggattattgactcatgaagatttaactaaaaaagacattaatgtcattatggctggacgtataatgtccagacggataatgggtaaatccatatttatgcatatacaggataataaaggccgtatacaactttattgttccagtgatatactccccgaatcaacgttttctgatatcaaaaaacttgatacaggagatataattggtattaaaggtaaactgtttaaaacaaaaacaaatgaattgtctgttaattgttatgaaatttctctcttaacaaaatcattaagaccattaccagacaagttccatggtttgcttgaccaagaactcagataccgccaaagatatgtagatctgattgtcaatcatgatacatatcgtacatttgaaactcggtcacggatattgactgaaattcgtcgttacatggcggaacatgattttatggaagttgaaacgcctatgatgcagtctattcccggtggtgcatccgcacggccttttattactcatcataatgcacttgatcaggacatgtttttaagaatatctccggaactgtatttgaaaagactggttgttggaggatttgaacgtgttttcgagattaaccgtaacttcagaaacgaaggaatatctccgcgtcataatcctgaatttacaatgatggaactctatatagcttatgcagatttccatgacctgattaattttactgaagacttattcagaacagtagctcaaaatgttcttggtaccacgcttatagaatatggcgatgaattgtttgattttggtaagccatttaacaaactcaccatgcgtgaatcaatcattaaatatggaaacggaattacactgactgacattgatgatattcagagtgcttctctgacagcaagaaaattgggaattactgtggaaccatcatggggggtgggccgtctgcagtcagaaatatttgaagaagttgttgaacagcatcttattcagccaacatttatcactgaatacccggcagaaatatcaccattagctcgtcgtaatgataaaaatccattatatacagatcgatttgaattttttattggtaaacgtgaaattgggaacggtttttcagagttaaatgatgcggaagatcaggcggaacgattcaaagagcaggtaaaagccaaagaagcaggagacgaggaggcgatgtattatgacgaggactacgttactgcacttgaatatggcatgcctccgactgcaggtctgggaattggtattgatcgtatgataatgttatttacaaactgtcataccattcgcgatgttattatgtttcctgccatgagaacatcaaagtaa

SEQ ID NO: 11830 - DNA, 372 bp, Escherichia coli
ttgattgattttatcgcagatgataatactgatgtcagagtcagactgactgttcttaatatgctgaataataatactacaacgattcgtgaactggccgcaagtgtttatttacaggaggactatcttaagcggattttcaggaggtacaccgggacaggattatatcaattttataactggataaaattattgaaagctataagcaaaatacaaaataatgataagataaaaaaaattgcaatagagttaggctacagttcatcatcctcttttaattattcttttaagaaagagtttagtattggccccagagattatatcaaagaatatctacacaataaaatctcctgtatggcggtacatgaatag

SEQ ID NO: 11831 - DNA, 1311 bp, Escherichia coli
atgagtggtcctaaaaaaataggattaataacatgtattgcagttgtcgctggaaatatgatgggaagtggtattgcgcttcttcctgcaagtctggcgaaaataggttctgtcgctatatggggatggattattgcggcaattggtgcattatctctggcatatgtttttgctcgtctggcaactaataacccacaaacaggtgggcctattgcgtatgctggagaagttgctccaatattcgggcatcagacatccattctttattatcatgcaaactggattggtaatttagcaatagctattactgcagtggcatatttatcagtatttttccctgttctgaataatcctgttccggcagcgattaccagtattgccatggtatggttatttacgtttgtgaacttgctgggcggggcatgggtcagtcggttgacatcaattggacttgtgcttgttcttatacctgtagttggaacggcattattcggttggggatcattcgatattgaagtttatcgccagaactggatggctcagccagatggaaatgtccaccaggctgttattaattctgttcttctttgcttgtgggcatttgttggtgtcgaatctgcggcagttagttcagatcttgtccataatccttcccgaacagttccattggcaacgctggggggaactgcacttgcaggaatagtttatattgcggcctcccaagttattgcaggcatgtttccgaacgaagtcgtggcaaattcaggagcaccttttgctttaagtgcatccagaattgtcggggactgggcggctccatttgtatcggcatttacggctattgcatgtctgacatctctgggctcctggatgatgctggttggacaggcaggacgtcgtgcagcaatggatggtaacttcccggctgtatttggagaaacagacaataatggtgtacccaagaaagggttgctcattgcatcaacgatgatgagcattttgatggtattactgactattctcagtgccagtggttctaacgctgcggatttatttactcaattaacaagcattgctgttttgttaactatgttcccatatttttactcggctattgaccttattcgttttgaaagtgcaacttcaaaaagtattttgagtctgatcgcttcagcgtttgctatgttgttctgttttgctgcgctggctggtgcagagcattatgaaataactgcaacaattattatttcattattaatattcgctttctacgcaagaaagctgggtggcattcagcacaaaaatatttaa

SEQ ID NO: 11832 - DNA, 2127 bp, Escherichia coli
atgaataccatattgattggtagtaagtcttttgacaataaatatgtggcagaaatcatttctcatttacatacaaaaaattttggcactgaactggctggttgtagtgagaaaattgaaaccattataagaaacaacgcaagaatcgctgcagtattactggatttggatgattcgaatgatattcttgacaaaattcgcatgctgaatgaacatctgccagtcttcttacttaagaccgatgatgttgccattaaaaaattttgttttgattcattcgacggaaatgtacatcttattgattgttgcctttattctgttgacgaaattgttaataaaatccagaaaataattaatgactatattgatgcaatattaccacctttaacaaaagcattatttaactatgtgaaggaaggtaaatatactttctgtacgccaggacacatgggaggaacagcttaccagaaatcgcctgcaggtagtttgttctatgatttttttggtgaaaataccatgaaatcagatatttcagtgtctgtcggagaactggggtcgctgcttgatcactcaggacctcattcagaagccgaaaagtatattgctgaaacttttaatgctgacagaagctatattgttacgaacggaacgtcgacagctaataaaattgttgggcaattctccgtacctgcaggatgtactgcactgattgacaggaattgccacaaatctctcacacatatgttgatgatgagtgacatcatcccgatatatctgaaacctacacgaaatgcatatggcattctgggggggatccccagaacggaattctcttctgattcgattaagcagaaaatggctgttacgccaggtgcaacatggccagttcatgccgttatcactaactctacttatgatggtctgttttataataccgactggatcaaagaacatctggatgtaaaatctattcattttgattccgcatgggtgccatataccaatttcagtccgatttattctggcaaaacgggtatgggtggcaagcgtattgaaggaaaagtaatatatgaaacgcagtcaacgcataagctgttagccgctttttcacaggcatccatgattcatgttaaaggtgatattaatgaagaaacctttaatgaagcctatatgatgcaaacctccacctctcctcattacggtattgtcgcctccactgaaatggctgcggctatgatgaaaggcaatcctggcaaatgtcttattcaggaatccatggaacgtgctctggcttttcgtaaggaaatccaggcccgctttgaaaacagtgacacttggttttttaaagtatggcaacctgagaacattaatgaggtagattgctggccattggataaaaacgatcaatggcatggattcaaagatattgatcaagaacatatgtatcttgaccccattaaagtaactttattgacgccgggtcttgataaatacgggaaaattgaagaacaaggtatacccgcagcattagtttcaaaattcctagatgatcgtggtattattgtcgaaaaaacaggtccatataacattttgttcctgttcagcattgggattgatgatactaaggctcttagtcttctgcatggtttgtatgaatttaaggagcggtacgatcgtaatgagctggtcaaagatattctgccagggatctgggccgaatcgccagctttttacaacaatatgagaattcaggagctggcacagggaattcataatctgattcgcaagcataatctgccggagttaatgttccgggctttcgatgtcctgccagaaatggtaatgaaacctcagcaggctttccaggcagaacttcgtggtgaaacggaggaatgtttcattgaagacttggtagggaaaattaatgctaatatgattcttccgtatccaccaggagtacctttagttcttcccggagaaatgattacagagagcaatcgtccggttctggagtttttgttaatgctttgtgaaattggtaaccactatcctggttttgaaaccgatattcatggtctgtatcgaaaggcggataacaggtatactgcaaaagtcattaaaaaataa

SEQ ID NO: 11833 - DNA, 660 bp, Escherichia coli
gtgaaggtgaatggttaccgtatcgaactgggggaagtcaaaagccaccttgaacagctcgacagcgtagggagtgccgccgtggtgtgccaccagggacagctgtatgcctttatcactgccgcagaaaacctgcatcctgacgatactgacgccctgttagcgcgtgttcgtgctcagttagccgtgcagttgccgtattacctgctgccccaacatttctttcttctcaaggtgctgccgatgacaggcaacggcaaaattgatcaggcggcaatggttcaagaggttatccaacgtatgtcgcaatctacatcacagaagtcgagggccctcgcgcacgcctcgccctatgaacagcaggtggccgctctctggtgcgaggtactacaacgagaacagatcggactgaatgacaacttttttgaagcggggggcggctcaatccagatcgtgctgttgcatcgccgtattgaggagatttttaaggttacggtacctattgctgagctatttcgcttaaccaccgtgaaaagaattgccggttatttgcaggctatgcaggacaatgcacgggcggtgaatcaaacacagcagcgtgatgcttcccgatcccgcgcccagcaacgacttgtacgtcgtcaccagcgtcagcgttaa

SEQ ID NO: 11834 - DNA, 294 bp, Escherichia coli
atgcgcctcaatcatcacagcttcctgaccatcaacacccggcacggtataaccactgcgcgcaccgccatcattgttgatggcgcttcccttgatgacggcaaggatgttatccccttgcacctgcgcgtctgtagcccgtttgagcagcaccatgcccaaaccactgctgtagaccgtaccgctcgcctgcgcatcaaaagtatgaatcaggccatcctctgcttgcagcccatcaccgtgcgattcatagctgcgctgctcctccatgcgaaacgtgacgccacccgctag

SEQ ID NO: 11835 - DNA, 534 bp, Escherichia coli
atgaacgtaaaaatcagatacagcctgtcggctgctgttctggcactgattgccgccagtgctcctgcccctgacattctcgatcagtttctggatgaaaaagaggggaatcacaccactgcataccgcgatggctccggcatatggaccatctgtcggggagcaacgatggtggacggtaaacctgttattccgggaatgaaactgtcgaaggaaaaatgcgcccaggttaacgccattgagcgggataaggcgctggcatgggtggagcgcaatataaaagttccactgaccgagccacagaaagccggtatcgcgtcattctgtccctataacattggccctggtaagtgttttccgtcgacgttttataagcggcttaatgccggtgatcgtaaaggcgcatgcgaggcgattcgctggtggataaaggacggtggacgtgattgccgcattcgttcaaataattgttacggtcaggttattcgtcgtgaccaggagagtgcattaacctgctgggggatagaacagtga

SEQ ID NO: 11836 - DNA, 282 bp, Escherichia coli
atgaaagatttaacactcaaatttcccgacagggccgacttttcggcctttatggagagcattggctattatgatgacgagttgatgcaggatgatattcttattgacgtgataggtaacgtgtacaaagaaaccggagaactgactgaagatggcgaaccggtatgtgttaaggaagacggatattttgtaaacgtgcgcatcattaatgattcgcaaatatcgtcattattcgatgaatacgtggttgctgttgagcatcaacttcgtggctggatgtga

SEQ ID NO: 11837 - DNA, 1371 bp, Escherichia coli
gtggatcacttttcatccgtcgttgacaactatatcttacaaacgaataaagatggccactattgttggcgaccattcgaattaattcatcctgcaatttacgttcatcttgtccataaaataacggaagatgaatcatggcaactcttgcttgaaaggtttggtgagttccaaagcaatacaaaaattgtgtgtgcaagccttccaagagaatctgaagaagatggagtttctgataaggcaaaagctgtatcaggatggtggcgtgatgttgaacaagaatctatcaataaatctcttcagtttaaatacctgttcagtactgatatcgcaaatttttatccatcaatttatacccattccataccttgggcaatttacacaaaagaagatgctaaagcagcaagaggagcaggtagaaatcttggagaccaaattgattatgccttacgacagatgcgatgggggcagactaacggcattcctcaaggttctgcccttatggattttattgcggaaatcgttcttggttatgctgatgagttgcttgggcagaaactcgaaagccagaatatcaatgactatcatatcattcgatatcgagacgattatagaatcttcacaaatagtaaagaggatgcagaggcgatagcgagacatctaactgttattctgcaagggttagggctacagcttaatgcttctaaaacttcacttactgaagatttagtccttggttcaatgaaaccagataaacaagaagcgttgatggtatttggaagaagtgttaatgccacaactattcaaaagactcttttgaagcttgttatcttttctcgtaagtataaaaattcaggtcagcttgaagcctatcttgctaagataaataagcgtttagaacgcatgagtagcataaaggaggaggttcgagcgatagtcagtattatttctgatctaatgattaataatccaagaacattttcatcttgtgcgttagtgttgagtaatgtattaaagtttgtagataatgacgtagagaaattagagttgctcaaacagatcaaagataagtttaaacctatcttaggtactgggattttagatatctggctgcaacgtatctcctatcatattaacagagatattgaatataaagagacgctttgctctatcgtttctggcgttcacgataggcctcatgagcatgtttggaattctgaatggataagtgacaataatttcaagaacagtattatggctaccagttttgtcgataacgataaacttcaggcctgcgagccgattataccagaggaagaagttacactctttccttatgatagtgatgttgatgaggaagacttagaatag

SEQ ID NO: 11838 - DNA, 900 bp, Escherichia coli
atgattgctcaggctttacgcctgcatcagacaacgattgatcaccatatcagcgaattcctgaataaaggaaaactgaagcccgaaaacggcggctcagacagcaaactcagtgctgaacaaacggcctttttaatcagccagttatccgataatttatttcaccatacccgcgatgttattgcgtttgtcacccggacatggaacatcattttcagcattccggggatgaataagtggctgcatcgtaatggtttcacctacaaaaaaccgtcaggcgtcccccataaattcagtgaagagaaacaaaggcaattcattgaatattataaggaactgaaaacaactgtgggtgatgagccgattctttttattgatggagtccatccgactcaggccactaaaatcagctatggctggatacgcaaaggccagaaaaaagcagtaaaaacaacaggcagccgcacacgcctgaatatcatgggggcgctgaatctgaaagcactgacgtcaccgctaatctgcgaatataaaaccattaatgaatataatgtatcccgttttttcaatgagatacgaaaggtttatcctgattataaccagaaaatccacgttattctggatggagcaggttaccaccgttcacagttagtgaaagactgggcggaagtggtaaatatcaggctgcattaccttcccccttacagtccaaacctgaatccgatagaaagaatgtggaaattaatgaacgaacatgcccggaataatcgctacttcagcagtacgcgagagttcagggaagcaatatctgtcttttttaaccagacactgtcggatatagcggactcactgacatcccgaattaacgatcactttcaggtgctcacacccgcatcttga

SEQ ID NO: 11839 - DNA, 387 bp, Escherichia coli
atgaaggcgttcaagttcagctttttgttgctcagtaatgaatattttcatgttggacagcatgatcttctgttgctgaaaaatcaagtatcttcaatgatcacgggtatatatgaaaccgtatgtaaggttaaatacaataaacataactgcatagggctggctattgtgtgggaaggaccaaataaagcagaggctacacctttagttcagggagaaatgttcgaattttttctatcaataaacatgtctcagattagaggtagcaggcctgtgttcttaatccacgaagacacttacaaagatcttaatcagtacaagaaatttataaatggagatattgcctttgttcagagaacactcccattagatcagcgtttattctga

SEQ ID NO: 11840 - DNA, 522 bp, Escherichia coli
atggcagttcgtggcattaacaaggtcattctcgtaggccgactgggaaaagatccggaagtccgttacatccccaacgggggcgcagtggcaaacctgcaggtggccacgtcagaaagctggcgtgacaaacagacgggggagatgcgggagcaaacggaatggcaccgcgtggtgctgttcggcaagctcgcggaagtggccggtgaatatctgcgcaagggctcgcaggtctacatcgaggggcaactccgtacccgtagctgggaagataacggtatcacccgttacgtcactgaaattcttgttaagaccacgggcaccatgcagatgttggggagtgcaccacagcagaacgctcaggcgcaaccggagcctcagcagaatgggcagccacagagtgctgacgcgacgaaaaaaggtggcgcgaaaacgaaaggccgtggacgtaaggccgcgcagcccgagcctcagcagccgtctgaacccgcgtatgacttcgatgacgacattccgttctga

SEQ ID NO: 11841 - DNA, 426 bp, Escherichia coli; identical to SEQ ID NO: 5761

SEQ ID NO: 11842 - DNA, 771 bp, Escherichia coli; identical to SEQ ID NO: 5760

SEQ ID NO: 11843 - DNA, 435 bp, Escherichia coli; identical to SEQ ID NO: 5759

SEQ ID NO: 11844 - DNA, 1290 bp, Escherichia coli
ttgaatgattctctggaagcgataacagggtatgcgccggggtataaaacaataaccatcggcagcgatgaaatcactgtgccagttaatggcatatgccaatttagccgggcttcatctgcaacgtatattgataagtccgggcatattaccgtggcaggtaataacgttcctcgttttgaaaaatatggtttgctgatagagaatcagcgaacaaacatgttcgtaaatagttttaatcctgatgcgtggaataaaagcggtggtatatctgtaacatcatcaacagatgaatttgagtttaaatatggacgtttcacggtaggaagcgatatagcaggaacgacaacagggagaaatatatgcacagttgctggtaacaaaggcatagatgtgactggcgatgatcagtacagtaaaggtccgtatgttaccgcgtcgttcagggtaagaagtgatctcaatgttcgcgcacgtatccgttttgaacggtataactcggaaggatacaccttcctttgcgacgcctatttgtcattacagacccatgaactacaaattactggtggcaatgcccagctattaacagcaaactttgaaatcgaccctggtagtggatggatatattttcaggcaacactgaaatgtctgccagaatggggaatggttggtacgcagctgcaaattgcagccgacagagctgtgggagcttttgcaacaggtgactggatagaagtaaccaccccgcaattcgagtatggtgcttgtgcaacttccttcatcataacgacaacagagccagcgactcgtgcatcagatttatgtaaatttccgctgatgaaaaatatgtataccatgccttttacgttcatggtggaagtccataaaaactggtttatttctcataatgctgcaccgcgtgtcattgattcagaaaatcaccagtccggaggcccatttattatggggtttggttcttctggaactatcagtcaggacggttattcgtattgcgatataggcggggctaaccgacgtgtatatgaatcatgcggagtaagggatctcgttatgggattcagggttaaggctgacggcatgacatgctcatttgcaaataagcatataagcgctgaaacaaaaacagtatggaaatatattcgtgaagcagccgtgattcgtatcggggggcaaacgacgacaggattacgacaccttaatggtcatataaaaaacctccgtttctggaacagagcattgtcagatacgcagcttaaggaatacgtataa

SEQ ID NO: 11845 - DNA, 207 bp, Escherichia coli
atggataagttaacaacaggtatcgcctatggcacatcggctggtaatgctggtttctgggcattgcagttactcgataaagtaactccgtcacagtgggctgcaatcggtgtgctgggtagtctggtatttggcttgctgacgtacctgacaaacctttatttcaagattaaagaagacaagcgtaaggttgcacggggagagtaa

SEQ ID NO: 11846 - DNA, 258 bp, Escherichia coli; identical to SEQ ID NO: 10427

SEQ ID NO: 11847 - DNA, 1752 bp, Escherichia coli
atgtactttcccctcatacactatggcattatttattgtgatacgttactgagccatccgcaaaagcacttacctaaacgaaaactaaccgcaggtcagtcttttgctggccttgcgtggaaacagtaccacgtcacagacactgcgcagcatcggctgcatttacggagatttgtgaatatgaatcaaccacacgcagacaaccttcagggccaacatccagatcgcgcaatctgttccgccgatgaagaccagtatggtttcatccacatagctacccagttagctgttgccgttaagggtattggccgcgagggtagcgcagtgatcggtatcgaaggcccatggggatcagggaaaacgagtctccttaacctgctgcgcaatgctctcgtcgaacaaatagaagaatgtacttttgtattgacaatatccccctggctcgacgggagcaacacaagtctggtggcatcgttactgcttcctgtcgccaacatcattgctgctgaagaggaacagcgactagcgcctgaggaaagggcagctctcagacgacgaaaatccctgacacggacggccaagacgatgatagactacacccgggcaactgcccgcaatctcgcaaccgtcgcctcagccgccgccgttattcccggcgtacctgatgccagtggcgcgttgaaagccctgtcagaaactcgttggctgaaggaaaaggagaaaaccacagcagagatgcggaccgaaattgcgaagaaaatagatgaactggatcttagctttattgtactgcttgatgatctggatcgtctcgagccagcacaggcagttgaggtgataaggctagttaaatctgtaggtgactttcctcgctttcgctaccttctctgttatgacaaagccatcctatcccaggccatcagcctagggctgggggtacccgacggcaacctatacctgcagaaaattgttcagatatcattctgtttaccgcgcccagaaacctttgtcttgcgcagaaaatttagggatgccgctgccgcgttatacagaaaagtaaacgggcatgctccagaccgtattgtactagagcaattgacacaagtggctgacgtctacggggcagcattaaaaacccccagggaggttcagatggtactgaatgccctgaccttcctatacccgggcatgcgggattacgtgtatttcccggatctgtgcttccttcaactgctgcgcacaacaaatgcgggtctttatgactgggtagaagaatatctgtcagaacgagcggtcgtagccgccggtgacgggcatgtaagtgagttagagcaggcagagatggcggagagcctaaagtcgcaccttgcccgttatttccctgccgaagcccatgcggtgcatgcccttgctcgctgggtcccgggtatcaccggctggaaaactgactcgcccatcaaactctttgtaccgactcccgaacaggatagtgccctgctgactgctggcaaacgtctgggcagccaagcatactggctctattatttcgctttttccgccccacagaatgtactttcacctgaaatgctcaatgagatattcgacatcgccggatatcctgaacaacaacataggcttgcagaacgtctactcgggtatatccagagtaaggggttgtcctcccgaacctggtttgaacacattctgacccagctcaccacacaacagattgcaactgtcaacgacggatga

SEQ ID NO: 11848 - DNA, 783 bp, Escherichia coli
gtgggtgagcttttcactggcgttcagggtaaggatgtctctggcagcctgtgttccgtcaagctgtgcgttctgcacatccacgctgacactgttgccctgcgtctgcgcagtggtcgtggtcttcagactgttgccttttacagacaccgtgccacccgcactggtttcacccgccagtgtggaagacgcgctgtccagcatgaggttaccgtcactgtttgtgaccgatttttctgtggtggtcagtgtgtctgcagaagccacaagttcctttgccccggagagggtaccgctgttgtttatctgcgtggcactgagcgtcagcacgtcatcgctgacaagtctgccgcggttttcgagtgtaccgctgacggtaacgcgggcactgtcttttgcaccggcatcaccggacagtgtggcattgcgggcgctgatatcgagtgtgctgccacttttaatactgccggtgctggtcaggtcagtggcggtaactttcaggccattcccctggacggtaccggtattactgaatgtcccggttttcaccgtggcatcgcgcccggcaaccagtgtcccaccgttgttcaggctgccggaactgacagtgagtgttttcccggcaatgctgcggcctttcagtgtggtatcattggtggtggtaagggtgacattttcagctgcattcacggtcccggaagtctggttcaggtgctgtgcactgagcatggcgttctgtccggcagtcagttcaccaccgttctgtacaatctgcccggatga

SEQ ID NO: 11849 - DNA, 396 bp, Escherichia coli
atgctgcagggcgtaatcccgcagacggtaataatgaaccgtcatgacataacactccgtacggcaggcgtgatggctgtacgtcatcagacaggcggcaatgccggcggcttccgggctcatttcagcgcggttaccgttcatggcattgaacagtacccatgtttcgtcatcatcgccatccggttcaggggccataaatgccccgccgttgttcagggtgtacagattccagataccaccgcagtagtcttcgcacagacggtccatccagccgaagacacggggctccagggtcacccactgtggaatgaggccaaaatgctgcggccagaaactgatgcgctgttcatcagggacaggagtggcaaccagttgagactggttattccctga

SEQ ID NO: 11850 - DNA, 819 bp, Escherichia coli
atgcgattagccagtcgttttggttatgcgaaccaggtacgtcgtgatcgtccgctgacacacgaagaactgatgcgccatgtaccgagtatttttggggaagaccgacatacctcccgcagtgaacactatgcgtacattcccactatcaccgtcctggaaaatctgcagcaggaaggctttcagccattcttcgcctgccagacccgcgtacgtgacccgggccgccggggatacacaaaacacatgctgcgcctgcgccgtaacggggagataaacggacaacatgtccctgaaattattctgctcaactcccatgacggtacctccagctaccagatgctgccgggttacttcagattcgtctgccagaacggctgcgtctgcggtcagtctctgggggaagtccatgtgccccaccggggaaatgtggtggacagagtcattgaaggggctcacgaggtagtgggcgtttttgaccggattgaggaaaagcgtgatgccatgcagtctctggttctgccgccaccggcacgtcaggcactggcacaggcggcgctgacttaccgttatggtgatgaacatcaacccgtcaccactgccgacattctgacaccacgacgccgggaggattacggtaaggacctgtggagcgcatatcagaccatccaggagaatatgctgaaaggcgggatttccggccgtagtgcaaaaggaaaacgtatccatacccgcgccattcacagtatcgacaccgacatcaagctcaatcgcgcattgtgggtgatggcggaaacgctgctggagagtatgcgctga

SEQ ID NO: 11851 - DNA, 483 bp, Escherichia coli
gtggatgagtatttctggcgacacatcctgcaccggggacatcagcgggtactgtttgtggtgacgcaggccgacaaaacggagccctgccatgaatgggatatggccggtattcagccttctcctgcacaggcacagaatattcgcgaaaaaacggaggcggtattccgtctgttccggcccgtacatccggttgtggccgtatcggcccgcaccggctgggaactggatacgctggtcagtgcgctcatgacagcgcttcccgaccatgccgccagtcccctgatgacccgactgcaggacgagctgcgcacggaatctgtccggtctcaggcccgtgaacagtttaccggtgcggtggaccggatatttgacacggcggagagcgtctgtattgcctctgttgcacgcacggttctgcgtgccgtccgtgactcggtggtctctgttgcccgcgctgtatggaactggattttcttctga

SEQ ID NO: 11852 - DNA, 342 bp, Escherichia coli
atgaacccactgctcgcctctgttattcagcgtggtgttcaccgccagcccgttcaggctctgtcccccgccgtcacgaataaccgtatcactggctgttcccccctccagcacgacctgacgaccatttgtggtaacagtggtgtttccggctatcccgccattctgtatccattgcccaccggtgttttcttcactgtccggccccagttccagcccggtactgatggtcattccgttggccgtaccgaggacaatctggttgtcatgattttccagtgttccgccgttcacggtttcacctgcctgtacaatactgtcagcagccagggccgggactga

SEQ ID NO: 11853 - DNA, 1035 bp, Escherichia coli
gtgaaggagcaggaggtttcagtcggaaaaagaactgaaaaaacgcaatatcggagttatgaattcactcatatcaatggtaaaaatttaacagagacagataacttatattccgtggaagaacttattgggaccacgcgtgccgacaagttttttggcagtaaatttactgatatcttccatggcgcggatggtgatgaccatatagaaggaaatgatgggaatgaccgcttatatggtgataaaggtaatgatacgctgaggggcggaaacggggatgaccagctctatggcggtgatggcaatgataagttaattggggggacaggtaataattaccttaacggcggtgacggagatgatgagcttcaggttcaggggaattctcttgctaaaaatgtattatccggtggaaaaggtaatgacaagttgtacggcagtgagggagcagacctgcttgatggcggagaagggaatgatcttctgaaaggtggatatggtaatgatatttatcgttatctttcaggatatggccatcatattattgacgatgaaggggggaaagacgataaactcagtttagctgatatagatttccgggacgttgcctttaagcgagaagggaatgacctcattatgtataaagctgaaggtaatgttctttctattggccacaaaaatggtattacatttaaaaactggtttgaaaaagagtcagatgatctctctaatcatcagatagagcagatttttgataaagacggcagggtaatcacaccagattctcttaaaaaagcatttgaatatcagcagagtaataacaaggtaagttatgtgtatggacatgatgcatcaacttatgggagccaggacaatcttaatccattaattaatgaaatcagcaaaatcatttcagctgcaggtaacttcgatgttaaggaggaaagatctgccgcttctttattgcagttgtccggtaatgccagtgatttttcatatggacggaactcaataactttgacagcatcagcataa

SEQ ID NO: 11854 - DNA, 549 bp, Escherichia coli
atgcgttatgacacgctggaaacctgccatcgtaatgcgttccgcttctttggtggtgtgccgcgcgaagtgttgtatgacaatatgaaaactgtggttctgcaacgtgacgcatatcagaccggtcagcaccggttccatccttcgctgtggcagttcggcaaggagatgggcttctctccccgactgtgtcgccccttcagggcacagactaaaggtaaggtggaacggatggtgcagtacacccgtaacagtttttacatcccactaatgactcgcctgcgcccgatggggatcactgtcgatgttgaaacagccaaccgccacggtctgcgctggctgcacgatgtcgctaaccaacgaaagcatgaaacaatccaggcccgtccctgcgatcgctggctcgaagagcagcagtccatgctggcactgcctccggagaaaaaagagtatgacgtgcatcctagtgaaaatctggtgaacttcgacaaacaccccctgcatcatccactctccatctacgactcattctgcagaggagtggcgtga

SEQ ID NO: 11855 - DNA, 780 bp, Escherichia coli; identical to SEQ ID NO: 6153

SEQ ID NO: 11856 - DNA, 504 bp, Escherichia coli
atgaaaagacttcacaagaggttcctgttagctacattttgcacattattaacagcaactctccaggccgccgatgtcactatcactgttaatggtcgggtagtcgctaaaccatgcactattcaaaccaaagaagctaacgttaatctcggggatctttatacacgcaatctgcaacaacctggttctgcatctggctggcacaatattactttgtcattaaccgattgtccgattgaaacaagtgcagtgacggcaatcgtgacaggttcaactgacaatacgggttattacaaaaatgaaggtactgccgaaaatattcagatagagctaagggatgaccaggatgcgacgttaaaaaatggcgatagcaaaacggttattgttgatgagatcactcgtaatgcacagtttccacttaaggcaagagctatcacggtgaatggaaacgcaagccagggtacgatcgaggcgctaatcaatgtgatctatacctggcaataa

SEQ ID NO: 11857 - DNA, 576 bp, Escherichia coli
ttgacgttttgcggggacctgccgtttgttccctccggtattcaccatcacctgtttgagaaccttcgccgcaaggggcatcactgccacggccggaaacgactgtccgggggcagaccgcaaaagtttttgcctgcttttgggcaaaaacttttgcgggatgtacatttcacccctggactggcggagacggttgtggctgtctttgcccccggcgacaggggcttaaacaggtgtatggcaccggacacaacaacgggcaggcacccgccgcaacgacgaagagcgcgtgcgcgaaacggcgttgccccttacatcccggcggccttttgccgggatgccaggagcgcaggccacggcgcgacagaggcggcgcgaccgttccggtcgctgcaagcccgggtttcgcgtcagggatggaagcccgccagggcggagacagcttcgctggctccgttcacgacagcccgccccgccagggggacgccggggaaaagcacaggcaggaggacaacaaaacagacagtaatcaggacagcagtaatcagaatcagaacaggagggaaaagagaataa

SEQ ID NO: 11858 - DNA, 216 bp, Escherichia coli
atgtctgatccacgtcagtatggcctcttaccgtgcaaattgcaaggaggagtaaaccatgaaactaccgggaaacgcccttatctggtgcgtattaatcgtgtgctgcacgttgttgatattcacactcctgacccggaatcgtctgtgcgaagtccggatgaaggacggatacagggaagttacggcaacaatggcttacgaatccggcggtaa

SEQ ID NO: 11859 - DNA, 1056 bp, Escherichia coli
atggtttacgttcttattcgtctggtgacatacggctattaccggcaaatatcggaagaaactcttgtcaggggggcccgggccagctcctattttatggaaagcctgtatggtattgccacggtaaaaatccagggtatggtcgggatccggggaacacactggcttaacctgaaaatagatgcgatcaattcaggtattaagttaaccaggatggatttgctcttcgggggaataaatacttttgttgccgcctgtgatcagatggcgattttatggctgggtgcaagccttgtgatcgataatcagatgacaatagggatgtttgtggcatttggttcttttcgtgggcagttttcggatcgggttgcttcgctgaccagttttcttcttcaactgagaataatgagtctgcataatgagcgcattgcagatattgcactacatgaaaaggaagaaaagaaaccggaaattgaaatcgttgctgacatgagcccggtttcactggaaaccactgatttaagctaccggtatgacagccagtcagcacaggtattcagtggtctgaatttgtctgtggctccgggagaaagtgtggctataactggtgcctccggtgccggaaaaaccacattaatgaaagtattatgtggactgtttgaaccagatagtggaaaagtactggttaatggcacggatatacgtcaacttggaataaataattatcaccgtatgatagcctgtgttatgcaggacgaccggctattttcaggatcaattcgtgaaaatatctgtgggtttgcagaagaaacagacgacgaatggatgacagaatgtgccagagcaagtcatattcatgatgtgataatgaaaatgccaatggggtatgaaacgttaataggtgaactgggggaaggtctttccggcggtcaaaaacagcgtatattcattgcccgagctttataccggaaacctggaatattatttatggatgaggctacaagttctcttgatacagaaagtgaacgtttcgtgaatgctgccataaaaaaatga

SEQ ID NO: 11860 - DNA, 681 bp, Escherichia coli
gtgttagcccgctggaaacaacctcacggtggatatatatcacccgcggcatttattccacttgctgaaaaatgcggattaatcgttccgcttacgcaaagcctgatgaatcaggttgccagacagatgaacgctatcgcgagtaaactgccggaaggttttcatattgggattaattttagcgcctcgcatattatttcgccgacgtttgtcgacgagtgcttaaattaccgtgacagttttacccgccgcgatttaaaccttgttctggaagtcaccgagcgtgagccattaaatgttgatgaaagtctggttcagcggttgaacattctgcatgaaaatggttttgtcatcgcgctggatgatttcggtactggttactcagggctttcttatctgcatgacttgcatattgattatatcaaaattgatcatagtttcgttggccgcgtcaacgcagacccagcatcaacccgaattctggattgtgtattggatctggcgcgtaaactttcgatcagtatcgtcgctgaagatgtcgaaacgaaagaacaatttgactatctgaaccaaaataatatcacatttcagcagggttattatttctataaacctgttacatacatcgacctggtcaagattatcctttctaaaccgaaggtgaagattgtggttgagtga

SEQ ID NO: 11861 - DNA, 549 bp, Escherichia coli
ttgattgatacgaaatatggtcgctatgtttttaaagtctttgccccgaaaacgaaaaggaatgaacgttttttaaaatcttttgtaaaaggtgactactatcagaatttgatcgttgaaaccgatcgtgtcagaagtgcaggtcttacttttcctaatgatttttattttctggctgagcgtaaaattttcaactatgccagtgtttttatcatgcttatcgagtatgtcgagggcgtagagctcaatgatatgccgattattccagaagatgttaaagcagaaattaaggcttcaatggaaaaattgcatgccttaaatatgctatcgggcgacccacaccggggtaactttatcgttagtaaagatggtgtcaggataattgacctatccggtaaaagctgtacggcagagcggaaagcccgtgatcgtctggccatggaacgtcacctgggtattgccaacgaaataaaagattatggctactattcagtaatctacagaaccaaactacgcaaatttattaaaaaattaaaaggcaaagcgtaa

SEQ ID NO: 11862 - DNA, 588 bp, Escherichia coli
gtgggcgatcagtggcgcacgccggacaacattttctggggaattaacaccttgtttggtccgtttgttctggatctgtttactgacggtgataacgccaaatgtgccgcgtattacacggcggaagacaacgcgctggcgcatgactggtcagaacgtcttgcggagcttaaaggtgctgcctttggtaatcccccatacagccgcgccagtcagcatgaggggcaatacatcaccggcatgcgttacatcatgaaacatgccagtgccatgcgtgataagggcgggcgctatgttttcctgatcaaagctgccaccagcgaagtgtggtggccggaagatgcggaccatattgcttttattcgcgggcgtattggttttgaactgcctgcctggtttatcccgaaggatgagaagcaggtgccgacaggcgctttcttcgctggtgctattgctgttttcgacaagacctggaagggaccggcaatcagctacatcgggcgcgatgaacttgaggcatgtggtgaggcgtttctggcgcaggttcgccagcaggcagaaaaactggtcagggagatggcggcatga

SEQ ID NO: 11863 - DNA, 327 bp, Escherichia coli
atgacgacgttaactcaatgccagcagcaggtgctggatatgctgatttcttatcagaaagaacgtggcttcccgccaaccaatcaggaggtggcaaccatgctgggataccgttcagtgaatgcagcggtggagcatcttcgcgcactggagaaaaaaggcgtcatcacgataaagcgtggcgtggcccgggggataacgcttcataccgcggtgaaggacgacgacagcgaggcggtcgggattatccgcgcactgcttgccggtgaggaaaacgcaaggctgcgtgcaacccactggttacatgagaggggcctgaaagtatga

SEQ ID NO: 11864 - DNA, 168 bp, Escherichia coli
atgaaatgctgtacatcacttgaaattcaagtctctgctatgggcgtggcaacaccagaagagtggatgtggcttgaatctgcaggaattgagatgtttcagggagatctgttttccaaagctaaattgaatggtatcccttcagttgcgtggccggagaaaaaataa

SEQ ID NO: 11865 - DNA, 615 bp, Escherichia coli
atgaacgcaataattattgatgaccatcctcttgctatcgcagcaattcgtaatttattgatcaaaaacgatattgaaatcttagcagagttgactgaaggcggaagcgccgttcagcgggtggaaacacttaagcctgatatcgtcatcattgatgtcgatatccccggagttaacggtatccaggtgttagaaacgctgagaaagcgccaatatagcggaattattattattgtctccgctaaaaatgaccatttttacgggaaacattgtgctgatgctggcgctaatggtttcgtgagtaaaaaagaaggcatgaacaatatcattgcagctattgaagctgcaaaaaatggctactgctatttccccttctctctcaaccggtttgttggaagtttaacgtccgaccagcaaaaactcgactccttatcgaaacaagaaattagtgtcatgcggtatattcttgatggcaaggataataatgacattgctgaaaaaatgttcatcagcaacaaaactgtcagcacttataaaagtcgcttgatggaaaaattagaatgcaaatcactgatggatctttacacattcgcacagcgtaacaaaatcggctaa

SEQ ID NO: 11866 - DNA, 225 bp, Escherichia coli
atgcacaggcaggaactgaaacgcactgaaacggcgcgggaagtccagaggccgagcattgatgctcaccttctgtggcttgaagcagagctgaagcgtcttgagaagcagataaaagacctgacagacgatgatccggatatgaaacaccgcaggaaactgctggaaagcatcccgggtatcggagagaaaacatctgcggtattgctggcttacatggtctga

SEQ ID NO: 11867 - DNA, 813 bp, Escherichia coli
gtggatgatgattatttaaagtcatttaatgaaacagcaaaacaatttaatacctcaattattgtatatttaattgacccaaaatactttgctgatctgccgacgtcacagttttggtcgtacgcgacatacttcagggtattgtcctttgaatatctgagtgaaagtatttccacactgctgtatctggatgccgatgtcgtttgtaaaggaagtctgaaacctctcacaaaaattatatttaaagatgagtttgctgcggttattcctgacaatgatagtactcaggcggcatgtgcaaaacgtcttaacattcccgaaatgaatggacgttatttcaatgcaggcgttatctatgtcaatcttaaaaaatggcatgaagcaaatttgacaccgtatttactcacgcttttacgaggggaaactaaatatggctctcttaaatatttagatcaggatgcgttgaatatcgcatttaatatgaataatatctacctcgcgaaggattttgatactatttataccctgaaaaacgaacttcatgatcgtagtcatcgaaagtatcagcaaaccattaccgataaaacagtattgattcactatacagggataactaaaccatggcatagctgggctggatatccgtctgcatcatactttaatatcgcgcgtgaacaatctccctggaagaaatatcctcttaaagaggcgcggactgttgcagaaatgcagaaacaatataagcatctgtttgcccatggtgagtatattaaaagtataacttcattaattaagtacaagcttaagaaataa

SEQ ID NO: 11868 - DNA, 174 bp, Escherichia coli
gtgctggttctggtgaatgccggtggtgagccgtttgcggtggttcaggtgcagcggcggtttgcaccggaagctgtcagccattcactggcactggcggcgtcactggatgggcaggggtacagcgttaacgacatcatccatatcctgatggcggaaggaggtcaggcatga

SEQ ID NO: 11869 - DNA, 405 bp, Escherichia coli; identical to SEQ ID NO: 2991

SEQ ID NO: 11870 - DNA, 204 bp, Escherichia coli
atggcgaagctggggatcgttgaacaacgcgaacgatacagccgtaccgcgattaacaacatcaaaaaattctggtcgctgacagcgaaaggctgcatgttcggcaagaacatcaccagtcccgcaaatccgcgcgagacgcagccgcatttcttcgaatcccgattccctgagctgttaaagctgctcgataccgttcattga

SEQ ID NO: 11871 - DNA, 294 bp, Escherichia coli
atggatataacacctttccttcatgcgctttgtgctgtggctgcgcagctactggttggtctttttaccgggaactgggcttacggggcgatagccggttgtacgttcttcattgcgcgtgaacacacccaggcggaatatcgctggattgaaatgtttgggcatggcaagcggattaacatgccgtggtggggcggttttgatccgcgagcttgggatgtggcaagcctgatggattttgctgtgccggtggtggcgtgtctgctggtctggctgttggttaatcgtgggtga

SEQ ID NO: 11872 - DNA, 411 bp, Escherichia coli
atgttaagcgttaatggtgcatgtcatgccaccgcatttaaccagcattccgaccgggatctgaaagacaacattcaggtgatcgataatgcaaccgaccgcatccgtaaaatgaacggctatacatacacgcttaaagaaaacggtatgccctatgctggtgtcattgcacaggaagctctggaagcaatcccagaagttgtaggttccgcaatgaaatatcaggacggtgcaagcggatcggaaggtgaagaaggtgaacgttattacacagtagattattctggtgttactggcttgcttgttcaggtagccagagagtcagacgacagaataacagcactggaagaagaaaacgcagaattaagacaaagattatctgcaattgaggcggcgcttgcgtctaaataa

SEQ ID NO: 11873 - DNA, 441 bp, Escherichia coli
gtggttacccggacacaggattttgagccgggcgggcaggttttcagccggggcgagtggctgaccatcatccgcgtgaacaaaagcaacggggcggtgagttcagttacaacggcgaattacagttttctcgggtacagcggcacgatgaaagtgacgcccgatcgcatcacggactacaaagcaccatcggcagaagaggctgccgtcgccggccaggccgcgaagcgtccgccggtagtcaactatccgggggaaggtttccgggaaatgacaaaggcgcagtgggccgccctgccccgggactgtaaggccgtgcgcagtgtggcagaagcagaagaccacggggcataccgctaccgccgcacaatggacaataatttccgtctggtgaatgtgtatatcaccgacatgaaaattacggaaatcccacagaaataa

SEQ ID NO: 11874 - DNA, 495 bp, Escherichia coli
gtgacatttgtcgggcgattggaaaaaggaaaaggaatagatgatctgtattacatatgtaaaaatctgccagatacttccttccatttagtttcaagtattcccgccccacaaaattttgcttcgctaaataatgttctgaccagcattgctgtcccctatgcgaaaatgccagaaatatttaagaaatccagagtacttattttaccgtcctattatgaaggatatgagctggttactattgaagcgctatgctgtggttgccctgtgataggctataatgttggtgcaattagagagttgtatgcagaaagttttcctggcgtatttattgccaataataaagaagatttagcacaagtagcctacaaattaattagtcttgataatgaaaaatattatcatttgagacaaactatttatagcaagcgtgagcttttttctgaagagagatatgcggaaattttaacggcggcatttaatgaaaaaaaataa

SEQ ID NO: 11875 - DNA, 240 bp, Escherichia coli
atgactgtcgctgagaaaatcctgctgcgatgcacctggcttgacccggcagagaaagaggcccgtcgtttgcatctgcagggtatgacggttccggattatacggtgaaggtgagaaagtggttttgtgtgatgtgtgacgaagattatgaaggagaaaagtgctgcccgcgttgtggtaccggggtatacagcagggagggggggctgcaggaaggcaactggaaggataggaactga

SEQ ID NO: 11876 - DNA, 396 bp, Escherichia coli
atgctgcagggcgtaatcccgcaaccggtaataatggaccgtcatggcataattctccgtacgacaggcatgatggctgtacgtcatcagacaggcggcaatgccggcagcttccgggctcatttcagcgcggttaccgttcatggcattgaacagtatccaggtttctccatcatcttcatccggttcaggtgctataaatgcgccaccgttgttcagggtgtacagattccagatacccccgcagtagttttcgcacagacggtccatccagccgaagacacggggctccagggtgacccactgtggaatgaggccaaaatgctgcggccagaagctgatgcgctgttcatcagggacgggagtggcaaccaactgagactggttattccctga

SEQ ID NO: 11877 - DNA, 396 bp, Escherichia coli
atgaaacatactgaactccgagcagccgtactggatgcactggagaagcatgacaccggggcgacgctttttgatggtcgccccgctgtttttgatgaggcggattttccggcaattgccgtttatctcaccggcgctgaatacacgggcgaagagctggacagcgatacctggcaggcggagctgcatattgaagttttcctgcctgctcaggtgccggattcagagctggattcgtggatggagtcccggatttatccggtgatgagcgatatcccggcactgtcagatttgatcaccagtatggtggccagtggctatgactaccgacgcgacgatgatgcgggcctgtggagttcagccgatctgacttatgtcattacctatgaaatgtga

SEQ ID NO: 11878 - DNA, 123 bp, Escherichia coli
atgaaagcactactaattactgcattattcatggaattcatttcggtaaatactgcatctgctgctgaggagattcatcatgcagatagcaaagtcgacgatcaggtcctcatagctaagtaa

SEQ ID NO: 11879 - DNA, 351 bp, Escherichia coli; identical to SEQ ID NO: 9152

SEQ ID NO: 11880 - DNA, 288 bp, Escherichia coli
atggcaactttgcaggaattaatcgacctgacgccagaacaggaaaaagcgtggaatcgccttgtgaaggctgtaaaggatttcagggcagccggaggaaagttttatagcgtcctggacacgctgagcgcatacaacggcgagcacgttgccagcattgataacgataagggctaccacactgcaagcgtctatatgcctagcattgatgcgccagggctaaccagttgggctgatgattggcacggcatcacgctgaaagatggcgttgaagtggatgaggactaa

SEQ ID NO: 11881 - DNA, 399 bp, Escherichia coli
atggatggggctattcagtctgatagtaataaagaccttgccaaagcacatatagattttctcggatcatggttagataaagttaataagttaacaaataaaggtgttcatgccgagttagatcggattgaagctgtaaagtcagtatttcacacgtatttagtagtggcggatttgcttgagtatatgtcaaataccaaaacctctgtatctaagcctgatatcaataaagctactttagatgaactggaagcattgttaaatataaatagaacaatcgctaaagaaattgttaaagcacgagttcgtgaaggcaagcttgatctggatattttaaaaaacataaaaggtataggtgctaagacgcttagtaatatacaagaagtgtttgttatgtaa

SEQ ID NO: 11882 - DNA, 183 bp, Escherichia coli; identical to SEQ ID NO: 1007

SEQ ID NO: 11883 - DNA, 396 bp, Escherichia coli
atgaaacatactgaactccgagcagccgtactggatgcactggagaagcatgacaccggggcgacgctttttgatggtcgccccgctgtttttgatgaggcggattttccggcagttgccgtttatctcaccggcgctgaatacacgggcgaagagctggacagcgatacctggcaggcggagctgcatattgaagttttcctgcctgctcaggtgccggattcagagctggattcgtggatggagtcccggatttatccggtgatgagcgatatcccggcactgtcagatttgatcaccagtatggtggccagtggctatgactaccggcgcgacgatgatgcgggcctgtggagttcagccgatctgacttatgtcattacctatgaaatgtga

SEQ ID NO: 11884 - DNA, 261 bp, Escherichia coli
gtggggaatctctaccggctgatgcgcggctatgccaccggtggttatgtcggtacaccgggcagcatggcggacagccggtcgcaggcgtccgggacgtttgagcagaataaccatgtggtgattaacaacgacggcacgaacggtcagatagggccacaggcgctgaaggctgtttatgacgtagcccgtaaggcggcaatggatgttgtgaccgggcagatgcgcgatggtggtctgttctccggaggtggacgatga

SEQ ID NO: 11885 - DNA, 222 bp, Escherichia coli; identical to SEQ ID NO: 8358

SEQ ID NO: 11886 - DNA, 387 bp, Escherichia coli
gtgcgccagcaccacggcagcggcattgtggtacagggcgcgtttaatcacttcccggggatggacttccgtgcggttgatggtgccggtgaagagggtttcaccggcaatcagctgattctggttgttcagatacagcacccggaattcttcacgctccagtcccgccatgttaagaatcagccattcccgtgctgcacgggtggaggtgaaggccacgccgggttcatgaagatggcggtccagggttttcagggcccgcagaatgtgactgcgctcgccgggcgtcatttctccgggcagaaaggaaatctgttgcattattccggcccctttcagtcaatgatgcgcataatggcgctgcattccggatgctgcagggcgtaa

SEQ ID NO: 11887 - DNA, 156 bp, Escherichia coli
atggagtcccggatttatccggtgatgagcgatatcccggcactgtcagatttgatcaccagtatggtggccagtggctatgactaccggcgcgacgatgatgcgggcctgtggagttcagccgatctgacttatgtcattacctatgaaatgtga

SEQ ID NO: 11888 - DNA, 261 bp, Escherichia coli
gtgggaaatctctaccggctgatgcgcggctatgccaccggcggttatgtcggtggcaccggaagtccggcgcaaatgcggcgttcagagggtatcaggtttgagcagaacaacaacgtggtgattcagaacgacggtacgaatggtctgccaggtccacagatgatgaaggcggtgtatgacatggcccgcaagggtgcccgtgatgaaattcagacacagatgcgtgatggtggtctgttctccggaggtggacgatga

SEQ ID NO: 11889 - DNA, 1197 bp, Escherichia coli
atgaaaacctggatctttatatgtatggccgtagcaatattgctatggtttctgagtacgttaaggcgtaagcccagccaaaagaaaggctgtattgacgccattatacctgcttataacgaaggcccgtgtctggcgcagtcactggataatctgctgcgtaacccttatttttgccgggtaatttgcgttaacgacggctccacggacaataccgaagcggtcatggcggaagtcaaacgcaaatggggcgaccgctttgttgccgtcacgcaaaaaaataccggtaaaggtggtgcgctgatgaatggcctcaattacgccacctgcgatcaggtttttttaagtgatgccgacacctatgttccgcccgatcaagacggaatgggctatatgctggcggaaattgagcgtggcgctgatgccgtaggcggcattccctctactgcgttgaaaggcgcgggtctgttaccacacatccgcgcgaccgtaaagttgccgatgattgttatgaagcgcacgctacagcagcttctgggcggcgcaccgtttatcatcagcggtgcctgcgggatgttccgtactgatgtattgcgtaagttcggtttctcggatcgtactaaagtcgaagaccttgatctcacctggacattggtggcaaacggctatcgtattcggcaggcgaatcgctgcatcgtatacccacaggaatgcaacagcccgcgtgaggaatggcgtcgctggcggcgttggattgtgggctacgcggtctgtatgcgcctgcataaaagacttttatttagccgcttcggtatcttcagtatatttcctatgctgttggttgtgctttatggcgttgggatttatctcactacctggtttaatgaattcatcaccaccgggccacatggtgtggtgttggcaatgttcccgcttatctgggtcggcgtagtttgtgttattggtgcatttagcgcctggtttcatcgttgctggttgttggtgcctttagcaccgctttccgttgtgtatgtattattagcttatgccatctggattatttatggacttattgccttttttactggacgcgaacctcagcgcgacaaacccacccgctattccgcactggtggaagcgtcaaccgcttattcccacccttctgtcacaggaactgaaaaactttctgaagcttaa

SEQ ID NO: 11890 - DNA, 246 bp, Escherichia coli
ttgcctctcctccctgtcgtggagcaggaagcatcgcgtaaaaacgcattaacgcatttgcaactgtcggcgcttttccagtatgttgctaaagattttatgaaaaacggcctgcgggccgttttgttttgtctggattttgcgctttttgcccagcattcagacgaaaatcgcccgggaattgtgaaaaaatacgcgacagcgcgcaataaccgttctcgactcataaaagtgatgccgctataa

SEQ ID NO: 11891 - DNA, 2973 bp, Escherichia coli
atgaaggagaataaccttaatcgcgtcatcggatggtctggtttactgctgacatctttattgagtaccagcgcactcgcagacaatatcggcaccagcgcagaagagctggggctgagcgattatcgccattttgttatttatccccgtctcgataaggcgctgaaggcacagaaaaataacgacgaagcaaccgccatccgcgaatttgaatatatacaccagcaggtgccggataatattccgctgactttataccttgcggaagcctatcgccattttggtcatgatgaccgggcgcggctgttgcttgaggatcaactgaaacgtcaccctggagatgatcggcttgagcgcagtctggcggctattcctgttgaagtgaaaagcgttacgactgttgaagaactgcttgcccaacaaaaagcgtgcgatgctgcgccgaccctgcgttgtcgcagtgaagtcgggcagaatgccctgcggctggcacaattacctgtcgccagagcgcaactgaacgatgcgacgtttgctgcatcgccggaaggaaaaacgctgcgaaccgatctactgcaacgcgcaatctacctgaaacaatggtcccaggcagatacgctatacaatgaagcacgccagcagaacacattaagcgcggcagaacgccgtcagtggtttgacgtgcttcttgccgggcagctggacgatcggatcctggcgctgcaatcacaggagatcttcaccgatcctcagtcatatattacttacgcgaccgcgctggcttatcgtggcgaaaaagcacgcctccagcattatctcattgaaaataagccgctgtttaccacggacgcacaagagaaaagttggctctatctgttatctaaatacagcgccaaccccgttcaggcgttggcgaattatacggtacagtttgccgacaaccgccagtatgttgttggcgcgacgctaccggtgctgttaaaagaaggtcagtacggcgcagcgcaaaaactgctcgccaccctccccgccaatgaaatgcttgaggagcgttatgccgttagcgtagcgacccgtaacaaggctgaagctctgcgtctggcacgattgctgtatcagcaagaaccggcaaatcttacccgcctggatcaactgacctggcaactgatgcagaacgaacagtcacgcgaagctgccgatttattgctgcaacgctatcctttccagggcgatgcgcgtgtcagccagacgttaatggcgcgactggcgtctctgctggaaagtcatccttacctggcaacgccggcgaaggtggcgattttatcgaaacccttaccgctggcggagcaacgtcagtggcaaagtcagttgccgggtattgcagataattgcccggcaatagttcgcttgctgggcgatatgtcgccttcctacgatgccaccgcctggaaccgtctggcaaagtgttatcgggacacgctacccggtgtggcgttgtatgcatggcttcaggccgaacaacgacaaccggacgcctggcaacatcgtgcggtagcctatcaggcgtatcaggttgaggactacgccaccgcactggcggcctggcagaaaatcagtcttcacgacatgagcaatgaggatctgcttgctgctgccaataccgcccaggcggcaggaaatggcgcggctcgcgatcgctggttacaacaggcagaacaacgtggactgggaaacaatgccctctactggtggctacatgcgcaacgttacattccaggtcagccggaactcgcactgaacgatctcacgcgctcaatcaatattgcgccttctgccaacgcttacgttgcgcgggcaacaatttatcgccaacgtcataatatcccggcggcggtgagtgatttgcgcgccgcgctggaactggaaccgaataatagcaacacccaggcagcgcttggttacgccttgtgggatagcggtgatatcgcacagtcgcgggaaatgctcgaacaggcacataaagggctaccggacgatccggcacttatccgacaactggcctacgtgaaccagcgtctggatgacatgcctgcgacgcagcactacgcccgactggtgattgatgacattgataatcaggcgctgataaccccactgaccccagagcaaaatcagcaacgcttcaatttccgccgtctgcatgaggaggtcggtcgccgctggacgttcagtttcgattcttctatcggcttgcgttccggcgcaatgagtaccgctaacaataatgtcggcggcgcagcgccagggaaaagctatcgtagctacgggcaactggaagccgagtaccgcatcggacgcaatatgctgctggaaggcgacctgctctcagtttatagccgcgtctttgccgataccggtgaaaacggggtgatgatgccggtgaaaaatccgatgtccggcaccggattgcgctggaagccgctgcgcgatcagatctttttcctcgccgtcgaacagcagttgccgctgaacgggcaaaatggcgcatccgataccatgctgcgcgccagcgcctcattctttaatggcggcaaatacagcgacgaatggcacccgaacggttcaggctggtttgcccaaaacctgtacctcgatgcggcgcaatatgtccgccaggatattcaggcgtggacggcagattatcgcgtaagctggcatcagaaggtggcgaacggacagactattgagccttacgctcacgtacagggtaacggctatcgggataaaggtactcagggcgcgcaagtgggcggcgttggcgtacgctggaatatctggaccggcgagacgcaatacgacgcctggccgcacaaagtcagtctcggcgtcgagtatcaacatacctttaaggcgattaatcaacgtaacggagagcgcaacaacgcgtttctcaccattggagtgcactggtaa

SEQ ID NO: 11892 - DNA, 2238 bp, Escherichia coli
gtggactggcttcttgatgtttttgctacctggctctacggcttaaaagtaatcgcgataacgttagcggtcattatgttcatcagcgggctggacgatttttttattgatgtcgtctactgggtacgccgcattaaacgcaagttgagtgtttatcgccgctacccgcgaatgagttaccgcgaactgtataaaccagatgaaaaaccgttagcgattatggttccggcgtggaatgaaacgggcgtcatcggcaatatggccgagctggcggcgaccacgctcgactacgaaaactatcatatctttgttggcacctaccccaacgaccccgatactcagcgtgatgttgacgaagtgtgcgctcgcttcccgaacgtgcataaggtagtctgcgcgcgtcctggccccaccagcaaagccgactgtctgaacaacgtgctggacgccatcacccaatttgaacgtagcgccaatttcgcttttgctggttttattctgcatgacgccgaagatgtgatttcaccgatggaattgcgtctgttcaactatctggtcgagcgtaaagatctgattcagatcccagtgtatccgttcgaacgcgaatggacgcacttcaccagcatgacctacattgatgagttttcagaactgcatggcaaagatgttccggtgcgtgaagccctcgccggacaggtgcccagcgcaggcgtcggcacctgtttcagccgccgcgccgtgaccgcactgttagctgacggtgacggtattgctttcgacgtgcagagtctgactgaagattacgacattggcttccgcctgaaagagaaaggtatgacggaaatttttgtccgttttccggtggtggacgaagccaaagaacgcgagcagcgtaaatttttacagcatgcgcggacgtcaaacatgatctgcgtgcgcgaatatttccccgataccttttcgactgcggttcggcaaaaatctcgctggatcatcggcattgttttccagggctttaaaacccacaaatggacctccagcctgacgctgaactactttctctggcgcgaccgcaaaggggcaatcagtaactttgtcagcttcctcgcgatgctggtgatgatccagcttttgctgttgctggcgtatgaaagtttgtggcccgatgcctggcatttcctttctattttcagcggcagcgcatggttaatgactctgctgtggctaaactttggcttgatgattaaccgcatcgtgcagcgggtgattttcgttactggctactacggcctgacgcaggggctgctatctgtcctgcgtcttttctggggcaacctgattaacttcatggccaactggcgcgcgttaaaacaggtacttcaacacggcgatccacgtcgcgtcgcgtgggataaaacaacgcatgacttccccagcgtgactggcgatacccgctcgttgcgtccgttaggtcaaatcctgctggaaaatcaggtcatcactgaagaacaactcgatacagcactgcgtaatcgcgtcgaaggtctacgcctgggcggttcaatgctgatgcaggggctgattagcgccgagcaactggcacaggcgctggcagagcaaaacggcgtggcgtgggaatccatcgatgcctggcagatcccttcctcgctgattgccgaaatgccggcctccgtggcgctgcattatgcggtactgccgctgcgtctggacaatgatgagttaattgtcggcagtgaagatggtattgacccggtttcgctggcggccctgacgcgtaaagtcggacgcaaagtgcgttacgtcattgttctgcggggacaaattgtcaccggattacgccactggtatgcacgccgacgcggtcacgatccgcgggcaatgttgtacaatgcagttcagcatcagtggctcacggaacagcaggccggtgaaatctggcggcaatatgtgccgcatcagttcctgttcgcagaaatactgaccacgctcggtcatattaatcgttcagcaattaacgtgttgttattgcgccatgaacgcagttctctgccgctcggcaagtttttggtcaccgaaggcgttatcagccaggaaacgttggatcgcgtcctgacaattcaacgcgaattacaagtttcgatgcaatcactattactcaaagcaggtttaaacactgaacaggttgcacaactggagtccgaaaatgaaggagaataa

SEQ ID NO: 11893 - DNA, 156 bp, Escherichia coli
atggcaatcgcttattggcaaaatgacaattttgtcattttcctgtcaccggaaaatcagagcctggcgagtaaagttggcggcataaaatcaccagaaattatgagcctatgtctccttgtaaacttctgccattttgtgtggcccttgcgctaa

SEQ ID NO: 11894 - DNA, 300 bp, Escherichia coli
atgcgccttttacttatagaagatgaagagaaaacctcgacgtatatgagcggttttatcgcatcgacacctcccgggcaagaagtgatgcccatcatgggttgggtctgtcgattgtgcgcgccgtcgctattatgcaccggggagatgcctttgcccgtagtgaaggtggcatcaatacatttggcctcacctttgcgatgcaagcgaataaaacggcggacaattcgccttcagacactgagtctggagctgacaaaattgtcagggaggcgtcagcctgacgacatgtccgtctga

SEQ ID NO: 11895 - DNA, 396 bp, Escherichia coli
gtggtaatactgaaagtcttaacaccatttatcttcccggaaaatgagatgcctgcaccggtgaagacgacatttgcccccttgagtgcttccgcaatgggtgttcccatgaatgaatttctcaaactcacgcgaatcccaatcgttatctattatggcgattttattgctgaaaaaccggatactgccgttggtccggataaatggagaagtgaatatgaaatggcaaagcaatttgtcatgacagtcaatcgtcacggtggagacgccacccttgtccatcttcctgatattggtatcaaaggcaattctcatttcctgatggcggaaaagaataatcaggagattgccgggatactggcatcgtggttacaagataaaggactcgataaataa

SEQ ID NO: 11896 - DNA, 495 bp, Escherichia coli
atggcgacacttgagcaacttatcattttctttcttcttattggcgttggtgtcattgctcgtaaagtgggagttattactccaggaaacacgccccaactcacatctcttgtttttaactttgcgatgccagccattatactttccggtattacaactgaacagccacatatttccggaaaagatctttccatcgtacttacatccgcattcactacgcttattttactgattatttgcagtcgtatgctggcaagaattttacgctatgaaagagaatactatggtgtgattactgttatgacaacatttactaatgtttccatgatggggatcccaatgatatattctttatacggctccgaagccatgatttatatcactgtctttttactcccatataacttattgttcttttcatatggttattactgcatgaaggaccagagtggtaatactgaaagtcttaacaccatttatcttcccggaaaatga

SEQ ID NO: 11897 - DNA, 1608 bp, Escherichia coli
atgtatacgcgaaatttattatggctggtcagcctggtaagtgcggctcctctctacgctgctgacgttcccgccaacacacagctcgccccgcaacaagtctttcgttacaacaatcatagcgacccaggcacgctcgacccgcaaaaggtagaggagaatactgccgcgcagattgtgctggatctgtttgaaggtctggtatggatggacggtgaaggccaggtgcagcccgctcaggctgaacgctgggagatacttgacggcggcaagcgctatattttccatctgcgtagcggtttgcagtggtcagacggtcagcctctgacggcagaggattttgtcctcggctggcagcgcgcggttgacccgaaaacggcaagcccttttgctggctatctggcacaggcgcacattaacaatgccgcggctattgttgcgggtaaagcagatgttacatcgctgggtgtcaaagcgacggatgatcgtactcttgaagttacgcttgagcagccagttccttggttcacgacgatgctcgcctggccgacgctgttcccggttcctcatcatgtcatcgctaaacatggcgatagctggagtaagccagagaacatggtttacaacggtgcctttgtgcttgatcagtgggtagttaacgaaaagattactgcacgcaaaaatccaaagtaccgcgatgcgcaacatacagtattgcaacaggttgagtatctggcgctggataattcggtcaccggctataaccgctatcgcgcaggagaggtcgatctcacctgggttccggtgcagcaaattcccgccattgaaaaatcactgcctggcgagctacgaattattccgcgtctgaacagcgaatattacaacttcaaccttgagaaaccgccatttaacgatgtgcgagtgcgtcgggcgctatatcttacggttgatcgacagcttattgcgcaaaaggtactggggttgaggacgcccgcaactacgctgacgccgccagaggtaaaaggctttagcgcgacgacgttcgatgaactgcaaaagccaatgagtgagcgcgtcgcgatggcaaaagccttgctgaagcaggcgggatacgacgcctctcatccgctacgctttgagctgttctacaacaagtacgatctgcatgaaaagaccgcgatagcgttgtcttccgaatggaaaaaatggctgggtgcacaggtgacgctgcgcacaatggagtggaaaacctatcttgatgcccgacgagccggtgatttcatgctgtctcggcagtcgtgggatgcgacgtacaatgatgcttccagcttcctgaacacgctcaaaagcgatagtgaagaaaacgtcggtcactggaaaaatgcgcagtatgacgccttactaaaccaggccacgcagatcactgatgcgacaaagcgtaatgcgttgtatcagcaggcagaagtgatcatcaaccagcaggcaccgctgattcctatctactatcagccgttaatcaaactacttaaaccctacgttggcggttttccgctgcataatccccaggattatgtctacagcaaagagttgtatatcaagacacattga

SEQ ID NO: 11898 - DNA, 525 bp, Escherichia coli
atgaaacgaacaatacttgcattatgcctgctacctttttccttttcgtcactgtcggcaaccacagacttaggggcgaaaggaacgttgaaattctctcttaaaatcagccagggagcctgtgaactggtaaaagacagtgttgaagttgacatgggattagcggttctcaaaaagccagtaagaatcggaacagaacttaatcccactactttttccatcggtctgaaaaactgtagcgaagttgtcagggcttacgtcaccatggatggaacacccaatgcggacgatccaaatctttttgcgctggatgcgggtggtgctacgggcgtggggttgaaaattaaaacctctgcgggagtacaacagttcccgaaaaatacgacaccgacgccgattgagttcgcgattaacggtgatggcgcgcatcaactgaactatatcgccagctacgtgccgctgcgtgctgatgcaaccattggccgcgcagatgcgacggtcgattttacggttcagtacgaataa

SEQ ID NO: 11899 - DNA, 1053 bp, Escherichia coli
atgaaaattaaaaacttgttggcaggtatggtgcttttagggacgagcacctttaccgggaatatatgggctgcggattgggggccgtgcaggacggcaagtggtgacccctttatttttgttacatcattcaccaaaaatattcaaaatccgacggataatgttaccgggcagacctaccctgatttttaccaatgggcactgggtgataaatattctggtgtttgtgaatgtccatcaccgaacccgacagaagcacgaccaacgctatataaaactgagtcaacattggcggcggggcataactcaacctattttaaaattaccaataatcttgaggtttcaacccgggtatatattgcaaacgtggggaatgtacaggttccatttatcaataaatcaaatagccagccaggaagagagtgcgatcaaccaacttttggctggactacagggagtaaaggacagctctcactttatatcgctaaaccttttgttggggaacaaaacattccgcaaactattatagtttctgtgtttggtacaaaaaaggagaatgtttatagttcagttccaatatcacaggtgcttctttcaggaaaggtcaccgtaactcaaggctgtgaacttgccgcagggacatcattggatatcgactttggtgagtatcaggcccatgatttcaaaggtcgaaccgggcagccgccacaaaatgtccagaaaatacaaaaagaattaacgtttaactgtactaatatttctgatggtgtccatatctatctgagtcttgaaggtacgccaaacgcggcttaccccagcgcaatcagtttgggcaacgcggatgttggtgcggtaattgaggatggtaaaggtaatattcttaagccgaatgatagtaatagcttattagaaatgaatcccggctcactgtacgaatatgtcaaacgtaaagtaacaaccaccattactgcttatccggttagtacaaccgggaaattacccgcagccggtgattatagcggtgtggcaacaatgcatgttgaattggattag

SEQ ID NO: 11900 - DNA, 2532 bp, Escherichia coli
atgcattggatgcatttacctcttgatcactacagagcgcatttttctttctcactgttggcattaactattgccagcgcgttacctgcgtacggcggaaaattcaaccctaaatttcttgaaaatgttcagggtattgatcaacacgtcgatttgtcagtttacgactctcctgtcggccagcaaatacccggtaaatatcgggtatttgtgtttgtaaacgaagaaaaaatggcttcccggacgctggattttagtactgccagcgaagcacaacgcaaagccagcggcgagtcgcttatgccttgccttagccgtgttcaactggaagaaatgggcgtgcgcatcgacagctttccggcactgaagatattgccaccggaagcctgcgtagcgtttgatgaaatcattccccaggccaccagtcgttttgattttaatactcagacgttgcatcttacctttccacaggcagcaatgatgatgaccgctcgtggcacggttgatccttctcgctgggacgaaggaatacctgcgctgttactggactacagctttagtggcagcaatggtcgcaacgaaggttccggttcatctccagattcgaccagtgacagttattacctgaacttgcgcagcggtttgaacgtggggccgtggcgtttacgtaataacagtatctggaaccgtaccgatggcaaaaatcaatgggataacgttggtacatcgttaaaccgggcgattattccactcaagtcacagataacattgggtgataccgccacgcctggcgagatttttgatagcgtacaaatgcgcgggacattattggcatccgacgatgaaatgttgccggatagccagcgtggctttgctccggtggtgcgtggcatcgccaaaagtaacgctgaagtgagtatcgaacagaacggatatgttatttatcgtacctttgttcagccgggcgcatttgagattaacgatctctacgcaacctccggcagcggtgacttgacggtgatcattaaagaatctgacggaagtgaacaacgttttattcaaccattttcggcagtggcgattttccagcgtgaagggtatctgaaatacagccttgctgccggtgagtatcgtgccggtaattacgacagcggtaaaccgcgattcgggcaatttactgccatgtacggcttgccgtggggaatgaccgcctatggtggtgcgttgctatcggcagactacaacgctttagctctggggctggggaaaaacttcggcaccattggtgcggtatcggtggatgtcacccaggcgaaaagtcagttacgcaacaatgaaaaagatgaagggcagtcttatcgtttcctctattcgaaaagttttgagggtggtaccgacctgcgtctgttgggctacaagtactcaaccagcggttattacaccttccaggaagcgaccgatgtccgtagtgacgccgacagtgactatcggcgttatcataagcgcagccagatacaaggtaacatcactcagcaactgggagactacggttctgtttacttcaatatgacgcagcaggattactggaacgttgatggtaaggagaactccttaagcgctggttatcacggtcatattggtcgtgtgaattacagtatcgcctatacctggacgagaagccctgaatgggatgaagacgatcgactgtggtcatttagcctctcaataccgctgggtggcgcatggggcagttatcgtatgaccaccgaccagaacggcaagacgtcacaacaggcctctgtcagcggcacattactggaagatcgtaacttgaactataacgttcagcagggttataccagtaatggggttggcaacagtggtagtgtcaacatgggttatatgggaggttctggcaacattgacgtgggttataactattccaaagataaccaacaagttaactatggtgtgcgtggtggagtcattgttcacagtgaaggtatcactctctcgcaacccttgggtgaaagtctggcaattgtttctgcgccgggtgcgcatggtggacatgtagtaaatagcagcggcgttgaagttgactggatgggcaacgcagtggtgccgtatctcacgccatatcgtgaaaccattgtggaattgcgcagcgacacgttagggcaaaacgttgaattacaggaagcgtttcagaaagtcgttccaacgcgtggggcgatagtccgttcccgctttgatacgcgtgtcggttatcgtgtgctgatgagtttgaaacgggcgaatggcaacgcagtaccgtttggtgctaccgcagcgttaagtgatgagagcaaacctgccagcagcattgtgggtgaagaaggacagctttatatcagcgggatgccagaagagggcgaattgcaggtgagctgggggcacgagcaggcgcaacgttgccgcgtgccattccgcttgccagagaaaaaggataattcgggtatcgtgatggttaatgcggtatgcgataaataa

SEQ ID NO: 11901 - DNA, 687 bp, Escherichia coli
atgaaacgaattagccttgccgttctggcgcttttaatgaccgcacaacagtgttttgctggcggcgtagccctaagcacgacgcgcgttatttatgatggtggcaagaaagaagcgtcgctgaccgttgaaaaccataataaaaatgaagagtttttgatccagtcatggattgatgatgtgaatggaaataaaaaaacgccgtttattattacaccgccattattcaaacttgatcctgataaaaataacgtcttacgtattgttaatattgaagataccttacccaaagatcgtgaatccgtttactggattaatgtaaaagcgattcctgcgaaaagtgctgaaaatgaaaataaaaacgtcttacagatagccgttcgcacccgtttgaagttgttctaccgtccgaaaggcttgccgggaagcaaccttgaagcaatgaaacagttacgatttcagcgtcaaaataaccaaattgtggttaataacgactcagcttataacctgacctttaatcagatgtccattaatggacaaaagattgaacgggcgggaatggtcctcgctaaaggaacgttaaacattaaccttccagccggtacaggcaatgcgaacgaagtgaaatacagcattattaatgatttcggtgtcgccggtgaaatgctgacgaagtcgattaactga

SEQ ID NO: 11902 - DNA, 525 bp, Escherichia coli
atgaaaaaggttctgtttgccttatctgcgcttgcgctgacctctacttccgtattcgcagctgatgcaggcgacggttctgttaaattcaccggagagattgttgacgccgcttgtgttgtgtctccagacactcaaaaacaagaagttgttctgggccaggtgaacaagtctgtgtttaccactactggtgataaatctgcagcaactccgttcaaaattaaactggaaaactgcgatatctccactttcaaaaatgtggagatcagctttaacggtgttggcgacgcagacaacagcaaactgatttctgtaagcactgaaccaggtgccgcaactggcgtgggtattggtatttatgataataccaatacgctggttgatctgaataccggtaaatctgctaccgtcctgaaagaaggccagactgttctgtattttaccgctaactatgtcgctaccaaaaatgcagtaaccatcggttacggtaatgccgaagtcgacttcaacctgacttacaactaa

SEQ ID NO: 11903 - DNA, 282 bp, Escherichia coli
gtgagcaaaattaactatcaggcactgcgtgaggcggcagaaaaggcaacacagggcgaatgggttgcatttatttcgtcggatactggtacatatgcggtgcatacacccggtgataaacgatgtgaagacgttatcaaatggaccggctttgatggacagaaaaatgcagagaacaacgcgcgttatatcgcagctttcaaccctgaagtagtgcaggcgttgctggatgaacgggaaagaaaccagcaatacatcaaacgccgcgaccaggagaactag

SEQ ID NO: 11904 - DNA, 192 bp, Escherichia coli
atgaacggacaaatatcaattgttcgaccgggagcatgtgacgattgcgagatacgaatgattattcgtttggcgagggggaaaacaataacggctctcattactccagaaaatctcgcattagcattaaccggaaagtcagacctgccagtagagctaaagctgcgaaatgttgagattacggtgaaatag

SEQ ID NO: 11905 - DNA, 849 bp, Escherichia coli
atgaaaaactttaaggtaattagtatgtttgaatcgttcaaagagctgtttttatctactgccaacactgccgtgcatcgagccaaaaaccctgtgcttggtgcttttgttatgtcctggtgcgccttcaactggaaatcacttctttatctgttttttagcaaatcaaatataatagataaaatttcatacatctcagataacagcacatggaaaactgttatgttttatccatgcttatctgtaattactatctgctgcctattaccatgggtaaacaatatcattaacgtatggcaagcaaaacctcttgataataatgactcaatcgaaaaccaccggaaggcaagaaaaatacaacgtgaaacacggctacagagattgctggctaaaaaagacattacttacgaaaaagtaaaaacaggcgctgaaaaaaacattcaagacatgaaagaggaaataattctttcaaaagacagaatgggacaactcacatctgaattaaaagagagggagacagaactgcgcgcagcacaagctcgtattttagaattatctaaggttattaatgaaacaacatctaaactagaaaatctagaaaaagctcacaaaaatttaaaaaacgaatatgagtcctataagaaaaacattcctttggcaacaaataatacaattgctaatgggtttgtaggtctaaaatcattacaagaccttaatgagtccgtaaagaaacttggcgttactggaattaacaatccagaaatcagtacattattgaataatcctctagtaaatataaatggtggtttaaattccacctatcaaagaaaatcaaaaacacaaaagtaa

SEQ ID NO: 11906 - DNA, 441 bp, Escherichia coli
atgattaagccgatgcacgctattacagctaccgttttgtttatcctaccaattttttcgtttgcaaacgacatatgttttaagaatttaataaatgaggatatgtgtgcacatgcaaacaaaattgcatcagaagcaggaaagtcacttcccataaaattgaatgataatatgtctattgtttcaataaatgcaatactaaacaaacttttagttgtagcgcaacttaattacaacaacagctatttatcaaaagtttataacggtgatgtaaccttagaaaataagttaaagagtgtaatgcgaaattattcaaaatcgagcatttgctccaacaggcaaatgaaagcatttattcaccttggcggagagattgaatataggtatgtatttagtgatggcaatatatttgatacatacgccatcactaattgtgaatag

SEQ ID NO: 11907 - DNA, 450 bp, Escherichia coli
atgttcaagaagatgatcaacagattaatcggtggtaaggaggttagcaataaaattcaacctcttatctttaaggataacttttcagcttttgagtatgcgtgtaagtatcttgacacaagcctttcagccaataaaccaatgccagccatcatcatacctggtccaagtggggaacagccagttttgctagattctggaagacaaagggcaatgctgaaggtgtgctcagctgatggtggattttttgttattgccgattcatcttacagcaaaggaccaaagctgaggattggtgatcttgttgcttggttgcctgtgagttatgccgaagaattaacggataaaatagaagatcctcgctccgctatggttggctttatattgggaaccattcatcctgaactaacatctactggctggaagggtaaagaaagatttcgcaagtag

SEQ ID NO: 11908 - DNA, 540 bp, Escherichia coli
gtgttaagtgaagaaatgcaatttgccatggctgtggctcaaatcgtaagtgcagtcgcggtttcgcttggcttgttcatagctatcgctactattatttataatgtaaatacagcgagaaaagtacacacttcagtattccttggtgaaagcaggtttgatgtagattataagaaaggcctatctactatgcgccgcattcacgagtcgaacaaatcattccgctcttatatgtatccaagcaatgggcaggctgatcttacggatgaagaaaagatagagaagagagaaataatttactgtctaggtttctacgaacgcatggctgtgagcgtgaagcggaaaacttatgatgagaccatgattaaggaagtattttacagctccgttgtaaataactatcagattgcgctacctcttatacaagctattagagaaaaagaaaacataaacacatattttaaagaatatgaatggttggccacacgatggaaggattgtccattgaaggataaatccccgtggtacaagttttggtaa

SEQ ID NO: 11909 - DNA, 3120 bp, Escherichia coli
atgacggtctcaaccgaagttgaccacaacgaatacaccggtaacggcgctacgacatcatttccgtataccttccgtattttcaaaaaatccgacctggttgttcaggtgtctgacctgaacgggaacgtaacagaattggttctggataccggttatacggtaactggagcgggcacttatagtggcggttctgttgttcttccgtcgccgcttgctgctggctggcgaattacgatagatcgtgtgcttgatgtagtgcaggagacagaccttcgcaatcagggaaagtttttccccgaagtgcatgaagatgcctttgactacctgacgatgctgatccagcaatgttttggatggttcagacgtgcattgatgaaaccatctttgcttgcaaaatattacgatgcaaagcaaaacagaatttctaaccttgcagatccatcacttgaacaggacgctgtaaataatcgctcaatgcgtaattatgtcgatgctgcaatcgccggggttgttggtggttttggttggtttattcagtatggttctggggctgtgtaccgaacgttccaggataaaatgcgtgatgctattagccccaaagattttggagctgttggtgatggtataaatgacgattccactgcaataagcgcgtgccttgaagcctcatctccaggttataaaattgacggattagggcttacttttaaagtatcaactcttccggatgtcagccgatttaaaaatgctcgttttttatttgagagaataccgggtcagcctcttttttatgcttctgaagattttatccagggagagttatttaaaattacagatacaccgtggtacaacgcctggacgcaggataaaacgtttgtatatgacaatgtcatctatgcgccttttatggctggagaccgccatggtgtaaataacctccatgttgcatgggttcgctcaggagatgacgggaagacctggacaacgccggaatggcttacagatttacatgaaaactatcccacagttaactatcactgcatgagtatgggggttgtcagaaatcgcctttttgctgtaattgagacgcggaccgtgagcggaaataaactgcaggttgcagagttgtgggatcgcccaatgagtcgcagccttcgcgtttatggtggtataacgaaagcagcaaatcagcaagtcgcttatattcgcattactgatcacggattatttgctggtgattttgtcaacttctcaaactctggtgttacaggtgttaccgggaatatgacggtgactactgttattgataaaaatacttttacagttacgacgcaaaatacccaggatgtggatcagaataacgagggtagatactggagttttggtacatcatttcactcgtcaccatggagaaaaaccagtcttggaactattccttcttttgttgacggaagcactcctgttactgagattcacagttttgcgacgattagcgataacagttttgctgttggctaccataatggtgatattggtccacgcgagcttgggatactctatttctctgatgctttcggttctcctggtagctttgttcgcagacgcatacctgcagaatatgaggcgaatgcatctgagccatgtgtaaaatattatgatggcattctgtatctgacgaccagggggacattaagtactcaacccggtagttcattgcacagaagctctgatttaggtgcatcatggaattctcttcgcttcccaaataatgttcatcactcaaaccttccttttgccaaagttggcgatgagctgattatttttggcagtgagcgcgcatttggtgagtgggaaggaggagaacctgataaccgttatgcaggaaattatccaagaacatttatgaccagagttaacgtcaatgagtggagtctggataatgtagagtgggttaatgttactgatcagatttatcagggcggaatagttaactctgcggttggtgttggttcagtttgtatcaaagacaactggctgtactacattttcggtggggaagactttctaaacccatggagcataggggataacaacagaaaatatccttatgttcacgatggtcacccggctgatttgtattgtttcagggtgaaaattaaacaggaagaatttgtttcaagggattttgtctacggagccactcctaacagaacgcttcctacttttatgtcgacgtccggcgtgaggacggttcctgtacccgttgatttcacagatgatgttgccgtccagtcactgactgtccatgcaggtacatcaggacaagttcgcgcggaagtcaaactggagggcaattacgccattattgcgaagaaagtaccgtctgatgatgttaccgctcagagattaatcgttagcggcggtgaaacaacgtcttcagcagatggtgcaatgataacgttgcatggttccggaagcagtactccacgtcgcgcggtatataacgcactcgaacatctttttgagaacggagatgttaaaccttatcttgataatgtaaatgctcttggtggtccgggaaacaggttctcgacagtttatcttggctccaatcctgtggttaccagtgacggaacattaaagacagagccggtctctcctgacgaagcattgctggatgcctggggtgacgtcaggtatatcgcttataaatggctgaacgctgtcgctataaagggagaagaaggggcgaggatacatcatggtgtaatcgcgcagcaacttcgtgatgttcttatttctcacggactcatggaagaagaaagcacaacatgccgctatgcctttctttgctatgacgattatcccgcagtatatgatgacgtcattactggccaaagggaaattccgctgactgataatgacgggagcatcattgttgatgagggtgataatccagtgatggtaatggaagacatcattgagcgcgttgaaataacgccagcaggatctagatggggggtcagacctgatctcttattctatatcgaggcagcatggcagcgcagagaaatggataagataaaagagcggattcagtctctggaagaacgttaa

SEQ ID NO: 11910 - DNA, 1227 bp, Escherichia coli
atgatggataacgataattctcttcataagcgccccacgtttaaaagagcattacgcaacatcagcatgaccagcatatttatcactatgacgctgatctggctgctgctttccgtgacgtcagtgctaaccctgaaacaatacgcgcaaaaaaacctggcactgacagcagcaacaatgacttacagtctggaagcagctgtcgtttttgccgatggccctgcagcaactgaaacactggcagcgctgggccagcaaggccaattttcaactgcagaagtgcgtgataagcagcaaaatattctggcatcctggcattacacccataaggaaccaggcgatactttcagcaatttcataagccactggctcttccctgcccccatcattcagccgattcgtcacaatggtgaaaccattggcgaagtacgcttaactgctcgcgacagttcaatcagccattttatctggttttcgctcgctgtcctgaccggttgtattctgctggcatcaggcatcgcaattaccctcacccgccatttgcacaatggcctggtggaagcgctgaaaaatatcaccgatgtcgtacatgatgtgcgttctaaccgcaatttttcccgacgagtttcggaagaacgtatcgctgagtttcaccgcttcgctctcgacttcaacagtctgctggatgaaatggaagagtggcagcttcgtttacaggccaaaaatgcgcagcttctacgtaccgcgctacatgacccattaaccgggctggctaaccgcgcagcgtttcgtagcggcatcaacacgttgatgaacaattccgatgcccgaaaaacgtcggcgttactatttcttgatggcgataatttcaaatatatcaatgatacctggggtcatgcgacgggcgatagagtcttgattgaaatagcaaaacggttagctgaatttggcgggctgcgacataaagcataccgcctgggcggcgatgaattcgctatggtgctctatgatgtacagtcggaatctgaagtgcagcagatatgctcagcactgacacaaatttttaatctcccgtttgatcttcataatggccatcagactaccatgacattaagcattggttacgcgatgaccattgagcatgcctctgcggaaaatttacaagagcttgccgatcacaatatgtatcaggccaaacaccagcgtgccgaaaagctggtgagataa

SEQ ID NO: 11911 - DNA, 483 bp, Escherichia coli; identical to SEQ ID NO: 4207

SEQ ID NO: 11912 - DNA, 810 bp, Escherichia coli
gtgtcaaaaaaggatacaatccagattatcgatatcaggatgcagagaccaatcatagcaagaatagaagaagaaaatttaaatttgacattgcaaatgtcagataaagccacattatctggtgcgacagttagttttttcaccccaaataacgtttctatattcttatcctcagcaaaaaaagagctctcaaaatccaattctatatataaaagtctttttggaaaaatacacaaaaccaaacataaaaactttaaaatttccgacaaagacctgccgagactctataattactttgaatcaattcagacggccattatttctatgtatactgcaattgagtcttttgcaaatatatgcataccacatgattatgtttatgaaaaaaacaatgccaagggaatcaaagaatcctatagcaaagagctaattgagcgatatataccaacaagtgaaaaaatagataaaatcctaccgtctattttaaattgtgattcacctaaaggttcaaaactatggcaagattttaaaagccttgagtcacttagaaatgacataattcaccccaagacaacaaagaaaaacacagaaacaaaagaagactcatcttttttatgcattttactatcagatgactttataaaaaaagtttcctgtggatttgatttggtatcttatttttgcaaacaagacactactcatagtcttttcccaatgggtttcggtgaaattgaacttaaacctgtcccaattaaagccggtgactttgaaaaagttgatgatcatgatgaaatagaattaccatcataa

SEQ ID NO: 11913 - DNA, 1041 bp, Escherichia coli
atgactgtaagtaagcaaaaaaatggcaaatggttatgcgagctctatccaaatggtcgagaagggcggcgtatacgtcggcaattcaataccaaaggtgaggccgaggcattcgaagcatttacgaaaagtgagagtgaggataagccgtggctcggcaagaaagaagaccgccgacgcttaagtgagattatccagctttggcataatttacacggacaggcactggtcgccagtaagtcgcggttagctaaacttcaaatcgtgtgtaatggacttggcgaccctattgcatcccgccttactgctaaagattgggctcattaccgtgaccgccgacttcggggggagatagataatggctatcataaagacccggcaaaatggattgctaaaccgataactgtcaatcgtgagcaacaatatcttgaggctgtatttaatgagctcaaaaggctaggggagtggagcttaccaaatccacttgatggagtccgtgttttcaaggaagccgagaaagaaatgtcttggctcactttgtctcaaattccgaaattgtttcaggcatgcgagcaatacggaaaagaagacctcaccatgattgttaagatttgtcttgcaacaggtgctagatggggtgaggctgagaggttgacacgtccccagctctcgccacataaactgaccttcaccaaaacgaaagggaaaaagaatcgaaccgttccgatcccaaaatggttgtatgacgaattatctgaaaggcagggaaagatgtttaagccttgctatcaggagtttaaaaagatgctcaaactaacggatatcgaactgacggaagggcaaaagacacacgttctgcgtcataccttcggcgctcattttatgatgaatggcgggaatattcttgtgctgcaacgtatactcggtcatgcgaatattcgtgaaactatgaagtatgcacatttctccccggatcatcttgaggaggctgtaacatttaatcctttaacattatgtaatggttttaaatggaaagattaa

SEQ ID NO: 11914 - DNA, 339 bp, Escherichia coli
atgaaatgtaaactctttttagctctgcttcttaccctttcttttggagcctcagccgctgaaaaaacacaggatttagatggcgctaagtttggtgaggattggccgttaacttttgaaaaagctacggtgtcttgtgtcaacggtaaatatgcctttgtgtacgacaaagcaacagatgaccgatacccattaaatggttttgcgattgatggagtaaagtctggaaagcttgaggggagcaatattgatactgtttggaaagatagcccggagtatgcaggcgtaaaaattcctttggatcctgtaatggatgctgcaacagcactttgggaataa

SEQ ID NO: 11915 - DNA, 861 bp, Escherichia coli
atgagttctgagcttgatgttcagtggcgtgttagtgcaacgaacggcgtattggaacgcttaatgtcagcctatggggtcaagatgcaaaaggatttggctgacctgctaggtatcgctaaacacagcgttagcggctgggttcagcgtgatgcaatacctggcaatgtcatagttaggtgttgtcttgacacgggagctgatatcaattggcttgtaaatggagaacttgcaaatgcaaatcacgagcgagccagttgcaagttaaaaggcaaagagctttatgacgagattatgacgaatggtggtaaaaccgttttgcgtaggattcttgatgcgtatggctttaccatgcaaaaggagctcggtgatttgctcggcatttcctctggcacaattagcacatgggtaaggcgagattttttccctggtgatgttgttgttacatgcgctcttgataccgatacgtcactggaatggttagcaacaggcaaggggcaaatgcgagctaacagggaagatgtcacatctggtttttctattaaaaaatctcgtcttgaatctggtgagcttaaggatgcaggaacgtggcatcctgacccctcaatgattccttctaactcaggggaattgatttttgttgacggtgtagctgcctcttggcttgtcgactgttctgcttcgaatataagtaatggtcgctggttaattgatatcgacggcgctcttgatgtttttgatgtaattcgcttgcccggtggaaaagtcaggttgtcaaataagtctgctgagtttgaatgcaacattacagacattactcctgccggggctgtagttttcacattggaaaaacacgtgtaa

SEQ ID NO: 11916 - DNA, 372 bp, Escherichia coli
atgtcagatgcaaaatcaatctcgacgcacgactcgcaaaactcacaaaatcaaactgtgctgctagatccaacacagtttgatgccatcgttaccgccatgctgccagctctacagacaatgattcgctccgctatgtcagacacgatgactgtgaaagacttcgccgctactcgcggtgttagcgagcgtctggtctggcaatggctcgatgagggagtccttctcaaagctccgaccaaagacttttccaacaaagaggaagctgctaaacgaagccgaaccctcgtaaacgtaaaagcatggcgcgataagctgactcaacaagcgattgattgtcgctacatcgaccagcgcaccgctcttaactga

SEQ ID NO: 11917 - DNA, 510 bp, Escherichia coli
atgtttgattttcaggtttccaaacatccccactatgacgaagcatgccgcattttcgcacagcgtcacaatatggcgaagctggccgagcgtgcaggtatgaacgttcaaacgttacgtaacaagctcaacccggaacagcctcaccagttcacgccgtctgaattgtggctgctgactgacctgaccgaagactcaaccctcattgatggttttttagcgcagattcactgcctaccatgcgtgccggttaatgagttggctaaagacaaattgcagtcttatgtcatgcgcgcaatgcgtgaactcggcgaactggcgagcggcgcggtatctgatgaacgtctgaccattgcccgtaagcacaacatgattgaaagcgttaactccggcattcgcatgttgtcattgtcggctctggctctgcatgcacgtctgcagactaatccagctatgtcgagcgtggtcgataccatgagcggtattggcgcatcgtttggtctgatttga

SEQ ID NO: 11918 - DNA, 201 bp, Escherichia coli
atgctgaaaagtgaaccgtcattcgcatctctgctcgttaagcaaagccccggcatgcactacggccacggctggatcgcaggtaaggacggcaagcgctggcacccgagccactcgcaggctgatttactggctggcctctctactcaaaagcgggggggatcatggctatcgaagctgtttccgcgactgttccgctaa

SEQ ID NO: 11919 - DNA, 339 bp, Escherichia coli
atggctatcgaagctgtttccgcgactgttccgctaaaagcgggtgaacgtctggccggtctcaatcatgttgccgaattgcgcgcgagatattggggcgatagctggaaagaggttgaacgttttgtcgatgatatgcgcgataaacgtgacccacaatttgaagaaaataatcgggcgctggccgctattttctttctggcaaaaataccggcggctcgtcatgaactcgaattaagtgagctgactactgacgagaaaaaggcgcttattacagcgatgaatcattttcgtgcagtagtgagcttatttcccaaacggctaaccatgccgaattaa

SEQ ID NO: 11920 - DNA, 228 bp, Escherichia coli
atgcgtaataccgaaatccgtagttttaacactgatagcgatgcgctggccgtattgctgaccgatgcaaaaaaagaagagcgtaaagaccgcgcgctcgctgtttccatccgccttgaggcgctggctatccatattaccagagagggaatgagcggcaccgaagctgccgaactgctgcgccgtgaagcaacccgctttgagaatgaatcacaggagctgcactaa

SEQ ID NO: 11921 - DNA, 222 bp, Escherichia coli
atggccgacgcaatggatttagcacaactgcgcgagcaggaagaccgcgaacgccacatcagcaacgcacgcacccgtatcgctgcaccttcccgttttctttgcgaggaatgtgacgcaccaatcccggaagctcgccgcattgcgattccgggcgtggctttttgcgtaacctgccagcaaatcgcagagctaaaaaacaaacactatcggggggtataa

SEQ ID NO: 11922 - DNA, 2223 bp, Escherichia coli
ttggctgttcaattcgcttatccgtggaacgtcccacggtcggcaatctccagcccataccttacttatgagcaacagcaaagccgcgaccgtatgttcgcggctttgctgcatgcaaaaaaggtgctttctctccagcccgactgcgtgcggttagatgtttatcgcactgctgcggtgctggaacaaaatcagggtagtcaacgagccaatgcatttttaatcagcttctgcaaaaaggcattgccgcgtcttgaactggtcgcaaaaaaatacgaatgcgctggtatcaacagcaaggtatcaaccgctgtttttggaagtcattttgatactcagcaaatgcaatatctgtcgtcacgcatggttaatatggtcgcccgatataaccgtctcccggacatgtcgcgcgctgatgttgacctgttggccgctgatattgctaatttcattcgtggtgaacttgccaacattaatgaccacggattcggcgagcttaaaacgctgtacacctggtatattcgtgctggctttatttccctccaattcaacgttatcccaccacattgggagcgggttgaaaaaaaatatgtcggtgcggatgaaatcgcaccggctatcgccaaaatgtttaacgatgggtggtggcgcggtcttttgcgccgtgtagcagctacgtggcgcgaacacctgcaaattgcagtcggcaacgtcagtaagaaaaaaaacacttacgcgagtaaaaactgcgtgactgactggcgtgaacaaaagcgccgcactcgtgaatttctcaaaggtctggatctcgaagacgaagacggcaaccgtatcagcctaattgaaaaatatgatggctcagttgctaaccctgcgattcgccgctgtgagctcatgacccgcattcgtgggtttgaaaacatctgtaatgagctcggttatgtcggtgagttttacactctaaccgcgccgtcaaaatatcacgccacgactaaagccggttaccgtaacagcaaatggagcggtgccagcccggctgacacgcaaaactatctaaccggtatctgggcgcgtatccgtgccaaactacatcgggaagatgtccgtattttcggtattcgtgtcgccgagccccatcacgacggcactccacactggcacatgctgatgttcatgctgccggaagatgttgaatatgttcgctccatcgtccgtaaatacgcatggaaagaagaccgccacgaactgaaaagcgataaatcccaaaaagcacgtttccacgcggagtccattgacccggagaaaggcagcgcaaccggctatgttgctaaatacatttcaaaaaatatcgacggttatgctctcgatggtgaaaccgatgatgaaagcggtgagctgctgaaagagacagcccccgccgtttcagcatgggctgcgcgctggcacatccgtcagtttcagtttattggtggtgcgccggtgacggtttaccgtgagttgcgtcgcctcgctgataccgaaaccgcgcacggtctgagcgttgagtttgccgccgtccatgatgccgccgacgctggtgactgggctggttatgttaatgctcagggtgggccgtttgtccgtcgcgatgatttacaggtgcgcacactgtatgaaccgcgtaccgagcttaatcagtacggtgaggaaacggtatgtattaagggggtctacgattcctccataggtgcaggaagcccgattttaacccggctcactcagtggaagattgttccgaagcgtgctgttgatttggccgttgaccttcaggacggcaaagccgtccctcggagttctgtcaataactgtacgggaagcgaaagcgatccaccgatactggatttaacaaaaccactgagtcggcgtgaaagacgagaattgaccaaccgactcaggaagcaaaagccagcagtacggcgaaaattcatccacggaacggatgagcaaaacgcagctatagctaaaactatcgatgagatacatctgacaaccggcattaatatcagccggggcgaagccctgcacctgatggccggtggtaaaagttgttttgatggtaaatggctacgcggaacggccaaaggagaaatattttccgcagcaccatcgcatgaggctaaagctcggaaaatccttaatcgtgttgcggcgatggctgaagcatcaaaaccaatacatgagtaa

SEQ ID NO: 11923 - DNA, 183 bp, Escherichia coli
atggttggcgaacatttcagccgaacgcagcaaaagtgggcttgtgtgcaatttattgccgaggtatctctgattacaaactgcaagccatcagacttaaagctcgcgctcactctcattgcagacctagcaaacagcgaaaataacgaaaccgaagatgataatttttataaggctgattag

SEQ ID NO: 11924 - DNA, 234 bp, Escherichia coli
atgagaatcaatatcacgctggataaagagcaaaaaattagtcaggcaacattggatgcacttgaggctgaactgtaccgcaatcttcaacctatttacccaaagactgctatccgaattcgcaagggctccgctaatggcgttgaactaagcggtttgaaactggacgaagataaaaaacgagtaatggaaatcatgcagcaggtatgggaggacgatagctggctgcattaa

SEQ ID NO: 11925 - DNA, 210 bp, Escherichia coli
atgcatcgactaccgggcgaaattccgcagcacaaaactaaaagcatcaaactgatggccatcgttcatcgtctgcagcagataatggtcaatgagaatttgacacccgccgagctggtcgggtgtgccgaaatagtcagggataattacggcacgctggatagcatcagcaagccgacatattactcaccgccaccacgtcgaccatag

SEQ ID NO: 11926 - DNA, 195 bp, Escherichia coli
atgcaaaatcccctttcatcgaaaaatgacccgtttgccgattgggcaaagaatctgactttaatggctttaaataacgatctgagctctcgcgaggtggaaagctacaccgcaaaaatggtcgagcaggccggtaaagatgagctatcagtcgttatcaaacacctgttaaatcacatcagaatgcgcaaataa

SEQ ID NO: 11927 - DNA, 1005 bp, Escherichia coli
atgggcgcggagattaatattttggaaactgattttaaaataaccctcgaaggtttcgctactgagcaagaagcaaataatatcggtaatttcacactagaagctatccgagctttaacaaaaaatctcaatcttgatatctccaaattaaaatgcgtgattgtttcctataacttcagtgaagctcttcaaaaggtaacatcctcttaccaacacaaatcccctagttcatttaccaatagcaaacagggcgcagccgtcgggcagttagtaacaaaaattggcaatgatgggctatgtgaagaatatacccttgtgctatcgattgatttttttgttgagcttttcaatgatggtagcttcttaaaactgaaagaagaaggatacctcgcagtcatccatcgcattcaccatgaattagtgcacgtacatgaaaaaaacttactaacatgcttagcccaaaactttacagtcaacgagtatggtagcgcgcttcttatctcagccacgcgtgcatggtctgaatatctcgctaattacatgtcttcggggtctgcccctcaagaaactatcgatttatttttagagaatcttgacactgttgtaaatgaagtatctgacgagattgaaaaactcatctggggttataagtacggtaatatttctctgaatgacatgtatctcgaagtaaaaaaacgtatcaggctaatcatcaactcttatgcttatgcgatgggttatgtccattctctaaacatcaatattaaagaatacgatccaaagctatcccttacactatccaactcaaatataagatatcaattatcagaattaggcattgcttttcagaatctttatgggaagtttaatgaccagcacattacaggttttggtgattttcgggagataacaataatcattgatgaaatattcaagcagtttgggcttgttttagagtgtcccgattggtctggcgacggtgaactctacatacatgtaaattag

SEQ ID NO: 11928 - DNA, 1047 bp, Escherichia coli
atgggtaaacaaaaatcccgtaaagccaacgcacaaaaggccagcaaaccacaacaactgaccgccagcacaccgccaaaaacgacagcgttcaccttcggcgagccggtgccggtactcgataagcgcgacattctggattacgtcgagtgcatcagtaacggcaaatggtacgagccgccggtcagcttctcagggctggcaaagagcctgcgctctgccgtgcatcacagctcgccaatttatgttaagcgtaacgtgctcgcgagcacctacattccgcacccgttgttatcccgtcaggatttcagccgctttgcgctcgattatctggtgttcggtaacgcctttcttgagcagcgccacagcgtcaccggccagttaatcaaactgctggcctcgccagccaaatacacccgacgcggagtcgacgattcgattttctggtttgtggaaaacttcacccagccgcacgagttcgcgcctgataccgtgtttcacctgctggagcccgacattaatcaggagatttacggcctgcccgaatatctcagcgcgctaaattccgcctggctgaatgaatccgcgacgctgttccgccgcaagtattatcagaacggcgcgcacgcgggttacatcatgtatgtgactgacccggcgcagagcgcgaccgacgtcgaatcgctgcgcgaggcgatgcgcaactcaaaagggctcggcaactttaagaacctgtttttctacgctcccggcggaaaaccggacggcatcaaaatcgtgccactgagcgaggtcgccacaaaggatgactttttcaacatcaagaaggccagtgccgccgatctgatggacgcgcaccgcgtaccgttccagctcatgggcggcaagcccgagaatatcggttcactcggtgatgttgagaaggtggcaaaggtatttgtgcgcaacgagctgtcgccgctacaggacaggttcagggaggtaaatgactggctcggcatggaggtcatcagattcaaagagtacaccctcgacaacccagaataa

SEQ ID NO: 11929 - DNA, 1770 bp, Escherichia coli
atgaccaattccaccgatacaaccttgttgcatgacccgcgacggcaggcatcgctgctttactggcagggtttttccgtgccacagattgccgaaatgctgcaggtcaagcgcccgaccgtgcagagctggaagcagcgcgacggctgggacggcatcgcgccgatttcccgcgttgaaagcagccttgaggctaggctgattcagctcatcgccaagccgcaaaagacagggggtgatttcaaagagattgacctactcggacggcagattgaacggttggcgcgagtcaaccgctacagccagaccggcaacgaagccgaccttaaccccaacgtcgccaaccgcaacaaaggggagcgcaaaaagccgaaaaagaattttttcagcgacgaggctatcgataaactagaggaattatttttcgaccagtctttcgagtaccagttgcagtggtaccgcgcaggactggagcaccgtattcgtgacattctcaaatcccgccagattggcgcgacattctatttctcccgcgaggcactgctgcgcgcactcaaaaccggccataaccagatatttttatcagccagtaaaacgcaggcttacgtgttccgcgaatacatcatccagtttgcgcgactggtcgacgttgacctgactggcgacccgattgtcatcggtaacaacggcgcaaaactgatttttctcggtaccaattccaacaccgcgcagagccataacggcgatctgtatgtcgatgaaatattctggatcccgaattttcagaaactgcgcaaagtcgcctcgggcatggcctcgcaaaagcacctgcgctcgacctatttttcgacaccttccacgctggcgcacggcgcttaccccttctggtctggcgagctgttcaacaaggggcgcagccggattgccgaccgcatcgaaatcgacatcagtcacagcgcgctcgccggtggccagctctgcgacgatggccagtggcggcagattgtcaccattgaggacgcccttgcgggtggctgcaccctgttcgacctcgaccagctcaaacgcgaaaacagtgatgaggactttaagaacctgtttatgtgcgagtttgtcgacgataaagcgtcggtattcccgttcgaggagctgcagcgctgcatggtcgatgtgatggaggaatgggaggactttgccccgttcgccgaccatccgttcggctctcgtcctgtctggattggctacgacccgtcacacaccggcgacagtgccgggtgcgtcgtgctcgcgccgccggtggtctctggtggcaagttccgcatgctggagcgccaccagtggaagggcatggattttgcagcacaggcagagggcatccgcaagctgaccgagaaatacaacgtcgaatacatcggcattgacgcaaccggcctcggtctcggcgtgttccagctggtgcgctcattttacccggcggcacgcggcatccgttacacacctgaaatgaaaaccgcaatggtactcaaggcgaaagacaccattcgccgtggctgtctggagtacgacgccggagcaaccgacgtcacgcagtcgtttatgtccatccgcaaaaccatgaccagcagcgggcgcagcgccacctatgaggccagccgcaccgaggaagccagccacgccgatatcgcatgggcgaccatgcacgccctgttaaacgaaccgctttctgccggtagcggcatgcagcctaaatctattctggagttcaactaa

SEQ ID NO: 11930 - DNA, 855 bp, Escherichia coli
atggcaaaaaaagtctcaaaattctttcgcatcggcgtcgagggtgacacctgcgacggccgcattatcagcggcaacgatattcaggaaatggccgaatcgtttgaccctcgcgtctacggttgccgcattaaccttgagcatattcgcggtctctttcctgatggcgacttcaaacgcttaggcgatgtggttgaactgaaagctgaaataattgacgacgattctgcgcttaacggcaaatgggcgttgttcgccagaatcaccccaaccgacgacctgattgcgatgaataaaaaattgcagaaggtctacacctcaatggaaattcagccgaattttgccaataccggcaaatgctacctcgtcggccttgctgtcaccgatgacccggcgagcctcggcactgaatacctcgaattctgccgcaacgcgaagcacaaccctctgcagcgctttaaggccaaccctgaaaacgtcttttccgctgccacgctggccgaactggaatttgaagacgttcccgatacggtgctaaacagcctggcagataaggtgaaagccattttcagccgtaagcaggtcagcgacgatgcgcgcctgaatgatgtgcatgaagcggtgaccaccgtcagcgaggatgtgcagaccaacctcactgcgcaggataagcgtctttccgctatggaagccgcgcttaccacctttaaacaggaactgaccggcaagattgaagaaaccagccaggcattttccgccctgaaagccaccctcgacaaaaccgaaagtttcagccagccgcgacgcacgaaagccagcggcggtggtggcgatgagctgctgaccgactgctga

SEQ ID NO: 11931 - DNA, 1068 bp, Escherichia coli
atgcgcccggaaacccgttttaagttcaatgcctatctgacccgcgtcgctgagctgaacggcatcagcactgatgacgtcagtaaaaaattcaccgtcgagccgtccgtcacgcaaacgctgatgaacaaagtgcaggagtcatccgcgtttctgcagacgattaacattctgccggtcgcagaaatgaagggtgagaaaatcggcgtcggtgtgaccggtactatcgccagcacgaccgacacctcgggcgatgatgagcgtaagaccgcagacttcaccgcgcttgagtccaacaagtacgagtgcgaccagattaactttgacttccatctgaaatataaaaccctcgacctgtgggcgcgttttcaggactttcagcgccgcatccgtgacgccattgttaagcgtcaggcgctcgatttcatcatggccggttttaacggtaccacccgcgccgccacctctgaccgcaccaaaaatccgatgctgcaggatgtagccgtcggctggctgcagaaataccgcaacgaagccccgacgcgtgtgatgagcaatatcaccgatgctgacggtaaggtcgtttcggcagtgattcgcgtcggtaaaaacggcgactatgagaacctcgacgcgctggtgatggatgctaccaacaacctgattgacgaggtttatcaggatgacccgaaactcgttgccatcgttggccgtaagctgctggccgacaaatatttcccactggtgaacaagccgcaagaaaacagcgaagcgctcgcggcagatatcatcatcagccagaagcgaatcggcaacctgcctgctgtgcgtgtgccgtacttcccggcgaatgccgtgttagtgacaacgctggaaaacctctctatctatttcatggatgagagccaccgccgcagcattgatgaaaacccgaaaaaagaccgcgtggaaaactacgagtcaatgaatatcgactatgtggtcgaggcgtatgccgccgggtgtctgctggaaaacatcaccctgggcgatttcaccgcacctgcagcaccggaaagcggagagtaa

SEQ ID NO: 11932 - DNA, 750 bp, Escherichia coli
atgacgagccccgcacagcgtcacatgatgcgggtctcggcctctcaagccgcgcagcgggaacaagccccgctgcgccatgcaaccgcctacgagcagatgctggtaaagctggccgatgaccgccgcacgttgaaaaccatccgttcaaacgaactgaaagccgcgaaaaagcgtgagctgctgccgttctatgcgccgtgggtcgccggtgtgctggctgatggccgtggtgcgcaggatgacattctgatgacagtcatgctgtggcgtctcgatgccggtgatatcgctggcgcgctggaaattgcgccatacgcgctgaagcacggcctcacctctgactatcgccgcacgacaccttacatgctggttgaggaggtggcgcttgccgcgctgcgcctgcgcgatgccggtgagcctgtcgacctcgcattactgctgaccccccttagcctgaccgacggcgctgacgttcccgatatggtgcgcgctcgactgcataaggtgaccggtctaaccctgcgcgatgccggtcagagcgccgaagcactggcacagtttcagcgcgcgatgcagctcgaccgcaatgccggtgtgcgcaaagagattgagcgactggagcgggcattgaagcctaagcccgatgccgcgccccgtaaaacgactaaaccgcgcacgcgcaaacctgccaccaaaccggcggcaaagcgcgggcgtccaccaaaggcggtaaaaaccgccggttaa

SEQ ID NO: 11933 - DNA, 510 bp, Escherichia coli
atgacgacagtaatactgaatcagcccgacgaaccgcaggacgtaccgggcgtggtgattcccgcaccggagacgggcgacgcagtgattaaaaacacgttctttttccctgatgtggatccgaagcgggtgcgcgagctgatgcgccttgagcagacggtttccgatgcgcgcctgcgcaacgccatcaagaccggcatggcggaaaccaatgcggagctttacgactaccggctgcgccagattgccgcagggtttaagacactggccgacgtgcctgacgccgaggaaatcgacggcgagaatgtgcgcgttttccactacctcagcgccgtgacggcgatggcgaccgccaccctgtatgagcgttatcgcggggttgaggccaccggcaagggtgacaaaaaagccgacagcgtcgaaaccaccattgatgacctgtggcgggatatgcgctggtcggtctcgcgcctgcaggataagccgcgctgtatcgtgggtcagctctga

SEQ ID NO: 11934 - DNA, 204 bp, Escherichia coli
atgaaagtctacgcgatgcagggcgacaccatcgacgcgctttgtgcccggtattacgggcgcactgagggcgtggtcgaggcggtgctgcaggctaatcccggtctgtctgagctgggcgtcattctgccgcatggcacggcaattgacctgcccgacgtggcatcgtcacccgtaacagaaactatcaacctttgggagtaa

SEQ ID NO: 11935 - DNA, 297 bp, Escherichia coli
atgacagaaggggaaaaaggcgtcctgtcactgtttgtgattggcgtgatgattgttgtcggaaaagtgctggcgggtggtgagcccattaccccgcgcctgtttatcggccgcatgctgctcggcggttttgtttcaatggtcgccggtgttgttctggtgcagtttccagatatgtcactgcctgccgtttgtgggattggatccatgctcggcattgcaggttatcaggtggtggaaatcgccattcagcgccgctttaagtcacaaaagggggatagcgatgccggtcattaa

SEQ ID NO: 11936 - DNA, 498 bp, Escherichia coli
atgccggtcattaatactcaccagaatatcgccgcgtttctggacatgctggcctattccgaagggacggcgacgcatccgctgacgaaaaatcgtggttacgacgtcattgtcactggcattgatggcaagccggaaattttcaccgactacaccgaccaccctttcgcacatggcagaccagcgaaagtgtttaatcgacgcggcgaaaaatccacggcatcagggcgttaccagcagctttatctctactggccgcactatcagaaacagctcgcattgcctgatttcagcccgttgtcgcaggacaaacttgcgattcagttaatccgggagcgcggtgccattgaggatattaaagcggggcgtattgagcgagcaatttcacgttgccgcaatatatgggcgtcgctaccgggtgcaggttacggccagcgtgagcacagcctcgacaaactggtcactgtgtggcgcacggctggcggggtgatggcatga

SEQ ID NO: 11937 - DNA, 414 bp, Escherichia coli
atgaaaatcctgataacgctgctggtgctggccgtgctcgggctgctgtggttgcgccatgagaacggcaatttatcccgctcctttgagacggcaaaccgcgtcgcaagcgaacaaaagacgacgattagcatgctgaaaaatcagctcagtgttgccggtcagcttgcccgacgtaatgaatccgcgcaggtggaactgcgcgaacagctcgcaaaggccagcgcagaggccagccgccgtgagcagacgataacgaggttacttaatgaaaatgaagcctttcgccgctggtataacgctgctttgcctgatgttgtgcgtcggctgcacacccgcaccgcctgcgccagtgccggtgattgtggtcagcggatgcccgagggtgagcctttgtccgatgccgggaagtga

SEQ ID NO: 11938 - DNA, 159 bp, Escherichia coli
atgccgggaagtgacccgaaaaccaatggtgacctgagcgcagatatccgccgtcttgagggcgcgctgaccgcctgcgcgctgcaggttaaaaccgtcaaacactgtcaggatgaactcgatgcagaagcacaaaagcctgcgcaaagcgctgattaa

SEQ ID NO: 11939 - DNA, 468 bp, Escherichia coli
atgcagaagcacaaaagcctgcgcaaagcgctgattaacgccgtgccgcagctccgaaataatcccgatatgctgcgcctttttgccgacaacggccataccgattcccgactggcgagctcgctgtcgtttgaaaaggtgtacgtgcttaacgtggtggtgaccggcttcaccggtgaccttgatttgatattcgtgccggtgcaggcgtggctgcgtgaacatcagccggacattatgaccaccgacgacgggcgggaaaaaggattcacctggattattgatatcaataacgacgattcgctcgatatcagtatcagcctgaggctcaccgagcgcacgctcgtcaaagaggtcgacggcgcgctgcacgtcagctatgcccctgagcagccactgcctgagccggtgacgcgcccggtcgagctgtacgttaacggcgaactggtgagtaagtgggatgagtga

SEQ ID NO: 11940 - DNA, 456 bp, Escherichia coli
atgagtgaattaaccgcgctgcaggaacgccttgccggtctgattgccagcctgtcaccggcggcacgtcggcaaatggcggttgaggttgcgaaaaagctgcgtaccagtcagcaacagcgtatcaagcgccagcaggcacccgacggcaccccgtatgcggcacgaaagcgccagccggtgcggagcaagaaaggtcggattaaacgtgaaatgttcgccaaactgcgcaccagtcgctttatgaaagccaaaggcagcgacagtgcggcggtggtggagtttaccggcaaggtgcagcgcatggcgcgggtgcatcagtacggcctaaaagaccggccaaaccgcaacagccgggatgtgcagtacgaggcgcgaccgttgctcggatactcttcatcagacttacaaaaagttgagagtttaattatggatgctttatgtcaacgccattga

SEQ ID NO: 11941 - DNA, 837 bp, Escherichia coli
atgaaaagaacttcatcttttaggcgtacaataagcaatatgaaatatattataggtatcttttttttatactccgggcttatagtagggttgtctgtttataatgataactacaactcaaaattcatggagaattttcttgttaatgcaaattcttcaattttagactttcttgttttgggtgtgattctttactattttgaaaataaaaggcaaaataaagatgctattcacgaactaattgaagatcttgaaaatctggcaaagcattcttctgcagaactgaatattatgaagataaaaatcatacgtcagttaaatgctaaaggaatatataacattcaagttccaaggattgaacttgataaaatgtccactatcaaatatttacattttaaagacgctgacttaaccggcttgaatatgagcgaatcatacattagagattgttctttcgataattgcacaattcaagctctaaatattacaggcaatagagttaagagtgttaaattcaaaaactgcaagctaagaaatattaaggcatttaatacatgttttcaaaatgtcactttcgaaaactgcagttttgaaggggggtattttacagatagcgaaatgaaaagctgcatattaaaaggatgtgattttaaatccgttacttatgaaggggctaacatgcggaatgcaaatctattaaattcaattaacattagcgttaaagaacttgttaaagcaaaaaacatagattatttaatttgtgatgagcaaattaaaaatgaaataagaaaggaaaacccagcaataaaaatatcgagaggaataatacgaggttag

SEQ ID NO: 11942 - DNA, 636 bp, Escherichia coli
atgaacacattaaacaccattcaagagttagcacgtgccattcgcaacctcatccgctcaggcgtggtgactgaggtcgatactgtgcaggggctgtgccgcgtacaaagcggcgggatccagactacatggctgaactggctgaccacccgcgccggtcgttcgcggacgtggtgggctccctcggtcggtgagcaggttctgctgctggcaatcggtggcgagcttgataccgctttcgtgctgccgggtattttctccgacgataaccccgccccgtctgcctcggcggatgcgtggcatgtggctttccctgatggtgcggtcattgagtacgagcccgaaaccggcgcgctgacggtcagcggcataaaaacggccgacgtgacggcatcggagtccatcaccgcaaccgtaccgctggtactggtgaaagcctcgaccagtatcaccctcgacaccccggaggtgatttgcaccaataagctaacgacggcgacgcttgaggtgcagaaaggcggcaagatgagcggcaatatcgaacataccggcgggtcactgtcgtctaatggcaaggtactccacacccataaacacccgggcgacagcggcgggcaaacgggggcaccgttatga

SEQ ID NO: 11943 - DNA, 348 bp, Escherichia coli
atgacggcgcgctatcaggggatgaaccgaaataccggccttggcatcagcgataccgagcatatcagccagagcatgcgcgatattctgctgacgccggtcggctcgcgggtgatgcgtcgtgaatatggctcgcttctgtcggcgctgattgatatgccgcaaaacccggcgctcaggctgcaaattatggtggcgtgctattcggctatccagaagtgggaaccgcgcatcaggcttacatccatcagctttgaggccggcgacgctggcgagatgtatgtcgatattaccgggatgcgtaccgataccggtgcgtcagtttcaaccactgtttcactgagttaa

SEQ ID NO: 11944 - DNA, 909 bp, Escherichia coli
atggcaaccgttgacctgagtcagttacccgttcccgatgtggttgaggaactggactatgaaaccatccttgcggaacgcaaagcgacgctgatatcgctctatccagaagaccagcaggaggccattgcccggacgctcacacttgagtcagagccggttgttaagctgctgcaggaaaacgcctaccgtgaagttatctggcgtcagcgggtgaacgaagccgcgcaggcggtgacgctggcctactccgccggtaacgacctcgacgtcgtagccgggaacaataataccgaacgcctgaccatcaccccggcggatgataccaccatcccgccgacacctgccgttatggaatctgataccgacctgcgactgcgcacgcaacaggcgtttgagggattgagcgtggcgggtccggtcggtgcatatgagtatcacggccgcagcgccgacgggcgggtcgctgacgtttcggtcgccagcccgtcgccagcctgcgtgacgattaccgtgctatcgcgtgagggggacggcactgccagccctgagctactggcgattgttgataaagcgctgaacgccgaagatgtgcgcccggtagctgaccgggtgaccgtccagtcagccgagattgtgccctaccagattgacgcaacgctctacgtttaccccggcccggagtctgagcccatcaggcaggcatcagagcagaagctgaagagctacatcagtgcgcagcaccgtctcgggcgtgatattcgactgtcagccatttacgcggcgctgcatgttgagggggtacagcgtgtcgagctggcatcaccgcaggccgacattgtgctgagtaagtcgcaggcgtcgaactgcaccgagtaccagataactatcgggggatcggatgagtga

SEQ ID NO: 11945 - DNA, 609 bp, Escherichia coli
atgagtgacaggctgttacccgctggctcgtcgccgctggaagttgccgccgctgctgcactttctgagattcagcgcgtgccggtaccgttgcgcaccctgtggaactggcgtacctgcccggtaaacctgctgccgtatctggcgtgggcgctgtcggtcgaccggtgggatgagaagtggccggaggcgacaaagcgcagcgtctgcgcgtcttcgtttttcgtccatcagcacaaaggcaccatcagcgcattgcgtcgggtggttgagccgctcggttttctgattgaggtgcgcgagtggtggcagctcgacgaggagcctggcacattccgcctcgttgtcggcgtgctcgatagcggcatcactgacgaaatgtatcaggagcttgagcgcctgattgaagacgccaaaccggcaagccgtcatttgacagggctggctatcagcctgagtgcgaccggcgagctgtatgtcggcgcgggatgttacgacggcgacgcgctgaccgtttacccctacacccctgaggaaattgtcgtcggcggtgaatattacccggcctcggccatccatttgattgataacctgagagtgaacgcatga

SEQ ID NO: 11946 - DNA, 1083 bp, Escherichia coli
atgaccgcaaaatattttgccattctgaccaatcagggcgcggcgcggctggcgaacgcggcggcactcggtaccaaactcaacctgacgcagatggccgtcggtgatgcgaatggtacgttgccgacccctgacccggcgcagacgaagctcattaaccagaagcgcatcgcgccgctgaacctgctgaccgttgacccggtcaataccagccagattatcgcggaacaaattattcccgagaatgagggtggtttctggatccgcgagattggtctctatgatgatgccggtgtgcttattgccgtggcgaactgcccggaaacctacaagccgcaactgcaggagggaagcggccgcacgcagaccattcgcatgattctgattgtgtcgagcacgtcggctattaccctgaaaatcgacccgtcggtcgtgctggcaacgcgccagtatgtcgacgataaggttatcgaggtaaaagcttatgccgatagcctgatggctgcacaccttgccgctgctgacccgcacgctcagtacctcaaaacagcggatattgataaatatattccggttggttttccgctgccgtggccgcaggcaacaccgccggaggggtggttaaaatgcaacggtgcagcgttcgataaggcgaaatatccaaagctggccgtcgcttatccttctggcaatctgcctgatttacgcggtgagtttttgcgtggctgggatgacgggcgaggtattgacagcggtcgagtattgctcagtgcccaagtagatgacttcaaagctcatcggcatgagtcctatttttatgcaggagtatcacgtaacgaggtacctctgacaagtctgccaagctcggatgaaatgctgacgttaagctcagcgacgagctcgctggcaccgcttgatattgatgccaacggcactctaatcggcaatgatgattacaactgtcttgcagaaggtaacaaaaacaataagcgaaccgcgaccgggttgagtaccaatattataggcggaactgaaacccgaccacgcaacatcgcatttaattacatcgtgagggcggcataa

SEQ ID NO: 11947 - DNA, 597 bp, Escherichia coli
atggcgaaagcaacattgaataaaagtggtattgccacaaaagctggcgatgtgacggtctttaactacgacggggaaacgcgagagtttttgtcgacttccaccgagtttttggcggtgggcgtggggattccagccaactcctgtatcgatgcaccggtagctgagaaagacggttttgccatttgccgctcggtcagtcttgatgggtgggtttatgttatcgaccaccggggagaaactgtatatgacacggaaaccggcaagcctgtcgagataaccgggctcggtgattatcctgataatgtgaccatcatcgaaccactgacgccttatgaccgctggaacggtagcgaatgggttacgaatgcggatgcgcagaaaagcggtcagattgcagcagcagaacagaaaaaagcctcattgctggccgaagcccaaagcacaatcagcctgtggcagactgagctgcagctcggcatcatcagcgacgatgacaaggacagcctgattgcgtggatgaaatacattcaggcgctgaacgcggtcgatacctccacggcaccggatatcgagtggccggttaaaccggagtaa

SEQ ID NO: 11948 - DNA, 1179 bp, Escherichia coli
atgagtgattttcaccacggcgtgcaggtgcttgagattaacgacggtacccgcgtcatttccacggtcgcaaccgcaatcgtcggcatggtctgcacggccagcgatgcagatgccgcgacatttcccctcaacgagccggtactgattaccaatgtgcagagcgccattgcaaaagccggtaaaaaaggcacgctgtctgcttccctgcaggctatcgccgaccagtcaaaacccgtcaccgtagtcgtgcgcgttgccgaaggtacgggagaagacgccgaagcgcagaccatttctaacatcatcggcggcacggatgagaacggtaaatacaccggtatcaaggcgctgttgactgccgaagcggtcaccggcgttaagccgcgtattctcggcgtgccgggtctcgacacgcaggaagtcgcaaccgcactcgcgtcggtctgtatcagcctgcgcgcctttggctatgtcagcgcatggggctgtaagaccatttccgaagcgatggcctatcgcgagaatttcagtcagcgcgagctaatggtcatctggcctgacttcctcgcatgggacaccaccactaacgccaccgcaacagcctacgccaccgctcgcgcgctcggcctgcgcgcctacatcgaccagactgtcggctggcataaaaccctgtctaacgtcggcgtgcagggtgtcaccggcatcagtgcctcagtgttttgggatttgcaggcatccggcaccgatgctgatctgctcaacgaggccggggtcacgacactggtgcgtaaggatggcttccgcttttggggtaaccgcacctgctctgatgacccgcttttcctgtttgagaactacacccgcaccgcgcaggtgctggccgacacgatggccgaggcgcacatgtgggcggtcgataagcccatcaccgcatcgcttatccgcgacattgtcgacggcattaacgccaaattccgcgagctgaaatcaaatggctacatcgtggacggtgaatgctggttcgacgaggaatcgaacgataaggaaaccctcaaggccgggaaactgtatatcgactacgactatacgccggttccaccactggaaagcctgaccctgcgccagcgtatcaccgataaatatctggtgaatctggccgaatcggtcaacagctaa

SEQ ID NO: 11949 - DNA, 519 bp, Escherichia coli
atggcactaccccgcaaactcaaatatctgaacatgttcaacgacggtctgagctacatgggcgttgttgaatccgtgaccctgccgaagctgacccgcaagctcgaaaactatcgcggcggcggtatgaatggtgcggcggcgattgacctcggtctcgacgatgatgcgttaaccgtcgagtggtctgtcggtggcctgcctgatgtggcgctgtgggcgcagtacgccgcgccgggtgctgacgctgtgccgttgcgttttgctggctcttaccaacgtgacgacactggcgaaatcgtggcggtcgaggtggtcatgcgtggccgtcataaagaaatcgacggcggcgagaataagcagggtgaaaacacctcgaccaaactgtcgaccgtatgcacctattaccgcctcacgattgatggtagcgacgtcatcgaaatcgataccgtcaacatggttgagaaggtgaacggcgtcgaccgtctggaacagcaccgccgcgcaatcgggctgtaa

SEQ ID NO: 11950 - DNA, 336 bp, Escherichia coli
atggcaaaagcaccacgtaaaaccgctgaatttgttgatatggctggcaatgaaattgacaccgtaaacccgaacgtcgtgaccctcgacaagccgattaagcgcgccggtcagacgatagataaagtcacactgattgagccgaacgccggtaccctgcgcggtgtcagtctggcagcggtggcgcagtccgaagtcgatgcgctgattaaggtattgccacgcatgacctaccccgcgcttacggcgcaggagcttaccgcaatgaacctgcccgatatgctgtcgctggccgctaaggtgattggttttttgtcaccggcttcggcggagtag

SEQ ID NO: 11951 - DNA, 2445 bp, Escherichia coli
atgagtaataacctgagacttgaggttttgctgaaagcggtcgaccaggcgacccgaccgcttaaatccatccagaccgcgagtaaaaccctgtcgggcgatattcgcgacacacaaaaagggctgcgtgacctgaacgggcaggccgcgaaaattgacggttttcgcaaaaccagcgctcaactggccgtaaccggccagtcgctggagaaggcaaagcgcgaggctgaagcgcttgccacgcaattcaaaaatactgagcgcccgacgcgagcgcaggcacaggtgctcgaatccgcaaaacgtgccgccgaggggctgcagattaaatacaacagcctcaccgagtcggttaaacgccagcaacgcgagctgggtgccgccggtatcaatacccgcaatctggcaaacgatgagcgggggcttaaaacacgcatcagcgagacgacggcgcagctcaaccggcagcgtgaagcattggcgaaggtcagcgcacagcaggcgcacctaaaccgagtgaaagagcgatataaatcgggtaaggagcttgccggtaacatggccgctgcaggtgctgccggggtcggtattgcgacagcgggaacgatggccggggttaaattgctgatgcccggttatgactttgcgcaaaaaaactccgagctgcaggccgtgcttggggtcgataagcagtctccagaaatgcaggctctacgcaaacaggcgcgtcagctcggcgataactcagcggcctcagcagatgatgccgccgccgcgcagattattgtagccaaatctggcgcagataaagacggcatagtggcgcaaacaccggccattctgaatatgtcgctggcaaataaaaaaactatggaggaaaacgccgctttgcttattggcaccaaatcggcattcgggctcgcagatgacaaggcatcgcatatagcagatgtcatatcgatggcgataaataaaacacaggcatcatttgagggattaaacgactcacttacatatgttggtccagttgccaaagatgccggtgtcagcctagaagaaaccgccgcgatgctgggtgcgctacacgatgcaaaaatcataggttcgatggcaggaactggtagccgagctgttttaagtcgactgcaggctccaactggcaaagcctatgatgccattaaagagcttggcgttaagacgatggataaaaaaggcaatacacggccaatctttaccatcctgaaagaaatacaagccagctttaagcgcaacaacctcggtacaggtcaaaaagccgagtatatgaaaacgatattcggcgaggaagccagttccgctgcaagtgtgttaatggccgcagcggccagtggaaaactggatgaactgaccaagataattaaggattctgacggtaaaaccgaggaattggttaaggtcatgcaggataacttaggtggcgacttcaaagagtttcaatccgcttatgaggccgtcggtaccgacctctacgaccagcaagatagctcattgcgtcagctaactcagacagcaacacggtatgtgctaaagcttgatgactggatcaaagacaacaaggagttagcggaaactatcggcatcatcgccggtggtgcgctggcgctgattggtatcatcggcggcattggtctcgttgcgtggccggttgtcatggggattaatgccattatcgccgctgctggcgtgctgggtacggtctttactgtcgtcggtagtgccattgcgacagcgctcggtgcgattacctggccgatagtggccgtcggtgcggcgattgtggcgggggcgctactcatccgtaaatattgggagcccatcagcgcatttttctcgggagtgattgagggcatcatgagtgcctttgccccagtcggggaaatgttcgctccactggctcccatttttgatggtctcggcgagaaactgcgcggcgtctggcagtggtttaaagacctgatagcaccggttaaggccacgcaggaaacgcttgatagctgcaaaaatgtcggcgtcatatttggtcaggcactggcctctgccttgatggctccgctcaatgtttttaacaagctgcgcagcggtgtcgactggcttctcgaaaagctcggcatcatcaacaaagagtcggacagcctcgaccagaccgccgccaaaaccaatgccgccacacagggtaattcctacatcccggcaaccagcacatatggcggctatcaggcttatcagccagttaccgcaccggcggggcgctcttacattgaccagagcaaaagcgaatacaacatcaatctgccgggaggtgttgcgccggggcatcagcttgacagacaactacgcgacacgctcgaacagattgagcgcgataaacgcgcccgccagcgtgccaacatgacccacgactattga

SEQ ID NO: 11952 - DNA, 486 bp, Escherichia coli
atgatgcttgctctcggaatgtttgtgtttgaacttcgcaccctgccttaccagtcgatgcagcattcgaaagattatcgctgggtgtccaatgaccgggtgggtaaaccacctgcctatcagtttcttggcgagggagaaaattctatacagcttgctggtacgctataccccgctatcactggcggttggatctcacttaaggctgtagaggtgatggccaatgaaggcagagcgtggccgttgatagagggaaccggaaatatcctcgggatgtatatcgtcgataaagtatcgactacacgcaccgagtttttcagtgatggtgcggccagaaagattgatttcacgctttcgctaaaacgggttgatgaatcgctgacagagatgtttggtgacctgaataaacaggccagtgagcttctcggctctgccggtaatttgacagataaactgcagggtatgcccggaggtttcactgcatga

SEQ ID NO: 11953 - DNA, 1170 bp, Escherichia coli
atgataacggggatggcaattgacgccggtgctagccttgcaccggcttttatgctgacgctgaacagtcaggacattaccagcaacttcagcgaccggctgatttctctcaccatgacggacaataggggctttgaagctgaccagctcgacattgagctcgatgacaccgatgggaaagtcgagttacccctgcgcggggcagtgctgacgttgtggcttggctggcagggttcggcgctgctgaataagggggattttacggtcgatgagattgagcaccggggggctcctgataccctgaccatccgggcgcgcagcgcggactttcgcggcacgctaaattccaggcgtgaagagtcatggcacgacaccaccatcggcgaactggtcagtaccatcgcaaagcgcaacaaactgacggccagcattgcggaatcgctgaaaaaaatcccggtaccgcatatcgaccagtcgcaggaatccgacgcggtatttttgagtcgactggctgaccgcaacggggcaacggtatcggtgaaggcagggaaactgttgtttctgaaagccggtagtgcgatgacggccagcggcaaacccgtcccgcaaatgacgctgacccgcagtgatggtgaccgtcatcagtttgccattgccgaccgtggggcttataccggcgtcactgctaaatggttgcacaccaaagacccgaagccacaaaagcagaaagtaacgctgaaacgcaagccaaaagagaagcacctgcgcgcactggaacacccaaaagcaaagccggtcagcaaaaagacaaaggtcaaaaaagaacaggaagcacgtgagggtgagtacatggccggtgaagccgataacgtgctggcgctgacgacggtctatgcctcaaaggcacaggcgatgcgcgccgctcaggctaagtgggataaactgcagcgaggcgttgcggagttttcaatcacactggcgctagggcgagcggatttatttcctgagacgcctgtacgcgtgtcaggctttaagcgcgtcatagacgagcaggcatggttaatcagcaaggtgacccacaacctcaataataacggtttcacgacgggcttagagcttgaggttaaactctccgatgtggagtacagctcagaagaaaatgaggagtga

SEQ ID NO: 11954 - DNA, 507 bp, Escherichia coli
gtgggctcggagatgtgtataagagacagtttcgtcagagttcgaaccatcaagccagaagcgcaggaaaatgtctatctaaatccaaaccttcataatataatattaacaatcttatcaattgttaatactgatgatggaaatgataaatggaacaggttaaaagaagcaaaagatatcttaatcgaatggagaaaatctactcgggtattatttcttcttcaggacataacgaacgaagaagactacgatgatgatgttatttcatttttcatccattgctatcatattagagattggatcattcaccttaacactttgaatatcagagcaaatcatgtggatatattcatcaatgaacaccaagcattgaagatttgcgctgatttagctaatggttctaaacattgtaaattaactcgctcaatgcgaactggtcgccaacctcacatcgcagctaaacaaaaacaaacatctacttggtattcaggaactaggtggtggtga

SEQ ID NO: 11955 - DNA, 153 bp, Escherichia coli
atgacatgcaaatatactattttatgtgatggcaaaatatatgatgccttacaattagcaagagaatgcattcaactttgggactcttatattccagagcttgatgctttgaaagcaacagtggttgataatgacccgacgaaaactatataa

SEQ ID NO: 11956 - DNA, 396 bp, Escherichia coli
atgggctgggagcttcacatagtaagaacggaacattggttcgatagcgcaagtgttccaatcagtagtgaagaatggctccagcttgttaatgatgataaagaactctccatagataacaagaatggtgatttttttgctctatggagtggtcaaagtgaactcgatgaaccttggcttgactggagtgatggaaggatttcaacaaagcatcctgacgaaaccctttactgtaaaatgttgcagatagctgagaagctacatgctgtagtcgttgatgaggatgatcataaatattcgctaccaagtgacctgatgaatccttcatgggcgaattcatcaccagttggtaaaaaacaatctttatgggaaaagttaatttcaaaactaaaataa

SEQ ID NO: 11957 - DNA, 1263 bp, Escherichia coli
atgtctttaaacgattcaaaaatccgcaacttaaagccctcttccaaacccataaaactgtctgattcacacggtctgtatttgctggtcaatcccggcggttcacgtatctggtatctcaagtatcgtttcagtggtaaagagtcccgcgtcagtctgggtgcatatccgctggtttcgcttgctgaagcgagacaacagcgtgatgctatccgtaagctactggcgcagaatatcaacccggctcaacaacgcatggatgaaaaagccgccacttcaccggaaaagtgttttaaaacggtggctctgggctggcacaaaaccaacaaaaagtggtcgcctgattatgcagagcgcattctcgccagcatgaataaccatatatttccggcgattggtcatctgcccgttaccacgctgaaaacgcagcatttcactgcgttactgcgggttattgaggataaaggttttctggaagtcgcgtcccgtacccggcagcaactctgcaacatcatgcgttacgccgttcagcagggactgaccgaaaacaacccggcgcagcatctggaaggcgtcaccgcgccgccggttaaaaaccactatcccgccctgccgccggagaggttgcccgaattgtttgagcgtattggtgattatcagcagggacggcagttaacaaggctggcggtggtgctgactctccatctgtttatccgctccagcgagctgcgctttgcccgctggagtgagatagatttcagaaacaaaatctggaccattcccgccacaagggaagcaattgagaaagtccgtttctccggtcgtggcgcaaaaatgcgtactccacatattgtgccactttcccgacaggctattgccattctgaagcagatacacgaaatttccggccatctggaactggtgttccccggcgaccataacccgtataaaccgatgagtgaaaacactatcaaccgggcgctgcgtctgatgggttacgatactaaaactgacgtttgcgggcatggcttccgggcaatggcctgtagcgcactggtggaatctgaactctggtcgcgggatgcagtggaaaggcagatgagtcatcaggaacgcaacagcgtccgagcagcgtatatccaccgtgctgaacatctcgatgcacgcaaggacatgatgcagtggtggtcagactatctggacgtgagccgcgagggatacgttgccccgtatatttatgcgcggcggcataaggcggcctga

SEQ ID NO: 11958 - DNA, 468 bp, Escherichia coli
atgattattgttcttatcaatattgacaggaaagcatacaaaaaattttgcccccaaaattttttgtatgaaaaccgattaatacccccgagattaataggaaatcacccaaaattatttgaggcaaataattttgtacgaaaaccgatgaataactcgattttttcaaggcaacggctatcaatcaacttcgccagtttgtccgtacattttatgacaactgtcataatatcacccgattacctattaataatcatatcttacgagttggaaactattattttttgccaatcaatctcttcttccgtaaacctgcgccacataccgcccgcgcccgtcgccgtgccccaaatccatcgccgtcattgccagcgcttccttctcacaaaatccctgcgccagataatgacgaatggcatcctgcgcccacgcatagcgcaacgagtgcggggaatatgtgcccgttaa

SEQ ID NO: 11959 - DNA, 879 bp, Escherichia coli
atggggatactggagcaggaaatgaagcggctggcgcagcaggcgggcggcagctacaaaactgtggatgaccgcatcaggctggcgcagcggttttgtgagcgtctggttctggcgcagaacgtacaaatccgccgggtggaacagcttaaggcgcggcatattgaaggctatgttcgtgaacgagtggtgcagggcatcacaaagcgttccctgcaaaatgagatggcggcggtgcgctgcattctgaaacaggccgggcgtgacaggctggcgcagagtgagcgactgaataaccgttctcttggtctgtctggcgcatcccgcaacggtacgaagctggcgatcacgccggagcactatcgtgacgtgctggagacggcccgcgcaaaagatccgggactggcggcagcgctggaactctcaaggctgatgggattacgttcgcaggaggcggtgcaaagtgcgcagtcattaagaacgtggaggcaatcgctggagcggggtgagccccgtttaaccgtggtgttcggcaccaaaggcgggcgtccgcgagaaaccgttattctggatgttgtcgctatcagaaaagcgctggataatgcgttggttgtggcagacgatcgccacggcaggctgattgataagtcagatctgaaaaccgccatgaaatactggcacagtcaggcgtcacgtctcgggttaacgggcacatattccccgcactcgttgcgctatgcgtgggcgcaggatgccattcgtcattatctggcgcagggattttgtgagaaggaagcgctggcaatgacggcgatggatttggggcacggcgacgggcgcgggcggtatgtggcgcaggtttacggaagaagagattga

SEQ ID NO: 11960 - DNA, 333 bp, Escherichia coli
atggacagaggggaaatctggctggtttcactggatccgattgcaggtcacgagcaaagcggaaaacgtccggtgcttatcgtatcgaaggcatcgtttaacaagctgacccggctacccgttgttgttcccgttaccagcggcggaaacttcgcccgtgcagccggttttaccgtctcactggacggtgcgggaacaaaaacaacgggcgttattcgctgcgaccagcccagaaccattgatatgggagcccggagcggtaagcgactggaacgtatacccgatgctgtcgtgaatgaagtgctggcccgactggaggccattctgagctga

SEQ ID NO: 11961 - DNA, 258 bp, Escherichia coli
atgtatacaactcgcctgaaaaaggtcggcggatccatcatgctggcggttccccccgccgtgctgaaaacgctggagctgtcgacggacagcgaagtgggtatgaccattgataatggctgcctgattattgaaccccagaaacggccccgttattcgcttgaggagttgttggcgcagtgcgatccgcacgcagaaatgagcgaagaggatcgggaatggattgatgcgcctgcggtgggcaaggagatcctgtaa

SEQ ID NO: 11962 - DNA, 207 bp, Escherichia coli
atgatgcagtctgactggcatcctgcctacattatcgctgggctgaaaaaacgtggcacttcgctgtcagcgctttcgcgtcaggctgggctggcgtcatccacgctggctaatgcgcttacccgccgctggcccaaaggcgaaagattgattgcagaagcgttagatgttgcgcctgagaacatctggccttcacgctatcgctga

SEQ ID NO: 11963 - DNA, 468 bp, Escherichia coli
atggctacgatccccactcagacacacccgttacttgctgttcccttcaatgctgccacagattttaccgtactggctgaccactgtgaaaacttcgccgaaaccctgatcgaaagcgacgatccgatgctgcggctggcgctttgcgggcggcttgccgcctgtctgactctgctgcaacccacgctgaacgaccctatcccgtcccatctgactgacagcctgaccgttgatgctctacctgccgatatgccccgatttgtccccgatgctgaattactttgtgattactcactgacgctggcgcaacttcttatcgggcaggggatgcagccaaaagtagagcagacgataacaggcttattatgtgaactggtctggtattttgccgccgaaatgaaagccccgcgttggctgcgtactgccggtggcgtgaagtttatcggcggtgtggaggccaaagcatga

SEQ ID NO: 11964 - DNA, 3903 bp, Escherichia coli
gtgagtgcccctttaatacgttcctacaatgccgttattgaatacaccctttctcaggcaaaaaaatccaaaacatcccgtcgtatcgcaggattttgtcagcttcaggggcctacgggtagcggaaaaaccagctcactctaccgctctggctatgccgataacgctctcccggcgctggagacgataaaaaaatcaggctctcaagccattctggttacccatcgctggaatattttgcacgacatttatgagaaaacggcagcgcataaagacagtaacggggaaccattcaccgtcagcgtgctctatgcacaagatgaacagatcgtttctgccatcgaggccacccccttgcctcatgagaataatatttccgcagactcacttcccgatccatttgactccatcaatatcctggaagacagaaatttgtttgccagtcaggatatcgccgacaaattgcgtagaaattgcaaaaacatactgcatattaacaaatcgctgaaaggatatccgacgcgttttcagacggccatcgccagtgagaaagagtcattaatcaaatcatgcgcagcggtggagataactctgattcagaatatcaaattgctggaaaaagaagccaagaaacaaaaagaaaaatatggcgaagaacatgaactcacgcaggcagccaggcaacgagttgcagatttccgtcgccacgtctgggtcaggcgcattctgcccgccattgcctggcgtgacgaaaagcaacatctgctgatcatgacgactcaaaagatggtttcatcgttttacgatgggcatcgcaaagtaaaaatgtccagcaaagagctgcgtaattacatcattttcatcgatgaatttgattaccagtctgaggtattacaagagtatctggcacaggcgcaatgggttcaggaaccacctgaatgtctgggtcagttgctcgacgggggacgcagattactacaacgtatgcagtatgttgaaacggaacctgcacctatgatccgtgaacgtctagaaaaatttattaatgatctggatagcgcattaacagataaacatgttgatttaacacatgccagatcgctggttattcctcttcagcaatatctggataataaaccctttggtgagcattatttattccgttccgatcaactggtgaccagtgaacggcttattatgcggaaagcggaacatggctacgaaattatcaggccagactctccgcttcaggatagcgatcagactatcgacatcagtgattttttacgcttgatggaaaaattcattcgacagtttagcctaatgttgaccgacctgactgcaagtgaagatgaagcgtatgaatacattaaaaagttaacccgacttctgttcgaccccgttaatgattacaggccatcatactacggctcaaccctgcccaatatgtctcgatttttgttaccgcgtactgacctgccggaactacgggaattaaggaaaagtaatattttgccaaatactcatgccagtatttttggcttgaccaattggttgctgaaacagaatgcctcagatacggatatcgatccgttacggatacagatcaaacgtgcctttctacccacaacggcagaaggtctgctgctttctctcgccagtcgtaatcttgtctttgcactgtcggctacgtcatatattgaaagagcctgtaatcacttcgatgtccggtggattaattcagctcttcgttatattgcagaagcacgcaaccctgctgttacacaaagttttctgggaacaacttttgaaaaacgacctgtcgagtggtttaaagaaccgataccttatgtccagacggctgatgatttccagttgcagtatttagctattgaagagatcaataacagcaaagaaaatatcagaaacacacaactgaatgctgagattcaagatttcaatagcataaagaatagcccgcattgtgttgatctgctcgcttcgctagcccccgattttttccagaatggcgatgacccctcatcggatttcgaatcagaatatcgaaaaaatatactgctaaaattgcttaatgtattggatcttgcggggaaaagaccccaacaccgggggcatcttgctttcgtgaattccatagcctatttaagaaaatggcttaccactacaatagcaacgcaaagtagagaatacctctcatggttaaaaatggaacaacctttatctgatgatcctctactaaaaaattttgctgatgtgtttatcccagtgagcatacataatgagcctgcgctgatttgtctgttaaccgcagaatgtcagaagaaaaagggctttagtgatgcttatcaggccgcatttgcctcccggcgtattgtcattgtgctgactcagactgcctctgcgacgaatggtgtgaatctggatttcaacctgcctgaatctggcaaaaatatggatctgacctgtttatatttgctggaatcacggcattattacttttccgcttttcaggccaatgcagaaaacaatgatgatatggcgcatgcgggtttccagttacgcaacctggaaaaactgctccgtgctggtgaaatttctcgtcaacagcatcaacgcttccttctgccattaatgatgaaccgaaaatatgagatttcccgattaaacggcgaatataagagaaccagtgattacataaaaaatacggcagctaatgtgcagcaacaggtcggtcgtattgaacgagcctggtgtgaagtccccaatgctgaaatccatcttgattctgaactggcaaaagacctttcgcgctttgcttcattgcctatttatacatcgaaccgtcgtcagctttctgcgctcaatcgccagttactaaatattttacgggaacgtgatgaaaaaatgcaggacaatttccttaacctgataatgacaccgacacaaccgggtaaactggttttggattatatcgataaacgactggttccggccatacgattgttgcgagagcaatcaacacccagaaatgatgttacgcaactctggagacaattaggtaaagcgatacttcaacacgatcttgcctggaaaccaggacataatgactttggtattgatcttgaactgtacaagtgggcttgttttaaaaaaccagaatctgcatttaattgtggagcaatctggtattcccctcagacctggcagttttttgaggaagcagcagaaggacggcgtaagtacaatcctcagatgttgtatcaatatatacagcgtcattcggacattactgactggtttaaccgtaaagggtacagaacatctttaatgccttacgctaacgatctggaagaacattacgccttccacccgctgatcgtacaacgtctacttatggggcgcctgggtgaagaggctattcgggcactacttcatgagcgttataaaattattacaacgactcaggtaagcgaccatcgaattttcgaactgtatgattttagtgtaaaaaactcagattaccgcatagatgcgaaattttggggacaggatactctcgacaaagcggatgaagaatatcagcaatggctggcgtctggcactgacccgaatcaaacccctctgggattaagtagcaaattagcaaaaatacgtgcgattgagggagacaacgtcaaacttgtaatcgctaatttcgtggctccccattctgattgtcagttgctgggattttcaagtcagttaattccgactcaggatctttatcatgcagatatcctcatcctcggcgggtgtattactcccgacacagtttcatcagttacactggggtttgaaaatcttactaccatgatctaccagaatattcatgaaagggcataa

SEQ ID NO: 11965 - DNA, 2457 bp, Escherichia coli
atgatgaactataacgacgaagtaacccgcacacttcccctttctcatatgatttatcgggacagtgagatcgaccaggagaaagctgaaaagctgattgtgtaccattatccattaagcaaaagttatcgctggaagcagtgggaaaaccatcttgatagcgaattaggcaatcgataccatccttatctgatgcgttcctataaagagcagtttggattatttgttgctgttgattcagatcaggatactcctcccgttattaaaaattccgatggaataatcattacaccagaaaggataaagtacgagccatcgcttaatcccatatggattcgtcttatcatgcgtaaaatctctgcatttggttctcattgcaagggtagccactcgttaggccgaccactactacagacggatgcctggaaaagtaaaaccagttgcggtatcaatgccattagtctggactgccgaactcagcaaagaagtgataaagatacaacagaagtcgttttattttatgaaaatgtgccactacgacctgtggatatgaaaagcgaattttcaaccacctctcaggcactgtgggtgtatgacaaaaataaagtgctggttcgctggaagcctgaaaaatcaacaaggcaaaaatttcaagcttatcaggaaatacccaaaaacaagaataagcgtaagcttcgcccttttattgatctctcctcgcctgatgcgttaagaaatagttggccatggatccttaaacccgtacaaaatgaatttattgaacaagccaaaatttttggttttacattaaccgctgttgttctccagttgcgtccactgccacttaagactaaattcaaaacgactgagagggcaaaatttcccggcatacagcttaacaccgaaattaaagtacttgatttacgtttttcgcgaaatattcccccacaacagatagtgacgcagatacaaaaggtgttgaacaaaaagtatcctgatgtacagctggaattattaccggattcagaaccctcatcatttgaaaaattggaaaaagacagctctatatgcatacttgttttgttagatcagatccgtggtataattgatgaccgctatccgttaactcagaatctaagaactaaaattgcgtgccagcatatcaacgttaatccgtttgatcttagtggtgattctgttgttgataatttattgattgagcaggatactcccgatgggactacccgactcatccctgcgatagattcttgctattacgactataccattcaagatcttgagaaaaagacctgtcttgatgcattggcgcgtaatgccgaagttgcgtacaaagaacttgcgttgaagcatcttttactttgcaaagaaacaagaatcagtacaagcctggcagagcagaaagacttactgactcatgacctattggttatcaccgaaggatatttattcaccgctgaacaagaccgcccagtaattttaccttttaatccttcttgcccggatttagttaaagcctgcgatgaaaggctgaaactgtttgatacctctgtcgaggctcttcttactctcttaaataaaaaatggccttatacttatcggcctgaatcaatagcgcaaggttttggcagcagtgaagataaattaaccagatttgctcagagattgacaataattattcatagaatggaagaaatatccattcttcttcaggatccgaaatacgatacccctaatatgattcctgagaatttagatgcattaatgactgttcttgatactcaaagtcagcaactctcactaaaccactggctcttaccagatacagagatactgtctttttatatagtgcaacttaatgaggaaggtgaattatccgataccaataaaaatacactcatgcgtgaactagacttgctgtgcgagttgtggaattgtgctttgcgtgagtattattacaataatgaacttaatgttacctacgacattttaaaaagttatattttttccaaatggccagaaagaaaaaatgcacttctggcaggtgagaaaaaattggcaaagaaagccagttcgtcattaatagcgtcatggaataaattactctctcgtgtttttgatttacctttaggtgatcctcgaaactggttgaaaaacatacctggcattacacgactttggcatgatccagaacaaaattacgttatcgtcgggagtttggctccccttcaacctcaaattcagcgccagcccagtattcgccagtggcatccattacaaggggaactaaatcctgaacttctggctggattagtggatgttgactgggtcagaatgaatcaactggcgggtaatccctgtgtagcaacgcttattcgacgatggaaagagtgccaacctcatccggatgatgttcgtgaggcctctttgaccgagtga

SEQ ID NO: 11966 - DNA, 2073 bp, Escherichia coli
atgcacattcatcaggtcgaaattaaaaacttccgtcttttagctgatgcagagcttgtattggaggaacagacgaccgtcattgttggacgaaacaacagcggaaaaacatcactctcagaaataatacgcagattcttagcagatggtagtgctactttccaacttgaagacttttccagttcctgctacgaccgtttttgtgatgctctggaagcacttaaggaaggcatggaagatcatctcgttcgagaacttattcccgccattgaacttcggctgaaattccagtacgaccctgcacaacctcaattaggtccattgagtccctttgttatcgatttggatcccgcgtgttctgaagcgcaggtagtagtccgatacgaattgaaagatggccatctgacacaatttctcgaaagtcatactgaaatgccactttctagagaagaccgcctcgctttcctccgtatattgcgagaacgtatccctaataatttctgtgtgaaaatatgggctgaagatcccaacgatcctgataatcgtcgcgagttaccacctagtgcattgcgcggtctggtcaaatcgggctttatcaatgctcagcgaggacttgatgatgtgacatcccgagaatccgatgtactggctaaaacagttgaaaatcttttcgcaacagcctcttcggcatctgcgggaacggctgataaacaaattgctgatgcattgaaaggtgcagttcaggacattcagactcaaattgacacaaacttcggaaaccagctcaacagtctgattccggctctagaaacttttggatacccaggattgggaggacaggagttacatactgaaacattgctcgatgttagcaagttgctatcaaacttcacgaaagttcgctattcaggttatagcggaatcgcattaccggagtcatataacggtcttggtacacgtaatctgatatttattctcttgcaattagctggtttctataaagcattttgtgccgaagttactgagccgggtgtacacctgatattcattgaagaaccagaagcccatctgcatccacaaatgcaggaggtttttattcgtcaacttgccaaaattgcacaacaactggtggatggcactgaggacaggagaccctggcctgtacaatttgtcgtgtctacacactcgcctcacattgccaatgcggctggtttcgagagtattcgctattttctgggggctccagcacaggggactcgggaaggtgtccgaaaaaccaaaattaaagatctgcgtaaagggctgaatcatattccaattgaagataaaaaattccttcatcaatacatgacgttgacacgttgtgatctgtttttcgcagataaagcgattctcgtcgaggggttaagcgagcgattattgcttcccgtcatcatcaaaaaactagaatcagccgaaccagagagaccgaagctgtcgagccagtacgcaacggtgatggaagtcggcggtgcatacgctcatttgttcttcgagttattagcgtttcttgagcttcaaagtctgatcataacagatctggacgcagtcctaagagcaggaggtcaggcatgtgctgttcatcttggtacatattccagtaatgcttgtttgaaagcatggttctctgaagatacccctttcacattagctggtttgattgccaggagtgacgatgataaagctcgtaatggaaatcgtattgcctatcaatgtgcagaagtgacagatggcccctgcggacgcacattcgaagatgcatttatccttgcaaattcggctttattcgggctggtagggagaaatactcaggaactggaaatagaagcccgtgataaagcggctgagtggaaaaaatcagaatttgcattgaaatacgcgattacagagacagaatggaacgcccccaaatacatagtcgatggaatccgctggttagctggcagcaatgagcttatgacacaagatccagtattggcgcaggttgtagaggccacaactagtattgaagaaggagccagcgctgatgtctga

SEQ ID NO: 11967 - DNA, 1734 bp, Escherichia coli
atgtctgagatccattcgcccgccgaagctgctagccagcgagctttggaatctatgtatgcttgcctcagtgaaggacgaagcttccggctggaagctggcgctggtgcgggtaaaacgtattcccttattaaggcacttcgattcttgattgagcgaaataaggatttatttgaaaaacgtagccagcaaattgcctgcatcacctttactaacgtggcgaaggatgaaatcgtcgcgcgaacagatcgaagccccatcgttttttgtgataccaatcatgcgttctgttggtcgttaataagcagctttcaaaaaccgttgagagaactgattgaaacaatgccaacatgggcagaaaagctcgaagaagttggtggaagccttgggaatcgtagtattgagtataatcttggacatcgctctattcgcgaccatcgtataactcttcatcatgacgatgttctttctttaactatctcactcatggagcacgaaaaattccgtagagtgattgcagaacgctttccaatcattctggtcgatgagtaccaggacactgataaaaactggattgaggcaattaaacggcattttcttggacaagctagagcacctttatttggttttttcggcgatcattggcaaaaaatctatggtggtggatgtggaaagctggaacatcaggacgtggttgaaataggtaaagaagccaattttcgttcggacaagataattgttgatgcccttaatcgtatgagacctgagctaccgcagtgtgttaaagatcccgaagctacaggtttagtacgcgttttccatacaaacaattggcaaggagttcgtcaaaaaggcgtgcactggagtggtgatttaccattatgtgaaggccaggctactctggaacgagttaaaacaacgttggagcaggatggttgggtcttttctcccaatcacaccaaaattctcatgttgacccatcgacttttagccaatcagcagggctattcaaatatagtggcagcgtttaaatacaatgaatccttcacgaaaaaggaacatgaacatatagccttttttgtagacaaactggaacccgcctgtgatgcctttaccgctcgtaagtatggagagatgtttaatgcgcttagcggtattacaccactgttgcgtagacattcagataaggtgagttggcacaatgtaatgacgcaacttcttgctctccgcgaaaccggtacaattggcgacgtaattgagttcatccgtgctcaacggaagccaagacttccagataaggttgaaaaatttgagcaggagttactccattttgacagaacggctgatgttgaaatgccccgaagattaaaagaacttgaaaagctgaaaaatattccctattcggaggtcagatcacttcgccgttatcttgatggatattctccattcgaaactaaacatggtgtgaaaggtgctgaatttgagaatgtcctggttgttgttgggcgtgggtggaaccagtataacttcggagaaatgttggaattcgctggagcccaaacgattccagtcgataagcaagactcatttgaacgaaaccgaaatttgttttacgtcgcttgttccagaccccaaaagcgccttgcgatccttttcaaccaagctttgtcacctgcggcactgacaacacttggaaattggtttggagcagagactataataccagcaccgtag

SEQ ID NO: 11968 - DNA, 729 bp, Escherichia coli
atgcttttttctatcattatgccggcatataattcacaggcaacaataaaagaaagtatagcatccgtgcttaatcagacatatcaaaattttgaattaatcataattaatgataattcaagtgacgcaactttatcgataataacaaatttctgtcatgataaaaggattcttgtaataaataatgagaacaatatgggagtggcacaatctcgtaacagaggattggaaatggcatctggagaaataattgcctttctggatagtgacgatatatggtaccccaataaattggaagaacagtataattgttttctttccggtcacaaaattgtctgctcttattatgatgtaattgactctgaaggggatattattggaacaagacatgcacctacacttgttacatttgaaaaaatgcttaaaagtaattttataggtaacttgacaggtgcatatgcctcctctttttttggaaaatgttatcagaaaaacattgggcatgaagattatattatgtggttggaattggtaaaaaaacaacctgcttattgcattggaaataaactagctgcataccgaatttcaaataattctctttcttctaataaaatgaaagtggtaatttggcaatggaaaatatatcgtaaagtattaggtatgaatattatcagatctttatattactttttaaattatatatattttgcgataaaaaagagaaactaa

SEQ ID NO: 11969 - DNA, 828 bp, Escherichia coli
atgaaaacagctgtacttatccaagctcacaaaaatgaaaattatattagagaattggcgttaaacaatccatcagttcgtttttatgtacatatggatgccaagtatccaaataaaatccaatggattaaaaatgaatgtattgataacatctatttaattgaaaatccagtatcggtttattgggggggaagtagtcagatttttgcaaccctattattgatgaagaaggcatatagtgataagagaaataagttttttcatctcataagttcagaatgcgttccattaaagtcatttgttgaaattgaaaacgaatggagcatgaatgaaaactgtcaatttattgagtcgcatagagataaaaataatgagtggagattaaaggttcgggtccctcactcaaatacgaagtatcttagaacttttttaggacgatgtgctaataaactctttaaagtaactacttttgtatgggatagtataggtttaaatcccgacaactatttttttggttcccaatggttttcggtaactaggaattttgttgagcaagtaatagatgaagataatgaagatttttttaaaacattccataatataacttgtgcagatgagcatgcttttgctatttttgcacgaacaaaatattctaacccgaatgatattcaagataacaataaaagatttattaaattttcaggtaagtcaagtccagaatatttaagtttagatcaagtgggggggattaagaatcttaactcgtattggttttgcaggaaggtgagatgtaatgatttattaaaaataataagacaggggaagtga

SEQ ID NO: 11970 - DNA, 888 bp, Escherichia coli
atgtttggttttataattatctcatgcatgttgatactaagtaacgaaatatactggagggatatcatcagatacttgtcactggctcattttttggtggtcctttttattattcctttagttttttttgcagaaaaatactcgtttattgatgatagatttggagttagatatacatttggcttccataatccgaatacatttagtcaatatttaatttctctatatgtagtgttcttgttgttatttgttgaagttatcaaaaaaaaatctctgcaatttttgactgttataatattgactctgtttatatatggggtgatatccttaactggttcaaggacgggaatgatattaactattattaccggcttcggttttttagcatgtacactgtctaaaacgaatgataaaaaaagaagaaagttcgtatatttatacatactaggtgcaggagtattatgttttgtacaatattatcttgtcttaacatttaatcattcagagttctcaaaaaccataaatacaattctttctggtagaatatggttttcttcacaattaactagccaattatggcctgtcccatatttccatggtgtgaatattaatgattatttgccaattgatttcttctacgtggcttatttttacaatcttgggatttttattggatcttggtttatatacctctttataagaaaaatgtttgtgcaaacatatactcctgttatggtaattgtgctttggttatcgcttgcaataacggtcactgaaaattattatgcaattccgttgtataatattagtttatttattgttttttcctcaagatatgtgattaatgaaaatgaaaacagctgtacttatccaagctcacaaaaatga

SEQ ID NO: 11971 - DNA, 906 bp, Escherichia coli
atgaaagatcaagcattagtttctattattattccaacatatgggcggtgtgacactttaaatcttgctgtccaaagtgtactaaaacaggattataaaaacatagaagtattggttattgatgataatgataatccaataatgtctaagaaagttcttgccaatttatcggaatatcaatccgaacccagattaaagtattttagtgatggggttaatagaggtggagcaggggcaagaaataaaggaattgaattgtcaataggtgaatatattacttttcttgatgacgatgatttgtttttagaaaataagatatcaaagcaaattgattttttagaaaaagaacaacttgatgtatgcctttgtgatatgtattttaaacaaggagaccgttttataaaaaaatcaaattgctatgcaaatggaacatcattaaaggaatttatactcaagggaaattgttacacgccaatgatcatgtgtaaacgacatattctaattgatattggtggattcgttttaactcctcggtttcaagatcacttattaatgattagaattctttctaatacttctaaagtggggcatttatctgagcaattatttgttcataacaaccataatggtgaaagaattacatatagtaataaatctgctgaagcatatatattacgcgaaaagatggaacgagaatatatttatttattaaatgcaaatgagcgtaaaacattcgaattcaagaaggcacttataaggatgaaaatatatagattaaaaaatgaatatatggagttacttaaaataacattatatgccatgaaaaacctcactaacttttcagatgtttacgcattaggaaaaactttaataagagtgatattttttgggagcaaaaatgtgtga

SEQ ID NO: 11972 - DNA, 1302 bp, Escherichia coli
atgaaaataatatataacacactttggatgatatttgaaaaattagtattgtccctatctttactaatcattaatgcctatgttgcgagatatttagggcctcagcaatatggggttatagcctattctattacactactcagtatttctgtggttattagtaattttggtactaacacattaattttccaaaaaataagtaaaaatcacagtgttgcaaaaatcattataccgccgatacagatattgaaaacaatattgtacataatatgtacacttattatgtttttctgtttatatatttttagttatgattttgatccttatctgacatttggtttagctgtagcattttactttcaagctattgatagctatacatggtataatgatgcaaaattgaaatcaaaatacaatagtcttattaatacaatagcattaatagttgctattctaagtcgttactatttggtaaaactatcgatggatttaaaatggtttgctattccttatgtatgcaattacgggatatcttttttattgaaaagatatttttacattaaagaagaaaaaactaaaagcatcaaatcatttatatttgaaaaaaaggaacatacactaaaagttatatcttactttataatttcaggtgcaccattatttttaagtgaaatatctattcttatttatacaagactcacaaacttatatttaggacaaattaaagatattgatgcggtcggcatattcaatgcatcttatgttttagctactgcctggacagtcgttcctttggcatttgttacgagtgtctttactataatctataaagaaaaggatatttctaacagggctttaattggaacattcttgactttgttgatgttgctttttggttttttacttgtcatattgtgttattttttcaaacgacagattatcagtattgtatatggatccggtttcgagttatcttcttctatattacctgtacttattcttggctcagtattctctcttttaggtgttatttcctatcgaatgataatatcaatgcatggatacaaatatatagcaaaaaagatggttataatgggggtgataagtattccattaaattattatcttattaaatcgttaggtattattggtgcagcttatgctacagttagtattgaacttatatcagccacattggccaattatttttttaaaggtggggtgattgcaaaaatgcattttaaaatgataacgtctccctacagtgtatctatgcaagctataactaaaatactgaaataa

SEQ ID NO: 11973 - DNA, 711 bp, Escherichia coli
atgctgcacgaccaaaattatctttatgttaaatgcgctgataagtatgaggtcaggaactatattgagaaaaaaattggcagtgaatatttagttccgcttcgttatatgtttactaataatgatgatattactgataaatgtattctgagtaatagtgtagcaaagtctaaccatggtgcaggtatgatagagttcattcctgaaacatattcattaagcgaattgaagaatacttttggaaaatggctaaatattgactatacctccgagtccaatgaaaaacattatagtaggattccgagaaaaattcttattgaagagtctctgtgtaaggagggaaaacctcctgtcgattataaatttcatacatttaaacaagcagatggttcatttcgttttgttcttcagttggtaaatggtcggtttcataatgaatcaagaggttattatctggaggatcttaataaatgcatatggtctcatggtgaaggttttcattctattccacaagagcatatcaaacctttaaaaaaggctatggaattgtcatcaattctatgtgaagattttaattacgtacgagttgattggtatatttatgacaataaaccttattttggtgaattaacctttacacctggtgctggaagttcatatgaatttggtaatgaacttgaaaaattaatggccaaatattggcagttgtaa

SEQ ID NO: 11974 - DNA, 996 bp, Escherichia coli
atgaacgataacgttttgctcataggggcttccggattcgtcggaacccgactacttgaaacggcaattgctgactttaatatcaagaacctggacaaacagcaaagccacttttatccagaaatcacacagattggcgatgttcgcgatcaacaggcactcgaccaggcgttagttggttttgacactgttgtgctgctggcagcggaacaccgcgatgacgtcagccctacttctctctattatgatgtcaacgttcagggcactcgcaatgtgctggcggccatggaaaaaaatggcgttaaaaatattatctttaccagttcagttgctgtttatggtttgaacaaacacaaccctgacgaaaaccatccacacgatcctttcaaccactacggcaaaagtaagtggcaggcagaggaagtactgcgtgaatggtataacaaagcaccaacggaacgttcattaaccatcatccgtcctaccgttatcttcggtgaacgcaaccgcggtaacgtctataacttgctgaaacagatcgctggcggcaagtttatgatggtgggcgcagggactaactataagtctatggcttatgttggaaacattgttgagtttatcaagtacaaactgaagaatgttgccgcaggttatgaggtttataactacgttgataagccagacctgaacatgaaccagttggttgctgaagttgaacaaagcctgaacaaaaagatcccttctatgcacttgccttacccactaggaatgctgggtggatattgctttgatatcctgagcaaaattacgggcaaaaaatacgctgtcagctctgtgcgcgtgaaaaaattctgcgcaacaacacagtttgacgcaacgaaagtgcattcttcaggttttgtggcaccgtatacgctgtcgcaaggtctggatcgaactctgcagtatgaattcgtccatgccaaaaaagacggcataacgtttgtttctgagtaa

SEQ ID NO: 11975 - DNA, 285 bp, Escherichia coli
atgatatcaggtcttaatggtggaaatttcatccttagctcgatggctaaggaaagagtcaaatcaggtttacttgatagagcaacaatagaaggttctaaaggcgagtataccgtgatttttgatggttcagagtgggaaggtaagccattagtcttaagtagctccagacagccttatgaagcacgagtattcaaaagcatagatggtgcagctgcagaactactacgcataggcttaagcgaagcttcaatcaaaaacaccaccaaatcgaacaataaataa

SEQ ID NO: 11976 - DNA, 2019 bp, Escherichia coli
atggatatgcaaaaagaaacgattttttcagaagttgaaactgctaacagtaagcagattgctgttttaaaggctaactttccgcagtgttttgataaaaacggggctttcattcaagaaaagttgcttgagatcgtcaaatcatcggatgttgaactctctaaagagtcatacagcttaaactggctgggtaagtcctatgcgcggctgttggctaacttaccaccgaagacgttgcttgccgaagataaagaccataaccaacgtgaagagaacaagaacagtcagaatctattgatcaaaggggataatctcgaagtattgaaacatatggttaatgcttatgctgaaaaggtgaagatgatttatattgatcctccatacaatacaggtaaggatggattcgcctataacgatgatcgcaaatttacaccagaacagctttctgatctggcaggtatcgatcttgatgaggctaaacgtatacttgaatttaccacgaatggttcaagcagccatagcgcatggttaacgttcatttatcctcgtttatatattgctcgtgagcttctacgtgaagatggtgtgatatttatttcgattgacgaaaatgaattaaatcaacttaaaactatttgtgatgaaatttttggcgaagcaaatttcatagaaaatattgtatggaataaacgtatccctaaaaatgataagggtattggtaatatccatgagtacatccttgcttatgcgaagaataacgaaataagtaaagaatttttaatgcggaaagatggtattgatgatgtatatcagtttattgaaaagttaaaaaaggaaaaggtgccattagataaagcagagcagcaactcaaaaaattctacagctccaacggatatgatcgtggaattactctttacaacggtttgaacgaggattataggccatggggtaaaattaatatgagctggcctaatgcagattcatttggacccacgtatgaagtattgcaccctttgactaataaccctgtcaaaatcccagacagaggctggcgttggaaagaaggcacttttaatcatattgcaaaaagaatagatggaaagtatgcagatattaaaaaactacatgatggtagcgttatttgtggtggaatttggtttgccagtacagaaaacacccaacctagttcggttaaatttttagatgaagttgaagagtttttactaagatcaattatttcaactaaaagtgatggtggtgttgaggttgaaaatctttttggtgggaaaggatatttctcctacccgaagccaacaagtttaataaaaacactatttggttcagtaaaaaccgaagataaagacatttatcttgacttttttgctggctctggaaccacagctcatggtattctggagttaaatattgaagacggcaggaaaagaaacttcatctgtgttcaattagatgaagaaacagataaaaagaaacaagcctataaagaagggtataaatccatcttcaatataacaaaagacagaattattaaggcaggaaaaaagctgaaaaaagataatcctaattataatggagatttgggatttaaaatatttgaaactgttcatgattttcgagcaaaagatgagtctgaacttacgctttctaatcttagtttctttgacgatgctgtattgacaccagagcagtatgacactctattgacgacatggtgcgtgtatgatggtagcttgctaacaacaccaattgaagatattgatcttaatggctacaaagcacacttgtgcgatggtcggctatatctaattgcgcctaatttcacaagtgaggctttgaaagctttacttcaaaagctggatgcagacaaagactttgcccctaacaaagttgtattttatggcagcaacttcgaaagtgcgaaacagatggaactcaatgaagcactacaaagttatgctaataaaaaatctattgatttagatttggtggtaaggaactaa

SEQ ID NO: 11977 - DNA, 2910 bp, Escherichia coli
atgtctaaagggttcacattcgaaaaaaatttacctcatcaaaaggctggcgttgattcggtaatgaatgtctttgtatccgccatacctcatcagacggatcatgttgcaattcgcctgttagctaatccagaactgaatctatctgaacaacaatactacaacaacataaaaaatgttcaggagttcaatggtattgagcactcaaaagataactacgatgctaaaagcaacgtaattgatgtttctatggagacaggtacaggtaaaacttatacttacaccaaaacaatttttgacctaaacaaatcatttggcattaacaagtttattatcattgttccgactctatcgatcaaagccggaaccgttaactttttaaaaagtgatgctttaaaagaacactttcgagatgattacgggcgtgaactaaagacttacgttgttgaaagtcagaaaagttctggtaaaaatacaaaatcatatatgcctcaagctattcatgatttcgtagaagcaagtaattttaataagaaatatattcacgttcttgtgatcaactcagggatgattaactcaaagtctttaactgacacttatgatgttggtttgcttgataatcaatttgatacgccatttgctgctcttagtgcggttaaaccattcattatcattgatgagcctcataagtttcctactggtaaaaagacatgggaaaatattgaaaaatttaatgctcaatatatcatccgctatggagcaacctttagtgaaggctataagaacttagtttatcgtcttacagccgtagatgcattcaatgaagatcttgttaaaggtattgatgcatacattgaggatattgttggtgatggtaatgccaacctcaagttcgtcaaatctgacggaaaagaagctacatttgaactgaacgaaaatagcaataaaaaaacatttaagttagtcaaaggtgaatcactatctaaaacgcatagtgcgatccatgatttaacactggatgccttaaacaagagcactgctgtattgagtaatggtattgaactaaaaattggtagttcaataaacccctactcttacgatcagacacttgctgataacatgatgcgtaaagctgtcaaagaacactttaagttagaaaaagagtatctgacacaaaggccacgaataaagcctcttactcttttcttcattgatgatattgaagggtatcgtgatggtaatgatattgccggaagtctgaaaaccaagtttgaagaatacgtattggcagaagctaatgaactgttaaaaatagagaaagatgagttttataggaactaccttgaaaaaactattaaggatatatcttctgttcatggtggttatttttcaaaagataatagtgataaagatgataaaattgagcaggaaatcaacgaaatccttcatgacaaagagcttttattgtctttagaaaatcctcgccgtttcattttctctaaatggacgttgcgtgaagggtgggataacccaaatgtttttcagatctgtaagctccgttcgagcggtagcaccacatctaaacttcaagaggtagggcgtggtttacgtcttccagtgaatgaatacatgtgtcgtgtgaaagaccgcaattttaccctcaactattatgttgattttacagaaaaagattttgtcgattctcttgtcaaagagatcaacgatagttctttcaaagagactgttccaagtaagtttactcaagagcttaaggataaaatcctatctcaatatccagagctttcatccagaacactcatgaatgaaatttttgatgatgagatcatagatgataatgataacttcaaagattcagatgcctatagccgcttaaaagccaaatatccggcagcatttcctacaggagtgaaaccaagcaaaatcaaaaaagccactgatggaaaaagacgcactaaaatgcgtgttggtaagttcagtgagctgaaagaactatgggatttgatcaatcaaaaagcagttattgagtataaaataaatagcgaaaatgaattcttatccattttcaagtcattcatgctcgaagaaacagaaagatttactaaatcaggcgttcatactcgcattgataaaatttatatctataatgatacggcaatgtcgaaaagcattatcagtggtgatgataactttgctaaactaaacacaatgagctatcgggaatttcttgataacttatcacaaactatttttgctaaacacgataccttacataaggttttttgtgatataaaagaaactattaatatcactgaatacctgaacattcaaacaatcagaaagattaaatctggttttagcaagtatttgttgaacaattcgtttaataaattcagtcttggatataatgtgatctcaggttcaattcatcctacaaagttcactaatgcagacggtgagcctgtgaatgaggtattatcaagtgatcttggcatattgaatgacaacacaaaaccacccttggattcttatctttttgaggaagtcttttatgactcagagcttgaacggctcaacataacagatggagagatccagtctgtagctgtttttacaaagataccgaagaactccattaagatcccggtggcaggtggatacacgtactcccctgactttgcatatattgtcaaaacaataaaaggtgattatttaaactttattatcgaaacaaaaaatgttgatggaaaggatagcttaagacttgaagaagaacgtaagataaaacatgcgcaagcattatttagtcaaataagtaaatctgttaaagtcgagttcagaacacaattttctacagacagaatagctgaaatgattaaacaagttggatga

SEQ ID NO: 11978 - DNA, 372 bp, Escherichia coli
gtgagcgaaattaactctcaggcactgcgtgaagcggcagagcaggcaatgcatgacgactggggatttgacgcagaccttttccatgaattggtaacaccatcgattgtgctggaactgctggatgaacgggaaagaaaccagcaatacatcaaacgccgcgaccaggagaacgaggatattgcgctaacggtagggaagctgcgtgttgagctggaaggcaaagacaggcgcattactgaggtgacaatgtggattaagcgactgagttcctctctcaaaaacgccaaaccagacagcaagttgccggatgacgccatgatctggctaaataatgaaggacttaccagtatagaggatattttacgatga

SEQ ID NO: 11979 - DNA, 654 bp, Escherichia coli
atgagcacttttaccaaagaatggctacaaaatacgattaccagtattgagtcagcacgagatgaaatgccattcggactcgacaacgatcaagcacacatgcttacagcatttaaaatcgctctcgcctcactggaacgcgaacagattcgccacgagcatgccaaatggtctgactccacatttggctgcgttggccccattggtccgctgaaacatctctcaaaagaggcactggaagccgcagccgaaccagacgatcttagcgagtgggctgatatgcagtttctgttgtgggatgcacagcgccgtgctggtatcagtgatgctgaaattaccgctgctatggaaaataaattgaagatcaacatggaacgccagtggcctgaaccaaaagatggtgagcctcgcttgcacattaaagaacgcggcaactctccggtaactccgggtggttggataagctgtagtgatcgaatgccggaagacaccaaaatgttactggcatttagtcaaggtgaaatcgtggccgcatattggaactgggttgtaaatccaattgattacaaaaaatatagagctttcacgtatttatcaggaaatatcttggatgacgtaactcactggatgccgctaccagagcctccactttga

SEQ ID NO: 11980 - DNA, 1074 bp, Escherichia coli
atgggaagaaggcgaagtcatgagcgccgggatttaccccctaatctttatataagaaacaatggatattactgctacagggacccaaggacgggtaaagagttcggattaggcagagacaggaggatagcaattactgaagcaatacaggccaatattgagttactctcagacagcggacgcaaatcactgatagacagaattaaaggcggtgacgcaatcactcttcatgtgtggcttgaccgatatgaaagaatcctcaccgaaagggggatcaggccgaaaactctactcgactacgccagcaaaatcagggcaatccgaagaaaattgccggacaaaccgctcactgacatatcaacgaaagaagtggcagcaatgctaaacacctacgtagcagaaggtaaagcagcttccgcaaaattaatcaggtcaacccttgttgacgtttttcgtgaagcaatagccgaggggcatgtggcaacgaatccggtaacagcaacccgtacagcaaagtcagaagtaaggcgctcaaggctgacagctaatgagtatgtcgcgatttaccatgcagccgaacctctcccaatctggctgaggctggcaatggatttggcggtcgttacagggcagagagtgggcgatttgtgcagaatgaaatggtcagacataaacgacaaccatcttcacattgaacagagtaaaacaggggctaagctcgccattccgctaacgctaacgattgacgcgctcaatatctcattggctgatacactacagaaatgcagggaggccagcggcagtgaaactataatcgcatcaaagcatcacgatccgctttcccctaaaacagtatcgaagtattttacaaaggcgagaaatgcatctggactctcatttgatggagacccgccaacattccatgaactgcgtagcctgtcagcgaggctataccggaaccagattggcgataagtttgctcaacgtcttctcgggcataaatcatattcaatggcggcgcggtatagggacagccgtggacgggaatgggacaaaattgaaatcgacaaatga

SEQ ID NO: 11981 - DNA, 2688 bp, Escherichia coli
atggcgctgttaaccctgaccagtaccctggtgggatggtacaacctgcgctttatcagccaggtggaaaaagacaacactcaggcattgattcctaccatgaatatggcgcgccagttgagcgaagccagcgcctgggaacttttcgccgcgcagaacctgaccagtgccgataacgaaaagatgtggcaggcgcaggggcgaatgctcaccgcacaaagcctgaagattaatgcgttgctgcaagcgttacgggaacaaggttttgacaccaccgctattgaacaacaggagcaggagatctcccgttcgttacgtcagcaaggggaactggtggggcagcgtttgcaacttcgccagcaacaacagcaactcagtcagcagatagtcgccgccgccgatgaaatcgcacacctggcgcaaggtcaggcgaataatgcggcaacctccgccggagcgacccaggccgggatttacgatttgatcgaacaacatcagcgtcaggccgcagaaagtgcactcgatcggctgattgatatcgatcttgagtatgttaaccagatgaatgaactgcgccttagcgccctgcgggtgcagcaaatggtgatgaatctggggctggaacagatccagaaaaatgcgccaacgctggaaaagcagctcaataatgcggtgaaaattctgcaacgtcggcaaatacgcattgaagatccgggtgttcgtactcaggtagcaacaacgttaactaccgttagccaatatagcgatttgctggcgctgtatcagcaggacagtgaaatcagcaatcacctgcaaactctcgcccaaaataacatcgcccaattcgcgcagtttagtagcgaagtcagtcagctggtcgacaccattgagctgcgtaatcagcacgggctggcacatctggaaaaagccagtgcacgcgggcaatacagcctgttattgctgggattagtttctctttgcgcactgattctgatcctctggcgcgtggtttatcgctcagtcacgcgccctcttgcagaacaaacgcaggcgctgcaacgcttgctggatggtgatatcgactcccctttcccggaaaccgctggcgtacgggaactggataccatcgggcggctgatggatgcgtttcgcagcagtgttcatgcactgaatcgccaccgcgaacagctggcggcgcaggtcaaagcgcgtacagctgaattgcaggaactggtgatagaacaccgacaggcacgggcggaagcagaaaaagccagccaggcaaaatcggcgtttctggcggcgatgagccatgagatccgcacaccgctgtacggtattctcggcaccgcacagctgctggcagataaccccgcacttaacgcccagcgcgatgatttgcgggcgattaccgactctggtgaatcgttgctgaccatcctcaacgatattctcgattattcggctatcgaagcaggcggcaagaatgtttcggtcagtgatgaaccctttgaaccgcgcccgctgctggaaagtaccctgcaattaatgagcggaagggtgaaaggtcgcccgattcgcctggcaacagaaattgccgacgatgtaccgactgcgttaatgggcgatccgcggcgtattcgtcaggtcatcaccaacctgttgagcaacgccctgcgtttcaccgacgaagggcacattatcctgcgtagtcgcactgatggcgaacaatggctggtcgaagtggaagacagcggctgcggtattgatcccgcgaaactggcagaaatcttccagccatttgttcaggttagcggcaaacgcggcggcaccgggctggggctgactatcagtagccgtctggcccaggcgatgggcggcgaactgagcgccaccagcacgccggaggttggaagctgtttttgtttacgcttgccgttacgtgttgccactgcacccgtgccaaaaacagtcaatcaggcggtgcgtctggacggtttacgtttgctgttaattgaagataacccgctaacccagcgaattaccgttgagatgctgaacatcagtggtgcgcaggttgttgctgttggcaatgccgtgcaggctttagaaacactgcaaaatagtgaaccgtttgctgccgcactggtggattttgatctaccggatatcgacggcattacgcttgcccgacaactggcacagcaatatccgtcgctggttttgattggctttagcgcccatgtcattgacgaaacactgcgacagcgtaccagttcgctatttcgcgggattatccctaaaccggtgccgcgtgaagtgctcggtcaattactggcgcactatctccaactgcaagtcaataacgatcaaccgctggatgtatcgcaactcaatgaagatgctcatttaatgggggcggagaagatccacgaatggctgatattatttaaacaacatgccctgccgcttctcgatgaaatcgacattgcccgcgccagtcaggataacgagaaaataaagcgtgccgcacatcagctaaaaagcagttgctcgagtctgggaatgcgtagcgccagccagcaatgcgcacaactggagcagcagccattatctgccccccttccacacgaagaaattacacgcagtgttgccgctctggaagcatggttaataagaaagacctga

SEQ ID NO: 11982 - DNA, 267 bp, Escherichia coli
atgttcgccgtcgacggcgggtttaaccgacataagctggcagcggggttcccagcgcctgatggcatcgacggattcgcgaaccacatgcggaatggcccggtcgacaggccagtcgatataaaggtgcagattgctgccgaactccgggcgatgcgggtcgctgccgcggggagtccgcaggatgatctggatggactgccggatatcatccagcccccggacgatttcgccgggagcctgcagagctggttgccagaatactga

SEQ ID NO: 11983 - DNA, 528 bp, Escherichia coli
atgactggtgtcacccgtcaggtcggtacggtcagtgccgttgatgccgacagggttcaggcccgcgttcgtctgcctgaatgcgataatctgcgcacaaactggcttaacgtgctacagcgcaatacccaggataacaaggattactggctccctgacgtgggggagcaggttgaggtgctgctcgatgccaacggcgaggatggtgttattctgggcgcggtgtactcagacgtcgataaaccgccgttcagtgataaaaacgtccggggtacgaaatacgctgatggcgcggagttcagttataaccgcgcgacccatacgctgacggtcagaggaggtattgagcgtatcgtggtggaggttgccgctgatatctctctcaaagggaaaaacctcgacctcacgggagttaccacgatcaacggccccgcgacactcaatggtgatctggaaatcaacggaagcgcccatgcaacgggtaacatatttgctgatggtcagaactctaatcaccattcccattga

SEQ ID NO: 11984 - DNA, 138 bp, Escherichia coli
atgcaggcgcagggcctgctggcgagatggttcaggtttcagccgggggagattgatgccctcgatactgacgatctggagatgtggctggagcaggctgaagagcaaatcaaaagcgagttcggcgacaatcagtaa

SEQ ID NO: 11985 - DNA, 336 bp, Escherichia coli
atgtcacagacccagcccgatacttttacgctgtcttatcctttcaccactgctgcaggtaccagaattgaacagattgaactgaaacgcctgacagtaaaagacctgaagcaggtgcgcaaaatcaacaaagacccggcagactgggacgaaccactgattgcccgtagcaccggtatcctcccggaagacctcgataacatggatcttgccgactatatggagctgcagaaacgatttcagaaaatcactgggctgggcaagagcgacaaaaacactgatgcaggcgcagggcctgctggcgagatggttcaggtttcagccgggggagattga

SEQ ID NO: 11986 - DNA, 438 bp, Escherichia coli
atgcatatattggagaagatgaactcggccctattgcttagtttattgattggatgtgggattggttttctctactggttcaagttgccccatatgccagtagccgcaatcccaaacttcatgactacattgtccagtgtctttgcaacgttgttaggttttattattacagcaattgcactacttgcatcattgcttgataaaccgttacttaaaaacatgcaaaaaaccggacattacaagcgtctgatgaccgatgcattctacacttgcttagttttgctagtgttggtgttgacatgtttgattgggttgatgctgcaaagtaagcatcaagagattgtagccgctatcctcattgggcttgttgttatgtctatgttgtgtttattacaaacaggtaggcgattattcaatataatcaaagtgatatcataa

SEQ ID NO: 11987 - DNA, 894 bp, Escherichia coli
atgagtggtgatgtgagaaattatcgtattgagtttcatcagctatcgtttaaggccacagatcagctggcaaatctcggagatgcttttcaatctgtaattgataaacagagcccttcctcttcaaaccatgagggttttactagagaaatttgggggttgaaaaaacgcgcggatggttcttttagtggagagttgagaaaatttcgcaactcgaacattccggataaaggtgcaccagggaaacagtctacccctattccacttgccaaggatgaagggatcattgagcgcaatttctttgtattctatcctcgaatcaatgttataggttggcactataatcatatggcttgtggtataagccgttttagtgcatttctttcaactatctttggttcaaaggttaagcccgcacctttgctggaaaaagatgcaatcgctaggcttatgagaggagatgtcaaaatgaaaaaaatccagttgacgattcctcgcccccgtaatcctgagttttaccctgatactgatttcagtcaaaagacactacaactgcttggtgatgcaggtgccgatacaatgcaaattgtaatggggattaatactcgccgtggcgatagtgatggtaggcttaagcagaatataaaatttgctatgcaagagttagtcgagtttggggcgaaaaaggctgtaattgatgtgttcgatgctgatggtgttgtccatcctgtggatttgattgccgagcgtatttcgtcctatcaatcggtagttactgacgctcgtttccctccagccgaaaccatgtaccgtctaatcgatactgcgtatgctgaaaaccgggagagtatcaatgcatatattggagaagatgaactcggccctattgcttag

SEQ ID NO: 11988 - DNA, 417 bp, Escherichia coli
atgaataacaaagatgttaacgctgtgctttcccggttaatgtcactattccaagcagagaatgatagtgagttggcaagagcgcttaacgtcaataggcagacacttgcaagttggaggaagcgtgattctgtgccttatgcaatttgcataaacatcgcagaagaaaagggggtttctttagattggttgctaacaggtagaaaacaaggtttatcaaaagaagtagacgtaactccgacgcaagtgcagtttagccaagctgaccttactatgcttgagcttttaaagcagctagaccccgaggttcgtaacgatcttctgcgaggcgctgcggaaaaacagcgagtgatcgagatggaaaaacaactgaaggaattatccgcaacgattgagcggttaaaaaatgtgggttaa

SEQ ID NO: 11989 - DNA, 225 bp, Escherichia coli
atgaataaacaacaagttcgggcacgactagttgaacgaggcagtagcttgcgtcagttcgcgcttaacgcaggctatgagccacgaacagtcacacaggcagtcagtcgctgggctggtaaaagtgaactaccacgtggtcgtttgacttatcggattttgcgagatctatcggttgcaataggtaaagaagttacccccggtatccttaaggaggtgtcatga

SEQ ID NO: 11990 - DNA, 309 bp, Escherichia coli
atgaataaaccaaatacatcaagcgcaggtacccgtattttgcgtgttcttaaggcgttacgtggccacgctctgaacggtatctccaacggtgaactggcggcagcactgcacgagtcaccagcaaacattaatcgggcactcaacaccctcattgaagaagggctggccctgaaactggagaatggacgttttgcaccgggcatccagttactgcagatcgccatggctcacagtaacgagatggcacgagcgcaggatcgtattaacgaaatcaaccaacgtgtcatttcaggtagtcgtttataa

SEQ ID NO: 11991 - DNA, 684 bp, Escherichia coli
atgacagacctggataaacacattgaaaaactgaaaaagttgctggcgctggcagcatccggcaacccgtatgaggctgctctggcactgcgccgcgcccgtaaactgatggatgttcacggcatcacacattccgacatcgccatgagtgatattgatgaaaccatcagtcactactggccgacaggcagcctccgtccaccgcgctacatgctgggcctgatgaacatcatccgcgaggcatttggtgttaactccatcattcaccccggcacatatccgggtgtggggttctacggcaaccgggaacgggccgcactggctgcgtacacctgggaagtgctggcccgccagctgaaaaaggcgcgtcaacagtatatcagcgcacagaacaaaagaataaaaactgccacccgtaccagccgtggtgaccagtttgctgaaggctgggtgctggccgttatcagtgaaatacagtccttcgccctgaccgatgacgaacgtgaactgatgcagcagtggctggaacataaatacccgcaaacgcaaaccaccagggcgcgtaaaccgggaagaagccgcaatggcgacgcctcgcgctatgcggggtttcgtgaagggcagaacgtcagactgcaccgcccggtcagtgggcaggaacaacagaaactggaggccagatga

SEQ ID NO: 11992 - DNA, 732 bp, Escherichia coli
atgcagaaaatgaaaccggcgctgaaaaaaacgctgatggcggtagcgtgtctgagcgcagtaccggcagcccaggctgccatctccctggaccgcacacgtgcgatttttaatggcgatgagaaatcgatgacgctgaatatcgccaatgacaacaaacagcttccctatctggcccaggcatgggtggagaatgaaaagaaagaaaaaatcaccacaggcccgattattgccactccgccagtacagcgtctggaacccggctcaaagagtatggttcgtctgaccagtacacctgacatcagccgcctgccacaggaccgggaatctctgttctatttcaaccttcgtgaaattcctccgaagagtgataaggcaaatgtgttgcagatagccctgcagacaaaaataaaactgttttatcggcctgaatctattaaagcaaaacccaacgcagtatggcaggaccagctggtgctgaataagaccggtggagggtatcagattgataatccgacaccgtattatgtgacggtaattggaattggcggcagtgaaaaacaggccagagaaggtgaatttgatgctgtgatgctggcaccaaagtcaacgcagacggtgaaatcaggaacatacagcacaccctatctgagttatatcaatgactatggtggacgtccggtactgcagttctcctgtgcaggaagtcgctgtactgcagtaaagaaataa

SEQ ID NO: 11993 - DNA, 516 bp, Escherichia coli
atgaacagggcaacaataggattttatctggcagttgtgctggggagttgcagtatgaacggtgtctcacaggctgatgaattgttgacgtgggatgattttttcgtagcagatgaaagccgccatcagtgggtaaatgagcacaacggaaggactggagcgctgaatgtcaaaggggcattagtgtcatctccgtgtcagctggatactaatgaggtgcaaatttcagaacggaagaaacgacgtgatatacagaaagttaagatcaatatgtcaggttgtggttatggtaatgttccggagtcgttctcagaatggaacagaaaattatatgtaaatgcatcaattataatgtctgatttactgagaagagcatgttatcttccttcaaaaagaaagtttttgtctgatggtgagaaccagttgatattttatttggaatgtgggacgcatatccgaagtcctgagaaagtcggcagagaggaaaatgctcttatcaggatgtcatatgattaa

SEQ ID NO: 11994 - DNA, 372 bp, Escherichia coli
gtgaatgttgattttgggaatgttcaggaagagaagataaactctcgcacatatgataagaaaattattgtcccggtcaggtgcccttatcatcagggggatgtatcgttaacaattacagctgcttccataattgaaaatgcagatgttgttgctactgatattgaagggttggggattttgttgtatgaagaagggaataataaacctttgtcattaaataatgcagccacaataagcacaggtttacgcgggaaaggcgaagaatattcagattttacttttattgcttcactatataaatacggtaaaaacaaactaaagaaaggagtattcagagcaacagtcatgatagatatttattatatataa

SEQ ID NO: 11995 - DNA, 993 bp, Escherichia coli
atgagaagaaaatatattgtttttttgttttttttatttattcagttttcaccggatgcctattctcaaaagttctgtaatattttatgggcaaatgaaaatttgccgaaggcatcacttaatgcaagtatggatggttcctcttctgcagtttattctttaaatttacaggctggaggatattcgacagcaataagacagtatgaagaagatatgcccagctttacatcggtttccggggtttacagatactggctccagtatcctgatgaatggcaaaaaacaaaggaaggtcttaaatacagaatagtaactaatcttgaacttgcaggtagtcaggagcctggagtgaaaactgtagtaacgccacctcaatacttcacatggaagaatatcttaagatgtaaccgtgtcggagaaagatataactttacacagacaaatatagaaaatataaaaattgagattgacagaggaacagcatggccaggcgtgtatacattacaattaccattaaaggttgcctatgaagaaaataaaggcagatactctggtcaatcaggaggaggctggccagaatatgccggtgccattaaatcattcagtccggttaatacaaataatgttaccatacatataacatccaaatgtgaacttacatcaaggtatctcagtattaatattggtgacagaataacccctgatgaggcgcgaggtggtataaataaaaatgccagtttatctgtagtatgtaatgctccggcgaatattcttttttcaataagagctgcagatatgcaggacggacagataaataaaacaaagtgtggtcctggttattgtacgttgtcgtttgataatgataaaagccagaagactgtaaaagctataagaggaacaacagatgttcctttatctgtgaattttaaaagcgactcgcctgttgccgggctctttgaaggatctgctgtactgtcaatggatgttctctga

SEQ ID NO: 11996 - DNA, 222 bp, Escherichia coli
atgtatgggcatcggatagtaaacttaaatgtaagctacgatcgtcaccttattgataaggttgttgttcaacttgagctgaatggtgaggcaacatttgaatgtgttctttattcagagggcgaaggtgattttcgaagtatgagtttagaagagatggagcgacgagcgatattatatgcggttgatagcatcaaatcatttaatataaatgaaatataa

SEQ ID NO: 11997 - DNA, 318 bp, Escherichia coli
atgaaaacggataattcatacataataacatcggcgttcaaaaagaggaactcgcgttgtccatattgtgttctggaagccggtaaagtacctgaggagcaattctggttattaatagatatttcgtccatacacagtcaacgaattatcaatgctctgtatgattatattgttgagggtgcttccagaaaagttatttgtgaaagacacaatataaataacggttacttcactacctgtcttaagaaattaaattatatcaataaggttatttctgagttatcgcggttttatactgatgaaatagactatgagtaa

SEQ ID NO: 11998 - DNA, 249 bp, Escherichia coli
atgtttgggaaagttgaagataaagccaaagaagtagccggagaagtgcaggagaaatatggtgaactgaccgataattgcggacatcaggtaaaaggtgctgcccgtaaaatcgctgcacagggtggtcaggctgcccaggaggcggcggatgttgtacgtaataatgtagaaaataatcccttcgcggcaatttccatcgccgcgggtgttggcctgctgattggtctgctcatcggacgaaaataa

SEQ ID NO: 11999 - DNA, 354 bp, Escherichia coli
atgaatgcattcaaaacattgtttctttctgccctgctggtatcaacaggcgtactggctgattcgtccactcataccgggagcttaaaaaaccaggccagtcagcaggccgaaaaaatatctaaccgggcagaagaagcagcgcacaaggctgaacatcgtattgaggaaaaacaacagcaggcggagaaccgtctcaggaatggtggagaggtgagtacaactgataaggtaaaggaagatgcacagaaagcctggaacagaaccaaagaaacaaccgaaaaagcctggaacaggactaaagaagcggcacagcaggccggagatgctgtaagtgaaaaggtgagcgaataa

SEQ ID NO: 12000 - DNA, 402 bp, Escherichia coli
ttgagaacaggaaatatccagccacgtggaccatcccgtagtctggtagacaatatacaccgtgtcttcaacacccttacaggaatatttcatacccgcattgagcttattgcaattgagctggaagaagaaaagaaaaatattctggggttgctgctgatggtggggttagctctgatattcactgtatttggggttgtatcgcttctgatattcattttgctgtcagtctcaccggagcatcggctgattatatcagggggtgcttctgctgtttttctggttattgcattattttttgtgattttcattaaacaaaagactgccggaagcaggatactatcagagacccgtaaacaactcagtgaagacctgaactgtctgaaaagggatgatgaatga

SEQ ID NO: 12001 - DNA, 294 bp, Escherichia coli
atgaatacccggaaaacagaggagaaccgaaaacagaaactgttaaaacagattgagcaacaacgacagacactgggcctgttaaaggcagactggctcaggataacgtcgcctgttgaccgcggctggcagtcattatatcagtggcgtaatgttatcgttcccgcagttggagtggctgcattgtatacgctgaaatccagacctcgtcgtctgattgtctggccacgcagagtactggcagtctggggagggctaagatttatcaggcggcccttcacgtcgctccgatag

SEQ ID NO: 12002 - DNA, 144 bp, Escherichia coli
atggcatgtcaggacttaatgatagtgattatcattaacatgatgaagggggagttataccgttcggaaagcctgctaacgctgtggcagcatcacagtctgagtattctcaggagaaatacaaaaaacggacataccccataa

SEQ ID NO: 12003 - DNA, 1881 bp, Escherichia coli
atgtctgaccctgtacgtattacaaatcccggtgcagaatcgctggggtatgattcagatggccatgaaattatggccgttgatatttatgtaaaccctccacgtgtcgatgtctttcatggtaccccgcctgcatggagttccttcgggaacaaaaccatctggagcggaaacgagtgggtcgatgattccccaacccgaagtgatatcgaaaaaagggacaaggaaatcacagcgtacaaaaacacgctcagcgcgcagcagaaagaaaatgagaataagcgtactgaagccggaaaacgcctctctgcggcgattgctgcaagggaaaaagatgaaaacacactgaaaacactccgtgccggaaacgcagatgccgctgatattacacgacaggagttcagactcctgcaggcagagctgagagaatacggattccgtactgaaatcgccggatatgatgccctccggctgcatacagagagccggatgctgtttgctgatgctgattctcttcgtatatctccccgggaggccaggtcgttaatcgaacaggctgaaaaacggcagaaggatgcgcagaacacagacaagaaggccgctgatatgcttgctgaatacgagcgcagaaaaggtattctggacacgcggttgtcagagctggaaaaaaatggcggggcagcccttgccgttcttgatgcacaacaggcccgtctgctcgggcagcagacacggaatgacagggccatttcagaggcccggaataaactcagttcagtgacggaatcgcttaacacggcccgtaatgcattaaccagagctgaacaacagctgacgcaacagaaaaacacacctgacggcaaaacgatagtttcccctgaaaaattcccggggcgttcatcaacaaatcattctattgttgtgagcggtgatccgagatttgccggtacgataaaaatcacaaccagcgcagtcatcgataaccgtgcaaacctgaattatcttctgacccattccggtctggactataaacgcaatattctgaatgaccggaatccggtggtgacagaggatgtggaaggtgacaagaaaatttataatgctgaagttgctgaatgggataagttacggcaaagattgcttgatgccagaaataaaatcacctctgctgaatctgcggtaaattcggcgagaaataacctcagtgccagaacaaatgagcaaaagcatgcaaatgacgctcttaatgccctgttgaaggaaaaagagaatatccgtaaccagcttgccggcatcaatcagaagatagcggaagagaaaagaaaacaggatgaactgaaggcaacgaaagacgcaattaatttcacaacagagttcctgaaatcagtttcagaaaaatatggtgcaaaagctgagcagttagccagagagatggccgggcaggctaaagggaagaaaatacgtaatgttgaagaggcattaaaaacgtatgaaaagtaccgggctgacattaacaaaaaaattaatgcaaaagatcgtgcagcgattgccgcagcccttgagtctgtgaagctgtctgatatatcgtctaatctgaacagattcagtcggggactgggatatgcaggaaaatttacaagtcttgctgactggatcactgagtttggtaaggctgtccggacagagaactggcgtcctctttttgttaaaacagaagcgattatagcaggcaatgccgcaacggctcttgttgcactggtcttcagtattcttaccggaagcgctttaggcattatcgggtatggtttactgatggctgtcaccggtgcgctgattgatgaatcgctagtggaaaaagcgaataagttctggggtatttaa

SEQ ID NO: 12004 - DNA, 123 bp, Escherichia coli
atgtgtgcgcccagcatgggcgcgatcttggaggtgaaagccctcccgcgagctgactacagcgagcgaaaggaagtgcaactgcgtgagggtgaccgagcgtgggaaggaagcacggaatga

SEQ ID NO: 12005 - DNA, 426 bp, Escherichia coli
atgcagtatgcgaaacctgtcactctgaatgttgaagagtgcgaccgtctgtcttttctgccttacctgtttggcaacgattttctgtatgccgaggcgtatgtgtacgcgctggcgcaaaaaatgatgccggaatatcagggaggcttctggcacttcatccgcctgccggacggtggtggttacatgatgccggacggtgaccgtttccacatggtgaacggtgcaaactggtttgaccgtaccgtgagtgctgatgccgcaggcataattctgacttcccttgtgattaaccgccagttgtggctgtaccacgacagcggggatgcaggactgacccagctttaccggatgcgcgatgcgcagttgtggcgtcacatcgaatttcaccctgaatgcaacgcgatttacgcggctctggactga

SEQ ID NO: 12006 - DNA, 1959 bp, Escherichia coli
atgtcagttacagagtctaagacaaaaacggagcgtaaatccagccgtaaatcgtcaaaagagcaggagactgccctgtctgccctgttggcgcagacggcggaagtgagcgtgccgctggcctcactgattaaatcaccactgaatgtgcgcacggtgccgtattctgcggagtctgtcagcgaactggcggagtccattaaaggcgtcggcctgctgcagaatctggtcgtgcatgccctgccaggtgaccgccacggtgtcgccgcaggtggtcgcagactggcagcactcaatatgctggcagagcgtggaatcattccggcggactggcctgtccgcgtgaaggttatcccacaggaactggcgacggctgcatcgctgaccgagaacggtcagcgtcgggatatgcaccctgccgaacagattgccggattccgcgcaatggcgcaggaaggcaaaacacctgcacaaatcggtgatttgctgggctattcaccccgccacgttcagcgaatgctgaaactggcagaccttgcacctgtcatcctcgatgcgctggcagaagaccgcatcaccacagagcactgtcaggcgctggcgctggagaacgacaccgcgcgtcaggtgcaggtgtttgaagctgcctgtcagtcgggatggggtggaaaaccggaagtgcagaccattcgtcgtctggtgaccgaaagtgaagtggcggtggcggggaacagtaaattccgcttcgtgggggctgatgccttctcgccagacgaactgcgcaccgatttgttcagcgacgacgagggtggctatgtggactgtgttgcgctcgatgctgccctgctggaaaaactccaggctgtcgctgaacaccttcgggaagctgaaggctgggaatggtgcgccggacgtatggagcctgtcggtttctgccgtgaggatgccggaacataccgttgtctgccggagccggaagcggtgctgaccgaggcggaagaagaacgcctgaacgaactgatggcacgttacgacgcgctggaaaaccactgtgaggaatccgacctgctggaagctgaaatgaagctgattgactgcatggcgaaggtcatggcgtggacgccggagatgcgtgccggaagcggtgtggtggtgtcctggcgttatggcaacgtatgtgtccagcgtggtgtgcagttgcgcagcgaggatgacgcggctgccgacgctgaccgcacggaacaggtgcaggagaaagcgtcagtggaggaaatcagtctgccactgctgacgaaaatgtcttcagagcgcacgctggcagtccaggcggcgctgatgcaacagccggacaaatctctggcactgctggcatggacgctctgtctgaatgtgtttggcagcggagcgtacagtaaaccagcacaaatcagcctggaatgtaaacattattcgctgaccagcgatgcgccatcggggaaggaaggtgccgcattcatggcgatgatggcagaaaaagcccgtcttgctgccctgctgccggagggggggtcacggaacatgacgacgttcctgtcactcagtcaggaggtgctgttatccctgctcagtttctgcaccgcatgcagcatccacggtgttcagacccgtgagtatggtcacacgtcacgcagtccgcttgactcgctggaaaccgctatcggctttcacatgcgcgactggtggcagccgacgaaagcaaacttcttcggacacctgaaaaagccgcagattatcgcagccctgaatgatgccggactgtccggtgccgcacgggacgcggagaagatgaagaaaggcgatgccgctgaacatgcagagttccacatgaaagacaaccgctgggtgcctggctggatgggttcaccacgtccacagacggatgccactgaacgcgccgataacttggctgatgccgcctga

SEQ ID NO: 12007 - DNA, 435 bp, Escherichia coli
atgaaaactgaactgaccctggatgtattacagaccatgagcgcacaggaatatgaagatatccgggctgccggaagtggtgaacgtcgtgagctgacacacgccgtgatgcgggagctggatgcgccggacaactggacgctgaacggcgagtacggcagcgagtttggcggctttttccccgtccaggtccgtttcacgcctgcccacgaacgttttcacctggcgttatgttcaccgggaaatgtctctcaggtctgggtgctggttctggtgaatgtcggtggtgagccgtttgcggtggttcaggtgcagcggcggtttgcaccggaagccgtcagccattcactggcactggcggcgtcactggatgcgcaggggtacagcgttaacgacatcatccatatcctgatggcggaaggaggtcaggtatga

SEQ ID NO: 12008 - DNA, 414 bp, Escherichia coli
atgcataaatcagaaaatgaaaaaatagattttattctggatgagcatgagcggatattcagaaaacagggttctttgtgtatggcactgtgtaagggctttttagttatagctattctttgtggtgttgccacattctgtgtttctggcctgtatctgaaatccctgtgcctgtccgttgcctgctgttgtggggtattcagtcgtatttttaattattacagcgtaccggaggaatcacgcatggtactcagtcgtcaggaattactccggcttatgcgtctgactgaagacgtaccagatgtgagacaggaactgcttaaccgtttgttgtccggtaaaaaactgactggtcgggatgaacaggatatccggcgtctctggcaggaaacgcagaggaaacactatgcataa

SEQ ID NO: 12009 - DNA, 312 bp, Escherichia coli
atgtttgttatccctgaaaaattcagtctgcaggtcagcagaggaaaaacattagcttgtagtgcgcttattgggggtttttcttttattacgcttgttgtgttcgccagtcagtcattcacgatggatgaactggatgtcgggagatactggaaaaatgactgtaaacttctggaagtgaatataccgacaggcgcatttactgaaccggttaataaactggactgtgccggagtcatcgttaatgtgccagtggctcagtatgaggagtatatccgacagtgggaattatataaggctaaaatgaaatga

SEQ ID NO: 12010 - DNA, 348 bp, Escherichia coli
atgaagtcgatagatttaaaatctgttctggcttttatatttgttggcgttatggctatgttgatatgtggtcttttttacaatgattaccttgagcaacaacctgcaacaccagaacaactgacagaaattgctcaggataccccctgtgcagcagaagcatttcaggaaacacttaattatcagtctgaacctttaagtcttggtaaggcaaaagagcttgcatcagcgtgtagagaaagaaacgaaatggcagaagtgaaacgggtaagagaaaatgagcgcaataagattcgcgaaaaacaaattcaggcattaaatgatgctccttcagtaaaggaacgttaa

SEQ ID NO: 12011 - DNA, 2826 bp, Escherichia coli
gtgaatgaagtttatgtgattgccggtggtgagtggttgcggaataacctgaacgccattgccgcctttatgggaaccaggacgtgggattccattgaaaaaattgcgctcacattgtctgttctcgcggtggccgtgatgtgggtacagcggcacaacgtgatggatttgctgggctgggtggccgtgtttgtgcttatcagcctgctggttaatgtccgcacatcggtgcagattattgataacagtgacctggtcaaagttcaccgggtggataatgtgccggtcggactggcgatgccactttcactgacgacccgtatcgggcatgcaatggtggccagttacgagatgatcttcacgcaaccggacagtgtcacctacagcaaaacggggatgctgtttggcgcagaactggtatcaaaaagcaccgactttttgtcccggaatccggaaatcgccaatcttttccaggattatgtgcagaactgcgtgatgggggatatttacctgaaccacaaatatacgctggaggagctgatggcctccgctgatccctacacgctgattttttcccgccccagcccgctgcggggcgtttatgacagcaataataatttcgtaacctgtaaggacgcttcggtttcgctgaaagacaagctgaatctggacacacagagtggcggaaaaacctggcattattatgcccagcagctatttggcggacgccctgatcctaacctgctgttcagtacgctgattggcgacagttacagttacttctatggctcaagtaaatcagccagccagatcatccgccagaatgtcaccatcaatgcgctgaaggaggggatcaccagttatgccgcacgtaatggtgattcggccagcctggtgaatctggccaccacatcatcgatggagaagcaacgtctggcacatgtctccatcggtcatgtggcgatgcggacactgcccatgacgcagaccatcctgacggggatcgccatcggtattttcccgctcctggtactggcggctgtcttcaacaaactgacgctgtccgtcctgaaaggctatgtgtttgccctgatgtggttgcagtcatggccaatgttgtacgccattctgaacagcgccatgacattttatgcaaagcagaatggtgcaccggtggtgctctcggaaatttcacagatacagctgaaatactccgatctggcttccactgccgggtatctttccatgatgatcccgccattatcctggatgatggtcagggggctcggggcaggattttccagtgtgtacagccatttcgcttcctctgctatcagcccgaccgccagtgcagcaggcagtgtggttgacggtaattactcctacggcaacatgcagacggagaacgttaacggcttcagctggagcaccaacagcaccacgtcgtttggtcagatgatgtaccagaccggcagtggcgcaaccgccacacagacccgtgacggtaatatggtgatggatgcaagcggagcgatgtcccggttaccggtcggcatcaatgcaacgcgtcagattgcggcggcacaacaggaaatggcccgggaagcatcgaacagagcagaaagtgccctgcatgggttcagcagcagtattgccagtgcctggaacacgctcagtcagtttggttctaaccgggggagcagtgattctgtcaccggtggtgctgacagcacgatgagtgctcaggactccatgatggccagccgtatgcgcagtgcagtggaaagctatgcgaaggcgcataatatcagtaatgagcaggcgactcaggaactggcatcaacaagtaccaggctatctggtggaatgtatgctgatgctcatgctgaatggggggttaaacctaaaattcttggtgttggtggtggggtaggcatcagaggtggatttaaggggagcctggatgcaacggatgatgactcacattcagcaagtagtggcagcagggctacccatgatgctcgccatgatatcgatgctaaagccagtaaggactttaaagaggccagcgattactttaccagtcgcaaggtcagtgaatccggcagccatacggacaataatgccgattcccgtgtggaccagctgtctgcagccctgaactcagcaaaacagagttacgaccagtacacgacgaatatgacccgcagccatgaatatgctgaaatggcatcccgtactgaaagcatgagtgggcagatgagtgaagacctgtcgcaacagtttgcacagtatgtgatgaaacacgcgccgcaggatgccgaagctattctgacaaacaccagttcaccggagattgcagaacgccgtcgggcgatggcatggtcttttgttcaggaacaggtgcagcctggtgttgataatgcctggcgtgaatcccgtggggatattggtaaaggaatggagagcgtaccttcgggtggtggcagccaggatattattgctgaccatcaggggcatcaggccattattgatcaaagaacgcaggacagtaatatccgtaatgatgtaaaacatcaggttgataatatggtcacagaatataaagggaatatcggagatactcagaatagtattcatggcgaagaaaatattgtagacagacaatattcagagttaaaaaataatcacaaacaggaagaaattcaacaaaacaacagatataatgaagaaaataaacgacagaaattaatgccaacaccgtctgaagatgcgttaaaacagatggtggatgataagaaagaacgattgaaggggccattatga

SEQ ID NO: 12012 - DNA, 2181 bp, Escherichia coli
atgagttttaacgcaaaggatatgacccagggcggtcagattgcgtccatgcgtatccgcatgttcagccagatcgccaatatcatgctttactgcctgtttatttttttctggatactcgttggtctggttttatgggtaaaaataagctggcagacgtttgtgaacggctgtatttactggtggtgtaccacgctggaaggcatgcgggatttaatcaagtcccagccggtctatgagatccagtattacggcaaaaccttccggatgaacgctgctcaggtactgcatgataaatatatgatctggtgcggagagcagctatggtccgcattcgttctggccacagttgtggcactggttatttgcctgattaccttctttgttgtctcctggattctggggcgtcagggtaaacaacagagcgaaaatgaagtcacaggtggtcgtcagctgacggagaacccgaaagacgttgcccggatgctgaaaaaagacggcaaggactccgatatacggattggtgacctgccgattatccgggattccgaaatccagaacttctgtctgcacggaacagtgtcgacgggtaagtcagaggttattcgacgtcttgccaactatgcccgtaaacgtggcgacatggtggtgatttatgaccgttcgtgtgagtttgttaaaagttactatgatccctccatcgataagatcctgaatccgctggatgcccgctgtgccgcctgggatttgtggaaggagtgcctgacacagccggattttgataatgtcgcgaacacgctgatccctatgggaacgaaagaggacccgttctggcagggatcaggacgtaccatttttgcggaagcggcgtacctgatgcgtaatgaccctaaccgcagctacagcaaactggtggatacactgctttccatcaaaattgaaaaactgcgtacctacctgcgtaattcaccggcggccaacctggtggaagagaaaattgagaaaacggcgatttccatccgtgctgtgctgaccaattacgtgaaagccatccggtacctgcaggggattgagcataacggtgagtccttcaccattcgtgactggatgcgtggtgtccgtgaagataagcaaaacggctggctgtttatctcgtcaaatgccgacactcatgcctccctgaagccggtggtttccatgtggctgtccattgccattcgtgggctgctggcaatgggagaaaaccgtaaccgtcgtgtgtggtttttctgtgatgagttacccacgttacacaaactgccggacctggtggagatcctgccggaagcccgtaagttcggaggctgctatgtgtttggtattcagtcctatgcccagctggaagatatctacggtgagaaagcggcggccacgctgtttgatgtgctgaatacccgtgcctttttccgctccccgagccatcagattgcagagtttgctgccggtgaaattggtgagaaagagcacctgaaagccagtctgcagtattcctacggtgctgaccccgtgcgtgacgggatatcaaccggtaaggagatggagcgccagacgctggtcagttattccgacattcagtccctgccggatctgacctgctatgtcaccctgcccggaccgtatccggcagtaaaactctcactgaaatatcaggcacgtccgaagattgccccggagtttattccgcgtgaaatcaacccggaaatggagaatcgtctgagtgccgtacttgccgcaagggaagcagaaggtcgccaggtggccagcctcttcgaaccggatgtgccggaggttgtttccggagaagacgtgactcaggctgaacagccgcaacagccgcaacagccgcaacagccgcaacagccggtgtctcctgccatcaacgataagaagtcagatgcaggtgtgaatgttccggccggggggatcgagccggagctgaaaatgaaaccggaagaagagatggaacagcaactgccacccgggatcagtgaatccggtgaagtggtggatatggccgcttatgaggcatggcaacaggaaaatcatccggacatccagcagcagatgcagcgtcgtgaagagatgaacattaatgtgcaccgggagcgcggggaggatgttgagccgggagatgatttctga

SEQ ID NO: 12013 - DNA, 5271 bp, Escherichia coli
atgatgagtatcgcgcaggtcagatcggccggaagtgccggtaactattataccgacaaggataattactatgtactgggcagcatgggagaacgctgggccggcaggggggctgaacagctgggactgcagggcagtgtcgataaggatgtttttacccgtcttctggagggaaggctgccggacggcgcggatctaagccgcatgcaggatggcagtaataagcatcgtcccggctacgacctgaccttctccgcccccaaaagtgtctccatgatggccatgttaggtggcgataagcgcctgattgatgcacataaccaggccgtggactttgctgttcgtcaggtggaggcgctggcctccacacgggttatgacggacgggaagtcagaaacggtgctgaccggtaatctggtgatggcactgtttaaccacgacaccagtcgcgatcaggaaccacagttacacacgcatgcggtggtggctaatgtcacgcagcataacggtgagtggaagacactgagcagtgacaaagtggggaaaacggggttcattgagaatgtgtacgctaatcagattgcctttggcaggctctaccgggaaaagctgaaagagcaggttgaggcgctgggctatgaaaccgaagtggtcggtaagcacggtatgtgggaaatgccgggcgtaccggtggaggccttttccggacgctcacaggcaatccgggaggccgtcggggaagatgcctcgctgaaatcccgggatgtggcggcactggatacgcgaaaatccaaacagcacgtcgatcctgaagtcagaatggctgaatggatgcagacgctgaaggaaaccgggttcgacatccgggcatatcgtgacgcggcggatcagcgtgcggagacccgcacgcaggcgcccggggctgtttcacaggaggggccggatgtgcagcaggcggtgacacaggccattgccggattaagtgaacgaaaagtgcagtttacgtacacggacgtgctggccagaacggtcggcatactgccgccggaaaatggtgtgattgaacgggcacgcgccggtatcgacgaggccatcagccgtgagcagcttatcccccttgaccgtgagaaggggctgttcacgtccgggattcatgtgctcgatgaactgtcagtccgggcactcagtcgcgatatcatgaaacagaaccgggtgaccgtacatccggagaaaagtgtcccccggacggccggctacagcgatgccgtcagtgttctggcacaggaccgtccgtcgctggccattgtgtccgggcagggcggtgcagccgggcagcgtgagcgggtggctgaactggtcatgatggcccgggagcaggggcgggaggtgcagattatcgctgctgaccgtcgttcgcagatgaacctgaagcaggatgaacggctgtccggtgagctgataaccggacgtcgtcagctgctggaaggcatggccttcacgccgggcagtactgttatcgttgaccagggcgaaaaactctccctgaaagagacgttaaccctgctggacggtgccgcacgtcataacgtacaggtcctgataaccgacagcgggcagcgaaccggtacaggcagtgcgctgatggccatgaaggatgccggggtgaacacatatcgctggcaggggggagaacagcgaccggcaaccatcatcagtgaaccggaccgtaatgtccgctatgcccggctggccggagattttgcggccagcgtgaaagccggagaagagagcgtggcacaggtcagcggggtacgggaacaggccatactgacacaggccattcgcagtgagctgaaaacacagggcgtgctcggacacccggaggtaaccatgaccgccctgtcaccggtctggctggacagccggagccgttatctgcgggatatgtaccgtccggggatggtgatggagcagtggaacccggagacacgccgtcatgaccgctatgttatcgaccgggtgacggcgcagagtcacagcctgaccctgcggaatgcacagggtgaaacgcaggtggtgcgtatttcctcgctggacagcagctggtcgctgttccggccggaaaaaatgccggtggcagacggcgagcgtctgagggtgacagggaaaattcccggactccgcgtctccggcggtgaccgcctgcaggtggcatccgtcagtgaagatgcgatgacggttgttgtgccggggcgggctgaaccggccaccctgcctgtgagcgattcaccgttcacggcactgaagctggagaacggctgggtggaaacgcccgggcattccgtcagcgacagtgcgacggtttttgcctccgtcacacagatggcgatggacaacgcgaccctgaacggtctggcccgcagtggtcgtgatgtccggctgtattcctcactggatgaaacccgtactgcggaaaaacttgcccgccatccctcctttacggtggtttctgagcagataaaggcgcgtgccggtgagacattgctggaaaccgctatcagtctgcagaaagccaggcttcacacgccggcacagcaggccattcatctggcccttcctgtgctggaaagtaaaaacctggccttcagcatggtggacctgctgacagaggcgaagtcgtttgctgcagaaggaaccggttttactgaactgggaggggaaatcaatgcgcagataaaacgcggtgacttactgtatgtggatgtggcaaaaggctatggcacaggcctgctggtttcccgtgcgtcgtatgaggcagaaaagagcattcttcgccatattctcgaaggtaaggaggcggtcacgccgctgatggagagagtacctggcgaactcatggagaaactgacatcaggacagcgtgccgccacccgcatgatactggaaacgtccgaccgtttcacggtggtgcagggctatgccggtgtgggtaagaccacacagttccgggcggtgatgtcagccgtgaacatgctgccggagagtgagcgtccccgtgtcgttgggctgggtcccacgcaccgcgcggtcggggagatgcgcagcgcaggcgtggatgcacagacactggcgtcctttctgcatgacacgcagctgcagcagcgcagcggagaaacgccggatttcagcaacacgctgttcctgctcgatgagagctcaatggtgggcaataccgacatggcacgggcatacgccctgattgcggccggtggcggtcgggctgtagccagcggtgacacggaccagctgcaggccatcgcgcccggtcagcctttccgtctccagcagacgcgcagtgccgccgatgtggtcatcatgaaggagattgtgcgtcagacgccggaactgcgggaggcggtatacagcctgattaaccgggatgtggaaagggcactgtccgggcttgagagtgtgaaaccgtctcaggtgccacgtcaggagggcgcatgggcaccggagcactccgtgacggagttcagtcacagccaggaagcgaaactggcagaagcgcagcagaaggcgatgctgaaaggcgaggctttcccggatgtccccatgacactgtatgaagccattgtccgcgactataccggcaggacaccggaagcacgggagcagacgctgattgttacgcacctgaatgaggaccggcgcgtactgaacagcattattcatgatgcacgggaaaaggccggtgagctggggaaagagcaggttatggtgcctgtcctgaacacagcgaatatacgcgacggggaactgcgtcgtctttccacctgggagacacatcaggacgcacttgccctggtggataatgtgtatcaccggattgccggtatcagcaaggatgacgggctgataaccctgcaggatgcggaaggtaacacgcggctgatttcgccccgggaggaggtggctgaaggcgtcacactgtacactccggacaccatccgggtgggaaccggtgaccggatgcgcttcacgaagagtgaccgggagcgcggttatgtggccaacagcgtctggacggtgacagcggtttccggtgacagtgtcacgctgtcggacggacagcagacccggatgattcgccccgcccgggagcgggcagagcaacatattgacctggcttatgccatcaccgcccacggtgcgcagggggcaagtgaaacctttgccatcgcgcttgaaggcacggaaggtaaccggaaactgatggccggctttgagtcagcctacgtggccctgtcgcgtatgaagcagcatgtgcaggtgtacaccgataaccgtcagggctggacggatgccatcaacaatgccgtacagaaaggaactgcccacgatgtgtttgagccgaaaccggaccgggaggtcatgaatgcagagcggctgttcagtacggcgcgggagctgcgggacgtggcggcaggccgagccgttcttcgtcaggcggggctggccgggggagagagtcctgcacggtttattgctccgggacgtaaatatccacaaccgtatgtggcactgccggcgtttgaccgtaacggcaagtctgccggtatctggctgaacccgctgaccacggatgacggaaacgggctgcggggattcagtggtgaaggccgggtgaagggcagtgaagatgcacagtttgtggccctgcagggcagccgtaacggagaaagcctgctggctgataatatgcaggatggtgtccggattgcccgtgataatcctgacagtggtgtggtggtaagaatcgccggtgaaggccgtccgtggaatcccggtgccataaccggtggccgcgtgtggggggatatcccggacaacagcgtccagccgggagccggaaatggcgaaccggtcacggcagaggtgctggcacagcggcaggctgaagaggccatccgccgtgaaacggaacgccgtgcagatgaaattgtccgtaaaatggcagagaacaaacctgacctgccggatggcaaaacagagctggctgtcagggaaattgccgggcaggagcgtgaccgggctgccataactgaacgggaagccgcgctgccggagagtgtgctgcgtgaatcacaacgggagcgggaagcggtccgggaggttgcccgggaaaatctgctgcaggagcgtctgcagcagatggagcgggatatggttcgtgacctgcagaaagagaaaaccctgggcggagactga

SEQ ID NO: 12014 - DNA, 747 bp, Escherichia coli
atgacaacggataacacgaacacgacacgtaacgattcactggctgcccggaccgatacctggttgcagtcgttgctggtctggtcacccggacagcgggatatcatcaaaacggtggcactggtgctgatggtactggaccatgcaaaccgcattctgcatctggaccagacgtggatgtttctggccgggcgtggagcctttccgctttttgccctggtatgggggctgaatctgtcccgccatgcgcatatccggcagtcggccattaaccggctgtggggatgggcagttttttcccagctctggtattactttgccggctttccctggtatgaggggaatatcctgtttgcctttgcagttgcggcacaggggctgacatggtgtgaaacgcgcagtgggtggcgtactgcagcggccattctcatgatggcactgtgggggcctttgtctggcaccagttacggcattgccgggctgctgatgctggctgtcagccaccggctgtaccgggcggaagacagaacggaacgtctggcgctggttgcatgcctgctggccgtgattccggcacttaaccttgcctccagtgatgcagcggcggtggccggccttgtgatgacggtgctgaccgttggtctggtgtcctgtgcagggaaatcattaccccgtttctggcccggagattttttcccgactttttatgcctgccatctggctgtgctgggcgttctggcgctgtga

SEQ ID NO: 12015 - DNA, 249 bp, Escherichia coli
atgtcgcagacagaaaatgcagtgacttcctcatcaggtacaaagcgagcataccgaaaaggtaatcctctgacgcttgcagaacgtcagcaggcatctctggcaagaaaacgtgccacacataaagaactcagagtgttcattcctgctgcgttaaaagcgcaattacaggagatgtgtgacgctgaaggtgttactcaggctgagatgattgctgaactgataaagcagaagagtgctttcagctaa

SEQ ID NO: 12016 - DNA, 546 bp, Escherichia coli
atgcttttaagttttagtgagttagatgttcttatttatcaggggaaggttggggggttatttcgtgaaagaaaaaatgaaagggttgctacagacattgattccagaaacaagtcatcatcaagcagtcatgaatatgattcagttttatcatttcaatttatttgtgataatggaaaagaaataaatgtgaatttaacaaattggaatattaacatatttccaggtcaagagcttattatttattttgtggaaaactcaaagaaaaacaaaaaaataccatacatgataaaaaacaaaagcacatcggaagtgactaataatgttcaagaaatgtataaagagtttttttatacatcatacttcaaactgataatacctttcctgttaatcatttcttactttatgtcatccatatctgtggctatcatgtcattcgttttatatgtcataatcagaagaagaataggaaaagatttcttttcagaaataaaaaggaaaaggttaaaaaaagaagatatcatggggttagagcacgtaatatag

SEQ ID NO: 12017 - DNA, 864 bp, Escherichia coli
atgaccagtaaaacgctcagactattattccctcaatggcaaggtggcaataatccgccctatcatcttgggtcgcttcttctctcgtatctctcccccggagcggatggccctattgagtctgttccggtcgatgagcccacaacggagccacaggccgtagtggatggcattaccgctaaacctcaaattatcaggcagctcaacgatgcagccactctgattgagaaacataatcccgattcaattgtcgtttttggtggcgattgcctagtatcactggctccttttgcccatctgctcaataaatacggtgataaactgggtgtgctctggattgactctcatcctgatgtgcagactgcaaaacaatatccgaacgcccatgcccatgttcttggtgcgctaattggaacgggtgataaagatttagttgctcatgtatcaaccagactcaacccttcaaaaataatgattgcaggtatccacgatccactaccttatgaagctgaatatcttgctagttatagcattgagacggtaggtcctgaaaaagttaaaaacgacgcgaaagatatcacggaatggatcgagagagaaaatattgaacatctggcaatacacattgatctggacgttctcgatccgtcacttttccgttcggttcttttcgccaagcctggcagaggagaacatgactttggtgacgtcgcagaaggtaaactatccattgaagatgttctaaatctgatagctcaggcaacctcaaaagcggaacctgtcggcctcactcttgctgaacatttaccctgggatatgctgaatctgaagaatatgctcagtgcgttgccgcttatgaagtaa

SEQ ID NO: 12018 - DNA, 573 bp, Escherichia coli
atgttaaagaaaactgaaacctaccataagctgattaccgctgccgctgcctgctttgctgaaaaaggctttagtgcgacaagcgtacgtgaaatttctacccgggcagggatcagccagggagcgatgtacacgtacttcaaaagcaaggatgatcttatcaaggcaatcgttcttgaagagcaaaattcagcgttgaccgctcacaatgctccgtctaacggtacttatttcgagcgcctttgcgtgcaggttacttcgtgcataagcgatgtaggttacccagttacgcatcaactgtgggttgaaataatggcggagtctgcgcgaaaccctgaattgcagaaaacgtatatatccagtgataccatcatgcggcaaagtattgcaggaattatcgcggagggtattgcagcgggagagtttcgcccggacattaatcttgaggaagtcacgattattctttttgcctttatcgacggtttaatcgcgcgcaaggctataaacgcatccttctcttttagccgcgacctgcctatgttttttgagctaatgtcaaagttattgaaataa

SEQ ID NO: 12019 - DNA, 264 bp, Escherichia coli
atgataccggtactggaaccgtgttttcagggagtaccggatatgtggtttttttcgacagttctgtttctgctcattgttatctgcagtgtggctggcgttgtgaatgcactggctgtgcggcgtgaattacatgcacgcagggaacaggaatatcatgcccgggggcggactgcgggaacggtacgaaaagttccggcaccgcagacagcactaaacaaaaaaaagccccctttcaggaagggggaatcacttgcgttttga

SEQ ID NO: 12020 - DNA, 765 bp, Escherichia coli
atggatgctgtatgttccgttgttctggtttgccagcctttcgacttaattatctgtaagaaacctgtatcattcaggaaaaatacggttttacttctggagccagcagccagaagtaaattatctgactgcccctctctcgtcagaacggtcgaacttgaccataaaacagtattgtcctttctgaatgatgtgaataacaggctgcccgaaatgttctgtattgacagacagggatatgtcgttgaagaagatattccgctgtcgctggtttattctctttttgaagggataagaattgcagatgcttacactacgtcactaagagaaaaactctgtttgtccctgctttctgtatttcaggagcgtacaaaagtgatttctttcttactgacgtatatgaacatattctcgtataagatcatggggattatcgggggagatttagaacgtgcctggcatcttaaagatattgctgaacgcctctatgccagtgaaagcctgatcaagaaaagactgaaggaggagggaacctcattttctgaaatattaagggagttgcgtatggagtcagcacgaaagatgatacttgaaaatacttactctgtctccatggttgcacaaaagtgtggctacaacagtacgtcatatttcatctcagcgtttaaggattattatgggatgacaccattacactattatgataatgccgtaagtgaaatggctgaaaataaacagcaggaccccttacggggaacattctga

SEQ ID NO: 12021 - DNA, 1110 bp, Escherichia coli
atgaaaaagctaacggtgacaatttctgcagtagcaacagcagtcctgatggctgtatccgcacaggcagctgaaatatacaataaagatggtaataaacttgatctgtacggaaaagtggacgggctccattatttttcaagcaataaggatgaaaatggtgacaaatcctacatgcgtatggggatcaagggggaaacccagatcaacgatgatttgacgggatatggtcactgggagtaccagatccaggcaaacacgccggaaaatgaaaaccatgcctggacccgtctggctttcgccggcctgaagctctccgattacggctctctggactacgggcgtaattatggtgttgtctatgacgtcacctcctggacggatgtgctgccggagtttggtggtgatacttacagcgcggataacttcatgcagggacgcggtaacggttttgccacctaccgtaacaccgacttttttggccttgttgatggtcttaattttgccgtgcagtatcagggcgaaaacggcggcgtgagcggtgaaaatacgacaaataacgggcgtggtgcattacggcagaacggtaatggtgtcggtggctcaattacctacgagtatgacggtttcagtattggtggtgcggtgtccagttcccagcgtacatgggatcagaaccatacgggactgatgggaaccggcaaccgtgcggaaacctacaccggtgggctgaagtatgatgccaataacgtctatctggcagcacagtatacccagacatataatgccacacttgccggcaacctgggctgggcaaacaaagcccagaaccttgaactggttgcccagtatcagtttgattttggtctgcgtccgtcccttgcctttctgcagtccaaagggaaaaaactgggaagcatcaatggccgcaattatgacaaccaggatatcctgaagtatgttgatgtgggcgcgacctactacttcaacaaaaatatgtccacctatgtggattataaaatcaacctgctgaaagacaaccagtttacacgtgatgccggcatcaataccgatgatattgttgcggtaggtctggtctatcagttctga

SEQ ID NO: 12022 - DNA, 531 bp, Escherichia coli
atgactcagagccgccgaccgtcgccactgcagcggagagtgctgattgtgctggcagcccttgatgaaaaacggccgggccccgtgctgacgcgggacctggaacgggtgctggagcgaagcggggaagccccggtctacgggccaaacctgcgcgcctcctgccgtcgtctggaggatgccggctggctgcgtaccctgcgcgctccgaacctgcagctggcagtggagctgacggacgccggccgggccgtggcacagcctctgctgctggtcccggcagcaggtctgcccgcaggcggcacttctgccactgatctggcggtggagctgaacggcataacgtatcaggcctgccgtggggattttgtggtgcgtctcgacggcagcacctgtctgcagttatggaataaagaaggcagagtggtacgccgggagggcgatccgctggaagtggcgcagtggctgcaggcctgtcatgacgcaggaatagaggttcgcgtacagataaatgaaagtgccgctccgtaa

SEQ ID NO: 12023 - DNA, 261 bp, Escherichia coli
atggatgaagaaagggtgttttcactcagctatgaacaactgacccggtttgcggaaaaacgcatccgggaatgcaatctggacagccagggcgtaacttatctctgcgagtcagccaaagccggagccgtgctgatcttctggcatgaactggccataaatggctatacctcaatgaatgccataaagagacaggagatcattgacgccgaccatcagcgcctcagaaagctcatctggccggaggatgactggaaatga

SEQ ID NO: 12024 - DNA, 816 bp, Escherichia coli
atgaatgatggcacaaatgaagttgctgcacaggcacttcagatattgaaagaaaaactccatgcctggcgtgatggaccagattcggcctggcgctcaacctggcccgtgtttgaaagactgatagaccgtcacgatgaaatgaaacctgtctacaccgaactgcaggaaaagaatgtcaccggatgccagctctggaactttctggaacagagcatttttgcaggggcctttgccacggctgataatcatgcagtcttacgtgcagactacaacgagcttcagtccctgaatgaggacatctcgtgcacggctttgcagctggaagcaatgctccgccgcagaagtgacatacttaaccgaagcggaagtttctccgttgacaggttgctgcgtctgactgatttcctgaatgaggcaggccgcgaaaacggactctaccggagctacattcaacctcgactggatgagctgaatggatttgatctgaaatactggccagatattgccgacctgcttcaggtgctgggaggggaaagtaccgaagtgcagatcctggacgatgcgaccgggacaattttgtctgcgcggcgagcgtctttaacagactttttcacggatttctttaaccggctgcataacctttctgacgactcatggtgtgggctcaggaaagggttcagattatcggatagttcgatcgccaccctgagtaatatcctctgtgatcgactccccgatgagatgatagatgaaggatatgtcaaacacgtccggcaacggttaagaggacagggcgtaacggcagtatggtaa

SEQ ID NO: 12025 - DNA, 597 bp, Escherichia coli
atgaatgcacgaaaggcggtactggcagataatccggaattgatcctgcctgtgctacagctgagatttgacgagtcactgtcgtactcgcgcatttctgcgcagactggtgtcagcaaaaccgccattttttctctggtgaagcgatttcaccaagtatttactgactggcccctttccggtgaatattcctgcgggcaactggcctgggctcttttcccggggcgatatccttcaaccccgactgtgactcagccagtgaaagcagagaaaccccgtcggaaccgattttcaccggagtttaaatggagacttgttcagcaaactcttttacccggtgcctgtgtcgcacaaatagctcgtaagaacggaataaacgataacctgctcttcaactggcggcatctctggcgtaacggcggcctgcagccgcccggcgaacatgaaccatcgctactgtcagcgccattaccgtcttatatcactggcgctgacaactacgcagaaattccggactcataccaaccatcagataacacggaccttaccatactgccgttacgccctgtcctcttaaccgttgccggacgtgtttga

SEQ ID NO: 12026 - DNA, 747 bp, Escherichia coli
ttgtcgcggcgctatctgtccgaagctgaagttcagcgaattctggatattgcatccccacactccctgcgtaattactgcatgatttatctcgccttcattcacggtcttcgcgtttctgaactcatatccctgcaactcactgattatgacccactggcttccactctctccatacggcgactcaagggaggactctcaaccattcacccgctcagcactgaaggctcccgtatcatccgtcagtggctgcaggaacgttccgactcatcgcctgcggaaaacccgtggtttttcccttcatacaacaacacacacatcacccgtcagcgcttctggcagattattcgcgcctatggcgacatggccggactgaccgtccgggctcatccgcacatgctgcggcatgcctgtggctttgctctcgctgaacggggaaatgacacccgcctgatacaggattacctcggacacaaaaacattcgccacaccgtccgctatactgccaccagtcctgcacgctttcgtcaggcatggcggaaacctccgggagaaactcgtccccggcagacgctcacactgacatacagcagcagtcatatccaaccccgctcttttaccttttccccgacggggctttcacaatcctgtaatgaacacggaaagataatgaaagccatccgtaaacaactcaacgaaatacaccatatactgaaaagaatgactctccggcctgccacaggataa

SEQ ID NO: 12027 - DNA, 564 bp, Escherichia coli
atgaagcagcgcaaatacctgacacagtcagaagtggaacttctgcttgcagaagcgggaagaagcagcacaccggaacgtgacagttgtctgctttatctgagttttattcatggattcagggtgagcgaggtctgcagtctgcgactgaatgatgtgagtctgcgggaccggagtctgcatataaggcggatgaaaaatggattcagcacgatacacccgatacaacgggatgaggtcaggatactgaaatcctggctgaaagtcagaagctcttttcccggagcggagagtgaatggttgtttgtctctcgtcagggggcggggttgacgcggcagcgtgcgtggcaggtcataaagtgcctgggtgaacgtgcggggattgaagtgagcctgcatccgcatatgctgagacatgcctgtggttttgctctggctgaccgtggtgtggatacccgcttgattcaggattatctggggcaccgcaatatcagacacactgtgatatacacggccagtaatgtggaaaggttcaggaatatctggtcaaaaaagaatctgtaa

SEQ ID NO: 12028 - DNA, 600 bp, Escherichia coli
atgaaaaagacggttatgtatctggcggtggtttctgcatttcttagtggtagtgctatggctgcgttgactaatggtcaagctgataactcagcaagctccgcaactctgaacttttccggtaaagtcacctccagtttgtgtcaagtcagtaccagtgatctgactaaaacaatttctctgggggaagcgtcagcagcagctttagcaagtggtggtcagtcaccattccagtctttcacagtttctctggccaactgtgatccgacaacgactaatattacctataccatccgcgatggtaatggtctgcctgggcaagatgcacatgcatcggattatctgattcctaaatccggcgacacgtctgcatcaggagtgggtgtatatattgcagatccggaacataaagctattcagattggtgctaaccaaaatgctggtgttacacaggtaggcggtcaggcagagtcagaacagacaattgctctgacagcctatatgaaagctactggcgatgcgggaaatgtgaaagctggtgttgttgacgccacaggtattatgactatcaaggcagcagctgcaggcgttggtggttaa

SEQ ID NO: 12029 - DNA, 705 bp, Escherichia coli
atgcgtaaactctattctgcttttattgtcgcaggggctctgttctgttcgtatgcaggagcagcgtcttttggcccccgagaaagcacgcttatcttcgacgggcgccagagcagcacctcataccggattgataactccgatgccagactcccatggctcgttcaggcatgggttgaggatattaacgaaaaacgcactgatgcttttacatctgtgccgctggtctttcgtgtggagccctcatccacatttactgtgcgtattgtaaaaaaaggtgctgttcccgaagaccgggaaaccctgtactgggcggtctccaactccctgccgggaggtgaacgcagtgtgcaaaaatctgacggcgacaaaatcagtgcgcaactcagtctggcataccggttcaaggtccccatgatttaccgccctgcaacacttgccggtaaacctcagcagccggaggctctgcagtggcgtgctgataaagggggaaaaatgacagttcataatcccacacgttatgttgttcagcttaattatgttaacgcgggcggtaaacgttatcagggtaaaggcgtttcatggtttatctcgccggagaagagtgtgacggtggatgttagtgccggtaccggcagtcgcataaaatatggcgtcgtgaatgattacggggcggtgcgcgaatatgagggaatcgtccgttaa

SEQ ID NO: 12030 - DNA, 333 bp, Escherichia coli
gtggaacccatgaaaataaccgtgaaggacagtcgtattttttacttcacggtttataacgacacagacaacgaatatatcatcacagcacgggttatcaggtcagacggccagggagagactccctttgcgctgagtccgccagtccgcctccttaataaacgtgatgatgtgaaagtcgggcttatttatctcccggaaaaaaaagacaaccgggagaagctgtattacatctctgtttcatttattccccgacagcagaaagcagttgtgagggagggggtttctgtgcctcttgttcttgagcaacaggtacctgtggtgactgaataa

SEQ ID NO: 12031 - DNA, 2508 bp, Escherichia coli
atgcaactgagaaaaaacttattattaccatcattgcttgtttttatcagcaaccgtgcggtgggcggagattattttgacccgtcactgctggctgccggtattgatggtgaaaatattgacctgtctgtattctcacatcccggaggtggaattgaaggagagcaggacgtcagtatctgggtgaatgataatttctatacccgtaaaaagttgaattttcgtaataccggggacaaagggttacagcccgatttcccgccggacttctttaataatttgctggatgcaggacatcgtccggaacagaaggatggtgttatctcttctgccgattttatgtctcagaccccctacagcagtgtcacctttaatcagggagagggcagggtcgatattcgcgttccacaggctttcctggggcgtgcagcacagttacgctccgcgccggatacctgggataatggagttccggccctgctgatggattatagtctgaccggaaacaggaataattctgatgattattcatcgcggagtctgtacgccagcgcccggtttggacttaacctgggaccgtggcgtctgagaacatccggcaattacagtcagtatctgactgattcccggtgggcacacagccggagtgagagtaccagtttctacaacacttaccttgagcgtgatatcagcgcactgcgtgcctccctgcgtatcggtgatgtgtccactggcgggatgattcttgactcggtcagcttccggggggtccggctttacagtaatgatgacatgctgaactcccgtctgcggaactactcgccgtccatccggggatttgcgcgcacacaggcggttgtggtggtaacccagaacgggcgtcaggtatatcagaccaacgtacccgcaggtccttttgagctgaatgacttcagtatctccggttattccggagacctggtagtcaaggtcagggaatcggatggtagtgagcacagctttatccagcctttttcaacactgccggagatgaaacgtgagggggtgtcgggatttgaactgtccgcagggcgttacgataacagcggctcggaagattattatgatgacccgttgtttgtttatggggcatggtcccgtggcttcagtcacggtatcaccgtgtttggtgaaacactgcaggcaggaaaatatcagtcggcaggtattggcagcaccctttcgctggggcgcgtgggggctgtctctgccgacgtttctgtatcgcgagctgaaaagtatgacgatcttcataccggtcagtcatatggactgaaatactccaaaagccaggtggatacgggcacgactgtgacgttggccacttatcgttattcaacgaaggatttctattccttcggtgattttgtgtcccggacggagcaggcccgttatgtgtgggaaaatcgtctgaaaaaccggatgagcctgagtctgaatcagtcactgggtactctgggctcggtctctctgagtgcgtcgcagcaggactactggaccagtggcgaggtgaaccgctcgttctcgttgtcccacagctttagctggaaagatatttatttcagtaccaccttctccatggaccagatgagggggagcagctatggctacgataacaaccggcagattgatttctacatgagcgttccgctgagccgtctgcttgggcgtgaggagccaacctcctcttcggtgtcatggagtgcaacacgcacggaccgccagctgcgacaaactgccacattgagtggcagtgtgcctgagacacaaatgcgttaccgcgtgggaggaaactgggggaatggtggtgctgatgaagggcaaagtgcctccctgacctggaatggtgatttcagcacggcatctctggggtatacccacagtggcgggtacagaacaacggatttcagcctgtccggctctgcggtggcctggggcggtggcgtggcgtttggcagcaacagtgtgacggataatggtgccattgtggttaatgccagcggtgtgtccggtatcggcaccagtgcgggcggacgaaccacccgggcgggaacggcgctgatttcatcgccacagttatataccgaaaaccggattgacctgcgtactgacggtctgccggacgatatcgtactggcagagacgtcagcacgtactgtgccttcccgtggcgcagtggttgttctcgattacaccgtgtaccggggaggccaggttgtgttcaccctgaaacgtcctgacggcagtattctgccgtttggcacagttgtttctctggacggtatgccgtcaggtaaggagaacaccggcattgtgggcgatggcgggcgggtctatctggccggtgttccggagaaaggtcggcttacggtgagcaatggaggaaaacagtgtcatgtcgattttagcctgccactggataaaaagcagacaggtcctgtaacggaaatggtggcggtatgccgctga

SEQ ID NO: 12032 - DNA, 687 bp, Escherichia coli
atgccgctgagatgcatgattgtgattgtcctgaccttcttctgtgccggtcaggtgcatgctgagtccggtggtcagataccgtatccggaaagaagccgggtaattatcagggagaatgagggggaggccactacgggcagcctgactgtcactaatcctggctcccgcccatggctgatgcagacctggcttgaggatgaacatggtgtcaggaaggggcatgtgtatccggaactgtcccggctggagccagatttttcccgccgcctgctgattgcgccgtctctgtctcagtggcgtgagggaaaggaaggactgaactggctggttatcaggttgataccgtcgacagcatctgacagtcgtaacaggctaattattccggttgtgctgagactgaaagtgtttctgcgttcacgcacagccggagcagaacaggaaaaaccggtgctgtcctgtgacatccgtcagggaggaatgttgatgctgcataaccgtggtaggcattatgtgacgttgacggaaatgaagaatggtagcggcagggaagcagaggacatgccactgatgctggagccagatatggagcagtctgcaggtaacagaatgacgcccggaacatacgtatatggttatgtaaatgaccgtggagttattgtgcacgaaagagttatatgtcattaa

SEQ ID NO: 12033 - DNA, 516 bp, Escherichia coli
atgagtcgttgtttaaatgcattatggcttttgctttttgtttctgccggagctatcggtggtgatgaagcgtctcagtctgtcgatatgactttcacggttaatatcgaaccaccaatgtgcaaactggataatgcaacgctggacgttgacttcggtgagtttcagatatttgacataattcagggaaatgtaaaaaaaacggtggggttcaattttactgactgtacaaacgttaataatgttaaaatatcattttctggtgataaaattgacacgaataacaatgttataaggaacaaatcaggtgcgggttatgcatcaggtgttgcaatagggctttatgatgataaagaaaacagaattctgcttaaagatttgcaaaatatattagttaacaattcaggttcgtttaatttccgtgttacggctgcggtgcttaaagacaacagtaatgcagccgtaactcctggaagtatagaaacgtcagttaatatgaatattacatataactga

SEQ ID NO: 12034 - DNA, 1182 bp, Escherichia coli
atgacaaaaatgaaaaatgtttttatattactattttgcctgtcgtgggcgaaaacaacgatagcttcttacacccctggaaatcaggttattaacgttaataagagtgttggagttacagactcagggggtgtttcaggtgattggtttaagttaagccagctgaatatgaatacgtccggaaatatttcatcctttaactcgaatccttgtagtccattaactttcttatgcacaggaggacttgtttcattaggttataatggtcaagcaaattattctcttgagataacaagacatgtagccactataactgatgatgcaggtaacaattatatgttcactcttgcgtttccagataaccctccagttgttgggatatatgagaacaaccaggctgttgtggggagaatatggaatacccgtgctgctattgataacagttttaattctccgcctgtttcgcaacaggatacagccaaagcctctgcatctgcccaaggatattgtggcaatatttcggtggggtgtaattatgcaatcgcagcttatatgcatgctgatagtggaatgccttatctttatgcaaagctcccgaaaaacatttctgcaaagagtgtatcttttaatgatattaaattattagagtttaaattaactgtgcgaaataaagctggtgacacagttattcctgttacagccaaactgtatatcagcggaacaatatctgttccgcagagatgttatatcaaagcagataaaaatagttttgatttcggaactctttattctaatgcaaataatggtcccgtaaaaaatgtgtcaacctctataacaacagattgttactatgctcccaagggaacaacgcaatatctgaagatggacgctgtttctggagggtcattaaatgacagctcaaaggtttatcaggtagcctctgaccctgctcttggaatcgttttcaatataaataataattctctgtgtgagtcatcaggtactatcggggggatgaatttctttaaacaagaatatattattcgaaaagtgtttactcaacaacagcaccagacctcgacagatacaataagtttttctttgtgtaagtacggtgtaccatcagtaacaggtcagaaaaccgtagtattaaagcttacgtccagatgggtggtgaattag

SEQ ID NO: 12035 - DNA, 417 bp, Escherichia coli
gtgaacaaaacgtatatgctggatactaatatctgctcattcatcatgcgtgagcagccggaggccgtaatcagacgcttagaacaagcggtgctgcgcaaccatcgcatcgtggtctccgctattacctacgccgaaatgcgcttcggtgctatcgggaaaaaagcctcgccccgtcatggccaactggtcgatgcgttctgcgcccgcctcgatgcgattctgccgtgggaccgtgccgcagtcgatgccactgtagaggtcaaagcagcactaaccgcagccggtacaccaatcggtcccaacgacacagcgattgccggacatgctatagctgcaggggccattctggtgaccaataatacgcgagagtttgagcgggtgcctgacctggtgctagaagactgggtgaagtaa

SEQ ID NO: 12036 - DNA, 231 bp, Escherichia coli
atgagaaccgtatccatttttaaaaacggcaataaccgcgccatccgtctgccccgcgatctggattttgaaggggtaagtaaactcgaaatcatccgggaaggggacagcatcattttgcgtcccgtccggccgacctggagctcgttcgcgcaactggaaaaggccgacgcagactttttggtggagcgtgaagacgtggtcagtgacgaaggacgatttaacctgtga

SEQ ID NO: 12037 - DNA, 609 bp, Escherichia coli
atgaaaaagggaaaaacgttagaaccggggctgctggccagcgacagcgactggcacaataatgcctgcctgaattacatgccggatcatggtacagcttacactgaaggttacaggcgagctgctgatattctgattaaccacattgatgaatccgggcgggaccaggattttctggtttatccggtgttgtttctctaccgacatcacttggagctccttatcaaacaaattatcggactggcccttgcactggcagaagacccggataaacaccagtacaaaaaagatgaccataacctgaataatctatggccgctggcacaaaagctgatcctggaagttgatgacagctaccggccttccgattttaaaatcgtcaaagaggtggttaaagctcttcaccaagcggatgaacgggcgacagatttccgatatgccaagagaaatgacggcacccggagccttgaaggaattcattacgtcaacacccgccgctttggggaaaaaatgggagaggcttccgatttacttgacggggtcgacaacggcctccggtacctgctggactgtaaggccgaatggaatcaaattctggacagcttctga

SEQ ID NO: 12038 - DNA, 129 bp, Escherichia coli
atgactggcctcataccttcagctacttctcagggctcaatggccgccctgccagtgaccatcgactatcccacagcactggccttacggcagatggcgctcgttcatcgacaggaatttaaaccctaa

SEQ ID NO: 12039 - DNA, 156 bp, Escherichia coli
atggagggggatgtatcagcggtactgaaggttgacccgctgaaatgcgtgctgtgcggaagtcagatgcgttttacagggctgaagcggggataccgtctggcagagctggttatgatgcatgagccactggccaggatgcggtggtgcggctga

SEQ ID NO: 12040 - DNA, 1059 bp, Escherichia coli
atgcttccccgttttgccgatattttccagcagggaaaccgctggcttaactggctggagaagcagccggaagattcagtgcgtccggtggtgattgagtcagtgacaaaaatcatggcctgcgggaccacgctgatgggttacacacagtggtgctgttcatcaccggactgttgccacacaaaaaaggtctgcttccggtgtaaaagccgctcctgcccgcactgcggagtgaaggctggcgcacagtggatacagtatctgctgagtctggtccccgattgcccgtggcagcatattgtgttcacacttccctgccagttctggtccctggtgttccacaaccggtggttactggcagagatgagccgtattgcagcggatgtgatactggaaatctgccgccaggcggatgtggaaccggggagattcacggtaatccacacatggggccgtgaccagcaatggcatccacatattcatctgtcgaccactgccggtggtgtggcgtcaggtcatacctggaaaaaccttcatttttacgcccgtaaggtgatgagcatgtggcgttaccggataacgcggttgctgtcacggaaatatccggacctggtgataccggatgcgctggcagcagaaggaagcagtaaacgggactggaatcgcttcctgaacacgcattaccgccgtggctggaatgtcaacgtatcccaggtgatggataacgccacacatgtggcggtgtacttcggctcttacctgaaaaagccacaggtgccgatgagtcgtctggagcattatgccggtcaggatgaagtcggtctgcgttataacagccaccgcacacggcgggaagagtaccttgtgatgagcggtgatgagtttatggaaaggttctcgtggcatatggcagataaggggttccgtatgatgaggtactacgggttcctgagtccggtgaagcagcgcttactggaagaggtggtatacaccataacggagacagtgagaaaaacagcaaggcaaataacatggagggggatgtatcagcggtactga

SEQ ID NO: 12041 - DNA, 951 bp, Escherichia coli
atgcgggcgaaacttctgggaatagtcctgacaacccctattgcgatcagctcttttgcttctaccgagactttatcgtttactcctgacaacataaatgcggacattagtcttggaactctgagcggaaaaacaaaagagcgtgtttatctagccgaagaaggaggccaaaaagtcagtcaactcgactggaaattcaataacgctgcaattattaaaggtgcaattaattgggatttgatgccccaggtatcggtcggggctgctggctggactactctcggtcagaaagggggtgatatgattgaccgtgactggcaggacccagacaagcctggcatctggacagatgaaagcagacatcccgatacccgccttaattttgccaacgaatttgatctgaatatcaaaggctggctcttaaatgaaccagattatcgcctggggcttatggccggatatcaggaaagccgttatagctttacagccagaggtggttcctatatatactctgacgggggattcagagatgatatcggctccatccctaatggagaaagagtaataggctataaacaacgttttaaaatgccctatattggccttacgggtagttaccgttatgaagattttgagtttggtggcacatttaaatacagtggctgggtagaagcatctgataacgatgaacactatgcccgtgtaaaaagaatcacttatcgcagtaaggtcaaagaccaaaattactattctattgcagtcaatgcaggttattacgtaacacctaacgcaaaagtttatgttgaaggtgcatggaatcgggttacgaataagaaaggtgatacttcactttatgaccataatgataatacttctgaatacagcaaaaatggtgcaggcatagaaaactataatttcatcactactgctggtcttaagtacaccttttaa

SEQ ID NO: 12042 - DNA, 1485 bp, Escherichia coli
atgcgaaagataattgctcatttcaagattgttttaaccttacttctacccgtaaccgtatctgcccagcagatcgagtggcaatcctgtatgaccagtcaattcaaccactggtttggtgaggaaaaaccgtctcctgacttactatgtggttatttgtctgttccattaaaatatacagacacaggcggagatgcttcttatgaaaaaaaatcacaagtcaaactagcgttgacaaaattgccggcaaaaagcaagcataaaggaagtatcctgataataagtggtgggcccgggttaccaggcataaatccttatattaactttgactggccagtcacaaatcttcgtgagtcatgggatattattggatttgatcctcgaggcgtcggtcagtccactccgacaataaactgccagcaatcagatacagagattcaggaaaacataaccgaaaagcaacgagtattaaataaaattaatgcatgtatccataataccggagccgaagtcattcgccatataggctctaacgaggctgtatatgatattgatcgtattaggcaagccttgggtgataaacaactgacagccgtggcgtattcgtatggaacacaaattgcagccttatatgcagaacgttttccttacaacgtcagatctatcgttctggatggagtcgtcgatattgatgacctggaggacaacttcacatggcaactcaagcaggcacaaagttatcaggaaacgtttgatcgctttgcatcctggtgtgcgcgtacaaaaagttgcccgctttcttcagacagagataaggcaataactcagttccacgacctgttattaaaattgcatcacagacctttaatcgacagcaagggagaaaatatatcttcggatgaactcatatcattaacaacagaccttctattatggcgttcatcatggccaacccttgcaactgccatacgccagttctcacaggggattgtcagtaatgaaattgaaactgcgctcaatgctccaatagcctcagaagagtcaagcgatgctttgggggtaatcctttgtgttgatcagggagatgagaaattaacaccagaagagagaatatcccgaaaagacgctcttgcgaatgccttcccagctattaactttgacaatggacgttctgatccacctgatttttgtgaattgtggccaatacatagcgacctgaacaaaactcgcctgaaaaatacagttctgccctcgggtttactgtttgttgcacacaaatacgacccaacaacgccctggattaatgctcgcaagatggcagagaaattttccagcccgttgctgacaataaatggtgatgggcatacattagctcttaccggagtcaatttatgtgtggataaaacagttgtacatcacctgatcactcccaagaaagcagaaaatatattctgtccaggaaatgctgaagtagagacacaataa

SEQ ID NO: 12043 - DNA, 300 bp, Escherichia coli
atgacaaaaccagtatcaatcagcaagaagccccgtaaacaacatacgcctgaatttcgtaacgaagccctgaaactcgctgaacgcatcggtgtggccgccgcagcccgtgaactcagcctgtatgaatcccagctttatgcctggcgcagtaaacagcagcaacaaatgagttcgtcagagcgcgaaagcgaactggccgctgaaaatgtccgccttaaacgacaactggcggagcaggctaaggaactggccatcctccaaaaggccgcgacatacttcgcgaagcgcctgaaatga

SEQ ID NO: 12044 - DNA, 165 bp, Escherichia coli
atgaagtatgtcttcatcgaaaatcatcgggcagagttcagcatcaaagcgatgtgtcgtgtacttcgggttgcccgcagcggctggtatgtctggctcaggcgtcgtcacagtgcctgtggcggtctcagcccggaacaatttgaaaaccataatctcgcttag

SEQ ID NO: 12045 - DNA, 459 bp, Escherichia coli
ttgcaccgacccgaggctgaaatcaacgaagagctcgatgatatttttgcctggcaggaacagcgtaagctgcctaaaacgctgacattacgctatgacaaaatgatatatcttgttgaacctacagaagagaacactcgtatcgctggcgaaaaactcacagtctatgactatccagacggcacactggcattcaaacacggttaccgttcactcaaatatcaggtgttcgacaaactggaatgtgtcgatcaggggcaaatcgttgataacaaacgtcttggggccgtgcttaaactggcacagtgtaaaatgggtgaacttgaacatgatggtaaacgtgcccgaagtaaaaagatgcccaaacgacgctctcaagccatgattcaggagcaattgagggctatcaatcccctgctggctaaccctgaggaattcagagccagccttaaacgttaa

SEQ ID NO: 12046 - DNA, 483 bp, Escherichia coli
atgagagacgagactaaaaaggctatgcgtatgtttctaggcggcagatgttacactgctgaaaaccttgaaagggattacctggctgaactggccggttacagtgatgaacgctgggaagcaccgcagagggcagcacgtcttgcggcggcggtaaaacgttttaaaacctcagaaatgctgcgctttatttttgccaccgtagcttacgaccctgacccggatttaacgccgcttactgttaagcgactgtgcaatgcgcttttcggccgaacgggtagccagtggttgattgtggaggtttttggggagaaggggcgacagcgccgaagcacggacagtaacccgaagtacgtggaaaaagtggcagcaagatatcgttatgccgccgcgaggcactggcaggcaacgcttgctgagattgaacgggtaaagcgtatctatcagacaggagtaaaggcatcaagagaacacgaggactga

SEQ ID NO: 12047 - DNA, 1308 bp, Escherichia coli
gtgctgaaaagtgactatcacgctcccgaagtgggctatcccatcagttgggtccagagtgatatggacggaaatacagccccgtttgactggaaagaatttaacgatcctcatctcgatagctggcttcgcctggtgatgacaagtaataacgacatggctatagctgcactgcgagtgcatcgggtgcggctggatgcggaaagaacaggtatcaccaattctcctgcattaaaaggttcactgggtgtggacgggaaaaaacagctgaataactcgtccggttggacaaaaagcggttatgccagtctcagtaccagctatgagctggatctctggggtaaaattgcccgtcagcgtgacgttgctgagtgggcagtccatgccagtgaagaagattttcgtttcgcgcgcctgatgttgctttcagaagccagcaataattactggcgcatcggttttgtaaatcaacaaattgccatcctccagcagagtatcgactatgcaaaagagacgttgcgtctggccgaggttcgatatcgagcaggaagcacctcgtcgctggatgtgatcgacgcgcagcaaaacctgctcacgcaagagaaccagctcacagggctacaacgagaacgtttacagatactcaatcagcaggcagttctgctcggcattgttccggggaggcagatagtcgagccaacaacgctgccaaaaggaagcctgcctaaggtcaatgcgaatattcctgccagcgttctgatgcgtcggcctgacatcagcgctaaagagtggcagttgcgtgaggcgctggctacggttgatataaagcgtagtgaatattaccccaccttcaacctgactggcgctttgggtaccagcagcacttcgctactggcattactgcataatccggtcggttctgtaggcgctaacctaactctaccgtttctggagtggcggcagcgggacatcgaggtaaaaattgcccgtaacgattatgaacagcgagtgctggagtttaaacaactactttataaggcaatgagcagcatagaagacgcgctttcattacgtaaccagctgcaggttcaggagacaagactcagggaagaactggaacttgcacgtaagtcagagagattaaacgaagtgcgttaccggcatggtgcaatacgtatttcattctggcttgatgctcaggaaaaacgccgtcaggcggaatttcggctagatgaaaatcgcttcaatcagttgcagaacttagcaaaaatttatcttgagtttggtggggctccagtatttccttag

SEQ ID NO: 12048 - DNA, 1941 bp, Escherichia coli
gtgagaaagattattgagctaaaagggattagccgaacttatggcaatggtagtcaggcacgaaccgtccttaaaaacgtcgatttgactatcgcggccggagaaatggtggcaatcatcggtgcctcaggctcaggcaaatcaaccttaatgaacataatgggttgccttgacgtaccagacaaaggcgattacttcatcaacgggcaaaacgccgcccacctttcgcccgatgagctggccagaacgcgccgggaacatattggctttatcttccagcgataccatttgattcctgatcttagcgcacttggtaacgtggagatcccggccatttacgccaacagagaacgaggcagccgtcggatgtacgcaaccgcgctgcttggtagacttgggctgaaaggacgtgagcatcataaacctagcgaactttcaggtggtcagcagcaacgcgtcagtattgcccgagcactgatcaacggtggagagataatcctagcggacgagccgactggcgctctggattcgcaatccgggctagaagtgttagccatcctgagtgagcttaatcggcatggtcataccgtagtaatggtgacccacgatatgacggttgcccggcacgcgaagcgcattatcgaactgcgtgatggcgaaattatctctgatagcggcagttgcgtatctgtaacaaaaacgtggcgacaaaccaacagtatccggcaaagctattggcaaacactgttcgatcgtacgcgtgaatcgctgcaaatggcgctaaaagcgatgaatgcgcaccgtttacgcaccacacttaccatgattgggattatttttggtatcgctgccgttgtgactgtagtggcattgggtgaaggtgccaagcagaagacactggaggagattaaaagtctgggtacaaatgtggtccgcatttatcctgggcgagatttttttgatgacagcgttgagagtattcgaacactaatacctgcggacgctgatgcactagcgaaacaaggatttgtcgacagcgtaagtccggaagttagcacatcagataatattcgttttcttggtaaatcggcaatgacttccatcaacggcgtagggcgggagcattttcgggtaaaaggtattgagttgttacaggggacaactttcagggatgatcgtaatgccctacaggaagtcattattgatgagaacacccgcaaggctattttcgacgatgcggggctacaggctctggggcaaataatcctccttggttccgtgcctgcacgagtggttggcattgccagaagcagcgactatagcgatatgccaaaccgcattaccgtgtggatgccttacagcacagtgatgtaccgtatggtgggcaaaccggttctgagcagtattagcgtcaggctaaaagacaatgtgaataacgaggcagcaattagcgcaatctcccaactgttaacccggcgtcatggtgtaaaagacttccaagtctacaactttgaacaaatcaaaaaatctgtcgaacgtacctcaatgaccttcagcattctaattctgatggtcgccagtatctcactaatgatcggcagtatcggggtgatgaacatcatgctggtctctgtaacggaacgaactcatgaaattggcgtacgcatggctgtcggtgcgagatacggcgacatcatgcagcagtttattattgaggccgtattagtttgcctgattggtggcgcattaggtattgcattgtcatatgccacaggcatgctctttaccgccctgggggacgaaatgttcacggtgatatattcgtggcaggctgctgtcaccgcgtttttctgctcaacattaatcggtatgattttcggttatctccccgcccgcaaggcagcaaggatggatccgatcatttcactggccagcgaataa

SEQ ID NO: 12049 - DNA, 1188 bp, Escherichia coli
atgataacgaaatgtctctttcgccgcaccgagttctttatcgcagcgctgttcattattcttatctgcgttttgctcttctttctgagaagtcctgatataccagaatttgttacggccccagtgcgtaaaggtgatatagaaaattccgttctggcaactggtcgcattgacgcgattgaacgcgttaacgtaggggcacaggtatcaggccaggtgaaatcactgaaagtaaaacagggcgactacgtgactaaagggcagctgattgccgaaattgacgacttgcctcagcgtaatgatttgcgcaatgctgaggctgcgctcagcgaggttaaagccgaacttcagtcgaagcaggcgctcctgaaacaggctgaattgcgttttaagcgccagcagcaaatgttaagagaagatgccagctcgcgtgaagattttgagtctgcagagacaatgcttgccaccactcacgccgaattactgtctctgaatgccaagcttgtccaggcacagatagaagtggataagaaaaagctagctcttggctatacacgagttgtagcgccgatggatggtatagttatcgccgtcgtcactcagcagggacagaccgttaactcaaaccagagtgcgccaacgatcattaagcttgcacgtctggatgttatgaccattaaagcgcagatctccgaagccgatatcacccgtatttccgctgggcaaaaagcccgtttcactatcttttccgaaccggacacgcactataatgcgacactgcgagcagttgagctggcaccggagtcagtgatgaaagatgattctcttgccagcaacagttcggtttcaggtgccagttcttcaaatgcttctgtttattacaatgccttgctcgatgtgcctaacccagaaaaccgactccgtattgccatgacagcgcaggttacactccttattgaagaagccaaaaacacattgctggtgccccttcaggccgtgcgcagaaccggggaaaacaagcaacaggtccaggtgctggcggctgacggcaagctggaaaccaggaatgtgacaactggcataaccaacggattggatattcagatcctcgaaggcttaaagattggagagaatgttgtgttgccgttgccggaagagaaagcaaccgaagaagagattgtgctgtga

SEQ ID NO: 12050 - DNA, 951 bp, Escherichia coli
atgcggttaaggtttctggcaatggtattatctgttcccattacattcaatgcccttgctactactgaatttctcacttttacccctgagaaaatcagtacggaactgaatcttggtacactgagtggtaaaacaaaagagcgtgtttacgcacctgaagagggtggacgaaaagccagtcagctggactggaaatacagcaacgccgctattattaaaggtgctattaactgggatctactcccccgtttgtccttcaatgcatcaggctggacaaccatcggtcagaaagggggaaatatggttgaccgtgactggttggactcagataaacctggcatctggactgatgagagcaggcatcccgatacccgacttaattttgccaatgaatttgacctgaatatcaaaggatggctcttaaatgaaccagattatcgcctggggctcatggcgggatatcaggaaaaccgttacagtttcaccgccagtggcggctcttatatctattcttatgaagggtttagggatgctattggcacattcccggatggcgaaagagccataggttacaagcagcgttttaagatgccttatattggcctgactggaagttaccgctatgacaactttgaactgggcggcacatttaaatacagtgactgggttgagtcatttgataacgatgaacattatgacctggagaaaagagtcacatatcgtgacaaagtaaaaagtcagaattattattctgtggccgtcaatgctggctattatataacatctaatgccaaggtgtatgttgagggtacgtggaatcggatcactaacaagaaaggtgatacatctcgttataatagaaacagcaacgtttctgaattcgacaaaaacagtgccggtattgaaaactacaatttcataactacagcgggtcttaaatattatttctga

SEQ ID NO: 12051 - DNA, 1110 bp, Escherichia coli
atggacttattattactcactggggccactggatttctcggcggtgctgtgctagataaactgatgaacaatcaaaaaaatatagaattgctacttttagttcgagccgattcgcaacatacaggacttgagagggttaaagacaatggtcgcaaatttaatatttgcgaggatagattacattctttaacaattgataatatattgctcggggatttaaataacccggagaccttcctctatgaccctcgtcttgataaagtcacatatgttattaattgtgcagcagttgcttcttttggcaataaccctcttatatggagtgtaaatgttacaggtacgcttgcttttgccaaaagaatgacaaaagttacagggttaaaacgctttattcatgttggaactgctatgtcatgtactccgaatgcaaattcgttagtaacggaagatgctgcagcattagatacaggagagcatttggtagaatatacgcgctcaaaagcaacaatagaacttttgatgcgcaaagaatgtcccaacttgcccttattgattgcccgtccatccattattgtcggccacacccatttagggtgcttaccttcaaccagtattttctgggtgttcagaatgggattaatgttacaaaaatttatgtgttcactggatgatagaatagatgtcattcctgtggactattgtgctgatgcattgttaatgctactggaaagctcgttatctaagggagaagttattcatatatctgcaggtaaagaaggcagtgtaacatttgcagatattgacaaatctatagcctgtgccctgaatggaactcccgttggtgataaatatactaaagttagctatgacgtgctggtcatggagagacatgaattaaagaatatttttggtccatgtaatgaacgtcttatgctcaaagccattcgtttgtacggcgcgttcagcatgcttaatgtcactttcagcaatgagaaattactgggtatcggaatgcccaaaccaccaaaatttactgactatattaaaacttgtatagaaacgactaaacatctgtcgatcccacaacaaatggtagtggattttaaataa

SEQ ID NO: 12052 - DNA, 804 bp, Escherichia coli
atgcacccggatgttgtttcattttttatgaagaatcatgcatggaagattgatttttttcactatgaaaaaaatggtgatattaaaggcgcatacttcctgtgcaatggaacgcaagttggcataatggctcgaaggcgttatcctttgtcatctgatgagattttaattccttttgattctcatacgaaatgcttttttcctgacaaaacgaataaattatccatgataaataaacctaacataataaacgcaacatggagtatagccagaaaaaagcaaaactgcataataaaagaagaattttccacgaaatttgaaaaaacacgacgaaatgaagtccagagatttatcagaaacggtggagagattaaatgcatagaggagttatcagatagtgaaatagccagattatacatatcacttttccagtctcgatttggaaatgtgttaccttgctataaatatgatgatttattgagatttgtttcttatctgcggaaaatgatatttgggtacgtgctattttggaataataagccttgtgctattgacattgttttgaaatctgaaagttcatgtaatgtttattatgatgtcccaaatggtgcgatactgaatgatgatggctgtatgaaactcagtcctggaagtgtccttatgtggtcaaatattaatagagccagaaaatactgtcatgaaaataataaaaaaatgatatattctataggagctttcaggcctgaatggaagtataaacttctgtggtcagccccctttaaacttggaaaatgtttgtgctga

SEQ ID NO: 12053 - DNA, 213 bp, Escherichia coli
atgattacagattgtttacttaaaaaagatccttttttgtccgactcaattgttgggtggggggtaataaggtgttctccatggtgtttatttggtgtattttgcaattatgagcaagcattagagtttgctgcaattcttggtaaagactatgaggtgttctgggggacacatcgattagggacctctgagttttggtgcggttttgagtga

SEQ ID NO: 12054 - DNA, 540 bp, Escherichia coli
atgaaaaaactttacctaattaaattaatgtttatcgctgcaattttttttgcaacatctaaagcattagcaggcagttattcagttatcaatctgattaatgaacgtttgtcatatatgaaagatgtagccgggtataaggctcaacaccatcaggcgatagaagatttgcttcaagaaaaaaaagtattacaaaatgctattgctgatgcaggaaaactaggaataaaagaggataccgcaataccttttatccaagcccaaatggatgttgcgaaagcaatccagtaccgatatcgtgctgactggctatcggttcctgaaactgactggaaacctcgtccacttaaggatgttcgagaacaaatcgctcagttaaactatagaattctgcaggatttggctaaacggttgaagtcagagggatcgctgactgaatgggaaaaagtgcactttatgcagaatatccaacagcaaaatttaaatgagatggataaattgttgatttggaatgcattgaggaaagtatctttgaaataa

SEQ ID NO: 12055 - DNA, 1413 bp, Escherichia coli
atgaaattatggatgcagggtatttcagacctggtgaagaagtattttgtagttttccgcgaagcctggtcaataaggaagtcgttagacgctcccaaacggctacgggatgagtatgattttttgccggcacatcttgaactgaccgaaaaaccggtatcacctcttcctcggattgtagcgcgcacaattatgatctttctggtcttggcgatattaatttccgtcttctataaagttgagatcgttgctgtagcgccaggccagctgatattgaatggccgtagtaaagtcattcagccactggaaacttcgcgtgtgaataaagtctatgtgagaaatggcgagaaggtcaaaaaggggcagttgttgatctctctttctgcgataggtgcggaagctgagaatgcccaaaataaaagcgttctggcgcaatcacgccttgatgaacaaaggctggaggccctccttaacgcaacggagaatgatttgcctccattaatgacatcccctaccggaccagattccgagagagccaatcagttgatgcaagcgcaatttgtcgcatggactacatcccgtgagcagcagcaggtcattattcgccagaagacggctgaacaggcagctataaaatcccggatagctaaactggagcaacagaaacgtataatccagataaaactaagcgatatgcgctctctttataaaaaacaggccatatctaaacatcagttactggaccaggaaaatcagtatgtggaaataataaatgaacttgaggtgttaaagagtcaaataagagaggccagtgaggctgttgctcacgctcataatgagtacaggcttcttaaacaaacattccgtagggacctgatggagcaacttaatcaattacgggacactatccaacaagtaacctatgagctggataagaaccgagaacggctggatgcattacaaattacatcgccagtcgatggtgttgtacaacaactggccacctttacacaaggtggtgttgttacaacggcacagacactgatggttattgttccggaacacgatcaccttgatgcaaaaattaaaattagtaataaggatatcggctttgtttcgcccggacaggacgtcgttataaaagtcgagtcattcccttatactcgtcacggttacttgcatggtatcgtcaaaacggtaagtagtgaagctatcgaggataaccagaaaggattatattttgatggggaaatcatgttacttgattcggtcatgatggttgagggaaaagaagtaaggatgacatcaggtatgaacattacagcagaaataatcacaggttatcgtcgggtaattgattttgttcttagtcctataaagggaacaattcatgagagcatgactgaacgttaa

SEQ ID NO: 12056 - DNA, 2112 bp, Escherichia coli
atgactaacgatttcgcactttctgcgctggtcatgcttgcgcagtatcacggtattgctgtttctccaaaagatatagagcatcagtttgatcctgaaaaaaatggaataagtgtaaattcctgggttctggcagctcgccaggtagggctgaaaagccgactggacaataagcccatctctcgtctcccctacctcactctcccccttctcgtttggcgcgatgatggagagcactttattcttgctgccatcgataaagccacgaaccgatatcttattcatgatttccatgaagatcggccaattacactctctaaagaagagtttgaagaacgttacagcagtaaagtcatttccatcgcttcccgtagttctgttttaggtaagctggcgcgctttgatttcagttggtttatacctgtcgtaataaaatatcgacgtatctttattgaggtaattgtcgcttccattgcattgcagctgctggcactcatgacgcccttattctttcaggttgtcatggataaggtacttgttcatagaggtttctctaccctcaatgtcattgttattgctttggtcgtcgttgttttgtgcgaggtcatactcggtggattgagaacctatattttcgcgcatacaaccagcaggatagacgttgagctgggcgcgcgcttattccgacacatgttagctctgcctctctcttatttttcaatgcggagagttggtgacaccgttgccagagtccgggagcttgagcagatccgcaacttcctgaccggccaggctttaacgtcggttctggatatgcttttctcgtttatctttctggctgtaatgtggacttacagctacaaactcacgctggtcgtattcctgtcactacctgtttatatcgtctggtctctactcatcagcccgcctctcaaaaagcgcctggacaccaaatttgcgcgcaatgcggaaaaccaatctttccttgtcgaaacagtaactgccataggcacgattaaggcaatggcggtaacgccccagattacccacaaatggaacaagctgcttgccagctatgtttctgccggtttctcggtgactcatctcgctactgtagggcagcaaggtatacagctcatccagaaggccgtgatgatcattacgttatggttaggtgcccatcttgtcattgaggggcagctgaccattggtcagctaattgcctttaatatgctttcagggcaagtgacggcacccgttttacgcctggcccaactctggcaagacttccagcaggtgggcatttccgtcgcgcgcctgggggatatcctcaactacccgacagaggtgtcagggaacggtattaatctgccgccactcaaaggggatatcgagttcaagaacatcagtttccgttacaagccggagatcccgcgcgttcttgagaacgttagttttaatatagctgccggtgagattattggtgtagttggtcgttcaggatcgggtaagagcacgcttactcgccttcttcagaggctctacgtacccgaacaggggcagatattgattgatggccatgatatttccctggttaacccagcttccctgcgccgccagattggcgtcgtgcagcaggaaaacattctgcttaaccgctgcatccgagaaaacattgcgctggcctgtccgggcatcgcaatggagagaatcattgctgcctcccgcctggctggcgctcatgacttcataagcgaacttccagagggttacgacaccgtggttggcgagcagggttctggcctgtctggtggccaacgacagcgtatagctatcgctcgtgcgctgattactgaccctagaatcctgattctggacgaggctaccagtgctttggattacgaatctgaaaacgccatcatgcggaatatgcacaacatctgtaaaaacagaactgtgatcattattgcccatcggctctcaaccgtgaggatggctgaccggattatggtgatggataaagggaacgtagccgagtccggaacccatcaggaattgctggctcgccctgacggcatttaccactaccttcatcagttgcaatctgcttaa

SEQ ID NO: 12057 - DNA, 2601 bp, Escherichia coli
atgtcgacgaatgaatcccccagtcttgttttgaatgtggcttcaacaacaggacttgttggaagtatgaaagatttggcgctcgcagcgagaaggctgggaatctcagttgaaaagtcatcagatctaactatagcaaaagatgctatcgccgtggctggcggagtccttactgttaccagtaagggggttgcgatttctgctgaatacttagactcgcttttaaaaaaacatacaacaacggaaaacatcacaactggcgatatcaataatcgcgttggccagtttacttccctgctattaaccgttcagtctgttctttctacctctttagctggagtgaatcttaatgctctggttaactcggggaatactgacagttttaccattgccaaaagtgccctgaacgtagccagtgaaacgctgaaaatggcggtcagttcggtagggtcaatcagtaagttcgctgactcattttctaatctgggggaaaaactccagggagttagtgggcttcagagtgtttcgtctgtcctgcagggcatcaaaggcctcgattttaaaacgggtacagctgttcttagtggtgttgccggtgtgctagggggaatcagcgccggtatggtcttaggctcgccaacggccagtacggagcagaaggctgcggcaggcgtggagatgacctcaaaaattcttgggaacgtcgctaaaacggtaactcaaatcatggtggcgcagaggctggcagccgggctgtccgtcaccgcgccggtgatcggttttatcgcttcgtcagtttctctcgctatcagccctctggctttttataacgtagcgaagaaattcgagtacgcagatgaaattctgaaagtcgcggaaaagtacaaaaaatacggctatagcggcgatgaactgcttgccaattttaacaaggaatatggcgcagttgaagcatccacgaccgcggtatctacagcgctcggtgccgtatcggccggacttggtgctgcggcagccggttctgtcgtcgcagcccctgtagctttggttatcggtactgtagcaggcgttgttgcggccatccttgaagcatcgaagcaagggatgatcaacaacatcgccaacaaatatcaccaaaaaatcatcgagtggcaggaaatccatccggggcagaattatttcgaatacggatacgattcccgttatgcagccttcatggaagaaaacctcggaaagctgaatgagctggctaaggatatgggggttaagtctcttgtaaccattacccagcaaggctgggattccatgctgggcgaactggccgctgttacccgtatgggagataatatctccagtggcaaggtatacgcatccatcctaaaggacggaaagcttagcacagacaaaaaagaagttaggctcgacgacgtagagggcagcatcactctgaactccaagtcgccgtctcaggcactaactttcctgacgcctctgatgacgcccacttcagaatcacgtattcgagtgcagacaggtaaaaactcatggctgtcgctttcattagggaaaactaaagattgggaaattaccgataaaggtaataccagcacgattgccgatttctcgaacgttgtgcaaagaatagttttccgtgacaaaaacatccatgacgtaggtataaccgcgtatatgggcggtggtgatgatactatttatgtcggtcagggcaagtctgttattgaaggcggtgagggttttgatactgtcagctatgcacgttcaccagtgctatggtcacagatagaggctgttaacggacgaccgggcgactatgacgttaaacgtggcgtcaacagtgacgtctatcatgaggttatctcaactcagaataataatgtcggcaaaaataccgaaagcattgaataccgcgatgttctggtcgcaaaaggcatctataacgtagaggataaactgcgttcagtagagcagattattggaaccaatggtcgtgatatgttcaagggaggagaacataccgattacttctacggcggtgaaggtcaagatgttatttatggtaatggtgggaacgacttgctgtatggcggcgacggcctcgatgttatctggggcggtgacggtgacgatctgctaagtggtggagccggaaatgattctctgtatggtggcgaagggaacgatgtctatctcttcagtaaaggcgatggacacgaccacattcatgagggaaaaggaaccaacgatattctgttccttaacggcataaaggccgaagatctctcgttccgacgcaacactgatggcgataacctggaattgaccgttcagggtagtacagacgctattaccttcgacaactggttcctttatgatcgactgaaagataacgtcatttctgaacatagagatatgaaggttgaatccattatcactggtgatggtttggtaatctcatctaagaaaattgatgcacttatcgagaagatgtctgaagtcggcttcaaagtatccgaagtcgacaagccccagataatcgaagaggacataggcaagttctttgctgttaaccctgtcttctaa

SEQ ID NO: 12058 - DNA, 510 bp, Escherichia coli
atggacagatacgacattgattttgaaattgttggtaaagccgcctggctttggggatgttcttcacttcataaaagctggcctatatctatattccataacaacatactcccggcaatcattcacaagcagtatgttcttttgatgaagaacgattatccggtggcatggtgtagctgggctaatttgagtattgaatgtgaagttaaatatatcatggataccaactcactgacgactgatgagtgggtatcgggtgacagaaaatggtttattgactggatagcaccatttggtcatacacatgaattatatcagtatatgagaaaacacttttcctattctcttttcagagcaataagagtttctcaaaattcaccaacaagtaaagtcacagagtttcatggaggtaaggtcgataaaatagtagctaaaaaacagtttattcaatatcactatgaactatcagaagcattaagaaatatccgaggtgaatatgtcgacgaatga

SEQ ID NO: 12059 - DNA, 3909 bp, Escherichia coli
atgaacttaatatattctcttcgttacagtaaagttgctggctgtttaatcgcggtttctgaactcacaaaaaagaagaataaaaaaaaggttaaggtacttcttctttcttctttaatatctattcttttatatacagggcatagttttgcaggaacggtaaacagcgaaatatcatatcagttatttcgagattttgctgaaaataaaggcctctttaaaccaggttccaccaacattccagttcataacaagagtggtgagttggtgggaaaattagataaagccccgatgccagattttagttctgtagattcaggtattggtgtagcaacattaattgaccctcaatatgttgtgagtgttaagcataatgggggctataaaggagttagttttggtgatggcgataactactatagtattgtagatcgtaataacgcacctgaccttgactttcatataccaagactaaataaactcgttactgaagttactccaacttctataacttcccagggagctgttagtggcgcgtacttagataaagtacgataccctgttttttatcgcctgggctccggtaatcagtacattaaagaccgtaataacgcccttgatcacctttccagtgcctataactggcttactggcggtacagtgggtaatccttcttcgtatcagaacggagagatgttatcaagttcctctggattagtttttgactacacgaggaatgacgtattaccgatctatggtgaggctggtgatagcggttctccgctctttgcctgggacaccaccctacaaaaatgggttttagttggcgttctcacagcaggcaatggtccgggcggtagagcaaacaactgggctgttacaccactgaattttgttcatcaaaaaatgactgaagatgatggtccgtttgttcttttcgactcttctgatgatgcgcctttgacatggagtttcgacccgcaaactgggactggtaatcttacacagggcaatgtcacctataaaatgcaaggtaaacaaggctccgatcttaatgcaggaaaaaatattcatttctccggaaaaggaggggaagtaaagcttgttgatgatgtgttccagggggctggttatttaagattcttagacaactatacagtcacagccataaacaatagcgtttggactggtgctggcatcatcgttgacaagctttcaacggtaaactggcagctcaacggattaaaaggagataatcttcataagatcggcgaaggtacgctcatcgttgagggtactggaatcaacgaggggggattaaaagtcggtgccggtactgttgttcttaatcaacagtccaatgaagaagggtcaacgcaagcctttagtagcgttaacatcgcagggggcacatcgtctgttattctcggtaatgaaagacaaattaacccagatagtgtctcatggggatatcggggcggtaaacttgacctcaatggtacaagtgcgactttccacaagttaaaggccgccgattacggtgcagtgcttgctaacgatgataatgaaaatatttcaaccatcacacttgactatcagcttaagccgagagatatcactacccatgaatgggattcctctaatagagggacagtaggcgatctatacgaatacaataacacctacacaagaacaaccgactacttcattctcaaaaagagcaagtatgggtattttcctactactcaaatcagtgatgataattgggaatacttaggccatgaactcgatgcagctcaaaaactaatagctaagagaacgaatgataagagttacgtgtttcacggcaggttggaaggcaacatgaacgtggagaaccgagtttcctcagaatatggaggcgctttggttctcgatgggtccgcgaatatcaaagggactttcacccaagacaacgggcacctggttttacagggacatcctgtcatccatgcatttaattcccagcaaacagctgaacatttatcagcgaaaggcgacgattctgtacacacacagccaacgtctttcgagcagaaagattgggaaaacagagactttacgtttggtcaactcgttttgaacaacgcgtacctccggcttgcccgcaatgctaccttgagcactaatctcgatgccaacaactctgttattgcgcttggagataacaaagtattcattgatacaaaagatggtaaaggtactgcattctcactggaagaaggtagttctgtggccgaaaaagaatctgacaagagcgtcttcaatggccatgcgatgcttaaagactatactgagttaaatattcttcatgctgtattcaatggcactatcactagcgacgactcttcaagtgtgcaattagatcggcgcggcaaatggaacatagccggagattcctcattaggtaagtttgtaagtcatggcggatctctgtcaatgctaggctcagactggaatcctaagacattacgcatcagtgaaatggacgccaccgatatgcatatttctttaggcgcagatgtaagcaaagggattggcgaccgaattgaaattattgaacgtgcgcaagggcaaaataacatcctggatgtttctctgttctttgatgagaatgcgcgcctcaaaaatgatctgacagtcgtttctgcgccagcaggtacagcacataacatgttctcttttggcagctttacacgcggtttttcagatttcacacctgaaacccaagtacaagaagctgacggaaaagtaatgtggcagcttgctaaagttgtgtccagcagtgaagaggaaaacacgccagaaccagagaaagtggttactgacgacggttcggaatctacggccccccctgtggagaaagaaaccgagagtggaacggaagatgcgaaaccagattcgcagaatgaggaactgacattttcgggatctgacagttctactaaaaaaaatagtgtgaaaactcaagaaactacggtagatagggctttaacaagacactcgaatacggccctgttaaataaggccagagatacctttatctctcatgagtacatcctgagtgatagagcagaccgttggcaacaggttgtggatgggactgcagcaaacggagcgtgggcgttgacggagcaaagctacggcaaacatggcgacttcacgcttagtcagagcggcctgaacatcggcttcaagaagtcgaatgattccggttcatggtggggcgttggcgcagatcttaatcgtggacaagccaaagccgattattaccgaaacggctataacctgtggggtgtgaacgtctacgtcaggcagcaactcatggaaggcttgtttgttgatggggccgcaggatttggccagttaaccgaggactttaaagttcatggcgaattgcgcgatctgtcaggaaaggtgaaaagtcatgtgttcacaggtggtctgcgagctggctacaaattcaattttgaaaacgcagacttctcaatcacgcctactgtctcgcttaatggcgtcaaggtgagtgacagccgtttaaaaggcaaaggccgcagtgcagagcttcgcgggggtaatgctctttggcttaaaaccggagttgaggctgagaagaaaattaaggacgttaagcttaaagcaggtgtgtggagtaataacaaccttaacgagatgtccgaaatttctctgagcgataattggtcacagcaccaatacaagtcgaagaacctggagcgaatcacatcttctgtagaagtcgaaggtaaagcaactgaaaatttacacattaaagcaggtgttaatgcgaaatttgacggttacttcaaaaacaattatgaaggtattgtcggtattcgatatgagttctga

SEQ ID NO: 12060 - DNA, 981 bp, Escherichia coli
atgaaaagagttatccttttgctattgtttttatctatggaagtatatgcatccgatgatgcatattgtgctttaatttggagaattaataacttcaaggctgaatcattcaaacgagttggtaataaaacatatgatttgacaatagtaacagaccccaacatgactctggtgtctaaggtaaccaaaaatgtttcagagtactattacactcctcttgaaggcgttgcttcatactgggggctgtttacctcacaaagtgttccatttgaagtagggaacaatttcaaaataatttccataaatggtagaaaagataaatatgagatggctctgacttttgttaataacacctggaccaatggatgtacggttatatctccagggcaaaatcttaactggggggggagcactcgtattgttttacgcgtagagtttgataaagaattgtcatacggttattacaatttttctaactttaaaattccagtcagattattttatgaagagaataaaggtttttatggtgggaacagagcattagtggccaagtattctcaagaggctccgtttatatcagttgattcatggaacctccaaataaaagcacctacatgtaaatactctgacatttctatcgattttggaaaaataacatcgagtcaagtaagaaccggagttagtaaaacccagaatctatcgatgtattgtgagaatgatcctgtatctgtaaaaatatactttgctgacacaaaaaaaacaatgacggaaaaaaagtgtggaagcacatcaaaaaaaatgaattgtaaaatatctatgggggataataagaaccagcgttttttggagtttggttataattattttcaaccatcaggcagtggagaaattaagattccaataaatgttgtgttgaaatcggaaagtccaacaccaggggtgtttaaagatagcgctgttttaaaggttgatattaattga

SEQ ID NO: 12061 - DNA, 561 bp, Escherichia coli
atgattattgagagaatagaatgtgagaaaagtaaacgcagattgagagccttgttttttgttggcttattattgacatcaataaaagttgcagctatggatgttcctattcaaattacaggtgagatattggtgccaccttgtcaaatcaataaagggaaaattattgaagttgattttgggaatatatcagtagccagtatttcaagtgctcataattggagaaaaatagatgttcctgttagttgtgaatatgccaatggcagcgcatatgtgaaaataattggccctcaaatgaacaataacagaaatgtattgcaaactaacattaaaaactttggtatagctctttatcaaggagatggtaatactacagaattgattttaggtgatggtgaatatcgcgaaggcgagtcaataggataccctgtccaaacggggttagttggtaaagagaatggtgtttttacatttacagcaattccttttaaggacgcggagaaaaatatatcaatcggctcatttatatcctcagcaagaattgaaatcacttacacttaa

SEQ ID NO: 12062 - DNA, 522 bp, Escherichia coli
atgaaaagaatcacgagcattatgttatctgcaacgttattttatgcagtatctgcgcaggccacagataatcttcagtttagaggaaatctgattattccaggttgtactatcaataatgacagcccaattgaaacagactggggacaggtagagatccagacgttaggaaatcctaatactccttcacatgaaaaacaattgagtattcctgtaaaatgcccatattctctcggtacaccaaaaatgaaaattactggggctgcgcatacagcatccgttccaaaaggactacagacttcaaaatataatgaaggactgctcatttatttgcgtactaaaaatgctagtgactgggtttcttataacaccgagcaaaacatccctgctggcagcattagcggggctgggattgataaaactctgactatgtatgcctcacttggatattataaaagaatggaagatttgaaacccggtccatttactgcagcggcttcattgacgttaagttatgaatga

SEQ ID NO: 12063 - DNA, 552 bp, Escherichia coli
gtgaataaaaacagaatgcacggagcattattcagcgttctgttatcagtggtgttcctgcctgtctccgtttgtgcctcggaactgggatttaagggtaatttgctggacagaccctgccagattgacccgtcttcagctgtacaggatgtgacgtttatggatacggctacgcatctttattatgcctggcccggcaaaagttatgaagagaaatttcagataaagctggctaactgccatgccaccacaatggggaaggtggtacgactgacattcaaaggtgcagaagagaagggcttacccggatatctacaggtcagtggtgtgaacagcgggaaactggggatagggattattgatactgacggcagcagccttctgaagctgaatcaagtccataacggtggacagggcagtaaggtggaaaaggacagcgtgacgctgaattttaaagcgtttgtgcaggccacatcagaagccattgcaaacaaggccgttcagccgggaatttacaactctgttgcaacatttgaacttttgtataattga

SEQ ID NO: 12064 - DNA, 588 bp, Escherichia coli
atgagcaggacaacaacagggctctgtctggctgcattgctggtgagctgcagcatgaacagtgtgctgcgggcagatgagctggtcatgcgggataacttttttgtggcagatgagacccgtcaccagtgggtgaatgagcacgatggccgtaccgggatactgacagtcagtggtgcgctgctgtcatccccgtgcacgctggagacgaatgaggtggaactgccattgccggagcagaaggagggcatcatgacgcgttatgcgctgaagctgaatctgctgggatgtggtgacggtggtgcggtgacctctgccacttcagtggcagggcgtgacagcatgatggtgatgcagagtgccctgctgacgggagtggaggatggcgtgctgcagccggaacagcggatggtcagcacggggcgtgctgttgtgtacggtggtgcgaatcagttcacttaccggctgagtgaggcacagcagcaggcgctggcgggtcagcaggcgacagaccgtgcgcaggggaaaccgtacatgaacccgcgggataacacagctctgttgcgtctgcaactggattatgaataa

SEQ ID NO: 12065 - DNA, 732 bp, Escherichia coli
atgcagaaaatgaaaccggcgctgaaaaaaacgctgatggcggtagcgtgtctgagcgcagtaccggcagcccaggctgccatctccctggaccgcacacgtgcgatttttaatggcgatgagaaatcgatgacgctgaatatcgccaatgacaacaaacagcttccctatctggcccaggcatgggtggagaatgaaaagaaagaaaaaatcaccacaggcccgattattgccactccgccagtacagcgtctggaacccggctcaaagagtatggttcgtctgaccagtacacctgacatcagccgcctgccacaggaccgggaatccctgttctacttcaaccttcgtgaaattcctccgaagagtgataaggcgaatgtactgcagatagctctgcagaccaaaatcaagctgttttaccgcccgaaagccattgaggcgaaacccaacgcagtctggcaggaccagctggtgctgaacaaaaccagcggaggctaccggattgaaaacccgacaccgtattacgtgacggtgattggtattggcggcagtgaaaaacaggcgaaggaaggtgagtttgaggccgtgatgctggcaccgaagtccacgcagacggtgaagtccggaacatacagcacgccgtacctgatctacatcaacgactacggcgggcgtccggtactgcagttcagctgcagcggagaccgttgtacggcagtgaagaaataa

SEQ ID NO: 12066 - DNA, 288 bp, Escherichia coli
gtggcgctgattgaaaacgcagagtttgtagaaggttctgacaaactgcttcgcctgacgctggatctcggtggtgaaaagcgtaatgtcttctcaggcatccgttccgcttatccagatccacaggcactgattggtcgtcacaccattatggtggctaacctggcaccacgtaaaatgcgcttcggtatctctgaaggcatggtgatggctgctggccccggcgggaaagatatcttcctgttaagcccggatgctggtgctaaacctggccaccaggttaagtaa

SEQ ID NO: 12067 - DNA, 300 bp, Escherichia coli
atgttgaacattacccaagcctaccaggtggcattgatcagctcatctcatacatcagaggaagatgctcgccgattcatgatcgcaagcaatgagctggattgggtttcacaaattgagtacggttgcattgtccacgccgggttacaggacgatgactggaaagatgagttgcgtcgatatggtatatccgagggcgcgattgcgaacattcagaaagtacttgatgtaggctttgactctgtacattttgattgtggtgcaccggtcgttgaagggctagagtgctggcaatggtaa

SEQ ID NO: 12068 - DNA, 186 bp, Escherichia coli
atgcttaaagaagactcatatctactaaaggcgcttgaaatgcgtggcgttgaacctacagtgaaaaacgctcacgatatctaccttcagttttcaccggagctgaaacggttcataaatcaatacggggttaatgactcaagtgttaaagcaatgatagatgatgaattagaccatctcatctaa

SEQ ID NO: 12069 - DNA, 561 bp, Escherichia coli
atggaaacccagaaccaacaaacaaaacctctgaataacatttatgcgtggattctagcgttcatgcctttcttctttggagtatcgccggaagagtataccaattacgctattataattgggggtgtaactaccatcggtttgttagtagctgacagaatggctctatcggagtctggctgtgaaccaccttcaattctatggggggtattcctcctgcctgtctatctctggaagcgcgcgactattacaaaaggcagcagagtgccatttatcataatcgttgcgtcgctggcttgggttatcttcatcggcatcccacacaaggacgaggttgctcttgaagaagcagcctgccctctcgtgacaactattctgaaagagaataacggttcgactgcaccaaaatgtatgaaggtgacaatagaggacaaggtgacggataagttctatagagcaacggctacactagacaatggtaatgacattaacattactctggaacttaccggcgacaggaacttctacgtccgtgttccaaatgtttatctgaacaactaa

SEQ ID NO: 12070 - DNA, 330 bp, Escherichia coli
atgtttgcaaatatcgacatcaaccaaatcaagaaattaactcaaaaagagtttgaccagttctatgagctggaaggttggtcttccactctgattaattcaagatgggtgctggagctgatgactcgtgatgatgcacctgctttgatgatcagcgacctgggtgaagatgctgactttatggatatgagcgaattttgtgtggacacatacaaccgcagccagaagtactacttcacatgcgatagcgaaaatgacgtgatttctaaggtctatcttcacctcgtccagcattgggacgttcaggagtttcttgaggtattcgcgtaa

SEQ ID NO: 12071 - DNA, 312 bp, Escherichia coli
atgaaaaaatcattggttcttggtctggacaaagaccagaagagaaaagagaagcctgcgctggttgctcaattaactttgctggacatcgttgccaatggaacctctattcgtctgttccgtgaaacagcggtgtctttcgataaaaacacctttactcgttatgtaatgaatgttcgtcgccagcgtggaaaaggctggatggcatttcaaagaatgtggccggaacatcagctcgaactggctttgatggaagttaaccgcgtggcccagcaagaaattcagagagcatcagtgatggcaatagcctga

SEQ ID NO: 12072 - DNA, 396 bp, Escherichia coli
atgaccgttaaacgcgaaaaactgacagttgatgtttactatgcctctgaaaccgccgaaggtaagaatgtggcaaaaatcaccgttgttacgtacaacaccgaaactggtgccgaagtacaggccagtacgatcgtgcgtaaaggtgatgcctccggcggcgagtacgcgactcaataccagtccattctcgatgcaactgacccgctgctgctgaaaatcgagaactacttccgccaggttgatgaagaggtgtttgaaaccatgatgaatatggttaacaccgtattcgcctccagcctgaacaccagcaccacctggattggccagtacggtctgcgcattacctctggcattcctgccgacaccttaatccctgaaagcgtattcgcttaa

SEQ ID NO: 12073 - DNA, 375 bp, Escherichia coli
atgggacttgatatctatatcgagacacagcctaaaaacgatctgaataacgaggcatccagaaagcaggttgcttacttccgtaagttcaatgcgctcgttgggtggatggagcgcaacgtaggtgaagtcgaaaattgtgagcttttagaattaacgatgaatgacatttgttttctgaaagctcatttgatgcacataaacgaaagtaattgcgaagagtacttgcctacccgggaaggttttttcttcggcagtcaggagtacgatgaaggttactggcatgatgtgggggagttgaaagagcttgtggaagatctgattaagaaccacgactttcacaataacagactgaccttctgcgcctggtggtaa

SEQ ID NO: 12074 - DNA, 483 bp, Escherichia coli
atgaattttatcgctactgtaaacgcacccgcacatggcaatatcgctgtaacgttctctgacattgaaaaacgagtacttggtgcatggcgcgacaatgagacggtagaactgtcagcacaagaaaaatgcattattgcacgcgacatcattggcaatcgtcgttactcgcgggtatttgagaaagcgtatgtggtaaattctggattcggaacgttcgtctttccggtgcgctccgggcgattctgccagtccaagctgattgagttcgctacgcagatttctgtctggattaaaactcaatcgtcgttcaaattttccgacgatgaagcagtatcgcaggggatgcggatcgccaacaatgcgattaaatgcaaaaacattacgtataccgctggcgttgatacatggaaactgttttgcgctaactttatgctgaatgtatacgcaagcaaccgcatccacatccttgatggcgtgtaa

SEQ ID NO: 12075 - DNA, 231 bp, Escherichia coli
atgtttgttcttatcgctggcgttaacgtccataatgaatattatgttaatcgcatcgctgggatcgctggttacgctgggcgcgcagtcgagcttatagatgaaacgacgcgcaaaattgacttattgagcgaccaggagcgaaaaaaagcagacgtgaacgacgctgatatatttttaatgttaaaagcgtttgtagaaatgggatttgaaatcagtctacataaataa

SEQ ID NO: 12076 - DNA, 204 bp, Escherichia coli
atggtcagctatgacaagatccgcgcggaatatcgcgcaaagtatcgcgcttataaactggaattaatcgatgatttgatcgcgcaacgcgaccaattaaattttacgttttctgatttgcttaacagcaagcgagattgcaagcgcaaacgtgaatacttacgtttaagcgcattaatcggaaaacttcaaaattctatttaa

SEQ ID NO: 12077 - DNA, 651 bp, Escherichia coli
atggctaacattatcatttctaaaaagtccatcattgaagctgcatctattgtatccgacgagctgcgcgaaaaagcagatctggcaactcaaacatataacgaacattataaaaatggtacgcacactaaagcagacaaagcaaatatgcaagctgcgaccactaaacttgcttacttcatcaacaacgttgtaaacgctgtagaagacgaaaaattatgctctgttttttactatgcgattaaagcaagcaaacaagcgccagaagtatttttccgtgatgcaatgactaatagttattctctggaaaaactggtttatctggttaaatcaattaaatctggtaaatgcgtttattccatcgctgatatgtcaggatctcgtgtattcgctttaatcgatatgattaacgacgagatcgacacgttcaccaatggcgctgttttcgatttaatgaatgaagctaaaaaagcgtgtgaaattaaattggacgctggctatactcaagccaaccagttgatcaatctttgcgaacgtcttggacttgttgaaaaagtcaaaggagctgggagcgcgaaagctggtactcagcaatatcgcttcattaaaaatgatttctacaattatttagctgatgctttcaaagcgtaa

SEQ ID NO: 12078 - DNA, 252 bp, Escherichia coli
atggactataagcctgtcattcagtcgctgatgaatgacgtgtgctcaacgtctcagaatgtatcagtttgcatgtatcaattttcggcagccgtaaaagcaggaaaagcgataggtgagaatatggaactgtgtaagaaagtggcaaatgaagaacgggcaatgttggattgcgaatctagcgagtcatcggcacagttcgttgatgcgctatttgacaccaatcgtaaggctgtagagtctgttcaataa

SEQ ID NO: 12079 - DNA, 525 bp, Escherichia coli
atgacaaccaaagatattacctacggtatccaagctgaactcttgccgcgagattacactaacgttgaaaaactactgatgttctggcgcagagaacaaattcctgtaagggtcactctcgaagatggtcaggcgttttgcatgtacgtttatggcctcatgccatctcgcaacaaagttgacctttgcccagccccttttgacaaagaaaatcgtataaggctcccacttgaacgcattagtacaattgaatcaggtgtggttgacagtatcgctcacgatttcaaaggtcgattaacagttcaccctgattatgtcgataatcggccatcacgccgcgatttttttgcaatttgcaaccaagcctataaagcaaacaaatctataagggtgtacatggcggatggccgtgaaattgagggggtgtcagcaggcgcagatgcttgtcaggttacactacgtgtcgagaacggtagaaaaatagttgttttgttcgattgggttgaacgaattttgcctttttga

SEQ ID NO: 12080 - DNA, 465 bp, Escherichia coli
atgaagtctcccatactgttcactttctgttctaaaactaacatgaaatactcgcttctccctctactaacgttaccagtgttgatgcttaccgcgtgccaatcacgtccaatatcaatccatgacgccaaaccagcaccgcaggccaaagtgttcaagtatcaaagcgcagcgccagctacgttggtggtaatgagagacacaggttttgtaggagctggatgtgatgcttccattttcatcaatggcgaaactgtcgcaaaactggctacaggcgaaaaagcgactttccatttaaatgccggagaattaattgtgggtgcatctcttgaaggtgcaggtttatgtgctctaaaccccgctcgtcaagagcgagaaacgactctgaagaatggagacacaaaagcgttcagggtgttcaccagcaattctggtgacatcgacattctgccaacaactctgtga

SEQ ID NO: 12081 - DNA, 279 bp, Escherichia coli
atgagtgaaaagaaaacaacttactgtcaggtagcattgtctgataaggccaatgacaaacttggaaagtttcaagtgaaactaaaagaaaaaaatatcaaaatgtctaaggctgaagtcattaataccattctggaacaattgacaatggccgactttgacaaggttatatcttctgtcggggcttccgctaagactcgtgagaaaatcatgcgtatctatgagaactctaatatgacaaaggaagatctcgaaacgctattaagcagattaaaataa

SEQ ID NO: 12082 - DNA, 1560 bp, Escherichia coli
atgactgttcggattgtatctaacgcagttaatgcgcttatttctggcgcagatgacaaggtaaagcaactggtgcaacagatgttgagctacgaagtcgagactggcgactggaagggcacaagcacaatgttcaactggagtaaaaactcgttccctgcaggctttgccaagcctgtagcggcgaacttgaacaaggcgggcatcaaatgtgttcatatccgcaaagacaaagccccggcgcttggaaaaccaaatccggcggttaacccattcccatacaatcctgattatgcgtatcaggatcagactgtggaaacactggttcgagagggaatgatgattgcgcagatcgctactggtggcgggaaatctaatgttgcctgcaaagcagctgcacgtatcggtcgaatgacattatttttaacaacccgctctgttctgatgtttcaaatggccgaaaacttccagagatccatcgactaccgcgccaaaaatggcgaaccgtggttaaaagaccaaaaggttggagtcattggctcgggtgagttccaggtatcacgacatatcaacgtcgctacagttcaaactcttgcaagtttcctcgaagaaccaccacgcgatgcaacaccagataagaaaagctaccacctcaaacgtcgggagttggtgaaacgcttcctttcaagtgtctctcttcttattctggaagaggcgcatgagtcttcaggctcaaatttctatgacatcgccagattatgtgtgaacgcagactatcgtctggcgcttacagccacgccgttcatgaaggattcgacggaagccaacatgcgcctgatggcggtggccgggcgaattgaaattaaagtcacagaaaagtacctgattgatcgaggcattctggcaaagccgtacttcctttatcataaagttgcctacaagccagacgaggccagaatcaaggccgaacttgccaacaaacatctcaattttagagttggtatgagcaccgcctaccaaaaggcttatcagttggggatcgtgtataatttgggacgtaacgaggccatagtgcgcgaggcattgctttataagcaacattcactcaactgcatgactctggttcgtcttaaacgccacgggcaaatcctgatggagatgatgaaggagtcaggtcttagagttgatttcatctatggggaatctaaccagacgacaaggcaagcaaagctgaacagtttagcgtctggtgaaatagatgttttaataggctcgactattctggatgttggtgttgatgtgccaagcgttggtgcggtcattcttgctggtggtgggaaagcagaagttgaaatgagacagcgtgtcggtcgtggcttacgagccaaaaaaaatcaggcaaacgtgtgttttatcactgatttcattgacattagcaacaaatacctgttgtctcactcttatgagcgaaaacacatcatcgacaccacacctggctttgcagaaggtgtattgcctattgatggagcattcgattttggagttctgaaacgagattag

SEQ ID NO: 12083 - DNA, 681 bp, Escherichia coli
atggatgtaaaaatcacgattttgcaggttgatgttgccaaccttcgcccgaatacctggaacaccaattcggttggtgcgcagaattttgaaaaactgaaaggttctatcgaaaaattgggcttttttaagccaattttggctcgtgaacttgaagatggattttttgaaatcctcggcggcgaacatcgctggcgtgccgctattgagcaaggaatttcaacggttccagtgctttctgtgggcaaaattagcgatgtcgtagctaaacagatgtcactggtggacaacgagcgatacggtgaagacgaccaaatcgcattgcaacgcttcattgaagaaattcagtcagaacttgactatcaactgtctgaaatcgccccgtatgacgacgaaatctcgatggttttagcaaaagaggcggcaatcgaccttgaagcactggaggcgttgtctcgtggtagtgatgagcctgtcgataccgacaaacgagagaaaaccgaacgtgtgggggcggaacatcagaccatgcgcttcaaagtaactttcgatgcgtcagatcgtgttgcagaaaccataaaaaacatcatcaaagagcaggctattaacaccggtaatgaaatggagaacgctggtgaggctctggtgtggctggtcgactactacaaggagcgtatgtaa

SEQ ID NO: 12084 - DNA, 669 bp, Escherichia coli
atgaccaaaaagtttgaaatcgtatatcgcgacccggcagatcttattccctatgagatgaatgccaaaaagcatgatgaacagcagatccgagatctagccgcagccattaaaaagcgcggatttgaccagccaattacggtcgataagaacgacgtaattattactggccacggccgccgtgaggctgcaatttttgctggacttgagcgcgtaccggttattgttcgcgatgatctcagtgatgacgaggttcgtgcgaagcgccttgaagataaccgacttgccagcattgattacgatgcaattaagctacagaaagagcttgagtcgcttgttctggacgatatcgaggttttcggctttgaagagcgtgagttgaatgttctcgttggcagcatgacagaagaaatggacaccgactcgctagttatcgatcttggcgaagaaactaaacgacagaaggatgaacacaccgagatcagtcgtgaagttgcagcggaagaagtacgtgttgtcgacgtattgggctttaaaacgcttcctgctggctctgccattgttgttggtgatttgcttgcccacatggaagaaatgacgggagaaagcggggtagacgcatttgtggcatatgcggagaagatctcttccggggagatggctgcatga

SEQ ID NO: 12085 - DNA, 666 bp, Escherichia coli
atgagcaaatacatcatcaacgtatcgtttcagacacgcgtaaataaaaccacgcgcacgttggaaatcgctgagtcgttcgggcttggcctggacgaaaaagagtggacgctttacgacaatctggagctggaagtgaagcagggcgatgtggtgtacatcaccggccaatccggttccggcaaatccgttgtgctgcgcgagttgcaacgacagatgaaggatgaagggctgtctgtagcctccatcgatgattttaccttcgataatgaggttaacgtcatcgatcagttgggcaaaacgaccagcgatgcgcttgggttgttatctatggctggtctgaacgatgcatatctgtttgttcgcaagccttctgaaatgtcagacggtcagaaatatcgtctcaagattgccaaattgattgagtcaggcgctaaagtgtgggctgctgacgagttcggtgctgttctagaccgtgtaaccgctcaggttgtggcatctaacctccagcgtgccgctcgaaaggttggtgcgacggtaatggtggcgacgactcacgaagacctgaagaacgcgctgcgcccggatatgcagatcaccaagcactacaaagaacgcgtgaaggtggaatatcacaatggtagtcatgatgaggttcatttatga

SEQ ID NO: 12086 - DNA, 891 bp, Escherichia coli
atgacggacatcatcattaaacgctaccgccctgaagagtttccgcgtcatctggactttctggagcgaatgactgtcacaaagggaactgtagaggactggcacgctcttaagtcgcttcactacaaaacagacggcaaacctttcgcgccaacttactatcgctgcgaacttgatgaccgtctggtgggcgtcgtggttatggcttacccgaaactactgctggcacctcgccaccgcatgtttcctaagttgaaaccaaccactaataccaccgtggctaaccagtactggggtcggtacgtgaataacaactttgcggtgatcagtcgctcagttgtggatactcagtatcgtggcgtaggcgtctcttatcgaatgattaacctggttagcaggatgcatgaccggccaatcattgagatccagtcctcgatgagcaaatacaatcccttcgccatgaaagcagggtttaagttcatccgccctgagcgaccgaagagctatgaaagtgcactgcgtgtattccagcgccatttccgttccgacccgggtgataacgaggcgatcgtcaaagagttgttcgcaatgagcgagtctcgtcgtcgccgtgcactgcgtgatctggtggcggactaccacaagaacagttccctggcaaaagctgggcggaatcgtggcacgacgattcaggacattgccgacagtctggtggacgaggccagcattgtgaagctgctcaaggacattcacaacctgagctttacgtctccgttgtatggtgtgtaccgaaaccctgactttggccgtcgactgcctgacacgctgccactgctggcattcgacaaacaacctttggataaaccgttagaaattgctttaccggcataa

SEQ ID NO: 12087 - DNA, 267 bp, Escherichia coli
atgacgttaaccgacaaacaaaaggacatcatcaaaacgctcaatctcggttatgagcgaggtcatctacttgatctggacgaattgcttgaagttttgccgtacaagacaacaaagcaaagtatccagttctcaattcgcgctctgataaaaaaggggctggtggagaaagggcatacgcgccaacgcagtgacaatcgctatcaccgccggactcttgggttaaccactttaggtcgagccaaagcgaagttactggtgatgtaa

SEQ ID NO: 12088 - DNA, 633 bp, Escherichia coli
atgacggtcgaaaaagacgaggtaaaaactcgcctgacaccagcggagtgggccgaagctgaagccaaatggacgtcaggcgaatatacactctcaaagctggaggaagagtacggcattcgtcgtgaaacactctccagacatttcaaaaagcgaggattagagaaaggcgcggactctgttgggaagatggttcgtgagtctcttaaatctgacgcagagcttcgcgctaaagcccgtgcggaaaagatagaagaacgtcgtacacgttatgacggctgggcgtatgcgttggggcagatggtgatggtcgaagtcactacggccaaacgtgagggtaagcctttaggggcgattgaggattctctcaagagcttacagagagccagtaatacccttgcaaaatgctttgaagtttcgtccaaagcattgggcatggatcatgcggaaaatgacgaggaagaaattccgaacctggtatttggtgagcttacgccttcccaggtggcgaaattacgtcaggaagacgacgagcctgaaatcatcgatgacgaattgcttgagacgttggaagaagaagctctaagcgaatttgatgcgacagatgatggaattgaaggggaggacgaataa

SEQ ID NO: 12089 - DNA, 1257 bp, Escherichia coli
atggcaatcccgtcctcgctcagtcttgtgcaactgcattctggacagatgaaagtcttccagtctccgcatcgatttaaagttgtttgtgctggtcgacgctggggaaaatcccggttgtcgatctccactattattcgtgcggcggcaaaggaaaaaaagcaaagagtctggtatgtcgctcctacttaccagatggctcgccagattttgtgggacgatctacaggaagttctgcctcgtaagtgggttaggaaaaagaacgacaccacgatgacaatcgtgttgaagaacggttcggagatcgccctcaaaggtgctgataagcctgacactctgcgcggcgtagcgttgcattttgtagtgcttgatgaatttcaggatatgaaggctgacacctggtacaaggtgttacgacctactctttcatcgacacgcggcggtgcattgatcattggtacgccaaaaggcttctcggaatttcacaaactgtggactataggccagaacgtagagctgcaaagaaagggacagtggaagagctggcagtttgtaactgccgattctccgtttgtacctacggcggaaattgaagctgctaagaacgatatggacccgaaatcgttcgctcaggagtacctggcgagctttgagaacatgtccgggcgcgtttactacccgttcgatcgtaacgtgcatgtaaaaccgcttcagttcaaccctcggttgcctatatgggtagggcaggacttcaacattgacccgatgtcttcagtaattttgcaacctcagccaaatggtgagctatgggcaattgatgaattggtgctcttttcctctaacacggcagaggtttgtgatgagcttgagagacgcttctggcgctggaaatcacagataacggtatttccagatccggcaggtgcttatcgccaacatgctcgcggggagtctgacgtcgacatattcaaagagaagggattcttacgtgtcgattattcgaaaaagcacccgccaattgcggatcgtgttaatgctgttaaccgaatgctgatgaccgcatctggagatatccggctgtatatcgatccgaagtgcaagcatttgattgattcactggaaaaagtcatctacaagcctggaacacgagatatggataagacaggtggcattgagcatagtgcagacgcattgggctatccagtacatcgtaggtatccagtcaaaaaccgtgttattcttggtggttctcgatag

SEQ ID NO: 12090 - DNA, 1575 bp, Escherichia coli
atggaattgaacgacaaacaaattaaggatctggtggcgcgacgccacccggaatacgaaaagaaaaaagaacattgggacttcctcgccagcacttacgctggcgggcgtggttggtttacagacaatatctttcgttactttaaagagggagatcaggagtttaaggagcgagttgaacgtgcttatcgcttcaaccacactcgtgaggtggtaaacctcatcaacaaatatctctttaaagaagacattcatagaaatatcgaagaggcaccagagcagatccgcaatttctggaaacgtgcgactcgccagaatgcctctattgactcatttatggccgctattgatttgcagtcgtctatttacggtcgcatatgggttgttgtcgatagcacgatgagtggtgatgttgagtcagtagctgacgagaaaaagaaagatgctcgcgcctacgcctactggatttcacctcagcaaatgctggatgtggcatgggacgacgacgggaatatgttgtgggcgttaattgtggaagtcgctcgtgatgacgcagatccttttacttctacaggtcaggaataccaacgttatcgtctgtggacacaaaacgagtggtatctgttccgtgaggaagtgaagaagggcgctggtggagcaggtcgccgtcaggcaaaagttattttagaggatagcggtgagcataatctcggcgtagttcctgtgtttcctgttgattgtattggagaaagtgaatcaccgtatttcagcccatcgttgatcgatgatatcgcttatcttgatcgtgcggttgcaaactatctgtcaaaccttgatgccattattcaggatcagacatttagccagttggctataccggtacagtcgcttttacctggtgatgaaaaccacactaaagtgcttgaaatgggcacaaagcgagtcttcacctacgattctgaaggtggaaaccagccgttttatctgtcaccagacccgaaacaagctcagatgatcatcactacgattaagacggtgattaacgaaatctaccattcagttggtgtagctggtgagcgaacgaagcaggacaacgcacagggaatcgataattcatctggtgccgcaaaaatgtatgacttccagcgtgtaaatagcttgcttgtcacaaaagcagagcgtctggaaagggctgaacgccaaatcatgctactggttgcgaaatggatgggggtagatctggacgaagaccactctttaattgcgtatccagaaagtttcgatattcgtggccttactgatgaattttctgttgccgagaaactgtcattacttcaggcaccggactctgtacgtcgtcaccagatggaaatgcttattgagaagattttcccgaacattactgaggcgatgaaaaaggaatttgataaagatctcttgaattttcctccaaaaaatgatctaaatacccttgaaaataagtcagtacttacttatgatcgtggtgcagcccaagaaagcgggcaagatcaaccccgagggaatggggactcatctactcaagagaacgagtga

SEQ ID NO: 12091 - DNA, 888 bp, Escherichia coli
atgaatctgtggcaaatgcttttggcccgtcgtggtctgatggatgtcgctgaagcgcatgagcgtggaggcgctggcggtgtagctgctgataatgagcagagtacacaagatcctgacaaacagggtgaacaaaaagagcagccgaagggcgatgacgaatacgctggcatgactcaggaagagttactggccgaacttcgtaaaaccaagaaagctggtgctgaactgctgaaggagaacatgaagcgcaaagagaaagagcgcacattggccgatcagcttgctcagtacggtgatatcgatccggctcgtgctcgccagcttttagaagctgaacaggccgcagaaaacgcacgtcgtgaggcggagcaagctgaactggagcgtcgtggtgagttcgatgctgttaaaaaacagatgatcgaagcacaccaggcagagctggcacagcgtgacgaacgttatgcagcactggaaagtgaaaacgcatcactgaaatctcaattagtcgagatgaccgtgggcgcttccttcagtaactctctcttcctacgtgacaaagttctgatgaccccggcaaaagcccgcgtgatctacggttctcattttgaagtgggtgaagacggtagcgtagtgggttatgacaaaccggcaggtcacaaagaacgagctgttctggttgacggtgaaggtaagccgttgccgtttgaatccgcgattgaacgcattgtgcgggcagatccggaagctgacgcattgatgcgtagcgaagccaagcagggtgtaggctcacattccaaatcgacctacacaatatcccaaccgaagaacaagtcgactatggataagttggcctccggtctggggaaaattggacttaagtaa

SEQ ID NO: 12092 - DNA, 876 bp, Escherichia coli
atgccattactgcgtgaagaagctgaaaagctgtctaacaacgaacttgaacagggtgtgatcgaaactatcatcgatcgcgatgacctgtttgccatcctgccttttatgaaaattaattcaaaggcatatctgtacaaccgtgaaaaaacgctgagtgaagctaccttcatcgacgttaacgacaccatccctgaaggtgcagcaaccttcgaagaatgcgttgcgaaactgcgtattctggctggtgacgtagacgttgataaattcctggcgaccactatggccgacaccaacaaccagttggctattcaggttcgtcagaaagttaaaggtctggctcgtgcgttccgtcgcaacctgattttgggtgactccagctccaacaacaaggcgtttgacggcattccacgcctgatgcacgcagatcagaagatcgatatcgccggtgcatctatgactttctctatgttcgacgaactggtcgatgcggtgaaagatcttggtgctgactgcatcatgatgcgttcagagcacctgcgtgcttaccgtgcgctgctgcgtacagtaaacgtaggtccgtctgaaatcatgatggagaacttcggtcgtccgatgctgtgtcataacggcgttccgttcatcatcaacgacttcatcccgaccgatgctggcaaagcaagcatctactgcctgcatctgtcagaagagaacggcgttactggtctgtatggcggcgacaacgcaggtatcgttgttgaaaacattggtactgtacagaacaaagacgcagtacgtacccgtgtgaagtggtactgctctctggcgaataagcacgataaggctatcgctgcactgaccaatgtaaaaatttaa

SEQ ID NO: 12093 - DNA, 921 bp, Escherichia coli
atgccagaacaaaagatgaagattacggaagaggcattttcggattttacggggcatatgtgccgtgccggatttaccaattctatctccgatgaacctttaaccgagcggcaacaaagtcagctatctgcttgtttgcaggcggttcccctctcccaatccgtaaacataaccccggcttcaccgtcagttttggttgggaaaactgttcaacttagtgcaggtattagtatgggtaagagtgccagttcattcacctggaagtcagccaatgaccaaattgcaaccgttaacggcactggattagtaactggcgtagcaccaggcaaagtaaaaattactgcaactgatcaggaaacccagctttccgcttcagtggaagtcaccgtaaatccggtagccgttcaatccgtaacggtaacgccagaatcaacgtctgttgagaaagggaaatcagtcagtctgaaagcgaatgttcagccgtcaaatgcgacgaataaggctgttacctggtcttccaaaaatgaagataaggcaacggtagaccagagcgggaacgttactggtgtagaagttggcactgcgacgattgagatcgtttcccaagatggcagcaaaaagggaactgcaacggtggaagtaactgcgcctgttgtggctgttaccggcgtcgaaatcgacccaaatagcacaaccgttgaggcaaacaaaactgttcagctgaccgcaaatgtcgagccggcaggagcaacaaataaaaccgttacttgggaatccaaaaataccgagtttgcaacggtggatagcgaaaccggtgttgtaactggcgttgcggctggtactgccacaatcgaggttactacccaagatggtagccacaaagcgacagcgaccgtagaagtcactgctgcacaggaataa

SEQ ID NO: 12094 - DNA, 435 bp, Escherichia coli
atgaaaccagcaaaaattgttttattagaaccgcaattttccggttattcgggaatgttgtgcggcgttcagttcgagaacggggtgtccgtagcggagttgccttttatcgatcagcaaaggatttgtgcctcaatgcgagcatcaacagtcgagggcaaaaatgtttctccgtctgccgcatacagtgatcgtggcgagttgaccgcagacctgattaccgagccagcagcacctgacattgtgccaatgaaacgtgggacaccagatgaaccggccaaacagatccagactttcacacgagaagagttggagtcaattgcagacaatgaaggcattgccggtctacgtgtgattggtaatcaggttggtgtcaaagcgaaaggaattgtcgagatgattgaaggcatcctgaaagcacaaggcggtgagtaa

SEQ ID NO: 12095 - DNA, 834 bp, Escherichia coli
atggcgcagatcgactcgtatcgtagcggtgaagctgtttccctttcatttgccttcaacgtgctggatatcgaatctgctacctacacagtaaaggacagcaccggggctattctcgttgatggcgagccgctagaaattaccagcggtcaaatgtcgattccggttgtcgtgtcggctgaatataaccagctctctgagaaagaacgcgatctgcggtacgtcattgtgaaggctgttgcatcgggtctgacgcatgaagagcggcaaatgtatgttctgctgaatagttttgaactgtcgataccagaacagtcgtttgcaactgtcgctgatgctcaaatgcaggcgatcgatatgctgaatggggacactttgctgtcggatggtgaaggcttaatgcgcaagcgtctcattgaggctaccagacgaattaaaactttaccgttctcaatccgcaaaattctacgtatcgactttgaccgatacgatcgccctcaaaatatgctgaatgtgtatgacattccgtggggagcagatggagcgtaccggcatgatttagtcgattgggaaaagatgacgcaggagaagtttgaagagttccctgactacttcaaagaagcgttgatgcttgccgttgtcaacgaagcgtgtgagatcgcaaatggcaatgatgttgccgcagcacgagaggatggcattttgtcagagtcaatcggtgaaacaaccaacatgtaccgtaccggtaaagctgcaaacgtgcatgtggctcgcagtacctggcgcttgctggtcagttacatcaacaaccgtatgattgttcgccgtgcgtaa

SEQ ID NO: 12096 - DNA, 345 bp, Escherichia coli
atgaatatttcgtggcaaacagaaattgcgatctaccgctttggcgcaaagaacgtttacggcgaggcgcaattacaattcgtcaggaagacgaatgtcggcgtggtcaagttcgaacagagtaatgagaaatcgtcagttcgtgctgatagctctggtagtcgtggtaaggcgagtctggagctgtttgatgctgtgttagttgtccctttagaagcggctgtacaacttgatgatgtgctgatccttgaaggtcaaaaattaaaggtgtccagtgttcatcgccgctgggggctacgaggaagacctgggcatcttgaagtaggggcgaatatatgggtctga

SEQ ID NO: 12097 - DNA, 474 bp, Escherichia coli
atgggtctgaaatacgatgcgcatcagttcaaacgtgcggggaatcgactcaacaacagccagaaagcatttaagcgatatcttatccgggacatggaaaagctggcgcgtttggttgagcgtctcagccgtgcaatggccccgctggaaaccggatctctggagacagccatctttgccagggtgattaaagaaggttattcagggctgcgtattgagctttctgtgtctggagcaaaaccacgtcaggggcatccgggcgtagaagtaggtgactatgctaagtacatggagctgggtaaataccgactcggttatctttctcgaatgaagaacgtgacaaacccaccaattgccggtgttaaaccccgtgttgggccacactttctggaaagagcggtggaaattagcgagaagcagttctcagaagcgattcttgaggctgccagaaaagccggatttacgagaggttaa

SEQ ID NO: 12098 - DNA, 384 bp, Escherichia coli
gtgtttattgaagcgtttgcaagtttgatgcagaaggcaaagattggcacggtcgggactgacattttctgtcactacttgcctgccaatgtgaaatctggcgtcctgcttattaacccaaataccggcatcagcatcgatcatgagctacagggcttttatcacgaatcattcacaatcattgtgcgtggttcgtcaattactacgacggttgagaaagccaataaaatcattgagatgtttccagtagaggaaacggaatctggtggtgtttattttcgacttgtacgaccgatggcgatgccaatcatttatcccaaaaatgatggggcattaatagaagcaggcattcctgttgaatttgctggctatttattgaattaa

SEQ ID NO: 12099 - DNA, 747 bp, Escherichia coli
atgtctaatacccatgtaaaaaacatcaaacttggtgcctgtaaggtgtcgtttggtggtgtggatttgggttacaccaaaggtggtgttcaggttgaagtagccactgaaacgctgaaagtcaccgtcgatcagttggggcagaccgtaatttccgaattagttcaggggcgcaacattaccatcaccgcgcctctggctgagtctgtactccaaaacatggttgacctgatgcctggttctactctgagcgaagatgacaactctgtcacgatcacatctgcacagggcgttaacctgattgatgtggcgaaggagctggttctgactccgcaggacaccaccgactatgtgttgaccatcccgaaagcggcaaccgcgggcaacttcactatgacctaccagtctgatgatgttcgtgtgttctctgttcagttcagcgcatacccggatgatgaaggcgttctgggcaaaatgagcggtcctaaaccggtaaaaactgtgtcgatctcaccggaatctccaaccgtaaaagctggagaaactgtgcaactgacagccgaaatcactccagctgatgccgcagacaaaaccggtgtttgggaatccgaagaccaggaaaaggccacggtagatcaaacgggtcttgtgcgcggtgtggcgcagggtactgcaaacatctccttcaccagcaatagcggttctaagaaggctactaagtcagtaacgattaactccgcagattaa

SEQ ID NO: 12100 - DNA, 318 bp, Escherichia coli
atgaccaaattactcgatctcgattccattctgcctccgaagaaaagcatcaaatttggcggtcaggaatatcccatcgttgaaatgacggtaggtctgttcgtttccatcaagcagatggaaggcaaagatctcatgaacatgtctcctgttgagcaagtgacagcttatgcagatctggttcgtaaggttatcccttcagtacctgacgaagttcttgaaaaactgactgttccgcaactccagcagatcttcaccttcgctatggaagtgattgatgaagaaaacgaaaaagcggctggcgaaggggcaaagtaa

SEQ ID NO: 12101 - DNA, 270 bp, Escherichia coli
gtgtcgccattagagctactgaacgttcctctcacgatgttctggatgctcagtcgcaatatagaccgtctgcgtgcggaagaggatgtccgcaacttacaagtcgctcgtgcgtcccaggcggatggcgaggctgtgaaggcgttcatggagggtttgcaactcaggattggaagaccagtcgtaacagataaagtctacgatccaagccaggataaggcagaccctgacgccaaagagcaactgatgcaaatatttggcagaggatga

SEQ ID NO: 12102 - DNA, 4572 bp, Escherichia coli
atgtcacaaaacgtagagtttatcctgtcgctggaagacaaacagtttacagcgtcaatcgatcgtgcggggaaactgcttactcgatttggtgagcaggtaacaaagcctgctcaaaaaatccaaacctttgaacgctctttgggttcggtcgcccgtatcatgggcgttctggaaagcaagctcgattctacggcagataaactacaggatgtagctgccggttttgagcttgcttcagatgctacgcgtaaaatgcgtggcaacatcaccagcctcaattctggtcttaaagccctgattgagcgcgtcgatacgacaacttcttcagtagataaactcaccgcgtcattacgtaaagtgcaatcagagctaaatgatttctctgattgggcgacctatgcaagcaaaagcgcaagccgctttggtacggaggtcaaagaagcctctgcgtccgtgagtggcatgaatacgcgccttaataccacgacgaagcgactcagtaattggggtgtcacaacgagtcaggctgccgagggactgaaaaaggttcgtgagcagatggacgaagttatcggacgtcagcaactgattagcaagccggtacgcgttcgtacatctggaagtggcgatggtggtagcgggcggcgtagcggtgcttctggccatagcggtaaaagtaacgaaggaggtatgttctctggccttcgtggcaacattttcctgcttggcgagatcggagatgcagccagaacggttactgacataatgtttgggtggcagaagcctattgttgaagctgcggccgaaatggaacgtatgcgggtgatgcttcgagggttgaataaggagaagtccaacccgggccaggctgccgctgatgatatgaagtacatcgtagacatggcgcaaaatgcgccgttcgcgatgcaggcgttaacagattccttcgtgaagtttcgttctgctggcttagatccaaccgatggttctctgaaggcgctggtggactccgttgctcgttttggtggtgatagtgagctgttgaaacgtgcggctgtggccgttcagcagatgtccggtaagggcgttgtgtcaatggaagagctacgtcagcaattaggtgaagccgttcctaacgcgatgcaggcaatggcagacgccgcaggcatcactatgggggaactgactaaagccgttgccagcggtacggttgaggcaaaacaggcgttgtctctgatgtttgttggtctgcgtgcggagaatgagaacgcagcgaaagacatgatgcaaacctacacaggtgcgctggcacaacttcagacctcatttacgctatttgcagatcgtgttggtcaggccggatatctggattctctatcaaaggggatgaaagaactggcttcaatcatgaatagcgcggaagggatttcgtttgccaattctttaggttcggggttaacgacggcaatcgatgggttgcgtcagcttgctcaatggttagcaaagaaccaagagatggtaattaatctcggtaaggttgtggccgcgatggttgcgttcaaactgatgcgagcaggggtcatgggggtagttggcgctggcagccagatggttagcacctttgccacgatggcgaccgctatacagactccatttaacctcggcgctacagcagtaactcgattcaatcgtgcggcacgtatggggctggctccgatcccctctcttattttcgccatccgtggggcgattacggggcttaaaggcgcttttgcaggattaacggcgttcattgcggcaaaccctataggggcagcatttacagtcgccactgtagctgttgctggcctaatcacgtacatgaccatgctccgcagcgaaacttcaaaggtcgttgacgagattaggaaaataccagaggcgatgacggcggccaaacgtgcacaaatggccgaccgcgcagaaaagctcgaaaagcagattcttgctgatcaacgagcattaaaaactggtgagggtgttaattacgtatctaactctgccggtgttattactcacaaagagtcgaaggctgacatcgaagcacgcctgaaaaaaaatcaggaggagtatcaaaagataaccggcacgatagctcttggtgacggcgctgtagcaaagcgtttggctaaagaggctgccgaatctcagattgagaaaattcgagcggaaaaccagattttcgcggcaacattcgtgaaagcccggcaagaggctctggataagatccagaaaatcaatgatgacggttcactttcagatgacgaaaagaacaagctattggcaccgttacgtgaaacggtaaacaaaagctatctggagcctgcgcaaaaactggttgattcactttcttctcgtaagaatgtgaccgagaagcaaattgcgactcttaatgatcagcttgaaaaagccaaaaaggatggaaataccgagcagatccagaaactgcaaggcagtattcgtggttatcaggagcatttggaagccgttgctcaggagctgactcaggcagagttcgagagagataacgcggccaaaactggtaagggcgtaatgtcaaaccaggggactgttcttgggttaggtacaactgataaagctgctcagaaggcgctggcgcaatatatgcgaaaccagatggattctgcgacttatcaacgtactttgcctgacggcactccgatgatggacttcgaaggtaagccgattattgggcctaaacaactcaagacgcagcttaatttgcagaaagcatccagtgccagctctctggagaaaatgagcgatgaagagcgtgccgcagccattgccgcacttactaaagctcgtgaacaggatgccgcagccgccgagaaagcagcccaacgatcagctaatgcctcgcagcgtgcggccaagaaagaacaggcagcgcaacagaaactggcggccggatatcagaaggctctggataaagccgatcagcttatggggcaaatgggtgaaagctctaaggctacggtatcgtttgatcagtctcttcgcgatacaacaaaatcgctaactgatttggctaatgcgattcctaacgagttcatcactcaagagatgatcgacaaggcgaaaaaacgtcttgaagacctcaaaaatgcgacacctgaatatcgcgagatgtttaatcgccgcaatgttgagcagatgatctccacttgggcaccggaggcggattccattattagtgctggctatacgccatctcgcgaagagaaagttgctgatttcgaagacacctacaaccgcaatctcaaagcgttgatagaacttcgtgataaggcgtctgatcctaaagttgtggcgctttatacaaagaaaatcaatcaactgattgctgctggcaataccgcgcttattaaagagacggggactgcgacgcagaagttggcactggaatacgaaaacctggcagagcaggtcgaaagcacctggactgatttgtttagtggcttaactgatgtcctgactgatttcgttattaacgggaagatgagcttctccagcctatctcagtccattttgaaagatatcaccaatatggtcgtgaagtcgcagatcacgctgcctctaatgaacatgttggggatgggaaccaccgcagctggtagttcacagagtggcaatttgctgaccggggttgcttctgccgttgccaatcaaggtgtacgaatgggcaacactgttaatggcgacaagtcggtaggagaagccacgaaggagacgtccagttcggtaactggattggggcaaacaacacagcagaccaccagtgcaattggcacagcaacaaatgcgattggtagctgggtatcggggctatttgatagcaccgaagccaaagatgctgagacaaaagcagtgaaggactccatcttctcgatgcagaatctcagctctgttaccggcgctctgtcagccgcgtttgcaatgcttggagctaatgcttccggctctggtaataagtggttgaatttcggcgcgacagttgcatctggtttggtttcagtatgggctggtggtggattcgatggattgatgtccggttcttctggctcaacttccgggttcaacaatctgaccagttctgctgccgatggcacgaatggtattcctgcaattccgaagtttgcaaatggtggcatattcggaaaagacggcgtgatcccgctccgggcataccagaaaggcggtatcgccaactcacctcaattggcgttgtttggggaaggcgatatgaatgaggcgtatgttccattgcctgatggtcgaacaatccctgtaacgctcagtaccgatggtatgagtggaggaggaaatgttctttctccggtatcaattgagatcaacgtccatagtgacggtagcacaactgaatccggcgatacagaaagcatatggaacaatgccgctcaacggatgaaagcaatcgcgcttgagactatcgctcaagagaaacgccctggcggatcactcaacccaaacactcaacgtaactaa

SEQ ID NO: 12103 - DNA, 336 bp, Escherichia coli
atggaaagacaaacgtttaattggtatccagattacgaatctgaaaaaagcgtaaaaccgaatgtaacggtacttaattttggtgatgactacgagcagcgacaggctcaaggtcttaatcgtattaaagaagaatggtcgttaacctttaccagatcatacaacgaaattaatgcaatcgatgacttcctgactgagcgatcaggcgttgaatcgttctattgggttaatccaagaggcaagcagattgtagttgtatgtgacagtcatacggtcaagcgatatcaggggcactgtgtcttaactgctacattcagacaagtatttgaggcttaa

SEQ ID NO: 12104 - DNA, 699 bp, Escherichia coli
atgggaattaaagctgatattcagagcttatctccctctgcactcattgagttgttcgtactggatatgtcgaacacaacttcaggggggaagctattcttccacgccggaacaaacgaactgatgcaaccggtcgtctggcaaggggtgacatacgagccgtggccaatcaaagcatcaggctttgacaaaacgggccagggaacgttgccacgtccaaaaattcaggtatcgaactttgccggaaccgtctctgcggaagttcaggcgaacgacgatcttgttggctgccgcattattcgcaagatgacgctggctcgcttcctcgatgccgttaattttaaagacggcaacccaacagcagatccaaaccaacatttcccggatgaaatgtggtttatcgaacagaaaactctcgaaactcatcaggttgtcgagtttgaattgtccagtgtgttcgatttgatgggggtgcaactgccgtatcgtcagatcattaaaaacacctgcccgtggaaataccgagggccagaatgcggctataccggtccatatttcgacaaaaataaccagcagacgtctatgtctggtgcggattactgcacaaaacgttatgacgcctgtaatgcgcgtcggaattattttgccgacggtgtgatccattttggcggatttattggagctacgcggtatgggtaa

SEQ ID NO: 12105 - DNA, 798 bp, Escherichia coli
atgggtaataaagcaatccctgagcttggctctgacgttatgcagcaaatctatctctgcgccataaatcgctaccctaatgaagcgtgtggctttctggttagaactaatggcgacaaatatcgctttatggaagcgcggaatgtttcggagaacccgcagaacacttttgtaatgcacgttgacgacattatggcggcagaggatgcgggtgatgttatcgcaatctggcattcacatactgatgaatcagcagaagcatctgatgccgatcgtgcaggctgcgaagcgacggaggttccgtggatgattctggctattcgcaagaatgttgagggagatgcccctttccattttagcgagatgaatgtgatcacacctgatggtttcgaaatgccatacctgggcagaccgtatgtatttggcgtattcgattgctggatgttgtgtcgggactatttgaagcgtgagtttaacgtcgaactaaacccgaacgcacacctgcatattccatcgtggtacaccggcgataacgacattctcgaccagaactaccgaaacgaaggattggtacggcttgcgcccggaacagagcctcaacgtggggacatcttctttatccaatacgggaaaatgcctgaccactgcgcggtttatatcggcgatggaatgattcttcatcaccagatcgaccgccttagttgtcgtgcttattacggcggaatgtatcagaaacatacgacgcatcacttgcgtcacagagacttgctcaagggagatgagacgtgtctgagttag

SEQ ID NO: 12106 - DNA, 594 bp, Escherichia coli
gtgtctgagttagttcatgtgcagcttggcggccctatggccaaacattttggccgccactggcatttaaaggtgcgcaatacaaaacaggctctggatttaattgaggccaacaagcctgggtttaaagcatggatgaagcgcaacatcaaaacctatgacagataccacatccagatcaccaataaacagggccacaagtggtctgtggacgagagtgaatatcagatgatggggcagtctgacaacattgccaaaatccgcattacacctgttccgcgaggaagcggtggatctgcttttgggtggtttcagacggtagtaggggccgctttgttggttgtatcggcggtagtgatgcctgctttagcacctctcggtttgtcactgatgatgggcggcatatcacaaatcatatcgccgcaagccactaacgaaagtgtgagacaggcagataactcgaactcttattatttcgacggccctcaaaatacagaaaaccagggcaacccagtacaacttatctatggcgaggaaattctggttggctcacaggttgtgagttcttcaatcacgattgaccagctaatgtaa

SEQ ID NO: 12107 - DNA, 4728 bp, Escherichia coli
atggaacagttcaagaagaaaaagctaccgctgtttattgccggtgcgggtggtaaaaaaagcagcaaaagctccagccgtacaccggttgaagccgacgataccgtaaattctcgtgcaatggccgctatcctcgatcttcttggggaaggggtaattggcggcttagtaaatggcgcaagatctatttttatcgacgatctgccgattgtaaatgaagacggttcctccaacttcagcggaatcacatgggattttcgcgacggttcacaagaccagactccaatgtctggctttgatttcgttgaaacgcctaaatccgtcaatatccagttaaaaaaaacacattatgtaacggtttcaatcgataacgatgaagctgatcgggttcgtgtcatcatgaagtttccttctttgcgaagcatagataaaaaaactggtgacacgaacggtacgactgttgagtacaagttccagatagcaaatggcgactcaacatttgtagatgtggtcgcggaaggtgaaaaaagcgttggcattaagctaacagcaaagaagacaggtgtttattaccgtagctatgagctgaagctgcctaagcctggacgcgcgtacaaggttcgtgtagtccgtattaccgatgataacagcagccagtatctctataacgatacatgggtggactcaataggtgagattgtagatacaccgatgaactacccaaactctgtgctggtgggtctgaaggttaattctgagcagtttggtagcaccatgccatctcgttcgtatttggtacgtggattaaaaattcgcgtgccgtcaaactacaacgaggccagcaacacttatgatggtgtatgggatggcacttttaagctgttgtcttcttcaaaccccgcgtggattctctttgatttgcttaccaatgctcgatatggccttggtcagtatgtgtcggaatctatgattgacctcggccagctataccagatcggtcgatattgtgacgaagaggttgatgatggctttggtagtaaagagaaacgctttgcaatcaatacgcagatcaccagtcgacaggacgcataccgattaattcaggatattgccggtgcattccgcggtatggtgttttgggctggtggcatggttaacatcatgcaggatagcccatcagatccggtaatgatgtttaccaactcgaacgtcaaagatggattgtttacctataaaggttctgcgcgtaaagatcgcccatccgttgcgctcgtaacctacaacaacaaggaggacggttataagcaaaacattgagtacgttgaagatcaggacgcaatgcgccgttatggtgagcgtaaaacagaagtcgtagcatttggatgtacaagtcgaggccaagctcaccgagttggtttgtggcttttgtataccgccagaatggagtcggatgtaattacatttactgccggtttagacgcctcatttctgatgcccggtgaaaccgttctgattcagaacaaatatcgtgcaggtaaacgtaactccggtcgaattgtggagtttaccaaaaacagcatcactctcgatgcgcctgtgtcgttagctaaaagcggcagctttattcggatattgaatcaggaaggcaaaatcgttgaacgcgatgttcttgaaactggcgaaagcataacaaaggttacgttttcaaaagctctgtcgtcagcggaaacgcctgttttgaacggcgtctggactattacagaaccagacctcgaacctatgcgcgttcgcatcgttaacatcgcgcagggggaaacgccgggtagctttgacatcaccgctgttgagaacaatccgtctaaatatgaggcaatcgacaatggtgcaacgctgatcccgcagaatacgacggtattggacccaacttactccaagccatctaatctgcaaatcactgaagggacttatctctcaagcccgggcaacctgtcagtaaaactgactgcaacatgggaagggaaatctccagagtattggatcagttggcgacgttctgatgaaaacaatgtatcgaactggcaatcggcgcgtgtaaccgaagagcaatacgaaatcgttaatgtcgcggagaatggacgctacgacttccaactgtatgcggtttcattcaacggtaaaaaaacagagattatcagtaccgtttatcaggtgctgggcacaatgacaccgccggatgcaccaacgtcattaacggccgttggagactatcgtaatgtgatactgaattgggttaatccagattcggtagaccttgatcacattaatgtttacgcatcccagaccaacaatctggatacggcgaaactgatcgcagagtctgcaagcaccacctttacacatgctggtcttggggatagtgaaacgtggtattactgggttcgagcatcgaacaagcgcggcatgttaagtcctccgaactcaaacttgggtacagaggcgacaactcgcgatgtattgtcgttcctggaaggtaagattacatcgtctgagcttggtcaggctctgcttgaggacatcaatagcaaagcctctcaagaagcagttgacgagttaaatgagcatatcaaccagagcgtcgaatctttggagggggcggtaaacgacgttaaggaagatatagctgaattagataagcagttcagcgataacctcgcggattttgaaataaaattcaacgagcgtagcgatgctttggagaacgcacaaaccgagcttaaaggtgaggtttcggcaacgatcgacaaggtcaatgaagcgtttgaaaaaattgatgctactgatgctgcaattgttgaaatcgaaaacaccgtatctgaacacgataaagctctcgctaatacagtcgaggcaataaaggctgcaagagacgaagcagcggctcttattgctaaggaaagcgaggctcgtgttgaaggcgatgctgcaaacgctaaacaactggaagtgttgcagtcaaccgtagaggaaagctccgctgccgttgaagaaatgaaaaagacggtagcagaggtcgatcgtgccagtgcagaactgactacgaacattgaggcgttagccaaaacaaatattgacctagctcttcgtcaagatgaagaccagcacaagcagatggtcaataacgcgaagatcgcaacaacacagaaaacctttgctgatgatatgtctgcaatggccacgaaggttgaggaaattcgcgtagaaattggcgaagacattaaggccagtattctggaagagtccaccgctcgtgccgatggcgatgaagcgttggcaaagcgtgtcactcagctgcaatctaagtttgaaggagatatcagcgcggcgattagtacagagcaggaggctcgtacatctgccgatgaagctctgacgacacagatcactcagcttgagtcgaaagtaagcaacgatatcgtcgcagctattaaggaagagcaagaagcccgagcaacggaagattcggctctggcaagccagatcacccaacttcaggcaaaggttgatgatgatatttctgctgcaatacgtagtgagcaggaggctcgagcaagcggggactctgcattagccaaacaaataaaccagcttcagtcaagggttgacggtgatatatccgctgccatcactcaggagcaggaggccagggcaagtgctgaccaggcgctctcacgagaaattaacagcctgcgagcacagaccggaactgatattgccgcagcggttgctgtagagacaaaggcaaggactgatgccgatagtgcattgtccactcagattacgtctcttacagcaaaagctaatgatctcgaggcatctcttgccagagaaacaacggctcgtgcagatggtgataccgctttaacaaaagaggtttcaagtttaaaagcacagactgcgaaagatattagtgcggccgttgcagttgaaacgcaggctcgaactgatgctgactcggcgttgtcatctcagatcaccaagctgacctctcaatacaaagaggatattaaagcggctgtagcaaccgaaacgaaaacgcgtacagagcaagatgctgcattggcgactcaaatcacaaacttagagtctcaaacggcagccaacatttccgcggcggtaacaactgaaacgacagcgagaacgcaggcagataatgctctgagtgggcgaatcgatactctgaaagcagaggtggatggaaataccgcgataattcaacagcaggcaacagctattgctgataccaacaaaaaagtatcaaccgcgtggacgttgaaaatggagacttcaacgagcggagggcagaagtatgttgccggtattgcgcttggtattgacaccactgggctatctcagtttttggttcaggcggacaggtttggtttggtcaactctgttaacgggaagatcacaacgccatttgttatcgaaaacagtatcgcctatatgaatggagcgtatatcaaggatggcacaatcaccaatgcaaaagtaggcgatctgcaatctaccaattttgttagcggtagatctggatggcggttcggcaaaaatggaacgcttgagatcaacggtaatagcggcggcaatgggcgattggttataaatggtcagcggattgacgtttatgacgataacaacgtcctacgagtaagaattggccgtctgtga

SEQ ID NO: 12108 - DNA, 4029 bp, Escherichia coli
atgtggtacagggaaggtactatcacatttacacagggtagcaatactctggttggggcagggacagcctggaacgtaacagctaatggtgtgttgccggggatgatcgtcattggccccgacaataagctgtatgagatcaagcgcgtaaccagtgatacgaacattgttctctcagaaccttataccggcgaaactcagtctgaagttccgtgccgaatcattacgacctatgaaggcgacttaacacagtttagcgcgcgctttacagcactaatgtcgcgtatgtcggctgattccaagtctatgcgcagttggttgactgctctggatgaggtgacaatcgagcgtgaagacggtacagaagtaaccgttaagccgctaatgcagatcgtcaacgagcacaacgaaaacgttgagtggtataaaaataacactgacgcgattgatgctgctggcgacaaagctcgtgaggcggcggccagtgctgccgcagcagcagaaagcgccaataccgctggagaaaaagcctctcaagcgtctcaaagtgcatccgctgcggcatcctcacaaagtgccgcaagtgcgagtgcaactgctgcgaaaaaatctgaaacgaatgccgcagcgtcacaacaatcagcagccacttctgcatccaccgcgaccacgaaagcgtcagaagctgccacctcagcccgggatgcggcggcctcaaaagaggcagcgaaatcatcagaaacgaacgcatccttgagcgccagtagcgcagcttcctcggcaacggcggcaggaaattccgcgaaggcggcaaaaacgtccgagacgaacgccaggtcttctgagacggcagcgggacagagcgcctcagctgcggcaggctcaaaaacagcggctgcgtcgtctgccagtgccgcgtcaacaagtgccgggcaggcctcagccagtgccaccgccgccggaaaatcggcagaaagtgccgcatcgtctgcttcaacagccacaacgaaggctggcgaagccactgaacaggccagcgcagcagcgaggtctgcttccgcagcgaagacatccgaaacgaacgcgaaagcgtcggaaacccgtgcagaatcctcaaaaacggcagccgcatcgtccgccagttcggcagcgtcatcggcatcatctgcgtctgcttcaaaagatgaggcgaccagacaggcgtcagcagcgaagggcagtgccacgacggcatccacgaaagcaacagaggcggcaggcagtgcgacggcagcatctcagagcaaaactgctgctgaatccgctgcgacccgtgcggaagctgctgctgatcgtgctgaagagattgccggtgcagttgcgatggaagacgcaagccttacaactaaaggtgttgtgaaacttagcagtgctgtcgacagcaccagtgaatcgctggccgcaacgccaaaagcagttaaagcagccaatgacaatgcgaatagcagggtgccatctaaccgaaaagttaacggtaaagcactgactgcggatatcacattaacgccgaaagatattggtactttaaattcagtaacgatgtctttctctggcggggctgggtggttcaaactggctacggttaccatgccacaagcgagttccatcgtttacatcgcattgattggtggcgctggttacaacgtcggctccccacatcaggcaggcatttcagaactggttctacgagcaggcaatggaaaccccaaagggattacaggtgctttgtggaagcgtacagctgtcggattaacgaatttcgcctggatcaacacatccggcgatacatatgatatttacgttgagattggcaattatgcgacgagtgtaaatatccattgggattgtactgcaaatgcgacagtttctatttatacatcgccaacatattcagcgagtaagccttccagcgttaccgatggtgttgtttatacgatgtatagcacacatcagaaaccgacgccgttagatattggtgcactgccaacaaccggaggaacagtttcaggtccgttgtctgttactggtgggatcaccggaacattaaatggtaatgcaagtacagcaacgaaattgcagacggcaagatctatcggtggagttggtttcgacggttctgcaaatatcaaccttccaggtgtaaatactacgggtaatcagaacaccactggtaatgctgcaactgctacaaaacttcagacggcaagaactatcggcggcgtgagctttgatggtactgcgaatattaatttgccaggtgttaatacgactggtaatcagaatacaacgggcaacgcggctactgctacgaagttgcagactgcgcgtactattaatggggtgtcgtttgacggctcggcaaatatttccttgtcgccagcaaatataggttgcccggcatctcctactggttggttaactacaggaagtaatggcggagcaataacaacagcacagttagtgacgttattgcaaaataatggagcatttaacacaaagtcatggattgctcgatgtgcgtgggcctatgccaatagtgcaaccataccaaatagtgaaactggttgtggcgttattccattggcaggagctgttatagaggtatttaataacggtagtagctcaaacaattatacgatccgtataacaacggccacaacgacgagtgtctctggtgctctcactaatgcggagtttatctatgtatttaatggcacagattattctccaggatggcgaagagtatataacacgaaaaacaaaccaacagcctctgatgtcggtgcattacctcttaccggtggtacattatctggaggtttgacatcttctggcgagatcatttcaaaatatgcaaatggtttccgcattgcttacggtagctttgggttctttatccgtaatgatggatcgaacacatatttcatgctaacagcatcaggagacacattaggttcatggaacggtttgcgacctattacaattaataataccagcggtgctgtatcaattggtaatggactaaatgtgactggtggcgtaaatggtagtttgaacggtaatgcttcaacagctacgaagttgcaaacagcgagaaacatcaatggtgttaagtttgatggctcaggcgatatcaacattaatacattggtatctcgtggccgagttacggcgttaagcggttctactcaaggtactgctggcattcaaatgtacgaggcgtacaacaatagctacccgaccacgtatggcaacgtattgcacatgaaaggtgcgagtgctgctggtgagggcgagttgcttattggctggagtggtacgagcggtgcacatgcgccggttttcattcgctccagaagagataccactgatgcggcatggtcagcgtgggcgcaggtatataccgctaaggattcaatccctggtgtgaatacaaccggtaatcagaatactactggtaatgccgcaacagccacaaaattgcagacagcaaggaaaattgctggtgtggcgtttgatggctctgccgatataactttgactgcggctaaccttaatgcttacacgaaaacagaggtaacaaaccttctaagttcctatgtgaagagcagtgctcttccaagcatgactgtgcgaacttcctctgtttcaggtggggatatgggcatgagcttgtccgcattcattagccacctaaaatcaaatggggcgtttagcaaaagttattggattggatttggcgatgctatgggattcaatgctggcagtatcaacaatataacgggatttggtgctgtagaattagcagaatctataatcgaagtttttaatctacctaacggtgattatacaattcgtttaacaacgtcacataaagctgactacggtggagttacaaacgcaatcctcgtttatcactaccgtagtaatagaagtccgtcaggtcaatggctgaaatttgcaggtactgttggggcaacaagtaactga

SEQ ID NO: 12109 - DNA, 324 bp, Escherichia coli
atgtcgaacgagatggcgggcgttacaacagagcaagttgagcgtattgccgcgatcgttgctcgggaggttgttggtaaattaggtaaagagctacgtgaagaaattggccaggaggtcaatgatcagctgaaaacctactttggtgatatgaccccggcgcaacatagtattcaacactccaatctggacaaactccttaaccggttagattccatctccagtgggttctttggcggcattgtttctaaaataacgtcgttcattattactgcactgcttttggggttagccgcgtatggcgtaaaaaatggactgcaataa

SEQ ID NO: 12110 - DNA, 693 bp, Escherichia coli
atgaagactccgagaggcattcgtaataataaccccggtaatcttgataaaggatcaccgtggcaaggtctggttgcgaatccagacgaaccgcgcttttgcacgtttaaagaccctgtttgggggattcgtgcgctggcggtgactctaattacctaccacgacaaacgtcgcgcaaaagacggctcaagtatcgataccattcgtgaagttattgaacgttgggcaccgccgaatgaaaacaatactgacgcctacattaatgaggtgtctaaagccgttggtgtaaccgcagacatgatcatcgatctgcatgattacgacatccttcgacctttggttgaggcaatcattcgccatgagaatgggcgaggtccgctaaaaacgctgaacacctggtatgcggcagaagttattgaggaaggtctgcgtcgagctggcgtcgttaagccggtgaaaaccgtgaaggctgttcctgtaactaaagaaaccgcaggcgcaactgtcacagcaggtattggtctggcgcagctggccgatgttatgccgcaggtttccgctgctatggataaagcacaaggtcatatctctagcggggatacagtacgcatcatcttcggcattgccactatttttgtggccggattcattgcctggtcgcaggtaagaagacaccagaaagggatggtctaa

SEQ ID NO: 12111 - DNA, 252 bp, Escherichia coli
atgctaggcagcctgatgacaaagctaaaagttgctttgattacgctggctgccgttcttttcgttcttgtcggcgcttacacgatgggcggaaatgcggcgcgacgagcaatggaagagaaggcaaaacaggaagacagaaaacgacttcaaaacacagtgaaagtggtgaatgagacgagcagtaaaatacgtcagaaagatgcttctgccgttcatcgtgagttgtatgataagtgggtgcgtcattaa

SEQ ID NO: 12112 - DNA, 522 bp, Escherichia coli
gtgagcaatacaacgatagagattttctctggagagaaagattatgatctaaacggttttgattgcggcgaagagtcactaaacgcctttttagccaaccacttaaaaaggcagcatgagggaaaaattcttcgtgcttatgtgctttgcactcaagaagaaaggccaaaagtgttaggatattacactttgtcaggtagttgttttgaaaaggagtccttaccttcaagaagcaaacaaaagaaggttccttatcggaatgttccaagtgttactttgggtaggctggctttggacaagtcccttcaaggtcaaggatttggctcaatgcttgtaacacatgcaatgcgcgttgtgtacaatgcatctcttgctgtaggcattcatggacttttcgttgaggcgttaaatgacaaagccaaggcgttttataaaagtttaggctttatccagctggttggtaacaacgagcgttctttgttctatcctacaaaatctatcgaaaaattgttcgaagaataa

SEQ ID NO: 12113 - DNA, 306 bp, Escherichia coli
atggccttcctacatcacggccatcaggaggaatacatgtcagcactaaaaaagcagcgcatcgatttgagattaaccgatgacgataaaagcatcatcgaggaagctgccgcaatgtctaaccagagcattactcagtttatggttagcagtgcatctgaacgtgccgtgaaagttatagagcaacaccgtagactagttctgaatgaagaatcctggaatctggttatggacgctataagcaatcctccggcaccgaacgacaagctgaaacgagctgctgatcgtctgaaaagcatggagtag

SEQ ID NO: 12114 - DNA, 669 bp, Escherichia coli
atgaccaagatctttgtggttggcggcacaaagggcgggcctggcaaatccaccgttgcccagcaaattgccgtttgcctgaaagtcaaaaagaagaagaaggtttatattaccgatatagatattcagcgcacgacaacgagctggtgtgaagaccgtcgacagaacgaagaccttgagctgattccttttgcatacgttcaggatgacatcattaagcacctaaaatcgcttcagggtagagctgagtttgtagtggtagatgctggtggcttcgactccgaaattcagcgacaagcgatgctgatggctgacgttatcattatcccgctgcgtcctaagcgtcgtgatttgaaatctttacgtgacatcgatcctattatcgacaatgttcgcaatgtaaacgataaagtgaaggtccgcgcggtcatgaaccagtgcccggctttgccatcacaagtgtctcgcattctggcggctaaagagattgttgagacgtttggaatcgagtctgcgccagtcaatctatataaccgcaacgtctatgatgatgcggaagagtctggtcgttctatctttgaaatgaccggtagcgagcgcgacaaaaaggcggaagccgagtttgaagaatttgtagattatctgttgagtctggaggaagaagaataa

SEQ ID NO: 12115 - DNA, 360 bp, Escherichia coli
atgtccatgaaaatgggtgacctagcaaagcgcaaagagcctgatgcaccggctaagaacacaactcctttgcgccaaccagtcagaccacagggacgcccgactcgtggcaaagagaaaattaaaagccgcacaatgtcactggaggacgaatacttcgaactgctggagatgatgaagttcatccctcgcttcgagaagttcactcgttctgacgtgattcgagcagccattttccatctggcagagaagtcaccgcaggaaatcgaggacatcgtgaaattgaatgaggcgatcaccgctgccgatgtcacgatgcgtaccgatgaaatcaaacgagagttgatgaagaaaggttaa

SEQ ID NO: 12116 - DNA, 768 bp, Escherichia coli
atggacgatttatcggtatacgcgagatcattggataaggctaaatactatgtttactgtctctatgatacagaagacaagatgaaaagaccgttttacataggaaaaggcaaatcgactcgttgtctcgatcacatcaagtatcccgatgactctcccaaatccatgcggatcaaagaacttttggctaataaaaaattaggcatagatattcttcgtcatggtatggatgaaaccacagccaaacttgttgaggcgacatgcatcgaccttatgggggtcggagagcttacgaataaggtacgaggaagtggttccatgatgggcagaatatcactggacgcctaccatcacttagtgctgcaagaggaaactgaaattgctcctgagcacgccggtcttgccttcctgctaaacagcacctacaagtcaggaatgtccgctctggcattatatgaagctacgcgtggcgtatgggcaaaggttccaagagacgagaatctcaaatatgcctacgctacatatggtgggctaataatggaagtttatcagattgaatgctgggtcaaagccggttctcagcagtactttacaagggatatagctcttggccccgacacaaaacgttatgaatttgttggcagaatagccgatgagcatattagaaaactgtatgtaggcaaattaatcaagaagccaccaagctacggtagcccttttgtgaaggttggggtggttaggactgaacatagtgttagcgcggcataa

SEQ ID NO: 12117 - DNA, 741 bp, Escherichia coli
atgagccaaatctttttcgataccatcgacaacgaccagtacgacttcatgacagagtggaataccgctgttatggacaagtgggtcgctgaaaacattggtttgtcgcgctgtaaagacgaggctgaactcttcgagacgaagtggtttgattaccgcgacatgcatcctctcatggccacctgtctttttacggaggcatacaaacgtcagtactcaaatatcatgctgacgcacggtcgcgaacactttgaaacagctccgttcaccaccgggttaaaacgcctgccttatcaggagttgtcgactgccaataaaacgtcgctatggaaagcacgccagtttgctgaccgctattgctgctcatacgactactttatctccaccgttctttccgcagctgcacgacgtctgtgggacaagctgcctcgcccacagcatttgtggcagccagaactgattgagatatttgaagagaaattagccagacgcgcaacaacccgtctggatgactctctggttagctttaagcatataggagacatgcagttcaacccgatccaggaaagctattttgagtggattctggagcgtttgcgcaccatccctcgcagcaagcgcatacgcgcaattttctccgctatctggctaatggaaatcgttccagagcgccttatttccgaccactttccagaagaactggaagaagcacggcggtttattgatcccctatctaattaa

SEQ ID NO: 12118 - DNA, 1341 bp, Escherichia coli
atgaccgaactttgccatacaggacgcgggctgtccgaagagtttgatgaagatttccagaacagactgacggcatatttttgtcgtgatcacgagtttcttactcgtgcgggagatctggttgtgcctagccaatttgccaatgcggccaatgccatattggttaatatggtttcgggctattaccgtatgtacaagagcgcgccctcttcatctgcaattctggatatgcttaagcgtgcgaaacgcgataagactatccgtgaggaactattcgccgatgttgttgctgcgtttaagcgcattcttgcagaaaaattgtccgatacctcgtacatggttgaccaggtatcaaccttcgcaaaaagtgtagcgtttgatgatgctctgattaaggctgctgaactgaaagagaaaggcgactttcagggggcgatggcaatcatggccaaggttcagcagattggatcgaacgaagcgaccggaatctatgactactacacctccgcaagtgagcgattgaaagcgcgtgaatatgaggcttcagaggagtatgtaccaaacagtattacaactggactccctcttctcgataggttgctgtaccaaaaaggctgggcaaagcgcgaaatggtgctcttcatggggttcgctaaatccggtaaatcgaccgcaatgggtgagttttccataaacgcaacgcttgctggctacaatgttctgtatctctcgctggaggttcacaccaccattttatccgaccgttttgatgcaagattgtcggagacggaaatgtccaagctggtggaacggcgcgatgaggttcatcgtaagttggcagagttgggagccacgaaggggattggtagtttgtgggttgtcgagcgtccgtcaggaagtatgtcaccggcagacctggatcgtatgcttaacagcatgaaagccaatggcatggtgcctgacatggttgttgtcgactacgcagatttgatgcgtgccagttatgaccttcgtgatgatcgcgccaacattcgtagtatctacaccgatttacgtgctctttatgacaagcataacgttgctggtatcacggcgtcgcaaacaaaccgtgaaggtggcgcgtcagaagttgccacaatgatgcacgctgccgacaacatcgaaaaagtacgtattgctgacctggtaataacgatcaacaaaaccgaagaagaagaagcgaaaggagaggctcgtctctactttgctggttcgcgtaaccagcagggagggatcagcattcgcgttaaacaaaacctcgaacaaatgcgcttcattgagcgaatcttagacgttacctaa

SEQ ID NO: 12119 - DNA, 1116 bp, Escherichia coli
gtgagcgagctgaaagagctaattaccgaattagattttgaacaatggttggatactgaaggtatcgtttatcgacgtggaggcgtgagtgctcgcggtcgtgaagtgaatatcaaggagtgtccggtatgcggcagctccaactggaaggtatatttcaatctgaccagcggcgtaggcaaatgcttcgctggtgatcatcccgaagagattcagttcaataagctggttttcctcaagcactacagcggcaaatcacgacgacagttcgaggaatatgtgcagaacgctcttctttcgcaggggtgggcaccaaagaaagaagagatagtgcttgcaagcacagtcgagttagaggggccacttgcactccctcgtcattacgaacttcctatagatggccgtcttccagactatctggttgaacgaaacatatcgcctgaaatggcaaagtattttgacctacgatgctgcgtcgaaggtaagcacgcctatgtagatccgtatacagatcaggttaaaggacagatattcgatatgcgaatactgataccggtttacgatctggatggggtaatgaagacatttcagggacgagacattaccggtacagcagaacgccgctacctcttccctatgcagctgccggcgtcgggtaagtttctctacaacggccacaacgcagtcgggaaacaaacagtcgttgtgtgtgaaggggcatttgacgtaatgggcgtgaagcgagccatcttcgacgaaaagacgctgagggattatgtagagccaattggcacgttcgggatgcacttgtccggaaatatgaatgaggacgctgaagatcagttgggcgcgttcctgacgctcaaggcgcgtggattacgcaacgtcatcatgatgtgggatagcgagaagcaagcgatccgcaacaccatgtcggcggccaaacgcctcaccagcatcggactaaatgtcaaagtggcctgtctgggcgaagaaggtctcgaccccggcgacgcgacgccagagcagatcctcaaagcctattatcgtgccaagccttactccaaacagctggagttaaaatgcaaagtgctcggtatcaagtcactcgtgtag

SEQ ID NO: 12120 - DNA, 1053 bp, Escherichia coli
atgacaacgttgtccaaaaacgtgatgcaacacaggaaggtattgaaagaaactggtttggcgtttgccaaatctataccgcttgttggacctcatattgaggcagcggaaaaaatgttcacgttgttctcagagataaatgcgacgacttgtcgtgatcgattcaaccgttacattatgggcattggtgaaatttgcgacgatgaggtcgatatctcaagagaacacttttcggcgttagtcaaaaagctcgtgcttgatgatgaagacaagaaaacagaatactacattcgcttgacggtaagcctagcccgcagcagccttaacgacgatgaaaaactattttttatccacatactgagtgggttaacctgctttgatattgaatatgcgcgcaaactttacatcacaacaagctcgccaataaaaggctataaatcaactgtattagcccaagttagcctcacatcacaaaaaagtggaatggctctgagatcgctaaataagctcataacctcgggtctcgtctacgaagacagggctggcgagatccaagcgaaccccatgttcaaattaacagatgaacttgagcgtcttttaggatttatttttcacaaggatgatttggagcctgaagctttatctattgagccaaaggaagaatacgacgtcattatcattgaaagcagcgaaatctatagtggggcatatccaaacagcatttatcgtagtttgaaagccgccggcattaaggtttgcatagaaaaaaatgaagactgcattacaaccaagctggcaaagtacttcatctcagtcaaaacagggagcggactcaatggtgaaggtgagtggattgaatttgggcaaatttacgtcctcaaacgcctagattcaagcagtaaacgtttctatgaaaatgagcacagtgagacagtcagtatcagcaattttaaacctaaggataacgaccaaacatatgatgcaagtttgctaaatatagcactaaataatatcgcagcgtttgtcctgaaccgtctgtctcccacaacttaa

SEQ ID NO: 12121 - DNA, 795 bp, Escherichia coli
atgaaagcagatattcagaagtccgttaccgaaatcatcgacaaatcaggcgtagaaattgatacagaagagcgccagaagattatcgatgaggcgatccagactgcgctggagcacatcgccacgtctgtgagcaccgcacctctttcggaaggctcgaaatacatgcgggtctgggttcgttttggggagtccccggagctgcctggtgttaaacagaaacgcgcggcactcgtggcgttcactcgcaaaatgaaggacgcaacggtcgaagtacgcgccggtgcatggtacgacggtcgcgttgtctacaccaatcaggcagtgtgcgatgaaggtgaacggtttgaggaaattgtcgacgcgactcttcgcgcgatcaaaggcagggctggcgtagaggatgatccttctatcgcggcgttcctgagcattgtcgaactgcctgaagttaccgaacgcgttacagatctgacaaccccacctggtttgctggagttggtggtcagtggcgataccaaaaaagccgttgagcgcattcgtgaggtggaatacggcatcatctgcgatatgtgccgcagcgacttagacctggtgcgcatcattgtcgacgcgggtcagacatgtgacggtgtgctcgccagttttgcagggcaggtggcacgcctggccaacgagctgccgatgattaaacaggaggcaaaatcctacgccgtccaccatgccaacgatttactggaaccataccggttcgaagccgctcaggacaaaatgactggctgggctacctggtaa

SEQ ID NO: 12122 - DNA, 246 bp, Escherichia coli
atgatggtcgaagagatccgcaaaggcgaacagctctacttcatcgatatggctgcgcttatcaaagaagtggaagagcaaaacgaccacgccagaacgcttacccggaagcgcaacaccatgacgattcaacgcacgaagaaaacagaaccagccaaacccgaaaccacgtccaccgattcactggcgcctgtcactgacgtgtacgcggcactcattgaagaagcaaccaaagaaaacacatga

SEQ ID NO: 12123 - DNA, 1323 bp, Escherichia coli
atggaaaaactgatcgccctaaagcacaagctggatgccataaaaacgatgggaaccaacgccaaaaaagaggcgctggccaaccttgatgaatttgagcagagcatggtctcgctaatgctcaacccattcattcgattcggtgtgaagaagtacaaagtggtcgagccactcgatacttccgtacccatcgaccagaaggtagtcgagctgctggagaagctggcggcgcgcgaactgaccgggaacgcggccattactgctgttgagtctatcgtggcgtcaatgtgcgccgatgggcaggacgtgttccgtcgtttcctcttaaaagacccgaaagcgggtgttgggattagcctatgcaacaaggtttttgaaaatcccattccgaaattcgaggtgcagctggcgtcaccgtataaagaaaaaggcgacaaataccccttcaagccaaaccctaaagcaaaatggcctatgattggcagccttaagctcgatggtttgcgagtaatttgcgaggttattgttgacgaagaagaggttaacttcctttctcgtactggtaatccaatcacgtctctcgatcacctaaagccagccatgctcgaattaggcaaactttcaggccacaaacacatcttcttcgatggtgaaggaactgccggttcatttaaccagtccgtatctgcattgcgcaaaaagaacgtgcaggcaattggcgctatttatcatgttttcgacttcttcctaccggaatggcgggcacaggctaaatccaaagagtatgcaaagacaggtatgaagctgaaagagcgcctggctattctcgtggcgttgttcaaaaacgatcgcagtgaaggctacacacaagacattcacctgcatccgttctatatcatccatagccacgaagacttcatcgaacgcttcatgaaacgcctggacgataacgaagaaggggagatgggcaaagatccgaactctgtttacgagtttaaacgtacccgcagctggtggaagttaaaagacgaagattcagaagatggtgaaattatcgactttgagccgggcgacccggactctggttttgccaacacgcttggaaaaattgttattcgccttgaaaacggtgtgattgttcgtgcgagcggcattaagcataaatatctggacgagatctggaacaacaaagagaagtaccgtggtcgtattgtcgaggttcattgtcacgagaaaacgccggatggcagcttacgccacccacgactgaaatggcctcgttgcttacgcgataccgaagatcgaatcggagataaagaatga

SEQ ID NO: 12124 - DNA, 216 bp, Escherichia coli
atgatcgtattaagtaaacgggagaaggaaacgcttcatgaaatcagtaagtggccggagttccctgagtactggaagcctaaaacgcgagctaagttagagcgtttagggttggttgcaaacgtttctgaaacgtggtgttcggccaactaccagttaactgataaagggaaagtattgctacagcaattagtagaatcaggagcgttaaaatga

SEQ ID NO: 12125 - DNA, 153 bp, Escherichia coli
atgattccatacatctcattagcttttatgggtggcttccttatcggcttcggcatctgtcgtgatttaattaagcaggaacttaaaaccaaaacactgtgcatcggaaagcgtgtgtatcgggtagttcatgaaacaaaggttagaaaatga

SEQ ID NO: 12126 - DNA, 291 bp, Escherichia coli
atgagcaatttaacttcttgggactggtggttggccacctatttcttagcggccggagtcgcattcgccttttacgtaggtcagttagtcgtaaaactgttgctgattaaatttgctagtcataaacgtatcgatgatggtctgtggcgtcttggcaccctggtggaaactcgctacgggcaacttaaggagaacgaaaccattactatccaggcgaaacgattcactgccaccatcacaagaacacctagtcgtagagtggccttgatcaaaaaagtcacaaccgaataa

SEQ ID NO: 12127 - DNA, 1263 bp, Escherichia coli
atgccttttttaattttcattattatactactgctcaccgtgattttttgggattgggttgttttaaatggtcaaattgttggaacattggctacagcatttgcttttatagcaacagcatggaatgcctacgaagcgagaaaaagtgcaaaagcagctttttcagcccttcaattaacaacagaatcattgttcgaaatgcgaaagagtgcatttaaacaatggtttgattccttattaaatcaacatgatgagctatgtcttcttgcaaaacaaattatcgataaacgcaaaattaatttaaacagcgatgagttaaatagactatattacccattggtaaaacagcatgaggtaatacagtatgtgaagcatattattaatatttttgagtatgtggatagttcattttatattgatggggaatgtctaaaggaaaaaagagcgtatgtgtcacaattaattttcaaaatcccacctcagatgaagttgatcattgctatctttggattaaagatcgattattgtgaacatattaattcgggaaaactgtgttgtttattaaataaatatgattttttcaatgatgaaatattttttgatgatgcttattcagatatgccttatctggatgcattcataaaccttagattcaacaaaatattcaaatctcgaatgataaattattttgataatatcattaaaagttattatgttccatcggacgttaaaagggactggatgtttcgagacccaaagctcgtaccgtcggttcttatgaattataaaactccttgttctcctataattaatgattactttgagaagttgcctttacatgtaagaaactactttgaggaactacttaaaaccgcgaatgatagagttactcattttgacgtttacatcccacgccttattggttgttcaatcgtgcaacattacgaagatgtgccttccgaaaaaaacaggttaaatgacaggaatgatgtaatagctatggctgaagattacatcgagaaaagaaaatctaatcaactaaattacatacttgaagatatatacttcaagagtgacgaagatataatcccaggccaccatttgattgtggcatttgatgactatgaatttaaattatcactcattaagataaatgagaataaagatagcgataatcttttaaatcgaatttatactgaatccagtagcatggttaaagaatataagcgcgaaatattaaaactgggcgactatgtaaagtaa

SEQ ID NO: 12128 - DNA, 246 bp, Escherichia coli
atgacgatcactatctacggacgagataactgctcatactgcaaacgtgcggtcgagctggcgaagcaactaaagggacatggctacggtgattatgagtacatcgacatcaccactgccggtatcgacaaggaaaaactaagtgaaattgttggtaaaccggtagagactatcccccaggtgctgatcgatggccagccgattggcggatacacagaactggctgcatacgtcagcaccctctga

SEQ ID NO: 12129 - DNA, 1023 bp, Escherichia coli
atgcaggccgttatgatctcccaggtcagcaatgacatgagattctcggacgcattcatgttattcactcgcttatctctgctgataaccagacgtcggccagagatcgctgttcattgtattttgatacatgttttgccgcacattgccgatgtaaaagtaagtgacattaataggttcatggtgaaccaactggtcaacccactaatactggatggcaaaattgttatgggccgccgcgttttctctctgatgaagcagttccttagctggtgcgccttccaggggatgatagacgtgtcaccgttaaacgatatgtcacttaacaaagttgccggtggcgcaaagcccacacctcgcgagcggaagctgaccgacgcagaggtatgggtgttctggaatatatgggactacttcaatgtgtgtgctggtacaaaatgggcggccaggctatgtcttgtatccgcaagacgacctgacgaagtactgcgggctaaaaaaagtgagttcaatcttaagcgtggggtttggaatcaaggcaagaggaacaaatctgcccgtgagcattctctgcctttaagctcattaatgcgcacttgtattgaagagttgttcgaatatggtaaagacagccagtggctcgtgccttcgaataaaaaaatcgggaaagaccttcctatgtctaaagtggcaatagcccaggcattacgtcgtattctggaacgaccagaactgatggagcttgagccatttacaccccgagatttgcgccgtactgcgcgtagttacttcccagcattaggcataagccaggaggtatcacgtaaaatcatgaaccacagtcttgaggggatagatcgggtctacgaccggcacgattatatggacgagatgcgagacgccttagaaagtttctcgacgtacatcgcatcaatcgtagagcaaccggatttagacgaaattgaccacaaatttaagggagatcgtctatcaacagagcttattcgtgtaaatttttcatag

SEQ ID NO: 12130 - DNA, 387 bp, Escherichia coli
atgtctgataacaagattgaatttatagaaagtcgctacgctgcttttatcgcagggttgattgaatcctcacctatgagccaggcccagatagccaaaacaattgggtataaaaacgccaacaacctttctttaattaaaagcggcaaaattcctttgcctatcgataaggttcgtccgctggcgctggcactgggtattgagccaagtcgtcttatgatgatggtgctggaagaacgccaacccgaactcgcagcatttttatacaaagaaggcactgctcctcttaacgaggacgaaaaacaggttcttgctgcatataacgagcgattcggtaaagagaaaggcgcatcacaaaaggttgttgaggccataaagtctctatga

SEQ ID NO: 12131 - DNA, 213 bp, Escherichia coli
atgaacaccactatttccagcctaatcgctcttgagatcggacacgtacagaaattagctgatgagtgtgtagctgacatcctcaccgatctaccgaatgagcagattcaggttggtgtgaatgacacaactggatttatattcgaacttaacaacaaacgcttcacgcttctcaataccggctccgggtctttagccgtcagaatctgttaa

SEQ ID NO: 12132 - DNA, 2109 bp, Escherichia coli
atgtctaaaaaacgttccatcaaagaggttcaggacttccgtgacagtgtaaaacgagtagtcgctctcctttcaggtaaaaacatccctgttgcagaacgaggggacgacgcttatgtacgctataacgatgatggagagccaattctcgtaaacatcccatcaatcccggataacgcaacaccggcattgatgaatgctgtgcgcggatttctcgatcatgaggttgctcacattttgtttaccgatattcgtgtgtccaacaaaatgagagaaaaaggacgcgttccttcctggtcgctatggaatgccttagaagacgtgttcatcgagcgaaaaatgggtcaggtctttaacggaacaagacgtaatctgatggcaactcagcgccttataatcgaaaaagtctttaaaccaaaggcttcagaggctattgcttattgtggcaaagatcagcgcgcgctttttctaaacttctttctctgtccggttgtaagagcctgggatggccaagcaccgttcgtagatttcatggatgaatattggcctgtcattgagaaaccaatttcattattaaaagaacatggtatcgatgtggccgtgcgtaacatgtcttgcaccgaggattgtgtaaaggtggctgcgaccatagctaagatcctcaaagacactgaaagtgaaagcaaaggtaaggagtcagctccgggaaaaacttccgatccttcagacgctgaccagacggatgcctctggagaaaacaatgaagacaacgaagatcatgagacaccctcagcgttagataatcacaaatctatcaaatcagaatcacacagtaagcacaaacatgataataacgacggtgatgattcagataattctgaatcatcagaaacaatattcgatgatacagaaaatgataaagaggtatcagattctgatgcttctgataacgcggtgtcagaatcatttaccgctgaccacgaaaaaagaaaaacgacagaagacggctcttcagatatcccaactccgtcaaaaatgagtctggaagaggctttagaggagctggatagcatagaagatgaagtcggaggcatgacagaagatgctctatccgaaacgattaaaagcgagttaacagaaagctcgaaaagcgaatacaggccatacaatcgctcatacgacttcatcggctcgattgatcaggcagaagcccatatcaaacggcttattaaaacattctccgatattgatttaggaggatatccaatcagccgctatcgcatcgttcctgaaggcaaccagctcttcgacaaatatattgaaaagcatctttcgtcaggtgtttcgtcgacgctggcaaaagacctggagcgagcaatagcaagcagaaacagagttcagtttataccgggccagcgtcgggggcgcattcatggttctagtatctacagattagcaatgaatgatgatcgcgtgtttcgtaaaaaagaagaatctaaagccgttaacgcctgtgttcagcaagtgattgatttatcaggttcaatgagtggtataacgatacaattggctcttgcaagtgcatataccatcgccgatgcccttgatcgaataaatgttcccaacattatcaccggcttcactacatttggtagtcatatggcggcaggagaacttaaggctgtcaagtatgagttctctcgctttgaatctttaatgctacctatcatcaaaaattggaatgaaaaggtaaattctcgcgaagttcgctcacgtatggggtgcgtaggctacacattcccacttcttaataacgtggatggtgaaagcatagccagccttgcatcgttattttccggtcgcatggaggacaggaagatcatgcttgttctgagtgatggcgcgccgtgggctgttgggagaggttttgacgctcatttgcgttcggttgcgaagcaaattgaaacgcagactgacattgatttgatggcaattggcatcatgactgacgcaccggagagattttactcaaatcatgccctggtaacgagcgttgatagtcttggttcatctgtagttactgaactatctcgtatcattttaaagtga

SEQ ID NO: 12133 - DNA, 1236 bp, Escherichia coli
atgactactactgcactgcaaaatgaaaaaaatccttctgattaccttgtttgcaagtggtgcggaaaatcatttcactattttaagtcccatgttgccaatggtaattgcgagggcattcctgagtcagtaaaagatgccgatcctgacaccgtactgaaaatgtacacaacacagtttccagatgagccaacgctatcgaaaaaggcacttgatgcaattcaagctaaacgtgccgagcaaaaaagcgaaatggccaaatcatctggcgtgaccagtagcccaggctacacaggcacagttgagtacaagacagatctggtcgcagctcacgaactgctaaatgtaacggtgaaagaactcggaacaaaacgtgggacgccgctcatggttagcgtcaacgtcaatacgccgtttccagagttcgttccagaagtgaagaagggatacgtatatggcgacttcgaactgatcaaagacattttcatgatgcttgaacttggcatacctggctatttgtggggtcatgcaggaacaggcaaatcgtcattgcctacacaactatgtgctttgctcaatcgtccgttgatccgtgcccaacatacagcatcaatggaagaggcacatgttacggggcaaattctggcgcgtgatggctctacgtatttcgagcctggcttgcttgcgctcgcaatgaagcatggctgggtttacctcgcggatgaatacgactttgcgtttccacaaattcttggcgtgtatcagccagtgctggaaggtgaagcgttagtcatcaaagaggcgactccagaatggcgtcgcattactccgcatgaacggtttgctttcattggcactggcaacacgaacggatctggtgatgaaaccggcttgtaccagggtacaaacatccagaacgccgcgaacttttcgcgttttggcatcgtttcgaatgtgaaatacatgagcaaagaggcagagatcaacatgttgataaatgccggtatcgtggatgaatacgcagaaaagatggttaagtttgccggtatcgttcgcgatggatacgaagaacaccttatcagtcagccaattggccctcgtgaacttttgttgtcggccaagattggaatgatgcgaggcgactttgtgacaggtattgagcgttctttcattaacaaactcccttcagcttctgcacaagcggctcgtgaagttgttcaaaaaatatttggttga

SEQ ID NO: 12134 - DNA, 3519 bp, Escherichia coli
atgaaggcactgatggttcgaactgacttctcacttggggagtcggctttaaaagcagaaaacgcggtgaagattgccagagaagctggctacaccgctgtaatttcagcagatagcatgaatattgcgagcgttattccactacaacgtgccgctggtgacgacatggcggttatttgtggtgtgaaactaaacatcgttgatgatcccacatacgagcaccgggctaaacttgctaaagagtctaagggatgtatggaatcattggagcgaggacgtaactactcgtttaccgctctaattaaaaatgagaaaggatatcgcgacatctgcgaactaatgacggcggccaacacacgagaacagttctactttgtaccgcgtctctcgctcgaacagttggtttctacatatgccaaaggcaacatcatcctgcttacttccgacatcggtagcgtgttccaacgcaacgattttgcaaaaatcataagcacactgattacagcgggtggaaaagacaacttctatagtgtggtttatccgcaccctaccccattctacgaccagattaacgtccgggcgatgaaagtcgccagcgcattgaaaatagagccagtggcgttctatcccgcttattacgaatcgatcgacgatgcagacattaaagacattgcgcacatggttacgaacaacataaaaatcgaccagccgcatcgtctgcgtatcccccaccagcgagataacgccatcaatggtcgtcgccatctccttgaggcgcttaaagccttctccgttcgcatggatgtgccggtaacagctgcaatggcctcaacaacgcaggactccattatcgatgcctgcacatggcgctggcatgaattgccaccagcactgcccaagatggcagacgacgaacctgcaacgctgatgaaactggctgttgcagggctgcgtaaacgtcttaccacaaaagagtttggatacacaccacctgcttctgagaacagggtttatgttgagcggctaaagtacgaaatggacacgctgactcgcctgggattctgtggttacttcctgatggtacgcgatctgatgaatcacagccgtgaaactggcattcctgtcgggcctggtcgtggttcctctgccggttctctggtggcgtggtgcataggcataaccaacgtcgacccaatccgtcacggtcttctgtttgagcgtttcatcaaccctgagcgtctcgacttgccggatgcggacttggacttcagccaggcacgtcgccatgaggtgatcgagtatctgaatgaacgctacggcgaagattacgttgcaggcattccgaacttcacctatctgggcgcggcatctgcgctgcgtgacactgcacgtatttacggtgtcgatgctgcggatatggcggtatccaaagagttcaagaatatggaggacgacagcctgtctctggaagagctgcgcgagcaactggccagcctggacaaatacgccacgaaaaacccggaagcgttcaaagcggcgtgtaagctgcaaagcctgatgcgtggttttggtcgtcacgctgcggggatgatcgtcgctggcgttccattagtagagcgcacgcccgtcgagctgcgtggcaatgctcgatgtattgcgttcgataaacgttactgcgaggcgatggggctgattaagttggacgttctcggtctggcaacactcgatcttctggatagcgcgaaacgctacatcaaagagagtaccggtgaagacatcaatctcgacgctatcccactggacgatcgcaaggttctggatgggttcgctgcagggtacacgcagggcgtattccagctggagtccggccccatgcgtaagctgcttaaagatctgggcggtggcatcgagccaatgagtttcaaaaccgttgtcgcaactaccgccctcttccgaccgggaccgattcaatccggcatgttggatgactatgtttccgttgcgaaaggatttatgacgcctacatcactacatcctgtcttggatgaactgacctctgaaacaaatggagtgattctctatcaggaacaaacgatgaacgcaacaaggcttcttgctggtttcacaatggccgaggcggatggtgtgcgttcagcaatcggtaagaagaacatggaaaagatgaggagcatgggtgagaaatttgtcattcaggctcaagctgggtggatcgacgtagagcttgaaaatggcgcaatacaacggattcatcgcgcagaacattttaaatgcgaggacggtactctgaggacagttgaagaggcgttggagcatggagtgaagctgccaatgccagttgtgcgcgttacaacgtcacatccaggtctgtctgagacgaaggcaaaagagatatggactgcatttgagaaaaacggagcctatcagttcaataaatcacactccgttgcttattctttaatcagttatcagtctatgtggctaaagacgcactaccctgctgagttcttcgcagctgcgctcaccattctgggcgaggataagcatcaggggctggtgaaggatgcgctgacctatggcattcgcgtattgccaccagacgttaatgtgtcatctaaccgaattgagatccgcacactcgaagacggcagtcaggcactgtatgcgccattctctgctgtgaaaggctgttctgaaaatggttgtcaggcaattatgcgtgcgcgtgagaaagttggtggcaaattcgagtcagtggcacaattcgatgaagcggtcgagaagcgtgcatgtaacagtcgtgtacgcgagtcgcttcataaagtaggggcttttgcgtcaattgagccaggcagtctgccagcaactgatcctgaacgactgcgcgaccaggctgagctgatgggcaatctcatcattgacgctgttaaagcatcacgtccgttcgaaatgaatcctaagcgttctgccgaaatcaacgtactcatgacacgtatggcggctgaaatgggcttgggtgaggagttgatacgcccgactattggtattaaacccaaaatcatgatcattctggacaatgcgaacggcaatgacgctcgtaccggctacttcatggagaacggatacgacgactttaaggcaaaactactgacagttggagatctgcgcatgggcgatctttatgtcacgggtgtttgtaagaaggttaaggacaaagagaaagactataccaaagacgagataggccagttcacagactttatgcgggaagaaattaatcttgtacgaccaacctacattttgacgtgtggtagtcgttcaaccgcactatttaacaataagagtaaaccatcagatctgattggtcgtaaggagtacttcccagagcttgatgcaaccgtcttctacggatttaacccgaatatcctgtacttccgaccggaagaaggagagcgactggaggccattctggctgatatcgcggagacaataaataagtaa

SEQ ID NO: 12135 - DNA, 216 bp, Escherichia coli
atgtctaataaaatgactggtttagtaaaatggtttaactctgataaaggctttggctttatttctcctgctgatggcagtaaagatgtttttgtacatttttcggcaattcagagtaataatttccgcactttggaagaaggccagcaggtcgaattctctatcgagaatggggctaaaggcccagcagcagcaaatgtcgttgctctaagctga

SEQ ID NO: 12136 - DNA, 564 bp, Escherichia coli
atggcgctttataacttcactctgacgctctcaggcgtatcgtatgagacggaaggactggaagacgcgctgtaccaaaacggctgtgacgatgcgctaatttgcgcatatggaaactccgtctatgtagaatttgaccgcgaagcacaatcacttgatgcagctatcgcatctgcggtcgacaatattgaatcagccggtatcggtgcaattgttgaatccgtcgactcggctcttgtgggcttaagcgatatcgcggaactgacagacctgtctcgccaggcagtggcgttgctcaaagacggtaagcgcggaagcggcgacttcccttgccctgtacaacgcataaaaggccagtctcctctctgggattgggctgatgtggctgaatggctcatgaataacggacgacttaaagagggcgatcaaattgtccaaaatgcccgaactttgagtaaatggaatctggcgcttcgaaacagcgtctcgaaagatttcaacgaaatagagcaaattgcggagaaactgattaaacgccgcaaagatattgcgaaatgcgcataa

SEQ ID NO: 12137 - DNA, 225 bp, Escherichia coli
atgaagcaacatccgaataagcatattcaagcagccattgactatgcattaagtaaaggctggatctgggtagcagctggtggtgctgcacattgtttttgcagactgcgatgcggtaatccagaaggtgaacacaaaactcaccaaatgagcgtatggtcgactccgggtaatcccgaaaaccatgccaaacagatcaaacgaatggttgatcgttgtaaatga

SEQ ID NO: 12138 - DNA, 432 bp, Escherichia coli
gtgaacactgatattttttctaaaatcatggccgatctggagttcgaccgcgacaaccttgaggaagtatggcgtaaacagccacggcttttaatggagtatgggtcaaaactagcgcaggcagatcgagatgtcgcagaggcaaaacttaaccttgaagctgttgaagcaaagctatacgacacagagcgtaagaacttgagtatgaacggcattaagttcaacgagtctgtactggacgctaaggttaaaacaaacccacagtatctgtctaaacggcagaagttggatgaagcacggcacatcgcagacatatacaaacatgctgtcgccgccttttcgcatcgccgagacatgatcgttcaggcgtcaaagatggccatcgttgaattagagcgattaggctctgaacgctttattactccccgttga

SEQ ID NO: 12139 - DNA, 1029 bp, Escherichia coli
atgtctaagacattacttgatttgcttaacaaaactcgtgaagacattgccgccaaacgtggcaacaacgttgatctgactcgcttaaaagacggcgtcaactatatccgcatcttcccgaataaagacgacccaaacggtaagttcttccagactttcggtatgcactacgttaagtatcagaacgaggaaggtaaagaagcaaccaacgcttatatttgtgagcaacatactcacggtcgcgcttgtcagctatgcgaaatggttatggaaggtcgcgctcgtcacaagggtaacaaagcaatggaagaacgcatcggtcaaatgcgtgccactcctcgctacctggtcaacggcattctttctgctcgtgaggatttcgcagatgctgagaaatgccagttaatcgagctgccgtctactgtattcgatgatatctgcaaagcaatcaccgaagacatcgctgatgatatcggcaatccactgagcaaagaggaaggctacgcattcctgattaaacgtactggctctggtcgcgataccaaatatgacgtctcgcctaagcgtaaagtctacaaaggcgatatcgaagataaattctggaacacccagcatgatctgatcgcatacgcaaatcaggctgatgaaactcgtcttctgtcgacagttcgcactgtgggtcgtctgattggcatcgctgcaccaactgccgcagcatctgcaccagcaatttcctcaaccgcgaaaacatcggctgcggcactacctggatttggctctgtcactggtcatacagaaggagcgacggctgtagcaaccgcgcacacaccggcttctgaaccaaccagtctggttgatgaagaaatcctccgtgccgttgaaactgaatttaaaccagaggcaagttccgctgccgttgccgtatcagtcaaagagtctgaagcagtcgcagcgacatctgtagcaaccgcatctgcgacggaagatgaaggtctggatgacctactgagagagctggactctctgtaa

SEQ ID NO: 12140 - DNA, 945 bp, Escherichia coli
gtgaattatctcttcgtagatggcaatagcctgggttattaccatcaacaatctgacaaattgcacaacggcgaaatggaagtacaggctgctttcggctttgttaagaacgtccgtcgttatgcctccatcctccatgcccgacctatgattctttgggatggatttagtgacaagcgtcgcgacttttacccggactacaaagcaaatcgcgacgacgatcctgatatgaaaaagatgaaggaaggctttgctatccagaagccatacatcctcaaaatgatgaccgcgcttggagttacccaactcattgcaaaagatgcagaagcggatgatctggccgggctgctggtatcccgcatggcaccgcagccaaccgttgaacacatctatctgttaacaggcgatagcgactggcttcagttagttcgtgaaaacgtaagctgggtaagcctgcgtgaagacgccaaaaacaagcaggttaattttgagcaatttgcggagctgacaggattcgccacgcctcgcgcatttttggaagcaaaagcattacaaggcgataactcggacaacattagcggtgttggtggcattggtgctggcggtgcgaaagagctgctgcatgaatggggaagtgtcgcaacgatggtacgcggcatcaacgacggctcaatcgtggttaataaagggcgtcataagaccgccttcaacaaactagcgaagaatgccttcaacgagaaaacaggctgtcgaatgctcgaagcgttcaagagaaacatcacgctaatgaacctgattgagacgaagtttccgcctaccgaaatcgaaacaatcaaaggcaatcgtgacgtgaaagcattcgagcaactgtgctacgagctgaatttccgttcgttccttgaagaccttgaagtgtttgttcttccattcgaaaggtattgctaa

SEQ ID NO: 12141 - DNA, 267 bp, Escherichia coli
atgcttaaatcgattatcaatggcgctacaaccacccctgcccaactggcaaaagagattgtcttttatcacggtgagtacgctgtcatcgcactgccgtcaattctaggcgctgccggaatgaaagcgacagatcgcgagtttggattagtcagcgagcaggtcgtaaaaatcctcgctcgtgtatccagactccttaaccacgatgcgattgtattcgatgaatccgccgctttaaaacgaatcaacgaaacaaaaggagcctga

SEQ ID NO: 12142 - DNA, 1074 bp, Escherichia coli
atggcaaaaggaaaatccgcactggcacttgctctgaaaaagaaaatcggtagcaacgacgaaattcagaaagtaactcattggattgatacaggctttccaccgttaaacaaagctatttctggtcgttacgatggcggcttcccatgtggtcgtatcgtcgaagtattcggtcctccaagtgcagggaaaacgttccttgcaacagcagcgatgatctccgctcaaaaacaagatggtctggcggtattcctcgatcatgaaaacagttttgacgttggcctggctgtcgccaatggcctgaacgcagatgaggatgacggtcagtgggtatacaagcagccagataccttcgaagactctgtagagttgatcggcacaatacttaaattggttcgtgatgaagagcttatccccgaatcagcaccaatctgtatcgtggctgactctcttgcgtctatggttccgaactccaaagccgagaagttcgaaaagatggctgaaggcactgccaaagacaaagatcagctaaacatgaacgacaatacggcactggctcgtgcgacgagtgcgaacttccctactctggctttgtgggcacgcaaatacaacgcctgcatcatcttcttgaatcaggttcgcacaaaaatcggtgtaatgtttggcgaccctactacgtcgccaggtggagattcaccgaagttctacgcttctgtacgtatccgtcttggtgcatcggtgatgaaggatggtaaagagaagatcggccaggacgtaggcgcagaatgcatcaaaaacaaagttgcaccaccgtatggcaaatgcacctggaaattctacttcgatcctactcgtggcctcgacgttatcgaatcgctcgtcgagtacatgctggaagaaggatacctgccaaagaacgccagcgggcgagttgaaattggtgacaagaaatacaccaaatcgcagatcgtcgagatgtatcgggagaagccactggctgaaatcattgcggctttgcaggcaatcgacgaccgaagagcaaaagacaaccccaccgagtcagtagaagagtaa

SEQ ID NO: 12143 - DNA, 201 bp, Escherichia coli
atgatcaaaatctatctattggcagtagccacaggcctttcagtggctctcatctacggtttactggttccgtcgctgatttctaccaagagtgatttagccgtcatgtttggagttatcgttggttttggtgctcctgtaatcggtcttattgctggtcgtaagtttatcaactcattaatcaaagcaaaggggaaataa

SEQ ID NO: 12144 - DNA, 831 bp, Escherichia coli
atgaagaaaggtttacttgcagttgctctggcggctatttgcacaatgggtcttactggctgtgatcgcgtggagcctggatacgttggcatcaaagtaaacaaattaggtgaagacaaagggattggtgaagtggttggcgttggtcgccaatggacaggtcttaacaccgaactttacgtattcccgaccttcaaacaaatgaagacctacgacgagccgttcacattccagatgagtgacggtactgctattggtcacaaaattggcgttgcgtatctggttaatcgtgacaaggtaacgacggtgttccagacctatcgcaaaggcgtagacgatatcaccgaatcagatctgcgtcagaaaattgccgactctctaaaccgtttggccagccgtatgaccactgactcatttatcgacggtggtaaggcacaattgctggacaacgcactgaaagatattcagaaagagatgtctccggttggtattgaggtactgagcctgtcatgggttggaaagcctgattacccaaaaactgtcattgaatctattaacgccaaagtaacggctaaccagcgtactctgcaacgtcagcaggaagttgaacaacgtaaagctgaggcgaatatgctacgtgaacaggctaatggtgaagctgatgctatccgtgctcgtgcgcaagcagaagcagacgccattcgtctgcgcggtgaagctctgcgtcaaaacccgaacgttatggaactggaagccatcaataaatggaatggccagttaccgcagtacatgactcaaggggctaacactcctttcattacagtgaaataa

SEQ ID NO: 12145 - DNA, 426 bp, Escherichia coli
atgacagctattaagaaactctacgatgccgcaaacgtggctctggatgttattgatgatgaagcagcaaaaggctttcctgaacctgattgggcgcatcagctacgaaacgctatcgccgaaatgaatccaccagatccgaccaccgacgagacagactggcagcgatttatccgtatgtacgctcaggaaataggtccaacgccaacggcagagcaagcaatgctgctgaaatacttcaaagaggcgggagaggatttaccaattgatgactcagcatattggttccactgcgcatggcgtaagtatgacgtgatattcacacaaggcatggggagcaaagatatggttgtgtggcatctactccatatagacacagccgttgacagagttattgaacagtttttccctaaacaagaagattga

SEQ ID NO: 12146 - DNA, 276 bp, Escherichia coli
atgagagttttagttcgaatcgttaccagcactgtctatgacgtgtttccgctttttatggtcaaagccgatggccttaacgacgaagaaactgacgcgctgatccagcgtattctcgttgaatatacaggtcatgacgctgattcagtgatggttgatgatgatggtgtttgttggcataacggcaactgttggtacgtagaagagactcaacaaatcagtgatgaagatgccgcacatcttgagcgtattttaagcatcagcacttttgagtga

SEQ ID NO: 12147 - DNA, 336 bp, Escherichia coli
atgaaggccatcccattcgcgctgttgttcctttcttcgatcgttgtggccgacaccactgtttatcagtgtgaaatgtctgtagccgacgttaagaatggcgctcttaccgacgtcataaaagcaccatatggagcgatggtcgtagacagcggcgaccagttctatgttgtgcgtgacgatcgagtgttgtcatccccatatctcacaaatcgtaatggcaaattaaccggcgtcggagaagaccacttcgtatacaacaaatacaagggcttctatggtgttcacgcttctcagcaaagctaccttttcgatgactgcaaggaggttggataa

SEQ ID NO: 12148 - DNA, 213 bp, Escherichia coli
atggcattaacactggcaggtctggaaatcgagaaaacaagcggctactggcgtgctaagggtttcaagcagcctggcattcttgagcgtctggaacgtgaagatgggtatatcgtccaccagcggcgtgaatggcgtatgtacgatccagaaacaggaaaactgactacaaaagccggaacactttggggtctgttaaagaaaatacactaa

SEQ ID NO: 12149 - DNA, 1095 bp, Escherichia coli
atgtccacaaaaaataaaaaaggtaaaaataacaaagaagtagaagataatctcgacaactttgaagaaggttcccttgaattgtacacaggggaacttgtccctaatagcaacaatacagtccaaccaattgcgttgatgcggctgggattgttcgtgcccacgctcaaggggacaaaatacagcaagcgtaacaagccaaatgagatcgatgcttcaaaggagcttgttcagctcgaagtagcccgttctgaaggctattccgatatcaagataaccggtcctcgtctcgacatggatcatgatttcaaaacgtgggtgggcgttgtgcgttcgctggcagaatacggcgaacctaacggtcgtgtcgagttaagcatcacgaaatttgcgaagttttgtggctatccatcgtcacagatccgcaaaacactccgcgaccggcttacaaacagtcttttgaagatcatgcgtacaactctgtctttccagagaacgtatgaagaaaagaacgtcgacggctctaacaagatctcgcttctgatggtgcacctcatcaatagcgtggactacaacgagcagaaagatacggtggtgttctatgcagaaccgaagctggccgaactatatcgctttgaccataaggttcttttgcagttaaaggttatcaataagctaccacgcaaagaaacagcacaggctctgtacaccttcatcgaaagtcttccaaccaagcctgcgccggtatcgcttgctcgattgcgtgcgcgactcaatttgagtagcaggaatgtcagctcgcagaatcagactatacgcaacggcttaaaagctctccaagatttgggttatctcgaatacagcgagattaagcgagggcggtcgatctatatccagattcacagccgcaatccaaaactcaaagtcgcaccgccaaaacctgaagacatcgaacccaaaaaactagatgagaaagctggggaaattgatgccaaacagaacattatcaacaagataaccgaactttcgcagaatttgacgcctgaaaatatcaagatgattgagatcctttccaatagtctcaaactgctttga

SEQ ID NO: 12150 - DNA, 645 bp, Escherichia coli
atggatctaaaacgcacgcgctgggttcgtcgtcttgaagacggctcctacactatcgaatcaaattccaacctgaataagcagaagttgctttgtgacatctgcggtatagcggcgaagtgcccgatctacgaaaccagaattaaacttgataaggctggtgtgaattttcatttaaacagttgcatcaggtacgttccattactcgcatttcgtaaaccgatcatcggattggatgctccctacttcaacacactccgttcaggtgtgacgtggcgagatcgtttatcaccagacaagctgatttgcctcgtatccgcagacacagggaaaatcatccgttttgggaaagtagacaaggtttactcaggcccagtagacgaaatgttgcggaaacacagccggtttaatcatctctgtatgggtggtgagaaaatcgagaaagtagaagaagtgatccgcaaatcctacggacactttctgaccaaagatagcctgctcaccgcaatctacatcagacatgtaaaacgtgagttcgacctcgaataccacagcgaagaagagcttaaccttgttgacccacgtccaaaagctggcgtcataagcataaacgcagcgcgtaaaaagcccactgacgcgctgtaa

SEQ ID NO: 12151 - DNA, 1086 bp, Escherichia coli
atgactttgccatacggcgtcatttctgactgccactaccacaaatgggatgcgttctccacgacgaacgctgaggggcttaactccagactcgaaatacagttggaagcaacgaaagaagcagccatcgccatgaagaaggccggttgtaagtacatgttggttgccggtgatacatttcacgtccgaggaactgtgtccccttctgttttgcattacgtaactgaaacgtacaagtggattatcaacgagcttgatctgacagtagtaatgctggccggtaatcacgatcttgaaaccaacgattcagtatatagcgccaacgcagcagcatcgctgagttctatcggcgtggtaatcgtatgtggcaagcgcccacactcaataaaaattggtgatgtgactgtccacctgattagctggcgtaacaatcatgcggagcttatcagcgatctgaaagcattacgtaagagcgtagaaggtgataatcatgacgttgttatccatacatccattaacaaagccattccaacaatgcctgacgtcggtatcgatgcgcaggagttaaaggatatcggctttcgtctcgtgcttagtgggcattaccacaaccacaaagaggtcattcctggagttatcagtgtcggtgcactgactcatcaaaattggggagatgttggatctctggctggctacatgatcgtaaacccggacggcagtttcagtcactacgaaaccagtgcgcctaaattcattaacctggaagatgatgttgctgatgaccaaattcgcggcaactacgtgcgtttccgcgccgtaattgagaacgatgaagaaggcattaagtaccagaacatcctcaaaacaatgggtgcaaaaggtgtcgtgtgcaacttcatccgtaagtcatcaatgatggaagggacagccagcacaactgaaaccagcaaaatcgatagcctgggagagtcggtatctgcttattgcaagattgtccacgatactgacggcggatttgatctgagcaaattggatattttgtgtcaggaaatcctcaccgaagcggagagttcggaggctgtgtga

SEQ ID NO: 12152 - DNA, 1917 bp, Escherichia coli
atgaagtttttaaagctccaggttgagaattttatggctatcgccagcgcggaggtcgagttagatcagcgtggtttagtgcttattcagggtgttaatagtgatgatagttccgcatcaagtaatggctctggaaagtcaactctaatgaatagcctgatgtggtgtctttatggcgaaacagctcatggtgtgaagggtgacgatgtgttgtctaccgaccatgaaaagaactgtcgtgttgcagtaaccatcgaggatgaaggcaagagatacgcaatcattcgtcaccgtaaacacaaagagttcaaaaatcgtcttatcgttcgtggtgaagatggcgatatgacgaaaggcaaagatgcgctgacgcaggagttcgtcgagcgtctgatcggtgcatctaaagaggttttcatggcttccatctatgcgagccaagaagctatgccagatttacctggaatgtccgacaaaaacctcaaaaccatcgtagaagaagccgctggcgttgacagactgacacgcgcctacgctattgctcgtgagcgagctaatgcagctgccgcacgtatggatgtggttaaaaccaaattggagtcgacaatctcgaccattgaggcaacacagtcagaaattgagtcagcgaaagcctcctctgaatcatgggagcaagagcgttctaaacgttatgacgatgccctggctgggctggccagtgccgaagttgagttaacggaagttgaacttgagatccgcactcttcccgaacagatacgtgataccgagaaggcaatcgaaagtgagcgcaaaaagttagcctcaaaagaagaacatgacgccaagttgctcaaagttcgtggtgcgataactgatattcgggcaagcatcaaagctacagaaaatagtcaggctgatgcaatgagccgcgcgcgcaattttaagaccaaagcagaagaggttggtactaaagtaggatcaccatgccctacttgtggcaaagcctactgcgaagaagatctatcaacggtgaaggagaatttcattgaacaagcacgtcaggaaattggtcaggcgaagacacttgcagaggcaatggctaaacacaaaacgaatcttgagaaagcgttaagcattgagtctgcccttgttaaaacgacacctgatgtaacggctatcattgcccggattgaagagcttacgaaacaactctcatctttgcgtcatcgtgagaaggaggttgttgctattgagtctcttgtgactcgtgctcgtactgaggtcgatcgtatatcaaaagagattaatccgtttattgctcttatcgccagacacgaagataacttggtatccagtaagtctaccttcaagtccttaaaagatgagttgaaggctattcaggaacaaacgttgctattggaaaaagctcgtcaggtctactctcctgccggggtgcgttctcatattttgacgtctgttacgcctttcctgaatacacgcactgccgagtatctcaatacgttgtctgacgggaatattactgctgagtggtcgacgatggatgtcactaaaaaaggtgagtatcgcgacaaattcaacattagtgtgcagaagaaaggttcaagtaagtcgttccagaccctctctggtggtgagaagcggaaggttcgcattgcgtgttctttggcattgcaggatctggttagtaaccgggcgagtaaaaacatcgatttgtttatcggcgacgaaattgacgatgcactcgatacagccggtcttgaacgcctcatgggtattctggagtccaaagctcgcgagcgaggtactgtgctgattatctcccataaagagatgaagtcatggttccgggaaactattacgctggaagttaaagaggggcgcagctatgtcgtttaa

SEQ ID NO: 12153 - DNA, 744 bp, Escherichia coli
atgtcgtttaaattaagccgctcgcagtttttgcaggtatttgcagtgatgcagtcgataaaactgatcaatgggcatacttccaatggtgcggctccacgtattctgtggggcagcaacaatattgacggagtacaattcgccgcgttgcttggtctaatatccgagacgccattgatgcaaagtttgaaatcactaccacctggatgtattgcgccgatcctgattaatccttttgttgaggggggatatcttcccaacgtcgggcctgggtttattgcatcccatgaaactgaagatcttaacattaatagcgaagggttctttgggggaatgggtgcgcatcactgtatggctttcacgaaccttattcgacttgccaataagcgggtggatagtttggcatcgccaggtgatgcttttactggtttccttatccaaaggagggataaaaagtacagtgcggacaaactacagtttgttggtaagtatggagaaatggtagaaatcgaacttcagctccctcatgttttagcaaacgatagtgcagacagtcggaggctattgggcatcatgcgtcatttcatagcaagtggtgttaaacatgccgcagataaacgtgtcacgcaggaaaatgagtattcagactttgcaaactatccccaaccaacgttgcaaacggcaatagtagccaattcgttggaggcgagattattggaaaaccctatatggggaacatggtaa

SEQ ID NO: 12154 - DNA, 570 bp, Escherichia coli
atgagtaaaaaaatcagcgtagttggtgttgatccctcaatgagcaactttgggcttgctgtgggcactttagaccttgagacggacgaacttgagattcacggccttactcttgttgagactaaagcggggagtaacaaaaagaccgttcgtgtgaacagtgacgatctgcgccgcgccagtgaaatatggcgtgttgcgaagccaatcattgataaggcaaatatggttttttgtgagctaccggttgggagccaaaactctcgttcgcagacgtcttacggtatttgtatcggtgtacttgcgtgtgtggataagccattgatccaggttactccaaacgaaatcaagcattttgtcggcaataaacttactacatcgaaagaagagattatccagtgggctacgaaaaaacaccctaaagcaccgtggctgcgtcgtaagcaatctggacaggatgttctcgtgaacaaaaacgaacatttggctgatgcggtggctgccatccataccggtatgcaaacagatcagttccgccaggtgcgcgatgttcttaagtctctcatttga

SEQ ID NO: 12155 - DNA, 2316 bp, Escherichia coli
atgataagcatcgtaaaacgtaacggccaaacagagccgttatccgaagaaaaatacaaccgcgtcgtaatgtatggcgtagaaggcattcgtggtgtaagcgcatccgctgtagcaatgggagctgcggccagcatttttgatgggattaccaccagccagttgcatgaggctttggttaaatctgccgctgatttgatctcaccagaagcaccaaattactcacaggtggctgcccgcctgaacatttttaaaatccgcaaagatgccttcggtcgttacgactatccgaacttctaccaacacattgtcaagaacgttaacaagggcgtttatgacaaggatttgctgacacattattcgtttgaagagatcgaagaactcggcaattacattaagccgaaacgtgacgatctttttggctatgcagctacggtgcagttgcaaagcaaatacctcgttcaaaaccgtgttactggtgagattcatgaggggccgcaacatatctatatgctggtaggcatgtgtctgttccagaattgggaagacgactgcgctggcaaaacacgtatggagatggtcaaaggtttctatgacgttacaagtacgttcaaactgtctctgcccacaccaatcatggccggcgtccgtactccaacccgtcagttctccagttgtgtgctgattgagtctggcgatagtctgaaagggattagtgcagcttcagccgcaattatcgactacgtttcacgtcgtgctggaattggtattggttttggccgtatccgtgcgctgggcagcgagatccgcaatggtgaagccacccataccggagttattccattcctgaagcatttccagacggctgttaaatcttgttcgcaaggtggtgttcgtggtggcgcagcaacagcgttttacccgatctggcatcttgaagttgaaagtctgctggtggtgaaaaataaccgtggtattgatgaaaaccgcgttcgccatcttgattacggcgtcatgagtaaccgtctaatgtaccgtcgactcgtcagaagcgagaacatcactctgttcagcccgcatgatgtgcctgatatgtacgaagccttcttcacagaccaggagctgtttgaaaagctgtaccataaatacgaagccgatgattcaattcgcaagaagccagtacctgccattgagctgttctcatctctgatgcaggaacgagcgtccacgggccgaatttatattgcgaacgtagatcatattaacgagcatggcgctttcattcctgctcttgcacctgttcgccagtcaaacctgtgcatggagatcactctacccactcgtccactggcatttaccgacgacccgaacggtgagatcgcgctatgcactttatccgcttttaacctcggagccatccgttcactggagtctcttaaagaggtggcgttctatgccgttgctgcactggattcgttactggattatcaagactatccgatggaggcagccgaagtgcctgccaaagctcgtcgtagcttgggaattggtgtaaccaactttgcttattacctggcaaagaatggcgttcgttattctgataccgctggcaataaactggtgcatgaaacgttcgaagctatccagtattaccttcttgatgccagctgccgacttgctgaagcaaaaggtgagtgtgactggtttgagcagaccaagtacgcaattggtcagttgccgatcgaccattaccgttcttcattagacgaaagtggcgaaaccaactttgagttaaagatgccgtgggaagaactgcgtgaacgtattgcaaaatacggccttcgcaactccacactgacggcacaaatgccatgcgagacttccagccagatcactaattccaccaacggcatcgaaccgcctcgtggcccggtgtcggtgaaatcttctaaggacggcatcgttaagatggtcgtgcctgagtttgaaaaactgaaggaacagtatgaatacctgtgggatatgccggacaaccgcggctatctgacaaaggtggcgatcatccagaagttctttgaccaggctatttcagccaataccaactatgacccttctcgctttgaaggcgataaagtcccaatgatgacgctactgtcagatttgcttctcgcctacaagatgggagttaaaacgctttactaccacaacaccagagatggggcaggaaagcgtgatgacgacgaaccgcagaatccactgacgcaagctgtagccgtcgagccagaagatgagtgcgacggagcctgcaaaatctga

SEQ ID NO: 12156 - DNA, 1143 bp, Escherichia coli
atgtcatattcaacgttccgtttgggtgctaatgatgcaaccaaagagcctatgttcctcggacaatctgtcaacgtggcacgttacgatcagcaaaaataccgtgattttgaaaagttgattgaacgtcaattgtctttcttctggcggccggaagaagttgatatttcgagcgatcgtatcgacttcaacacgaagctgcgggaccacgaacgtcacatttttctgagcaatctccgttatcaaacgttactcgattcagttcagggacgtagcccaaatgcaacgctgctgccgcttatctctattcctgaactggaaacgtgggttgaaacatggtctttctctgagactatccatagccgcagctacacccacattattcgtggcatggtggacgatccgagcattgtttttgacggtattgttacggatgaagaaatcatcaaccgagcgatcagtatctctgctgaatatgacaggctttatgggatgacctgcgagcgccagtcgttaggtgagaaagagtttgaacgtctgtacgtaaatgaatatggctgggagccataccctttgcatcgtcagcttttccgcacgttggtgtccattaatgcgcttgaggcgatccgtttctatgtaagttttgcatgtacgtttgcctttggcgaacggaagttgcttgagggtaacaccaaaattatgcgctttattgcccgtgatgaagctctgcattgcgaaggaactgaacgcatgatccgcttcatgcgtaccggtcgcgaaggtttattgtggaaagagattgctgctgatgaagaaaacgtcatttacgacaccatgaaatcagtcgccgaacaagaaatgaactgggcagactatctcttcaaagacggttcgatgattggtttaaacgcggatattctgaagacctatgtaaaataccgaaccaatctggctatgaatcgtcttggcctgaaggctttatttccagaagttaccactgatccgctggtctggatgaacaagtggttgttaaccgacacactgcaaattgcaccacaagaggcagagcaaagcacatatctggtaggtcagatcgattctaccgtggataaggcttctctaagccagtttgcagacctgtaa

SEQ ID NO: 12157 - DNA, 870 bp, Escherichia coli
atgaactttaccaaactgactgaccacctgaaacttgccaccgatcgactcattggatttaagccagaaccatatgagttgcatgaaggccatggtgtagccactgaaagtatttacaagatggtcgatcagtttcatgaactcttccagcatccgagacgcgttatgccgacaccagagctgcttcgtctccgtgcaagcctgattcatgaagaagctgtagtggaaggtattccagctgcaatgaatggggatattgagcaactgctggatgcaatggccgactttttatacgttggtgttggtacgatggtcgccatcaaaggtggtatttctaccggcatgacctattacacgcaggaacagagcattgatcgctttatgcagacaatttttgtgcccggtaacactgttttcgatgatatggcaatgccatttcaggaagctcgtgaggcgtcatgtatgctcgaagagctggcagataaacttgagaacaagactgttaaggattctgagctgattcaggaactgcgccgtgtcatgaacaaaatctatgtggcgtgcatgatgacctatcgactggctgatttcctcggtatcaatgtagtcgagctggttggcgaaattcatcggtctaacatgacaaaattatggcctgctgatgtagaggaacgtcgccaggctgtggccaactgcaaatacgactcttcagacctgggatttcgccatgctgatggtaccgataagatgatcggttttcgaatttccgatggaaagattctgaagtctccaacctatagtgatgtcgatttatcctcctttgttgagcaagctaaagcctcagcaatgtacggaatgatcaaaaaataa

SEQ ID NO: 12158 - DNA, 1104 bp, Escherichia coli
gtgtcactccttttgaatcgtgagcatacgaacggtcaggtaacaaacgcatcgtatgcaaaagttattgagacggtgcttaaaagcggcgtgcaggctgatgatcgcacaggcactggtactttaagcacctgctacgttccctcttactacatgcttactggtgggactgtgccgcttatttctggaaaggcggtaaatcttaagccactgcttgtcgaacttgagtggtatctgaaaggcacgggcaacatccaatttctcaaggataacggcgttaagatttgggatgcatgggccgatgagaatggcgatttggggccggtttacggtaagcagtggcgtcgatgggaagatacccgcatcgtgagccatagtgaatatctgagcaagatcgctactttccgtgaacgcgggtacaaagtcgagggatacctgggtatcagtgaagatcgcgtagtgctgtcccgtgaaatcgatcagctacagcgtattgtcgatacactgcgcacgaaccctaccgatcgtcgcatcatgcttaacgcatggaacgtaggcgagcttgaggatatgaaactgccaccttgccactttgtcttctctttgtggagtcgtgagctggattttgaaacccgtttaacgatggcaactgacattggtcttcaacacagtcgcctcggttacgagtctatctacaccaagatgctatacgatctggagatggacggcagtgttactgaagctgaactggatgaacttggaatccccaaacgcatcctcaactcctgcctcgtacagcgtagcgtagacacttttgttggtatgccattcaatattgctggctatggcattctcactcattttctcgcgaagattacgggtcacatggccggtgcatttgtgcattttggctttgacgtgcatttgtacaacaaccacatggaaggtgtgtgtgagctaatgaaacgacaggctccagagcattcagatccggtcgttattttccctcatgaatggtcagagttggatgatttcaaatgggacgaggttttaattcttggctatgaccctctatcgtggatcaaggttccagtggcggtgtga

SEQ ID NO: 12159 - DNA, 414 bp, Escherichia coli
atggcaagaggtatgtatgtcttatgcgaaattgaaggtgtgctggcaaatgccagccatcgtaaatcagtatctgacgcggatgcaggccagctcattgccggtgatgaactcattttccccaccagccgtatgttgcgtggttttgctcgctcaggggctgaagtggtgcttatcagtagccgctctgaaactcttgaagcgccaactaaacgatggctgaaagattttggcgttgattatgactggcttcatctcgtaccgaatggcaccagttatgagaagcatattaagcgcacattagcggagcataaaggcgatctgcttatcgctgcgctggtgcacgatcctcgactccgtgccgctttagccgactctcaccatcgaccggtcatctatgaggtgagcaaatga

SEQ ID NO: 12160 - DNA, 477 bp, Escherichia coli
atgaagatgatcgctgctgttggccgtaactatgagatcggcatagcgaatgaactcccctggcgttgttctaccgatctgaagctatttaagagactcaccaaaaacgccactgtcgttatggggcgtaaaacgatggaaagtctcaaacgccctcttccagagcgtcataacctcgttttgacgcgctctcatggctttgtaccaaatggattctaccctgctggtgtggatgatgtgttgcgattaccagagcctgtgtgggtgattggcggggaacaaatttactcgctattcatgccgcatgttgaagagatttggctctcccacatcggcgttgatgtgccaaacgccgatgcattcttcccggcaagcatgatgcgtaatttaggctttgtgcctgttgaaacagcttatacccaacgagccagcgaggaagagcctggcttttcgcagatcgtatacagaaggtcgtaa

SEQ ID NO: 12161 - DNA, 645 bp, Escherichia coli
atggattaccggattgggatcactggtgctcagggcagtgggaaaacaaccctggctaaatatatcgacaaacattacggaatcccttacgtggatgctggtgtcggaagtttgatgagccgcctcggtgttcgagtaggtgattctatgcctctatatgagcggcttcagattcaaatggaaatagcaaagcatatagagctacttacgcgtggtgttgaaggctttgttatcgatcgcacacctgctgatgttatggcctacacgttggatttggtcggccatacaaatgaagatcggtgtattgagttagccctcgatatcgaaaagttttgccacaaaactgctatttcaaactttaacgccattgctggcttacgcccgggagtcgctctctcagagcgagattacttgcgatcacaacgagcatcattagaccgtctgtatgtcgctcgtattgatgcgttgatgtgcggggaactgacaaaaattcacctgcatccgcaaaggggagatctgcaaaccttcgtcgtttccaaccgatatcgcacggttgaagcaagagccagatcagtgatgagaatgctagataacgctgtagaaaagatagaaaaccggttctgtggccgagtgaccgttcattag

SEQ ID NO: 12162 - DNA, 420 bp, Escherichia coli
atgtttagtgaaatgttgcttgaagatgaactggatcggaaaacaacagaggctttgattcgtgtagcggacgaacattcccggtcgcttatgagcgatcgagaggctcgtctggctattcgtgccatattcgaaactgcgcaggggcttgttggtacacaagtgggtgaagccattaacatcgccatgtctcagttcagtgaaggcagtaaaaagcctctgtttcctatgcatttgatgctggctggtggcacggtgctttatatctctgtttgtctggatagcaaccaaatcaatattctcaacactgtgtcaggtaagtggaaagatccgattgtctgtgaaaccagtgaagaaactttgaaaaaagcggctcaatttgtacgtagcgcactacttaagggcgctaagaagttgtaa

SEQ ID NO: 12163 - DNA, 558 bp, Escherichia coli
atgacaacgattgttgcaggcatcgatatcgagtctacgggactggatttccttgctggtcataaaattattgaaatcgcaattacccgctatgaactggagacacagagacatattgatagtctggagatgcgttttaaccctcgcagaaacatagatccgaaagctcaagccgttcatggcatttcattggaacagctcgcagctgaacctttgttgtcaaatcatgccagcgaaattggcgcttatatgggggcatgtagtgtgtgggttgctcataacggcgaagcatttgatataccatttattcgacacgagttttcagggtatggagtaagactgccagaagttcctgttatagatactatgttatcgggattgtgggccacagaagacggtaaacgtccccgccttgaagagttggccttctctcttggctttatatacgatcatgccaaagcacatagtgccttatatgacacaaacttaatgatgcaatgcttctttaaggcacgtaataagtacggattttttaaattaccctctgaaattgtgtaa

SEQ ID NO: 12164 - DNA, 810 bp, Escherichia coli
atgagttcggttgaaaatgtaatgacaaatgatgatctggacgagctggcagccatgttgcaatcacttgatgaaccagtaaaaaaagctgcacaggttgaaaatactgatgatattgacgatctgctgctcggcctagatgctggcgtagccatgagttctgatgatgttgccgaagaactgttcaatgaagaaaaagcaggtgatttcagctcagctttaaatgagttggagttagcgcatgagcctataaacgtaattaacgctgaaagtggtgaagctgccgaaaacgaaccagaacagttggggatcatcgaggttgaagggtgtgttgagattaatgatgaattaaaagttcaacagtcaaatgatagcaacacaaataaaaaagcgcgtactgcaagaggtcctcgttttgctctaagtgataaagatgatgcgtttttcaataaagcgggtttagagaaagatatttttttagacgcttacgataacgcgcctgtcaaagcaaaggataagatattaaaccttcttaattggtttagcggaggtccagatattagtgtttacacggtaatttccatgagacaccttctcacagaaaagaaggctacaagtaatagtattaagattgctttaatgagcaatccagaaaaaccgtatccgcttaacactgcgtcaactcaggctgggcaaatgatggctgtatttccagcgacaggaattgccgttagagacggtggaaatctaacattgaacgaagaatcaccgatcgttaagaagtttgtcgcggagtacactattggatga

SEQ ID NO: 12165 - DNA, 594 bp, Escherichia coli
atgattgcagccgaaaaaatcaaacagcgaaagcgcgacaactctcttcgtgacctctggagaacacctgactggctgttttctgccattcaacgttatcttggagtgacatttgatgttgacgttgcctgcaacaaggacaatgcaaagctgcctaatttcataggcgttgagcgtgatgctttgaaatctgaatggggacagccaggtacaattgccttcctcaatccaccctactccaaaatctccccctggattgatgcggctatacgtgagcaggctcgcggagttacaacagtgatgctaattcctcaatccctagatacaaagtggtatgagcgtgcaacagagtgtgcgaatgagacgattattctgtctggtggccgcgtagcgtttgtcgagcctgacgtcaatctgggtcaggtagaagtaaacatcaacccaggtggcagtatgctcgttgtttttcgaggattctgtcaggacgctgggcactctataagcaagatccctttggacgtcatgaaaagtctgggagggtatgatcctgcgaatgtgatcaggaaaaaaagaccatcaaagaaggctgcttag

SEQ ID NO: 12166 - DNA, 231 bp, Escherichia coli
atgtcatacccgactaatgtcgttgcgctcgtagagagcgattttctggcccaggctcgtgaaatgatgaaagatcgtgagcaggctttcaacttgtacgaatgggcaattaagtgcttgcatcttggcgagcatcgcgaacttgttgaacagcttttaggtgagttgatcaatgaggtgtttgccttgaatgttcaactacatggtagagaaaataatcaatcacaatga

SEQ ID NO: 12167 - DNA, 594 bp, Escherichia coli
atgacgacgaagacaccagcccgatcgcaagaaaaaactcgcaaaaaagccaaaaacaaaaattctccccgcaccaattccacaacgcctgtcgtagagttcaatccccagcttaaaaccgtgaaaatcttcagtgatggctcttgccttaaaaatccgggtggcccgggcggttacggtatagttctccagtatcgtggtgaggaacgcgagttctcagatggttttcatagcaccaccaataaccgcatggagatgatgggggcacttatcgggctggagcgtttgaaatatccatgcaacgttattttgcactctgatagccagtatctgaaaaacggcatgacacagtggatgaaatggtggaaacgcaatggatgggtgacttctgacaaaaaaccggtaaagaatgttgatctgtggaagcgtctggatgaggctgcaagtcgacataatgttcgctggaagtgggttaaaggtcacgccgggcatcgtgaaaatgaaatatgtgatcgactcgcgaagatcgcagctttttccgcagcagatatgcctcacaagaaagatattggttttgtttacaacaagcagtaa

SEQ ID NO: 12168 - DNA, 495 bp, Escherichia coli
atggcacgtcaaacctatttcacttctgcaactaaacgtcctcgttcactacgtcaaattttggccgaattatttagcggtcgtgttctgtcacgtcttgatgaactagagactgccgttcggttgctgaatgaacgtttagataagcaagcgtcagttgttgcgaacgtgggggcgattgttacctctggttcttcacgcgaagcgaaaagtacacggcctttagtgaaggagaaaaacaacaaggacagttcgaatggaaaattttcaaagaaagaggctgaaaccaatggcctacgttctcattatagtttcactggcgacggtagccgttccagccggccagagccttttgatgccgggttcatccatcaccacacctccgtcgacgacaattaccaccactccagtagagcgtcctgtcactctggatgggatgacggtggatgcgatacctcaagttcatccagttactcaggatcatgctgtgactaa

SEQ ID NO: 12169 - DNA, 198 bp, Escherichia coli
atgaactggttttcaaatcactttggaaaaacttggctggcgattctggctttcatagctctcatggccgccggttgggtatcgaacattgtaaaactcgtttgctctggtgatctccagtttcaggctggtatgaccttggctcgtgttgttgggatttttgtttttccagtcggttcggtacttggttatttctga

SEQ ID NO: 12170 - DNA, 426 bp, Escherichia coli
atgttaggtttattcaaaaagaaaactcgtaaagctgttatcgaggtcaaaaaaatggagaaccgagatgcggttgaagccaccgtgtggggcgcgtacatgatctcctatgccgatggcacatgcgacgcaaaggaaatttccattcttgagaaaacaattgcagctctgcctgcgttttctccgtttgctggtgagattgcccaaatgagcgccaatatccgtgctcaatacgaagcctcaccgcgccgcgctaatgcccaggctttacgtgagctggctgatgtggccgggactaatgatgcagtagatgtactgtgtctgtgccttgatattgccgaccaagacggtattggcgaacaagaagagctggccctgaaaaagatcgcacaggcgcttcagttgtcactggatgcttatctctaa

SEQ ID NO: 12171 - DNA, 159 bp, Escherichia coli
atgcttgagagattccggcttgtgaccgtcattgctcttctggtgatggcggtgttggtggattttacgggaaagatgatgtctgtcatttctgatggcgtcctcattggtctggcgatctacttcgcttatccgctagtccgtaaagcaacgtgttaa

SEQ ID NO: 12172 - DNA, 570 bp, Escherichia coli
atgtgcaagaaatgcaaagcgatagctgatgaacaaaacgccttattcgaagaaatggatgctaatgaactggtcaaaatgttagccattcttcgaggaatagaagacgtttccatatttgagagagtggttacagcacttaattttgagtccacctttgaagagccaactcaggttgtagctttagcacatcatttcggtgttcattatcttgctgaaaaagagcgcgctgataagttgcaggcgactttggatatggtgagcgagactcaacgaactgatgacactaacaagagtgaggcgattattgccagcaaagatcgtgaaattgctgggcttaaatcctctctaacgatgttgatgtctgcgttcaatcttatgtcttctcaggcgggttataaaatgccatcactaaacagcgatgatccgatggccgttcgtcagcttttgggagcaatggccgaccaactcgacgacacaaagagtcggcttgaagacatgatgcgtgagttaagccatcgacataacctcgcaacacagccacacaaagcctttcaaagctctaattga

SEQ ID NO: 12173 - DNA, 282 bp, Escherichia coli
atggcatacggtacagggatttacaacaataaaggaattaacgttactggcttccttactcctattttttttcttgatcgatttactgcgtcatcaggctctaagacgtactccaatccgccaccgggtaaatcgctacatgccgtgtggtcattgatgcctcttaacaacgacaactacattaatttacctgttccaacagttactattaatggaaatacggttagttggtcaaatttatatacggggcttggttcttacatatacacatactggggataa

SEQ ID NO: 12174 - DNA, 615 bp, Escherichia coli
atgttcgggatgtcaattactcaatcagatggaagtttgtggatgagtccagaatttactccgcaaaatctgattaataaagggacaatgtctacatctaaaggttctgtttttcaaacatcaatcccatcaaacaaatcatgctttttcttcataaaaagcagtaataaggcgaacatgatgtttattcatgagcatagtaacggatacaatgctctcagattgcatcaggtaaatggtagccccggaacaataacagtttatgctttttctgatatggtgttatcacattctggctatggcattgccatgtataacagcgcaggcgcaatggtgtatcacggtgagatgatgccccttgatgcgaaacttatcactatttctgaccctcaatttacaatagatatggggtatccatgtgcggtaatgcctgctatggttggggtatataactatagacgaaccgattacgacagacctgtctatgtaacaatgacaggtgcaactggaaaccaagtatataacggtcaatggtattccggtaatgtcacatgggatattaagaagatttatacaaacaaaattctggtgataaatacctccaagtatgattag

SEQ ID NO: 12175 - DNA, 1686 bp, Escherichia coli
atgaatacagccctttccatcatcgacgatgccaactcaaacactgctatcgactatcggcaggaaatgaacgtcatccacgaaattgtggccgagtgcgagaaagagatcgccttcatgtatcaggtacacgacttcgtttatggcgacgaacgccacaacatgattaatcgcctgctgagactaaaccatcgaccagatgaagatcgctcgcgtttaaatcgaggttggttggataaagtcgatctggaatgggtgaaacagaatatttgggccgagtactggaggaaggtcacggacatgactaacgttttgctgatcatgccagcttcccgtcgagatgagtggcgcgagcagtttatagagggcaaacaggaagtcatcaaaactgacagaaccggctaccagatgaaggttaaagagttcgttggtgtaccggagttcaaagcagaaacggtcatacccacgatgcttaatttgctgaatgacaggcacaaatatctctctgagcgcgtgtatggcttgtttaaggcgctgagtcctgcgcacaagacaaataagacaaacggtttcagcgaacgtctgataatcgctgactgcatttctgatttctggcgggacagcgttagtgtgaactatcgcaaagaggactatatcgacgatctgcgtgtcttgcttcatttcttcgcgcacaaagaatttattaccatcaaccgcactgctgaggtgctatcagctgcgtatcgggcaaacgactgccagaccggtgactggatgaacgtcgatggaaatctaatgcgcgtgaagatgttcaagaacggcaacgttcactttgaaatacatcctgacgtggcctggaagttgaatgaggtgctggcttacagtatgcctgctgcaatccccgcgccatgtcgcaccgcgccaaaaacacgggcaccaaagcagttcgggttaatccagaagacgatctccgtgccggttcgcactgcgcttcgtgacgggcgattaagcaaagacaaaggcgtatggtacttctctgattcagctctccagaagtcgcaggtggaagagcttgagcgcacactgagcttcattggcggcgtgcaggagaaaaagcactggcagttcccgtatgagatcggccatacgctaaatacgattgtggctaccggattaataccggatacaaaatcacaccagttctaccctaccccacgcttgattgctgagtacgttgccagagccactgaattgaagtctggtgagaagctgctggagcctcaagccggacgtggggatcttctggcctatatcaacgccgatctggaagatgttacctgcatagaaatcgcacctctcttcgctgatatcctgcgcggaaaagggtatacgaacacgatttgctgcgacttcataaagtggtctgaggacaacgtaggttatcagttcgacaaaatcgttatgaacccgccgtactcgcttggtcgtcatagagagcacacgctggctgcgctggggcatctgaaagtcggcgggcgtcttgtagcagtattgccgggcactgcgccaatactggactggatgacgatggataattacgtttatgccagagggaagtcgtttaccaacgagtttgaagacacagggatcacagtcagcgtatacgttttcaaacgcgttaaatga

SEQ ID NO: 12176 - DNA, 705 bp, Escherichia coli
atgaacaacctccagttagagcattttaacgtcacaggccattctgattttcctttcaagtttacattgaaaggttatgcagaggatgcggtaggccagatcattattgataaaggcatcgttaagtttgagggggattttgatgaatccgcgaaaacattcatagacttcgttgccaaacgttggagcgagcaatggaaaaacctggaaaagcgcgccaatgagtttgatcggttcatggatgcaatggatacagcaaaagaggctcttgatgccgggactccgttagatctggagtcacttttcaacggcgaagtggcctctgcgatgttcgccaccatgttcgcgggtgagttcgtccgcagcggtgccaaaaactaccttgagctggattacaacgtccctgcaattggcgatttcgtcgttaccatccaacgcaaagaaggtaagacgccaggtgaacgcgtcgcagagcttgaggccgttgtggatcagcgtaacggagagtgtgaccgtttgatcaacgagcttcatgcacttcgggaagaaagaatatgtgcgggtagcaatacacgtaatgcagcggatatctacttccagttagttgaggaatgccagattccaccaggtggctctcttgtcgattacgtcagacatttaatggcggaagttaactccagccataaagatggtgaggtgcgctga

SEQ ID NO: 12177 - DNA, 381 bp, Escherichia coli
atgtttggcattgacgcacagcgtatagccgcttttgcaaaaagccctcttgataatcccttgtctcgtagtgagcaaatggagctggcaaggctttttcttcacattcaaaaacaggcagacattttcaataacatgcctaatcaacctattctggatggtcacatccagatggtcattaacagtcatgagaaaggctgggctgcaatcgtcccctgcacaattacatacaagttggcgaaagaggttcaagagtttcgaaaagccagtgtcgaatcggagtctaccaaagccgcaataaacactcttattcgcatggggttcacatggaccggtggagcctactggcaagcacctcaccccattttatccggcaattag

SEQ ID NO: 12178 - DNA, 642 bp, Escherichia coli
atgtctagtatttccgaagctcatatgttcgccgctggcgctcatggtggcgttggtcagaaaagaaaatataccggcgaagactacatcaaccacccggttgctgtccgagagattgttgcattgcatgacggaaccgtggagatgcaaatcgcggcgcttctgcatgatgtggtcgaagacacccatgtaaccatagagatggttcgtgatcacttcggtgagcgcgtagctgaaatggttcaggctctgaccaacattgcaaggccagaagacggcaatcgaatacagcgtttcatcatcaatgtccgggagctggagcaaaatctcgacatgcagacgcgcatgatcaagctggctgacctgctcgacaatacctcttctatcgtgagtcgcgatcccgagttttcagctgtctacctcgcagagaaagaactgatgctggacgtactctttcacggcaaagagattggtgccaacgctgatgttgtcgagtacatggagaggataggtatagaacacccgttgctattaagcgcaatggcgaaagtcactgaaggtattgcgcttctgaaaccggtacacatcaaacgttatgaaaaacacaaatcgctgatctggagcgcgtgggaggctgcatga

SEQ ID NO: 12179 - DNA, 402 bp, Escherichia coli
gtgagcaagattgactatcaggcactgcgtgaggcggcagagcgtgcaattccggcaatggaacgcctgttaatgttgccagttgatgatgatctgatatgcgaacaggaacttaaagatagcggtgttgatattgatgccctcaacgccttcaaatttctggccggaccagaaaccgtgctggcactactggatgagatcaacgcattagaggaaacgcgtatcaacgatgtttgccgtattgcggaactaacaaaacaactggagttggcaaaatcaaaactcaacgagcagcgtgagtattacgagggcgttatctcggatggaagtaagcgcatagccgctcttcttcgcaaggacaatcttgccagcgccacgaacattgaaggtgaaagaaaatga

SEQ ID NO: 12180 - DNA, 531 bp, Escherichia coli
atgaaattatccaaattttctgagttggtgaatcgtattttgtccaacaaccacagccatcgtcgcgatatggatgtaacgatcgttgttcattcgcctggtcgcatcggttcaacaccatcagttgaggttcagtcaattcaggcgggttttgattgggatgccgggcaagtgatgatttttccatcacagccactgaccacgctaacaccagagcaggttgctgatatcgctgatagtgtgcgcaaaggtcagtcttggcacgcgtatcaggaatacaagaagcataaagagcagttggaaaaattgtcgatggagttggaagccgctaaacagcgggaaaaagatctgtttatggaaaatgttcgacttaagtcaggtatagccggtctgatacacctcggtattcgatatgcggatgttgaggtcatgaaaattgctggagatgcccagctttctactccatgcactgacagcatcataaacagcattgcagcaggcattttcaccaaagagggggcagcacgatga

SEQ ID NO: 12181 - DNA, 186 bp, Escherichia coli
atgagaacactagaggttcgcgctgaagacgtaatccctggtgatgtgctcataacatctaaaggtcaacaatgtgcggttaaatctttttggatggaaaatgacaaagtgactctgttcggtacggatggttccgaaactgattatgactacgacgaattgcttgttgttgagagagctgcctaa

SEQ ID NO: 12182 - DNA, 654 bp, Escherichia coli
atgaccaccgttaacaataagaaatgctacccaagcgagaaatatcttaatgagctgatcaccaacattgagtttgctgcaagggcaccagttgaagtcgtgagagcgattgcagcagagctacagaagcaccgtaaggcctatgccaatacagccgcatctaaggatggttggataagctgtagtgagcgaatgcctgtaattggcgagctaaattggagaactagttttcctttactggttacgtgtgagatcggcgttatacctgcttattacggctttgtgagcgttaatggtgataggcattatggctttatggagagtcttaaatacggagacgataacggcaaccatcctcaaactaatgaatatggtctgattagcaatgtcacacactggatgccactaccagaacgccgcaggagtcgaacagtgaataatgcagagttatttcagaaaatatcggctctcgcgactgaatgccacgctatagcatctgagcttgatgttggcgatgaacgaaccgagatgttcgaaatatacagtgtgctgcgcaatctctgtcggcgtggctacgccactcaagtagggcgaatgactaacccactactctcatcctgtgatgaggatgactcggatgaggatgacgaatga

SEQ ID NO: 12183 - DNA, 384 bp, Escherichia coli
atgatgcataaatcagtagccggtgagtttcagaaggaagtcgataataccactgatctattggacgatattttaagcattctcgcgctgcttgaggctggcgattggtcagaacattgcactaaaacagagctaggcggtcggcttgaaagagagattacacgactgattagcgatgcccaaaatgatttgtcacctgagcatctcccctgcgatgtagttcttgtgccagggatgaggatacacgaaggcgtcagaacgaaaacattattaaccgcattacagagaagagccgaactaagctcgcggataaagttgatgccatccaaaatatttgatgtcgtcaaatttacgccatcgcaacatactgagagagataaatga

SEQ ID NO: 12184 - DNA, 390 bp, Escherichia coli
atgggcttcccttctcctgcggcggattatgctgagagccgtatttctcttgatcagcagataattagacatccttcagcgacctacttcatgagggcagctgatagtcatcatcgtgagggaatattacagggtgcattgctggtggtcgattcctcacttaccccggttgatggttctctgcttgtatgcgctctggatggggaatatcgcgtaaaaagataccggaagtatccacgtcagcatctggaggatttaagaaccggtaagaaggaagcattgccaaaggatgacgatggatgcacgggcagcaatgccgtgtttggtgtgatcactcacattatcaacgacgcaagaagtggcgagtttgatgattgtcccgtgatgtag

SEQ ID NO: 12185 - DNA, 1101 bp, Escherichia coli
atgagcgagtccaaatcgccggatgccctgagagcaatggtagccggtacgctggctaattttcagcacccaaccctgaaacacaacctgactacgcttaaagcgttacaccatgttgcgttgatggatgacacactgcatgtcgaactaatcatgcctttcgtgtggaataagccttttgaagacctgaaagagcaatgtagtggtgatctgctccgtatcactggagcaaaggctattgactggaagctgtcgtacaacattgccacgcttaagcgcgtcaaaaaccaaccaggcattaatggcgttaagaacattatcgccgtcagctcaggcaagggcggcgtgggtaaatcctccacggcggtaaacctggcactggcgttggctgctgaaggtgcgaaagttggtattttggatgccgatatctatggtccatcaattccaaccatgctgggcgcggaaaaccaacgtccaacctcacctgacggtactcacatggcacctatcatgtctcatggcctggcaaccaactctattggttatctggtcaccgacgacaatgcaatggtgtggcgtggaccgatggccagcaaggcgctgatgcagatgttgcaggaaactctatggcctgatctggactatctcgttctcgatatgccgccgggcactggtgatattcagttgacgctggcgcagaacattcctgtaactggtgcggttgtggtaactacgccgcaagacatcgcgctgatcgatgcgaagaaaggcattgtgatgttcgaaaaagtcgaagtgccggtactgggtatcgtcgaaaacatgagtgtgcatatttgcagtaactgcggtcatcacgagccaatttttggcaccggtggcgcacagaaactggccgagaaatacaacacgcagttgttaggccaaatgccacttcatatctctcttcgtgaagatctggataacggaacaccaaccgttattagtcgtccagatagcgaatttacggctatttatcgtgacctcgcagatcgcgttgctgcccaaatgtattggcaaggtgaagtaatacctggcgaaatcgcattccgcgcagtgtga

SEQ ID NO: 12186 - DNA, 270 bp, Escherichia coli
atgaacattaccaaagcaatccataactatgctcgccgccgtggaatcgaacttcaactcgaagatgagcaggttagattctgggagactgaacaagattgtgaatggatgttcagctattcgattgctcaatgtggttgcttgttctggaaaggtaatgtgtatcttccccgcgatattaaagaagaacttccggcgatgattggcaccgataagaagttgaaagaagttttagattttatccataaagagtttattagcaagaagtaa

SEQ ID NO: 12187 - DNA, 387 bp, Escherichia coli
atgttcaatatcatgattcgtaaatttggtgagatgactttcgagaaagctggtgttgctcgtaccgaagaagaagcaatggccttagttctggtagcactgagatcatcacctgagatcatcgacgctgaatatgtagctgcctctggtgagattaacgagattaaagcaattgctaaagagttaggcattaaaggttttcgtaagctgagactatcccgcgagtcatatgtaattggtaagcaggggcaatatcttgatgagaatagtgcgattgttctactgaataagatcacccgctatggtttccagattgaacaatataaaacctgcttcgaattacacgagaaaggtttgctggatacactgaccatcactcgcgcttaa

SEQ ID NO: 12188 - DNA, 414 bp, Escherichia coli
atgaaaaagattatcgctggtatcgttcttgctatgggcttagttggtgttgctaatgctaatacctattatgtgtgtaattcctactttgagtataaaggagatgatacacgctacctgagcgatggcgaccgttattatcatgcaccgtctggcaaataccgtggttttatcggtgtgaaagttcgtgtgaatgatgataatagtcaatttgctttcaacgatccggtatatgataagacaatcaaaagcccgaaactgaaagaagataagaacgagaaagaagaatattatggttccgaagatggtaaatcctacatcaaatatctgcattctgttgatggcgcaccaatatttgatgttaaaaaaggtgatacatcttataccctgattagctgccgtgaaattctttaa

SEQ ID NO: 12189 - DNA, 1680 bp, Escherichia coli
atgaaaactaaactatattcgtatattcgcttctcgtctatgcgtcagaatgatggttcgagttatgaacgacaaatcaggatggctagagaggttgcggcaaagtatgacctagaactggtaaatgattatcaggatctgggtgtatctgcgtttaaaggtgctaactccaaaacaggggcgctatctcgtttccttgatgcaattggtagatccgttcctgttggtagctggctattcattgaaaacttggaccgcttatcccgtgccgatattgtcagtgcgcaggagttgttcttgtctatcatccgtaggggaataaccattgttactggcatggataacaagatctactcgctggatactgttaccgctaatccgatggacctgatgttctccatccttctattcatccgtggtaacgaggaaagccagactaagcgcaatcgtactaactcaagcgcattgattaagattaaatcgcatcaagaaaatccacaaaatccggctgttgcaatcgaggaagttggaaagaatatgtggtggactgataccacttccggttatgtatgccccgatccggtttacttcccgattgttaaagaaattgtggaattgcggaagaatggacgttcaacctccgaaatactgaattaccttaacgagacatatacaccaccaccagcggttagtaataagaaacattcaaaatggccacgggcgatgattggtaggttgttccatacccgcgctttgattggtatcaaggaagtctcggtcgatggcgttaagtatgagttaaaggattattacccgcgtgttattgatgatgctacgttctatcaccttaagaaaaatattggtgctagagcatggaactttggagacaaggaagaagttaaaccgatccccctgcttagtggcattggcctcttgaaatgtgaacattgtagttccgctatgattaaggtgaagggaacgaacaaacgcgctgatcaatatcgttattcatgcgagggtatacgatcacatagatttgattgtgagcacccaaactggagttttcgaggcgaccaattagagaaagctgtattgcaattgctggctgataaaatctggattgctgaggacaaggctaatccggttccggcgttgaaagtacagattgatgaaatatcacgcaagattgataacctgatcgccctttctgctatgacaggagcaacgaaggagctagccgatcagattactaccctcaatagcgagcgtgaaacactctacaatcagattaagatggcagaagaggaaatgtattctgtggactctcaaggctgggagaagctcgcagaatttgatttagaagatgtttacaatgaggaacgaatcaaggttaggtttaagattaaacaagctctaaagcggatcgggtgtagaaggattgacaggaacaaaaacttgtttgttctggaatatgttgatggaaagacccagagagttgtaatagaaaattcaagaggaacgaggaaaggccggatcttcattgatttgaagactatcaatgataggcagattctggagagtaacgggcttgttctgcatccatgtttagacatgctgacagataagaactggaaaccagaagaagaaataccaggtccgttacaggaatttgggatttaa

SEQ ID NO: 12190 - DNA, 1014 bp, Escherichia coli
atgaaactagcatttgcaaacgagattgtttttatcaggaagaaacaagcatctaaggccaaaactccagaattctatgaatctgaatgtttagagtatgcgaggaagacaaacaagaaatttttaggttttgttatgccgtgggaaggtggtaacactcgatcggtgtttattgatactaatgacatcaaaaccacaccactagcaaagaatgtactaatagccaaaaacagacttaaaggaagacaaccaaagaaagggacaattcgccaaaacttcaaagaagacaagaagcaagcaaggatagacaagctatacaatgaagttaagggaattgctgaaaagggcgggtacaaactgatccggttacatggagaactacccagcaaatacaaatcctttgcagaatgccattgcgaaactcacaacgaaacattcagccgcaattgtcgagatttgttgcataaaggtagtgttacttgtccacaatgcctaacggtgatgcgctcacttcaaaacggggtatcgcactataaacgacaaggaaaaatgagacctgtttcgctctatatcaattcattagaaaacaaattcattaaatttggtgtgtcaatatctccagaattaagactaaagcaacacaagaagcaatctaatctcgatcaatctatggtgtatgtgcgtgagtttaaggatgggtggcaagcaatcgatctggaatatggcattaaaactagattcaaagggaagagattaacgagcaaggatttaactgtagggtatacagaaacaagggaatatagactgcttccagaaatcattaaattcatagatgactacatcaacctgaatccaaccctaccgcaatacattatagaagatgatgaatactggtcagcgatcaaagatgattttgtattcgatgaatcacaattcacgttcccagataccagtgatgaggaatattacagtaatttagcagaacttgatttaatccagttagaggctctctaa

SEQ ID NO: 12191 - DNA, 570 bp, Escherichia coli
atgattccagtaatggctaaagatattgtttttacccctaaatcatcccgtgctgtaactccaccagcattagaacaacgcattcttactcacatcaaagataatgacttaccgttagtctttcatggctttctgggtgagtttaaagggcttcacacgagaattgctcttacatgtactcgctgcggtgatagagccgacaaatcagctactaacctgcttaatgaaggcaaacgctgtgtatgtttcaagagtgattattttcaatataaagcgggtgtgccttatctctatgtgatgcaatccggtgatattggtaaatttggtgtaacaaaatcgattatcaaacgtagggttaatctgggcttacgcaatcccggtcataactttgatattgtctatgctcgtgaaatgccatcaatgaaacatgcgctagccactgagcgagcaataaagagaatgttggatgtgggtataggcgggattgaatacggcaaaactgaaacattccactactgcaataaatcactaaacaatataaagaatattgcaagtgtggagtggaactaa

SEQ ID NO: 12192 - DNA, 1494 bp, Escherichia coli
atgcaagatattaacattcattttcaagattacagtttcgttaaggttgaatgctctccttccattgggatggaattaagagattatttctcgtttgaggttgaaggggctagatttagcccccgctacaaatattccggctgggatggaaagataagactgtttacgcatgaaaataccctgccaatcggattattgaaaacattgggtatcttcgctaaaaacatgggttatagcgtatgggtagaccccagattgcttgagaaggaagatgtaaccaaagaatcaattgattcatggattgactctttagaagtgtattccggtagcaataaaatcaatccttactggtatcaaagggaggcagtctttcagggtatccataatcgccgtagaatgctggttcttcctaccagtgctggtaagagtctcattgcttgcatgttgtctcgttggtacttagagaactacaccggaaaagtgttaatcattgtcccgactacatcgctagtggttcaaatgagggatgatttcatcgattatcggttattcccttatgaagcaatccatacaatgatgagtggtagcgggaaacatccgggagacaggttaatcactgtttcaacatggcaatcagcttgcaagatgcctcctgaatggttccgacaatatggaatgttgatagttgatgaatcacatcgcgctagtgcaaagaatatcaccaatatcatcaacggaatgaatcactgtcaattcaagattggtatgactggttccccgaaagaatcaaaatgccatttaatgcaatatgtcgggttgttcggtgatattcagaagatagtagcaattaaacaattgatggatgacggacaagttacccagcttaaaattaatgctctcttccttaagtacaaagatgaagaatgtaaagcaatgcggggcaaagattatcaggaagagattaaattcatcaatgctcataaggtaagaaataaactggcttgtaatttggccttaaaactcgccaggaagcaagaaaacgtatttttgatgttccggtactctaagcatggaaaactgctttataatgcattacagcgcgtttacgataaggtttattacgtttccagtgagattaccaccgccgaacgcgatgccttaaagaaaatggctgaaaatgagaaaggattgattgtagttgcctcctatggtgttttctctactggtgtttcgattaagaatcttcatcatgtcatctttggtcatccggttaaagaatcaaccattgtccggcaatcaataggacgtgctcttaggaaacatggtagtaaggcaattgcggtagtctgggatttgatagacgacctttgcattgtgggtaagaatggaaaagttacccgtaagaattatgctgttagtcatgcgcttgaaagaataaagtgttatatatccgataaattcgactggactcaaaaacgtataatgcttgcataa

SEQ ID NO: 12193 - DNA, 354 bp, Escherichia coli
atgttaagcaaatacttttcccgcaaggaattcaaatgtaaatgcggaaaatgtgattatgatactatcgacgctgaattactggtaattcttgaggatgtacgagaacacttcgggaaacctgtaattattaacagtgggaaccgttgtccgactcataacaagaatgtaggcggggcaaccaatagctatcacgttcgaggccgtgcggctgacattgtgatcaagggtgtctcccctgatattgtccatgcttatcttgatgggaaatatcctactcaatatggtctaggcaaatataaaacctttacgcatattgatagcaggtcgaaaaaatctagatggaatggttaa

SEQ ID NO: 12194 - DNA, 348 bp, Escherichia coli
atggctaaaaatatttttactgaatttcctacttatccggtcgatcagctttccggtatttttattaatggcattagccctgaatcaatgacacatgattttgaggcgaagagagtccaacataaacaattcaagcagatgatccgcgatgatggtaatgggctagtgttttgtgttgcgacactcgctaaacgtcctaagtatcgttttcgtgtaggccaagagattgatattgataatccttataatttcaattgcttaggtgacacgcgagcggtttgcttaggtactgctccttattatatcaagggtatgcgctttattggatatatcttccagtacctttaa

SEQ ID NO: 12195 - DNA, 684 bp, Escherichia coli
atggcaatcggtaccaataaacgaaacgctctaaggactaagaaagcgttacgccaatggactgataaagcaactgatacattcgaaagggcaataggggaaggggcgatctttgcttccagagcactccagaagaagataaacaagaatgttgatagacctactcgttggactcagcaagctgtaggtaataccaactataagaacagatcagggacgagacaccaaatcttcatcaagggcgcaagggataaggacaagaagatcggcagtcaggatgactatctgaaacattatttcgatggtggcaaaatcaataagctagttccaatcgccaacggcaaggtcttagactcccacgggaacattaaggccatcaaaggcggtaagatgatgcgtaacatcgaaaacggcaacttcatcaaggtagagaaccaggaagggacttttatcatgaagaagtacaagcctaagaaatcccgaactaaacgcgctaagaatgggtcggcggtggcaaaacgtcgcttagagaaacgcacacagaaacagagtaagcgaattgttgccgttaagtcggacaaaatttctactcgttattcgacaatgggatcatgggaaagcaacgaagcaatgatgcttgaaaacatcaataagcacattaaatcgcgcatgaaatacgtttaa

SEQ ID NO: 12196 - DNA, 171 bp, Escherichia coli
atgaagaataaacttaagaaatattttggttatctcttaattatcgccctcacttataacgtagctattagacctctgcttacgtcctttgggcttgaactcccggctatgaccgtggatgaacaattgctaaggacactggcgggggtcttttcgttattagggggctaa

SEQ ID NO: 12197 - DNA, 279 bp, Escherichia coli
atgactgaaattatatatggcggtatcggtgttatcgccttaatttgtggtgggctttggagactccaccgaaatcaaatagccacagaaaataggttgtctaaattggaatccagcgacgcattgttaaaccagaagtttgagacgatgcagaacaaccatactcagattgctgaacgtgtttaccaaatggaacaaacactacacggcatagaaaagaaagtggttgcgatggacgccaaatttgatcaggttatcgatttactcaagaaaaaataa

SEQ ID NO: 12198 - DNA, 3750 bp, Escherichia coli
atgggcgtagaagtattggtcggtgcagtgattgcgggtgcatcggctgggatggctgctgctgcaacgttttccgtaatgacggcggtcgctatcggcgttgctgctggtgcgatgaccttgatcgcttccactttggcaactccaaaaacaccaaaagtacagagtgcggataactcaactacattgggaacgacaaccgatccgaagacagtattacctgttgtatttggtgtaacccgtgtcggtgcgatctgcgtttataaggctatttctaaacaggaaagcaataagctggtgcagattttcgcaattgccgagggtgagatcgatcactataaagccttatacatggataataagaacgttctcaatagtaaaacaatgaccatccgtgatggtgttttggataaagggaacattaaagaacgctaccgcaaagttttagaagtagaatttagaacgggtaaaaatccaaataccgcattgtctttagcgaaacatcatttaggctcagattgggatgaccgttatactggtaatggcattgcgaccatgtgtattattttacgtcgtgatgatcgctcgttggcagatggtgtcgagattctccagactaacagccagatcgcggtcgatgtatccggccttaagattcgtaaccttgaaactaatgctattgaagccagcaccaacggtgtggatcagatttttcattatctgacaaataccaaatatggtttatccgtgccaattgaaaacattaacgttgattcattcctgaaagtacgttctcaagttcgccagatgaatttacactctaacggggcttgcgatcctaacgccagctttaaagagaacttgaccggattgatgcaaactttcggcggggtgatgtttgaatcctttgggcgtattactctgaaacttgatgcccctgatgtggttaaacatactttcgacgaagataatattatgatgggtaaagtgacactgaaaacaggtggcactaacggttattttaataccatcaacgcgatgtatcagaacccatcaaatgactatgctgaaacaatgctacgttatccggctgatgctgaaagtgatgctacagtccaacaagacgggcgaattatcgctaaagatgtagaatatcgctttgttaaagataaaaagcagattgataaacttgcgagcgtagaacgaaataaatctcgtattactcaggttatcagtttcatgactaccgacgcattcaccgccgaagtctgggacgttatcagcgttactcatgatgaattgaaattaagcaattccctttggcgtattactgcaattgaacgttctattgattctggcatcgctggtatgttggcaatcaccgccacggaatacaattccaagatttataccgatctgaactatgcagcaaacccagatgatcgcccaaccggattgccggattcgatgacggtacaagcaccaactaactttagaattaaggcaactggtgagactctacacggtaaaaatatttctttaacatgggatgcaccggaagactttaaccgttacggcttccaggtagattaccgcgtgagtggatcacctaactggattaaagctggtcagacgtcacagcaaatttttaatatcaatgcactggcaagcgataggtcttatgattatcgtgtatgtgctttcggtatcattgcgcgtagtgattgggtggaactgatcaaccagaatccgactgttacctatgaattgccgactccagttattcgaattaaaaacgttggaagccaaccgaactacttcaaaggcaatgaccttactattgcatgggaaaaccagcaaaagctagatgtagtcgtgaatggtgaaacgaataaattcagtgatttgtttgacgcatacattatcaagatcactaacaaagctggtaagtctattcagtaccgtacccgcgatcctgaatcatggacttatacgctcgatatgaaccagtttaacggcctttcccgtgaattgactgtagaagtatcggctaagggctataacaactcacaaagcgccccagcgcgtttagtggctattaacccacaacataaagcaattaaaggttttagtgcgcgtggtggttttaactctgctttcgttagctggaatggtgatgttttagagtcagattacgcgggtacaatcatccaatatgcgactgcgcaggatttttctaacgcacgctcagtaagcacgaatagtgttagtcatacatcctttgatattgcggacggtgattattatcttcgtgcggcacactacgatattttcggtatggatgatgctgtttggtctgaaccatatttcatgcaaatgaaatctaccattagctgggacgatcaggataaagaagcattagaagacctgattggtttacaagatcgcttagatgaaaccatcgctgatgctattgctcaagctggcgctaatgccgatgctaaaattgatgcgatgcataagcagattactaccgaaacgggtaaaactgttcaagcctcagccgatactctcaagagtctgattgcttccggtgacaaggcatcttctactaagattgatcaggttaaagctgaactgaaaggcgatatcaccaaagaagttagcgcatctgctactaccctgaaacaagctattgctaccagtgaggccgcaagcgcaagtaagattgatcaagttcgggtagaaatggacggtaagattgctggcgttaaccaggaagcagacgtaaaaatcgatgctttgaagggaaccattaacagcaaatataatctggcagttaatgcagatggtcgcgtggctggtattcacatgagcgcaaccaacgatccggcacaaccgacgagaatcatctttacggctgataaaatcgcggtagctccacaaactggatcgggtgtttgtccgtttggtatcgaaaataacaaggtttatctcgattccgcaatgatccgcaatgcatcgattggcacagcccagatcaatgatgcggctattactaccgctaagatcggcaatgctgctatcaactcagcgaagattcaggacggggcgatcaccaatgccaagatcgtaaacggtgcaattgataacgccaaaattggtaactatatccagtcttccaactggaacggatctaccggatggcatattaacaagaatggtagtgctacgttcatgaacgccaccgttaaaggtaatatcacggctgattctggtactctgaacaacgtcacgattaactctaactgtacgattaagggtatgcttgatgctactcaggtacgcggtgacttcgtgaaagcggttggtaagcgattcccacacacaaacgccaactggcctaacggcactttgacagtgcgcattgaagatgaccataatttcaaccgacaaatcattattccggctatccatcacaatggatctgttaggaaatatgacagcgcggatttatgggacacttgccgccttatcgttagaaagaatggtactgttttgtatgatcgcacggcaacttctggctgtatgtacagtggtataattgatatgccagccggacagggggcggtaacactaacgtttgaagtttcttgcgatggtgttaacaactataaccctattggatatatcagtgatttgactgtaattgtcactaagaaagcctcaacgggcatttctatttcttaa

SEQ ID NO: 12199 - DNA, 429 bp, Escherichia coli
atgctaaaaactaggcttatcaccgattatatcaattctctggtaggtcgtgaatttgttcaaggtgagaatgactgcaatctgattgcatgtaaaatcatcgatattctcgctggaaccgacctacatgattctctttatcaaaaatattccacgaaagaagaaggcttaaaagtctgcaaagaattaagcggatatacaaacatccttcaaccgattaagaaacattttaagttagtcaccgatgaattacaggacggtgatttactgattaaaactcataagctagggaaccggaaatactattctgttactccttattattccggttatggcctcgttaccgaagatggaatttggacaaataaaccagtttacgaaattgaatttgaagaagcatatcgttttgggggtgatctatgggcgtag

SEQ ID NO: 12200 - DNA, 654 bp, Escherichia coli
atggcaacgattcaagacgcatttaatagcctatgcaccaatgtagactttatcgaggtatacaacgaccagacgggtcaaaacgtgtctagattgacgctaccgcagcttttttccactggctcgatgtttcacattatcgaagccgtcaccgcgtcaggggacgttctacggcttactgatgggtacttcgatttagactataacggctttacctatcttgcgacgggtgactttctcgatatttcatctaacagcgaagagaaagagatcaacaacaacgggatcaccgtaaacatctctaacgttcgcgaggaatacattaccctgattcgtaacaagcaattcgataaatcagatgtgaaaattgagatggtatttctgaacccgaatacaggaatggttgaaaccacttaccctgttttccgtggggtagtcgataacatcaatatttctatcgaatacaatgaagatgaatgtaaaaacgaatcagagatccagcttaatagtatctgggaagttctagataaaaacgctcgtagtcatgcctcagacggtattcatcgttcctacccaggcaatgagaacgatctgttcttctcaagggtgggtcgctggaacgcagaagcgcgttgggcttcttataaaaaataa

SEQ ID NO: 12201 - DNA, 561 bp, Escherichia coli
atgttcaattctcgtaatattaaaatcacagattttactctgaaatcaaaacagcctttcttcaaggcgcaatctatttccggtaagttccagcgtcgctttactggcattcatttttatgaagcagaatttacagctaacttcatggctgaacacatcaacgaagtaaaagaatttgtagcaaaacacctttttggtcgtccgttcaaagttccactgtcttactattccaaatacacaggggacgttaagcagatggtaacggctgctactcgcacagaccgtggtgggcgtaaggtaagactctccaacttcaccggaacactgaaagcaggaactatcatccagtttgagaaccacaagaaaatctacacgatcaccgaagacgtgaaatccggtggtgaaatgaaactcttccctaacttacgccagcatgttctagcgggtgaggtgatcaaatatcagaacgtagagggtgaatttcttctcaaatcagaccagattgattggcaattagcacagattgggaaaatgaaatttgagttagtggagaatgtctaa

SEQ ID NO: 12202 - DNA, 2352 bp, Escherichia coli
atgcttgataaccttgcggataaggcatcaaaacttgatttttctggtgggttatcaagtttaggtagctcgcttaggggtttgggtgggtctgctagtcttgccgttggtggtgttctaggtgtcacaggggcaatggttggactgattaaagtcggtgctgattacgttaaacagtattcagaagtatctaaggcgaccggactctcgattgaatcccttcaaagactggaaaaggaattttctggtactggcctaaccgttgaaaaattcggtgatatcaacaaagacaccttagataaaatgggtgatgcgtgggctaacggtggtggtattgccgatgacttagaatcggttggactcaagttagaaaactatgctcacttcatgacagatccgcaaggtggtatgaaagcggcgatccaagtgttctatgacatgaagaaagccggaaaatcaatggctgaaatcaaattcatgatggaatctttagccagtgattcaagtcatatgaccagccagcttgagaaatataataatgctcaagaagcgatgaccgctatccagaatcaatctgttaaagtcaccgaagaaaacgcaaagaaatttgataagttttctcagaatatcgataagctagaaaataacatgaaaggcgcagccatgaccatctctggtcctttggttgatagcttaaactggttatttgattggtttaatattgattgggagaagagttctctattcaaggcattagaccgactgaataaagaaggtgcaaccgctacgggtggtattcttaacgccaaccataaagacgctcaaaagattattgacaagtacaataaagaaaagcgttggaataatctggcagattgggaaaaggccgcgatccgtggtgctggtgtcgatcctcgtactgctggctttgatgttgaagcatataagaaacgttttggtaattcttataagaaaaatggctctctgattgtagtcgatgctggtgaacatctgacaaccaaatcaagcggtagtttgactctaccaaataaaccagtcagaccagcttcattgggtcagtctgccgaagagaagaaagccgaggaagaaaaacgcaagaaagcagaagaggcagctaaaaaggctaaggaagccgcagagaaagcacagaaagaacgtgaggatgcaatcaagcgattgaatgctctaaacgttaaactacaaggacagacagccgcgtctatttcttctcaaaatagccaattagaatctagcttgaaagatgttaatgatgctttaaagttgggtgtaatttctcaggaagaagccgcagcgaaacgccaggcgctaatcgaccagaatgccgcaaacgtctataagatggttttaggtgctgatccggttgatgctctaaatgctttaacacaattgcaacaaatcagggacaatgagttagaaagccataaacggttacttgatggtaaggctatctcctacgaagaatatatgcgtcgtgtgaatgataccgaacaaagttattcacagattgaagaatctttgcagggaatggatggttttaaaaccaatcagttgaccaatggtttagactatcaggactcgaataacccgtttgctaaatttaatgcaatcgataaagagaaatcggaagcggaacaagattataagaccgataaactcaagattgatgggatcaccgatccggctaaacggatggaagcattagaaaaactcaatgaaaaccatcaaaaacgaatggctgcaattgagaagaaatatgctgatgctcgccagtcaatagccgatgatatgtatggcggttttgctgctgcaatgactctcttcgggcaggaaaacactaaagctatgcaaatggctttcaatgctcataaggcattctccattggacaagcgacggtgaacatgtggacggctgctaccgatgcatggaacgatccgaccaacgttaccacaggacaaaagatcgctgctgctgcattggctgtttctcagaacatggggaacatcgcaaacatcaagtctactaacgttagtggtatggctcacgatggtattgataacatccctcgtgagggtacatggttgcttgataagggtgaacgagtagttgatcagcgtactaacggtgatttgaaagacttcttatctgctcaaaaatcaggcggtggtaactctcagccgattgaagttcatgcgcctttaaccattcaaggcaacgttaatagcgcagacaagatggtcatggaagctatcaagcgtcatgctaaattagttgctcaaacggtagaagacgcccagcgtcgtagaatgtaa

SEQ ID NO: 12203 - DNA, 351 bp, Escherichia coli
atgatgcgatcggggcttagtaaagatgaaatggataatatgccaatcactttgttttggaaattatacattttcgacacctacttagaaccacaaagccccgcgtttcaagatatgcagaatgcaatgttgcaatattccatgtatatgacatcgcaaggaatgacacgcgaaactgcaaagaaactcaagcctagccaattccaattaattagagaagaaaaactctttaaaactaaagaagaactggaagaacttgcacgcaagaaagaagaagaacgtaaagctgcaacattgagcatgttcgatccatctttgcttgagaaactcagaagcgcacatacggggtaa

SEQ ID NO: 12204 - DNA, 294 bp, Escherichia coli
atgctgaaagctctttctccgaaacgcgaatctctaaccatcggtggattcactttctatgctcgccctatgtcagtaaaagaatttaacgaacatgttttcaatactgataaagaagaccgtgatgaacgttctattcttcgttgtattgaagatgaagacggtaagccagtatttgaatctatggaacaagttaaagcactgtatactaacgtccgcagtgaattaatcggcttagttgctcaagcgtccttgatgcaagatccggcagtaattgaaagcgaggtaaagtaa

SEQ ID NO: 12205 - DNA, 471 bp, Escherichia coli
atgtctcagattaatgatattttcactggtagtcagattggcattttctatcattctgataccaaaaataccgatcttgcgcacgaaggatacgaagaaattaaagagtgtgctggattcccggaaactggcgtagaacgtagcacaattgaagtaaaatcattctcttctcagtacaaccgaaaacttgttggtaagatgaatgtttccgacctgactctttccgtgaattatatcccgtcagatccagttcatactaaattggatgctgccgcagaagctggtactcgcattcagattaaggtcgagtattacatcgacgctacccgcaaaactggtattcacaccgcatttaacggctttatttctaaagctaccatgcagggcgacgatgactcagtagtcaccaaagaatacacctttgtagttgatggtgctccggttaaacaagccgttttctctgctgaataa

SEQ ID NO: 12206 - DNA, 1206 bp, Escherichia coli
atggcgagtgtaacggtaattccaaccgatattaataatttaaaagccgatatgactacggctaaatctgatattagcacagcgaaaactaatatcaccactttacagaatgatgtgaagacagcgaaatcagacattagcacggcaaagactaacatcacgacattacaaaatgatgtaaagaccgctaaaagtgatattgccaccgctaaaaccaatatcactaacttgcaaaatgacgtaggcaaactgaaaacagatcagggaactttggcgaccaagacctatgttgatggtaaacgtgaggttttaggtgattgggacgcgaccaaaaaagatacagcattacccgcaactggtacggtatttggtggtaaacatcgttccgtccataaaacggcagacgcaatagacgtttatacggaattctacacccgaaaaaacgtagacggcgaccaatctctaatggcgcgtttacatgtttatgaaaagggtaaggcttgctggtgggattttagtaccctgtatggtgggacaatgattttccccggcacgtccggttatctgaaaatgggtaactgtctcatgtcttacggaaaccgtagtagcaactccctgattaaatttgattataccgattcattgcaaatcaaatatgccaatcatgggtcaaccatgacaataaacacacagggaaccgctcacgctggtgttactgctagtttgtggggtaactctacccgtccggttgtttatgaggttggtgctgatggtggcgcttatatgttctatgcgcagaaaaataccgacaacacctatatgttaagcgttaatggtgcatgtcatgccaccgcatttaaccagcattccgaccgagatctgaaagacaatattcaggtgatcgataatgcaaccgaccgcatccgtaagatgaatggctatacctacactcttaaagaaaatggcataccttacgctggtgttatcgcgcaagaagccttagaagcaatcccagaagttgtaggctctgcaatgaaatatcaggatggtggaagcgggtcgaaaggggaagaaggcgaacgttattacacagtagattattccggtgttactggcttgcttgttcaagttgcccgtgaaactgatgatcgagtaacggcactagaaaaccgaatcgcacatttagaaactctcatcactaaataa

SEQ ID NO: 12207 - DNA, 279 bp, Escherichia coli
atgaaagatttaactttgaagtttcaagataaacaagaatataaaaaattcttagaatacatcgattgggaaaataacgaaacattacaagatcagatcctgattgatgtaattggatattacttcgatgaagtcggcagaaatgccgacgatgaaccaatttacaagcgccgtgatggttattttgtaaatattagaatcttagatgataagctggacgcatcaccgtttaccggaaatgtagtgaaccttgatgctccgcttcatgaatgggcttaa

SEQ ID NO: 12208 - DNA, 837 bp, Escherichia coli
atgagtattacttatgacaatatggatattttcaccggatcgcatgttgaattatccatttctacgaatattgatgctgaacctagttttttcgatccgtcattctctactgtagagaatctggcgtcgtttcctaccatctcgtttagcaatgagattgagacattggaagaatataattctgatgttacggcaaaattacgcggtggacgtaagatcgaaaatacaaacttgagtctctatcgtgtcattaacgatgaacatcaagagctattaaatcaggctgtactaagcaagcaattgctccgcttccgagtgttttatgtgattgacaccgaccagaatacaagcggtcagacgggctattattgtgtctacgacgcctacgtcactagcgccaaaacaaagggcagtgacacaagcgcggttagtattgaatatcgattagaaccagaaggtggtgtgctattagacgggatcgcgacacaaggacgcgtattgcgtgagggtgattttggtatcggtgctggcgttggtgtttttcctggtgttatcgatagcgaatctctgacaggaaaccgattcgtaacgtataagggaaccgctagttctaacccgttcggtgctgacaccacaatgatcagccttcaacctaacgaggaaagcggatggcagcttactagctcgacgaccggaaaccctcgtgttcgtgttcgaaccattcagaaaaacggtgctaccggatggtttaaagtttacacatcggctgaaaagccaaccgccgcagatgtaggggcagtgtcactaactgcacgcgttgattttggcgagtattga

SEQ ID NO: 12209 - DNA, 423 bp, Escherichia coli
atgctcgctaccgttaataatatgccacgtcttaagattaaacgtgctttacaggatattatcgaacaagatctaggtctggctttaaacgtagaacaaactcaaactggttttagcgatgacgtggtgtgttggattaccggaatgaatgagacttacactagggtccgtggcggtaatgcaatgcaagctgaatgcgttatcgaaatgcaattgtattctcagattcacgaaaccaaaattcatgagggtatttgccagataatccagattcagccggataacccacgttttaaagatttaggcttctccatttcagatataactccagtcgcttctaataccgattatgacgatgattctagtgatgggggtatcgttgggacacttagccttaaattttcttatctagcgcgtttttaa

SEQ ID NO: 12210 - DNA, 291 bp, Escherichia coli
atgttcaaattatcagaatcacaattatcaagaatgttccgaagtgctcctgtttttgtcgtggaaggtggtaaatcaattcgtgcttaccatgaaattactactaccgacgaacaaggggtatggacagaatcagaattcttattctgtcgtgagggagatttaaagcaaggtgatgttgtcattgtagaaaatcagcgtttcaaagttcaatacattaagcgcaatggtgacaataccagtgattgctttatcactttagcagggggtgctcatgctcgctaccgttaa

SEQ ID NO: 12211 - DNA, 2010 bp, Escherichia coli
atgcttaaatttcgccgcgatcttaacggttacggtggggttattaatgaagggcataatgatcaatacgaatttgaaattgctttctcaagtacacagccttatcagcgccaattttgggatgagcaaaatcaagaaatggtggtattagatgaaattctggtacatacaccggaagcggttgatctgtctcgcctgaataataacgctccgttgctgttcaatcataatttcgataatcacattggtgttgtctgtaacgctcgaatcgatgcggataacgtaggccgtgctctggttaaattctctaagcatgggactttggctaatgatattcgtaataaagtcattgaaggtacgatggaaaaaatatcggtcggctatgacattaaagagtatcacatcgactacgctaaatcgcaactcattgtttctaaatggattcctcacgaaatttcgtgggtcacggtgccagcggacgattcggttggtttaaatcgctctctaaatactatcacagttaatttggaggctaaacgcgatatgactaaagaacaaatcgaacaagttaaagacgaagaagaaaaagaagtcgctcaggttgaagaaactccggtagaagaaaataaagaaccggaagtagaagaaactcaagagcgccaagttgaagagaataaagaagatgaaaatctcgaagacggaaaagacgctgaacatcctgaaagtgttgatgatgatagttcaactgttcgggaagcagaagaaataaaaacagaagaacgtgaagccgctccggttgaagaagaaaaaaccgaggaagtggctgaacgttccgaagaagacgaattagaaatccgcgagatcgcgcgggaactaaatattgatgactctgaattagaacgtgcattgtcgattaaagacatgacgccggaagcattccgcactaaggcactaaataatctcgtcaatgctcaacgtaataacgaacaaattaaggactctaaaatggaaaaaacttttgacctgaacaacgtaattcgctctctggtagatggtgctgctctgggcgctaacgaagctgaatattccgcaatggctgcaactgctgcaatgcagcgtggtcgtgctgctcgtggtggctctgtattcgttccggctgctgctctgcgtgctgcttctgctggtaacaccaaagctactctggaagctgtaaccgacgaaaaactgctgactgaatcctatgtagaaatgctgatgccggaatctgttctgggtcgtctgggcgtgaccgttctgtctggtctgaatagcccggtagcagtgccaaaaatgacatcttcttgtgttgacggtttcggtttcgttgacgaaaacggtgctgcaccggaaagcaaagctgaatttgcgaacgtgaaaatggctccgaaaacttttgctggtggcaacccgattagccgtcagagcatcaaaaccgtaccaggaattgctaccttgatcaccgatcacatgaacaaagctgttcgcatcaaactggaacaactgattctgtctgacaaagataacgctaacggtccgaaaggtctgattaaacatctggttgatgctaaccgcgtagagaagaaagctgctttctcttttaaagatttcctcaaagagattgctaaactgaccgacgctggcgttcctgctcaggcgatcaagtttgcgatgagcggtgcaactgctgctgaactggaatctaccctgaaagataacggcgtttccggttatatcatcgaaaacggcaaactggctggttacgatgtagttacttctggtgttattccggcagatcacatcgttctgggtgacttctccgcgattactatcggcgagtggggcggtcttgaggtcgatctggacgattcaacctacagagcacagggcgcgatcgttccgcgtatctgggtagacctggacttcaccgtagttcagccggaagctctgaaagttcttcacatctccgaatga

SEQ ID NO: 12212 - DNA, 1515 bp, Escherichia coli
atgtttaatctttttcgacgcaaaaaggcggtagaaactccagttaaaactaatcaccgccagcaacaacaaaaaatctttatcgacaaacaagtagacaagtttcaaaaagaactgaataaacgttctctgggcttagtaggtgatcgcattgatggatcgcttcaacaagataccattacaggaaccttcaataaggctcttaaatcgaacggcaagcgcctttatgatcagggtcgtactctggctataaacaatgctgttggtaagcgatacaagcagtatatcgttgaccaagttgttggtacggggcttgatccgaaaccatcaatcgttaaatcaaatggcaaacttgacaccgcactgaataagcagatcgagaatgctttctggaagtgggcgcagagtgctaaacgcttctctcgcaacggtcgctttaacttccgtgaaatgctggcaatggcagaatctgaacgtgttcagggtggagaatgcttcatcgttttaaccaaagaaaacaacgagttacaagtttccattctgtctgctgataggtgcgactggtcgcttagtcgtgaaataagcaaagaccgcgcgatctttcaagggattgagtatgacgtagaaacaatgcgccctgtagcatactggtttagaaaaatcaatctactgactcagacctacactggcgaaaattatcgcgtagatgcttctcaggtgtgccactactaccagccactgtgcgcggaaagtttacgtggtgtgactgacttcctgccagtgattaaggatattgcgcatcaagaagcgttccgcgaaaccgcgatcatccagaaacgtattgcagctagctctatgggctttattgaacgtccgaaagattctggtgacgattttgatactggtgaagaggatgaacaatatcaagcgccggaagtagtacaggactttgcaccgggtactattcaggaattgccggaaggggcaacaatcaagtcaattcagagcacccaaagtggcgacgactttaattccttcaatgatgcgatgttcactagcgtagcaatgggcttaggcgtgttcaaacagggcttaactggtgatactagccaaataaactacagcgccagtagattcggtgaactacttcaacgtaaccgtgttaaatcgctgcaaaacaaattgattgaaacagtggtgttgccaattttcgaagcgtatctgcgtcattattccgcgcgtggtattgttccgattcgtattactgcaattcctcatattatcgataacactactattatcaggccacgtttcgagtctgtcgatgttattaaagacgtaaacgctgatattgctttaattcaaaatggtcttaaatcacgtactgctgttattcttgaacgtggtgatgatcctgaaaaagtattctcagagattcaagccgaaaagagcgcactaaatattatcgttaatggcgagagcaaggataacccttctcaagccgatccccaataa

SEQ ID NO: 12213 - DNA, 495 bp, Escherichia coli
atgagtttagaactaattcccttagtaattcgtaaaggcgaaaaaatcacgctggcgaatgaagagggtgtaacaattcaggtaggaaataataaaggtatcatttatcaggttgatgattctccggctaatcacgagattaaaaccttagattttgccgagggtaaatataccatcgtaataactttggaagaagaactggtatcaatgcaggaattaactgttttgccagtattcgccaaacaatccaaaaaagaatatctgcgggaaactatcgccttaatcgagcaagttattttcgcccgtttatctggggacgaagccgcattatctgcaatgaccgtgaaagggaatactttcgcctatgagtcattgggtgttctccagcaattgaagactgattatgaacgtcagttatctaaagtaattcaagccgaacgacgtaaacagggaattagccctattaaaaatatcaaattacgtcttacgcgataa

SEQ ID NO: 12214 - DNA, 1908 bp, Escherichia coli
atgaaactgatttctaataaaacaaaactaaaaagaattcttagaaatgccgcaaaatatatcacgccaccgcctaaactccttccatcggaatggtgcgaagcgaatatggtgctggtagatggtcctcaagctggggataaagttaaattgctgtcattccagaaaggcatgattgatgctcctttccttgagaacaagaaaaagtatgttctgatgaccagtgcgcagatcggaaagactaccatcctgaacggtatcctgtttaaccagatggctaacgatccatgcaatatgattatcggacaatcaaccgctaaagaaatgtctcaatatctcgctggtaagatccgaccgtctatcgaagcatgtgatgcattaaaagacgtggttacagacaagaatgatcgcaatgcggttaacaacaataaccagctacagctaaaaacgaatcacttcctgtacatggtatcgcttaccagtccatcaaccctacgtggtaagaccgcaaaggttggattgcttgacgaaatcgatgctgctacagcctcagaagaaggtgatccggtggcacttgctgctaaccgtttaactacctttggcgatgaaggtcgattagtcgtatccagtaccccgaccagtaagctcggaagcattaaccagcaatggttatcaagcgatatgcgtatgttttttgttccgtgtcctcattgcggggaacaccaggtgatcgagtgggaaaacgtacagtttgaatggcgtaacatcgatggtaagaacttacccgatcctgataccgctcgttatatttgcccccattgtaagaacgcatggacagaaggggaacgaatcagggcagtagcacaaggcgagtggagagcaacccgtgaaagtgaagtagccggattctggatcagtcgtctgtattcacctttcagtagtatccgcgcttgtgtggttgattttagtcatgcgtggcaatcctttgatttacaatcattttataacaccgtgttaggcaaggtatacgatgatcaggacactgccgtagaagccaatgaactggaacaactcaaaacagatgtttctatcgagaatatcccagatgacgtaattttcttgtgctcaggaattgaccagcaattggatcgcgcagaatctaccatcttaggtgtagcgaaagataaggtttacattctggatcaccgcagcttttacgatcataactgtgaacgatatgaatcacctgtatgggatcgcctggttaacttcaagaaaaccaaattctataacgttaatggtgaacgtgtgccaatgctcgccagcttcctcgatacatcaaacggtcgattcactcaggccggataccgtatttgcggcaagtggaagaacctacacgctatcaaaggtagttcatctggtaatgctccagtgattccggttaaacctactcgcacaggtggtcatgaattgcttatgctgggtgttaacgttgggaaatccgctgttcgtgaaatgctggttagaaacctgaaagataatcctcacattggcttagaaatatcagaaaccgttcctgatgattatctcgatcagcttttgagtgaatccataaagcgtactactactggcgtgcgttgggtgaaaaatccaggtagtacccgaaacgaggctctcgactgtctggtttatagctatgctgcttctcgctacgtcctttcaaaaatgtcatgggataaactcattgcaatgaaagacagcttaaacagcgttaaagaagaacccgtaaaagctcctgaatcgcaatctaacgagcaaatagaagaaactaagccaatcacacgaccacaacgtcaaaacatcgccagacgcccaaatagaggccgtagctgggtaacatcgttctaa

SEQ ID NO: 12215 - DNA, 609 bp, Escherichia coli
atgctaattaatcagcaacaaagagatgaattagaattagccttgtcttgtaccgatcatgaataccgtttgccagtcaagcataagcacggaaggaatgatataaccacatctggatttagccgcgaggaagcgaaagagattttaatagagttttatcgtgattgcggatatggtggcgacagaaaagcattttttaagaagcacagaacatcacagacagtatttcagacagtcagagactggtttgattttgacattaagcggttttacagaatcgacgatggtccaatctaccggatgcagtggataccagtaagagaaatgatgaaacagggaagattgcataatctagcggttacatatcatcgtaatgatgcattcaggaaaggatatggtgatacaagggaattgtttgtagaactcgctaacgtgaagtacagccactattacaacgatcctaaatccttctttgaagtgcttcgcaaggttgatattagtcggggtacatactattcacggttgaagaagtacgggattaaggttgagttctttatgagtattgacgatggagaactttttccgataaaatgtaaatcctctaaataa

SEQ ID NO: 12216 - DNA, 225 bp, Escherichia coli
atgactactaaagctactcgcggacgtccttgccgttttgatcgtgaacaactggcagcgattgtaaaagcgtactatcaagcaccgaaaggtaaagctgaaaaagagcaagtattgagtgaacacggtatttcaatcgctcaattctacaaatcactccataaagttgatttgaaattctttgttcaggttgacggtgaaatggtagaagcaacaggaatttga

SEQ ID NO: 12217 - DNA, 828 bp, Escherichia coli
atgaatactgttaaaactatgactactaaaactgcttctgtgtctctggttgttgataacaccaaaccgcttaccatgtcttcccgtcagatcgctgaatttaccggaaaagaacaccacaaagttaaagttgatataactaagatgttgaatgctctaggttatgaagatcacgcgaagtttcgcgtcatctattttgaccaatacggacgcgaacaaaacgaatatcaactagacgaagaaatgactctgactcttgtcactggttacgatgttaagcgtcgaatggttgttattcaggaatggaaacgactgaaagaagaaaatgaaaaactgcgttctcagcaagtcaacccatacgcaaacatgactaagctcgattggattcgcgaggcaatggaactggaagctgcaaacgaacaactgattcaggaaaagaatcaactggttgaattgcatgtacgtaaagcaatcgacacacacagcttaacccgtcttctgggcgaaaaacgcggctctgtgaaggtacaaatgattctgaaagggttatgtgctgctggtgtccttgagcgtcgtctggatgcttctggtaagcctaacggttatgatctgctgcctcctggctatatgttcgctcgtatgtcggcacacggtcagatcgagttcactgctgatgctatcccgcatctcgtaaaactcggattgcttgaagaagaaaaggccgcaactttgaaattgccacagccgaacaactcacgagcaattgtcaataacactgctttgctgattcgtcagaatgctggatcactggaacacttcggactgtaa

SEQ ID NO: 12218 - DNA, 174 bp, Escherichia coli
atgaaaacctacactcgtgaacgtgaagaaggagtaatcgaaacccgccgtcgtcgttatgaccgtaagtatggctgggtaacagaaaccgttgatgtggaatacaaagacgaaagcaaacaaccgaaacgctcaccgcttcaaatggctttaagccgtatgtgtgcaaactaa

SEQ ID NO: 12219 - DNA, 459 bp, Escherichia coli
atgattaagactaacactcctttcattcttttaggttttgatactcgtagctacaacaacttccatatgctagaagtttttgctcatcgtggttataacatcattcgtcattccgaagactccaatttctcaactgctttctacgctttaaaacaaaatggtcgtcctaccgttattgttgattgctttgatgataagttccgttctcaatacaacgacattccggcaattattgttcgtgatgacctgccttttgatgttcgtgaatatgacgttgatttagggtcttcctactctttagccgaactggaccagattatggctgattacggtaaagaaaccgctcaggaagccccagaagaagatgaacaagacgaagatgacgatgactatgcaccaatctgtttctcttctcagaatggcttctacggctatcacgatggcttagaaatgctctaa

SEQ ID NO: 12220 - DNA, 183 bp, Escherichia coli
atggcacgacctgttaagttcactcgtgaaatcgttttagaaatggcaaagcgttattttgaactgacacctgatgtagtgatgggtgaatggtttaaaggtgaaggtattgatcaatcaaccttccacaaactcttaaagaagtatgacattaaagtaaagattaccgctgaggtgtggtaa

SEQ ID NO: 12221 - DNA, 1023 bp, Escherichia coli
atgaaaaattctaagcgcattaccttcaacatgtttatcaaagcaaacggcaaactgaacattactgtcatggaaggtaaagcaagcaaacaagacaaatcctttgaagtagtatccggtaagactctgaccgaaatgcgtcagaatgctggcatcaaagacggtgccgaatggcagatcactaaccgtttcgacaaacgtcacgttaaacctacactggtagaaggtgaatccgtttattgcttcgctcgtgctgttaaagctgatgagacttactatctcgctgttgttaaaactgcttccggcttccgtgctgtaatgcatcacaagagcaagcgtaacgaatacggtgtagagacccaggaagttgcaaaacgcttccgtactgttgctactgaatccactgtaaaggatgtttctggtactgttaacaccgctaaaggcggttctttctacaaccatgcattacaggttacttcctccttcttctgcaaaaaagaagcacagaaagaagtttctccggtagtagttgaagaagttaaagaagaagttgtagtggttgaatcttccgaagttgaagcactgaaagcacgcatcgctgaactggaagctgaaatgacagcagttaaagcagaaaacgcatctctgaaagcagaactggcagcacaggaaaccactttcgaagcagtagttgaagttgaagcagttgaagaaaaatccattgatgaagaactggaagaactccttaactatcgctggggtaacggtgaagtagaagaagaacaggaaaacgagaaagaagctgatccggtagtagttccggttgaagttgaagcagaatccgcaccagttactaactttgaaaccctgcgcaataactttatggctaaattcaaaactacttgggaagataccgaagaagaacaagaagatattgaagtaaacgaagacgagatccgagaagcacagatggcactgcatgacgctatctatgacactaactacagcgcctacgcagcttaa

SEQ ID NO: 12222 - DNA, 243 bp, Escherichia coli
atgatgaatcaaaacaaagaatttctgggtaatctgatgttagaaattaccaaaatgaaagaaagaatggtagcgatggaatcagagattaaatcacttaaagctgataataaggcgttgagaaagtccttaaagctgattgatgagactaatgcggttatgatggatcatgtattccctgaatggcgaaatgaaactaaacctacacaacataagaaacctacacttcggattgttgcataa

SEQ ID NO: 12223 - DNA, 285 bp, Escherichia coli
atggctactttcttaacttatctcgtgatcatcgttgttctttctatcgtttctgctttcaaactgtctaccaatgaaaaagaacgttgggaattgtttttaggcgcgttttgtggaattgctagtttgtttgcgattgtcgaagtaatttcctttacggtggattgtctggcgatgttcttatttgattttaaaccgacttcatcaattcatgtgttgttaatcgcattttggttttactgtctgtttgtcgttttgaatcacattttcaagcgtactaaataa

SEQ ID NO: 12224 - DNA, 558 bp, Escherichia coli
atgaaagaagaattaacccttacagaaatttcccgcttatacggctatacaattaacgccgctaagaaatggcaagaacgaggaatgccatttaacaccaatacacgacgcgtaccactcaaggaagggaccgaatggatagcaaaaaatatcatcagtccactcagggaaactactgtcaaggaacaaatcgacgtagagaaattacgccgtgaacgtgctttagcggatgcagccgaacgcgagaaccaggaagcaatgaatctcctgattccggtcggatatgtagaacaggaactagcggaatattgcgggaaagtgaaacagactattttgcagatcgccacaatcgacgctttagaaattctcgaatctgcaaccgatcagaaaacgttgaagaataagctaagggagatcatcgagcgtcgtttaaatgaagtaggggatatgttcgaaaatgcagaattaggtgaagacgaggacgaagaagaattgccattaatggatgaaccggaacaagaagaatcagaagaagacgatgaatttgatgtgtcttaa

SEQ ID NO: 12225 - DNA, 363 bp, Escherichia coli
atgttaaagctatttgcaaagtacacctcgattggtgtgctgaacacacttatacactgggtggtttttggtgtatgtatctatgccgcgcataccaatcaggctctggcaaacttcgcaggtttcatagtagctgtgagctttagcttcttcgcgaatgcaaaattcacattcaaagcatcgactacaacgatgcgttacttgttatatgtgggattcatgggaaccttgagtgttgtcgtcgggtgggttgctgatagatgttcacttcctccaattgtcactcttgtcaccttctccgccatcagcctggtgtgcggtttcgtctattcaaagttcattgtctttagggatgcgaaataa

SEQ ID NO: 12226 - DNA, 930 bp, Escherichia coli
atgaagatatctctggtcgttcctgtcttcaatgaagaagaagcgataccaattttctataaaacggtacgtgaattcgaagagttgaagccatatgaagtggaaattgttttcataaatgacggcagcaaagacgctacggagtcaatcattaacgctctggctgtttctgatccgctagtttttccgctgtcatttacacgcaactttggtaaagaaccagcattgtttgcagggttagaccatgcaactggcgatgccgtgattccaattgatgttgaccttcaggatccgattgaagtcattcctcatctgattgagaaatggcagggcggagcagatatggtcctggctaagcgatctgaccgctcaactgatagcgctttgaagcgaaaatctgccgaatggttttataaactgcataacaaaatcagcaacccaaaaattgaagagaatgtcggtgattttcgattaatgtctcgtgatgtagtcgagaacatcaagctcatgcctgagagaaatctcttcatgaaaggggttttaagttgggttggcgggcgtaccgatgtagtggaatatgcacgcgctgagcgtgttgctggcgattcaaaattcaatggatggaaactatggaatcttgcccttgaaggtatcactagcttttctaccgtccctttacgcatgtggacctatatcggcctaattgttgctgtattatcgtttctgtacggagcttggatgattttcgacaccctggtattcggtaatgcagtacgtggttatccatcactacttgtgtctattctgttccttggtggcattcagttgataggtattggcgtacttggtgaatacattggcaggatatatgtcgaagtaaaatcaagaccacgttacataattaaaggaataaaaaatgaacgtcgataa

SEQ ID NO: 12227 - DNA, 1650 bp, Escherichia coli
atgaacgtcgataagataaaaatatctcttgtatatcttctaatgtatgtattaacacttggaattgcattgcatacaccaatgcattcagatgattatgcatatgcattgaagggaataagtttagaatcccatattaatcactactttacgtggagtgggcgcgtaatagctgactatatcagtggatttatactgttcattgataatcattacatcagagcggcgataaattcactggctccagttttattaacattttgcttaacaaaaatcggttacaccacaacaaataaacagtcgagttctgggttcattgttgtatccataattattttccttacatattggatatcaaataccaacataggacaaactaccttctggttggttgggtctgcgaactacttatggaccaacgttatactatgcctattcttgctttcaatatttaaagattactttaataaaaagtatagtttgtctattgtttcattgctccttgccttagctgctggatgttcaaatgaaaatacaggttttattgccgtcgcagctccagcgattttctttgctgttggatatttccttaaaaaagagcgtaactactcatttgctttctactcattcagcgccatcattggttatgcgatattggtgctatctcctgggaacgctgctcgagctaagtattttacatattggtatgacaaacccatggtggacaggcttgatgagcacttttatagccgcgcaccagaaatgatgggtatgctatggataccactgctgataattggtgtgtcactgcttgcgggttgcttgaatgcagtagagaaagatacgttgaaatctagggtcatttgctcagcggcgttcctgtctgcctctcttctctctgtagcaatgatggctgcagctccggggtatccgcctcgctcaggcaacggaaccctggttttgatgcttgtctctatgtcttttgcgttaaatcaggcttatcacggaacttctattaagctattttttgctggccttgctgcaatactgttagcatacttcgcgccgtcctattacttcatgtacaaatcatataagtcagcattcatgcaaaatgatgtgcgcatgagcgttattgcagaaatgaagcgtcaggggaaaaaagatttcatgatccctgatttttacttcccaaaacttctgtcgaagggtgataagtttgatatgtaccactcggtgaatacgtatggtgaatacttcggcgtttcgcggatcagaaagtctaactcaacttttgattattccatgcttcccgaatccaatgaaatcaaggttggcaagacaatgattccagctaaggaaactattctggaaagcatatatattgctaaaagcaatgaccttattgtgcttaaaacgaataatgacctttcatccgataacttcaagcagggtcctaaagtttatctcagaattacttataaaggcgaaaaacgacctgtttatactgacttctggcccaaatcaacaaagctaacagattatagttggaccgcgaagtcaatcaacaaaggcgatattataaacattgaggtgggaacttacgatctttctggaactcttcagataattaacatccctgtaaactag

SEQ ID NO: 12228 - DNA, 180 bp, Escherichia coli
atgaaactgacgcctgttattgctgcgctgcgtgcccgctgcccgtattttgaaaaccgggtggcaggcgcggcacagttcaaaaatctgccggaggtcggaaagctgagactcccggcggcgtatgtggtaccgggtgatgactctccgggagaaaacaaaagccagaccgactactag

SEQ ID NO: 12229 - DNA, 351 bp, Escherichia coli
atgccatcacgaatcccaaaagcctgccgtgttcgcggctgccgtaataccactacagacccgtcaggctactgcgaaagccacaaaaacgaaggctggaaacaatacaagccggggcaatcccgtcatcagcgcggctacggttcgaagtgggacagtatccgcgcgcgcatattgaagcgtgacaaaggcctgtgtcagttatgtctgcgtgctggtgtggtgcgtgaggcgaaaaccgttgaccacatcatccctaaagcgcatggcggcaccgatgcagacagtaatctgcagagcctgtgctggccgtgccataaggcgaagacggcccgtgaacggctaaagtga

SEQ ID NO: 12230 - DNA, 315 bp, Escherichia coli
atgatttcagcgaaacaaattaataacctgatatcgcaagataagtttgatgcagaagcggcaatgaagaaagtgtctgaactggaaacgctggtggcgcaggccaaagaagcggataaaagcggcatgaatttctcgtttattaattcggcaggccagtatcaactcgaggctaaaaaatacgttcgccgcatcagagataaagtcccgtactctgactgggataaagagcaacttcaggacgcaaactcaagctggatggccgaagactcatttcccgagagcgttatgcgattacaacgaaatggtcgatga

SEQ ID NO: 12231 - DNA, 588 bp, Escherichia coli
atgttctggcgcatgatcatttcggtaccgtttttctggtgtgcgatggctcaggccctgccatcaggttcttttccaccaccggggatgactttgcccgagtactggggagaagaacacgtctggtgggatgggcgggccagctttaaagggcaggttatcgctcctgcctgtacgctggctatggaggatgcctggcaggaaattgatatgggagagactccggttcgtgatttacaggacagtgctgcggtgcctgaaaagaaattccgtctgcggttgcgtaactgtgagctggcgggaacaggtaaacggatttatacggcgagccgtgtcaggatgacatttgatggtctgcggggtgaaacgccagataaattctcactactcggtgaagcagaaggtatcagtctgcagatactggacaatcaagggtatccggctcgtgttggaaaagttatgccgccgctattactgaacggaaatgaagacgaactgaagtatatgctgcggattgtccggaatggttatccgctgaaggcaggaaattattataccatattacggtttatagtgaattatgagtaa

SEQ ID NO: 12232 - DNA, 528 bp, Escherichia coli
atgaataaagttattattgcaaccatgcttgcttctactgtttcatttggcgttaatgctgctaatcagggacagggcgttattaacttcaaaggtacagtaattgatgctccttgtggtattgcacaagaatcagcagatcagacaattaatttcggccagatttctaaagcacatttgaatgcagacggaatttccgtaaaaaaagatctggatatcaagttagttaactgcgatgccacagaaatcggaaaactgaccaatggtgtgaaagtttcttttactggtacaacaatcaatggacagaatcaggagttaggtactactggtgatacagggactgcaatagttgtctcagctgcgaatggcagcctggtttcatttgatggtacagcaggttccgcgacaaaagttaaagaaggtgataataccctgcgctacagtacttgggttaaaaaagctactggtggcaccctgaaagaaggcgattttaccgctgttgctaacttcaatctggcctacgagtaa

SEQ ID NO: 12233 - DNA, 279 bp, Escherichia coli
gtgttttttcataaaaaaaactttgattttttatcgggagaacattatagacaagctggtagtatgtccgttgagcactttcgacatctggttgaaatttcttctataaacagtcgaaaagttatttgtgcgttggaagatttttttgtccacggcatgacaagaaaagaagcctgtgacaaacacaaggtcgctcagggctatttctcaataagcatgagaaaattcattaaagtaaataataccgtgtcacatttgacccggtattatgtaaggtaa

SEQ ID NO: 12234 - DNA, 525 bp, Escherichia coli
atgatgaaatcggttcttggcatagctgttgcaattgctttctgttcagtagcaaatgcggcggatcagggacaaggtaaagtaaattttaaaggaaccgtaattgatgctccctgcgggattgctccggaatctgccgatcagtccattgattttggccagatttccaaagctcatctggctgctgatggtatttcagtgaaaaaagacctagatattaaactagtaaactgtacttttgaaaacgataagcttaagacagtaaaagtggctttttctggaacgactgttaatggacagcccagtgagctagggactgcgggtaacaccggcacagcgattgttgtttcaagtagcgatggcactctggttacctttgatggtgcaagccccagtggcgcaacaaaattaaaagcgggtgataacactctgcattataactcatgggttaaaaaggccacaaatggcaccctgaaagaaggtgagtttactgcagttactaacttcaatctgacttacgagtaa

SEQ ID NO: 12235 - DNA, 501 bp, Escherichia coli
atgactctccctgaatactggggagaagaacttgtctggtggcatggacggacgagttttaaggggcaggtcatcgctccggcctgcacgctggccatggaagacacctggcaggtaattgatatgggagagactccggttcgtgatttacaggacagtgctgcggtgcctgaaaagaaattccgtctgcggttgcgtaactgtgagctggcgggaacaggtaaacggatttatacggcgagccgtgtcaggatgacatttgatggtctgcggggtgaaacgccagataaattctcactactcggtgaagcagaaggtatcagtctgcagatactggacaatcaagggtatccggctcgtgttggaaaagttatgccgccgctattactgaacggaaatgaagacgaactgaagtatatgctgcggattgtccggaatggttatccgctgaaggcaggaaattattataccatattacggtttatagtgaattatgagtaa

SEQ ID NO: 12236 - DNA, 1527 bp, Escherichia coli; identical to SEQ ID NO: 5856

SEQ ID NO: 12237 - DNA, 315 bp, Escherichia coli
atgactcaaaactatgaactgattgtgaaagggatccgcaattttgagaataaagttacggtaactttagcgttacgggacaaaaaacgctttgacggtgaaatttttgacctggacatctcgctggaccgtgttgaaggtgccgcgctggagttttatgaggctgcagccagaaggagcatcagacaggtcttcctggatgttgctgccgggttatgtgaaggggacgagctgttgccagaaacgcgcccctgttcagaggcgcggtataccataaaaattaacagttcagataactcgattactggttgttag

SEQ ID NO: 12238 - DNA, 240 bp, Escherichia coli
atgcaaaaagaagtttttatcaatattacagctgactgctcatctcctgcatcaacagcaaaagaaattgaagctcttaaatatatgattacagtaatattttccgtattggaccagaatgaaaaaaatggaatcattcatcaattaaatgaacatgtaaataatccatatatcaaaagcaatctggaaatgctgctaccaatgaaagatattggaaaaccaactgaaacaaaaggctaa

SEQ ID NO: 12239 - DNA, 534 bp, Escherichia coli
atgaacgtaaaaatcagatacggcctgtcggctgctgttctggcgctgattgccgcaggcgcgtctgctcctcagatacttgaccagtttctggacgaaaaagagggtaaccacacaaaggcataccgcgatggttccggcatatggaccatttgccggggtgccacggtggtggatggtaaacctgttattccgggcatgaaactgtcgaaggaaaaatgcgcccaggttaacgccattgagcgggataaggcgctggcatgggtggagcgtaatataaaagttccactgaccgagccacaaaaagcaggtatcgcgtcattttgcccctataacattggccccggtaagtgtttcccgtcgacgttttataagcggcttaatgccggtgatcgtaaaggtgcctgtgagtcgattcgctggtggattaaggacggtgggcgtgattgccgcacacgttcaaataactgctacggacaggttattcgtcgtgaccaggaaagcgcattagcctgttgggggatagatcagtga

SEQ ID NO: 12240 - DNA, 828 bp, Escherichia coli
atgacaactccatgcctatatagcatcgttcgctatgcgccttatgcggagactgaagagttcgcaaacataggcgtacttctgtgcgcgccaaaagaaaattactttgatttccagctcacaaagcgaaatgactctcgtgtaaagaattttttccatgatgattgtattttccctgtagcaaaagactcaatacaaagagaactacagttcgcaaaaatgcatgcgacccagattgttggacatcaacaacttgcacaattcttcagatattttacaaacaaaaaagaatcaatttttcagttcagttctacgagagtgattctcagcgaaaacccaaaagaagagctggcccgcatttacaataaatatgtaaaccactctgactacacaaaagagcgccgtgaagatgttctagccagagagctaaaacgaagtatcgatagaatagatggattgaagaacgtcttcaaacaagcaaccattgatgggtatttcgcaaagttctcaatgccattggtcgccaagaagcatgacaggatccaatgtgccatcaaacctctggcattcactcaagctgaaccaggaaaaatgatggagcatagtgatacttgggtgatgagaataactcgagcagcagaagaaaacctgctttcacttgatgacattttattcacaattgaaactcctgaatcaccaaactcaggccaaagcaaagttattgacatcataaagagaactatggatgctaagaaaataaatcatatacctgcatccaaccacaaagaaactattgattttgcaaaaaaaatacttccccaagtttaa

SEQ ID NO: 12241 - DNA, 750 bp, Escherichia coli
atggagtgcgtagcgagcagcaatagtgcaatacctaatgtcgttgaggtaatacgtcgcatcaatgaaggttccactcagccatttctttgcaaatgtgatgatgggcagttgtatgttttgaagtcaaaaccatcaatgcccccgaaaaatctcttagctgagttcatttcggcgtgtttggctaatgatatcggccttcctttacctgactttaaaatcgtatttgtgccagaggaacttatagagtactcacctgatctgcagcaacaaatttgtacaggatatgcctttgcttcattgttcattgacggtgcaatagcgttaacgtttacgcagtcaagaaacgaaacgatcatcccagtcgaacagcaaaaattaatctatgtttttgataaatggatattaaatgcagacagaacgcttactgacaaaggtggaaacgttaacatcctttatgacatcagtaacgataagtattatctgattgaccataatctctcatttgatcagaatgctggacctgaagatttttctgtgcacgtgtacggccctggtaaccgcaaatggcaatatgatttagtggatcgcgtagagtaccgccagagggtcgttaacagtttacacaagcttcctgctatccttgacgaaattccagaagagtggatagtagatgaggagtttttaccttttgtctgcactacgctagacaaaggtgattgtgatgaattttggagcgcaatagaatga

SEQ ID NO: 12242 - DNA, 342 bp, Escherichia coli
atggaagtcatcgacaaggaaaccgacagcatccaagtaaagtctaacagtgctgttttatcatatatctatggacagtctggattcaccattgatctgaataaatgttttgtgcggctattcaataatgcatctggcatgaatgccgcatatgactatgaccaaatccgggaaattaattacacattacaaaacactgatttcggtgatgcagagatctgtattatcacatctggaagcaacaattctttatggaagtttactgttaagtcagaagacagcgaaagagtttgtgagaaatggattaatatatttgatgagcagatatttaacagtatataa

SEQ ID NO: 12243 - DNA, 531 bp, Escherichia coli
atgaagaagattttactcgttgctggcgcggctctggcactggcgggatgtggtgagaaaggtgattttgagaaagcgatcaatgccaagattgggcagaccagatactgcttctcgctggataacaataacaccagcttcccgatccgtcttgccaagccacgacttgattcgactggcacagggacgaattcagtgatcctcgatggatttgtagagcagggaatgatggtctttgagcagggctatgattcgaacgtattagggataacagaggaaggcaaaaaagccaaagtctggagcacaacagatggtgcctgtgttggtcgtcgtgctgttgacgagattaaggaatggactgagccgggaaacggtaatcagaaagtagttcgcgtgacttatacgtggaagctggttgacgttccgggctggattgacaaaaaagcattcgccagcgttaaaggaatgaatgaacctgctgatggtgccatgaatctctttaagaccagtaatggctggaaagccaattaa

SEQ ID NO: 12244 - DNA, 204 bp, Escherichia coli
gtgacgatagaatttgaatctaccccagaaggggcaaggcagggaatgacacatcatcagcgaaaaattagagaacttttggaagaagaaactgctatatgcgaggacgctcttgaaggtgaatacaatcaaggtcgtctggatgaaatacataaagagatagcctatcgagaaagccaaatcgaaaaattgaaggttatttga

SEQ ID NO: 12245 - DNA, 534 bp, Escherichia coli
atggccaaaggatatccgctcttagttaatggtatacccattcaatcgagtgaaattctttaccaagcatgccgatatccagactatccagatatccaaaaggctattattacccaaggcaacccttatgaagctaaacaaaccgccagatctttcgaagccaaaacccgtgcaggttgggaaaaaaatcgagtttcggtaatgaaatggtgtgtctgcgttaagctttgccagaactgggaatcgtttttcgcgctcctggatagcacaggagagcatgacattgttgagcactcagagaaggaccaattttggggggctagtaaagactccgaaggtaacttttatggtatgaacgtgttaggtcgtatccttatggatgcgagagatgttgcaagaaagaaggggctttcagggtttgctacgataccgccgctacccttggataggtttcttctgctcggggagcaaatacgtgatgttactttctctccactaccgatgaattcggggcaaagcttatcgcttttttaa

SEQ ID NO: 12246 - DNA, 1020 bp, Escherichia coli
atgtgttatagcaatgttacagatcgtgatcttatggggcaaattgctactaaattaaatgactatcgaaaccctcctcaaggtggcatgagcattgatcatgttaatcgatggattaatcaatttgagttaaccgataggcgatttgtcttagaggaaacggaccgattaatggggattggatacttctctgagagcgactatcgcagagttattagtagtatcgccaatgatgagcaaaatgaaaggttctttcaaaccgcagcgtttctcgatatccagaaccaaggcaccagtcaatctgagtttttggatttgcttcgagaagattgtgtagaagaattcaacgttgtgaccagactgtcacaacgtcaaagagttagttcattccgtgaatttatttaccttgacgatgtttcattctcaggagctaaggcaatcaatgatttaacttggtttattgagcactttgaactccaaaatattacaatattggtgtactttttaggcgggcacacgtattcagcatggaagataaaaaaccaacttgaacgaaaatttgctgataggaatatttcagtttgcgttggtggtggtgagtttgcagttgttgaaaatcaacgccgaaacagttcgagttctgaggttttttggccaaaagcgcaaagtgtatcaatacctgaatgggctgacggtcaagtacattatttaggaacatatcgtgacggttacgtcgcgaataattttttccctaatgagcagagacgagatcgttttgaagcaattatgacaaaagttgggtttgatatccttggtcagagtcaaaatccttctgatgttataaagcctttaggcttttcaactttcaatggtgttgggtttggtggaactatctttactttcagaaactgccccaataatacccctctagcgtactggtggggaacttatcttcgaacgggaaatagagctctggattgttggtatccacttatgaagcgtaatgtgtataatcggtga

SEQ ID NO: 12247 - DNA, 540 bp, Escherichia coli
atgcaaccacttacataccaacagactagcggatttagcccgactgcggtgataaatcgttctcaaacaaaacaggcgccaggccacgaaaaaatccgtgatgccgttcgcgcctggtcggctgcagataatcaggatgtcgttgccacactcattgtgaatgagtatcgggagcagggcggcggcaccatcgatttccctgatgatgtcagccgtgcacgccagaagctgttccgcttcctcgataacaaattcgattctgaaaaataccgaaataacgtgcgtgaactgaccccggcaattctggcggtactaccgctggaatatcgcggccacctggttgagcaggatagcttcatggctcggctggctgaaatggaaaaggaactcagtgaggcaaaacaggctgtcattctcaacgcaccacgccaccagaaactgaaggagatgagtgaaggcattgtgtcgatgtttcgtgtggacccggatttggctggtccactgatggcgatggtcaccaccatgctgggggcaatatga

SEQ ID NO: 12248 - DNA, 1005 bp, Escherichia coli
atggcgaaagccggtctgcgcgaacagaaccgactttcaggtgcaaatcgtaacacactcattgcggggggaattatggcaaacactgctgagatattcaattttccagtgccggatgtggcacaaaaggagcggcgcgtggcagatctcgacgatggttatacgcgcattgcaaatgagttgctggaagctgtgatgctggccggattaacacagcaccagcttctggtcttcctggctgtcatgcgcaaaacatatggctttaataaaaaactggattgggtgagcaacgagcaactttccgagttgaccgggatattgccgcacaagtgttctgctgcaaaaagtgttctggtaaagcgtgggattcttattcagagcgggcggaatatcggcattaataatgtggtcagtgaatggtcaacattacccgaatcaggtaagaaaaataaagtttacctgaaagaggtaaatttacctgaatcaggtaagaaaagtttacccaaatcaggtaaaggcgtttacccgaatcaggtaaacacaaaagacaaactaacaaaagacaatataaaacctttttcgtccgagaattctgacgaatcctctgaccagccagaaaacgaccttcctgtggtgaaaccagatgctgcaattcagagcggcagcaggtgggggacagcagaagacctgaccgccgcagagtggatgtttgacatggtgaagaccatcgcgccatcagccagaaaaccgaattttgcagggtgggctaacgatatccgcctgatgcgtgaacgtgacggacataaccaccgcgacatgtgcgtgctgttccgctgggcatgccaggacaacttctggtccggtaacgtgctgagtccggccaaactccgcgacaagtggacccagctcgaaatcaaccgtaacaagcaacaggcaggcgtgacagctagcaaaccaaaactcgacctgacaaacacagactggatttacggggtggatctatga

SEQ ID NO: 12249 - DNA, 735 bp, Escherichia coli
atgaatacaccagatgctgatctattacacttatttgaatcattaactaccgagcaaaagattgatatcgcaagacgcttactacaaaacaaagaaataaaatcaacaacagttatttcttctgatgaagataaagctatttcgttttcacaaccttatgtatttgcttttacttccaactttcgtgttttctctaatcttgatatatccaagaatgaattccgtgtattaacctatattttggagtatatggagtttggaaatctgatcaatctttcacaatcatcgctgtgtaaagcattgaatatcgcctccggtaatatgtctaacatttttaaaaaactcagacagaaaggaatacttgtagagcatcatggtcatctctatatcaactctaacattttcgctaaaggaatgagtcaccaactggatcagaaacgtaaagaacagttgagcaacgctcgcaatctttgcgcagaaatagaacagtatccagaaagttattcagctatgtcaaaaagtgaaagaagaaccctatccttagaaacagagaccaaagaaatctatactgacgcatttgttttcagtaagaagaaaaagaataacgctgttcctaatcccaataacagcatacatgttgataaaccacgaaaagtatataaaagaacaaaggaaaatgaggaagcaagaagaaactctgttgacgcagactctcatatgcagaaagtatcctga

SEQ ID NO: 12250 - DNA, 264 bp, Escherichia coli
atgaaaaaactacccggttcgcttgagattaagctccacgaaaaactatccaagagtgatatactaaatatattggctgagcagatgaccatgcctgaggaaacatttggcattcaggagtttaagattttctcttatcttgaatgctacattggagataagaaacaagcattatattatagaagtcgcaacagtgccgtagccacattcaaattaaagggtctggaatccccggtaaacacggctaagctcatatcaaaataa

SEQ ID NO: 12251 - DNA, 303 bp, Escherichia coli
atgcgcaaagcgaaagaaagagaagagtatgaacgacctttaaaggcttttatttcttcaaaaataaaagaaagtggcttatctgagaagaatttcaaaaagcaggtttgttcaagctgcgactatctgaaagatcgcgccacaaaatcaagatactttagtgaacgacctgacttgttagaaaaatattataatgaaagattaattcgtttctcgataaaagacactgatggtaaagtaggaaaaatagaaatttatacagatacaggcgagcttatttttgaacggtataaaaccaagtaa

SEQ ID NO: 12252 - DNA, 1020 bp, Escherichia coli
gtggttgtagtacgcgctcatctgactctgcgatggctggctgccgccactgctcacaccggcgttcaggctgtaactgctcagccctttgttcagcgtgtcgctgtaacccacagtattggtgtaacggtcgttgctcatgctgccgctgtagctggccgtaccggttccccacggcacggacagacgaacaaacgccgaatcgttatcccggttctggtatttcgaacgggatgcagacagccccagcgcgatattcttaaagctgaacgcatcgaagtagcggttcaccgacagcgtgtaatagtcagatgtccggcggtcccagtaagtctgatggctgtactgcaggttgaccgaggtcttccagtcctcgaagttcttgttgagcgtgacggtgtacagctccttctcacgtcccgtgaagtcattccggtaacgggcattgaggtactggtccatcgtcatgtaattgcgttcagagaagcggtaacccgcaaaagtgatatccgtattcacgtcatcaaaacgtttggaatagctcagacgccaggatttcccctgcttcgtctcttctcccggaatgcgggccacggactgggttacatcagcggaaacagtaccgaactcattcaggtcccggcccagccccacagccagggcgttgtaatccccggcaacgataccgccaccgtaaagagaccacttgttgctgataccccaggatgcctcaccggcagcaaagaccgggccttccgtggtgtgctcatagttacgcgaacgaccggaaaccagccggtaacgaacctggcccggacgggtcagatagggcacatatgccgtgtccacctggaacgtttttttccgcccgtcctgctcgataacttcaacatccaggcggccacgcacggagctgtccaggtcctgaatggtgaacggacctgccggcacggtggagtcatagaggatgcgtccctgctgcgaaatcacgacacgcgcattcgtatccgcaatccctga

SEQ ID NO: 12253 - DNA, 1251 bp, Escherichia coli
atggcccaacagcggttgctggataccatcccaggtcagttctgtattgaggaatgcttctgcgcgctcggtcagtttcggcagtaccggtttcaggtacgtcatcagcacgcggaacaggttaatgcccatagagcaaatcgcctgcagatcggcatcgcgaccttcctgcttcgccaccacccacggagcctgttcatcgacatagcggttagccaggtcagccagcgccatgatttcacggatagctttaccaaattcgcggctttcccacgcttcaccaatcacttcagcggcatcagtgaaggttttgtacaactgcgggtcagccagctcgcttgccagcacaccgtcaaaacgcttattgataaagccagcgttacgggacgccaggttaaccactttgttcacgatatcggcattcacgcgctgaacgaaatcttccaggttgagatcgatatcatcaatgcgcgaagacagtttggcggtgtagtagtagcgcaggctgtcggcgtcaaaatgattcagccaggtgctggctttaataaaggtgccgcgagacttggacattttcgcgccgttcaccgtcacatagccgtgaacaaacaggttggtcggcttgcggaagttgctgccttccagcatggcaggccagaacaggctgtggaagtaaacgatatctttaccgatgaagtgatacagctcggcagtggaatctttcttccagtattcatcgaagcttacgctgtcgccgcgcttgtcacacagattcttgaaagagcccatatagccaatcggtgcgtccagccagacatagaaatatttgcccggcgcgttcggaatttcaaaaccgaaataaggggcgtcgcgggagatatcccactgttgcaggccagattcaaaccactcctgcattttatttgccacctgctcctgcaacgcaccgctgcgggtccatgcctgcagcatttcgctgaaagagggcagatcaaagaagaagtgttcagaatcacgcattaccggggtagcaccagaaaccaccgatttcggctcgatcagttcagtcgggctgtaggtcgcgccgcagacttcgcagttatcgccgtattgatccggggatttacatttcgggcaggtgccttttacaaaacggtccggcaggaacatgcctttttccggatcgtacagctgagagatggtgcggtttttaataaaaccgttttctttcagacgagagtagataagttctga

SEQ ID NO: 12254 - DNA, 240 bp, Escherichia coli
gtgcgtcgagtgatagttgtcatagctgatgttaaagcctgcgaaatcagtctgatgttcctgactcatttcgccaatcatctgctccggagtgataccaagctgctgagctttaagcatgatcggcgtgccgtgggcatcgtcggcgcagatgaagttgacctcgtggccgcgcattcgctggtaacggacccagacatcagcctggatgtgctccagcatatggccgaggtggattga

SEQ ID NO: 12255 - DNA, 246 bp, Escherichia coli
atggagttatggactggtgaagggcttgccgcaaacaacacccgtgcaggaacaaaccctggtatactggctacatacggtgatggcgggattgttaaaacagatgagtcaggtgtaaaagttccatcttcactacgtgctattggcactcgtggtgtttatagattaggtgccaacggagggaatacaggaacggaaaaccgcccccgtaatattgcgtttaactatattgtaagggctacttaa

SEQ ID NO: 12256 - DNA, 618 bp, Escherichia coli
atgaataatgctgctgcagtacttgatcagaatggtatcgctataactgcaggcgatattaccgtttataactacgatgctgaaaaccgtgaatatctctctgccactgttgagtatctcgcttatggtgttggaattccggctcactcatgcattgacgcgccaccagaaaaacgccccggcttcgctgtctgtcgtgatacggaccagaacatctggaaatatgttccagaccacagaggcgaaacggtttacagcacagagaatggtaacgctgtgcaaatcacacaaccgggagattaccctcctgatacgacggtgaaacagccagctactatctatgatgtctgggatggtgagatttgggtgacagatacgagacgacagcacgcagcagaactggaagctgccagagcgcatcgtcagcaacttgaggaacaggcaatggcatctgttgagcttattaatctcaaactacgagccggacgccgattgacgccccaggagacggaaaaactaaacgccgtgcttgatttcatagatacgcttaatgcgactgacatcagcactgcaccggatatcaactggccggaaatgcctctggcagcagccagttga

SEQ ID NO: 12257 - DNA, 168 bp, Escherichia coli
atgacactcaaagatcccagtaaaggtaactctagaaagagagatgccgaggaaatgctggaggcaatgttgaagactgaacatccattttcaattttctggcgttggcattacttgggggatggtttcctaacagcaaattatcccgatttaagagttggtttttaa

SEQ ID NO: 12258 - DNA, 270 bp, Escherichia coli
atgaacaatatcaaaatgatcactctcttccatccacatgacaaaacaccattcatgatctctattgtaagcaaagtagaagatacagaacttggattgaaattaactcttgaaaacggcaacaacatttgtgtcaacaactatgaccattatctgttatcagagtctgcaagtcgttacgataaagacaggttaaagaatatttatattcgcttggtttcagaactcacgcagatgagtgaagaaactataaaatcacagatgttataa

SEQ ID NO: 12259 - DNA, 357 bp, Escherichia coli
atgtaccccaaactggcacaggcttaccccaccaataaattaccggatttacggggcgagtttattcgtggctgggatgacgggcgagggattgatgcaggacgagagatactttcatttcaggaaggcactatcgtctccggttttgatgataatgatactggggatatcagttcacttagctcaacacaatacggatttggtgacactctaacctctaatcaatggggggccataaatggcaaaaagtggatatttgatgcatccagtaaaggtgcacaaaaatatgactggtgggcttatgtatcagctcgtccgcgtaatattgcatttaattacatcgtaagagcggcatag

SEQ ID NO: 12260 - DNA, 429 bp, Escherichia coli
atgtaccccaatctggcaaaggcttatcctacaaataaactaccggatctacggggtgagtttatccgtggctgggatgacggacgtggcgtggatgcggggcgagccttgctaagtcttcaggatgactcttttgaagcgcacaggcatgagtcatttttttatgcgggtatttcacgcaatgaaatcccattaaaaaatcttccaagttcagacgagatgctgactttaagttccacaactaatgccttgtcaccggacggtattgatgccaccaattcgttaattggtaatgacgattacaactgtcttatcgaagggaataaaaataacaaacgaacagcaacgggtctaagtaccagtattgtcggcgcagcagaaacccgcccccgtaacattgcgtttaattacatcgtaagggcggcatag

SEQ ID NO: 12261 - DNA, 471 bp, Escherichia coli
atgtctggaaaaaatccattctggaattatgattataatgcagcacaacgcaacagagagattgtagattcatatcaacaggctaatgaagccagactgaactctcagcaagctcagtttgaagcatctatggcaaacgatgaagttaatcatctacaattgcgccttaaccaaaccatagccagtcataagaaggtagtgggcaggtatgaacaacagttggaagtatttaaaaataattttttccgcgttgcattacacaagaatattctttatagaactatcagcaaactgcaggaggaatggcccgataaaaaggagtttatccttgacaaaatgcaaagacaacgtgatttatgtaatcaacaggattataaagaaagatggtggaacgctattaaaggtaataaccttgctgatgactatctttattttccgttccctgaacgtaaggtcaagaacaacgtataa

SEQ ID NO: 12262 - DNA, 294 bp, Escherichia coli
atgaaaaaaatgttgttttctgccgctctggcaatgcttattacaggatgtgctcaacagacgtttactgttggaaacaaaccgacagcagtaacaccaaaggaaaccatcacccatcatttcttcgtttcgggaattggacaggagaaaactgtcgatgcagcaaaaatttgtggcggcgcagaaaatgttgttaaaacagaaacccagcaaacattcgtaaatggattgctcggttttattactttaggcatttatactccgctggaagcgcgtgtgtattgctcacaataa

SEQ ID NO: 12263 - DNA, 303 bp, Escherichia coli
atgcaggtgcgccagcgtgatgttgctgcgctcgatgcaaaatacacgaaggagttagctgatgcgaaagctgaaaatgatgctctgcgtgatgatgttgccgctggtcgtcgtcggttgcacatcaaagcagtctgtcagtcagtgcgtgaagccaccaccgcctccggcgtggataatgcagcctccccccgactggcagacaccgctgaacgggattatttcaccctcagagagaggctgatcactatgcaaaaacaactggaaggaacccagaagtatattaatgagcagtgcagatag

SEQ ID NO: 12264 - DNA, 378 bp, Escherichia coli
atgggaaccacgccactcagggacttacagaacagccctgccggtcccgagaaaaaattccggctacggctacgcaactgtgagcttgcaggtgcaggaaagcaggtctatacggcaacccgggtgcgtgtgacttttgatggcattcccggagaaacaccggacaaattctcgctgacaggtcaggctgaaggtataaatctgcagattatggataattacggatatccggcgagagcaggaaaaagcatgccacctttaattctcagggggaatgaagacgggcttgattattctcttcgcattgtcagaaatggttatccattaaaggctggcgattactacgctgcattgcgttttaaactggactacgaataa

SEQ ID NO: 12265 - DNA, 171 bp, Escherichia coli
atggctacaccgcttattcgtgtcatgaacggacacatctacaaagtaccaaatcgtcgtaagcgtaaacctgagctgaagccatccgaaataccaactctgctcggatataccgccagcctggttgataaaaaatggttgcgactggcagcaaggaggaatcatggctga

SEQ ID NO: 12266 - DNA, 357 bp, Escherichia coli
atgtaccccaatctggcaaaggcttaccccaccaataaattaccggatttacggggcgaatttatccgtggctgggatgacggacgaggtattgatgcaggacgagagatactttcatttcaggaaggcactatcgtctccggttttgatgataatgatactggggatatcagttcacttagctcaacacaatacggatttggtgacactctaacctctaatcaatggggggccataaatggcaaaaagtggatatttgatgcatccagtaaaggtgcacaaaaatatgactggtgggcttatgtatcagctcgtccgcgtaatattgcatttaattacatcgtaagagcggcatag

SEQ ID NO: 12267 - DNA, 429 bp, Escherichia coli; identical to SEQ ID NO: 12260

SEQ ID NO: 12268 - DNA, 237 bp, Escherichia coli
gtgtttgagagcatcttttacccatgctgcggtagcgaacgatttccccctgctgatgaggtattcactgatttcgctgtaccacatatggctgagtgcattctgggaaagactgcgtttctcacgccacggtttaagcaccatgcgaaagcattttccgtcctccagataaggctggatctgctggccgatagcgatgaagttaccgcgatgcagtttgatgccatcttgtggtag

SEQ ID NO: 12269 - DNA, 216 bp, Escherichia coli
gtgtttgagagcatcttttacccaatctggagtggcgaacgttttacccctgctgatgaggtattcactgatttcgctgtaccacatgtggctgagtgcattctgggaaagactgcgtctctcgcgccacggtttaagcaccatgcgaaagcatttgccgtcttccagataagtctggatctgctgaccgacagcggtgaagttaccgcgatgtaa

SEQ ID NO: 12270 - DNA, 357 bp, Escherichia coli
atgtaccccaatctggcaaaggcttaccccacgaataaattaccggatttacggggcgaatttatccgtggctgggatgacggacgaggtattgatgcaggacgagagatactttcatttcaggaaggcactatcgtctccggttttgatgataatgatactggggatatcagttcacttagctcaacacaatacggatttggtgacactctaacctctaatcaatggggggccataaatggcaaaaagtggatatttgatgcatccagtaaaggtgcacaaaaatatgactggtgggcttatgtatcagctcgtccgcgtaatattgcatttaattacatcgtaagagcggcatag

SEQ ID NO: 12271 - DNA, 357 bp, Escherichia coli; identical to SEQ ID NO: 12270

SEQ ID NO: 12272 - DNA, 858 bp, Escherichia coli
atgattaagacaacagtaataattccctataaaaataatccagatgctctcaaacgagcactggttagcgtgagtagccaaactgtacctgttagtattattgtcatcgatgataattcagaaaaatggtgttcggcggagaaaatagttcaagaacaaaataaattctccgatattacgataatcacgcataaaaacaatcaaggggggggcgctgctaggaatagtggcattatcaaagcaaaaacacaatatatcgcttttttggattgtgatgattactgggatgaagataaaattgaaaagcaagaagtactattcgaaaacataaaaaatgaaaaagcaataattttttcatcaataaaagtagttaatgaaaatttagatgtgattaaattgtatgataatgacaatattattgtaaataattttgccagctatgtatttaaagatagtgggttaatacagacatcatcaatttttttggatacaaattttgctaaaaaaaacttatttgatgcaagtttaaaaagacatcaggactatgatttttgtttaaagctacaaaaagatggtgggattttttatgggtgtgggggaacttttagttattgggtcgtgcctcaagatccattgattgcactaaaaaaaggatacgatacaaatttaagtattgatttttatcaaaaatataaaacgttaatgggggaaaaaactagttgctattttctagtaaaaacgcctatgtggttcagtttgaaacaacgtaagctgttttctttcttactaaacttgtctagaaagtgcggagtaaaaacaactctccgagttttaatgctgtctcttatacacatctga

SEQ ID NO: 12273 - DNA, 789 bp, Escherichia coli
atgaaaaaaacgattatcttaatacctgtctataatgataaaggtgatttactgaaaacattaaatagcatcaatgaagatgatgataatttcgaaatattaattatcgatgacggaagtgtcataccattaacattacctcgcgaaaaatataaatttaaaattaatattttcaggcttagtgagaatatggggataacaaaagcgctaaatacagggttagacataataagcaatagaaaagatatagattatatagcgcggttagatgcgggagatatacagcaaccaaatcgaataacaattcagaagaaaacatttgaatccgatagtgaattagtgatgcttgggacgaatgttaaattttacgacacaaatcacaattatttatttgatactaaattgcctttgacagatatacagataaaaaaagaaaaatatataagatcttgttttatacatccttcggtaatgtttactaaaaggattattgatcaaggaatgcgatattcgacaaaatttcctgcagcagaagattatgaattttttcttagaattatattaaattataaagtggctaatttagataagtcatatgtgtattgctttgatcgggctaccgggatcagtatcagaaagcgaaatatccaaatcaatagtgtcttaaaatgcttgtttaagcatcgagattatacatcaacatattggtatttcggtgttttcaaagtgttaatgcaaaaaattttcccgagaaaagtgtttaatttaattaagtcgaaacaaaaatga

SEQ ID NO: 12274 - DNA, 1092 bp, Escherichia coli
atgaaagtattatttttaattacaagaggagatgagttaggtggcgcacagactcatgtcaaagatgttatattaggattaataaataagtacaacatagaatgttatctcgcctgtggtacaaaaggcatattcacagacattatggaagaaaataatattaatgtaatacatattgattcgatgaaacgggaaatatgctttggtgatatcattgcactaaagaaattaaatgatattattaaagatattaatcctgatattattagttgtcattcatcgaaggcaggtgtattaggtcgtttggcatctttgggaacccgaaccaaaaaagttttcactgcacatggttgggcttttacggaaggaatatctcctaagaaagctgcaatatataaaaaaattgagttacttttatcttacataacagatgcaacaattaacgtttcatattatgacaagaaattagctcttaaggcagggttgaaatcgcagcactatgtgatacataattgtattcctgatgtccattatgaaaaaaacaatggtattgccaataaaacagttcttgaatttattatggttgcacgtttttgtgcgcaaaaagatcatgaaactttacttaaagccttttcaaatatagataaagaaaagtggcgattgactttgattggtggtggagatagtaagtcaattaaggagttagcgaaaaaacttaatatagataacaatattaattttgtaggtcaaacaaaaaatgttgtcgactttttgaaccattctgatgtttttcttcttatatctaactgggaaggcttccctatttctatactagaagcaatgagaagtagtttacccatcatagccactgacgtgggaggagttagcgaagctgtcaagcatggttacaatggctttttgattaataaaggaaatgtagctgaactcgaagaaacaataattaaaataattgaatcttattcatcattaaaaatacttagtcaaaattcaagaaaaacatattgtgaaagattcaaagttgacaagatgatagatttatatgcatcaatattcgatgaggtattaaaatga

SEQ ID NO: 12275 - DNA, 894 bp, Escherichia coli
atgacgaatttaaaagcagttataccggtagcaggtcttgggatgcatatgttgcctgccactaaggcgatacccaaagagatgctaccgatcgtcgacaagccaatgattcagtacattgttgacgagattgtggctgcagggatcaaagaaatcctcctggtgactcatgcgtccaagaacgcggtcgaaaaccacttcgacacctcttatgaattagaatctctccttgaactgcgcgtgaagcgtcaactgctggcggaagtacagtccatctgtccgccgggcgtgaccattatgaacgtgcgtcagggcgaacctttaggtttaggccactctattttgtgtgcacgacccgccattggtgacaatccatttgtcgtggtactgccggacgttgttatcgatgatgccagcgccgacccgctgcgttacaaccttgccgctatgattgcgcgcttcaacgaaacgggacgcagccaggtgctggcaaaacgtatgccgggtgacctctccgaatactccgtcatccagaccaaagagccgctggaccgtgagggtaaagtcagccgcattgttgaatttatcgaaaaaccggatcagccgcagacgctggactcagacatcatggccgtaggtcgctatgtgctttctgccgatatttggccggaactggaacgtactcagcctggtgcatggggacgtattcagctgactgatgctattgccgagctggcgaaaaaacaatccgttgatgcaatgctgatgaccggcgacagttacgactgcggcaaaaaaatgggctatatgcaggcgtttgtgaagtatggcctacgcaacctgaaagaaggggcgaagttccgtaaaggtattgagaagctgttaagcgaataa

SEQ ID NO: 12276 - DNA, 996 bp, Escherichia coli
atgaacgataacgttttgctcataggagcttccggattcgtaggaacccgactacttgaaacggcaattgctgactttaatatcaagaacctggacaaacagcaaagccacttttatccagaaatcacacagattggcgatgttcgcgatcaacaggcactcgaccaggcgttagtcggttttgacactgttgtgctgctggcagcggaacaccgcgatgacgtcagccctacttctctctattatgatgtcaacgttcagggcactcgcaatgtgctggcggccatggaaaaaaatggcgttaaaaatattatctttaccagttcagttgctgtttatggtttgaacaaacacaaccctgacgaaaaccatccacacgatcctttcaaccactacggcaaaagtaagtggcaggcagaggaagtactgcgtgaatggtataacaaagcaccaacggaacgttcattaaccatcatccgtcctaccgttatcttcggtgaacgcaaccgcggtaacgtctataacttgctgaaacagatcgctggcggcaagtttatgatggtgggcgcagggactaactataagtctatggcttatgttggaaacattgttgagtttatcaagtacaaactgaagaatgttgctgcaggttatgaggtttataactacgttgataagccagacctgaacatgaaccagttggttgctgaagttgaacaaagcctgaacaaaaagatcccttctatgcacttgccttacccactaggaatgctgggtggatattgctttgatatcctgagcaaaattacgggcaaaaaatacgctgtcagctctgtgcgcgtgaaaaaattctgcgcaacaacacagtttgacgcaacgaaagtgcattcttcaggttttgtggcaccgtatacgctgtcgcaaggtctggatcgaactctgcagtatgaattcgtccatgccaaaaaagacgacataacgtttgtttctgagtaa

SEQ ID NO: 12277 - DNA, 651 bp, Escherichia coli
atggttgttttcggttccggcaacggttgccggatgcggcgtgaacgccttatccgtcctggggggctgggcttggatcttgtaggcctgataagacgcgttagcgtagcatcaggcactgaatgccggatgcggcgtaaacgccttatccggcctacggttctgtgctcggatcttgtaggcctgataaggcgcgtcagcgtcgcatcaggcactgaatgccggatgcggcgtgaacgccttatccgtcctggggggctgggcttggatcttgtaggcctgataagaggcgtcagcgtcgcatcaggcactgaatgccggatgcggcgtgaacgccttatccgtcctacggttctgggcttggatcttgtaggcctgataagacgcgtcagcgtcgcatcaggcactgaatgccggatgcggcgtgaacgccttatccgtcctacggttctgggcttggatcttgtaggcctgataagacgcgtcagcgtcgcatcaggcactgaatgccggatgcggcgtgaacgccttatccgtcctacggttctgtgctcggatcttgtaggcctgataagacgcgttagcgtcgcatcaggcaaaaaacggcaacgaacacaacaaacacagcctcacttggcatcaaatttatga

SEQ ID NO: 12278 - DNA, 1371 bp, Escherichia coli
atgaaaaaattaacctgctttaaagcctatgatattcgcgggaaattaggcgaagaactgaatgaagatatcgcctggcgcattggtcgcgcctatggcgaatttctcaaaccgaaaaccattgtgttaggcggtgatgtccgcctcaccagcgaaaccttaaaactggcgctggcgaaaggtttacaggatgcgggcgtcgacgtgctggatatcggcatgtccggcaccgaagaaatctatttcgccacgttccatctcggcgtggatggcggcattgaagttaccgccagccataacccgatggattacaacggcatgaagctggtgcgcgaaggggctcgcccgatcagcggcgataccggactgcgcgatgtccagcgtctggcagaagccaacgactttcctcccgtcgatgaaaccaaacgcggtcgctatcagcaaatcaatctgcgtgacgcttacgttgatcacctgttcggttatatcaatgtcaaaaaccttacgccgctcaagctggtgattaactccgggaacggcgcggcgggtccggtggtggacgccatcgaagcccgctttaaagccctcggcgcaccggtggagttaatcaaagtgcataacacgccggacggcaatttccccaacggtattcctaacccgttgctgccggaatgtcgcgacgacacccgcaatgcggtcatcaaacacggcgcggatatgggcattgcctttgatggcgattttgaccgctgtttcctgtttgacgaaaaagggcagtttattgagggctactacattgtcggcctgctggcagaagcgttcctcgaaaaaaatcccggcgcgaagatcatccacgatccacgtctctcctggaacaccattgatgtggtgacggccgcgggcggcaccccggtaatgtcgaaaaccggacacgcctttattaaagaacgtatgcgcaaggaagacgccatctacggtggcgaaatgagcgcccaccattacttccgtgatttcgcttactgcgacagcggcatgatcccgtggctgctggtcgccgaactggtgtgcctgaaaggaaaaacgctgggcgaactggtgcgcgaccggatggcggcattcccggcaagcggtgagatcaacagcaaactggcacaccccgttgaggcgattaaccgcgtggaacagcactttagccgcgaggcgctggcggtggatcgtaccgatggcatcagcatgacctttgccgactggcgctttaatctgcgctcctccaacaccgagccggtggtgcggttgaatgtggaatcacgcggtgatgtgccgctgatggaagcgcgaacgcgaactctgctgacgttgctgaacgagtaa

SEQ ID NO: 12279 - DNA, 156 bp, Escherichia coli
atgataagttgggtcatcattaagagtgacatttttaaattttttcaaatagtttattatttcttcatctccatctttaacaaatggatgtcggctataataaacatgattgtatttcttaactactttttcaaaaacatttttgaaatcaagtaa

SEQ ID NO: 12280 - DNA, 714 bp, Escherichia coli
atgaagatttttttggagaatctttatcattctgattgctatttcctgccgataagagataaccagcaagaccttgtcggcgttgagttaattacccatttctccagtgaagatggtacggttcgtatcccgacgagtcgggttatagcgcaacttaccgtggagcaacattggcaattattttctgaacagttggaattactaaaatcatgccaacacttttttattcaacataaactctttgcctggcttaatttaacgccacaagtggctacattattattagacagggataatttcgcaggcgaactattaaaatatccgtttattgaactgttgattaatgagaattacccgcatttcaatgaaggaaaagataatcgcgatcttttatccttatcgcaaatgtatccccttgtgttaggtaatttgggagcaggtaatagcacaatgaaagcggtgtttgatggtcttttcacccgcgtcatgctggataaaagttttattcagcaacaaatcacgcatcgctccttcgaaccgtttattcgtgcgatccaggcgcaaatttccccttgttgcaattgcatcatcgcggggggcattgatacgccagaaatattggcacagattatcccctttgatttccatgctctccagggatgcctgtggcctgcggttcctataaatcagataacgacgttggttcagcgataa

SEQ ID NO: 12281 - DNA, 396 bp, Escherichia coli
gtggaaaaaacagttaatagcgatttgcatttaggtcagtactggagaatagacattgtctgcgatccagaacttcgagatgaggttgagcaatatttttctcgacacgatgttggttttagcaaaattgaagttttttccgtcgaaaatccatataaacttgctctgttctttgatttcgcgaagaagggtgtggaggttgcaaaagccattatgggactcttagaccgaaatgatattgaaataacgatgtatcgtgctacggacagtagcccgcagtctgtaaaaagcatcaaattgcgtaagtctgaagacgtagagaaatgtaaagatttgcttagtacgtgtgtcgcaattggcgttcaacgaaataaggaaaaagaggggagcgaatga

SEQ ID NO: 12282 - DNA, 936 bp, Escherichia coli
atgcgccctgaggggcgtaaaggcaaacgcattcgtaaaaaatttaaaacgaaatcggatgcagttttatatgagcggtgggtgctggcgcaacagcataacaatgagtggaaaggaaactccattgatcgccgtccgctgtcagtgcttattgacttgtggtggaaataccacggccagctaatgaagtcagggcataacacgcgccttaaattgctgcgcttgagtgaggcaatggatgacccgtgcgtgcataaacttaatacaacgatgctcaccgagctacgtgtgtccaggatagagcaggggatacagcccagcaccattaatcgagagattggggcgttaagcgcgatgtttaccgcactcatctcatccggccattttcttaacgataaccccgttcaaggccttaaaggaatgaaggttaacgagcgcgaaatgggatatctgagtaagtctgaatgtgttcagttgctggatgcactggctgaaaatcccgatgaacggctggctgtcgaaatccttctgtcgaccggggcgcgatggggcgaggtagcggcactggagcagcgccgtgttcttcattgtcgaatcactttttcaaaaacgaagaacagcaaaaaccgtaccgttcctatttctgaaagcctgtttgaaaagatcaaaaaacggggcgggaaactggtgtttccgacgctggattatccattggttcgcgatgtcatcaaaacggtcgcacctgatgttcctgacggccaggctgttcatgcgctgcgccacaccttcgccagtcatttcatgatgaacggcggcaatattctgacgctccagaaaattctggggcacgcaaagattcagacaacgatgatttatgcccatcttgcgccggattacttgcaggatgcggtgagatttaatcctattgctgggtaa

SEQ ID NO: 12283 - DNA, 312 bp, Escherichia coli
atgtcaagtgggtacgaaaaaaaactgaaagagatacggaaaagtgaagggttaactcaagctgagtttgctgatgttactgggataaatctcggaactataaagaattatgagagcggtaaaagagaggttggtttaagcgttgttgatcgcgtaattaattctaaggatttcgaaaaatacactatatggcttatgacgggaaaaacaaatgaggctgctgggcagatcagtccctctctctcccctgatgggccagaaaacacatcgtcttctcaaaaatcccgcaagactggtacacagcccggctaa

SEQ ID NO: 12284 - DNA, 279 bp, Escherichia coli
atgacaaagctcttgaacacatacgagcaagcggattttgagcgtttggcggcgttctacccataccgcgatgagcatggattaccggtactcgaagaaagcctgaaagattacgcgaagcgtaccaatcaaactgttaatgcagtgaaaaggcaggctgacagagcagcccttcccatcaaccaagaagaaaaaaactcaaaacgtacagtaaatctcttcgcaattttcctgaaaaccatcagaaacgcagagaaatacgtgcagatgacaaaataa

SEQ ID NO: 12285 - DNA, 279 bp, Escherichia coli
atgatcaaagagcatgcacaaggtgtatttatccgttttattgattttcgcggtgaactgttattgcgcgcatcagctattgatggagttgtcccatcagaaaaaaatgcagctacttacgtttatctgaacggcacgcgcctgaccgtagaacttccgtaccagactgtacacggaatcattagcgaagctgaaaaagcacgtaagattaatggcgatgaaccctatatcgaaattatttgtatggattcagaagctgaaattcagaaagcagattaa

SEQ ID NO: 12286 - DNA, 243 bp, Escherichia coli
atgggcaaagaatataaaactctcattaacaaagcacttgagcgtttttattttcgcttaagtgcatcaggtgctcatgctgaacgtgcagcccgtgactcattgaccagggcaatccggagtctgtatgacgtggctttttacgctgatgatctggatgcacttaacgaactttccgagctgatctgtgccgcagaatgcggggagcatattgaaccgtataagctggggaatattgcatga

SEQ ID NO: 12287 - DNA, 219 bp, Escherichia coli
atgagcaggagaagaatcactcgcagacatcaccgcacacacctgaattcctcagcaacgctaaaggcacttattcaaagcgagatcggtgatttcttcgcgggagttggctcaccaggtgaaccagaaacaccagaagcgatgcagcgtgagctcatgatacgcatagataacacttttgatttcttctacagcatgcacggaattaaacagaaatga

SEQ ID NO: 12288 - DNA, 390 bp, Escherichia coli
atgattgacgctcatgacttcacaagatgggtgcgcacacaggacacccgtctggctcccgttctccaaggattatttgatctttacatccgtggtcgtgacaacagagcacgcactacaaaaccggagaatgtggataccctttatttcacagtagacgactgctaccgcgtggacttcacaccacacggactggcgttgcactgcctgacaccgcacggcgaatcactgctggcgtattacgactccccggcctccgtatttgcggcaatgctggcgcatcgcactgctggcgggtgtgcctcgctgagtgaatacaccgctgaatttaaccgcctttccaccatcttcttgcaggagtggcagcgcgtgacgggataccagccatga

SEQ ID NO: 12289 - DNA, 312 bp, Escherichia coli
atgacgacaccaaccagacgaataagtttctatctgaagcccgccgccgtcaagaacgaaggcgaagcatgcgcctggctggacagccttacaccagaagcccgtaaaaacggccaacgcgtggcttttctggctgggctggcgcttctgaaaatgaatccggcagaggcttaccgactggcagcatgggctgacgatgaggcgttatcagtgacacaaaccaggacagaacgcctcctgtcacagccagtaccaaccgcacagataaccagtcagatggccggaaatatcagggcgttatttcctgaataa

SEQ ID NO: 12290 - DNA, 384 bp, Escherichia coli
atgagcaaaatcaactatcaggcattacgtgaacgttattcacctgcaccagtaccaaaatgccctatttgcggcgaagaaatgtcaattcagcgaatatctggagcacaggttgtttatggctgctccggttatggtgatgatggagatttcaaaattggtcgaactcttgccgacgaacattatgaaaaatcacgcgtaacagtgttggatgtcggggatcctgaagtattggcgctacttgattggctggaaaccaaagacaaccgaatcgctgaactggaaaaaatcgccactgactatgcacttaaattccagaaagcacaggacgcattaaagtacgccgctttgctgcatagcaggacagcgcagctacaagactaa

SEQ ID NO: 12291 - DNA, 531 bp, Escherichia coli
atgaagaaagattcatatccttatttgatttgcatgactgtttcagtgctagggattattttcctcttttactggtggagggcagatatctacaggattacatatcttaattcgcgtatatccaattattacatcttgtgtagtatgggtatgtcctttttcttctccttgtttctggtgaagaggggggtagtgaagcaaagtggctggaaaggactgtcggaatacctgaaggtttatgctggctcttgcattcttacagggatatccctgattatccctcttatgatggtgacttattttttaccaggagtaacatcatcatatgttgcaccgtatgagtatacatccggtagttcaagaagctgttccggagcgtttgttgatgatcccgatctgcataaaaatattcttatttgctatccgtatggtaactatgaatatgacaatattatctatgttgaaaagaaaactaatgcattgggcgttgttgtgacgtatgcacagactgcacgagacgatgctgaataa

SEQ ID NO: 12292 - DNA, 528 bp, Escherichia coli
atgagtaattcactgttaccgccatcagccagcaatttcatgcgttgcgccgaagctgtcggagcgcgcattacagacattccggtagacctcaacacgctgtggtcgccggacacctgcccggtgcatctgctgccttatctcgcctgggcattttccgttgaccgctgggatcgcaactggccggaagagacaaagcgacaggtgattcgtgatgcatggctgatacaccgacacaagggaaccatcagcgcactgcgccgggccattgagccgctgggatatctcattcgtgtgtctgagtggtgggagttcgacggcgaacccggaacattcaaggttgatgttggcacgctggacagtggtgtgaccgaggaaatgtatctggaaatggaacggctgattgccgatgccaaacccgcaagtcgccaccttatcggcctgaacattatccaggacattcccggctatctgtatacaggcggtgtggtctgtgatggtgatgttattactgtttatcccggataa

SEQ ID NO: 12293 - DNA, 2736 bp, Escherichia coli
atgagcacgaaatttaaaaccgttatcactactgccggagccgcgaagctggcagccgccactgtccccggcgggaaaaaagtaactctgtctgcaatggccgtgggtgacggtaatggcaaattgccggtgccggatgccggtcagacgaaactggtgcatgaggtctggcgtcacgctctgaataaagtcagcgtggataacaagaataaaaactatatcgtggctgaactggttgtaccgccagaagtgggcggcttctggatgcgtgagctgggtctgtatgacgatgccggaacactgattgcggtcgccaacatggcagaaagctataagcctgaactggctgaaggctccggacgtgcgcagacctgccgcatggtcattattgtcagtaacgtggcgtccgttgagctgagtattgatgccagcacagtgatggcgacgcaggattacgtcgataacaaaatcgcagaacatgagcagtcccgccgccatcctgacgccacgctgacagaaaaaggttttactcagttaagcagtgcaacaaacagcaccagtgaaaggctggcagcaacgccaaaggcagtaaaagcagcctatgacaatgctgaaaaacgtatgcagaaagaccagaacggtggcgatattccagataaggacgcttttctggacaatgttggcgttaccagcctgacgtttatgaaaaacaatggcgaaatgccggttgatgccgacctgaatacatttggtcccgttaaggcttatcttggcgtctggtctaaagctacatccactaacgcgacggctgctaaaaatttccctgaagacggtgcagtcggtgtactggaggtattcaatggcggtaatttttcaggaatgcagcgttataccaccagaacaggcaatgtttatatgcgcaacctttctggcacatggaatggttcagacggtccgtggagttactggcgtcaggttcagtctgcaacacgccccctgagcacaaccattgacctgaacacgctcggaggcgcagagcatcttggtttatggcgaaacagtagtggctcaatcgcttcatttgaccgcaactatccggaagaaggaagttatggtcagggactccttgaagttcttgaaggtggtggttactcgcgaacgcagcgttacacgacccgccgtggaaatgtttatgttcgctgtctttcggcctcgtgggatgcagagaacccacagtgggagccgtggtcaagagtgggctaccagtcagaaagccgttattacgacggtgatttgaatgatgtaacctcaccaggtatttacagcgttacaggtaaagcgaccaatggtccaatactggacggaaacggcgtgacagtcctcggtattctggaagtgttgaggcgctttgatggtgttaacgtatggcagcgttatacaactgccggaacaggtacaacccttaaaggtcgcacgtttgagcgcgtttttaccggcagctcatggagcgaatggcgggaagtttacacatcttattcactttccctgaatctgggtatcggtggcgcagtagcaaaactcaccagcctggactggcagacctacgattttgtgccgggcagtctgataaccgttcggctggataatatgaccaatattcccgacggtatggactggggcgtcattgatggcaacctgataaatatcgctgttggtccgagtgatgattccggtacgggacgctcaatgcatgtatggcgcagcactgtaagtaaagccaactaccgcttttttatggtgcgtatttcaggaaatccgggaagccgcacgatcacgacaagacgtgtgccaatcattgacgaagcacagacatggggcgcgaaacagacattcagtgctggcctttctggtgaactgtccggcaatgcggcgacagcaacaaagctgaaaacagcctgtaaaattaataacgtttcgtttgatgggacatcagatattaacctgacgccgaaaaatattggtgcatttgcttcaggaaaaacaggagacaccgttgcgaatgataaagccgttggatggaactggagtagcggagcctataacgcaactattagtggggcatcaacattaattcttcattttaatatcggtgaaggaagttgccccgccgcccagttccgcgttaattataagaacggcggtattttttatcgttctgctcgtgacggttacggattcgaggctgactggtctgagttttataccacaacgcgaaaacctacagcgggagatgtcggtgcactgtcgttatctggtggtcaattgaatggtgcactgggtatcggaacatccagtgctcttggcggtaattcgattgttttgggtgataatgacacgggctttaaacaaaatggtgatggtaatctggatgtttatgctaataacgtccatgttatgcgctttgtttccggcagcattcagagtaataaaaccgtaaatattacggggcgcgttaacccctcggattacggcaattttgatggccgatacgtgagggatgtccgacttggcacacgtgttgttcagaccatgcaaaaaggcgtgatgtatgagaaatcaggccatgtaattaccgggcttggcattgtcggcgaagttgatggcgacgatccggcagtattcagaccaatacaaaagttaattaacggaacgtggtacaacgtgtcacaggtgtaa

SEQ ID NO: 12294 - DNA, 528 bp, Escherichia coli
atgcagcatttaaaaaacattgtcgccggcaatccaaaaaccgttgagcaatatcagctaacaaaaaattttaatgttgcctggctgtggtcagaagacggaaaaaactggtatgaggaagtgaagaactttcagccggacacaataaaaattctttacgacgagaacaatattattgtggccgtaaccagagacgcttcaacactggaccctacaggctacagcgttgtcgaagttcccgatatcaccgccaatcgtcgcgccgacgattcaggaaagtggctgtttaaggacggagctgtggttaaacggatttatacggcagacgagcagcaacagcaggccgaattacaaaaggccgcattgctttccgaagctgaatcagtcatccagcagctggaacgcgctgtcaggctgaatatggcgacggatgaggagcgcacacgactggaagcttgggaacgctacagcgttctggtcagccgtgtggatacagcaaagcccgaatggccacaaaagcctgagtaa

SEQ ID NO: 12295 - DNA, 3120 bp, Escherichia coli
atgattggacaatttttaagtgcaacagagattttagcaaagaactatgttcgtaataaaatggttaaaaatccattttattcgaatttaaaatggaattttgttgaaaaaaacatcataagattaacatcctcaccggttaaatcagtactttgcatatcagctttttcatttgtactactttatgttggatatttaaacgaattatttataaaaaagaatcttttacattatttcccgtttaggcattcattaaccgaatggcaaacaaccattttaagtggccaattgacaattattggtattgtatacccccttgttataggtttagtaagtgtcttattccaaaaaaaagcagatagaaaaatagcccaaactgcttatcagcgttactcaggattcatgcttgctggactcagcgggcttttcttatcaggatttatacttctcagtgtactaattaaaactgtctttggaagttatctttatggtatagcctgtctaatcagcatattatggcttttgataaacatagttctttctatttggttctttatcgtgagccttgaaattcttgatgatgtaaaacggcaaataattataaagcgatacattgccttcgaaatagtaatgccccatatttgtaacaaaatctcagccaatcttaggttataccctatctatcaaaaacataactattcaaatttagaaatcaagcaagccgattacaaaggagaatacatatctgtggctagcagttattctaaggaagatgagttaagtttatatcaccgtccttttcaacttattcttaatcttattaattaccaactaaaaaaaaagaatcattttgcgtcatttgtcattggtgataatcgtgcaaaagaaacagaatccacgggtaagatactttttagcgttaaaaatatcaaaccagacagcttattaataaaaatacttaagcaatgtttttatagggctccgattaaaggaggagatttttccgtaagtcttacaatgcaggctataacagcagatacgtatatgtatctgcgggattctgatctctttagttttgacgatgctatctctgcattaattaataactttaataatctctgcgatttgtatttttttcaagatgacaataccaacaataatttcttactgatcactacagaattatttgaacggagttttcaatatgagttttcagatgaagtttataaaatatcaaataattccatggataaaattaatctttctgaaagattttttgaattatgtctttggagcggagtgcgtattcttaataatagaaaacatcttatcagcaatgaactttgtatctatatgggaattactcgttcacaatggtcaatattaacagaatggttccgaaacaaccaatcactcttaaatgcctcgcttcgttcacgttataatcgtatattaagaacctatgccactgtttgggagcaatatcaagaaagcatcaactttcgtttctgcaatacagagaattcagatttatttgaattattttgcaaaacgcaactacaagaacttccatcgatcattattgatgcaacacagactcgcgatccttctactattgatacagccgtcgatcttattaaccgatggcagcactcaatgaatattgacagccattcggtagaaaaatacagttaccaaggccagctttttaacccgggttttttcatctccaaaaaactaaacttcaattcagacagagagtggttcaatattgccatcataaatgcgttgactgacatgcgtatatgcacatgtctttatctgacatcaagaatcaatacttctgacaaactaatgacacattacattaaacttattttagagggtaaacttattgaccaaaccggtggatatgaaactcccactgaagaaattgataatgcaagccaactaatcaagatattagttagaatctgcctgtggacatggtctgaaaatatggagcacaatgggtggatgaatagtttagcaaggcgtttacgtgactatgataaaacagacatggtgatgggcagagtttacagtaatgtttttgactgtggatttattgatatggaacaatcatgggtgcagctattattaattttctctaacaagaacgatagcgtatcaaaagaaataaaagaagcaatagaaaacgactatataacatatcgtgagaagcaacgactcattggaatattatcaaaaatttgtaactccatcgaatacactaaaatcaagctgactttaacattggacgatctccaaacaaaaaaagaaaacttaagaaagttgcttcaagagcatattaacatgctaaagaaagatcttgatatgagacttcaggatgctgccatagatgtacatcgactagatagcactgcacgtaaaacatcagaacatcttcgtaaacgcatcaagaaaacgctccctctttcacttttcaaatctattgattttaagcaggctagcgattgtttcacaaaacataagatatctattaagatagataaagaaccgtatgccgaaggaatagaatccatcccttatatcaatgaaggtgatattcaagcaggcttcattctcaaggacatccagagaataatactttcaaatttatttagcactggctgttcgcaacataccgtaatagaagatttcaatatgttgattgatcacataaaatcatctgctgacttggctggcaaactggttcttgtgatgagtaaagagatctttcagcaatataatcgtatgcttttcgataatcccaacctcagagaactaatgagaaaaaatgatgatggctctatgaacataactactgaatccggtacctgtaaggtttacttcttaccatttgttaatcaaccattttctcttgtggtaaaggataactacttcactaaattaattattagagaatatgataataataagttagtaaatgtcacttcagagaatatcaaaagtgactcagataaattcaagctaactcttaactatgagttgaatatagtatttgaaggaaacgctgatttaaaaatatctcactcgcaaagagtgacatcagaataa

SEQ ID NO: 12296 - DNA, 1110 bp, Escherichia coli
gtggcgacattaacccggctttttattcatcctgttaaatcgatgcgcggcattggtcttacacataccctggcagatgtcagtggtctggccttcgatcgcatctttatgatcacggaacctgacggtacgtttattaccgctcgccagtttccgctaatggtacggtttactccttcacccgtgcatgatggcttgcatctcaccgcaccagatggcagtagtgcatatgttcgttttgctgatttcgccacacaagacgcaccaaccgaagtttggggcacacattttaccgcgcgaattgcgccagacgcgatcaacaaatggctaagtggatttttctcccgcgaagtgcaattacgctgggtggggccacaaatgacccggcgcgtgaaacgccacaacactgtacccctgtcatttgctgatggctatccttaccttcttgctaacgaggcctcgttacgtgatctccaacaacgttgtccggccagtgtaaaaatggagcaattccgccccaatctggtggtttccggtgcatcggcctgggaagaagatagctggaaagtgattcgcattggtgatgtcgtgtttgatgtggttaagccttgtagccgctgtattttcaccaccgtcagcccagaaaaagggcaaaaacatccggcaggcgaaccattaaaaacgctgcaatctttccgtactgcccaggataacggcgatgtcgattttggtcagaatttaattgcccgtaatagcggcgtgattcgcgttggcgacgaggtggaaattctggcaacggctccggctaaaatttacggcgcaggtgccgctgatgatactgccaacaccacgcaacaaccggacgcaaacgtagatattgactggcagggacaggcatttcgtggaaataaccaacaggtgctgctggagcaattagaaaatcagggaattcgtatcccttattcttgccgcgcgggcatttgtggaagttgccgtgttcagcttttagaaggcgaagtcacgccgctaaaaaaatcagcaataggcgatgatggcactattctttgctgtagttgtgtaccgaagactgcgcttaagctggcgcgttag

SEQ ID NO: 12297 - DNA, 1560 bp, Escherichia coli
gtggaccctgtattctctatcggtatctcatcattatgggatgagctgcgacatatgccagcaggcggcgtctggtggtttaacgtcgatcgccatgaagatgctatcagtctggcgaatcaaacaattgcatcccaggctgaaaccgcacacgtcgcggtcattagcatggacagcgatccagcgaaaatctttcaattagatgattctcaagggccgggaaaaataacattattttcaatgctaaatcatgaaaaaggtctatactatttggcccgtgatttgcagtgttctattgatccccataattacctttttattcttgtttgcgcaaataacgcatggcaaaacattcctgccgagcggcttcgctcatggttggataaaatgaataaatggagccggctaaaccattgttcgcttttggtaattaattccggaaataataacgataaacaattttcattgttacttgaggaataccgttcactttttggtcttgccagtttgcgttttcagggcgaccaacatttgctggatattgctttctggtgcaacgaaaaaggggtcagcgcccgtcagcagcttagcgttcagcaacaaaatggttgctggacattagttcaacaccaggaggcggaaatccaaccacgcagcgacgaaaaacgcattctgagtaatgttgctgtactggagggtgctccgccgctatcggaacactggcaactgttcaacaataacgaagtcctgttcaatgaagcccgtaccgctcaggcggcgacggtggtcttttctttacagcaaaatgcacaaatcgagccactggcccgcagcattcatactctgcgtcgccagcgcggtagtgcgatgaaaatcctcgtacgggaaaataccgccagcctgcgcgccaccgatgaacgtttattattggcctgcggtgcaaatatggttatcccgtggaatgcgccactctcccgctgtctgacgatgatcgaaagcgtgcaagggcagaagtttagtcgctatgtgccggaagatatcactaccttgctgtcaatgacccagccgctcaaactgcgtggtttccagaagtgggatgtgttctgtaatgccgtcaacaacatgatgaataaccctctattacctgcccacggtaaaggcgttctggttgccctacgtccggtaccgggtatccgcgttgagcaagccctgacgctatgtcgccctaaccgtaccggcgatatcatgaccattggcggtaatcggctggtgctgtttctctcattctgtcggattaacgatctggataccgcgttgaatcatattttcccattgcctactggcgacattttctcaaaccgaatggtctggtttgaagatgatcaaatcagtgccgagctggtgcagatgcgcctgcttgccccagaacaatggggcatgccgctgcctttagcgcaaagttctaaaccggtcatcaatgccgagcacgatggtcgccactggcgacgaataccagaaccaatgcgactgttagatgatgctgtggagcgctcatcatga

SEQ ID NO: 12298 - DNA, 210 bp, Escherichia coli
atgggattttggttcgctcgtacaaaaacgagggataatgcacccagccctcaggcaaaaaatacagaagttccggcgtcagcgcaggttaacaagcgtggtggtgtgtatatctcatcacagcaaatttctgagcttcctgaggttaaggagatgcgtcgtctcgctgctgcaatcgttaaacaggatcttgccactgtaaggaaatag

SEQ ID NO: 12299 - DNA, 861 bp, Escherichia coli
ttgttagctcttctaattatccccattctggttagtggttatattatgataaccgctaaccagtatcattatttccgtttataccgacatgaaggccagcttctttatatgaaagtagctgcattaggtacatattgccttgttgcttctgtaataattgccgcatttataaaatataaatatcctgattttcacctagttcacgatatggtggaaacttttaatgtaacgtcaaaaccagaaacagatagaatttacatgtggctacttcttctgtcagtcacatcaatttgcttctctttgtgttatgtatcttttgtttggctaaaagatcttcttttaggttgtttttataaacgtgatatttatgacaaaatatcagaggcaatgaaagctagggtattgcgaaaaacgtactcccagggttctttagatttgctattgcttgatgcaatcgaatcagatcctaagaaaccaatgttaattactttatcatcaaataaagtatacgttggaataataaatggttctggtgagccaacggaaaatcaagggccacaccaacacatatcttttgttcctttaatgtcagggtacagaaacaaagaaaatttatctgttacatttacaaacgcttacccaggtgaaatccaaattaagcgcagtgctgcgataaaagggataagcaaaaagaaagttcaaggtctagaaattatggtatctatagacgaaataagtcatatatcatggtttgactttgaagtatataaggcaacaaataacaaagtagaaacaaagggtcatgttgttaatgtgaccaaaaatggtcgcaacatatactacagaagtggcaggaaataa

SEQ ID NO: 12300 - DNA, 504 bp, Escherichia coli
atggataatactatcttaggcgcattgataggtgctgttattgctatagtttccacttatataaatgcaggacaaggatacaaaaacagcataagattagagcgacaaaaaatattaagggataaacgagagcaattatttataaattgtatacttactaaaaaagtcatagattcaagcacaattaccattctcaatttcgtaaaaaatgccagataccactctgatagtaaatttgacgtatcaagagcgaatccgttgcaaacgatggaaatgctaataaacatataccttcctgagtataaaaaagacttacaagaactcaataatgcgtatcaagaatttcacaaatactactctcaatatacatgtgcacataccttcaaaaatatgcctgataatgagaagtcgaggtttattgaggaggctgatttttatgcaaaaaagatatatggcaaacttaatgatattaaggacaagatatcattaaactcaatagtataa

SEQ ID NO: 12301 - DNA, 2472 bp, Escherichia coli
atggctatcagttggatccagcccagctttgccggtggtgagattggaccgtcgttgtacggtcgtatcgacatggcgaagtaccaggtggcattgcgcaagtgcgataactttatcgtgcggcagtatggcggcgttgagaatcgacctggtacgcgttttgtcggtgccgccaaatacccaaatcggaaatgccgcctgatcccgttccagttctcgacggttcagacctatgctctggagttcggacaccagtacatgcgcgttatcaaagatggtgcgttggtgctgaacagcagcaatgttatttatgaaattgccacgccatatactgaagccgatctgttccgaattaaattcacgcaaagcgccgacgtgcttacgctggttcacccggcatacccgccgaaagagctgcgccgctatgcgcatgacaactggcaactggttgatgtggtaacgaagaacgggccatttgaagatatcaatattgacgagtcagtgacggtttatgccagcgccagcactgggacaattacgttaacggcaagcgcctcaatttttggcgcggagcaggtaggcaaattgttctatctggaacagcctgcagtggattctgtgccggtatgggaaaccagtaagagtacgtcgattggcgatattcgccgtgcagacagtaactactatcgcgccgttacagcaggcaaaacaggcactttgcgcccttcgcatacagaaggcacatcatgggatggctggggcggatccggtgatgatgataccggcattgagtgggagtatctgcacagtggttttggcattgcccgtatcactgctgcaaatggcactactgcaactgctgaggtgatttcctatatcccttcgcaggtcgttggcgaggataatgccagctataaatgggctaaatatgcctggaacagtgttaatggttatcctggcactgttgtttattatcaacaacgtctttacttcgccgcatcgactgcgttccctcagactatctgggccagccgtaccggggattataaggattttggcaaaagcaatcctacgcaggatgacgacagaattatctacacctatgccgggcgtcaggttaatgagatccgtcacctgattgatgttggttcgctggtggcgctgacttccggaggtgagtacgtcatcaccggcgaccagaacaaagtgttaaccccatcatcatttgcattcagctctcagggatcaaatggctcaagcaacgtcccgccaattgccgtggcgaatattgctctgttcgtccaggagaaaggcagcgttgtccgtgatctggcctactcattcgatgttgacggctatcaggggaacgacctgaccatccttgccaatcatctttttcagaagcacagcattgttgactggtgcttctcgattgtcccttactccagcgccttctgcattcgtgatgacggtaaattactggtgatgacctatttgcgtgatcagcaggtttttgcatgggcaccacaatccagtaccggaaaatatgaaagcacatgcagtatcagcgaaggcaatgaagatgcggtgtatttcgtcgttaaccgaaccgttaacgggcaaacagtgagatacatagagcgactgtccagccgtttatttaccagcgatgaagatgctttctttgttgattctggccttagctatgatggaagaaatacgtctgacagaacgatgaccatcactggtggttctggtgaatgggattaccgtgcggaatatacaatcagtgtttctggtggtgcgtacttcaccagtagtgatgtcggcgcgcaactacagttcccttataccggaactgatcctgatactggcgatgaagtgtcaaaagaattacgttgcgacattatttctgtaaccagcaataccgctgtagtggttcgtgctaacaggaacgtcccgccatccctcaggaatgtggccaccacgaactggcagatggcgcgccggacatttggaggcctgtctcatcttgaaggccagaccgtaaacattctctctgatgcgaacgtggaaccacagaaagtagtttccggaggtgccgtcacgctggaatctccgggggctgtagtgcacatcggcctgccaataactgctgaattcgaaacactggatatcaacattaacggacaggaaacgctgctggacaaaaaacaggtgatcccatccgttactctggttgtgaatgccagtcgcggcatctgggcgactacgcctggtggtaaatggtacgaatatccacagcgtgaattcgagttctacgatgatcctgttgatgatgctaccggaaaagtagaagtgaaactggacagtaactggggcaaaaacggacgtgtaaaaatccgtcagcttgatccgttgccgctgtctgttcttgccgttattcctcgccttactgttgggggattctga

SEQ ID NO: 12302 - DNA, 315 bp, Escherichia coli
atgacaatcacaaaacaacgagtagaaaaaatcatatatcgccatgaaatgggactgaacagcgatgtcactgccgaagaggtttatgacctggctgtactggcgctgaatttatcaaatatcgcaaacctcaagcgatacgagcttgatatgggtggttgtgactcgtgcggtcaggattgtggcgctgacatgacagaagattctgatggcgattatgtcctgtttgatgacgtggttaagttgtttgagtttgatacaaccactcagaagatagaaagcccagcaaaggaggcaaccagtgagccagattga

SEQ ID NO: 12303 - DNA, 648 bp, Escherichia coli
atgagtgaatttagtaatcttttaaatagcattcctggatggttatcctcctccctcacagctctagttggtactcttattggcggatggtttaccctaaaaggagttacccaacaagctaagctgtctaaagtagagacagaaagagaatcccttgaattgcaactttcagtattaaaaggtgttaagggagaagttttcaccctaatcaatttatataataaaaggatgaaaacacacattgataatatcaaaccgggacaaatgttgattctcactttccctgtaggggatgataatttcacattctatgagcaaaatgcgaatgtcattgcaaaactaaatgattctgccagagactcaataattaatatctacacatattcacggtcattaatacaatcatttaaaggaaacaacaaactcattgaggattatgaaaaaatccttattggtatggctgacaataacaaagataaaaccatgtataagagattacatgatgaaaaaatagatgtaatggtagattatgctcaagggataaaaaatattgatgcagagctaagagatgcagtcaataagggattcaacattatcgaccaagaagtaaagtcgctacaaatgaaattaaacaaattagcttcatag

SEQ ID NO: 12304 - DNA, 546 bp, Escherichia coli
atgaatattagtgaacttaaaaactgtatacactatgaagtaataggttataaacgccctttctcctggcgaaaagcaattgttcgcgcaataaaacacagaagattacgttatttattttggtggcgcatagcaaaatatctttttgataaaggcggataccggcgaaaggttgcaggaaaaatagaacgcttcattcttgataaatacaatgtaaccgttcccttaactgtaaatattggtaaagggttcgacatatcttatctcaatggcgttgttatcggtcacaaagttacaataggtgaaaattgttcaattaagcctggagtaactattggacttcgcggtgaatttaatgatatggatattgtcataggaaataatgtaaccattggctgtaacgccaccatccttggtggcaaagtgcatatagggaataatgtaaaaataggagctcatgcattggtactgcatgacattcctgatgactccacattcattactaaatttcactctgaaattatttataactcatctcacacataa

SEQ ID NO: 12305 - DNA, 1098 bp, Escherichia coli
atggcaaaaaatgactttaaagcattcgcaacgggtaaaaatgccaatgttatgtcgcaggaggaatgggaagcgttgcctgcgcttttatccggatttacagcagggaaagcatccagtgcgcaagtcaataaggttattcggcaggccagctttattgcatctgcaatggcacaatatacagcaaatgaaagtggactggatgtacaggacgatggcgatcaggccggctttatcgcaaaaatgtcgtctgcattagataagaactatcagagaattaatgtcatacttaccgcacttgctaatctttcagcatccgaaaacaaattaccgtattttaccaatcaagataccgctaatttggctgacctgacacaggttgggcgagatattttggcaaaaagctctgttgctgatgtccttaaatatcttggtttggaaaataattcgacctttcctgtaggtgccccgatcccgtggccatcagatacagttccatctggttatgctctgatgcagggacagacttttgacaagtctgcatacccgaaacttgcagccgcttatccgtcaggcgtgatccctgatatgcgtggctggacaatcaaaggtaagcctgcaagtggacgtgatgttcttagccaggaacaggacggcattaaatcgcacacccacagcgccagtgcttcaaatacagatttagggacaaaaaacacatcatcgtttgattatggaactaaatctacgaataacactggtgcgcatacccatagcgttagcggaacagcagcttcagcaggtgcacatacgcatccgatatctcagggggataatgctaacgttagatccggtagagtagcttcgtcgaactctgctcaaactcacttaggtgcaacaaattctgctggcgcgcatacccactcagtatcaggtactgcagcaagtgctggggcgcatacacatactgtcggtattggtgcacatacgcactcggttgcaattggctcacatggacacaccatcaccgttaacgctgctggtaacgcggaaaacaccgtcaaaaacatcgcatttaactatattgtgaggcttgcataa

SEQ ID NO: 12306 - DNA, 573 bp, Escherichia coli
atgagttcaaaaccccgcaagcaggcggccgttctcaaaaagcatcaggaaaacaaagcgtcgcaaaaagccgttcctgattcggatggtatcgacgaagatattgattcctcggaatatgatgagtctcaggaagtagtggaaaagctgtctgcagttgccaaccttgatcctgagctaaaatcgaagttaacacctgaacttcttgagagagtttctaagaacccgaaggttattgccatgtttcagcaggagtcttttcagggaccactcccacctcctgctatgctcttacaatataatcaaatattacccggcggcgctgagagaattttcaggctaaccgaaaaagagcaagagcataggcataagacgcaaagtgatgcattacttggtgcggtttcacgcgacaaacgtgggcaatggatgggattttgcattgcaatggtagtgcttataatggctgcgttttttgctaatcgcggtaacacttggttcgcaggtactcttgctactttagatctcgtaggattaactacagtgtttgtttatggtaggaagaaacctaaataa

SEQ ID NO: 12307 - DNA, 351 bp, Escherichia coli
atgaaacgatggatattttcattgctggcgttagtgtctgttggtgtaagtgcaaacaccataacgatgcaatgcggcaattttcgtatggatgcgatccctgactcattatttaaaatcaatggcgaaacagtaacgtcccaaaaagtaaaaatgttgggtaaagacggtacaggcatgcagatcaaaatggggctgatgcctgccaaagatggccacaattatgggttcgagtatatccatcgaccgggcaccgaaacgcgtttcctgaacgtccagcttctgcagaacagcatggacgcgcctagaatcatcggatcattcccttgtaaaaaagtggctgggcgatga

SEQ ID NO: 12308 - DNA, 222 bp, Escherichia coli
atggcaaaaaataatgcagtaatacacgtacataccccgtttgtgctcacgcttcccgacggttcgcggcgcgagtttgttaaaggccgtcatgctgtggaggaagacgttgccacgcactggttcactcgtgcgcacgcggaagtatccgttggcaaagccacaaacgcgcgtaacgaggtaaaaaatgccaaagaatcaaagtctgccagcggtaagtga

SEQ ID NO: 12309 - DNA, 693 bp, Escherichia coli
atgattaatgatcgtattcgcgaggctcgtcgcaatgtccacctaacgcaggatgcgcttgctaaacgtattggtctaactaaagccacgatttcacaatgggaatccggaaacaccacacctaacgggaaaaatcttataaatctggccgaagcattgaacgtttctccagagtggctactttcaggcaaaacaggcgataccaaagaaatacattctaatgcacaagttgaggggggattttctgtatgggactcatcaacgccattagaggatgatgaagtggaaataccgttctatcaggaaattgagctatctgccggtaatggtacttatgttgatatagatcgaatgggatgtaagttaagattcgcccgttcaacgttgcgcaaagcaggtgttgacgtaaattgtgcggcttgtgtcagcatccacggcaacagcatggaaccggtattaccggatggcgctgtcgtcggcatagatacatcaaaaacaggtgtaaaagatggtcaaatgtacgctatagaccaagacggattacttcgtgtcaaactattgtaccgtctcccaagcgggctccggatacgctctttcaatagggatgaatacgcagacgaagagtattttaatcaagaggctaataaaatcaggattataggccaagtattttggtactccgttctgctctga

SEQ ID NO: 12310 - DNA, 195 bp, Escherichia coli
atgcctaaatataaactggttaatgacctggctatcggcgacaaaattgaattcagtggaaaacggataatggaggttacccaaaaaactgaccgcgaccagtataacgttagcctgactctagttaacaaacatacaggttctgcgaccaatacttgttttaaccgaatggataccgtcgtccttcacccataa

SEQ ID NO: 12311 - DNA, 690 bp, Escherichia coli
atgactgtgggtaataagagacagcctaatggattacctgaatattattgtcaccgtggtaacgacataaaagatgcgatagttcgggattttattattcagcctgttgcacacctgaaacttattactggacaaactaaaaccagttattccggttatccgttaaccgatcagtactattgtttttcatttaaaaaacgctctgatgaaaattgtacaggggcttttttctgtggtagagatgttgcaaaggatttcattcggcgtatcggttgtacagagctgccgttatttaatcctatgaaatcggataccagtgcagcaatagaacgttccggttctggctctggtagttccggtattactgtcaagccaaatgctgacaaaaagctatttatagacgcagctcgtctgttaatgacgctgtgggattcaacaagtaagggacaaaccccactggcgtcggttcttaatgaagcaatttctggtggtatagataaacctccagaaattagacatgtagtggcggttaatacaatgttgggtaacacaaaaaatactttaactggcctgctggataaagcaagagcgaagtatcctgatgtgttattcagagattttgatttcacgcctcttaacgagattgtaaaacgttcaaaatcatataataagcatcccccttgttattga

SEQ ID NO: 12312 - DNA, 144 bp, Escherichia coli
atgtcagataccaaaagaagttataaggaagatggatatacccctattgaaaaagggtatcagcctaaaaatgacttggctaataatggttttcaaccttcgaagcaaacttcccagccagctccaccacccaaaaaaccataa

SEQ ID NO: 12313 - DNA, 621 bp, Escherichia coli
atggatatttgggaaaaaagtaaaattattatatttttgcttttcgttattcctggttttataagtatgaaagtttatagtgttattcatcctaataccgcttttgatacttctaaagcgattgtggaaattgtttcttatagctgcataaattacgcagtatggtttgctcctatatattttatagaatctgagggtgtatatctcaaacatcctgttctttattgtgctttatacttggtgattttattcattagcccaatattgttaacgatatttttctcttggatgcgaacttggcgttggttatgtaattatatgccacatcctaccggaagagcttgggattatttctttgggttaaaagtcccctgttggatgattattacgctaaaaaatggtaaaaaaatagcaggcaagtttggggctaactcatttgcttccagtgcaccagagccagagcaaatttatcttgaggaacattgggttctaaacgatgatgggggatttgaacgccctcgagtttcaacattaggaatattaattttaggtaacgatatagaaaatttagagtttttccgttttgaactaccaacatgcaataatggagaaagcaactga

SEQ ID NO: 12314 - DNA, 879 bp, Escherichia coli
atgagttttgatccgacgggttacaccctggcccatgagcatctgcatattgatctctccggctttaaaaacaacgtggactgccgccttgatcagtatgcgttcatttgccaggagatgaacgacctgatggcccggggcgtgcgtaatgtgattgagatgaccaaccgttacatggggcgcaatgcgcaatttatgctcgatgtaatgcgcgaaaccgggatcaacgtggtggcctgtaccggttattaccaggacgcgtttttcccggaacatgtggcgacccgcagcgtgcaggaactggcgcaggagatggtcgatgaaattgagcagggtatcgatggcactgacctgaaagccggaattatcgcggagatcggctccagcgaagggaagattacgtcgctggaagagaaggtgtttattgccgccgcgctggcacataaccagaccggacgcccgatctccacgcatacgtcgttcagcacgatggggctggagcaactggctctgttgcaagcccacggagttgatctttcgcgcgtcaccgtcggccactgcgatctgaaagacaatctcgacaacattttgaagatgatcgatctcggcgcgtatgtgcagttcgacaccatcggcaagaacagttactacccggacgaaaagcgcattgcgatgctccatgcgctacgtgaccgtgggttgctgaaccgcgtcatgctgtcgatggatattacgcggcgctctcatttaaaagccaacggtggttatggctatgactttttattgaccacttttattccgcaattgcgccagtcaggattcagtcaggccgatgtggatgtgatgttacgtgaaaatccctctcaatttttccaataa

SEQ ID NO: 12315 - DNA, 666 bp, Escherichia coli
atgaaaaaagagacggatatcaatatcgacgcgctgctgcgcgacacgtttctgacggtggtggaactgcgtcagggaaccaccgtgcgtcacggtatggagctgtatcgccactgccagcggcaggtggaactggtccgcgaacgtctgaaagatgccggattcagtcgggagaacgtggagcacataacttacgcgcagtgcgccctgctggacgaaacggtcctgagccgtagcggcatggacgacggtcagaccatctggatgaaggatccactccagtcgcatttcttcaacaccctgcaggccggtgagctgctgtacgagcggatgaagcaggtgctacaggaacccgcccccgcgcaggccgtgctgacctgctttcaccgtgtcctgctgctgggatttcgcgggcgttatcaggatccggcagccccggagcgcgaccagcttatttcgacgctcaacgggcaggtcgcgccatttggtgtgctgccggaaacggcggtactgaacgtgccgttatccacccgtcagcaccctttgctgcattcgccatttttctggctggtaacactggcgctgctactggcgggcgtctggtgggggctacaccactggctgaatgtactggtggatgaactgctgccgcaaagcctgcgttaa

SEQ ID NO: 12316 - DNA, 1266 bp, Escherichia coli
atggcactgactgacgcaaaaatccgggctgcaaagcccactgacaaggcttataaactcactgacggggctggcatgttcctgctggtacatcctaatggttcccgttactggcgtctccgttatcgtattctgggtaaggagaagactctggcacttggtgtgtatccagaagtttctctctccgaagctcgtacaaaacgggatgaggcccgaaaactgatttcggaggggattgacccttgcgaacagaaaagagctaaaaaagtagtccctgatttacagctctcttttgaacatattgcacgacgctggcatgccagtaataaacaatgggcacaatcacacagcgataaagtactcaaaagcctcgaaacacacgttttcccctttatcggcaaccgggatatcacaacactcaataccccggatctgcttatccctgttcgtgctgcagaagctaaacaaatttatgaaatcgccagtcgtctgcagcaaagaatatctgctgtaatgcgttatgccgtacagtctggcatcatcagatataatcctgctctggatatggctggcgcattgactacggtaaaacgccagcatcgccccgctcttgatctttcacgtctgcctgaacttctgtcgcgtattaacagttataaaggtcagcctgtcacccggcttgccgttatgctgaatttactggtttttattcgttccagtgaactcagatacgcccgctggtctgaaattgatattgacaatgccatgtggactattccagccgaacgcaaacctctgccaggggtaaaattctcacaccggggctccaagatgcgaacaccacatcttgtgccactcagcaaacaggctgtagccatactgacagaacttcagacatgggctggtgaaaatggtctgatctttacgggagcacatgacccgcgtaaaccaatcagtgaaaataccgtaaataaggccctcagagtgatggggtatgacacaaccaaggaagtctgtggccatggattccgggcgatggcgtgcagtgcattgattgaatccggcttatggtcaagagatgcggttgaacgtcagatgagtcatcaggagcgcaacggagtacgtgccgcgtatattcataaagcagaacatctggaagaacgtcggcttatgctgcaatggtgggcagattttctggatgcaaacagggaggagtgtatcagtccgtttgaatatgcaaaagttaacaatccactgaaaaggtga

SEQ ID NO: 12317 - DNA, 1503 bp, Escherichia coli
atgaatatcagaaaactgttttgtccgggtaacaccccccggattttattgtttttattcttttttgtcgtttctgcaataaccacaattgcatgcggatacactgagaagaatgccaccgggaatgtgttgctgctgttccttcttctgctccttgcacacagaaataccctcacatccattacagcgctgttatttctgttctgttgtgcactgtatgcgcctgccggtatgacgtacggtaaaatcaacaacagttttattgtcgcgttgttgcagaccacaactgatgaggcagcggagtttaccgggatgattcctgtttatcattttctggtcagtgccgcgattctggtattcatggtgattttctggcgaacacaccaccgcggtcaccgtaactggctggcactgctgctgttcgtattatgctcagtaaacagctggccgttgcggatggttaaaggaactgttgtggggacaactgacacattgcgtgaaatgcagcgttataaacaactgaatcagcacggggctgacaactggaaaatcctgccgggtgtaccgttgtatgacacgattgttatcgtcactggtgagagtgtgcgcagggattatatgtcggtatatggctatcccgtgccaaccacaccgtggctgaatactgctcccggtttatttattgacggctatacatcggcagcagccagtactgtgccttccctgagccggacactgatttatgactatgagcagaaccctgattccggcaacaacgtggtggcgctggcagcaaaagcaggatacagcacatggtggatatccaatcagggaaaactgggagagcatgacacacgcatctctgttattgcttctgatgcggagcataccgttttcctcaagaaaggcagcttcgcttcccgtaaaacggatgacatgttgttgttacaggaaacagaacgtgcgctggcggataaatcctctccgaaggtgatattcctgcacatgatggggtctcatccgaacccgtgtgaccggcttcactcctggccgaataattaccaggagcagttcccccggaagattgcctgttacctcgccagcatcagtaaactggataactttctcgggcagcttgatggtatccttcgccggcattcccgtcattttgccatgctttacttttctgaccatggtctgtcggtcagcgacagtgctaatcctgttcatcatgatggtcatgtgcagggaggctacagcgttcccctgattattaccgccagtgacatcacgtctcatcagtccgtcagcagaaaaatcagtgcccgtcatttcgcaggtatttttcagtggctgaccggcattcgtactgaaaatataccgccattcaatctgctgacagacgaagataatgaacccgttatggtttttaacggagagaggaatgtaccggcagacagtctgaaaccgcagcctctgattcttccggtcaagggaaaataa

SEQ ID NO: 12318 - DNA, 741 bp, Escherichia coli
atgaaaaaggtttttgctgtttcagtggtggccacagcctgtgtatttgcagcaaatgcaggtgctgaggaaggtaaaagcggtttttatctgaccggtaaagccggtacctctgtggtgtcactttcagaccagcatttcctgtcaggagatgaggaagaaacgtcaaagtataaaggcggcgatgaccatgatacggtattcagtggtggtatcgcggctggttatgatttttatccgcagttcagtattccggttcgaacagaactggagttttacgctcgtggaaaagctgattcgaagtataacgtagataaagacagctggtcaggtggttactggcgtgatgacctgaagaatgaggtgtcagtcaacacactaatgctgaatgcgtactatgacttccggaatgacagcgcattcacaccatggatatctgcagggattggctacgccagaattcaccagaaaacaaccggtatcagtacctgggattatgagtacggaagcagtggtcgcgaatcgttgtcacgttcaggctctgctgacaacttcgcatggagtcttggagcgggtgtccgctatgacgtaaccccggatatcgctctggacctcagctatcgctatcttgatgcaggtgacagcagtgtgagttacaaggacgagtggggcgataaatataagtcagaagttgatgttaaaagtcatgacatcatgcttggtatgacttataacttctga

SEQ ID NO: 12319 - DNA, 2568 bp, Escherichia coli
atggcagcagtaaaaatctcaggtgtgctgaaagatggtgcgggaaaaccaatacagaactgcactattcaactgaaggcaaagcgtaacagcaccacggtactggtgaacacggtggcttctgaaaatccggatgaagccggacgttacagcatggatgttgagtatggccagtacagcgtcaccctgctggttgaaggttttccgccttcacatgccgggaccattaccgtctatgaaggttccagaccaggtacgctgaatgattttctcggtgccatgacggaagatgatgtcatgccggaggcattgcgccgttttgaggaaatggtggaagaagcggcacgcaacgccgaagccgcctctcagagcgcagcggcggcaaagaaatccgaaactgcagcggcatcatcgaagaacgcggcgaaaacctcagaaacgaatgcagctaacagcgcacaggcggcagcgacctcacagactgcatcggcaaactccgcgacagcagccaaaaaatcagaaaccaacgcgaaaaacagcgagacagccgcaaagacgagcgaaaccaacgcaaagtccagccagacggcagcgaagaccagcgaaacgaatgccaaagccagtgaaactgcggcaaaaaacagccaggttgcagcagcccaaagcgagagcgcggcagctggttctgcgacttcagcagctggatcagcaactgctgcggctaacagccagaaagctgcgaagacgagtgaaactaacgcaaagtccagccagacggcagcgaagaccagcgaaacgaatgccaaagccagtgaaactgcggcaaaaaacagccaggttgcagcagcccaaagcgagagcgcggcagctggttctgcgacttcagcagctggatcagcaactgctgcggctaacagccagaaagctgcgaagacgagtgaaactaacgcaaagtccagccagacggcagcgaagaccagcgaaacgaatgccaaagccagtgaaactgcggcgaaaaacagtcaggatgctgcagcccaaagcgagagtgccgcagctggttctgcaagtgcggcggcttcttctgccactgcatcagccaacagtcaaaaagctgcaaaaaccagtgaaaccaacgcaaaggcgagcgagactgcggcggctaactcggcgaaagcatccgctgcaagccagacggctgcaaaagcaagtgaagacgcagccagagagtatgcaagccaggctgcggagccgtataaacaagttttgcagccgcttcccgatgtgtggataccgtttaacgattcactggatatgattacgggcttttcgccatcatataaaaagattgttattggcgacgacgaaataacgatgcctagtgacaaggttgttaagtttaaacgcgcatcgaaagcaacctatattaataaatctggtgtactgacagaggctgccattgacgagccgcgatttgaacgtgatggcctgcttattgaggggcaaagaactaatcttctgcttaattcaacaaatccatctaaatggaataagtcaggcaatctggaactcacagaaatatccacggattcttttaattttacttatgggagatttactgtaaaagatactcttattgatcagacaagtgcgattaatatcgtaacggtttctggcagtaaaggatttgatgtcacaggtgatgaaaaatatgtgaccatttcatgccgtgtcagaagtgatgttgaaaatataaggtgtcgtttaagatttgaacatcatgatggttctacttacacttttttgggagatgcttacctcaatttatcaacacttgtaattgataagactggtggtgcagcaaatcgtattattgcaaaggctgtaaaagatgaggctactggttggattttctatcaggctacaattaatgcactagatacagagagcatgattggtgcgatggttcaatatgctccagtaaaaggttcaggcacagcatctggagactatctggatatcgcaactccacaagtggaaggtggatcaagtgcttcgtcatttattgtaactgatataattgcaagcactcgcgcaagcgatatggtgacagtcccaatcaagaataacctttataatcttccttttacagttctttgtgaggtacataagaactggtataaaacgccaaatgcagcaccgcgtgtttttgataccggcggtcatcaaaccggagcggctattattcttggcttcggtcgttcaacagattacgacggatttccttattgcgatataggtttggctaacagacgggtaaacgaaaacgcatcgcttgaaaaaatggttatggggatgcgtgtaaagtcagatcagtctacgtgctcagtaagtaacgggcgtatatccagcgaaaagaaagccacatggtcctatattcagaacaccgcaattatccgtattggaggccagactacagccgggttgcgtcatttatttggtcatgtcaggaatttcagaatatggcacaaggcattgactgatgctcaggtgggggagtcaatctaa

SEQ ID NO: 12320 - DNA, 282 bp, Escherichia coli
atgaaagatttaacactcaaatttgccgacagggccgacttttcggcctttatggagagtgccggctattatgatgacgagtcgatgcaggatgatattcttattgacgtgataggtaacgtgtacaaagaaaccggagaacttaccgaagatggcgagccggtatgtgttaaggaagacggatattttgtaaacgtgcgcatcattaatgatgcaaaaaaatcgtcaatattcgatgaatacgtggttgctgttgagcatcaacttcgtggctggatgtga

SEQ ID NO: 12321 - DNA, 1041 bp, Escherichia coli
atggctacatcgacagtaattcctgaagacatcaaaacgctaaaatccgacgttagcaaattaaaaaacgatcaaggaagctacgcaacaaaatcatatgtagacaataaaacaacatggaatagttattgcaatgtaatctatgatcaaaagacattgccgaccactggaactatatttagcggtaagattcacttgtcaaataagacaggagaaaccgaaaacgtttatagtgagatgtacactagaaaaaatatttacggtacaaaagatacaatgacaaggattgtcacacacaatggaacaaaaggtatcttttgggattttagcgatctttacggtggaacattaatttttccaggcagtgatggttaccttaagatggggaactgtctcatgtcgtatggtgtgcggggaagtaacgcgcttattaagtttgactgcacagacacattacaaatcaaatatgccaatcatgggtcaaccatgacaatcaacacacagggaaccgctcattctggcgctactactagtttgtggggtaactctacccgtccggttgtatatgaagttggtgctgatggtggcgcttatatgttctatgcgcagaaaaataccgataacacctatatgttaagcgttaatggtgcatgtcatgccaccgcatttaaccagcattccgaccgggatctgaaagacaacattcaggtgatcgataatgcaaccgaccgcatccgtaaaatgaacggctatacatacacgcttaaagaaaacggtatgccctatgctggtgtcattgcacaggaagctctggaagcaatcccagaagttgtaggttccgcaatgaaatatcaggacggtgcaagcggatcggaaggtgaagaaggtgaacgttattacacagtagattattctggtgttactggcttgcttgttcaggtagccagagagtcagacgacagaataacagcactggaagaagaaaacgcagaattaagacaaagattatctgcaattgaggcggcgcttgcgtctaaataa

SEQ ID NO: 12322 - DNA, 288 bp, Escherichia coli
atggatataacacctttccttcatgcgctttgtgctgtggctgcgcagctactgattggtctttttaccgggaactgggcttacggggcgatagccggttgtacgttcttcattgcgcgtgaacacacccaggcagaatatcgctggattgaaatgtttgggcatggcaagaggattaacatgccgtggtggggcggttttgatccgcgcgtgtgggatgtggcaagcctgatggattttgctgtgccggtggtggcgtgtctgctgatctggatgttgatccgttaa

SEQ ID NO: 12323 - DNA, 1038 bp, Escherichia coli
atgcacgataatcatgaaacacaaaaaattaatcaaaccagcgtgatgcctgaaaaaactggtgtttactggaattctcggtttagcattgctcctatgcttgactggacggacagacattgccgttatttcctgcgtctgctttcccgcaatacgttgctgtataccgaaatggtgaccacaggggcgattattcacggtaaaggtgattacctggcgtacagtgaagaagaacatccggtagcgttgcaactcgggggtagcgatccggcggcgctggcacagtgtgcgaagctggcagaagcgcgcggatatgatgagatcaacctgaatgtcggctgcccgtctgaccgggtgcagaacggcatgtttggtgcgtgtctgatgggtaatgcgcagctggttgccgactgcgtgaaagcgatgcgcgatgtggtgtcgattccggtgacggtgaaaacgcgtattggcatcgatgatcaggacagctatgaatttctctgcgatttcatcaacaccgtttccggcaaaggtgagtgtgagatgttcatcatccacgcacgtaaagcctggctttctgggttaagtccgaaagaaaaccgtgagatcccgccgctcgattatccgcgtgtgtatcaactgaagcgtgactttccgcatctgacgatgtcgattaacggtggtatcaagtcgctggaagaagctaaagcgcatttgcaacatatggatggcgtgatggtcgggcgcgaggcgtatcagaatccggggattctggcggcggtagaccgagagatttttggttcctcggataccgatgccgatccggtggcggtagtgcgcgccatgtatccgtacattgagcgtgaactcagccagggtacgtatctcggccatattacccggcatatgctgggcttgttccagggtattcctggcgcgcggcagtggcggcgttatttaagtgaaaatgcccataaagcgggtgcagacattaatgtgctggaacacgcgctcaaactggtggcggataagcgttaa

SEQ ID NO: 12324 - DNA, 984 bp, Escherichia coli
atggcaacacgaattgaatttcacaagcacggtggcccggaagtacttcaagccgtagagttcactcctgccgatccggcggagaatgaaatccaggtcgaaaataaagccatcggcatcaattttatcgacacgtatatccgcagcggcctttacccgccaccatcgctacccagcggattaggcaccgaagcggcaggcatcgtgagtaaagtcggcagtggtgtaaagcatattaaggcaggcgatcgcgtagtctatgcacaatcggcattaggcgcttacagctctgtgcataacattaatgcggataaagcggcgattctgcctgcggcaatttcttttgagcaagctgcggcatccttcctgaaaggcttaacggtttattatctgctgcgcaaaacctatgaaattaaacccgatgaacaattcctgttccacgcagcggctggcggcgttggcttgattgcctgccagtgggcaaaagcccttggcgcgaaacttatcggcaccgtaggaacggcgcaaaaagcgcaaagcgccttaaaagccggagcatggcaggttattaactatcgcgaagaaaacctggtcgagcgattgaaagagatcaccggtggtaagaaagtgcgcgtggtgtacgattcagtgggcagagacacctgggaacggtcgctggattgcctgcaacgccgcggcttaatggtgagttttggcaactcatcaggtgcggttaccggtgtgaacttaggcattctcaatcagaaaggctcgttgtatgtgacacgcccttccctgcaaggctatatcaccacgcgggaggaattaaccgaggccagtaatgaactgttctctttgattgccagcggtgtgattaaggtcgatgtcgccgagcagcagaaatatccgctgaaggatgcgcggcgtgcgcatgagattctggaaagccgggcgacgcagggttccagcctgttgattccataa

SEQ ID NO: 12325 - DNA, 2049 bp, Escherichia coli
atgacgcataatgtctctgaatctattatcgattccctgactgacgtgaaaatgccccattacgcaccgctggctcaagtcagcggtagtatcgaccttaacggtaccattttacctgagtaccgctgcaacacgctggttctgggcagtggcgcggcaggatggcgagctgccgtcgagctgaaacggcaaaatgtcgatgtaatggtagcctccagcaaagccttctggggaacttccgcctgttctggttctgataaacaaacgcttcacaccgcgaatacgcgtgcaaatggtgaccattttctgacattaagtaacaccctggcggcaggtggtgcgatggatcatgacaccgcatatgttgaggcgctcggatcggtgaacacctgtgaagtactgaaatatctgggtctggatttgcctgaagatctctttggcgcaacgttgcgttatcaaaccgatcacgatgaatttggccgtgccactagctgcggtcctcgaacatcgcgcctgatggtgaaggtgctggcccaggaggcaatgcgccttaatattcctctttgcgatcacacaacggcgattcgtatcctgaccagtggtgaaggagaaaatcgacgagtcgagggggtgatcgccatcgataaagcctgtcgggataatccctggagaatggtagtgattcgctgtcagcatctggttttagccacgggcgggcctggtgaactttatcgtgacagtgtttatccggtgaactgttttagtgcgttgggcatggcgctggaagcagggataactctggttaatcttacggaaagtcagtttggtatcggtacaccgcgcagccagtttccgtggaatctttccggtacttacatgcaggcgatgccgcgcatctattcgcaggaccactccgggcgtcagtataattttctggcaacttattaccccacgactcgtatgctggcctccgcgatatttcgcaaaggttaccagtggccgtttcacgcggaacgaatgctggaatatggctccagcttgctggatgtcgcagtttatgaagagactcaaaaagggcgcgatgtttttctcgattttctacgggaaccagaacccgcagcggacggaacactatttaacctgcgggagctggatgatgatgtcatcgactatctgcaacaaaatcacgccctgctggcacaaccgctggcgagattaacacagatgaatcctctggctattcgtttgtatcagatgcacggtcatgatctcacagcctcaccgctcaagtttacgctaaataatcaacatcttaatggcggaattgaagttgatatttgggcacgtacatcgctaactggttgttatgctgccggagaaaatgccggaacacatggtgtcacgcgcccaggtggagcagcgctcaatgccgggcaagttttcgcccgccgctgtgcattacatattgctcatcagaaaagccaggaccggcctctcgagaggcaacaaattctcagtacgattaatgaggcgcaacagcacctgaatcaggggctgctacgtgacgacgtgcgagaaacgatacaaaataccatgagccaccatgccgcaattttgtgtcatacacaggggatcaacactgccgcgcaaaccctggcaacactttgtgaagatattcgccgggaaggtattcaatgcgatgaaaacagcctggcacaatctttccagtggcggcaaagtgcgcaactggcgctggctgtactgcgttctttacaatgttatgtcgaaaacggtggtgggagtcgtggtgccagggctatctatgatggcgaagccggtattgcaccgcaaacaccaggtgggccactcctggcctggcgttttcggccagaaaatcaggatgccaggcaatatatgatttgtgtttgtcgggaagctaatgattaccaaacctggactcgcccgtgccgtgaacggggcgtattaacgctaaccaactttgagcgccagtggcaaaactggattgcggcgacgccgtttcaatactga

SEQ ID NO: 12326 - DNA, 279 bp, Escherichia coli; identical to SEQ ID NO: 9194

SEQ ID NO: 12327 - DNA, 2562 bp, Escherichia coli
atggctgaaccggtaggcgatctggtcgttgatttaagtctggatgcggccagatttgacgagcagatggccagagtcaggcgtcatttttccggtacggaaagtgatgcgaaaaaaacagcggcagtcgttgaacagtcgctgagccgacaggcgctggctgcacagaaagcggggatttccgtcgggcagtataaagccgccatgcgtatgctgcctgcacagttcaccgacgtggccacgcagcttgcaggcgggcaaagcccgtggctgatcctgctgcaacagggtggtcaggttaaggactccttcggcgggatgatccccatgttccgggggcttgccggtgcgatcaccctgccgatggtcggggccacctcgctggcggtggcgaccggtgcgctggcgtatgcctggtatcagggtaactcaaccctgtccgatttcaacaaaacgctggtcctttccggcaatcagtcgggtctgacggcagatcgtatgctggtcctgtccagagccgggcaggcggcagggctgacgtttaaccagaccagcgagtcactcagcgcactggttaaggcgggagtaagcggtgaggctcagattgcatccatcagccagagtgtggcgcgtttctcctctgcatccggcgtggaggtggacaaggtcgctgaagccttcgggaagctgaccactgacccgacgtcggggctgacggcgatggcgcgccagttccataacgtaacggcggagcagattgcgtatgttgctcagttgcagcgttccggcgatgaatccggggcattgcaggcggcgaacgaggccgcaacgaaagggtttgatgaccagacccgacgcctgaaagagaacatgggcacgctggaaacctgggcagacaggacagcacgggcattcaaatccatgtgggatgcggtgctggatattggtcgtcctgataccgctcaggagatgctgattaaggcagaggctgcgtttaagaaagcggacgacatctggaatctgcgcaaggatgattattttgttaacgatgaagcgcgggcgcgttactgggatgatcgtgaaaaggcccgtcttgcgcttgaagccgcccgaaagaaggctgaacagcagagtcaacaggacaaaaatgcgcagcagcagagcgataccgaagcatcacggctgaaatataccgaagaggcgcagaaggcttacgaacggctgcagacaccgctggagaaatataccgcccgtcaggaagaactgaacaaggcactgaaagacgggaaaatcctgcaggcagattacaacacgctgatggcggcggcgaaaaaggattatgaagcgacgctgaaaaagccgaaacagtccggcgtgaaggtgtctgcgggcgatcgtcaggaagacagtgctcatgctgccctgctgacgcttcaggctgaactccggacgctggagaagcatgccggagcaaatgagaaaatcagccagcagcgccgggatttgtggaaggcggagagtcagttcgcggtactggaggaggcggcgcaacgtcgccagctgtctgcacaggagaaatccctgctggcgcataaagatgagacgctggagtacaaacgccagctggctgcacttggcgacaaggttacgtatcaggagcgcctgaacgcgctggcgcagcaggcggataaattcgcacagcagcaacgggcaaaacgggccgccattgatgcgaaaagccgggggctgactgaccggcaggcagaacgggaagccacggaacagcgcctgaaggaacagtatggcgataatccgctggcgctgaataacgtcatgtcagagcagaaaaagacctgggcggctgaagaccagcttcgcgggaactggatggcaggcctgaagtccggctggagtgagtgggaagagagcgccacggacagtatgtcgcaggtaaaaagtgcagccacgcagacctttgatggtattgcacagaatatggcggcgatgctgaccggcagtgagcagaactggcgcagcttcacccgttccgtgctgtccatgatgacagaaattctgcttaagcaggcaatggtggggattgtcgggagtatcggcagcgccattggcggggctgttggtggcggcgcatccgcgtcaggcggtacagccattcaggccgctgcggcgaaattccattttgcaaccggaggatttacgggaaccggcggcaaatatgagccagcggggattgttcaccgtggtgaatttgtcttcacgaaggaggcaaccagccggattggcgtgggaaatctctaccggctgatgcgcggctatgccaccggcggttatgtcggtggcaccggaagtccggcgcaaatgcggcgttcagagggtatcaggtttgagcagaacaacaacgtggtgattcagaacgacggtacgaatggtctgccaggtccacagatgatgaaggcggtgtatgacatggcccgcaagggtgcccgtgatgaaatccaggcacagatgcgcgatggtggtctgttctccggaggtggacgatga

SEQ ID NO: 12328 - DNA, 330 bp, Escherichia coli; identical to SEQ ID NO: 8750

SEQ ID NO: 12329 - DNA, 699 bp, Escherichia coli
atgcaggatatccggcaggaaacattgaatgaatgcacccgtgcggagcagtcggccagcgtggtgctctgggaaatcgatctgacagaggtcggtggagaacgttattttttctgtaatgagcagaacgaaaaaggtgagccggtcacctggcaggggcggcagtatcaggcgtatcccattcaggggagtggttttgaactgaatggcaaaggcaccagtacgcgccccacgctgacggtttctaacctgtacggcatggtcaccgggatggcggaagatctgcagagtctggtcggcggaacggtggtcaggcgtaaggtttacgcccgttttctggatgcggtgaacttcgtcaacggaaacagagacgccgatccggagcaggaggtgatcagccgctggcgcattgagcagtgcagcgaactgagcgcggtcagtgcctcctttgtactgtccacgccgacggaaacggacggcgctgtttttccgggacgtatcatgctggccaacacctgcacctggacctatcgcggcgatgagtgcggttatcacggtccggcggtcgcggatgaatatgaccagccaacgtccgatatcacgaaggataaatgcagcaaatgcctgagcggttgtaagttccgcaataacgtcggcaactttggcggcttcctttccattaacaaactttcgcagtaa

SEQ ID NO: 12330 - DNA, 1074 bp, Escherichia coli
atggccctaacggatactaaagttcgctctgcgaaacctgaggagaaagagtattcacttgttgacggcgacggcatgtccttacttgtaaaacctggcggttcaaagtattggcgatttcgtttccgttttggcggtaaacaacatttgatggcgttcggcgtttacccggatgtttcgctggcagatgccaggaagaaaagggaagaggccagaaagctggtaactgctggtatcgatcctcgagagcataagcgggctgtgaaagaagagcaggcgaaagagattattactttcgagaaggttgccagagagtggctcgtaaccaaccaaaaatggtcggaagatcatgctaatcgtgtaaaaaagagcctggaggacaatatcttcccaacaattggtgctcgcaatattgctgaactgggcacccgcgatctgttaattcccattaaagccgtggagaaatccggacgtcttgaagtggcttcccgccttcaacagcgcaccacggccatcatgcgttatgcagtgcaaagcgggttaattgattacaatccggcgcaagagatggcgggggcggttgcttccagtaatcgacagcatcgtccggcgctggagttaaagcgtatcccggaattactccagaaaatcgatgactacaccggcaggccgctaacccgctgggcaaccgaacttactctgcttatttttattcgatccagtgagctgcgttttgctcgctggtcagaaatcgattttgaaacgtcaatgtggaccatcccgcctgagcgagagcctattcccggcgtgaaacattctcagcgaggatcaaagatgcgtacaccgcatctggtgccactttcaaagcaggcgctggcgatcctgaagcagataaaacagttctgtggcgaacatgagctgatttttattggcgatcacgatccgcgtaagcccatgagcgaaaacacggtaaacagtgcactacgggtgatgggttatgacactaaggttgaagtttgcggccacggcttccgtacaatggcctgtagttcgttaattgagtcagggctatga

SEQ ID NO: 12331 - DNA, 219 bp, Escherichia coli
atgtcgcgcaagggcaacagccttgataatgcggtaatggagaacttctttggtcacctgaaagaagaaatgtactatcgccgggactacagaaatgtagaagagctggaaaatgccgttaacgaatacataacttactggaatcaaaaaagaataaaactcagtcttgggggactcagcccggtagaataccggactgagtatcaaaaagccggttaa

SEQ ID NO: 12332 - DNA, 474 bp, Escherichia coli
gtgacagatatcaccgaattcagggctggcggacaaaaactgtacctgtccccgatacttgatttgtttaacggggaaatcgtggcgtgggaaacggcctgcaggcctacagaagagctggtgaagcggatgttaaataagggtctggaaagccttgctgaaggggagaaaccgctgctccacagtgatcaaggatggcattaccggataaaaagttatcagtccgccctggcggacagagggttagtgcagagcatgtcgcgcaagggcaactgccttgataatgcggtaatggagaacttctttggtcacctgaaagaagaaatgtactatcgccgggactacagaaatgtagaagagctggaaaatgccgttaacgaatacataacttactggaatcaaaaaagaataaaactcagtcttgggggactcagcccggtagaataccggactgagtatcaaaaagccggttaa

SEQ ID NO: 12333 - DNA, 288 bp, Escherichia coli; identical to SEQ ID NO: 11880

SEQ ID NO: 12334 - DNA, 837 bp, Escherichia coli
atgaacagtttaacggcaaataaccgtttgtcgcaacagctggtggtcagtgtcgctgaacacctgttgttacggcatgaatgcagattaccaaatcacctggctgtaagtaaccacagagaactttacctgactgtggggggcgagttgtgcaggaacttaaccgctggtttcgtgatggaagagggctttatgtccatgttattcgttgggagccagaaacacagcgcgttatctatcttcgcaaagactacccgcatgagtgctttagtcctttgtggaaattcaggcgtgattttgttgagtgtgaaggaccaccagcacattgattctgccattccgggacgttacactgttcaggcaccttataaagcgggtgccgggattggcgtcctggaaatgttatcggcgatatatgacgcgccagcgtcttttttatcgtctgcgtctgcgcacacccaaattatggtgggctggacgggggcaccgaaaggtgcgccggtttccgataacgccggttacgccaaccccgttcagttcaccaccagcgaaattggcgtttccggtggtgaaggtaattcactgttatcggaggctgccatcatggctactgtcccagccctcactcgtctgaatgatgaagacttacataaactcagttatgtaacaactgcactacgtgctctgcgcaaggtaactctttcggatccgcaggcgcatcaggttctggtagaaacccttcttaacttgcaggctgaacgtatccgtttggcggataaggctaattttcatattcaccgtctcctgaatatcagcggagggcatcgtcatgcttaa

SEQ ID NO: 12335 - DNA, 237 bp, Escherichia coli
atgcttaatccgttgatcctcaatatttgccgtttgcttcagcgtaaaaaaacatcaattcctacagttgggcagtggtacaccacgcctgcagggcatgttctacgtgttagcctggttgaccgtgaatgtcagaaggtggtttgtgaaccgctgggccgtaattaccgcgtcagtatgccgcttatagcctttcgctccggaaaaaacatgaagcatctcggaggtgcagcatga

SEQ ID NO: 12336 - DNA, 204 bp, Escherichia coli; identical to SEQ ID NO: 4411

SEQ ID NO: 12337 - DNA, 1080 bp, Escherichia coli
atgcaaatacttgccgatttactgaatacgatcccagccatcaattctgccgctatgtcgcgtgcacaacggcatgttgacgggttactcaaacctgttggtagcctgggaaagctggaggcgcttgccatacaactggcaggaatgccggggttgaatagcataccgcatgtgggcaaaaaagcagtactggttatgtgtgccgatcacggcgtctgggaggaaggggtcgctatttctccaaaagaagtgacagccatacaggctgaaaatatgacccgtggaacaaccggcgtgtgtgtgctggcagcacaagcgggcgctaacgtccacgtaattgatgttggtattgatactgctgagcctatccccgggcttatcaacatgcgtgtcgcacgaggtagcggcaatattgcttcagctccggcaatgagtcgccgtcaggctgaaaagttgcttttggacgtcatatgttatacgcgggagctggcaaaaaacggtgtcacgctgtttggtgtaggtgaactggggatggcaaacacgacaccggcagcggcaatagtcagcacaatcactggccgggatcctgaagaagtggttgggattggcgcaaacctgccgacagataaactggctaataaaattgatgttgtgcgtcgggcgattacgttgaatcaaccaaatcctcaggatggtgttgatgtcctggcaaaagtgggtggatttgatttggtcggaatagctggagtgatgttaggtgctgcttcctgcggtttacccgtgttgctggatggatttctttcttatgctgctgcgctcgcagcctgccagatgtctcctgcaatcaaaccgtatctcattccttctcacttgtcggcagaaaaaggcgcgcgtatagcgctctcgcatttggggctggagccttatctcaatatggatatgcgtttaggtgaggggagtggtgcagctctggcgatgtccatcatcgaagctgcttgtgcgatatacaacaacatgggcgaacttgctgccagtaatattgttctaccggggaatacgacttctgatttgaacagctaa

SEQ ID NO: 12338 - DNA, 240 bp, Escherichia coli
atgcctttaataacacatcttttaaatgttgaagaattatcccgcctgctgaagaacgttgctctgagtgtgataaacctttttattcttgatgatgtcagcgagaagatggaatatatcccacgactgggtcgtggttacccggttaaacatctggtggcgctaataaatctggcaagtcacattctgttgaatgctgtgacagtgccttaccgagagagcgaaattgtggtgttctag

SEQ ID NO: 12339 - DNA, 183 bp, Escherichia coli
atggcctggctgggctaccgactagccgaaatggcgcagtttaaagtgacacaaattctgaaggtttcatggttctggatcgatctggcggtccctgtcggcgcactggcaacggctatttataccctctactggttaataaacgatacaaaacaatccgatagcggagacaaaatgcaatga

SEQ ID NO: 12340 - DNA, 1653 bp, Escherichia coli
atggaaatacttttaacaattttaattcttacgttggtagtatcattaaccagcgtgcttacacgtctgtctcctgtccagataccacttcctttaatccagattgccgctggtgcagtactggcccagcctatatttggtctgcatgtggaattcaatcctgaactttttctcttattgtttataccacccctgttgtttgctgaaagttcaaaaatacaacctaaagaattgatcaagcacagccgggaaattatcagcctggcacttgtgttggtactaatcactatttttggtgtcggctatgtgattcatttactcttaccgaatgtgccgctcatcgctgctttcgcattagccgccgtgttgtcgcctaccgatgccgtggcgttgctggggattgtcgggaaagggcgtatcagcaaaaacatccaggaagtgctcgaaggcgaagcgttgatgaatgatgcttccggcctggtggcgttgaaatttgctgttgcagtgacgatgggaacgatggaattcagcgttcatggcgcaaccattgcgttttttgtcgttgcgttgggcggtattgccgtggggatcgctgttacctggttatatggtaaagggctgctgttgatcagccgatatgctcacgatgaaccttccattcagattgtattgatgcttctgttgccgtttattgtttatctggttgcggaacattttggcttatctggcattcttgccgctgtcgccgcggggttaacaaccagtcgcattggcgtagtccaccacgcgcctattcgcctgagaattaaagctaaaagtagctggtcgatgcttgaatatgtctttaacggcatggtgtttctgattttaggcttacaactgccgggcattatttcggaatcactgatccgtgcagaaaacgatccactggtggacaccggatcgctgctccttgatgtcatttggatctacctggcgttaatggttgtgcgcctgggctggctttggctgatgcgtctgtatagccgtaaacgacccggcaaacatccgatgctgtttgctggatataaaacgcgtcatatgctgctggcgacctttgcgggggtgcgcggagctatcacgcttgcgggggtgctttctatcccgttattgctgccggatggcacaccttttcccgggcgttacttgctggtatttctcgccacaggtgtgatcctcttttcgctggtttgcggcattattattctgccgttattactggggaaaaatgtggggattttcagcgataaccgacaaaaagaagaggaagctgccgatctgtttatggctaaaatggccatactgagtgtgcaaaagaccgagcaacgtttgctgcgcgccagaacagaaaacctcgataacgagttgattatggaaacgggggccagagttatcggttatatgcgacatagtgaagaggatatgtcgcctaatgataattccctgcatatgcagcgtgcgaagctggaaagaacatttaatctggcggcgttaaatgccaaacgcgcggctatttaccagatgcgcgcaaggcaagaagtcagtgatgaaacactggcaaaaatagtcagtgaattagatgtgctggaaacgttaatcatggatagccgataa

SEQ ID NO: 12341 - DNA, 603 bp, Escherichia coli; identical to SEQ ID NO: 8919

SEQ ID NO: 12342 - DNA, 1263 bp, Escherichia coli
ttggcatggagtcagttccccgtcatcttaggtatcactttaactcacaggtgtccagtaaatatgaacaggatcccagtaatcattatcaatggtttccttggcgcaggaaaaaccactcttatgaaaaacctgctcacacaggcaaacaggaatcacttagctgtatctgtcattgtcaatgatatgagcgatctggatgttgatggtgtacttattgcaaatacagaaatcgttaatattgcgaacaataatttcgtgagtatcacatctgatagtatcagcagccagagtgggattaagacggtcgacaaggcaattaaaaatatgctcaggcattatttgcctgacgttatatttgtcgaaacatccggaggtagccacccactgccattaattaagtatctgcagactcatgagcgattacagctaaaatcacttttatcacttgtcgataccgttatgctcaatgatgactataacggagggaaagcactgatacctgcatttcaggagaatcttttccatggcaagcgcagaatagagaatttactggctgagcaaatcatgttttgtagcactttgctgttaaccaaaaaggatcgactgtcattcgacattgtcaccgatgtggcgaaagcaatccatcctctgaatccttacgtaaatgtgatagctgtgtcatgggggaaccttaaactagcagagttactaacccttccggattacgattttaaccgggtcggattacttatcagagaactggaagacacaatcacagtagaagaagcaaaaatttcagcccaaaatggcgaaataatttcgcgagtgattaaagatgacaggccattccacccacaaagattatgggaaacctatcattattttatgggaatgggtatttatcgtagtaaaggctttttctggctaccaggaagacctgacatggctctgctctggaaccaggccgcaggaagcatcaatctggagtttatcagctactggaattccggtgtattggcagcccctgataatcacctgacccacgaagagcgctctgctttgcagaaaaaagtcaataaaactatggggcggtttggagacaggagatgccatttaacgattatagggcgttctgatgaagtccatgattttacctccgccttaattaactgttttctttctgaagaagaaattgtctggtggcaatcaggtggcgttttcgcggatccctggcccgttaatatatcccggctgaactga

SEQ ID NO: 12343 - DNA, 534 bp, Escherichia coli
atgtctccgtttttagtgtgggcgttattaaaaaataaattgccttactcaaactataaaaatataactattgctatgtctaagttcacgggagaaaaaggagttatactaaggcagtatttttataaactcaccttagattcctgtgggcataatttaagagtgcattatggggctttttttgtttatccaaacgttaaggttggtaataattgcactgtagaggaatactctattgtcagcttatgtgatctaggtgatgatgttattatcgcagcaagagtatcgattatgagcggtgggaatcatcacgaaatagataagttggatataaagtttgttgactcacttcttcctttaaaaaaagttaaaattggttccaatgtttggattggaacccatgctattgtcatgaatgatattccagatggtatggtcgttggtgctgggagtgttgttacaaaagtatttcaacctgattcaattattgcgggtattcctgcaaaggttatgagaaaaagagggaaatcgtga

SEQ ID NO: 12344 - DNA, 1161 bp, Escherichia coli
gtgaaaattacagttattccatcttggtatccgaatcctaaaatgagaacacaaggacttttttttagagaccaagctagagcactttcaaaagagcatgaagttgatgttttatattgccatagaggaaaaagattttattcaaatttatataccgatgatggcattaaaactttttactggggatatagactgcgcataggaagcattttaggaatgatatctagaatcttcatatattgcatgatgtttatcctctatgaaaagaaaagaaaagtagatgttatacattgtcatagtgttgctttcaatcaagatggcagtgccggtattgctggtgtgattttaggtaaattattttctattcctgttgttataacagaacatgcaacggttttttcaaataaaaattatggtaggtttgagaaaagattaatgcgatgggctttatctaatgctgatatgataatttgtgttagtgaaggcttgcgtgacattttagaagaaatgaccctaagacaggatatactaataataccaaacacaattgattttaaaacttttgtgaataatgatattgtcgtacataaaattaaaaaagaaaacgacaaaatcaaaatatgttcagtaggttatctaatggagaaaaagggctttgatcgacttatcaatgtgataaataaattgattaaagattttggttatgatatagagttgagtattgttggtgcgggtccacaatatgattcgctatcaattctcattcgacaatatgacttacaagattcaatatttctactgggggaactcgataaaaagcaaatatctgaattgatgctctcaagcgatttgtttattttgctaagtcgagtagaaacttttggggttgttattattgaggggttagcaaccggattatattgcgttgcaactaaatgtggcgggccagaatatataattaaagataaaaaactaggtcatttactcaaaaatactaatgatgttgaatatctaagttcggaaatagataatcttttacaaaataaaacttatgacaaggatcagatttatagaatgaattatgctcgtcaagaatatggattcgaacgtttcttggaattatttaatgatctggttttgaaaaaatatgaaaataaatga

SEQ ID NO: 12345 - DNA, 1218 bp, Escherichia coli
atgaaaataaatgatttattgaaaaaatacacacttttttcattgtcgccactactttccgcgtttattcagctagcttctatttttcttttaggtcattcattatcaggtccggaactaggtatagcaggaatttataacacaatagtttttattttagtttttatttcggatggcggtagttcaagttattttatttatcgtaagtttttgccaaaatatgatgttaacttgatcaatatttttaatgtggccatatctgcattcgctataattatcataggttattacgttccagaaaaatccgatttattgggattaattgtagtatcactaacagttacgcttccattatataattatgctcgtttgttagtagaaaagaaatacaatattatcgctatagttgaactaaagtcaaaattgttattttttattacattatacatagcaattaacgagtttgactatcaaggcagtgccgtagtaatgtcatgggctgtttcttattttttaagatattgtttattttggtggttttctaaaaaaatagaattatataaaaatgataatttaccccaaaataaaccagcggcgattttaaaaagttggtggatgtacattcataatcaaattttgtcacaagtactaaattattttacaattacatttgatatttttattatatcgcatttcgggggacttgaaaaagtaggtgtgtacagtttgtgcaaagatgccactttaaaaataagtgctgttttaagcccagtaataagcaagttgttaatctctcacgttgttaatattgaagagaataaaatatcgcctatgtataaaaaagtatacaaggcaactattataatctctataagtgtatttggcatttgggctttatgcggaagtagtattattcactttattagaccccaactggatcaaggtattttgacctttataatcggatggtctatatgtggcattcttagaatgatgattaatccaactgtttctatttttcaggcgacaggaaaaacaagaaatgaattatatgttaatattacttcggcggtctcctttattttctttatgggaatgctatcaatatattttgataatatagccgatgctgttattcttgctttaatatgtatgtattctatttcgttcgtttatgctactgttttattgagaaaatatttttctaaaatttattaa

SEQ ID NO: 12346 - DNA, 1017 bp, Escherichia coli
atgaaaatattaataactggtgggactggttatataggttcccatacaattttaatgttgctaaatgaaggttatgatataattgttatagataatttttctaattcatcgcctaaagttatagaaagaattgagtttctttctcaaaaaaaagtatgctttcatgaaggggatataagagatgaaagatttttgaaatctgtttttaaggaacatgtcattacgacggtaattcattttgcttcacttaaatctgtttctgaatctatttcaatgcccattgaatattatgataataatatttctggaactctgaccttgttgaaggtaatgaattattttggtgttaataattttatctttagttcatctgcaacagtttatggtgctccttctagaattccgcttgatgagtcgtgtgatactggagatactacaaatccatatggaacttcaaaatattttttggagcagatattgattgatacacaacgtgctaatcctgcattaaatattatgctgctgaggtattttaatcctgtcggagcccattcatcaggtttcatcggcgaggacccgaatggaattccaaataatctatttccatatattacccaagtggccattggaagattaccgaggttgtcaatatttggagatgattatccaaccgaggatggtactggagtaagagattatatacatgttatggatttagcatctggtcatgttgctgctctcaatagacagcatgttttaacgggattgcggtgttacaatcttggcacagggaaaggttattcagtcaaagagattgttgaaacttttcaaaagataactggaaaaaaaataccatatattgtttctgcacgtcgtcccggtgatatagcagaatgttggtcctcaccagagttagctcaaaaagaacttcattgggaagctaagcgtagtcttgaggatatggttattgatgcttggaactggcaaaataagaatccaaatggatatttagaatga

SEQ ID NO: 12347 - DNA, 342 bp, Escherichia coli; identical to SEQ ID NO: 982

SEQ ID NO: 12348 - DNA, 186 bp, Escherichia coli; identical to SEQ ID NO: 9133

SEQ ID NO: 12349 - DNA, 1134 bp, Escherichia coli; identical to SEQ ID NO: 8777

SEQ ID NO: 12350 - DNA, 948 bp, Escherichia coli
gtgtttacgggaaaatactgcgaacacctgccactgtatcgtcagagtgaaatctttgcccgacagggtgtcgaactgagccgtgcattactctccaactgggttgacgcgtgctgccagttaatgacgccgctgaatgatgccctgtatcgttatgtgatgaatacccgcaagcttcacactgacgacacaccggtaaaggtactggcaccgggcctgaaaaagacgaaaacagggcgcatctggacgtatgtccgggatgatcgcaatgcgggttcgtcatctcctccggcggtctggttcgcgtactcaccgaacaggcaggggaaacacccggagcaacacctccgccccttccggggtatcctgcaggcggatgcgttcacaggttacgacaggctgttcagtgcagaacgcgaaggtggtgcgctgacagaagttgcgtgctgtgctcatgcccggagaaaaatccacgatgtatacatcagcagcaaaagtgcgatggcagaagaagccctgaagcgaatcagtgaactgtacgccatcgaggatgaaatacggggattaccagagtcagagcgtcttgcagtcaggcagcagcgaagcaaagcgttactgacgtcgctgcatgaatggatggtggagaagaatggcacgctgtcgaaaaaatccagactgggcgaagcgttcagctatgtactgaatcagtgggacgccctctgttattacagtgatgacggtctggcggaggcggacaataacacagcagaaagagcgcttcgtgccgtctgtctcggaaagaattcttatgacctttgtcaaatattaagcccaaaaagaccttacgcagctccgggagcttcgttatatcgcggattaaagaacctgaaacagtcagactgtatcttggattttacaaactcttattcggggattttagccccatga

SEQ ID NO: 12351 - DNA, 1362 bp, Escherichia coli
atgaaacgacatctgaataccagctacaggctggtatggaatcacattacaggcgctttcgtggttgcctccgaactggcccgtgcacgggggaaacgcgccggtgtggcggttgcactgtctcttgccgctgccacgtcactcccggcgctggctgctgactctgttgtaccggcaggagaaaccgtgaacggtggaacgctgataaatcacgaccgccagtttgtctcaggtacggctgatggaatgactgtcagcaccggactggagctgggggcggactctgataacaacaccggcggtcagcagatagcccggggtggaacagccagaaacaccagagtcaccgcaaacggtctacaggatgtcatggcaggtggcagtacctcggatacggttatcagtaccgggggagggcagaatttgcgtgggaaggcttccggtactgtccttaacggcggtgatcaatggatacatgcaggcggcagggcatccggaacggtgattaaccaggatggttaccagaccattaaacatggcggactggtaaccggaaccatcgtcaacaccggtgcagaaggtggtccggattctgaaaatgtgtccaccggtcagatggtcggggggattgctgaatccaccaccataaacaaaaatggccggcaggttatctggtcttcggggatagcccgggacactctcatttacacaggaggtgaccagacggtacacggagaggcacataacacccgactggagggagggaaccagtatgtgcacaagtatggacttgcactgaacacggtaattaacgaggggggctggcaggttgttaaggccggtggtactgccggtaacaccaccataaatcagaacggcgagctgagggttcatgccggcggtgaagcgtctgatgtcacccagaacacgggaggtgcactggttaccagcactgctgcaactgtcaccggtacaaaccgcctgggagcattctctgttgtggagggtaaagctgataatgtcgtactggaaaatggcggacgtctggatgtgctgagcggacacacagccaccagaacccttgtggatgatggcggaacgctggatgtccgcaacggtggtaccgccactgccgtatccatgggaaatggcggggtactgctggccgattccggggccgctgtcagtggtacccggagcgacggaacggcattccgtatcgggggcggtcaggcggatgccctgatgctggaaaaaggcagttcattcacgctgaacgccggtgatacggccacggataccacggtaaatggcggactgttcactgccagaggggctcgctggcgggcaccaccacgctga

SEQ ID NO: 12352 - DNA, 873 bp, Escherichia coli
atgaatccgtctgatgccattgaggcaattgaaaaaccgctctcctccctgccttattcactttcccgtcacatcctggaacatctgcgcaaactcaccagccacgaacccgtgattggcattatggggaaaagcggggccggtaaatcctcactctgtaatgcactgtttcagggggaggtcaccccggtcagtgatgttcacgctggcacccgggaagtgcggcgcttccgtctgagtggccacggtcacagcatggttatcactgacctgcccggggtgggcgagagccgggacagggatgcagagtatgaagccctgtaccgtgacattctgccagaactggacctggtactgtggctgattaaagccgatgaccgtgccctgtctgtggatgagtatttctggcgacacatcctgcaccggggacatcagcgggtactgtttgtggtgacgcaggccgataaaacggagccctgccatgaatgggatatggccggtattaagccttctcccgcacaggcacagaatattcgcgaaaaaacggaggcgctattccgtctgttccggcccgtacatccggttgttgccgtatcggcccgcaccggctgggagctggatacgctggtcagtgcgctcatgacagcgcttcccgaccatgccgccagtcccctgatgacccgcctgcaggacgggctgcgcacggagtctgtccgctctcaggcccgtgaacagtttaccggtgcggtggaccggatatttgacacagcggagagcgtctgtgttgcctctgttgtccgtacggccctgcgcgctgttcgtgacaccgtggtctctgttgcccgcgcggtatggaactggattttcttctga

SEQ ID NO: 12353 - DNA, 792 bp, Escherichia coli; identical to SEQ ID NO: 9021

SEQ ID NO: 12354 - DNA, 192 bp, Escherichia coli
gtgacaaatggctgggatcctaagtacgatccaacatggataaaatatgctgaagtaaatcgtaacgatatcattcgagaaggcatgaaaccgagcaatattcctggaactgctggagatattggcggttctataggatccgagctaggtggaaaagtaacagataaagtatctgaggaactcaagaaatga

SEQ ID NO: 12355 - DNA, 738 bp, Escherichia coli
atgacgataattgacatatcaggaaagacaatcgcgcaaagagcggaaatatttaaacctattggtcttaaattagaccacacaggagtaccaaaaggtttatcattaaccttctctccccccattcatcttgtaaaaacagaaattcgaggaaatatcagtgttggagcctattcttttatgcgtggaggaaggctttgtgctgatattggaaattattgtagtatagcaccggatgtatccattggagatggggagcatcccgtcaactggttaagtacacatccttttcaatatggtcgctctgcttttactgattggcttaatgctgacggttttaacaacactaagaggcttccgcttagcatttcaaaacgagctccaataataggaaatgacgtttggataggtactcgagtcgttattctgcgcggtgttaagatcggtgatggtgcaattgttgctgcgggtgctgtcgttacaaaagacgttcctccatttgctattgttggaggtgttcctgcaaaaattttacgttatagatttgaccaaaaagtaattgaaaaaattcaattgtcacaatggtggaaatatgacattaaatatttaaaagacataaatttccaagaaccagaggcggcagcagagcaaatgttagaaaaaatctctttaggtataaaaatgattcctgaaaataaatatagattagaatatgataggcttattatgcagaaataa

SEQ ID NO: 12356 - DNA, 1116 bp, Escherichia coli
gtgggctcggagatgtgtataagagacaggctagaaaatcgttttggtataactaaagatcaatattctgttgaagtattacaaaaatatagtctaaaggattacgatcatcctattggcggtaagttcagtaaggacaaactttctcaattagtttgtgagctttctgatataattttggaaaatgctaagcaagaaagaataaacttaattgattatctttcttcccacggcatggatactaatgagaatattgcggtagttgatatcggttatgctgcatcaatgcaatctgcatatcaaaaaatacttaataaagaaaatattcacggtatatattatgcaacatttaatagtgcattgaaaaatgtttcagatagttctctcttgcatgggtatagtgtgcatcttgaaaatccatcatctccaaaatatggaatatgtagccatagattcttctatgaaacaattttttgtgatgcagacaatagttttattaaacctattaaaactaataatggatttgaaatcgttaaaagtaaatttgatgattccacaagacaaaccgttgtaaaagaaatacattctggtgttttggctttggctcacgatctcgcagaaaattattcaagcagtgtgttaaatggatatattgatcctagtttaggaagttttcttttcgattcattcttaaaaacaccgaataaaaatgatgcagaaatgtttaagggggttctgtttgaagatgcaactggtcctaacattcgtcgatatctatttgtcccagatgaatataaaaatgataaaaaaaccattgataatatgatttggaaagaagctgcaagtctatttataaatccaacaccgtctcaagatgttaaaataaagtctgaacccccagttaagaatataaataatacaataagtactaaacaaaataaaaatgataaggtaaaagccaaaccaagtgaatgcaagcaaaatagagttgctgtgattgaacgagtaatattcgaattgtttttaaaaggtaagaaaaaaataaatatctcagggaccggagtatgtttttcaaagactctaataataagtttatttcgcattattataaaataa

SEQ ID NO: 12357 - DNA, 480 bp, Escherichia coli
atgtatatcgggactgaagagcagcgaaaaaagcgtctaaaagaactggaaaaattaaacaaagaatcggaatcagatccgaaaaataacggcccattcacccaggtttatcagaagggctgggaaaggatccgagaactgtcgaaggacaagcagggagttgtagcaataccgctttactcgtttttagctgagcacatagatccctcatgcggtgctgttgttgccgatcagcagtttttagcagataaattgggtgttagccgaagcacaattaagcgctggctcaactacttagaatcaaaaaacgcgttagtcagaattcctgttgctggtaaggtttgtgcgtatgcactcgatccacatgaagtctggaagggatacaacacatctaaaaactacgcggcgtttgtcactaaaacactggtcaacaaagacggtgatattcagcgccgaatcatggccatgttttcaaattga

SEQ ID NO: 12358 - DNA, 1533 bp, Escherichia coli
gtgaacccgaaactggatggtctcggaaaggtggacagcagtctgtttgccggactttatgacctgctcaggatgcaacccggagaggcaccacgtgaaacagacccggtgtatatcgatgaaaaacagtttctgggctcatcgtacattcttgaccgtcttggcctgaaaccggaaaaagattaccgctttctgggggatgcggcttttgatacccggtatgtcagtaacgtcatactgaaccagacgggctcacgttatatcaacggcacaggctctgacctgacgcagatgaaatacctgatggacagcgcggcagcacaacagaaagcgctcggactgacctttggtgtgtcgctgaccgccgggcaggttgcacaactgaccagaagcatactgtggtgggagtccgtcaccatcaacggacagacagtcatggttccgaaactgtatctgtctccggaagatatcacccttcataatggcagcgttatcagcgggaacaacgtgcagcttgcgggtggcaatattaccaacagcggcggcagcatcaacgcacagaatgacctcctgctcgacagcacaggtagtatcgacaacctgaatgccggactgataaacgccggtggtgcactgaacctgaaggccatcggggatatcagcaatatcagctcagtcatcagcggtaaaaccgtatccctggaaagcgccaccggaaacatcagtaacctaacccggacagaacagtgggcgatgaacaacggatataaccatttcagcggaacggataccggtccgctggctgctgtcagggcaacggactcactgtttatgggcgcagccggggatatcagtatcaccggtgccgccgtttctgccggtgacagcgtgttactgtccgccggtaatgacctgaacatgaacgcgatacaggccggagaacgtcgtcgctatggcgggtccgggtggtatgaaactcatgccgtggcccccacggtcactgccgggaacagtctgatgctttccgccggtcgtgatgtgaacagccaggctgccggtattacggctgaaaacagtatggatatccgcgccggacgggatgtgaacatggctgcggagtccacaggcgcaggtgaccacgacagcactttcagcatgaagacggttcatgattcggtccggcagcagggaacagacatgaccagtggcggtgacatcacggttactgccggacgggatatcacctcagttgcgactgctgtaacggcaaagggcgatatccgtgtgaatgccggtcatgacatcgtactgggtactgccacggaaagtgattatcactacagtgaatcaggggaaacccgcaaccgtctcctcagccatcagaccacccggaccatcacggaagacagcgtcacccgtgagaagggctctctgctgtcggggaatcgcgtgaccgttaacgccggcgataacctgacggtagagggttcggatgtggtggctgagccgggatgtgtcactggcggcgggtaa

SEQ ID NO: 12359 - DNA, 369 bp, Escherichia coli
atgtcagcacaagaaaaaacagtacagattgattcttttgatgcgaaatttttagatataaatacattaagcaagcttatttatgaacgtaagagttttgtgatcgaaaatgtttccgatgttagtgaaacggtaaaaagagtggagcatgaaatagagaaaacgaaattaagttgtcgtgtatatactgagtacaggagtacagctttagctggttctttatggtcaccaaccgtaattctgggagtggcgagtgcagtagcaataggtgttcataatttatctacatggaaccccgattatgaaatcggtaagaactatattaaacggagattatcggtaaaatataaaaaggcagaagtattgtga

SEQ ID NO: 12360 - DNA, 1176 bp, Escherichia coli
atggatttatccattaacaaaaactggatcgacaaagaagaatatccgcaatccgctgcaatcgacctgcgttgcgtaaacatggttgccgatctgtggcatgcgcctacaccgaaaaatggtcaggccgttggcaccaacaccattggttcttccgaggcctgtatgctcggcgggatggcgatgaaatggcgttggcgcaagcgtatggaagctgcaggtaagccgactaacaaaccgaacctggtgtgcggtccggtacaaatctgctggcataaattcgcccgctactgggatgtggagttgcgtgagatccctatgcgccccggtcagttgtttatggacccgaaacgcatgattgaagcctgcgacgaaaacaccatcggcgtggtgccgactttcggcgtgacctacaccggtaactatgagttcccgcagccgctgcacgatgcgctggataaattccaggccgacaccggtatcgacatcgacatgcacatcgacgccgccagcggtggcttcctggcaccgttcgtcgccccggatatcgtctgggacttccgcctgccgcgtgtgaaatcgatcagtgcttcaggccataaattcggtctggctccgctgggctgcggctgggttatctggcgtgatgaagaagcgctgccgcaggaactggtgttcaacgttgactacctcggcggtcagattggtactttcgccatcaacttctcccgcccggcgggtcaggtgattgcacagtactatgaattcctgcgcctcggtcgtgaaggctataccaaagtacagaacgcttcctaccaggttgccgcttatctggcggatgaaatcgccaaactggggccgtatgagttcatctgtaccggtcgcccggacgaaggcatcccggcggtttgcttcaaactgaaagatggtgaagatccgggatacaccctgtatgacctctctgaacgtctgcgtctgcgcggctggcaggttccggccttcactctcggcggtgaagccactgacatcgtggtgatgcgcattatgtgtcgtcgcggcttcgaaatggactttgctgaactgttgctggaagactacaaagcctccctgaaatatctcagcgaccacccgaaactgcagggtattgcccagcagaacagctttaaacacacctga

SEQ ID NO: 12361 - DNA, 1026 bp, Escherichia coli
atgaaaatattcattactgagcaacaaaaagctgaacttgaacgccttcatgattccagtcgtgacgggcgagtcagagatcgtattaaagccattcttctggcttccgaaggctggagttctgccatgattgctcaggctttacgcctgcatcagacaacgattgatcaccatatcagcgaattcctgaataaaggaaaactgaagcccgaaaacggcggctcagacagcaaactcagtgctgaacaaacggcctttttaatcagccagttatccgataatttatttcaccatacccgcgatgttattgcgtttgtcacccggacatggaacatcattttcagcattccggggatgaataagtggctgcatcgtaatggtgtcacctacaaaaaaccgtcaggcgtcccccataaattcagtgaagagaaacaaaggcaattcattgaatactataaggaactgaaaacaactgtgggtgatgagccgattctttttattgatggagtccatccgactcaggccactaaaatcagctatggctggatacgcaaaggccagaaaaaagcagtaaaaacaacaggcagccgcacacgcctgaatatcatgggggcgctgaatctgaaagcactgacgtcaccgctaatctgcgaatataaaaccattaatgaatataatgtatcccgttttttcaatgagatacgaaaggtttatcctgattataaccagaaaatccacgttattctggatggagcaggttaccaccgttcacagttagtgaaagactgggcggaagtggtaaatatcaggctgcattaccttcccccttacagtccaaacctgaatccgatagaaagaatgtggaaattaatgaacgaacatgcccggaataatcgctacttcagcagtacgcgagagttcagggaagcaatatctgtcttttttaaccagacactgccggatatagcggactcactgacatcccgaattaacgatcactttcaggtgctcacacccgcatcttga

SEQ ID NO: 12362 - DNA, 480 bp, Escherichia coli; identical to SEQ ID NO: 12357

SEQ ID NO: 12363 - DNA, 252 bp, Escherichia coli
atgagtaataccgacgcttcaggtgagaagcgagtgacaggcaccagcgagcgacgagaacagatcattcagcgtctgcgacagcaagggagtgagcaggttaacgatctgtcggcattgtatggcgtatctactgtgacgatccgcaacgatctggcgtttctggaaaagcaggggatcgctgtgcgtgcctatggtggcgcgttgatctgcgatagcacgacgccgtcagtcgcaatctttttacggtga

SEQ ID NO: 12364 - DNA, 477 bp, Escherichia coli
atgcaacagctttcctttctgcccggatcgatgacgcccggcgagcgcagcctcattcagcgggccctgaaaaccctggaccgtcatcttcatgagcccggcgtggccttcacctccacgcatgcggcacgggaatggctgattctgaacatggcaggactggagcgggaagagttccgggtgctgtatctgaacaaccagaatcagctgattgcgggtgaaaccctcttcacaggcaccatcaaccgcacagaagtccatccccgggaggtgattaaacgtgccctgtaccacaatgccgctgccgtggtgctggcgcacaatcacccgtccggtgaagtcacccccagtaaggcagaccggcttatcactgaacgtctggtacaggcgctggccctggtggatatccgggtgccggaccatctgatagtcggtggcaaccaggtattctcctttgccgaacacggtctgctttaa

SEQ ID NO: 12365 - DNA, 174 bp, Escherichia coli
atgatgcctgtacacgacctgtattttgacagtttgttagagataatgaaaacgtcttccactgagatgtacttcccatcgcaggaaagtctgttgtatacagatttcctaaaggtacatttatatcttttggagtcgtacatgttctttgcaaaacattacccgtcacagtaa

SEQ ID NO: 12366 - DNA, 369 bp, Escherichia coli
gtgcgtacagctaaactagccaatgatgccgacaaaagtgcaccggttggatttgatattgaattaagcgattgtagtacggctgctttatccaatgcagcaataattttctctggtagccaaatgtctgggcataacaatattttagcagttcagggaggggctggtacagcaacgaatgttggtgtgcaagtaactgattacacagggaagcctgttgtttttgacggaaccactgcaagtactgattataaactgaccgacggcactaacaaaattccgttccaggctcgctatattgctgttgatggacaagccactgctggtacagccaacgccgacgccacctttaaagttcagtaccagtaa

SEQ ID NO: 12367 - DNA, 447 bp, Escherichia coli
atgacaaccagagagcgcagcctcattctgcgggccctgaaaaccctggaccgccatcttcatgaacccggcgtggccttcacctccacccgtgcggcacgggaatggctgattctgaacatggcgggactggagcgtgaagagttccgggtgctgtatctgaataaccagaatcagctgattgccggtgaaaccctcttcaccggcaccatcaaccgcacggaagtccatccccgggaagtgattaaacgcgccctgtatcacaatgccgcagccgtggtgctggcacataatcacccgtccggtgaagtcacacccagcaaggcagaccggcttatcacggaacgtctggtacaggcactgggcctggtggatatccgggtgccggaccatctgatagtcggtggcagccaggttttctcctttgccgaacatggtctgctttaa

SEQ ID NO: 12368 - DNA, 306 bp, Escherichia coli
atggaccgtctgtatgaagactactgcggtggtatctggaatctgtacaccctgaacaacggtggcgcatttatggcacccgaaccggatgacgatgatgacgaaacatgggtactgttcaatgccatgaacggtaaccgcgctgaaatgagcccggaagccgccggcattgccgcctgtctgatgacgtacagtcatcacgcctgccgtacggagtgttatgccatgacggttcattattaccgtctgcgggattacgccctgcaacatccggaatacgacgccattatgcgcattattgactga

SEQ ID NO: 12369 - DNA, 336 bp, Escherichia coli
gtgaccctggagccccgtgtcttcggctggatggaccgtctgtatgaagactactgcggtggtatctggaatctgtacaccctgaacaacggtggcgcatttatggcacccgaaccggatgacgatgatgacgaaacatgggtgctgtttaacgtcatgaacggtaaccgcgctgaaatgagcccggaagccgccggcattgccgcctgtctgatgacgtacagtcatcacgcctgccgtacggagtgttatgccatgacggttcattattaccgtctgcgggattacgccctgcagcatccggaatgcagcgccattatgcgcattatcgactga

SEQ ID NO: 12370 - DNA, 147 bp, Escherichia coli; identical to SEQ ID NO: 8534

SEQ ID NO: 12371 - DNA, 549 bp, Escherichia coli
gtgaaaacgggggccgaagccatccgggcgctggccatgcagatcccggcgtttcgtcagaaactgagtgacggctggtatcaggtacggattgccgggcgtgatgcaggtgaaaccgaattatctgcccgtcttaatgagccgctggcaaatggtgccgtgatccacatcgttccgcgtctggagggggccaaaagtggcggtgtgtttcaggcggtgctgggtgcggcgctgattgcggtggcatggtggaaccctgtgggctggctgggggccgcggctgtatcgggtatgtatgcagcaggggccagtatgatcctgggtggtgtggcgcagatgctggcaccgaaagcccggacgcccacggcagccagtacagataacggcaaacagaacacgtatttctcgtcactggataacatggttgcccagggcaatgttctgcccgttctgtacggtgaaatgcgtgtggggtcgcgagtggtatctcaggagatcagcacggcagatgaaggtgatggtggtcaggttgtggtgattggtcgctga

SEQ ID NO: 12372 - DNA, 3396 bp, Escherichia coli
atgggtaaaggcagcagtaaggggcataccccgcgcgaagcgaaggacaacctgaagtccacgcagttgctgagtgtgatcgatgccatcagcgaagggccgattgacggtccggtggatggattaaaaagcgtgctgctgaacagtacgccagtgctggacactgaggggaataccaacatctccggcgtcacggtggtgttccgggcaggtgagcaggagcagactccgccggaggggtttgaatcctccggctccgagacggtgctcggtacagaagtgaaatatgacacgccgatcacccggaccatcacgtcggcaaacattgaccgtctgcgttttactttcggcgtgcagacactggtggaaaccacctcaaagggggacaggaatccgtcggaagtccgcctgctggttcagatacagcgtaacggtggctgggtgacggaaaaagacatcaccattaagggcaaaaccacctcgcagtatctggcctcggtggtggtgggtaacctgccgccgcgcccgtttaatatccggatgcgcaggatgacgccggacagcaccacagaccagctgcagaacaaaacgctctggtcgtcatacaccgaaatcatcgatgtgaaacagtgctacccgaacacggcactggtcggcgtgcaggtggactcggaacagttcggcagtcagcaggtgagccgtaattatcatcttcgcgggcgcattctgcaggtgccgtcgaactataacccgcagacgcggcaatacagcggtatctgggacggaacgtttaagccagcatacagcaacaacatggcctggtgtctgtgggatatgctgacccatccgcgctacggcatggggaagcgtctcggtgcggcggatgtggacaaatgggcgctgtatgtcatcggccagaattgcgaccagtcggtgccggatggctttggtggcacggagccgcgcatcacctgtaatgcctggctgaccacacagcgtaaggcgtgggatgttctcagtgatttctgctcggcgatgcgctgtatgccggtatggaacgggcagacgctgacgttcgtgcaggaccgaccatcagataaggtgtggacctataaccgcagtaatgtggtgatgccggatgatggcgcgccgttccgctacagcttcagcgccctgaaggaccgccataatgccgttgaggtgaactggattgacccgaacaacggctgggagacggcgacagagcttgttgaagatacgcaggccattgcccgttacggtcgtaacgtcacgaagatggatgcctttggctgtaccagccgggggcaggcacaccgcgccgggctgtggctgattaaaacggaactgctggaaacgcagaccgtggacttcagcgtgggcgcagaagggcttcgccatgtaccgggcgatgtcattgaaatctgtgatgatgactatgccggtatcagcaccggtggtcgtgtgctggcggtgaacagccagacccggacgctgacgctcgaccgtgaaatcacgctgccatcctccggtaccacgctgataagcctggttgacggaagtggcaatccggtcagcgtggaggttcagtccgtcaccgacggcgtgaaggtaaaagtgagccgtgttcctgacggtgttgctgaatacagcgtatgggggctgaagctgccgacgctgcgccagcgcctgttccgctgtgtgagtatccgggagaacgatgacggtacgtatgccatcaccgccgtgcagcatgtaccggaaaaagaagccatcgtggataacggggcgcactttgacggcgaccagagcggcacggtgaatggtgtcacgccgccagcggtgcagcacctgaccgccgaagtcaccgcagacagcggggaatatcaggtgctggcgcgatgggacacgccgaaggtggtgaagggcgtgagcttcctgcttcgccttaccgtggcagcggacgacggcagtgagcggctggtcagcatggcccggacgacggaaaccacataccgcttcaggcaactggcgctggggcgttacacgctgacggtccgggcggtaaatgcgtgggggcagcagggcgatccggcatcggtatcgttccggattgcggcaccggcagcgcctgtcactattgaactgataccagggtattttcagataacagcggtcccgaaactggctgtatatgacccgacggtgcagtttgagttctggttctcggaaaagcggattatcgatatcaggcaggttgaaaccagcgcgcgttatcttggtacggcgctgtactggatagccgccagtagcaatattaagccgggttatgattattacttttatatccgcagcgtgaacaccgttggtaaatcggcatttgtggaggccgttggtcgggcgagcgatgatgcggaaggttatctgaatttttataaagggttgatcaataaaacgcatctcggcaaggaactgctggaaaactttgagctgacggaagataacgccagcaaactggaggagttttcgaaagagtggaaggacgccaacgataaatggaatgccatgtggggcgtcaaaattgagcagaccaaagacggcaaacattatgtcgcggggcttggcctcagcatggaggatacggaggaaggcaaactgagccagttcctggttgccgctaaccgtatcgcgtttattgacccggcaaacgggaatgaaacgccgatgtttgtggcgcagggcaaccagatattcatgaacgacgtgttcctgaagcgcctgacggcccccaccattaccagcggcggtaatcctccggcattttccctgacaccggacgggcggctgacggcgaaaaatgccgatatcagcggtaacgtgaatgcgaactccgggacgctcaacaacgtcacgattaacgagaactgccgggttctgggaaaactgtccgcgaaccagattgaaggcgatctcgttaaaacagtgggcaaagctttcccccgtgactcccgggcaccggagcggtggccatcagggaccattaccgtcagggtttatgacgatcagccgtttgaccggcaaattgttattccggctgtggcattcagtggcgctaagcatgagagagagcatactgatatttactcctcatgccgtctgatagtgcggaaaaacggtgctgaaatttataaccgtaccgcgctggataatacgctgatttacagtggcgttattgatatgcctgccggtcacggtcacatgacactggagttttcggtgtcagcatggctggtaaatggctggtatcccacagcaagtatcagcgatttgctggttgttgtgatgaagaaagccactgcaggcatcacgattagctga

SEQ ID NO: 12373 - DNA, 600 bp, Escherichia coli; identical to SEQ ID NO: 5367

SEQ ID NO: 12374 - DNA, 2256 bp, Escherichia coli
atggaagtcgagaatgatttaagccagtcggctttgctgctgacagtgccacaggcttacctcgaatataccagcagcgactgggaccctccctcacgctgggacgatggtatttctgggctgattgccgactacagcctcaatgcgcaaactcgccatcaggagcaagggggcgaggactcacatgatatcagcggtaacggtacagttggggcaaaccttggggcatggcgtttccgtgcagactggcaaagtgattatcagcacacccgcagcaacgacgatgaagatgacagcagtaacagtacaacgagtaaaaactgggactggagccgttattacgcctggcgagctttaccctctttaaaagcgaagctgtcgctgggagaagattatctcaattccgatattttcgacggctttaactatatcggcagcagtgtcagcaccgatgaccagatgctgccgcccaatctgcgcggctatgcgccagatgtttctggcgtggcgcacagcagcgcaaaagtgaccatcagccagatgggccgggtactttacgaaacccaggttcccgccgggccattccgcattcaggatatcggcgattctgtctctggcacactacacgtccgtgttgaagaacagaatggtcaggtgcaggaatatgacgtcaccaccgcatccatgccattcctcacgcgtcaggggcaggtgcgttacaaagtgatgatggggcgtccggaagactggaaccacaagaccgaaggcggatttttttccggcggagaagcatcatggggggtggcagatggctggtcgctttacggtggcgcgctggcagatgagcactaccagtcggcggcgatgggggtggggcgcgacctcgcacagtttggcgcgctggcgttcgatgtgactcactcgcacgtcaacctggatcatgacagcgcatacggcaaaggaaaactggacggcaactcctttcgcgtgagctatgccaaagactttgacgaacttaacagccgcgtcacctttgcaggctaccgtttctccgaaaagaactttatgactatgagcgagtatctggacgcgagccagtcggacatggcgcggaccggaaacgacaaagagatgtatacgatcacgtataaccagaactttgccgcagcgggtgtctcggtctatctcaactactcccatcgtacttactgggatcgcccggaacagacaaactataacctgatgttttcccactattttaatatggggagcattcgcaatatgagcatctcggtgaccggctatcgctacgaatatgacgataatacggataagggaatgtacctcagcatgagcattccgtggagcgacagcagcaccgtgacctacaacggctcttacggtagcgggtcggacagcagtcaggtcggctactttaatcgcatcgatgacgcaacgcactaccagattaacgtcggcaccagcgaacagcacggtagcgtggatggttatctgagccacgacggcacgttggcgaaggtagatctcagcgccaactaccatgaaggagaataccgttcggcggggatcgccttacagggcggggcaacgctgaccgcgcacggtggggcgctgcatcgcactcaaaacatgggcggcacacgcctgctgattgacgccgacggtattgccaacgtgccggtcgaaagcaacggcgcgccggtgtacaccaatatgtttggcaaggcggtggtcgccgatattaacaactactatcgcaatcaggcgtatatagatttaaacaacttgccggaagatgcggaagccacccagtcggtggtgcaggcgactctgacggaaggcgcaatcggctatcgtaaattcaaagtgatcagcgggcaaaaagcgatggcggtactgcggttgcgtgacggtagctacccgccgtttggcgcggaagtaaaaaacgacgagcagcagcaggttggcattgtggatgatgaaggcaatgtctatctggcggggatcaatgcgggtgagcatatgatggtgttctgggaaggcagcgcacaatgcgagatcgtattgccgaagccgctacctgccgatctgttccgcggcctgttgttgccgtgtgaacaaaagggaacgacagcccccgattctttagcgccggaaattaagcccgttattcaggaccagactcggcaggtcacgccatctgaagcgccgacgtcaatttcagccactcaataa

SEQ ID NO: 12375 - DNA, 504 bp, Escherichia coli
gtgttcaacgttgactacctcggcggtcagattggtactttcgccatcaacttctcccgcccggcgggtcaggtgattgcacagtattatgaattcctgcgcctcggtcgtgaaggctataccaaagtacagaacgcttcctaccaggttgctgcttatctggcggatgaaatcgccaaactggggccgtatgagttcatctgtaccggtcgcccggacgaaggcatcccggcggtttgcttcaaactgaaagatggtgaagatccgggatacaccctgtacgacctctctgaacgtctgcgtctgcgcggctggcaggttccggctttcactctcggcggtgaagccaccgacatcgtggtgatgcgcattatgtgtcgtcgcggcttcgaaatggactttgctgaactgttgctggaagactacaaagcctccctgaaatatctcagcgaccacccgaaactgcagggtattgcccagcagaacagctttaaacacacctga

SEQ ID NO: 12376 - DNA, 720 bp, Escherichia coli
atgcaagagaactacaagattctggtggttgatgacgacatgcgcctgcgcgcgctgctggaacgttatctcaccgaacaaggcttccaggttcgaagcgtcgctaatgcagaacagatggatcgcctgctgactcgtgaatctttccatcttatggtactggatttgatgttacctggtgaagatggcttgtcgatttgccgacgtcttcgtagccagagtaacccgatgccgatcattatggtgacggcgaaaggggaagaagtggaccgtatcgttggcctggagattggcgctgacgattacattccaaaaccgtttaacccgcgtgaactgctggcccgcattcgtgcggtgctgcgtcgtcaggcgaacgaactgccaggcgcaccgtcacaggaagaggcggtaattgctttcggtaagttcaaacttaacctcggtacgcgcgaaatgttccgcgaagacgagccgatgccgctcaccagtggtgagtttgcggtactgaaggcactggtcagccatccgcgtgagccgctctcccgcgataagctgatgaaccttgcccgtggtcgtgaatattccgcaatggaacgctccatcgacgtgcagatttcgcgtctgcgccgcatggtggaagaagatccggcgcatccgcgttacattcagaccgtctggggtctgggctacgtctttgtaccggacggttctaaagcatga

SEQ ID NO: 12377 - DNA, 423 bp, Escherichia coli
atggcggatctgtacagtcatcgctgggaaatcgaactgggatacagggagataaaacagacgatgcaactgagcaggctgacgctgagaagtaaaaaaccggagcttgtggagcaagagctgtggggtgtcttactggcttataatctggtgagatatcagatgattaaaatggcggaacatctgaaaggttactggccgaatcaactgagtttctcagaatcatgtggaatggtgatgagaatgctgatgacattgcagggcgcttcaccgggacgtataccggagctgatgcgcgatcttgcaagtatgggacaacttgtgaaattaccgacaagaagggaaagggccttcccgagagtggtaaaggagaggccctggaaataccccacagccccgaaaaagagccagtcagttgcttaa

SEQ ID NO: 12378 - DNA, 534 bp, Escherichia coli
atgaccggtgaagcctggggccacggcgtgatgcaaagtgactactatcgccacggcttcgatgcgatgatcaatttcgattatcaggagcaggcggcgaaagctgtcgattgtctggcgcagatggatacgacctggcagcaaatggcggagaaattgcaggatttcaacgtgttgagctacctctcgtcgcatgatacccgcctgttccgtgaagggggcgacaaagcagcagagttattattattagcaccaggcgcggtacaaattttttatggcgatgaatcctcgcgtccgttcggtcctaccggttctgatccgctgcaaggtacgcgttcggatatgaactggcaggatgttagcggtaaatctgccgccagcgtcgcgcactggcagaaaatcagccagttccgcgcccgccatcccgcaattggcgcgggcaaacaaacgacactttcgctgaagcagggctacggctttgttcgtgagcatggcgacgataaagtgctggtcatctgggcggggcaacagtga

SEQ ID NO: 12379 - DNA, 1179 bp, Escherichia coli
atgtttactaaacgtcaccgcatcacattactgttcaatgccaataaagcctatgaccggcaggtagtagaaggcgtaggggaatatttacaggcgtcacaatcggaatgggatattttcattgaagaagatttccgcgcccgcattgataaaatcaaggactggttaggagatggcgtcattgccgacttcgacgacaaacaaatcgagcaagcgctggctgatgtcgacgtccccattgttggggttggtggctcgtatcaccttgccgaaagttacccacccgttcattacattgccaccgataactatgcgctggttgaaagcgcatttttgcatttaaaagagaaaggcgttaaccgctttgctttttatggtcttccggaatcaagcggtaaacgttgggccactgaatgcgaatatgcatttcgtcagcttgtcgctgaagaaaagtatcgcggagtggtttatcaggggttagaaaccgcgccagagaactggcaacacgcgcaaaatcggctggcagactggctacaaacgctaccaccgcaaaccgggattattgccgttactgacgcccgggcgcggcatattctgcaagtatgtgaacatctacatattcccgtaccggaaaaattatgcgtgattggcatcgataacgaagaactgacccgctatctgtcgcgtgtcgccctttcttcggtcgctcagggcgcgcggcaaatgggctatcaggcggcaaaactgttgcatcgattattagataaagaagaaatgccgctacagcggattttggtcccaccagttcgcgtcattgaacggcgctcaacagattaccgctcgctgaccgatcccgccgttattcaggctatgcattacattcgtaatcacgcctgtaaagggattaaagtggatcaggtactggatgcggtgggcatatcacgctccaatcttgagaagcgttttaaagaagaggtgggtgaaaccatccatgccatgattcatgccgaaaagctggagaaagcgcgcagtctgctgatttcaaccaccttgtcgatcaatgagatatcgcaaatgtgcggttatccatcgctgcaatatttctactctgtttttaaaaaagcatatgacacgacgccaaaagagtatcgcgatgtaaatagcgaggtcatgttgtag

SEQ ID NO: 12380 - DNA, 240 bp, Escherichia coli
gtgcggatgcggcgtggtgttatgccagagctgcgctgttttcgtgaacacgcggcggacagcctcaattcccagacgctggcgggtctgaataacggcactgggggcaacgaaggggcgattgcccggcagcatgatatccaggcgattcacaatctggtgaagaggttctttacgctcaagcgccatgccaacaatacaccagaccatcatttcgaggggaagacggcgcttgcgtag

SEQ ID NO: 12381 - DNA, 204 bp, Escherichia coli
atgaaaaacgtgtttaaggcactcactgtattacttactctcttcagcctgacgggctgcggtctgaaaggtccgctctatttcccgcctgcagataaaaacgcaccgccgccgaccaaaccggtagagacgcaaacgcaatccacggtaccggacaaaaacgaccgcgccactggcgatggtccatcccaggtgaattactaa

SEQ ID NO: 12382 - DNA, 306 bp, Escherichia coli
atgcagttctcgaaaatgcatggccttggcaacgattttatggtcgtcgacgcggtaacgcagaatgtctttttttcaccggagctgattcgtcgcctggcggatcggcacctgggggtagggtttgaccaattgctggtggttgagccaccgtatgatccggaactggattttcactatcgcattttcaatgctgatggcagtgaagtggcgcagtgcggcaacggcgcgcgctgctttgcccgttttgtgcgcctgaaagggctgaccaataagcgcgatatccgcgtcagcaccgccagatag

SEQ ID NO: 12383 - DNA, 321 bp, Escherichia coli
atgaacgacagtgaatttcatcgcctggctgatcaactgtggctgaccattgaagaacatctggacgactgggatggcgacagcgatatcgactgtgaaatcaacggcggtgtactaaccattacctttgagaacggcagcaaaatcattatcaaccgccaggaaccactgcaccaggtatggctggcaaccaaacagggcggctaccattttgatctgaaaggcgatgagtggatttgcgatcgcagcggcgaaaccttctgggatttgctggaacaggcggcgacgcagcaggcgggagaaaccgtcagttttcgttaa

SEQ ID NO: 12384 - DNA, 216 bp, Escherichia coli; identical to SEQ ID NO: 5123

SEQ ID NO: 12385 - DNA, 507 bp, Escherichia coli
atgaaatggtatgttttgcaattcaccactacgagatttgcagcggtttttgcgcatctcgaacgcctgagcttttcttacttctgtccaatggaaacagcaaggtatcgtcgcccggataagatagtttcatatcgagaaagatgttttccacttttccccggttatctttttgtccaggcagattttgaagaggttcattttactataataactgctatcccttacgtacaacgctttatctcatttggcggtgaacctttacctgtatcagaagatgtgattgaggtgcttttgcggagacaatcgcaatccgctcaaacaaatcttttgaggaaatcaattccacacgaatttgctgaaattctccttatggaaaatccacaacaaagaagtatggctttcatccattatatcactgagagaagcttaacccacaaaatgaaacggaagaaaaatgactgctacccggaaaaaaagcgcaacgagacgcaagccccaacgtaa

SEQ ID NO: 12386 - DNA, 222 bp, Escherichia coli
atgactgctacccggaaaaaaagcgcaacgagacgcaagccccaacgtaatacactctacctaccctcaacttctcgtgaggaactggataaaattgctctggagattggctatcgtagggggcggcgtatatcaagctctggtgttgtccagtacctcattaaaaaatattccagtcaggctattgaggagctgataaacgaagacgatgacgatgactaa

SEQ ID NO: 12387 - DNA, 228 bp, Escherichia coli
atgaaaagtatcgctactgctggccttgtcattatatctgtttttagtctttctggatgttttgaagaaacaaaatcggttgattggtggcttgcacatccgaaggagacatacaaaaaatttgaagagtgtcagaagtctggtagcgattctgataattgtaagaacgttaagcgagcacatttgtcttttgaacggagaaaggcggttggtttaccaataaattga

SEQ ID NO: 12388 - DNA, 1134 bp, Escherichia coli
atggggattgtcactggtataccggatggtactgatttatcaggtaatgtaacctctcccgcaaatgcgggaggtgttcctgggtttgattctgatttttttcagacaactcatgaagttatatttaacattctcaataagagtatatctggaaaattaagtgaatattcagatgtggcttatactcttggtaaatatggagtttctctgtatgttttatggtatgcctttactgtattagcaaggaaacaacagacacctgtacctgattttatctggaatatctgtaggttttacataatattgctttttgttaagaatacagggggaatacttacatcagcaacagatgctattgatggattgaaaaatacattggcagggggagatccgtgggtatggatggatcagttatgggtgaaggttatacaagttgcaactcttatttttgataaagatacatctactgtgcctgttgccggtgggattggtgctttattaacttatgttggtggtgttttggcattattgctttgttctatagtatttgcagctgctgaattaacattactattactttctgtcactgcgccaatatttatcatgtgtttgatgtttggtttccttcggcaaatgtttaatagctggctacagcttaattttagctcgttactggtttttctatttgcagcattagcactaagagctgggacatggcaattaaacatggcattaagtacgtctattgctacagcatcagaaaacaatcttcttcaaacgggagtaacttcattagctgctggcattttcatggcctggattatctggcaggcgaaaagttatgcttcacagattgcaggtgtgggtgttgaaggtgccatgcagggcgcagccgctatggggattggtgctggcgttttcggtgcatcccgtatggcgcgtggcgcacttggtatgggcagaaatgccggtattggtgcatggaaaggtctgcgtcgtcaggaaggcgggtttggtgagtctccgggaataacgggtaagaccgctaacctggccggacagggcgttaatattggtgccaaaaagcttcgtcaggcagctattgagagggcaaagaaaatgtatggagggtga

SEQ ID NO: 12389 - DNA, 303 bp, Escherichia coli
atgaaaaggatatgcaaaggtctaatcgtaatttttactgtgtcctggctgacagcacctgcgtatgcatctgacccttgcgcctcggtactttgcttatatggaaaagcagtcgggcaaggtgggggaagtgaatgcagaagtgctgaaaaagacttttttaatattctgaaaaagaaaaaaggaaacattcgctggagtaaaacatttgatgcccgcaaggcatttttgaatcagtgctcaacggctgatccggctgctatctcaaaaattatgagtaagttcggtaagattaaggggtag

SEQ ID NO: 12390 - DNA, 258 bp, Escherichia coli
atgaaaaaaaaagaaaagattgattttcttaatgcaataaaagcagggcactctggctttatagctggtaatcctgctcatgcattggatgataagactatgaacgccatcattcataactacgaggcaacgattgcgcccggtaaagcaggtaactgcaaagaaactcctctcacaaagtattgttcgaggactatgccagagcgtatttcagttgaagaaattaatgaggttaaaatttatccagagttattctga

SEQ ID NO: 12391 - DNA, 435 bp, Escherichia coli
atgatgaataaatttagttatgtcaatcgtatgcttcggcaagtttttgtttttagttttatcacggccccatcaatagctttatttgttgtttttatgtttttttcgtttaataactcaattgctggttcatttttaaaagaggccagggggcttataaccgatactccttctgataaggttaacgtctgtcttttcgaaaagggtgtaccacaggatatggagttgacaaactccacaactgaacatgtattaaaaaataaatgtataacaacgttagttgatgctgctgactggcaggaatctgttgacggttccattcgatatttttattggtcgtcagttgttattggctttgtggtctggcttacctttaattttcgtgcactggaagaactattttatcgtagaaagagaaaaggagacgttgaatga

SEQ ID NO: 12392 - DNA, 516 bp, Escherichia coli
atgaggatttttttaagcgtgattttattcctgtttactgcttttcagtctgcaaatgcaggtggaatacctggtgctttagcaggaatactttctacattaaaccaggaaatccaggggaaagttattcgtgttctcgatggcgatacaatcgaagttttacaggacaaaaagcccgtcaggattcgcctggcaaacatcgatgcaccggagaaaaaacaggctttcgggcgctggtcagcaaatcagcttaaagctctgcttgcagcacagcctgttacggtgacgtacacgcagacagaccgctacggacgcattatcggtcatgtgttcacgacgaacggcacggatgccagccgctttatggttcagtctggcgctgcatgggtatatgaacgttacaacgtggatgagtcattaccggctctacaacgggaagcgcaggaacaaaaacgcggtttgtgggtcgatgcaaatccggttccaccgtgggagtggcgatacaaacataactaa

SEQ ID NO: 12393 - DNA, 405 bp, Escherichia coli
atggctttatcacccaaagaaaagaaagagttacaacaacgcttcgaaaagcaattactacctgaccttgatatgtcatttgaactaaatggcgaagtatataaatttaattttgataaaaatgagtcaggtgactatatcgatagttttacacaagcagtatggggaggttatcaggatgccgaggaatgggaaaaatatggtaaacatcaggagacagaattacctgaataccctgaaccagtcgagggttggtgcgactgtgataaatgtaagtcgatgatttttcataaagagaaaaatatttatgtttgcctctcctgccataaacaaacagagccatttcttccaattgactggaactcaaacgattacgattggctaccttatgaagatgaatactaa

SEQ ID NO: 12394 - DNA, 321 bp, Escherichia coli
atgaatatccatttattttcagaagtattgttctgcgtatgggttatagctttgattgtgattttatttatagttgttaaatattacaggcgtgtccattacagactcaattcactgtctgaaacgataaagcgcacacagggcggtgttaataagcgaatatctgaaaacagagaactgcttgaacttataaagaatcaacatcctgaaattcttgatgaatatccgtgggtaagtggttggcttgattcacaggaaaagtttttggtcgctcttgctgataagtctggtatcgatatcaacaaatcaggacttatttga

SEQ ID NO: 12395 - DNA, 588 bp, Escherichia coli
atgtatatacatattgttcctaaactttatcatctcatggctaataaatgtagccttaaatctatttccatacctgagcttgattttataattgatagtgaatcattgtctgtaggcagaccgtggcctaataaatgtttatgggttggaatgcgaaaaggaaggaagtcagttaatggcctcgttttgcaaacagataaaaaattaagatggtttactactatatacacctgggatattgaagatatggggttaatttaccatcaagtcaatacctatatagaagatgataattttgatatggtttcacaggaaattcttttaaatggttcttttgataagtggagtaacagggttcattcagcttatgaaaataagcctccagccagaatccagcccaaaatggagtccttattaaataaacctggtgaaaacagtcatgatgtgtgggaagagttcgaatggggtgacttccttctgtccagagaagaaagccttttacttcacactattcagtctgaacgattgagtacagattgctctttattcaaaagacaaccgtctattgaaagtgcattagttatttaa

SEQ ID NO: 12396 - DNA, 2154 bp, Escherichia coli
atgagactttttatcgcagaaaaacccgcagtagcaaatgatattgttaaggcacttggtggcaattttacccgccatgatggctggtttgaaagtgataacgccattgtgactaactgttttggtcatattatcgaatcacaaccgccggaaaactataatcctgaatacaaagcctggaaggttgaaacgcttcctttacgtctttatcccgtgaagtatcagcctgttgaaagtgccgcaaaacaggttaaaacgattctcgaacttatcagacgtggagacgtgactgaaattgttcacgctggcgatcctgatgatgagggacagttacttgttgatgaagtcctggaatatgcaggcaacacaaaacccgtaaagcgcgttctgattaacgacaacacgcttccggcagtgaaaaaggcactggcaaatcttaaagataatcgtgatttcaaagggctttaccttaaggcgctggcgcgttcagttgctgatgccgtctatggcttctccatgacgcgtgcttacaccattcctgcaaaagccagaggatatcagggcgttctgtctgtcgggcgcgtccagactcccgttcttggcctgattgtgaatcgtacccgtgctaaccagaaccataaatccagtttttactacaccatgaccggagtctttcagcgtggtgctgatgttatcagggcgaactggaagccaggggaatttgctccgctgacagaccgtaaattacttgataaagcgtgggcagacggaacggcagcctcccttgcaggaaaaccggctacagttgaagcggcagcaactgatgataaaaaaacggctgcaccgttgccctttaacctggtacgactccagcaatacatgaacaaaaagttcaaaatgacggcacaaaaaacgctggatattacgcaacaattacgtgaaaaatataaagcgattacttataaccgctctgattgctcatatttatctgatgaacaattcagcgaagcgccgcaggttatcgatgccctgaaatcagtctttcctcagtcgctggatattgattcttcacgtaaaagcaaagcgtttaacagtgcaaaggtgactgcgcatactgctataatcccgaccgccagtgtgcctgatgttaacgcactcagcaccgacgagcgcaatgtttacctggcgatcgcacaacactatcttgttcagttcatgcctgaaaaagcataccaggaagtatcggttgccattcagtgtggtgatgagtcgttctatgcccgtgccagaaaaacaactgacagcggatttgaggcgtttcttggcgcggaaaccacagacgaaggtgaatcagaagataatgatgattccgcttttgaactgctctgtaaaattcgcacaggagaaacactgacgacaaaagaagttattgttaatgagaagaaaacaacaccgccgccgttattcaccgaagcctccttgcttgctgcgcttgttcgtgtcgcggattttgtcactgacccaacgattaaaaaattgttgaaggataaggataaagacaaaaaagatgaacatggtggcattggtacgccagctacccgcgcagccattctggaaacgctgaagaaaagaaactatatcacgctggaaaaagggaaacttattcctactgataccggatatgcgcttattgatgccctgcctggtatagcggttaatcctgatatgacagcattatgggctgaaaagcagacagccattgaaaatggcgacctgaccgttgaagagttcattaatgaactatacgatgaactcacaggcatgatttctgatgttgacctgggcgagatgaaaattgaacccgtagcgccagcaggacaatctcaacgcctgagttctccctgccctacatgcggcaaacaaattattatcaggcaaaaaggttatttctgtaccggatgtgaatttaaaatctggagtgagttttctggtaagaaaatcacccaggcacaggccgaaaaactggttaaatcagggaaaaccgatttgattaagggatttaaaaagaaaagtggtggaacgtatgatacagttcttgtccttgaggataagaaaacagggaagctgggttttccggcaagggctaagaagtga

SEQ ID NO: 12397 - DNA, 465 bp, Escherichia coli
atgagcgaactgactaaagaagatgaatacggcattatcagccgtactatgatgaatattcgttcattacgtgtttttgcccgtgaagttgattttgagcaattgctcgaaatgcaggaaaaactgaacgttgttgttgaagaacgtcgtgaagatgctgaacgtgaagcggctgaacgccaggaacttgaagccaaacgtcagcaggccattgaatacatcatatctttaggtcttgatcccgaatcactccttgctcctgtaacagcagatacagtaaaaaccaggcggaaagccaaaggcggagtaagaaaggctaaataccgctttaaggatgaaaatggcgagatcagagaatggtctggtaatggcaagcgtccgcttgctttacagaagctgcttgatgagggccatttcatggaagatttcctcattgacaaactgcaacctgggcaggttgaataa

SEQ ID NO: 12398 - DNA, 654 bp, Escherichia coli
atgatcaaatcaaaaaaagtagtggttatttttgttgctttgagttcattcttgctggcagggtgtgattcaccaaaagatgctaataagcaaaactttgaaaaagctattaatactcgactagagaaggaatgcattactattagtccgctgggaatgtttgatagtaagccttatccggttcaggtagctgtggctcaggctaatcgatatacatctcaggaacgggcagatgaaataaattctcgacagttttctgcgctggatgtactggtcaaagccgatttattaacagtaaaagataccctggttgatgacgttattggttttactaagacgggtaagaaagtgccaggtcgtgaatatgctctgacagatgaggggaaaaaatatctgaagtctccggaacggcctgatttttgcgttggtcattataaggtggatgagatagttgattttaccgaacctggtgatgctatgggaatgaagatcacgcaggtgaattacacattcagtcccaccagtatcgctgaatgggcgaaacgcgatgatgttcgggctgcatttttaggacttgagtctgatttgaaagagaaacaaacaaaacgtattacactggttttgaaaaatgatggatggtctgctgaacggtag

SEQ ID NO: 12399 - DNA, 888 bp, Escherichia coli
ttgtcggacgcacctctgcttcaggtcataattgctggcacgtccaaaaaaacaggtgcggagattaaaaaattgagtcatttacccgccagcattttccagatttcacgtagcgacgcctggaatttaaccctctctcccgatgcagcccgtaatatgcgggatctggcggcgcagattggcgcaggaatgccaaaatatctgatagcaccggaagtctcactgcttctctcctacattgatgatctgagcatccgcatgtactttgagacactctggaataccggagcacgactgaatgaagctctggcactgaaacctgctgattttatgctgactccgacgcgccagtacccacaacccgtggtgatcctgaaaacactcaagcaacgtataaaagaagcagaaagaagaccaggacgcccgaccaccaggcacccaccattacaccctgatccgcgatacagaaaaccaccggagcctgctgtaaggctggttcctgttctggatgccggatacgcattgcgtatgcgggaatacctggcgacctggaaaaagcggatcaaacatcagccagtgtgggacataacatcgagacagacaccgctgaactggataaacaccgcagtggcacgggcagggcgtgacggcgtaacattttcggttccggtcacgcctcacacatttcgccacagttacgccatgcacctgacaatgagtggcgttcctccgcgcgtcctgcaatccctgctgggacaccgttatgcaagaagcaccgagatttacacccgcgttttttcgctggacgtccttacaggaagtggtctgtcctttacctgcgatccacagcttgcaaaacagcttcttggataccctgatgcgccttaa

SEQ ID NO: 12400 - DNA, 660 bp, Escherichia coli
atgggaaaaatcattacagttgcagggcataaaggcggcataggaaaaagcaccgtgctttgttccttatgtgtgtgcgtcatcataaaagggaaaacagcctgtttcctggaaacagactcacagggaagcatcaaggatttcatcgaggaacgtaaaactaacgaccggctgtctgaaataccgtatttcgagtgctacacagatattccggcaatggcacgaaaactggctgcccgctttgattatgtgtttgttgatacgccaggaatgaaatctccggccttcgttaaggcactgagttgtgctgacattctgttcacattcattgagccaggagcaggcatcgagatcaacacgctgggacggctggttttcgacattaaaacagcacaggccggagtcaatccgtcaatgaaagcatggattgtcctgaataagtgttcaactaacccgtcagacagtgaagcgtctgaactgcgccgacaactcaatgatgatccggactggcttccggttccccgccagcgtatctatatgcgtactgtgcataaaaaagcctataacagtggtatgggcgtgcatgaatacgatgataaacggggaaacaaagcccgtggagagattgaattactgttaaaagaaacggatgttctgtaa

SEQ ID NO: 12401 - DNA, 303 bp, Escherichia coli
atggcaaagctcccaaagaaaattgatcaggaaattaaaccgctggatttacgccagtttgtaagttctgctgcacaaaaaccagcatcggcatccgcagtaacgcgtataaatctgactatgacagatgatgatctggatacagcgcaggtgttccagaacaagtacggtgcaagccgtgctgaagttatcagagcagcactggcagcgttacgtctggtatcagcagaagaacgccggaggctgtttgatgatataaggaaaaacagcccgaaagcaggaagaccaaccgtgaataaatag

SEQ ID NO: 12402 - DNA, 285 bp, Escherichia coli
atgctcataaagatcattaaatctgtattcaatttttacatgctctgtgtgcagcctttacttggattatttctcatgggttacagtatatggagcttctctggtgacggtatctgtacggcagacaaagttatagcctgtgatatatcaatatatctggaaccagcattttaccttctcattggcactgttgttttgtttgtatggtatatagcatggcagacagaacgctcgaaagaagaagattttaaatcaagcattaagccggaagattttgtgaagtga

SEQ ID NO: 12403 - DNA, 282 bp, Escherichia coli
atgagtgaaatatactgcattgcaattgcagtcattatcgttggttacgtttatctaatgatcagtgtaattactgcaccacaaaaattgtttcctatacttcagctaataactctaataggtatcagttcgttattttcttttatgtcattcaagagcgaaagcatgtggacgggtgagcctgaattattagttgcgattatgtttggcactttttcagcaacactgattttttacatgtttaaaattttgattcgcgcttttgattcattgactaaataa

SEQ ID NO: 12404 - DNA, 216 bp, Escherichia coli
atggaacactgcatcgttgatttaggcattataaactatcatcctgtcattacatggacagtacctgttgcatttttctttttagtagtgctggctggtatagcattcaatattggcaggaaaagtaatctaatcgttttcatcctggcaatgttgctcccagtaacaactgttttcatttttatgttactgggcggtaagatcgatatgtgctga

SEQ ID NO: 12405 - DNA, 354 bp, Escherichia coli
atgaaatatcaggtgaaagagtttgttaatgaaaaatattctaaggctattaacattttaaaggataaccttaaagaaaactatcatattttttatggagtaagattaagtgagattctttttcctgccagtgagtatggcactgatgcattctttaaagagtttgaatcaataaatagtattactttaccattaattatttttgaaatgaatgaacgtaagcctgtagctatcattggctttgaacaaattgcaggtgctgtttttgttgagcaattagacattaaggttttggttattgacgacctgtctgaattgctgactaatgaaacgctggcttcattatacaactga

SEQ ID NO: 12406 - DNA, 897 bp, Escherichia coli
atgccaataagaaagatttctgagaagacaaaaattagacatcgaaatgagatcaataaaacgcttgctcagttacctctttctgcaaagagggttttgtgtctggcattggtgtctgttgatacgaaaaaaccgcttgaaccaggtatgatttttaaaattaccgctgatacctatacatctattacaaaagtcaaaccttcagttgcatatcgccagttaaaagaaggagctgaattacttaatactagtaaactttcactatcaagtgatgatattttggcattatctactgaattaggcttacctgatgcaatgcgtaagagtttagaacgcctggatatggggattactgattattgtgcatatagtccgaatgaggggtatgtcgttctaaaatttacgcatacaattcacccttacatttcaaatctaattggcggtgaaaataaattcactactcaattgcttacttcagcaatgagattaagtggtcaatactcatgggctttatatcagttaataagaaaaaactattccaaatttagaacaaagaattatttttcaatacatctgaacgaattaaaagatgagttaatcgcatatactatagaagacgatgaagttgtttataaatatcctgagtttcctatattcaaaagagaagtgatcaataaagcaataaaagagattaaagaaaaaacggaaatagaattcctgtcctgcttaatagaaagtaaagaggggcgtaaagttagtgttttacgctttgaatttcttgtttctgaagataaatttacaggtattgataacgaaactcatgaatttatgaatgatgatgatgctgctttcctgacagagtttgacaaagtcgttccaccaaaaaagaataagtga

SEQ ID NO: 12407 - DNA, 336 bp, Escherichia coli
atgccttacacggcgaaacgatatcagacagaaaacggtgaggttccatacaccgactggatgaaaaaattaagacgtaaagaccagaccgcagcgttaaaggtggattccagaattgcccgcgctatgggcggaaattttggagatcataaattcgaaagggacggtgtatgggaattacgggttgattacggtcctggttacagggtttattattcaatcgaagatggcgaaataattcttctgctcattggagggaataaaaaaactcagacagccgatttagataaagccgttagttatctgcaagattttaaaaagaggtcaaaaaaatga

SEQ ID NO: 12408 - DNA, 351 bp, Escherichia coli
atgacagccaccaaaaatgtgaagtcgcagaaaaatgattatccggcatccgttgatcacaatgccgccatgattgaagaattgcgcgcagatcctgattatgcaaacgcttatcttgctaatgccctggaagaaataaacgagcctggtggtttaggtggttttcttgttgcactacgtcaggtaatcgaggcgcgaggggggatttccgaagctgccaggaaatctggccttgcccgtcagagtatttaccgcgcattatcccccaacggtaacccgaccatcacaacgcttgcacaacttacatcggtagccggattacagttcactctcagtaaatccagccactaa

SEQ ID NO: 12409 - DNA, 516 bp, Escherichia coli
atgaatatccaggaagcattaaacgtttttggattatccggcgaattaactgaaaaagatatcaaagcagcatacagaaaagccgctttaaaatatcatccagatcgtaacccgttaggggctgaactgatgaaagcggtaaatgcagcttttgatgtattgatggcaaatattgataaaataaatcagttccagagcactgatgaacatgcacgatataattacggtgatgacctggaaaaagtattaaacgttctttctggtttatctggtctggtatttgaagtgataggtaactgggtctggattagtggagaaaccattacacataaggaaactttaaaagaaatcgggtgtaaatgggcggcaaagaaaaaacaatggttttatcgtccagacgaacataaaagttactggaatcgtgaagaacacacgatagaagaaatccgcgcaaaatacggtacaaccggacagcgcagggcgacagggtggcaacgcgtggaaaccagagcgtaa

SEQ ID NO: 12410 - DNA, 543 bp, Escherichia coli
atgaactctttttttgaacaatatcaccctgtctttgaagttgtctgccgtatcctggggaacggctggcgcgtgaacaaacttgatgattgttcgtctcgtataaaactgacgtcaccgcagtttaaaaattactctgtgcatattcggatggaaaaagaccggttttctgttgtggggagtgtggatagtcgctcctggcgtagtccgcatcatgtttgcacgttatccagaaaacggaatcccgttgatattgcagccgatatcgagcgaaaaattctggtaaatgcttcgcaggaggtgttacaggcgattgagtatgagaaacaccaggtggaaaaaaaggacgaaattctgatcctgaaaggtatgttatcgcaacttgtccagcttgaaagctggtatggggcattgacaggctttaaagctgaaaacggattgaacggtaaagtcaccgaacagggcgacagttatgatttacagattcggggcttgagtatagatcaacttgttaaaattacagggtatttgaaacagttatga

SEQ ID NO: 12411 - DNA, 252 bp, Escherichia coli
atgagaaaaaataaaggtgatgtgacttattttcttgaaaaagaaggtgacaattacaggcttacaaaaaggataaaagccagaacaaatgttaaaatcgggaacaaaactacgaaaattacattgtatgatgccgtactgaatgagaatgaattacaacatattgattttacgtgtgccggattaagggaagacgatgagacgccagttaagaatttaattaaggagtttatgttaaatgaaacccgataa

SEQ ID NO: 12412 - DNA, 228 bp, Escherichia coli
atgaaacccgataatacacctgaaaatgtaaaaaaattacgtttaaaagcaggattaacacaaaaggaatgcagtcatatttatggtgttgggctaagaacctggcagaaaaaagaggaagttaatactcaaaacagtcaaagtctgtcactggttgagtttgagtttcttttgttacttgcaggagaacatcctgaatacgtgctctgcaaaagggagtcaaaataa

SEQ ID NO: 12413 - DNA, 300 bp, Escherichia coli
atgaaatgctcatctgtttttacttcaaccactaatcatgttttcacgttcgaacgagtaacgctttgcactattatccttatgcataaggatacgggacaacagtatgttgtcatatttactgataacaataaaattcgtgactataaaaccggaattgttcctcagtttggcgaacttaagcagagtgatgttgatttagtccttttctacagggacgaatatgaaaaatattttgattcgttaaaagatggcgatgaatgcttaagttttaaagattttattgagtgccttcgttaa

SEQ ID NO: 12414 - DNA, 375 bp, Escherichia coli
atgaaatgtgtttatgttgttggcaaaggtttaatcgttgccggtaataaaattaccatcgatggaaaagagcatgtctcggtagaaaatagtgaaaacattgttgtcactgatgattgtattaaaattggtaataaaacagtggtttttaaaggcaggagtattaaggtagaaatacatggaaatgtaaataaaatagtaaccgaaaatgctgatgtcagtattcatgggaatgctggggatgttgaaaccgtgagtggtgatgttgattgtcatcaggttaatggcgatataaccactgtaagcggtgatgttacttgtggagatgtttctggtgacgtaaccactgtcagcggagatataaacagaaaatga

SEQ ID NO: 12415 - DNA, 294 bp, Escherichia coli
atgcttactgaagctaaaaaaatggcagtagagatgatgttctggcctgcttgtcctgtagatgatgattattgtttcgacgctataatgtatacatcagttattgacaggaagtttgaagatgaacatggggtatatcttcatcaggtttacaaagaactatgctcaacacccgaattaaaaaagtttctaaaaaagaaagcaataaaattgattgcttttaagcacgatattgatcttgattcagctaacaagattttaatgaaaaatatgctaaggaggattgaaaactga

SEQ ID NO: 12416 - DNA, 189 bp, Escherichia coli; identical to SEQ ID NO: 6014

SEQ ID NO: 12417 - DNA, 162 bp, Escherichia coli; identical to SEQ ID NO: 9709

SEQ ID NO: 12418 - DNA, 699 bp, Escherichia coli; identical to SEQ ID NO: 6139

SEQ ID NO: 12419 - DNA, 582 bp, Escherichia coli
gtgaacacggcagcggaagccattcgcgccctgtcgatgcagatgccgggctttcgccgtcagatgaacgaaggctggtaccagatacgtattgccggttatgacacggcaccggaggcggtgtacgcccgtcttcacgaacagctgggtgagggaacggtcatccacattgtgccgcgactggccggggccggaaagggtggactgcagattgtgctgggggcggcagccatcgtgggctctttcttcactgccggggcatcaatggcgttatggggttcagccctggcagccggtggtttttctgccaccacgatgctgttttcacttggagccagcatgattctgggcggtgtggcccagatgctggccccgaaggcaaaaacaccggattaccgcgcaacggataacggcagacagaacacgtacttttcctcactggataacatgattgcccaggggaacccgatgccggtgccttacggggaaatgctggttggctcccgccgtatatcccaggacatcagcacccgtgatgaaggcgggggcggaaaggtcgtggttatcgggcggcaggggtaa

SEQ ID NO: 12420 - DNA, 819 bp, Escherichia coli
gtggtcaacgggcatacggaagttatctgctcaaccagtatccaccacattctggctgtacgaaaaagtacactgctgcaaatcgacacacttatccggcaactggctgaaatctcagttctgacggaaagcattggaggtaaaaccacccgggactgggccatgaaacaggattttcgctgcggctgctggctcatggagaaacctgaaacggcaatgaaagccatcacccgcaaccttgaccgtgaaatctggcgtgacctgatgcaacgttccaggatgctttccttaatggatgcgcaggcccgtgatacatggtaccggtcactggagtacgataattttccggaaatcagcgaagcgaacattctgagcacatttaaacaactgcaccagaacaaggatgaggtgtttgagcggggagtgatcaacgtcttcaggggactgagctggaattataaaaccaactctccctgtaaatttggaagtaaaatcattatcaacaatctggtgaaatgggaccggtggagatttcatcttatcaccggacaacagactgaccgactcgccgatctggaaagaatgctacatctgttcagcgacaaaccgattcccgacaaccgggaaaacatcactattcgtctggatggtcacatccagtccgttcagggtaaagagcgctatgaagacgaaatgttcagcatcagatactttaagaagggctccgcacacatcacgttcaggaaaccagaactggttgatcggctaaatgatattattgcgaaacattatgcgggaaaagtatcttcttcagtatag

SEQ ID NO: 12421 - DNA, 207 bp, Escherichia coli
atgggtgtcggcgttcgacgaaataaacagccagccgtttttctgatcttcccggacaccacgcatccagtcacggatggtgaagggatcaccgttatgctcaatcccctgcaggtaacggatggctttcacgtagttggtcagcacagcacggatggaaatcgccgttttctcaattttctcttccaccaggttggccgccggtga

SEQ ID NO: 12422 - DNA, 345 bp, Escherichia coli
atggtgattctgcagttcagaatactgtcctcttacaatattttcctcgccacgtacgctgttctgagtatcacctatattccctttatattctgtgaccatattatcaacctgatgttttacatcattacggatattactgtcctgcgttctttgctcaataatggcctgatgtccctgatggtcagcaataatatcctgactgccaccacccgaaggtacgctctccattcctttaccgatgtccccacgggattcacgccaggcattatcaacaccaggctgtacctgttcctgcacaaaagaccaggccatcgcccgacgacgttctgcaatctccggtga

SEQ ID NO: 12423 - DNA, 186 bp, Escherichia coli
atgttctttggcagcgatcacggcggcgagcgtggagcactgttgtacgggctgatcggcacctgccgtctgaacggtatcgatccggaagcgtatctgcgccatatcctgagcgtactgccggaatggccttccaaccgagttgacgaactcctgccatggaacgtagtactcaccaataaataa

SEQ ID NO: 12424 - DNA, 2631 bp, Escherichia coli
atgagtaataacccacttgaggccgtcactcaggcggttaactccctcgtcacagcactgaaactgcctgacgaatccgcaaaggccaatgaagttctgggcgaaatgagcttcccgcagttcagccgtctgctgccgtaccgtgattacaaccaggaatccggtctgttcatgaatgacaccacgatgggctttatgctggaagccattcccatcaatggggcgaataagtccattgtggaggctctcgatcatatgctgcgcaccaaactgccgcgcggtattccgttgtgtatccatctgatgtccagtcagctggttggtgacaggattgaatacgggctgcgtgagttctcctggtcaggtgaacaggctgaacggtttaacgccattacccgtgcctattatatgaaagcggcagcgacacagttcccgctgccggaggggatgaatctgcccctgaccctgcgccattaccgggtgtttatctcgtactgttctccctcgaagaaaaaaagccgggctgacattctggaaatggaaaatctggtgaaaatcatccgtgcctcttttcacggcgcaaaaatcaccacacagacagtggatgcacaggcctttatcgatattgtcggggagatgattaaccataacccggactccctgtacccgaaaagacgtcagctggacccgtattctgatctgaattatcagtgtgtggaggacagttttgacctgaatgtccgggctgattacctgacgctgggcctgcgtgagaacggcaggaacagcacggcccgcatcctgaatttccatctggcccgtaacccggaaatcgccttcctgtggaatatggccgacaactacagcaacctgctgaacccggaactgtccatctcctgtccgttcatcctgacgctgactctggtggtggaagaccaggtgaaaacccacagcgaagccaacctgaagtacatggacctggagaagaagtcgaagacctcctatgccaaatggtttccgtcagttgaaaaggaggcgaaggagtggggggaactgcgccagcggctgggctccggccagtcttctgtcgtgtcctacttcctcaacatcacagccttctgcaaggacaataatgaaacggcactggaagtggagcaggacatcctgaacagcttccgtaaaaacggttttgagctgatttcaccgcgctttaaccacatgcgcaatttcctgacctgcctgccctttatggccgggaaagggctgtttaaacagctgaaagaggccggtgtggttcagcgcgcagagagctttaatgtggccaacctgatgccgttagtggcggataatcccctgacaccggcaggtctgctggcgcccacctaccgtaaccagctggcgtttatcgatatcttctttaaggggatgaataacaccaactacaacatggcggtctgtggcacctccggggccggtaaaaccggactgatacagccacttatccgcagcgtgctggactccgggggctttgccgtggtgttcgacatgggggatggctacaagtccctgtgtgagaacatggggggcgtatatctggacggtgaaaccctgcgttttaacccgtttgcgaacatcaccgatatcgaccagtcagcggagcgtgtccgcgaccagttgtcggtgatggccagccccaacggtaacctggatgaagtgcatgaaggtctgctgctgcaggcggtcaaagcctcctggctggccaaaaagaatcaggcgcgcattgatgatgtggtgaatttcctgaaaaacgccagtgacagcgagcagtatgccgggtcaccgaccatccgcagccgtctggatgaaatgattgtgctgcttgaccagtacactgccaacggcacttatggccggtattttaactctgatgagccgtccctgcgggatgatgccagaatggtggtgctggagctgggtgggctggaagaccgtccgtcactgctggttgcggtgatgttcagccttatcatttacatcgagaaccggatgtaccgcacgccgcgtaccctcaagaaactgaacgtcattgatgaaggctggcgtctgctggacttcaaaaatcgtaaagttggtgagtttattcaaaaaggttaccgcacctgtcgccgtcataccggtgcctatatcaccatcacacagaacatcgtcgactttgactctgacaaggcatccagcgcagcccgtgcggcatggggtaactcctcctacaaaattatcctcaaacagagtgcgaaggagttcgcgaaatataaccagttattcccggatcagttccagccactgcagcgcgacatgattggtaagtttggtgcggccaaagaccagtggttcagttccttcctgctgcaggtggaaaaccattcctcctggcaccgtctgtttgtggacccgttaagccgtgccatgtacagctctgacggcccggattttgagtttgtgcagcagaaacgcagagagggtatgagtattcatgaggcggtgtggcagctggcgtggaagaaatcggggccggagatggcttcgctggaggcctggctggaagaacatgagaaatacaggagtgttgcatga

SEQ ID NO: 12425 - DNA, 633 bp, Escherichia coli
atgagatgccgggggctgattgccctgctgatatgggggcagagtgtggccgccgccgatcttggcacctggggcgatctgtggccggtaaaggagccggacatgctgacggtgatcatgcagcgcctgacggcgctggagcagtccggtgagatgggccggaaaatggatgcctttaaggagcgggtgatccgcaacagtctgcggccccctgccgtgcccggtatcggacgcacggagaaatacagcagccggttgtttgacccgtccgtcagactggctgcggatatccgggataacgaagggcgggtgtttgcccgtcagggtgaagtgatgaatccgctgcagtatgtgccttttaaccaggcgctgtatttcatcaatggcgatgatccggcgcaggtggcctggatgaaacgccagacgccgcccacactggagagcaaaattatcctcgtgcagggcagtatcccggagatgcagaagtctctggacagccgtgtttactttgaccagaacggtgtgctctgccagcgcctcggcattgatcaggtcccggcacgggtgagcgccgttcccggcgatcgcttcctgaaggtggaatttattccggcagaggagggcagaaaatga

SEQ ID NO: 12426 - DNA, 993 bp, Escherichia coli
atgaagcgaagcctgtggctgctgatgttattccttctcgccggtcatgtccctgcggcatctgcggattctgcctgtgaggggcgttttgtaaacccgatcacggatatctgctggagctgtattttcccgctctcgctgggcagtatcaaagtcagtcagggtaaggtccccgacacggcgaacccgtcgatgcccattcagatttgtccggcaccgccgccgctgttcaggcgtatcgggctggccattggttactgggagccgatggcgctgacggacgtcacccggtcaccgggatgcatggtgaacctgggcttcagcctgccggcttttggtaaaacggcacagggaacggcgaaaaaggatgagaagcaggtgaacggggcgttctatcacgttcactggtacaaatacccgctgacgtactggcttaacatcatcacatcgctgggctgtctggaaggtggtgacctggatatcgcttatctttctgaaattgaccccacctggacggacagcagcctgaccaccattctcaatccggaagctgtcatctttgccaatccgatagcacagggggcctgtgcagcagatgccattgccagcgcctttaatatgcctctcgatgttctgttctggtgtgccggttcgcagggcagtatgtacccgttcaatggctgggtgagtaatgagtccagtccgttgcagtcctccctgctggtcagtgaacgcatggcgttcaaactacaccgtcagggcatgattatggaaaccatcgggaaaaataacgccgtctgtaatgaatatccgtccccaatcctgcctaaagaacgctggcgttatcagatggtgaatatgtatccggacagcggacagtgccatccgttcgggcgcagtgtgatgcgctgggagacgggaaaaaatccgcccaacacaaagaaaaacttcggctacctgatgtggcgtaaacgtaactgtgtattcctgtaa

SEQ ID NO: 12427 - DNA, 306 bp, Escherichia coli
atggcaacaatggacagtaaatatattcagcacctcaggaaaataagtgctgtactgctcaggctgataagcagaacattaaaattatttccttttggtcttgtaatggtgcccgttatattattttattttgcacctgacagttttctcgctgaaattattcatgaatggaagaaggcagatatatcagaacaagtgacacttgtcagattatatctgaaggtgacatttacatgtgcgtttatggctgtttttctcaattatcttttttctgatgagttcatgcctgtaaatagcagaaagtga

SEQ ID NO: 12428 - DNA, 639 bp, Escherichia coli
atgaaccggaaaatatttgcactttttgctctgacagcagggatgcatcttgctgttcatgcttcagaaaatgtgaacacacctgaaaaccgccagttcctgaagcagcaggaaaatttaagcagacaactgcgagagaaacctgaccatcagctgaaagcttgggcggagaaacaggtgctggaaaacccccttcagcgttcagataaccattttctggatgagctggttcgtaaacagcaggcttcgcaggacgggaaaccccggcagggtgccctgtattttgtgtcgttttccattcccgaagaggggctgaaacggatgctgggcgaaacccggcactacggtattccggccacactgcggggcatggtgaacaatgacctgaagaccaccgctgaagccgtgctgtccctggtgaaagacggcgcgactgatggtgttcagatcgacccgacgctgttttcacagtacggcattcgcagtgtaccggcactggtggtgttctgcagtcagggatacgacatcatccggggaaacctgcgggtcggccaggcgctggagaaagtggccgccacgggtgactgccggcaggtggctcatgatttactggcagggaaaggagattccgggaaatga

SEQ ID NO: 12429 - DNA, 240 bp, Escherichia coli
gtgcggatgcggcgtggcgttatgccagagctgcgctgttttcgtgaacacgcggcggacagcctcacttcccaggcgctggcgggcctgaataacggcactgggggcaacgaaggggcgattgcccggcagcatgatgtccaggcgattcacaatctggtgaagaggttctttacgctcaagcgccatgccaacaatacaccagaccatcatttcgaggggaagacggcgcttgcgtag

SEQ ID NO: 12430 - DNA, 240 bp, Escherichia coli; identical to SEQ ID NO: 12429

SEQ ID NO: 12431 - DNA, 297 bp, Escherichia coli
atgaatactgtttatccgttgaagaccttaaatcagttacgtcctcttctgattggctttcgtaaagtaaatggactgacccaaaaggatattgcagagaggcttggcgtaacacagcaaacctatgcgcgattggaggcgaacccaggtagcgccagtattgagcggttgttcaaagtgtttactgtgttgggcgttgaaatagaactttcttcttcattggcttcatcagccataaattcatataagttaactgataaatatagagattctctagccagacgagaaaagtggtga

SEQ ID NO: 12432 - DNA, 150 bp, Escherichia coli
atggcattgacacgttcttactatgtgtcgatgaaattcgcttttttaaacatgtcttctggatatgtttaccgcatcgacacattccagccatatgtcgataaagccttattttttaaacatgttgccggaatatgcttatggcattga

SEQ ID NO: 12433 - DNA, 747 bp, Escherichia coli; identical to SEQ ID NO: 6050

SEQ ID NO: 12434 - DNA, 888 bp, Escherichia coli; identical to SEQ ID NO: 6051

SEQ ID NO: 12435 - DNA, 684 bp, Escherichia coli; identical to SEQ ID NO: 6106

SEQ ID NO: 12436 - DNA, 1071 bp, Escherichia coli; identical to SEQ ID NO: 6069

SEQ ID NO: 12437 - DNA, 186 bp, Escherichia coli; identical to SEQ ID NO: 12423

SEQ ID NO: 12438 - DNA, 591 bp, Escherichia coli
atgaagctgattatttttattcttattgttctgattattgcagcgttacttatccggattatcctcagaagtgtaaatcagcattctcctttgctgatgcaattgcatgcggcaggtatacggaccggtgatgcagagcgaatactgtccggcggtgaatactggcaacgtcagaagacgctgctgacagaaagggaagtcagttttatgaaaggactgttcagaattgtggatatgaagcggtggtatctgtgtccgcaggtacgggtcgcggatatcgtccagctgaacgggaatatccggccacgatcacgccagtggtggcagttattcaggatggtgtctcagtggcatgttgatgtggttatcgttgagcggcgttcgttcagtattgttgcagcagtagagctggatgatgccagccatttacgaccggaacgcagacgccgggatattcttctggaagaggttctgaggcaggctggtattccgttgctcagaagccacgatgccagaaaactgctgcagatgaccggagaatggctgaatacaacaggggctgttcagcagtcaccggaatatcgtagctga

SEQ ID NO: 12439 - DNA, 462 bp, Escherichia coli; identical to SEQ ID NO: 5115

SEQ ID NO: 12440 - DNA, 276 bp, Escherichia coli; identical to SEQ ID NO: 6180

SEQ ID NO: 12441 - DNA, 264 bp, Escherichia coli; identical to SEQ ID NO: 5910

SEQ ID NO: 12442 - DNA, 483 bp, Escherichia coli
atggtatatataataatcgtttcccacggacatgaagactacatcaaaaaattactcgaaaatcttaatgctgacgatgagcactacaagattatcgtacgcgacaacaaagactctctattattgaaacaaatatgccagcattatgcaggcctggactatattagtggaggtgtatacggctttggtcataataataatattgcggtggcgtatgtaaaggaaaaatatagacccgcagatgatgattacattttgtttttgaatcccgatatcatcatgaagcatgatgatttgctgacatatattaaatatgtcgaaagtaagcgttatgcttttagtacattatgcctgttccgagatgaagcgaaatctttacatgattattccgtaagaaaatttcctgtgctttctgattttattgtgtcatttatgttagggattaataaaacaaaaattccggtgatgctgccaacttactga

SEQ ID NO: 12443 - DNA, 564 bp, Escherichia coli; identical to SEQ ID NO: 5765

SEQ ID NO: 12444 - DNA, 858 bp, Escherichia coli
gtgactgatcttcaacaaacgtattaccgccaggtaaagaacccgaatccggtgtttacaccccgtaaaggtgccggaacgctgaagttctgcgaaaaactgatggaaaaggcggtgggcttcacttcccgttttgatttcgccattcatgtggcgcatgcccgttcgcgtggtctgcgtcgacgcatgccaccggtgctgcgtcgacgggctattgatgcgctcctgcaggggctgtgtttccactatgacccgctggccaaccgcgtccagtgttccatcaccacactggccattgagtgcggactggcgacagagtccggtgcaggaaaactctccatcacccgagccacccgggccctgacgttcctgtcagagctgggactgattacctaccagacggaatatgacccgcttatcgggtgctacattccgaccgatatcacgttcacaccggcgctgtttgccgctctcgatatctcagaagaggcggtggcttccgcacgccgcagccgtgtggaatgggaaaacagacagcgcaaaaagcaggggctggataccctgggtatggatgagctgatagcgaaagcctggcgttttgtgcgtgagcgtttccgcagttaccagacagagcttaagtcccgtggaataaaacgtgcccgtgcgcgtcgtgatgcgaacagggaacgtcaggatatcgtcaccctggtgaaacggcagctgacgcgtgaaatctcggaagggcgcttctctgccagtcgtgaggcggtaaaacgtgaagtggagcgtcgtgtgaaggagcgcatgattctgtcacgtaaccgcaattacagccggctggccaccgcttccccctga

SEQ ID NO: 12445 - DNA, 243 bp, Escherichia coli
atggaaataattcccatcagacctttcagtgaccctgcttcaattatctcattatgtagatgtacgttagaaaactccaatgcccctcttagcctgttgtgttctgcaactaacaaattcatattttcagcgcgtgactctgctgatctaaatgaaaaaggtgactttatgaatatatttaaaccaatttcgtacattgccagtcttgcacctagggaagtcacgctattagcattggtataa

SEQ ID NO: 12446 - DNA, 489 bp, Escherichia coli; identical to SEQ ID NO: 5883

SEQ ID NO: 12447 - DNA, 378 bp, Escherichia coli
atgaaaacattacctgtattacccgggcaggcggccagttctcgcccgtctcctgttgaaatctggcagatactgctgtcccgactgctggaccagcactacggccttacgctgaatgacacaccgttcgctgatgaacgtgtgattgagcagcatattgaggcaggcatttcactgtgtgatgcagtgaactttctcgttgaaaaatacgcgctggtgcgtaccgaccagccgggattcagcgcctgtacccactctcagttaataaacagcatcgatatcctccgggctcgccgggcaacaggcctgatgatccgcgacaattacagaacggtaaataacattaccctggggaagcatccggaggcgaaacgatga

SEQ ID NO: 12448 - DNA, 369 bp, Escherichia coli
gtgtcagacacactccccgggacaacacttcccgacgacaatcacgaccgcccctggtgggggctgccctgcaccgtgacgccctgtttcggggcacgtctggtgcaggagggtaaccggttgcattaccttgccgaccgcgccagtatcagaggcctgttcagcgatgcagatgcgtaccacccggaccaggcctttccgctgctgatgaaacaactggaattaatgctcaccagcggtgaactgaatccccgccatcagcataccgtcacgctgtatgcaaaaggactgacctgcaaagccgataccctcagcagttgtggttacgtttatctggctgtttatccgacgcccgaaatgaaaaattaa

SEQ ID NO: 12449 - DNA, 348 bp, Escherichia coli; identical to SEQ ID NO: 8336

SEQ ID NO: 12450 - DNA, 822 bp, Escherichia coli; identical to SEQ ID NO: 8707

SEQ ID NO: 12451 - DNA, 201 bp, Escherichia coli; identical to SEQ ID NO: 5078

SEQ ID NO: 12452 - DNA, 435 bp, Escherichia coli
atgaaaactgaactgaccctgaatgtattacagaccatgaacgcacaggaatatgaagatatccgggctgccggaagtgatgaacgccgtgagctgactcacgccgtgatgcgggagctggatgcgccggataactggacgatgaacggcgagtacggcagcgagtttggcggctttttccccgtccaggtccgtttcacgcctgcccacgaacgttttcacctggcgttatgttcaccgggcgatgtctctcaggtctgggtgctggttctggtgaatgccggtggtgagccgtttgcggtggttcaggtacagcggcggtttgcaccggaagccgtcagccattcactggcactggcggcgtcactggatacgcaggggtacagcgttaacgacatcatccatatcctgatggcggaaggaggtcaggtatga

SEQ ID NO: 12453 - DNA, 261 bp, Escherichia coli
atgctgatggcggggattcagttcaccgctggtgagcatgagttccagttgtttcatcagcagcggaaaggcctggtccagatggtatgcatctgcgtcgctgaagcggcctctgataccggcgcggtcggcaaggtaatgcaggcggttaccctcttgcaccagacgagcgccaaaacagggcctcactgtgcagggaagcccccaccaggggcggtcgtgattgtcatcgggatgagttatcccggagagtttgtctga

SEQ ID NO: 12454 - DNA, 222 bp, Escherichia coli
atgagaatcatcacccgtggtgaagccatgcgtattcaccaacagcatcctgcatcccgtctttttccgttctgtaccggtaagtatcgctggcacggcagtgctgaagcgtatactggtcgtgaagtgcaggatattcccggcgttctggctgtgtttgcagaacgccgtaaggacagttttggcccgtatgtccggctgatgagtgtcaccctgaactga

SEQ ID NO: 12455 - DNA, 477 bp, Escherichia coli
atgcagcagctttcctttctgcccggagagatgacgcccggcgagcgcagcctcattcagcgggccctgaaaactctggaccgccatcttcatgaacccggcgtggccttcacctccacccgtgcggcacgggaatggctgattctgaacatggcgggactggagcgtgaagagttccgggtgctgtatctgaacaaccagaatcagctgattgccggtgaaaccctcttcaccggcaccatcaaccgcacggaagtccatccccgtgaagtgattaaacgcgccctgcatcacaatgccgctgccgtggtgctggcacacaatcacccgtccggtgaagtcacccccagtaaggcagaccgccttatcacggaacgtctggtacaggcactgggcctggtggatatccgggtgccggaccatctgatagtcggtggcagccaggttttctcctttgcggaacacggtctgctttaa

SEQ ID NO: 12456 - DNA, 405 bp, Escherichia coli
atggcgcgactgtcgcaactggcggggaacctgaggatcgtcttcccgcccactgtaacgatcgctgtcctgttcacgttgtttcagcagagcctcagccagttcaacttcacgacgcagtttttcagaacgggtaccgaacagcatccggcgcagtttttctatctgagcccgcagatgttctatttcccgttcatcttcttcgatcttttcttcggcacgtgtcagtgcagagcgcaggaaggcttccgtctcttcaaccagactcagttgctggtctttctgacggagggcttcagcctgctcagagagcaacctttccagctctgcgatgcgaatgaggtatttctgactcatgaccgtttttataatgcggtcaggagttttttacaacattgtcagtga

SEQ ID NO: 12457 - DNA, 141 bp, Escherichia coli; identical to SEQ ID NO: 6191

SEQ ID NO: 12458 - DNA, 465 bp, Escherichia coli
atgaaaacattgtctcagaacaccacctcttcggcctgtgcaccggagactggcctgcaacaactggttgccaccatagtccctgatgaacagcgcatcagcttctggccgcagcattttggcctcattccacagtgggtgaccctggagccccgggtcttcggctggatggaccgtctgtgcgaagactactgcggtggtatctggaatctgtacaccctgaacaacggcggggcatttatggcccccgaaccggatgacgaaacatgggtgctgtttaacgtcatgaacggtaaccgcgctgaaatgagcccggaagccgccggcattgccgcctgtctgatggcgtacagtcatcatgcctgtcgtacagagaattatgccatgacggttcattattaccggctgcgggattatgccctgcagcatccggaatgcagcgccattatgcgcatcatcgactga

SEQ ID NO: 12459 - DNA, 384 bp, Escherichia coli; identical to SEQ ID NO: 6164

SEQ ID NO: 12460 - DNA, 366 bp, Escherichia coli; identical to SEQ ID NO: 6960

SEQ ID NO: 12461 - DNA, 318 bp, Escherichia coli; identical to SEQ ID NO: 7542

SEQ ID NO: 12462 - DNA, 195 bp, Escherichia coli; identical to SEQ ID NO: 5143

SEQ ID NO: 12463 - DNA, 147 bp, Escherichia coli; identical to SEQ ID NO: 8534

SEQ ID NO: 12464 - DNA, 222 bp, Escherichia coli
atgaaaattatcacccgtggtgaagccatgcgtattcaccaacaacatccgacatcccgtctttttccgttctgtaccggtaagtatcgctggcacggcagtgctgaagcgtataccggtcgtgaagtgcaggatattcccggcgttcttgccgtgtttgcagaacgccgtaaggacagttttggcccgtatgtccggctgatgagtgtcaccctgaactga

SEQ ID NO: 12465 - DNA, 369 bp, Escherichia coli
gtgtcagacaaactctccgggataactcatcccgatgacaatcacgaccgcccctggtgggggcttccctgcacagtgaggccctgttttggcgctcgtctggtgcaagagggtaaccgcctgcattaccttgccgaccgcgccggtatcagaggccgcttcagcgacgcagatgcataccatctggaccaggcctttccgctgctgatgaaacaactggaattaatgctcaccagcggtgaactgaatccccgccatcagcataccgtcacgctgtatgcgaaaggactgacctgcgaagccgacaccctcagcagttgtggttacgtttatctggctttttatccaacatccgaaacgaaaaagtaa

SEQ ID NO: 12466 - DNA, 792 bp, Escherichia coli
gtgaacggtggaacactggaaaatcatgacaaccagattgtcttcggtacggccaacggaatgaccatcagtaccgggctggagtatgggccggataacgaggccaataccggcggacaatggatacaaaatggcggtatcgccaacaacactactgtcaccggtggtggtcttcagagagtgaatgccggaggaagcgtttcagacacggttatcagtgccggaggcggacagagccttcaggggcaggcagtgaataccactctgaacggcggtgagcagtgggtacatgaaggcgggattgcaacgggtaccgtcattaatgagaagggctggcaggccgtcaaatccggcgcagtggcaaccgacacggttgtgaataccggcgcggaaggggggccggatgcagaaaatggtgataccgggcagtttgttcgcggaaatgccgcacgtaccaccatcaataaaaatggtcgtcagattgtggctgttgaaggaacagcaaataccactgtggtttatgccggcggcgaccagacggtacacgggcatgcgctggataccacactgaatggcggttaccagtatgtgcacaacggaggcacagcctctgacacggttgtaaacagtgacggctggcagattgtcaaggaaggtggtctggcggatttcaccaccgttaaccagaaaggcaaactgcaggtgaacgccggtggtacagccacgaatgtcaccctgaaacagggtggagcactggtcaccagtgcgtattaccgtgaaggagatcggtga

SEQ ID NO: 12467 - DNA, 489 bp, Escherichia coli; identical to SEQ ID NO: 6148

SEQ ID NO: 12468 - DNA, 423 bp, Escherichia coli
atgtactgtactgttaaagaaatcatccgcgatgtactggatacagacgtgccggacagtgaatgcgtttttgccgtggtgctgacccgtggggatgtgcgctacatagcccaggactggaacctgtcagacgatgagctggaaaccgtcatgcagcggctggacgatgcctttgaatatggtgcggatgtcagcattgttcacgacgttgttcgtgagctgatggaagaaaagcgagccagccgtcaggtgacagttccggcggtgatgctggaaaaagtgatggcgctggcaggcagtgaaatgaagcgcctgtatgccgtcgggagtgagaacgggggcgacggtgacgcattcgtcagggaagaacgcgaagcaatggacgttgtgttacaggcgctggacggggagcacatgtcatga

SEQ ID NO: 12469 - DNA, 234 bp, Escherichia coli; identical to SEQ ID NO: 11469

SEQ ID NO: 12470 - DNA, 234 bp, Escherichia coli; identical to SEQ ID NO: 10186

SEQ ID NO: 12471 - DNA, 258 bp, Escherichia coli
ttgcacctgagcgttctgctgtggtgcactccccagcatctgcatggtgcccgtggttttcacaaggatttcagtgacgtaacgggtaataccgttatcttcccagctacgggtacggagttgcccctcgatgtagacctgcgcgcccttacgcagatattcacctgccacttccgcgagcttgccgaacagcaccacgcggtgccattccgtctgttccttcatttcccccgtctgtttgtcgcgccaggtttctga

SEQ ID NO: 12472 - DNA, 213 bp, Escherichia coli
atgagtttttccgacaccaggaggtcccagcaggatcacgttttcgctgcgctccacgaacgccagaccagccagttcccggacaaccttacggtcgatgcccggctggaaggtaaagtcgaactgctccagcgttttgacccacggcagacgagcctgcttcagcctggactccataccgcgctgatgcctgccgttccattcctgctgtag

SEQ ID NO: 12473 - DNA, 270 bp, Escherichia coli
atgcctgtatacacgcgttgggtaaaaacgcagaaatgcatgacgtgcggtaatcaggcagatgatccgcatcacatcattggtcatggactgggagggatgggaacaaaggctgatgatttgtttgttattccgctgtgccgtaaatgtcataacgaactgcacgccggggtaaaagattttgaagaaaaacacggcagccagctgttgttgctgattcgttttttaatgcacgcgagaaattcgggtgtcctgaagtggaaagcatga

SEQ ID NO: 12474 - DNA, 444 bp, Escherichia coli
gtgaaagcggtggatgcgggacatcgggtactgtttatgccactggacagactgatcgcgacactgatgaaagcgaaacaggaaaaccggctggagcgtcagctgcagcaactgagttatgcccgggtgttgatcctggatgaaataggctatctgccgatgaacagagaggaagccagcctgttcttccggctactgaaccgtcgatatgaaaaagcgagcatcatactgacgtcaaacaaagggttcgcagactggggagaaatgttcggagatcacgtgctggcaacagcgatactggatcggttgctacatcactcaaccacgctgaatatcaaaggagagagttaccggttaaaagagaaacgtaaagctggagtgctgaccaaaaacacaacgccaatcagtgatgatgaaatggtgaaaagcggacagcatcagtaa

SEQ ID NO: 12475 - DNA, 141 bp, Escherichia coli; identical to SEQ ID NO: 7328

SEQ ID NO: 12476 - DNA, 261 bp, Escherichia coli
atgtcgcagatcgaaaatgcagtaacttcctcaccgaaacgcatttacagaaaaggtaatccgttaaccggagccgagaaacaacgcatatctgtttcccggaaaaaggggacacataaagcgattaatgttttcatccagagtgaactcaaagatgatttgacacagctttgtaaggattcgggcttaactcaaaaagaaatgatagagcactggattttgaaagaaaaagctgcgatgactgatgcgaatagaaagtaa

SEQ ID NO: 12477 - DNA, 216 bp, Escherichia coli
atgtggactagacatagggatgcctcgtggtggttaatgaaaattaacttactacggggctatcttctttctgccacacaacacggtaacaaaccaccttcacgtcatgaggcagaaagcctcaagcgccgggcacatcatagcccatatacctgcacgctgaccacactcacttttcctgaaaataacccgctcattcaggctgtttacgggtaa

SEQ ID NO: 12478 - DNA, 258 bp, Escherichia coli; identical to SEQ ID NO: 11054

SEQ ID NO: 12479 - DNA, 213 bp, Escherichia coli
atgcgtttttcctacacccgaaggtcccagcaggatcacgtattcgctgcgctccacgaacgccagacctgccagttcccggacgaccttacgatcgatgcctggctggaaggtaaagtcgaactgctccagcgttttgacccgcggcagacgagcctgcttcagcctggactccataccgcgctgatgcctgccgttccattcctgctgtag

SEQ ID NO: 12480 - DNA, 240 bp, Escherichia coli
atgatgccggatggcgaccgttttcatctggttaacggtgaaaactggtttgaccgtaccgtgagtgctgatgccgcaggcatcatccttacctcccttgtgattaaccgccagttgtggctgtaccacgacagcggggatgcagggttgacacacctgtacaggatgcgcgatgcgcagttgtggagccacatcgaatttcaccccgaatgcaacgcgatttacgcggcacttgactga

SEQ ID NO: 12481 - DNA, 240 bp, Escherichia coli
atgatgccggatggcgaccgtttccacatggtgaacggtgcaaactggtttgaccgtacggtcagcgccgatgccgcaggcatcattctgacttcccttgtgattaaccgccagttgtggctgtaccacgacagcggggatgcaggactgacccatctttaccggatgcgcgatgcgcagttgtggcgtcacatcgaatttcaccccgaatgcaacgcgatttacgcggcactggactga

SEQ ID NO: 12482 - DNA, 177 bp, Escherichia coli; identical to SEQ ID NO: 5907

SEQ ID NO: 12483 - DNA, 1080 bp, Escherichia coli
atggacagagcatcacagccagcgcgtaccgggctgaccgaccggctggccccggatattgcgcggatcaatttttaccgtttttgccagttgctggaacagcgccagcagaacgcgccgctgggcagtaccgacagccccgccgccgatgcggtgcgctttcgtcctcatccggggatgggctttccggtcagcgagttaaagaacgttgaacgtgacgtggacaatcccgacgcgccacccacagtgcgcaccacttttctcggcctgtacggcgtggattcgccactgccaaccgcctatctggactacattacccagcgtcatgacggacatgacgcggtgatggcgtttctcgatatttttaaccatcgctttatcacccagtattaccgcatctggcgcaaatataactacccggcgtcgtttgaagcaggtgcagtggatgacatttcccgttgcctgctgggactcatcgggctgggtattcccggcagcgagaaccatatcgccacgccggtatcccgttttctggccctgctcagcgtgatgcgcctgccgacgcgcacggcggaaggcgttacggcactggtgggactgcttgccccgctgacgaaagcgacggtggtgcctcatgatccgcagcctgtaattctcccggcccctgcgggtctgtcaaaaaattcacccatcagcctgaaaacgcgaacgctgctggggcgtaccggcaccgacgtcaacagccagttgctgctgaaactgtataccgaagatgccgcagaagcacgtggctggctgcccggcgggcaactgcacagcgatttgctggtgctgctgcgcgtttatctgggctggcgctgtcaggcccgactgcaactgacgctgcccgtcagcctgttgcctgctgcccggctgggaaaacagcgtgtacagattagccgtaccggcatccttcgcgcctcctttgccgcgcccgcgaccggaacagtgacggtcagtctggggcgttatcagggattaatacccgctttttccattcgtaacagggagagtatgactcatgtttcctattcgttttaa

SEQ ID NO: 12484 - DNA, 201 bp, Escherichia coli
atgccgcatccggcaaaaagctgcccgcacaataacatcattcttcctgaacacgttttaccgcaaattatcatcgctactgaaaccgattacaccaaccacgccagccaaatatttgtaatattttcatattattattcagctttcacagttgttacatttcttttcagtaaagtcttaattgcagataacagcgtttaa

SEQ ID NO: 12485 - DNA, 519 bp, Escherichia coli
gtgtctgattataattctaaaaataaaaatgataatttcataataacgccgccgttatataaaatttcagcaaatgaaagctttcaatttaagattgacaaattaaaagaaaattttcctaacgacagggagagcatattccatatcaatgttatggctattcctccaatcacaaatgacgaaaaggatagtaacaatgctgttcaatttgccatcaacacaaggataaaattaatatatcgcccacataagataaacaacaaaaaccaagtttctgatgcttataaaaacttaaaaataacatcttcaaaagaaacattaactgtctcaaaccctagcccatactatattaccatgaacgatgtaaagattaatgggaaaaatattacatctataaaggattttatggtttcaccattttcaacattaatcatcccggaaaaaaatgctaaaacaattagttattctacgataaatgattacggcggagaaacgccgattcaaaacattaaactttaa

SEQ ID NO: 12486 - DNA, 243 bp, Escherichia coli
atgtcgtcaaccctacgagaagccagtaaggacacgttgcaggccaaagataaaacttaccactactacagcttgccgcttgctgccaaatcactgggcgatatcacccgtctacccaagtcattcaaagttttgctcgaaaacctgctgcgttggcaggatggtaaatcggttaccgaagaggatatccacgcgctggcgggatggctgaaaaatgcccatgctgaccgtgaaattgcctag

SEQ ID NO: 12487 - DNA, 975 bp, Escherichia coli; identical to SEQ ID NO: 2880

SEQ ID NO: 12488 - DNA, 2658 bp, Escherichia coli; identical to SEQ ID NO: 5677

SEQ ID NO: 12489 - DNA, 258 bp, Escherichia coli
atgaaaccgttacgttatacagcttcagcactggcgctcggactggctttaatggcaaatgcgcaggcagtgacgaccattccgttctggcattctatggaaggggaactgggtaaagaggtggattctctggcccaacgttttaacgccgaaaacccggattacaaaattgtaccgacctataaaggtaagcgtaaactgaccgccgtatgtagccatcagacgagaattggtaacttagacgcccatctgatatag

SEQ ID NO: 12490 - DNA, 222 bp, Escherichia coli
atgaaaatcatcacccgtggcgaagccatgcgtattcaccgtcagcatcctgcatcccgtctttttccgttctgtaccggcaaataccgctggcacggcagtgctgaagcgtataccggtcgtgaagtgcaggatattcccggtgtgttggccgtgtttgctgaacgtcgtaaggacagttttggcccgtatgtccggctgatgagcgtcactctgaactga

SEQ ID NO: 12491 - DNA, 375 bp, Escherichia coli
gtggccttcacctccacccgtgcggcacgggaatggctgattctgaacatggcgggactggagcgtgaagagttccgggtgctgtatctgaataaccagaatcagctgattgccggtgaaaccctcttcaccggcaccatcaaccgcacggaagtccatccccgggaagtgattaaacgcgccctgtatcacaatgccgctgccgtggtgctggcgcacaatcacccgtccggtgaagtcacacccagcaaggcagaccgccttatcacggaacgtctggtacaggcactgggcctggtggatatccgggtgccggaccatctgatagtcggtggcagccaggttttctcctttgccgaacatggtctgctttaa

SEQ ID NO: 12492 - DNA, 546 bp, Escherichia coli
atgaacccattcaaaggccggcattttcagcgtgacatcattctgtgggccgtacgctggtactgcaaatacggcatcagttaccgtgagctgcaggagatgctggctgaacgcggagtgaatgtcgatcactccacgatttaccgctgggttcagcgttatgcgcctgaaatggaaaaacggctgcgctggtactggcgtaacccttccgatctttgcccgtggcacatggatgaaacctacgtgaaggtcaatggccgctgggcgtatctgtaccgggccgtcgacagccggggccgcactgtcgatttttatctctcctcccgtcgtaacagcaaagctgcataccggtttctgggtaaaatcctcaacaacgtgaagaagtggcagatcccacgattcatcaacacggataaagcgcccgcctatggtcgcgcgcttgctctgctcaaacgcgaaggccggtgcccgtctgacgttgaacaccgacagatggcactgttgcaaatagtcggtggtgataaacttatcatccccttttgctga

SEQ ID NO: 12493 - DNA, 126 bp, Escherichia coli
atgaaaaaaagtgtcgattttattggtgtagggacagggccatttaatctcagcattgctgcgttgtcacatcagatcgaagaactggactgtctcttctttgatgaacatcctcatttttcctag

SEQ ID NO: 12494 - DNA, 666 bp, Escherichia coli
atgataaaaattgtaaacttaacaaaatcgtacaaaacatcaaacggaaggcattatgtatttaagaaccttagtattgatttccctgaaaaaaaaagcattgctttaattggccataatggggcaggaaaatcaacgctactgaaaatgattggaggtatcgatagacctgatagcggcaagattataactaataaaacaatatcttggccggttggtttagctggtgggtttcagggtagtttaaccggtagagaaaatgtaaaatttgttgctcgcctttatgttaaaaaagaaaacgtgaataatattgttgattttgttagagatttttctgaattgggcaaatattttgatatgccaattaaaacatattcatccggtatgagagctcgcctaggatttggccttagcatggcctttaaatttgattattatctagttgatgaaattactgcagttggtgatgcaaaatttaaaaaaaaatgcattgatctttttaataaaaaacgagatgaatcaaattttcttatggtatcccatagtatgaacacacttaaagaatattgcgatttaggaataacaattcatcgtaatggacaaatttatattcatgacaatgtttcaaacgcaataaaatattatttgtcttcagaaaacttataa

SEQ ID NO: 12495 - DNA, 777 bp, Escherichia coli
atgtccagaagcagtatggaaattcagtgctcagcagtaaaagcccttttttttagagagattaggactcgatttggaaaatataggttaggatacatatggtcagttttagagccttcatcacatcttgtgatattaataacaatatttggatatattatgcacagaaccatgcctgacatatcttatcctgcatgtttattaaacggcgtcataccatattttatttttagtagtgttgcgacacgttctgtaaatgctattgatgctaacagaggtttatttaattacaggcctgtaaggcctattgatactctattggcaaggacactcctagaaacaataatatatatcattgtatacgcactattaatgttaatacttgcatttttaggtgaaaatttctctatgtccaaattagtattacttttcacaacatggttattactaattattttctccttggggactggattaatttttatggtgcttggacaattatcaccagaggctgaaaaaatattaccaataataattaagccagtttactttatttcatgcgttatgtttcctatacatgcagtcccaaaagaatactggcactatttactctggaatccagtagtccatatagttgaattaagtagagaggcagtggtaccagggtatgtaagcgaaggtgtgagccttggttttttagcaattagttctgtacttatactttttattgggttagcactttatcgtacttatgaagagaaaatgttgacatcatga

SEQ ID NO: 12496 - DNA, 261 bp, Escherichia coli; identical to SEQ ID NO: 5979

SEQ ID NO: 12497 - DNA, 1731 bp, Escherichia coli
gtgcagaaatcaccggagccggtactgctgtttattgatgaagcccataccattatcggtgcgggtaatcaggcaggcggcgcggatgcggcgaacctgctgaaaccggcgctggcaaggggcgaactgcgcaccatcgcggcgaccacgtggagcgaatacaaacagtattttgagcgcgacgccgcgctggaacgccgcttccagatggtgaaagtcgacgagccggatgatgacaccgcctgcctgatgctgcggggactcaaggcccgctatgcacagcaccacggcgtacatatgctggacagcgccattcagaccgccgtgcgcctgtcgcgccgctatctgaccggacgccagttgccggacaaagcggttgatttgctggataccgccggggcaagagtccgcatgagccttgacactctgccggagccgttgacgcagcttcatgcgcgactggcggcgctggatatcgagcgggaggcgattgagcaggacagcgtgttttatcccgaaaccagcccggagcggctggcggaactgaccgatttgcgtgatgagctacaggcagaagccgggcatctggaagcgcagtatcagcaggaaaaggcactggcgcagcagattatgacgttgcgtcaggaaggaacagacagctctgaactgcaacagcaactgcggacgcatcagggctttgcaccgctgctggcgctggatgtggacgcccgcgccgtcgccacggtggtggcggactggaccggcatcccgctctcttccctgctcagggacgagcagagcgacctgctcagtatggaacagagtcttgaaaaccgcgttgtcgggcaaagcccggcgctctgcgccatcgcacagcggctgcgggcggctaaaaccggcctcacgccggagaacggcccacagggggtattcctgctgaccggccccagcggcaccggcaaaaccgaaactgcgctcacactggccgacaccctgtttggtggtgaaaaatcccttatcaccattaatctttcggaataccaggaaccgcataccgtttcccagttgaaaggctcgcctccaggctacgttggttacggtcagggtggcgtacttaccgaagccgttcgcaaacgcccttacagcgtggtgctgctcgacgaagtggaaaaggcgcatcgcgacgtgatgaacctgttctatcaggtgttcgaccggggctttatgcgcgacggcgaagggcgggtaatcgacttccgcaacaccgtcattctgatgaccgccaatctgggcagcgaccacatcatgcaactgctggaggaaaaaccggacgccacggacgcagacctgcatgaactgctgtatccccttctgcgagaccattttcagcctgcactgatggcgcgttttcagacggtgatttaccgcccgctgggacaggaggcgatgcgcaccattgtggaaatgaaactggcgcaggtggtccgccgtcttcaccagcactacggactggaaacggaaatcaacgacagcctgtatgaccagcttaccgccgcctgcctgctgccggataccggggcgcgcaatatcgacagcctcctgaaccagcaaatcctgccggtcttaagccagcagttgctggcacagcaggccgtgcatcataagcctgcccgactgcggcttggctgggatgaggaggacgggattgtactggaatttgatgagaaataa

SEQ ID NO: 12498 - DNA, 708 bp, Escherichia coli
atgacatcaaaccctctgatagcctataagtccaatgcgctggttgaggccagttacaagctaactttacaagaacagcgtttcttattgctctgcataagccgacttaactccggtactgacgtagcttcacctgaattgcaaaagacaatgaccattacagctgcggaatattttgattcattccctgatatggggcggaaaaatgccgaggttcagctacaggaagcgatcgatcgtttgtgggacaggtcgatcattctcaaggacgacgagaagcgcgaggagttccgctggattcagtatcgggcacagtacgcgaggggagaggggaaagcacaaatcactttttctgacgcggtaatgccttatctgacacagttgaaggggcaattcaccagagtcgtcattaaaaatatttctaatttatcaagaagttacagcataagaatatacgaaattctccagcaattccgcagtactggggaacgtattatcgccctcgatgattttaaatcatcactgatgcttgatggtaaatataaagatttcaaaacgttaaacagggatctaataaaaccctgtgttgacgaactgaacaaaaaaagcgacctggctgtaacggttgagacgatcaaaaaggggcgcacggttgtagccctgcattttcgcttcaaggaagacaaacagatcaagatgacgatctag

SEQ ID NO: 12499 - DNA, 2094 bp, Escherichia coli
atgctttctaagcataaagtagtatcattagacatctttgatacagtcctgcaaagaaatattgccaatcctagtgacataccatatttggtcgcaaagtatggtaaagagaaattctttattaatatagaatcatatatggatgccagaaaaaaatgtaaatctttaagtcaatatacatatgaaactcctttatctgaacgatataaaatcataggaaaacttctctctattcctgaagatgttttccttgatttatataattatgaattagatattgagagaaaggttattgattctcgaactatcggaaaagaaattataaaggctgcacgtgcgctaaataaaaaagtgatattagtatctgatatatattatgacaaagagttcgttgcccaattacttaagcattgtgatattgattatgatgaactttatatttcctctgaattagacaaaacaaaagagagcggaagtttatatgaccatttgattgacatttatggatgcgacattatacatattggtgataatagacactctgattataataaagctttagataagggtttaacccctgttttattgttgagcaataaagagcaaataaaaagaaccattaattcatatactgaactttcaggcgactttaaagagttccgaaatggattaatacaagcgaatatgtctcaatatcctatgataacctatcaacctggttatatgagaggaaatgctgaattttttggatataatgtcgttggcgatatatttcttgcatttgctcactggatattaaaagaagctcaaaaacgtaaaataaaaaaactagcatttctggcaagagatggtgaaattgttaagaaagtctttgatcttataaataatacagatatagagtcgaagtacatacttgcatcacgacgctgcgtacgagtttcatcgatgtataccaagcaagatgtgatcaatgaaattgataatttcattagctcgttaaacaataataacaacgatatatttaattatttatccctgcgttttggcctttctattgaatctatcaaaaatatttttgaaggtagtataccaagtctaaaaaacaataatgaacttaaggaaaaattgtattcagataattttatatcagctgttcttagtaattccgctatagaaagaagcaactatatttcttatttaaaaaataatcatatcgacagtaacacggcttttattgatattggccataatggttctcttcaagccagtatttgtaaacttttaggattaaagaaaagtacaggactttattttgcaacatatgaagggatagatgccacattagcgtgcgtttccggagaacatgtcggaataggttattataaagatcggatctcagtacaaaataaatctgataactatataaaatatgcactcatgatagaaacaatatttttaaatgagaaaggaaccttcattaaatttaacaaagtagacgacaaacttattccagaatatttatctgtaaaaaatgaggctaagcgcatatcatttattcgctcattgcaaaaaggtatcttgcactatatttctgacttaacaaaatcattaaactcaatgaactttgatattgctaaaaatgatacatttagtagatcatttgatccttgtgaacgattttttaaaataatgcaacaaccggtattaagagatgctcaaatgttttctggcgtcacaatggaaaattatttttccggaagggatattcgttatattactcctaaatttgatatgttgaattcagtttgtttatggcgagaaggcactaagttaataaaagaacacgtagctaaagataacaaaaaaaatgaaagaacatatgctaaaaatacagttagcattaaaactttaaaaccaaggcctataataggcaatatagctaaaactactttaacattggcagagtctttttatataatgatggcaccatttgttaataagaaaaaagttaagaaacttatccttgataaggagaaattctataatgactcacagaataaaataataaaaaaaatatggcatgcctcccgataa

SEQ ID NO: 12500 - DNA, 1311 bp, Escherichia coli
atgtatatgaagtatgatgaaaatttaaaagataaaaatatttttatcgttaaccattcttttatacaaggagatggctggttagaagaaaactgtataatcaatgggcgattaaatgctcgattttttgtaggagcttacagcatagtagatattggcagttattgtagtaacacattcattggtaggtttagtgttgttgataaaaatgttcatattggctatccaaaaatacattctcggcacaatttctcaaaccatccattcagtaaggatttaccattcattgcttctgatgattacttgaaaaaaataaaaaccagtcgattttattatgagcaaaataaatatactataataggtagtgatgtttttattggcaaaaattcaattatagaagaaggatgtgttattggtgatggcgcagtaattcaacccaatacatatgttaattttgacattgaggattatgctatagtgggaggaaacccagcaagaataataggttatagatttgaagaagagatcattgaaaaactaaaaacaataaaatggtggaaacatgacatatcatcagttatttatcaaaacaaaccaaacactattgattatattaataatataaaactcattgaacaattatataatataaaagatacgttacctaaacttataaaaaaaagatataactataataaatataaaaacattttggtggaagataaatgtgataaaatgataacaggcccttcacatattgatttgtggtataggaagtttttgaaaaatgaagtgtcaaaaccaactaaatatcacttactccctattcctgccgtttctcttttcagtcaacaattagagaacttaattgcatggtggaatgagtggtttggctcggttatcttgtttgtgccggatttccgtattggcaatgtttgcactaataataaagttaaagatggtcgatttattagacaagatcttgtgtcaaatgaaaattcattacagtgttttaaattaggtattgaagcgctaaataagttctctcaacgatatcaggttacgtattggttttggtgtttattaggacgtgaagaattcaatcgttctaacaaccattataaggataataatggaaattataaacatccaatctggaactataatgaaatattaaaaatgtatcattcaaatgcaatcgatataaaaaaatacattcctaatatattagagtctattattgatggtagcattcatcctacaaatgaatgttataaacaattctcaataatattcgataaattagattaa

SEQ ID NO: 12501 - DNA, 312 bp, Escherichia coli; identical to SEQ ID NO: 6177

SEQ ID NO: 12502 - DNA, 456 bp, Escherichia coli
atgattcacctgttcaaaacctgcatgattaccgccttcattctggggttaacgtggtctgccccactccgggcacaggatcaacgttacatcagtatacgcaatacagatacgatatggctcccgggaaatatttgtgcttaccagttccggctggataatggcggaaacgatgaaggatttggccccctcaccatcactctgcaactcaaagacaaatatggtcagacgctggtgaccagaaaaatggaaacggaagcctttggtgacagtaatgccacgcgaaccacagacgcatttctggaaacggagtgcgtggaaaatgtcgccacaaccgaaatcattaaagcaactgaagaaagtaacggccatcgtgtcagtctgccgttatcggttttcgatccccaggactaccatccactgctgattaccgtttccggaaaaaacgttaactga

SEQ ID NO: 12503 - DNA, 534 bp, Escherichia coli
atgctggaacagcaatttgaagatttcgaacagcaaaaacggcgagatcatcaggcacaagatcaatccaaaagtgctaagcaaaaacgagatcggttgaatccacctgactggtcgcaggttactaaggcgggatggaatatgttggactctatatctgagaaggttcccagagcatttaggctatattctttttttgctcaaaatatagataaatcgtgtggggctgttgtatgtgaccaaaaattcttagctgattatttcggtgttagtttaaggacgatccaatattggattggagatttagaaagtattggtgccatcgtgaaaataccagtaggtatctattatgcttatgcgttagatccgtatcaggtatggcgcggatataataaatctaaaaaatatgcagcgtttaacgcaaaaacattaactcaaaaagatggcgttattgatcgcaagttgcggctcatgctctctaggagagaagagtttgaaggctcgcttaagacatctaatcatgacttggactag

SEQ ID NO: 12504 - DNA, 477 bp, Escherichia coli
atgcaacagctttcctttctgcccggagagatgacgcccggcgagcgcagcctcattcaacgggccctgaaaaccctggaccgccatcttcatgaacccggcgtggccttcacctccacccgtgcggcacgggaatggctgattctgaacatggcgggactggagcgtgaagagttccgggtgctgtatctgaataaccagaatcagctgattgccggtgaaaccctcttcaccggcaccatcaaccgcacggaagtccatccccgggaagtgattaaacgcgccctgtatcacaatgccgctgccgtggtgctggcgcacaatcacccgtccggtgaagtcacacccagtaaggcagaccggcttatcaccgaacgtctggtacaggcactgggcctggtggatatccgggtgccggaccatctgatagtcggtggcagccaggttttctcctttgccgaacatggtctgctttaa

SEQ ID NO: 12505 - DNA, 477 bp, Escherichia coli
atgcagcagctttcctttctgcccggagaaatgacgcccggcgagcgcagtctcattctgcgggctctgaaaaccctggaccgccatcttcatgaacccggtgtggccttcacctccacccgtgcggcacgggaatggctgattctgaacatggcgggactggagcgtgaagagttccgggtgctgtatctgaataaccagaatcagctgattgccggtgaaaccctcttcaccggcaccatcaaccgcacggaagtccatccccgggaagtgattaaacgcgccctgtaccacaatgccgctgccgtggtactggcgcacaatcacccgtccggtgaagtcacacccagtaaggcagaccggcttatcaccgaacgtctggtacaggcactgggcctggtggatatccgggtgccggaccatctgatagtcggtggcaaccaggttttctcctttgccgaacatggtctgctttaa

SEQ ID NO: 12506 - DNA, 252 bp, Escherichia coli; identical to SEQ ID NO: 9417

SEQ ID NO: 12507 - DNA, 381 bp, Escherichia coli
atggcagtaacgtccccggtggtggatttcagcctgcagttgccagaagttacgtttctgcaccgcctgcagggcatccgcgatacgatggagttcatggtcctgtgtggcatactcccggagccttctggctgttgctggctgccagtgccagcgtccttcaaaacaggctccgtccccctggctgcagaatccgctgaaccagatgcacggctcttccataaacctgccattgctgagccggaaaacgcgctggcggaggtcaatcccgaaaatgccacagacctccctgaagtcttcatacacgttttcataccagttgctgtcagcatgatgctgacggtaccagtcgcgggctttttcctgtgcggtggaggatag

SEQ ID NO: 12508 - DNA, 210 bp, Escherichia coli
atgattaaacaggcgtggtgcagtgccctgggagtggatgccggacgttatgacacgctggcacattttccggtcaggccggcggtgtggctggaacgcgatgatgacaccggctttcagcaggtgctggagcgtgctgactatctggcgaaggagagtaccaaagcttacggcaccggtgagcgcaactttggctgcagtcgtggctga

SEQ ID NO: 12509 - DNA, 384 bp, Escherichia coli; identical to SEQ ID NO: 8439

SEQ ID NO: 12510 - DNA, 894 bp, Escherichia coli
atgtgtataagagacaggttatgttctgaagaaatacttaagagatccgtcttttatttgttcgcatttctttgccttattggcattataagtattcttttacagaagactgagattatacatgataaaagtatgattctttttcctgaaccatcagcatttgcattggtttttatacctatcttttcattttgtttatactatacaagagggggggggctactattgctctatatattatctttgggtattgcgttaggtatccagaatttaacaatgttggtaggcattgtgattagtgtttttgtgatgaaaaaaataactataaggcaaactattgttatacttttgggggcatggattttttccatgatattaagtgatttagacatttcttactatacatcgcggcttgattttaaaaatactacgaacctatcagtgcttgtatatctttcaggaattgaaagagctttcttgaattttattacaagttatggtcttggtattggttttcaacaaatgggagtgaatggggagataggaatatatcaacaaattttagctgaacttgatgcccctatgttaaatatatacgatggctcatttatttcttctaagttaatatctgagtttggggttattggtgcattaatgtgtattttctattttttttatttttcccgattttatctgcgtttcaaaaaaagtaagagatattcaccgcagtatattttagcatatagcttctacatgtgtttcttcatccctctttttatacgtggtgctggttatataaacccctatgtgtttatgttattttcatcaatatttttgtgcaaatatcacgctaaaaatatcttgatgaaatctaatgtccagatagctatataa

SEQ ID NO: 12511 - DNA, 759 bp, Escherichia coli; identical to SEQ ID NO: 6176

SEQ ID NO: 12512 - DNA, 402 bp, Escherichia coli; identical to SEQ ID NO: 5076

SEQ ID NO: 12513 - DNA, 432 bp, Escherichia coli; identical to SEQ ID NO: 7321

SEQ ID NO: 12514 - DNA, 375 bp, Escherichia coli
gtggccttcacctccacccgtgcggcacgggaatggctgattctgaacatggcgggactggagcgtgaagagttccgggtgctgtatctgaataaccagaatcagctgattgccggtgaaaccctcttcaccggcaccatcaaccgcacggaagtccatccccgggaagtgattaaacgcgccctgtatcacaatgccgctgccgtggtgctggcgcacaatcacccgtccggtgaagtcacacccagtaaggcagaccggcttatcaccgaacgtctggtacaggcactgggcctggtggatatccgggtgccggaccatctgatagtcggtggcagccaggttttctcctttgccgaacatggtctgctttaa

SEQ ID NO: 12515 - DNA, 357 bp, Escherichia coli
atgcagcagattacccagctgattgaggtcatgctcgttggccgcggtggtgaccaggctgtgggtcaggccactcttggcatcgacaccaatgtgggccttcatgccaaagtgccactgattgcctttcttggtctgatgcatctccggatcgcgttgctgctctttgttcttggtcgagctgggtgcctcaatgatggtggcatccaccaaagtgccttgagtcatcatgacgcctgcttcggccagccagcgactgatggtcttgaacaattggcgggccagttgatgctgctccagcaggtggcggaaattcatgatggtggtgcggtccggcaaggcgctatccagggataa

SEQ ID NO: 12516 - DNA, 210 bp, Escherichia coli; identical to SEQ ID NO: 8156

SEQ ID NO: 12517 - DNA, 210 bp, Escherichia coli
atgattgaacaggcctggtgcagtgccctgggggtggatgccggatgccatgccacgctggtgcattttccggcctggccggcggtgtggctggcgcgtaatgatgacaccggctttcagcaagtgctggaacgtgctgactatctggcgaaggagcataccaaagctcactgcaccggtgagcgcaactttggctgcagtcgtggctga

SEQ ID NO: 12518 - DNA, 213 bp, Escherichia coli
atggatatcaccgtcacccggaacagtccgactggtcaggcaatgacaaccgatgcggaagccgctgtcagcgaagccctgcgcgacctggccttctggttgtaccgtcagctggaaaacgagtacgacaggctgacctctgatgccgctgtggatgaggcccttctcatcaacgaatacaccttcaccgaagccggtctgcgcgccggctga

SEQ ID NO: 12519 - DNA, 357 bp, Escherichia coli
ttggcagtggtggataccgacattggctatcccttttcattaagtcttgatcgtaaccgtgaaggaatgcagtcctggcaattgggcgtcaactatcgtttaactccgcaatttacgctgacatttgcaccgattgtgacccgcggctatgaatccagtaaacgagatgtgcggattgaaggcgcgggtatcttagggggtatgaactatcgggtcagcgaagggccgttacaagggatgaatttctttcttgctgccgataaagggcgggaaaagcgcgatggcagtacgctgggcgatcgcctgaattactgggatgtgaaaatgagtattcagtatgactttatgctgaagtaa

SEQ ID NO: 12520 - DNA, 180 bp, Escherichia coli
atggcaacgggtccaaagaatgcaaaatcacaatctgtaactgcacgtattgcccatgaaattattgaaggcatggagaacgtgaaagaagaaggcgaaagcacgggacagtttataaacgcagccatgcgcggcgaaatcaaacgccgccagcgccgcaaggccaaagaaccagagtaa

SEQ ID NO: 12521 - DNA, 153 bp, Escherichia coli
atgcgtgatgatcgttttaattccctgaaacaggaattttccggcgttcctgatgatgcggctgatgcgctttcgtcaatgccagagcttattagagcggctttttcttactttccacgagagaatataaatcaacggggcttgatgtactga

SEQ ID NO: 12522 - DNA, 258 bp, Escherichia coli
atgcgcacatcaggaaaacttaataatcagaagaagcagcataaccgcgccattgaccttacagagcactggctgagagtggcgataaaaatcatcgaccgcaacacgggggaaggatacgcgaaagcacatcccgacctgataagcgcattcatgaccacggcggcggcaaactttgccacgctgacagaacgggagattgccgaagcggaacaggtaacaaccatcaacgttaaaaccggagaggtggaatcatga

SEQ ID NO: 12523 - DNA, 273 bp, Escherichia coli
atggtacatgaccgcatagcggaagaactcgaggcgaaaggcttttaccggagggcgtcggcgcgatggggtgaagtcatgctgctggtggagacagacaaggaacggcatcaggttacgatgcgacggctggaatgttccaggaaggcacagaagccaccggagccgccggataacttcggagacctgagaaaggcagtagatcgcacttatgctgaaatgggtatagatggtgtaagcgatgaaatatggcgaaattaccaggacagataa

SEQ ID NO: 12524 - DNA, 1158 bp, Escherichia coli
atgccgagaataatcgaattacgccagcagaaaaccgccattaaaaatcagatgcgcgacatgctggagaacgcggaaaaagaaaaccgcagtcttaacgatgctgagggcgcaaaatttgacgaattacgcgctaaagctgaatccctcgataaagacatttcccgccttgaagccattgcagacgaagagcgcagcaagccaggtaaaagcagccagaccactgaccccgcagaactacgcaactacattctgacaggtgaaacccgcgcattaagtacaggcgttcccgctgatggtggttataccgttatccccgaactgaacaccgaaatcatgcgaatgctgacggatgaatccaccatgcgccgcatctgtaccgtgaagaaaatcagcagcaacgagtttaagcagcttgtttccgctggcggtgcgaccgttaaccacggtgaagagggtaagacacgcgaacagaccagcaccccgcagattaacgaggtgagcattaagctgtatccggtctatgcgtacccgcgcaccacacaggaaatcgtggatttttccgatgtggacatcctttcatggctgacgggtgagattggcgacaccttcacggaaaccgaagaaagcgatctggttgtgggcgacggtgacaaaaaagcaaaaggttttttatccgtaccccgtgcagagaagaacgacaaagagcgtgattttggtacgttgcaggtaattaaaccttccgaatctctggcgtggacatctgcggacccgctgatcgacctgaaatttgcattacgtaaaaaataccgcaaaaacgcggtctgggtggttaactccacgacggcggcaaaacttcagaaggtgaagaacgcgaacggtgattacatctggcgcgaccgtttacaggcgggtgatcctgatacgttgctgggccttccggtcgaatatctggagtttatgcctgataacgttattgccctgggtgacttcaaacgcggttactacattgttgatcacgaaacaggtgttcgcaccagaccggacaacctcacagagccgggcttcatcaaaattttcacgcagaaatatttaggcggtggcgtggtggattcgaacgcgatcaagattctggaactgccacaggacgacgattaa

SEQ ID NO: 12525 - DNA, 573 bp, Escherichia coli
atgggtgaaaaaattatgaagagtatggaaatccggtcatcggaaatcactaccagcggagccggtacgctgacgggctacgttgttcgctgggataagctttcagaactgctatggggggagttttacgaaaaattccagcggggggcgtttactgagtggcttgcggcgggtaatgacgttcgcggcctgtatgagcatgaccacagcatgttactggggcgcacccgttccggcacgctgaaactggaagaggacgaaacagggttacgctttgaactgaccccaccggataccagtacagggcgcgacgttatcgaactggttaaacgaggtgatatatccggcatgagctttggctttcgttcccgtaaggatgtatgggataccacaacagatccatgcgtgcgcaccgtgctggtggcggaactatacgaaattaccgttacatccgtaccggcttaccctgattccggcgtggagctggcccgccgctccctgtacgagcagcaccccgaaaaaatgccgcgtgcggataatcgccgctggtgggcggatttagcgggggtgtga

SEQ ID NO: 12526 - DNA, 1176 bp, Escherichia coli
atgacgcttgatgagtttatggcgctggctggcacatcgaacacgggggcgggtgagtacgtatcatcggggacagcggaatcactgcccgccgtcatgaacgccgtcacggtcatctctgaggcggtggctaccatgccgtgttacctgtacctggtacgcaatgagaaggggaaggaggcccgagagtggcttgattctcatccggtcgatcacatcctcaacgagcgcccgaacgcatggcaaaccccctaccagtttaagcgaatgatgatccgccactgcctgttaaacggtaatgcttatgcggtgattcagtgggggcgtgatggttttccagtcgctttgcatccttacccgccgcagtcggtgaacgttgagcagacaggtgagcataactggcgctactgcatcactgacgcctacaccggaaacacccgcaactatttaccgtgggaggttctccaccttcgttactccacggatgacggttttatggggcgctcacctgtaaccatctgccgcgaatcgctggggcttgggctggcccaacaacgccacggcgcgagcgtgatgcgtgatggcatgatggcggcaggggttatcacgtcaggcgaatggctggacggcgtgaagggcaaacaggcattagccgcactggaacgctacaaaggggccagaaacgccggaaaaacgcccatccttgaagggggtatgagctatcagcagctgggcatgagtaatcaggatgctgaatggctggcctcccgtcgcttcaccattgaagacatcgccagaatgttcaacgtctcgccgatttttttgcaggaatacagcaacagcacctacagcaatttcagcgaggcaagccgcgcatttctcaccatgacgatgcgcccgtggctggcgaactttgagcagcagataaaaaacgccctgctggtggcctcgcctgtacctggtatccggtatcaggtggagtttgacagcgcggacctgttacgggccacacctggcgaacgctttgccacctatgagcgcggcatcaaatccggcgttatgtgtccgaacgaagcccgcgaacgtgaaggactgtcaccgcgtgatggtggtgatgagttcagccaggcatggaaacaggaagtaaaaatcagcgagggagaaaaaccggaatga

SEQ ID NO: 12527 - DNA, 339 bp, Escherichia coli
atgaacatagggcgactgcgtgacagggtaacgattcagaccctgaaacagaccagagccatgacgggcgaaatactcgaaacgtgggtggacggtcacacactctgggcaagcgtgaacatgatcagcagcaaggaggccatttcatcaggtgcagagctggcgactggaactgtaaggatatggatacgctaccggaaggacatcaacgccaccagtcggataaaggtcaatacggggccgctggcggggcgtgtactgaatatcatcgggcaaccgctgccagatgccgccaggacacgccttgaaattctttgtcgtgagggcgcggaaaaatga

SEQ ID NO: 12528 - DNA, 294 bp, Escherichia coli
atgacagaacttatcaccctggaagaagtgaaactccattgccgcatcgatggcgacgatgaagaccagttaatcagcggatacattgccgcatcgcttgaggcgtgccagatacacataggcaggcgctttgatgacgggctggagttcacgccagccataaagattggctgcatgatgtttatcgctcacctgtatgaaaatcgccagattgtcgcggataacgcaaaaacgcgcgtacccatgacgataggcgcactctggacggcttaccgtgatgtgggggtgtactga

SEQ ID NO: 12529 - DNA, 441 bp, Escherichia coli
atgccgtggcaaccattaagacgatgtacagaaccaggctgtaacaggcgcgttaagtccggtaagtgtgaggagcacaggcgggcggcatggcgtgcagaggatgccagacgaggacaccgccgcgcgcgtgggtactccagacagtgggacaaataccgcgccatgtatctgagtaaaaacccgttatgcgtgcgatgccttgagaaggggatatatacgcccgccgtggtggtggatcacattatccccatcgatggcggcgatgatgttctcttctggcccgaatggaaccatcagccattgtgtcaggcgtgtcataaccagaaaacgaaatggcttgatccggcaacaaaaagcaagcgtgccgcaggtggatttcgtgaagatgaagaacgggccgctaaccgcaataactggatgtatgacgctgatgaatga

SEQ ID NO: 12530 - DNA, 357 bp, Escherichia coli
atggcaagaccaccgaaagcccccgcctacctggatgacatcgccgtgaagcagtggcgggaaaaatcgcggcagcttgcggaacggggagacctgacccccgccgactggagcaatctggaactgtattgtgtcaactactccatttaccggaaagccgtcgcagaccttgcggcgcgcgggttcagcattgttaacagtcagggcggcgagagcagaaaccccgcattaagcgcgaaatcagacgctgaaagggtgatgataaaaatggcctccttgctcggttttgacccgataagccgccgtaaaaacccaccggaaacagaagaagaggacgagcttgaccgcctggaataa

SEQ ID NO: 12531 - DNA, 1662 bp, Escherichia coli
ttgaccgcctggaataagtacgcagaagacgtaaaaacgggcaaaattccggcctgtaaacggctgaaacaggccgttaaacggtacttttcggaccttaaaagccccctttacacgttcgatcgtgaggttgtggagcggtttattgccttttccagggtgtgcccgcacgtaaaaggaccgatgcgtggcagacccattgagctggagccgtggcagcagttcgcctttgcgtgcatcctcggctttaaggttaaggccaccggacggcgcaaatacacgagcgcctttatcgaagtgccgcgcaaaaatgcgaaatccacgaccgccgcgattctggctaactggtttctgattatggagaacggtcagcaggatatctacaccgcagcggtgagccgtgaccaggcgcggatcgtctttgatgatgcgcgtcagatgtgccttttatcccgaccgttacgcaggcgggtgaatattcaggcgcataaggtgatacacccgaaaagcaacagcctgttaaagccgctggcagcaaaagcggcaaccatcgagggaacaaaccccagcctttccatcgtggacgaataccacttgcaccccgataacggcgtttattccgcgcttgagctggggatgggcgcacgtcccgaagggctgttatttgccattaccacatcaggcagcaacgtcgtttcagcctgtaagcagcactatgattattgctgccagatcctggacggcgaagaggttaacgattcaatttttgtactgatttacgaactggacgacgaaaacgaggttgatgatccggcgatgtggataaaggcgaaccctaatattgatgtttccgtcgatcgtgaaaaactggcctcaaccatccagaaagcgcggggtattccgtcgcagtgggtggagatgatgacaaagcgatttaatatctggtgccagggggctaccccgtggatgggtaacggcgcatgggctgagtgtgccggaacgttcacggaggaagatttacacggccaggagtgttacgcggggctggacttatcatcaaccagcgatatttccagcgtgtgctatgcctttccggtcggtaaaaccattatgctggtttcccgtcactatctgccggaatttcagctacagaaccccgccaataaaaaccgcgccatctatcgtcagtgggctaaagcaggctggatacgcacaacgcctggcgactgcattgattacgaccggatcagagatgacatcatgcaggacgcggagaaatttaatatcaggctggtgggctttgatacgtggaacgccacgcatctcagaacgcaattacagggggcaggttttgaggtggagccgttcccgcaaacctacctcagattcagtccggcggcgaaatcgttcgaagtttttgttaaccgcagggtgattgtgcatcgtggcgatccggtgttgtcctggtcgatgagtaacgtcgtgatgcagagtgacgcgaacgccaatatcaagccgaacaagaaaaaatcaccgaacaagatagacccgagcgtggcggcgctgatggcgtttggtacattccaggcagagcatgaggattttgcttttgatataagcgacagccaccgccagaaactggaagaatttagcggggtgtaa

SEQ ID NO: 12532 - DNA, 282 bp, Escherichia coli
atgacagaagccgaaataacgggattaatccgccgcgttgccggaatcagccagcaggctgacgaacaggccacgcagccggacagcgtgacagccgaaaactatgcgcgtgttgttgctgaggtgatgcgccgtgatggtatagaacttaatggcgtggatatgcgcaacatacgaaccagagttcttgagttgctggcctaccgtcgccgcgtggagatgtatcgggagaaggagaaaataacgtaccactggaagaagccggagcggttgcggcggtaa

SEQ ID NO: 12533 - DNA, 1368 bp, Escherichia coli
atgacaatagaaaaacacgaaagaagtactaaggatttggtgaaagcagcagtatcgggatggttgggcactgcgcttgaatttatggacttccagttatattcgctcggcgcagcgttagtgtttcatgaaatattttttcctgaatcatcaacggcaatggcgttaattctggcaatgggaacctatggtgcaggttatgtggcacgtattgtcggagcatttattttcggcaaaatgggcgacagaatagggcgtaaaaaagtgctctttattaccatcaccatgatggggatctgtaccaccttaattggtgtgttaccgacttatgcacaaattggtgtttttgcccccatcttgctggtgacgctgcgtattattcaggggttgggtgcaggtgcggaaatttccggtgccggtacgatgctggcggaatatgcgccaaaaggtaagcgcggaattatctcctcatttgtggctatgggaactaactgcggaaccttgagcgcaacggcaatctgggcctttatgttcttcattctcagtaaagaggaactgctggcgtggggatggcgtatacctttcctggcgagcgttgtcgtgatggtctttgctatctggttgcgtatgaatctgaaagaaagcccggtctttgagaaggttaacgacagcaaccaaccgacagcaaaacctgcacctgctggtagcatgttccagagcaaatccttctggctggcaacagggctgcgttttggtcaggctggtaactcaggtttaattcagactttccttgcaggctatttagtgcagacgttattgtttaacaaagcaattccaacagatgcattgatgatcagttcgattctcggctttatgaccattccgttccttggttggttatccgataaaattggtcgccggatcccgtatattattatgaatacctctgcgattgtgctggcgtggccaatgctttctatcatcgtagataaaagctatgccccgagcaccattatggttgcactgattgtgattcataactgtgcggtgctgggattatttgctctggaaaacattaccatggcagaaatgttcggctgtaaaaaccgctttacccggatggccatttctaaagaaattggtggtcttgtcgcttccggttttggtcctatcctggcgggtattttctgcaccatgacggaatcctggtatccgatcgccattatgatcatggcatattcagtgattggtttaatctctgcgctgaaaatgccagaagtgaaagaccgtgatttaagtgcgctggaagacgctgcggaagatcaaccgcgtgttgtaacagctgcgcaaccttccagaagtctttaa

SEQ ID NO: 12534 - DNA, 591 bp, Escherichia coli
atgctcaacggcagtcattcattccttgcgtatctgggttatcttgccggatatcagcacattaatgactgcatggaagatgaacattatcgtcatgcagcgtatgccttgatgttgcaggaacaagcgccgacgttgaaagtgcagggcgttgatttgcaagattacgctaaccgattaattgaacgctatagcaacccggcgttacgtcatcgaacctggcagattgcgatggatggcagccagaaattgccacagcggatgttggattctgttcgctggcatctggcgcatgacagcaagttcgatctgctggcgctgggcgtcgcgggttggatgcgttatgtcggtggtgttgatgaacagggaaatccgatagaaatcagtgatccactgttacctgttattcagaaggcagtacaaagtagtgctgaagggacagcgcgcgtccagtcattgctggcaattaaggcgatctttggtgatgatttaccaggcaatagtttgtttacgacaaaagtaacggaagcgtacttgtctttattagcgcatggcgcgaaagcgaccgtggcgaaatattccgtgaagtaa

SEQ ID NO: 12535 - DNA, 573 bp, Escherichia coli
atgataaaaatcacaccacataaaatagcaatactcatggggctattattatcgccatctgtatttgcaacggatgttaatgtcgattttaccgctaccgtgaaagcgacaacatgtaacatcactctgacatcgctgaatagttcaaacgtcgttgataatggcaatgatagttataccctgataatccccaatatgggactggataaaatagtcaataaagcgtcacaatctgaggccaacttcaaattagtcgccagtgggtgtagcagtggaattagctggattgataccacaatgactggaaatcagtctggtagtacatcgctgattattccacaatcttctgactcctcctcaacaaccagtaatattggtatgggatttaaaagattagagacttcgggcgatacgtttctgaaacccaatagcgcggaatacatccgctggaaaaccacagaaattagcaccagtggtctggaaatgactgtcgcactgcgcgaaacaaccccaggacagggcatacccgggaaatttcgcgcacaggcaacgttcaatttcagctatcaataa

SEQ ID NO: 12536 - DNA, 1005 bp, Escherichia coli
atgcaagatacagacgtttacgtatacataggcgatgttcaccgttctggtcatcacgacatcaccaaagcgattaaagaaagaaaaactaaccatggtttacaaaaaaatgttcttttttgcgtcgctacctatggcggtgatcccagcgcaggatatagaattggccgcgctttgcaacacaactatgagcacatcaccgttctagttgttggcccttgcaaaagtgctggaacattgatggctgtcgccgctcataagctcgtgattggtgatatgggtgagctcggccctctagatatccaacttaagaaaaatgatgagatcggcgaattgagctcgggccttgttatcgcaacggcgattgatgaaataaaagagtgcgctatttcgacctttagatcatacgtacttgatataaagtacagaaaccaaattagcacaaagatgtctgcagatattgctgctaagcttactgaagcaatcatatcgccgatggcctcacagatagaccctatcaaactcggggagcatcagcgagcaatgaacatagcgctttcctatggggaacgtttgaatagtcactcgaaaaatcttaaggaaagctcattaggcaagttgatcgctggatatccagcccatggttttgtgatagaccgtaaagaggcgagggaactattcaaccatgttgaaagtcctacagattttgcagccaacctgtacgaagttcttggtgaaatgatttcgtcaggcgaaatctctatcttcgacaaaccgatgattaaagatttaactcctaaaaaacaatatgaaacaactaacgcagaggaagattcccatgacaacagcagaattcaggaaggagatgaaatctctgaccaaaattcaggaagagcagaaccgccaagggatgaacctgtccagggaggcgatggaaaacatgcggaaactgaagaagaggctggaaccttaccagcagagcaaccagatgaaggcactcagtga

SEQ ID NO: 12537 - DNA, 603 bp, Escherichia coli
atggataaagccgtattaaatagcgaacttattgccacaaaggcggggaatattaccgtctataactatgatggtgaaacacgggaatatatttccacttcaaatgaatatcttgccgttggtgtcggtatcccggcatattcctgtttagatgctcctggcacatataaggcgggttatgctatctgccgttctatggatttaaaatcatgggaatatgtgtcagaccatcgtggtgaaattgtctatagcaccgaaacgggagacgccaaagaaatcacagctccgggtgattaccctgataatacaaccactatcgccccattaacgccatacgataaatgggatggtgagaaatgggtgacggatactgaggcacagcatagcgccgcagtagaagcggcagaagcacagcgccagtatctgattgatgctgcaatggcttccatcagtctgattcagttgaaattacaggccggacggaagttgacgccggcagaaacaacccgacttaacgccgtgctggattacattgacgcggtgacggcaacagataccagcacagcgccggacgtcatctggcctggactgccggaggcgtag

SEQ ID NO: 12538 - DNA, 444 bp, Escherichia coli
atgaataaagttaaaagtgtttatagcccgtccgaaaatgcaatctacaacgcagcgctatatgaaagttatatcaaggaggggacatggccgcaggatggtattgaaatcagcgatgaggatgctgtcagatttaatgggggaaataagccaacaggaaaaatgctgggaatggtttcagggacccttgcatgggttgatgagccgccgctttcaccagaacagaaaatatcagatgcagaaaacatgaaagccacatttcgtgcaaaagctgacagtgaaatattctggcgtcaggatgctgttgatgcgggcattgcaactgatgaagaaacttcaactctcacccaatggaagaaataccgtgtgctgctgatgcgtgttgatacttcaacagcacccgatattgaatggcctacgcctccggcagtccaggccagatga

SEQ ID NO: 12539 - DNA, 894 bp, Escherichia coli
atgacgaatttaaaagcagttattcctgtagcgggtctagggatgcatatgttgcctgccactaaggcgattcccaaagagatgctaccgatcgtcgacaagccaatgattcagtacattgttgacgagattgtggctgcagggatcaaagaaatcctcctggtaactcacgcgtccaaaaacgcggtcgaaaaccacttcgacacctcttatgaattagaatctcttcttgaactgcgcgtgaagcgtcaactgttggcggaagtacagtccatctgtccgccgggcgtgaccattatgaacgtgcgtcagggcgaacctttaggtttaggccactccattttgtgtgcacgacccgccattggcgataacccgtttgtcgttgtgctgccggatgttgttatcgacgacgccagtgccgatccgctgcgttacaacctggccgcaatgattgcgcgctttaacgaaactggccgcagccaggttctggcaaaacgcatgccgggcgagctctctgaatactccgtcatccagactaaagaaccgcttgatcgcgaaggtaaagtcagccgcattgttgaatttatcgaaaaaccggatcagccgcagaccctggactcagacatcatggctgtagggcgttatgtgctttctgccgatatttggcctgaactggagcgtactcaacctggagcatggggacgtattcagttgactgatgccattgctgagttggcaaaaaaacaagcagttgacgcaatgctgatgactggggacagttacgactgcggaaagaaaatgggttatatgcaagcgtttgtgaagtatgggctgcgtaacctaaaagaaggggcgaagttccgtaaagggattgagaagctgttaagcgaataa

SEQ ID NO: 12540 - DNA, 288 bp, Escherichia coli
atgaaaaacgccacatgtttaactgacgatcaacgctggcaatctgtcttagcccgcgacccgaacgccgacggcgaattcgttttcgccgtgcgcaccacgggtatcttttgccgtccgtcttgccgagccagacatgccttgcgggaaaatgtctccttctacgcaaatgccagcgaggcgcttgccgctggctttcgtccctgcaaacgttgtcagccagacaaagccaatccccggcaacatcgccttgataaaattacccacgcctgccgacttctggaatag

SEQ ID NO: 12541 - DNA, 651 bp, Escherichia coli; identical to SEQ ID NO: 551

SEQ ID NO: 12542 - DNA, 270 bp, Escherichia coli
atgaaatcaccattaatcacaacaggaatgatttgtttactggggatctgcaactttgcccaggcgactgtctcccccgacagaacacgcatcatttttaatgcttcgaataaaagcgcaacggttcgcctgaccaaccaaagtaaaatcgatccctatctggctcagtcgtggattgaagatgccagcggtaaaaaacgcgtgattacatctcgacattgccgccgatggaacgtattgagcctgatgaacagatacaaattcgcctga

SEQ ID NO: 12543 - DNA, 315 bp, Escherichia coli
atggggcgcgagctgcctgtacggcagtttacaagtccgtatccggagatacctctatttctaagctgctcaaggcagtttgggtatgttagtgcttcaactattgcgtggcaaatattaagttgctttaatatcacctatggtgattacatgagatttaataatatcttttggaagatatctctaggagagtttgtttgtgtgatcaccactggtgttgtcccttttgctgtgtatgtcagttgtactgaagccatgttgggctacggagatttttcagtgaaatcagggagcaacttcgacttgatggattaa

SEQ ID NO: 12544 - DNA, 783 bp, Escherichia coli
atgaaatcaactccagaacttcttaatgagtacgatcgctttcgtggtgggcatgaccactcgacggcggttgcttctgctgacgatgaaagggcaaagaaggagcaggttgcaagaattttcaacgaaatgtttgtccagttacaggctgcatttccaggcagcatcgctgctatcagcgagcaaggaaagctaaacgaatttcgaaaacaatggatgcttgcgtttctggagaatgggatcacaacaatggaacaggttaacgctggtatgcgccacgcccgcgccagtgagtctccgttctggccgtcgccagggcaattcatcaagtggtgtaaagacagcaagatggttcttggcgtcaccattgacgatgtgatggcggagtttcaccggtacagcaaggaaaaaagtttatatcctggtggtcccgaaagattcccgtggcgacatccggttatgtactgggtcgtatgtgatacccgccgtgcaatgtatcagcgccagcttagcgagattgaggttgagaaacacgcgcgcaggctgctcgatgattgggcgaaaaaggtggcttccggacagcagatacccgatccggtgatcagcatacaggcaaagccagaacccatgagtacgcctccggacacagggagagacgtttaccatccaccagggcgaagtttcgggtgcatgcctaacgccgccacccttgggggaataacaccggcgcagtggctgatggaggaatacaggcggggaaaggcgtcaggatttatcaagtaa

SEQ ID NO: 12545 - DNA, 492 bp, Escherichia coli
atgcaaatttcaccggttactcttcgtgttgcgaaggcgtttatatccagacatcaccgacacaataaaccacctgttgggcataaattcagcattggtctgagaaatgatgccggagaattgataggtgtggcgacagctggtagacctgttgcacgacatttggacgatggattaacacttgaagtaaatcgcacatgtaccacaggagaacgcaacgctaacagcgcgctttatggtgctgtctggcgggcagcaaaagctatgggttatcaacgttgtattacgtacacccaggcagatgaatcaggagcatctcttcgcgcagctggttttgttcgtgtgaaagagcttcctccaagaaaaagctgggcggaatcaagcgtcgccctgcggagtaaacgcgatccggtcggaaacggtggtgttcctcgtgtgctttgggaaatcaggagaatgagtaccactggcattcgcatcaaaggagagtga

SEQ ID NO: 12546 - DNA, 288 bp, Escherichia coli; identical to SEQ ID NO: 11880

SEQ ID NO: 12547 - DNA, 285 bp, Escherichia coli
atggtctccttcgcgaaatatacgattattgactggatagcattcattcaggttttgctcatctggttttatatggcttacaggagtggacagtggattgtcagtgtagcctgtagcaatggatggcgttggtggaaccgaaagaataaaaaagcgctggccttggcttcgttttacgaagcattcaatcttaacagtcttcagcctggttctgtcgttgtagtcaccactcaaagcggcatgacgatacaaattcacaagccaaaggaggaaggtcgtggctaa

SEQ ID NO: 12548 - DNA, 138 bp, Escherichia coli
atgcataagtatggttgcgccaggagggatatagttatcgacagtcagcacccttgcggcgaggatgtaattttcattcgcggtaaatgggaagggtatcttgacgagagtttttacgatgaatttgatggactttga

SEQ ID NO: 12549 - DNA, 375 bp, Escherichia coli
atgaacgaccagcaaatcgaaaaagaaatcgttgagaaaggcaaaaccgctccgcgtgtaacacccgagaaaattgaaggcctcatttgcagtgagcattttttcactgctgcgcagggtgaccaccaggctaaagaagatgaccttatttataatccggagccttatgtcgaagccacccctgatgctctgcaccttctcactttctgcgtattggtactgaagaatggcttcaccgttaccggagagagtgcctgtgcaagcccggaaaactttgatgcagaaattggtcggaagattgcccggcagaatgctgtaaacaaaatctggatgctcgaaggttacttgctgaagcagaagttaagcgagcaataa

SEQ ID NO: 12550 - DNA, 189 bp, Escherichia coli
atggaaatcaacatcattacattgctgaaggccattattggcggagcgggcttaggctttgccctaccaggcggattatctttcctgcttcctgcttttactgttacagctgggatagcctatgcatttgctgtggctggtgctgttgcactccctgctatctatgccgcaaagaagttagccaactaa

SEQ ID NO: 12551 - DNA, 180 bp, Escherichia coli
atggtggtgggggaaggattactcagcgctgcgcgcttcgccctacgggtcgttgcctgtggcaacgctctctcgctggcgctcgagtcgaaccttggtcgaagcttctcatcctttcccgcatgggcagaatatttaattgcggattcgtttgagagttcacggacttttgaaaagtga

SEQ ID NO: 12552 - DNA, 537 bp, Escherichia coli
atgaaacaattacgtatgccgcaacatgacccggcgctgttgcggctgaataatctttcctccagcgaactggttagcgccgtcaatccgaaacaattcgccatgtccggggcatttagtggtgcattgccgttatggctaaacaacgaaaaatggatagtgaaagacggctggctggcaaatagcgggccgatgaccttgcggctggataaagacaccgcagatgcggtggtgaaagacaatatgaccgcgggttcagcaattaactggttgcgctatatggaaattagccgttcatcgacaaaaattaatttagataatctcggtttattaaccatgcaggccaatattacaggtaccagtcgcgttgatggtaaaagcgggacggtaaatcttaattaccatcatgaagagaatatttttacgctgtggcgcagtttacgctttggcgataatctccaggcatggctggagcagaacgcgcgtctgccgggaaatgactgtccgcaaggaaaagagtgtgaggataaacaatga

SEQ ID NO: 12553 - DNA, 1137 bp, Escherichia coli; identical to SEQ ID NO: 5036

SEQ ID NO: 12554 - DNA, 1119 bp, Escherichia coli
atgaaaaaatggcctttatttaatggcccgcaccgcctgatgaacgggttactgctggcgacgttgatattaatagccggatggctggcactcaaacccggaacatatcattattcattaagtgacagggagaaagagatggtcacctcgttattgcaacaccccgaaacgcggtattttggcttctattccgtggcgcttccggctgaatttacgccaacgggaatggtgatgtttatacagggctcagagatgaccccggtggaaacaaagctgcaatattaccctccgtttcagcagtttctgctcaggtatgaggaagaactcagaaataagcctgtaacagatcctcgggatgcaccttatcttaagcaggtttatcaacaggagccaccactaaaaggcgctatttttgaacgtaatgaagagtcttttactccagatatggcaagagtattagatgcgtggaaatgggctgagggggtcacattttcagttaaaatgaaagcccgagacgaacgggcagcccgctacgatggttactggcgaggtaagagtaaagaagtttctgatacctttcgatataatgtcccacagaaaaaagcacaattactggctatcctgtcaggattacagccccgcaaagacaaccagcgcccgtcagaaaataagttagccattcagtacggacaggttgatgcttcactgctcgggcagtatgaagcctccgtaagttatcaaaacagcaaagaaatcactataacattaaagacggataaccacagttatattggtacaccgttactggataaagatgcccgtgtaatggaaacagagcgtggtgaaacgttatataaagggaaacgcaaggtcaacggtcttgagatttcagagtggtggaataaacagcatgataattatagttcagaacccgctataaactataatttcgaactggttatacatgaagataagaaaggaggaaataagttacttgagttgtcgatggattacagtattgacctcttacacgctgataacgcattaaccgaacatgagcttgtggcactgtgggaaagtataacagggacaattaaatatcatcctactcaatggtaa

SEQ ID NO: 12555 - DNA, 1788 bp, Escherichia coli
atgacatcgacgatgcatatggacagggccgataagaataaagttggcaccgctgaaattgaggatctacgggttattccggttatttttcttcctggaatcatgggttcaaaccttatggataagaaaggaaaatccatctggcgatatgatgactctatgagtctgatgggctggtcactacctacatcaggaccaaaagagaggaaaagattattgcatcctgacagggtgaaagtcgataatcgagggagaattcccgcacctccggatgcccaagaaaaacttattcagttaggtcaacaatatccggaggacccatccgataaagaagcaatggataattacactcaggcagtacgtgaagctctggataatatggagccagaagcgaaattatttggttcacggcatgatcggggatggggagaagtggccgctgcaagctacggctcttttcttgatgcgctacagccagcactgtaccgggataagcccacgagaaaagacaataccctgagtgcgacctatcagaaattacttgatgaaccactggggctggagtatggcccggattcactggatgaagaatatcttgaagttatgaaactgtatcagtttccggtacatgttgtgggctataactggctgggttccaacaggctttcggcaaaaagactaagtgaagaagtcgagaagattattaagcggtatcaagagcagaaaatgaagtgccataaggttattctggtcactcactcaatgggcggactggtggcacggtattattcagaatgtctgaccgaacccggaccgggccgggataaaatttacggtattgttcacggtgtcatgccatccatcggcgcggcagcaacctatacccgcatgaagcgtggtactgaaaatccagaatcgggtatggctggtgctgcaggatatgtcaccagccatgtacttggccgcaacgcagcggaaatggtggctattggctcccagtcttccggcgcgctggagttactccctgccaatgattatggtgacgactggctgaaggttgttgaccgtgacggtagtacattaacattccccagagatctgccggtcggagaggacggtaagaaagaaaattgtctttatagcgagctttatctgaacagggataactggtggaggctgatagatgagaatttgctgaatccattaaacacgaagctgaataaagaaaaaatagaatctgactggcagaagtataaaaaaatcattgataaagacgtcaaaacgctgcatgaaaaattatttaataaataccatctaaatacctactcattttatggaaaagcaaaagagcataaaattccagaagcgcaccggactcaggaaacagcaatctggcgcggcgcactggcaagtggtgaaatgggggcgacgcctccagagccaaaaatgaatgacgatcgcctctatttaagtgagatcagtgccgatagaacggtgaaagatgagctttcgccggaagagcaggcatggaaattaaagggcgataacggtgtgatgtacggttgggtaggacagcgttttacactacgggatgcctgtgaaaatggcgacggtacggtgcctctgcgtgccgggcaaatcgttcacgcgaatattcaggagcgtctggcagtaccggctcttcacgaagcggcttaccgtcatgacgttagtcaggcttttgccttacgctctattataaaaatcgctcagcaggtaaataaagatgaaaaaatggcctttatttaa

SEQ ID NO: 12556 - DNA, 792 bp, Escherichia coli; identical to SEQ ID NO: 3213

SEQ ID NO: 12557 - DNA, 669 bp, Escherichia coli
atgaatagcgaactagagttacttataaaaatattattctcttccctatctgccattatatccttattagggcttaaaacagggtggacttataaaaaagacaaactattcacatcacgtaaaaacattagcgaattttcatatcagatgtataaaagcagtgaagatccgaccttcaaaaaactggcggaagattacggcattgctgcattaaccaaagataacacattgacaaaaaaacaaagattaatattactcaacacaacaaaccccgttagcgatatagatgattattccaaatgtcaaagtctaatttccattaccacccataaagaaatattcgcatggaataaaaaaagatataaatacagcatatatagaaaattaataaaaattataacaactctaatttacttcatgggcagtctcatcgtagcacttcctttcagttattctgttgtagtaagtgctaagatgatggagaagataaaccatctaactacttggcaatactttggtttaagcagctattttgtggtatcgggagtagcaatatgctttatctgcctagataagctctccaagattaagatcgccgagagattaatcgtttcaaataggcgtttaggcgacaaatgcagtggcgtcactttggcggcagaaagttaa

SEQ ID NO: 12558 - DNA, 1017 bp, Escherichia coli
atgactgtcagaaaacagccaaacggtaaatggttgtgcgagtgctatcccaatggacgcaatggcaagcgcgtgcgtaagcaatttgctacgaaaggcgaagccattgcttttgaaagcttcacaatggaagaagtgaacaaaaaaccatggctgggggaaaaggaagatcggcgacacctatcagaattaattgagcagtggtattccctgtatggtcaaacactcgcagaccccaagcgcctcatagcgaaacttagaattatctgtaatggtctaggcgatcccatcgcttcagaactgacagccggtgactttacgaaataccgcgaagcacggttaaaaggtgaagtacgaaatgaagatggcacgtttatgtcgcccgttaagccccgcacggtaaaccttgaacagcgcaatctatcatctgtttttggtacactgaaaaagctgggccactggtcagcccccaacccgcttgctgggctgccaacatttaaaattgctgagagtgaattggcgttcctgaccccggaagaaattaaacgtctgctggatgcctgcgccgattctcaaagctccagcctgcttttgattgcaaaaatatgcctggccaccggcgcacgctggagcgaagccgaaaacctgcagagtcatcaggtatcaaaataccgtatcacttataccaagaccaaaggcaagaaaaaccgaactgtgcctatttctaaggatttatatgaagaactgcctaagaatagggggaagttattcaccccatgcagaaaagcctttgagcgtgcagtaaagcgggctggtatcgatctgccagagggtcaatgtactcacgttctgcgtcatacattcgctagccattttatgatgaatggtggaaacatattggttttgcgggatatcctaggacattcagatataaaaatgaccatggtctatgcacacttcgccccagaccatttagaagatgccgtaactaaaaatcctttatttaatttgaggtaa

SEQ ID NO: 12559 - DNA, 633 bp, Escherichia coli
atgttaaacatcagaatgggttccgatacgggaggtaaggcagctattgagaggctgcttgaggcttatggattcacaactaagcaggcattaagcgagcacctgaatgtctcaaaaagtactatggcaaacagagtgttacgtgacagttttcctgctgactggataattcagtgtgcactagaaaccggtgtttcgttactttggttagccactggacagggaagcatgaaagaaggatacgagcctgagaaaagatctcataacgagaacaaacaagcaattaaaccgttatccaaactcataactccatctattcctaaaggaaccttggaaaatggacaactcagtattgatgaagagattttcctagaccacagcatattacctgcagattatgaagaatcgatgttcttagaaacccctactgattgttatctcatcgataaatcagttaaacaagtcagcaatggattctggcttatcaatattgatggaatgattattattgcaaaaatcatgcggattcccggcaataagattgtagtaaatcaagatgaagcgtctttcgagtgctctgctgatgatgtggaagttattgggcgtgcagtcaaagtaataaagagtatctaa

SEQ ID NO: 12560 - DNA, 243 bp, Escherichia coli
atgagtactgatatttcaattcgtgtaccaaaagagatggctacgcctgcagagttcgcagagtgggagggcatttcccgtggctctgtttaccaaaaaattcaccatggtcaacttgctaagtacatggtcaagaaagaaaaaaataaaggccgcgtaagccttcgttatctgatgtacaaaactgatcaggtccgtgaatccctcggtcattccaacttccgcgtcattgttggtaagtaa

SEQ ID NO: 12561 - DNA, 510 bp, Escherichia coli
atgtttgattacaagatttccaaacatccgcatttcgatgaagcctgtagggcttttgcactgcgtcacaacctggtgcaactggcagaacgtgcaggcatgaatgtgcagattctgcggaacaagctgaacccagctcagcctcatttattaaccgcaccagaaatctggctgcttaccgatctgactgaagattcaacgctggtagatggttttctggcacagattcattgtctgccatgtgtaccgattaatgaggtggcaaaagagaaactgccgcattacgtcatgagcgcaactgcagagatcgggcgtgttgcagcaggtgcggtatctggtgatgtaaaaactagtgccggtcgtcgtgatgctatcagcagcattaactctgtaacacgactgatggcgctggcggctgtttcattgcaggcccgtttacaggctaatcctgcgatggtgagtgcagttgataccgtgactggcctcggtgcttcattcggtttgctgtga

SEQ ID NO: 12562 - DNA, 342 bp, Escherichia coli
atggcaattaatggcgctgcggcgactgttccattaagccccggtgaacgcctgaatggacttaatcacattgcggagttaagggcgaaagtatttggcctgaatattgagtcagagcttgagcggtttattaaagatatgcgtgatccacgggatatcaataacgaacaaaataaacgagcactggctgccatattctttatggcaaaaattccagctgaacgtcatagcatcagcattaatgagctgaccactgacgaaaagcgggagttgattaaagcaatgaatcattttcgtgcagtggtgagcttatttcccaaacggctaaccatgccgaattaa

SEQ ID NO: 12563 - DNA, 234 bp, Escherichia coli
atgcgtaatattgaaatccttacgactaaaaccggaccggatgatgcagggcttaatattttactgacagaggctcgtctggaagaacgccgggcaagggctgaagcaatggcagctcgccttgatagcctggcgtgtcatatctcatcccgtcagctaaaccatgtggaagcggcagaactgctgcgtgtgactgctgaagcaacccagaacgaagcgcaggagatccactaa

SEQ ID NO: 12564 - DNA, 228 bp, Escherichia coli
atggctgatgcaatggatctcgtacagcagcgcgttgaagaagaacgccagcgccatatccgtgctgctcgtgccaaaacaccgggcgtgtctcgcgtgctttgcattgagtgtgaagcgccaattccgccagcacgacgccgcgccattccgggtgtgcagctttgcattacttgccaggaaatcgcagagctgaaaggcaaacattacaacggaggtgctgtatga

SEQ ID NO: 12565 - DNA, 303 bp, Escherichia coli
atgacaggggctgtgcgtatccatcaattaaaaattgcacctaagtatttcaacgctgtggttgcaggtcaaaagacggctgaacttcgtaaagacgatcgtggctataaagttggtgatgttctttctctttgcgaatggaagcatggcgtatttacgggtagggaatgggccgcggttatctctcatgtgcttccggttaatgacgtcatggcagtttcagaacaatgggtgatgctatcaattcgctcattaaccccattagaagctttaggatatgttattgcaggaggtgctgtatga

SEQ ID NO: 12566 - DNA, 171 bp, Escherichia coli
atgggggactattttgggcaacgagtgaaacgaggcgttaggtggacggccattttgataagtgatcgtccgctttttgttctgagttcaagcgatggatttaacacactggttgaagcagaagtatctaagttcaatttatattatttgaagggcactggtctgatgtag

SEQ ID NO: 12567 - DNA, 1578 bp, Escherichia coli
atggatatcaactatgttgtttcaaaaatgggggtcgtagatgatcttattaatgcaggttcatttgattctgcctataaaaatgtaaaggatattcttaacggtatcgatgagataaatacaatcaaagaaaatagaataattatattatctaatttggccggaaatcttattgatatcggaaattttagtaatgtaaaaaatatagcggaggaaggcttaaatatctttataaacaataaaaatgaatttctgactataatgaaagaatccttatattactataacttggcaaatggaatgagcgcagttcttgattttaatcctaatgacaatgcagatattgatagtttcattaagctgaatgatgtaaaaaataattactggaaagcgtttaaactttcacaagaagatggatgggtgccccctgatttaatagttaatctagctaatgtattaaaaaaacaatatcgtatgtctgaatcaatggattattatgaacaagcaatatctattgataactcaattcctcaggcgtgggtaaacagatctgaggcattagaattgcttaatgaattatctacaacatatacatataaaatgattaaagaagttattcgaggttatgagtgtgcaataaagtcagggaaatgttttccttcatggaaggttgctcttcaaagaaaaataaagtacaacgaaagtatattgagtgaatcatgtgtatatggcatagaggatataagtacagatgaaaggctcacgcaggaggagtatgatactttatcaaactaccagaggttttgtatagataataatctaatgttgtctgatcattcgctatattgcaattgttatgcgtcatctaaagataatataactattgcgaccaccgaggaaggtgtgtttggtgattttatagtgccaatggaaatggtgttaaatagacttaaagctgagtattccttagcacgaaaaatgttttttgaatataaggttgatagtgagttttttgatgaggattcggaggtatgttattctgaattgtataatggagaaatattgtatgaaaatgttgagaagttaagggttgcatttagagcttgctttggtatcttggataaaatagcagttgctctgtgtcaattatttgatttaaaaccagatagaggacatatatactttcataacttctggcggattagtgatgaaaaaagaaagcttaaaataaacaaaataaataataaaggattgctgggtttgtttagtattgctatggatttgaatgataaaaatggtgagcttgctttttttaaagaatggaggaatgatttagaacataaactgttagttattcacgagaaagacatgttagttgatttatataattcttatggattttttgatgaggtgaggtttattgagaaagaaaagtttgagaaacagctcttacaactcatgaaaattgtgagatcagccgttattctttttgtgtttaccatacgtatagaggggaaaaaaagtattcctaaagatatgttgaccattaaaaataccatcgagagaaaagtattgtag

SEQ ID NO: 12568 - DNA, 1665 bp, Escherichia coli
atgtcgctaagcttggtacgagaacaaattctaaactttgtttctaaatcagccccttcggttatggcaattaaaggagagtggggagttggtaagacatttagttggaataagtttcttctggaagcaaagtgtcaaaatatgatttctgcttcgcattattcctatgtctctcttttcggtatatcttcgttagatagattaaaatattccatttttgaaaatgcagtttcaaaagactccataggacatgagccaagtctagatagtttaagaaaaaatacattaggtatgcttgaaatattggggcgaggttcgtggagtaaattgaaagagctgccgtatataaagtctgccgctcctgcaatagaagcatggtcatttatgtctgtgtcagattcattaatttgcatagatgatttagagcgtaaaggatcgtcattagaacttaaagatgtattaggtcttatttctttgttaaaagaacaaaagaaatgtaaggttatacttttactcaatgatggtactaaagaagttgctgattatgaaaagtttaaagaaaaagtaattgacattgagttgcatttttcacctacgcccagtgaatctgcacagatagcatatgataatagtaaggattttcataagccgttagcacaatatactatttcgttaggcatcaaaaatattagagttttaaagaaaatagagcgaaacgtagaaaatgcatggcgagcttttgaagagtgcgaaagtgaagttaaaatgcaatttttgcatacggttgtattaatgaattgggcctattattgctctaaatcagataaggatgttccctctttggatttcctcgaatctatggaaagtatttactcaataggcaaaaaggatgtaacagaagaagaaaaaaaatggaaggatattttactgagctataattttacaagggttgatgagctggataggaaaatagcaaagctagtcaggaatggttatatagatatgacagagtttaatgaggcaataaaaattataaataaacaggctttagaaaataaaaagtcaaactcatttagaagtgcatgggatttatttcataatagttttgatgataatgtagaagaagttgtttctcatttttataagtgctttatggattgtgtaactcaagtatctcctaatgatcttgatagccttgttggggtcttccgtgaactaggagaagatacaaaggcatctgagatgattacgtattatattcaagaaagacgaagtgaaatagagttatttgatctggataatttttatctttttagaccaatcaaagatgcagaaatcattgagaaatttaaaggtgtgtatctaactgattcacccaagcgcactttaggtgaggtgttggatgcgctcagtggaaaaaatggctggaatgatgatgatatagaagtattaagtagcgctactgaagatgattattatcattattttaaaagtttgcatgggaatcatttaacatcccacgttgctacttgtctgaaatttagtcgtattggtaatgtaaatgagaaaacgagatctgtttctataaaagctaaggctgctttaatgaagatttctagagagagtaaattgaatgagttaagaatgcataaattcaatttatag

SEQ ID NO: 12569 - DNA, 522 bp, Escherichia coli
atgaaagctttgcagcagtcacttgaaaaggccatagaggcactaggaaacaaggatgctggaaccattgataagttgatctctttgattgaccgaatggctgtagagcttcgcccctctgtaaggcaggcagtatcacctattggtaatacttgcgatcagataagtgttgcaacaaatgttgacggctgccttctaaaagttaatgagagagataaagctgaaattgataggcttgatgatgatgaagttctcggtcttcgtgagtatcgtgcttttcttacagaatttgatgcacaaaatatgacagctaaaataattttagatggtgatgactcaaaaaagagaatcactgctgaaattagcgatccagctgcaggaaagaagaataacccgtatattagagctcttagtgcatatatatcaaccaaaggtgatccatctgcagtattcactataaccgcaaaggctactgttaaaaaaggccagataaacaggttatttattgtagatgcgaaatga

SEQ ID NO: 12570 - DNA, 207 bp, Escherichia coli
atggttcatcaacattacggaactcagaccgttaatcgcggtgccgtccggccaggtatgctggttaaacacaaagatggtacctggacggcatcagctaatttgcgcggtcggctttacttgcatcgcggcatcgaacgaacgtacacaaaagatttgctcgtggaggtttacctgaatggtactggcggtggtctgagccactaa

SEQ ID NO: 12571 - DNA, 306 bp, Escherichia coli
atgctgattgataagttaaagtcttctccgatgtacccaaccgcagaaatgggtaagcagtcgaaaaagaatcattggtatgtaagggaaaaggggagtgatcaaccgcaagaccagacctggagagcttggtgggaatctcgctcgcttggcaaaggccatatcaattggagatctacatgcgtagcagaaaatgtactcgatccattcaatccgccatctcggtttgaggttgatttcaaagcccctgatgggagtatctacaaccttgaatttgctttggctccacacggcccaaacaagtga

SEQ ID NO: 12572 - DNA, 219 bp, Escherichia coli
atggcagacatcattgattcagcatcagaaatcgaagaattacagcgcaatacagcaataaaaatgcgtcgtctgaactaccagactgtatccgcaactcattgttgtgagtgtggcgatccgatagatgagcgaagacgcctggctgttcagggttgtcggacttgtgcgagttgccaggaggagatcgaacttaagaacaaacaatggggactgtga

SEQ ID NO: 12573 - DNA, 237 bp, Escherichia coli
atgttttccccctttcgaaaacctgaagtacgtctgctgaaaaataccgctgcgggcgtcattttttcggtgaaatccgggaaaggatttctgcgtcaatgtgtgatttacgatccgcactcgcacggtcttatccattcgctctgctggcaaggatgtcccgttaatacgtttctggtccgaggctggttgccctacctgtgcggaatttgtctacagcggttttgcggaggatga

SEQ ID NO: 12574 - DNA, 246 bp, Escherichia coli
atgtccgcatttatgttgtcaggagtaaacgataaagtctcggtagaagcaaaagagctgatcgcaataggggttgtcaggactattcccagaagtttcgcccgcataaaaggtctccattcaatcgttttaatgattgagtatgtattttttatatctaacttaatgagtcaattgtatattgccccactgtttatattttgtttaacattggatttttgtcacaatgcgctgtcagttttttag

SEQ ID NO: 12575 - DNA, 984 bp, Escherichia coli
atgaacaaaatatttaaagttatctggaatccggcaacaggtagttacaccgttgccagtgaaacagcaaaaagtcgtggtaaaaaaagcgggcgcagtaagctgttaatttctgcgttggttgtgggtgggttgttgtcgtctggagtacaagcatcgaccgcgcttgatggtggtggggctagcgaaagcactccattgaccgatacctggattgccattggtcagggtgctaaagcatcatcagtagacacttcaccatcaggaggaccaggaacatcaagtattgcaatagggcaagaagcccaatctgggataggtagtacctcattaggtttcaagagccaggctacaggagaaagatctgttgctttaggacaaacagctgacgcaaccggtaatagggccatagcaatcggtagtggagctaaatcgactgccgattattcccttacgctggggaatggatctaaggctttcgctgaaaacgccacggcgataggcaaggacgcaagagcggagggcaaaggtagtcaggccttcggaaaagtggccttggccactggggagaatgccattgccttgggtagtaacagcaatgcatctggtgataacgccgttgcgctgggtagtacaagtcaggcatatggcgactccagccttgcaataggtgagttaagtgagaccaatgctgaaaatgctattgcactgggaaaactcagtaacgcaagtaaaatcaattcaatcgccctgggtagtaacagcactgcatctggtgtgggctccgttgcgctgggagagaatagttttgctggaggcataaacagtcttgctttgggtagtcaatccaatgcaaacggtgataacgcagttgccctcggtgtaggatctgtcgcagagcaagacaataccgtttcggtagggaacagcacaacgcaaaattaccaatatggctgccggtcttatactaccaggcagtactga

SEQ ID NO: 12576 - DNA, 330 bp, Escherichia coli
atgctttacttttctgaccatggactgtcagtcagcgacagtactaatcctgttcatcatgatggccatgtgcaggctggctacagtgttcccctgattattaccgccagtgacatcacatctcaccagtccgtcagcagaaaaatcagtgcccgtcatttcgcaggcatttttcagtggctgactggtattcgtactgaaaatataccgccattcaacccgctgataaatgaagataatgaacctgttatggtttttaacggagagagaatagttcctgcggacggccttaagtcacagcctgtgattcttccgggcaagggaaaataa

SEQ ID NO: 12577 - DNA, 303 bp, Escherichia coli
atggggcgctggcttgccggcaggctcatgaaagaactgggactggtcagttgccagcagcctgcgcaccgttataaacgaggtggtcgtgaacatgtcactatcccgaatcaccttgggcggcagttcgcagtgacagagccaaatcaggtatggtgcggcgacgtgacgtacatctggacggggaaacgttgggcataccttgccgttgttctcgacctgtttgcaaggaaaccggtaggttgggcaatgtcgttctctccggacagcagactgaccatcaaagcgctgaaaatggcctag

SEQ ID NO: 12578 - DNA, 303 bp, Escherichia coli; identical to SEQ ID NO: 3491

SEQ ID NO: 12579 - DNA, 771 bp, Escherichia coli
atgcatcgcatagacacgaaaaccgcgcagaaggataagttcggcgcgggtaagaacggttttacccgtggcaacccccagaccggcacgcctgccaccgatctggatgatgactactttgacatgttgcaggaagagctttgtagcgtggtggaggcatccggtgccagcctggagaaggagaggcacgaccagctgcttaccgcgcttcgtgcgctgctgttaagtcgcaaaaatccgtttggcgatatcaaatcggatggcacggtgaaaacggctctcgaaaaccttggtttgggagaaggctctgcattacctgttggtgtccctgttccgtggccttcagccactccgccaacaggctggctgaaatgcaacggagcagctttttctgctgaagaatacccggaactggcaaaggcttacccgacaaataaattgccagatttacgtggtgagtttattcgtggctgggatgacgggcgtggtattgatgctggacgtgctttattgagccttcaggctgggatgctggaaaaacaccgccatattgttgttgccaatgatggttacgacacaaaagatgaatgggaactggctacgattttcaaaaaaacatacacacaaggacggggacttgatgccacaaatacaggagggagtctgatcccatcaccgacacttcattcacgagggagtatcggtaatactggcgggagtgagacccgtccacgaaatattgcatttaactttatcgtgagggctgcataa

SEQ ID NO: 12580 - DNA, 603 bp, Escherichia coli
atggataacgcagtattaaatagcgagtttattgccacgaaggcggggaatattaccgtctataactacgatggtgaaactcgggaatatatttctgcatcaactgaatatcttgcagtgggtgtcggtattccagcatattcctgtttagacgctcctggtacatataaggctggttatacaatttgccgttctgtagatttaaattcatgggaatatgtgccagaccatcgcggtgaaatcgtctataacaccgaaacgggagatgccaaagaaatcacagcaccgggtgattaccccgaaaatacaaccactatcgccccattaacgccatacgataaatgggatggtgagaaatgggtgaccgatactgaggcacagcatagcgccgcagtagacgcggcagaagcacagcgtcagtcactgattgatgctgcaatggcttccatcagtctgattcagctgaaattacaggccggacggaagttgatgcaggcagaaacaacccggcttaacgctgtgctggattacattgacgcggtgacggcaacaaataccagcacagcgccggatgtcatctggcctgaactgccggaggcgtag

SEQ ID NO: 12581 - DNA, 228 bp, Escherichia coli
atgcttattgggtatgtacgcgtatcaacaaatgaccggaacaccgctctgcaacgtaattcgttgaactgtgcagaatgtgagttgattttgaagataaaatcagtggcacaaagttcaataaaaaatatacctgacacattatacgaagaagattttatggttttttctgttgattttttaacatggctgcatggatacagatatgacgaaggtaatgtagagtag

SEQ ID NO: 12582 - DNA, 822 bp, Escherichia coli
atggataagttttcaattggtaaacctttcaaagtaaatgactacgtgacatacccgtgcccaagttgcggaagaagcagtttgaaattaaataaagaaaaattttatgcaaaggtaactagtgaatcacataatcttattgagattctcggctccgatacagaactgattaaagaggtttttactgcggttctggtatgcgaaaatcatgaatgcgaggaagttgtcgtctgctcaggcactggttatgttgagatggatattactgtaaatgatcgagatgaacagatacaggagtactttagctattacatccccaaagtatttatccctccgctacagtacatagatatccccacaacatgtccatctgaagtatatgagaatttgcaagaagcattttcactgacactactttcgccaagctcagcagcaaacaaggttagaatggcaatagagaatcttttatctgaatacaatataccaaaatacaaattaattaagcggaagggtaagtccaagcgcgagcggtgcctcatgtctcttcatgaacgaattaccatagctgcacatagaaaaaaaacatttggaaagttagatggacttttatttgctgttaagtggttaggtaatgaagggagtcacgcagcatcaggtttaactcaaagtgatctgtttgatgcgtaccgactgactgagcacattctcaacgtgctctatccatcaggagtagaccttcagaaaagggcactggaaatagtaaaaaacaagggcgtgaaaaaaacgaaaacgaagccacctcaaacaccagctgtaagataa

SEQ ID NO: 12583 - DNA, 441 bp, Escherichia coli
atgcttttagataaaatacagcaagcatactatgatgcgagcggttcactatcaaatattaacaggcaatcatgtctaggtgggattgcattgatatggttattcaagggaagtataagtcatagttcagtaggatcttcgtctgagacaattctattatttcccaatacactatattggtcattagtgttcttggttatgtctttaataatggattttctgcaatatgctgcaaccactattatttggggaatacttggccgtagaagagaaaaatatcttgaggaaaatggacttgataaaaaaacacataatttaaaagaaccaccaaattgtataaattaccccgccttattttttttctggataaaaataatgttatcagtcgtgggtttttgtcaactaactacatttatgtttacgataaccattagttactaa

SEQ ID NO: 12584 - DNA, 888 bp, Escherichia coli
atggagaattcagtggcagataaaatggcggcaagttcagtatctggttgggtcaacggtctgttgggcgtcatcatttttagtggttccctaccggccacacgtgttgccgtgcttgatatggatccgttttttctgactttcctccgggcatccattgccggtacgctggcggtgattcttgtttattactttcgtgaaaaacgcccacaagccgctcagttcgcaccgctaattattgtgtctgtgggcgtcattgttggctttcccttacttacagcgatggcgctaaagcatattgatgcggcccactcgatcgtttatttagggctactgccgcttagtacagcgatttttggggtactacgaggtggtgaacgaccaacaatagcgttctggattttttctgttctgggtagcctactggtgatagggtttgccttcatgcaaagtgatacagtctccctgacaggcgatcttcttatgcttgccgctgtggttatttgtggacttgggtatgcagaaggcgcaaaactgacccgagtgcttgggggatggcaagtcattagctgggcactgattatttccctgccttttatggtgttggcctcattgatgacaatacccgatacttttggcgggatttctacatcggcctggttcgctctggcctacgtctcgctattcagcatgctgattggctttatattctggtataagggactggctactggcgggattgcagctgtcggtcagctacagctattacagcctttctttggattgggtctgtcagccacactgctgcatgaagccattagtccgctgatgatactgattacattcggtgtcatcctctgcgtcataggctcccgtaaattttcctga

SEQ ID NO: 12585 - DNA, 1335 bp, Escherichia coli
atgaaagagcgctataaatccatcgtagatatgttcgcaaagaagatacgcagtggagatattccttccggcacccgtttaccgacacacagagcactctctgcgcgggaacacatttcgctggcgacagcgacacgagtttatagcgagctggaggctatggggctggtcagcggagaaacgggaagggggacgtttgttcgtgaaatcgcgcttccatacggacatggagtcgaccagcctgctgttgctacagatgtgattgatttgaactttaactatccatcgttaccggagcagggggaaatattgcgtggcgctctccgacatatatcgaccgtgggagatattgagtcgcttctgcgctatcagccgcatgcaggcagaatgactgagcgaaaaattatcgccggttaccttgccagtccagagtttgagcctgaaccagagaatgtgattattgtgaatggcgcgcagcatggacttaccgtcacagttatggggttattgcgaccaggagatgtggtggccgtcgatgctctgacctatcccggctttaaagtactggctgagttataccatctggagattgtcagtattccagcattggttgatggccccgatttatctgcactggaagcgatatgccagaaaagggatgtaagagccatctatacaatgcctacgttgcacaatcctttgggctgggtgcttagccgtaagcagcgaaaaaaaatggctgatattgcccgagcttatgacctgatcatcattgaagatacagcttatagttttctgatccacaggcctccgccaccggttgccttttatgcgcaggaacgcaccgtgtacgttacgggtttttcaaagaacatcgcgacgggacttagagtaggggctatagtttgtcctgaaacctacagaccagctctggaaagagctgtgagagcaaccgcgtggaatacgccctcagtgattacctcgctggtctgtaactggataaaagatggtactgtttcccggtttgaaatactgaaaaggcgcgatgcgcgccagcgccaggctgtattaagatccaacttgggcaatcttcgctgtgttacgcattcgaattcctattttgcctggatccctatgccagatgaagcacgagctgatagggttgccaagaatttaatgaattgcaacatttctgtctcaacagcagaaccgtttagtacatcattagtggtgccccaggcaatcaggttagccctaggttccgtgactaccgatgccttatacaaggcaattcttaaagttcgggaagcgattgagtatgagcagtatcgctaa

SEQ ID NO: 12586 - DNA, 213 bp, Escherichia coli
atgtgtctcagttttgtcccaccttgtattacgacttgcatagccaatgaagataaacgtgacgacaaacggctcagcagtcttcttttctttcacactttccccacccagcatgcatacctttctgccgtaactgaagtgaatgtctcagggcgtgaagcggacgttgtattctttgaagtcaaatactccaacaacggactatcaggttag

SEQ ID NO: 12587 - DNA, 606 bp, Escherichia coli
atgactataaaaaatctacctgcagactatttattggctgcgcaacagggggatatcgataaagtaaaaatctgccttgcgctgggtgtcgatattaatacctgcgatcgtcaggggaaaacggcaattacgctggcaagtttatatcagcaatatgcttgcgttcaggcattaattgacgccggagcgaatattaataaacaagatcatacctgtttaaatccttttttaattagctgtctgaacgatgatttaacgctactacgaattattttaccggctaaacccgatcttaattgcgtaacccgttttggcggtgtcggcctgacgcctgcctgtgaaaaaggccatttaagtattgtaaaagagcttttggcgcatacggagattaacgttaaccagaccaaccatgttggctggacgccgctactggaagcgattgtgcttaatgatggcgggattaaacagcaggcgattgtccagttattactggaacacggtgccagcccgcatctgacggataaatatggcaaaacaccgctggaactggcgcgagaacggggctttgaagagattgcgcagttactgattgccgcaggcgcataa

SEQ ID NO: 12588 - DNA, 273 bp, Escherichia coli
atgaatgtcttatccggcctacgaatggcgcggaaatctgtaggcctgataagcgtggcgcttcaggcattggccaccacagccggatgcggcgtgaacgccttatccggcctacgagtggcgcaagaatctgtaggcctgataagcgtagcgcatcaggcattggtcaccacagccggatgcggcgtgaacgccttatccggcctacgaatggcacgggaatctgtaggcctgataagcgtagcgcatcaggcagtctggcgttggtcataa

SEQ ID NO: 12589 - DNA, 1383 bp, Escherichia coli
atgaaagaaaacaatagacgccgtgaatttctgagccagagcggtaagatggtcaccgccgccgcgctgtttggtacctcagtgccgctcgcccatgcgggggtagctggcaccctaaactgcgaagcgaacaacaccatgaaaatcactgacccgcattactatctcgataacgtgctgctggaaaccggttttgactacgaaaatggcgtggcggtacagacccgcacggcgcgccagaccgtggagattcaggacggtaaaattgttgccctgcgcgagaacaagcagcatccggacgccacgctgccgcactatgacgctggcggtaagctgatgctgcccaccacccgcgacatgcatattcatctcgacaaaaccttctacggcgggccgtggcgctcgctcaatcgtccggcaggcaccactatccaggacatgatcaaactcgagcagaaaatgctgccggaactgcaaccgtacacgcaggaacgggcggaaaaactgatcgatttattgcagtcgaaaggcaccaccattgcccgcagccactgcaatatcgaaccggtttccggcctgaaaaatctgcaaaatttgcaggcggtgctggcgcgacgtcaggcgggcttcgagtgtgaaatcgtcgccttcccgcagcacggtttgctgctgtcgaaatcggaatccttaatgcgcgaagcgatgcaggcgggggcgcattacgtcggcgggctggacccgaccagtgttgatggcgcgatggaaaaatccctcgacaccatgttccagattgcgctggactatgacaaaggcgtcgatattcacctgcacgaaaccacgccggcaggcgtggcagccatcaattatatggttgaaacagtggagaaaacgccgcagctaaaaggcaagctgaccatcagccacgcctttgcgctggcaacgctcaacgaacaacaggtagataaactggcacaccggatggtggcgcagcaaatttctatcgcctcgacggtgccgattggcacgttgcatatgccgctcaaacagctgcacgacaaaggcgtaaaagtcatgaccggcaccgacagcgttatcgaccactggtcaccctacggcctgggcgacatgctggaaaaagccaatctgtacgcgcagctctatattcgccctaacgaacagaatttatcccgctcgctgtttttagccaccggtgatgtattgccgctcaacgaaaaaggcgagcacgtgtggccaaaagcgcaggatgacgccagttttgtgctggtggacgcctcctgttccgccgaggcggtggcgcgtatctcgccgagaaccgcaacgttccataaagggcaactggtgtgggggagtgtggcaggttga

SEQ ID NO: 12590 - DNA, 1332 bp, Escherichia coli
atgggctttgattttcagttgttagaaaatgcagggatccagctaattgatggtgacagaggcaaaaattatcctaaacataatgattttatggagaatggctattgtcttttcttatccgctaaaaatgtcactaaatctggttttcaatttcaagaaacattatttatcaatgaaactaaagatcgtgaactaagagcaggaaagcttaagtacggtgacattgttcttactacccgtggcacagtaggtaatgttgcgtactatgacaataataatccatataaacatattagaatcaactcaggaatgattatcattcgagctgataataaattatggaaccctaaatttctatatttcatattaaaatcagaactattaaaagaacagatcattaatcttatctctggctctgcagtgcctcaactacccgcgagagatattaggaaatttatattaccagttattaatagaagccttcaaaataaaattactaatattatattagatattaatgataaggttaatttaaatatagaaattaaccaaacactcgaaaaaatgtcccaaaccctgttcaaatcatggtttgtggattttgatccggtgattgataacgcgctggatgcaggaaatccaatcccggaagccctgcaagctcgtgccgaattgcgtcaaaaagtacgtaatagtacagattttaaaccgcttccggcggaaattcgctcgcttttcccaagtgaatttgaagagacggagttaggttgggtgccaggaggctgggaaacaaaccgactggaaaatattttagagctggcttatgggaaagcactcaaaaaaacagaaagaatcgaaggagattatcccgtttatggttctggtggggtggatggttcccataatgagtttcttgttaaaggacctggtattattgttggaaggaaaggaactgttggttcattgtattgggagaacaaagatttttacccaattgatacagtattttatgtaaaacctaaaaagtacttctcgcttgtttactgctatcagctcttgaaaacactaggattagaaaatatgaatactgatgcggcagtccctgggttgaacagaaacaatgcttatcgtcttgacgtcataacaccaacacaaacaatcattgcccaatatacaaatatagtacaaacgttcaggtataaaatggattcaaataataatgagattgacaatctaaccaacctccgcgacaccctgctcccgaaactcatctccggtgagctatccctggaagatcttccggatctcaccaccgatacagaagctgcataa

SEQ ID NO: 12591 - DNA, 519 bp, Escherichia coli
atgtccatccgttttgcccgcaaagccgactgtgctgcaattgcggaaatttataaccacgccgtgttgtatacggcggctatctggaatgaccaaacggtggatgcggataaccgcattgcctggtttgaagcgcggaccatagcaggttatccggtgctggtgagtgaagaagatggcgtagtgacgggatatgcctcgtttggcgactggcgtagttttgatggttttcgccataccgtggaacattcggtttatgtccatcccgatcatcaggggaaaggtctggggcgtaaattgttaagccgattgattgatgaagcgcgggattgcgggaagcatgtcatggtcgccgggatcgaatcgcaaaatcaggcctcgctgcatctgcaccagtcgctgggatttgtcgtcaccgcgcaaatgccgcaggtaggcactaaatttgggcgctggctggatctgacatttatgcagttgcaactcgacgagcgcactgaaccggacgcgatcggatga

SEQ ID NO: 12592 - DNA, 405 bp, Escherichia coli; identical to SEQ ID NO: 9151

SEQ ID NO: 12593 - DNA, 306 bp, Escherichia coli
atgaccacttttaccgacaaagaactgattaaagaaattaaagagcgtatcagcagccttgacgtgcgagacgatattgagcgccgtgcttatgaaatcgcactcctatctctggaagtagaaccagatgaacgcgaagcttatgaattattcatggaaaagcgtttcggtgacttagtagatcgtcggagagcaaaaaacggcgataacgaatacatggcatgggatatgactctcggttggatcgtctggcagcaacgagctggtatccatttttcaacaatgtcacagcaagaggtgaaataa

SEQ ID NO: 12594 - DNA, 1164 bp, Escherichia coli
atgtcactcttccgcagaggtgaaatatggtacgccagtttcacattgccgaacggtaaaagatttaaacagtctcttggaacaaaggacaaaaggcaggcgacagaactccatgacaagctaaaggctgaagcatggcgggtcagcaaacttggtgaaatacctgatataacgttcgaggaagcgtgtgtcaggtggcttgaagagaaagcacataaaaaatcactggacgatgacaaaagccggatcggattctggcttcaacatttcgcaggaatgcaactaagagacattactgaatcaaaaatttattcagcaatgcagaaaatgacgaaccggcgtcatgaggaaaactggaaactcagggcagaagcatgcagaaaaaaagggaaacctgttccagaatacacgccaaaaccagcgtccgttgcaacgaaggctacgcatctttcatttataaaggccctactaagagccgcagagcgtgaatggaaaatgctggataaggcaccaattattaaagtgcctcaaccaaagaataaacggatccgctggctggagccccatgaagcacaaaggctgattgatgaatgtccggagccattaaagtctgttgttgaatttgcactggcaacaggcttaagacgctcgaacatcatcaaccttgaatggcaacaaatagatatgcagcgccgggtggcatggataaacccggaagagagtaaatcaaaccgcgcaattggcgttgcgctgaatgatactgcatgtcgcgtattgaaaaaacaaatcgggaatcatcaccgttgggtatttgtgtacaaggaaagctgtaccaaaccagacggaacgaaagcgccaacagtaaggaagatgcggtatgacgcaaacacagcctggaaagcggcgctgagacgggctggtattgatgatttcagatttcacgacttgagacacacctgggcaagttggctggttcaagccggagtcccgttgtcagtgttacaggaaatgggaggctgggagtctatcgaaatggttcgtcgatatgctcaccttgcacctaatcaccttaccgaacacgcacggcaaatagactcgatcctgaacccatcggtctcaaatttgtcccagtcaaaaaataaggaaggtactaatgatgtgtaa

SEQ ID NO: 12595 - DNA, 537 bp, Escherichia coli
gtgctggggagcgtatcattttatagctgtgcgccgatgcctgatgcgacgcagacgcgtcttatcatgcctacaaaaccgcgctcacccgtaggccggataaggcgttcacgccgcatccggcggttgtgcatcggtgccagatgcgccgctacgcgtcttatcatgccgacaaaaccgcactcacccgtaggccggataaggcgttcacgccgcatccggcggttgtgcatcggtgccagatgcgccgctacgcgtcttatcatgccgacaaaaccgcactcacccgtaggccggataaggcgttcacgccgcatccggcggttgtgcaccgatgccagatgcgacgccacgcgtcttatcatgccgacaaaaccgtgctcacccgtaggccggataaggcgttcacgccgcatccggcaatatgcaccgatgccggatgcctacatcaacgcccccattatcttcaactccagctcatccggcacttcgttatacgacagcacatgcagccccggtgcaaacaaccttgcgtag

SEQ ID NO: 12596 - DNA, 2094 bp, Escherichia coli
atgtccagcaaaataagtggtctggcttttccgtgttatgcccccccggtgttccctgaagatgggcgattaatattatctgaagcgcaggtaaacgcgaactacctaaaacaaatcaataaaacagaagagcacaaaaccaactgtagtaaacaggctggatttagaattggctttacgtgtaatcaaagtctgcatattagtctgttttttgatggtacaaataataatgaatataatgacactcctggacacccaaccaatattgccaaactgtttcatacgacctatcagaacgcagaagaacagggatattttaactactatataccgggtgtaggcacaccatttcccaagataggtgaaatggattacagcaacagcgggctggagttcgctactggtggtgaagatctaattaattgggcattattacgcctcgtggatgccctgagctattccattgacccttcccataagcgactggatgataatgtggcaaaagagcacattcctcttatgcgcgctccctggcctatgactggtgaagtgaatcgtcgcaatgtgattaacccctacctggaaaaattacagggactgttagagcaagccagtccgcgcctgctaaacgtaaagctgtttatctacggattttcccgtggcgcagcggaagcacgaacttttgttaactggttgactcagttagcttgcccgcaggagcaacaggtgatgctggccgggttagctgtcagtattgagtttttggggctgctggataccgtagcttctgtgggggcggcgcatgttttaccgggcgctgccggtcatatgggatgggccgatagtactcagcaactccctgatgagaggcagtttcccggcctgattaaatgctgccgccacttcgttgccgcgcatgagcagcggctgtgctttccgctggattcaatccgtcgtccagacggaaattatcctttaaatgcagaggaaattatctatccggggatgcactctgatgtcggtggtggctatcccgttcgcgatcaggggaagtcctgtggtgactcaggcgacattctttctcagatagccctgcatgatatgtatcttgctgcatttgattcaggagcaccacttgctgtttattctaaatttgttactccattaataaaaggtgtgtcgcctctgcgaattatgagtccttctagcgtaaaggaatttacgattgctaattcattaacaaaacgcttcaacatctggcgacaaacgctgctgaacaccactttgcagggcacagaagaaatgattgatacgagggaaggttatcacccctatcaacttgcccaggttcttgaaagcgcaattagtgaccagatcggctggatcaccgcctggcgtatcggtcgctatgcgaataacagtcttcttgtacaacctttttatattaaggcgccacaactggataaagatggacttgataaagaggcccaagcgcgcgaagaacaaatggaaaatatcgaaaaagagcgggtgaacaagcagaaaggcaatggcacacttgatgaaagtaatcagggcatacctatccttgacccgacgaacgctcagtaccagttgcgagaggcagcccgagaatttcagagcgattataaaggatggacgcgcgatattaacggcagcgtcacggagagagccattcagattcttgtggatgtcattcctaaatatccggtgtatctgattaatggcgatgatgaagcaaaagaatatcagcaaattaaggctatgggagacggactctatccacaattttttattgattcactgggaacgggaacgcgaactcagccctgcgctgaattactggctctctatgatgaccaggttcacgactcccgcgcctggtttatgcaaagttcgctgggtggacgcgaaccctggggcggttattttcgctaccgcatgatttacttcggtgatgaggctaataaagagctgaagctaatctctgcagatggcgaagttgttggcgatcagcccacatccaaccgggtcatttattggatggaatcgaaaacggtgagccgaggttaa

SEQ ID NO: 12597 - DNA, 543 bp, Escherichia coli
atgtccagcaaaataagaaatggaatgaatataacaaaagtagttaaaggctgtctggtattaattttgatggtgatttcgggttgctcagcagctaattacgacgattatactgcaggtgatctccgggcaataaatcatattaaaggtatcagtattaattggttcaccgtaaatggttatcgggtccatggtttgggcggtggatattgctgcataatgttaccagagaagtggcattctggattaaaagcccggatcgagtgggaagtagacccgaccccccttgaacctattgcaatgaaaaaagaaggttttggctatgaagaagatgcttatgctaaacatgctgcaaattatcaaaaatataaagtaattgttgatatcccggaatacggcgctgaacgttgtggcctgaccgttcattttctgccgtgtaatcagattaaagtgacaaccgtctgcgagggctatggtacaccgaattatcctatcaaagaaccccgcgagatgaaggaacctgcaacatgtccagcaaaataa

SEQ ID NO: 12598 - DNA, 555 bp, Escherichia coli
atgtccatcaaaataaggaaaagtataagtatgagagcgattttcaaatgttattctctaatgattttatttgcagtatcaggctgttcaatggcgagaaatagcggtgattacactgctgtggatattaacgggataaatcatacggataaggctataaattatatacacatcaatggttacggcggaccaaatattggtccattcggggacggtggaggatattgttgcgttatgctgccagataagtggcattctggattaaaagcccgagttgagtgggaggttgatccaaatacagctcctctgcctccaggctataaggacagggagaaatttgaagcatggaagaaagttgcgctaaacagttttagaaaatattcaacaattgttgatatcccggaatatgatgctgagctttgtggcctgaccgttcattttctatcgtgcaatcagataaaagtgacaaccgtctgccagaaatatggcacaccaaattatcctatcaaagaaccccgcgagatgaaggaaccagcaacatgtccagcaaaataa

SEQ ID NO: 12599 - DNA, 264 bp, Escherichia coli
atgcccgtcgaaataaagaatggtattggtgtgagagcgatttttaaatatttttcgctaatggttttatttgcagtgccaggctgttcaatgacgagaaatagcggtgattacactgctggagatattaaaggtatgaaccataccgatgttgctattaattatttcagtatcaatggctatggcgggcaaaatatagttccgttcggggagcgggggggtattgttgcgttatgttgccagataagtggcattctggattaa

SEQ ID NO: 12600 - DNA, 765 bp, Escherichia coli
atgataacagtatcgccacacgctaccgatcaagacaaatatattatctggctgaagcaggctgaatcattctgttctgccgctggtttggattacatagatgtgcttgttgaccaggctggaacagaccaacctttgcaaaatgagatgcttcatctgtggccagccattcactggtatgccctgtttgaaggaacgcctgaagctgagacgatggactattcccctgtagtgttacgcctgtactttgcgctcagtagtcatcgcaaatttctggcacaactgatggcgtcatttgctgatacgccgcgtcttactttgttgatatcccctcttacattcgacctgctggggcggcatcttcaggtattgtcacaggttcagtgggaagaacagaccggattgctgcgttactatgataatcgggtgttccctttactgttcacacatgttttgaccaacgagcagcaggcgacatttactgatattgcgttgttctggagctggttagaccgtgatggagagattaactggaaattaggaagtttttcaccagaacgcaggcttactgacaacccggagatgaatcgggtggatgatgtacaggtgggattgatgggctgtatctgcgacgctgaagccctgatgaaggagaaagcagtcagtgaagtcagtcaggaaagctattttgcccactgtcttgatattgctttcagggccaatgacgcgaaatatttcggagctttgcgggacttcgaaggataa

SEQ ID NO: 12601 - DNA, 1008 bp, Escherichia coli
gtgagggtgtcacaggcgtgggcggggccggggttcggtaacctggcgataccgcgtgtgggtcaggaagtgatagtggacttcctgaacggggacccggaccagccggtggtcatgggcaggacgtaccatgaggacaaccgttcaccaggggacctgccggggacgaagacgcagatgacgatacggtcgaagacctataaaggaagcgggtttaacgagctgcgctttgaggatgcgacgggcggtgaacaggtctatatccacgcgcagaagaacatggacacggaggtacttaacgaccggacgacggacgttaagcatgaccacacggaaaccattggtaacgaccagaagataacggtggggttgggccagacggtgaatgtggggagcaaaaaggaaggtggtcatgaccagaaagtgatagtggcgaacgaccggtgcatcacggtacgtaacgaccagatgctgaaggtgacgaacgaccggacggtgagcgtgagtcacgatgacagtctgtatgtcagaaatgaccgctgggtgacggtgaaagggaagctggagcacaggacgacggggaaccatatcagccaggtggaggggaagcacagcctggaggtgaaaggcgacctggcgaggaagattagcggtgcgctgggaatgaaggtccgggatgaaatcgtactggagagtggcggtaaaatcaccatgaaagtgggtggttcgtttgtggtcatccattcagggggcgtggacatcgtcgggccgaaaatcaatctcaatagcggcggtagtccgggagcgccggtgccgacgctgcaaccggcggttctgaaagcgctggcagatgataaaagtttagcggctgagcaaaatgatagtaatgcatcgtccgatcagaatgataacaacgatgagggtgaggaagcgccagaaaaatcggtgtgtaaggagtgcctgaaaagggcgcaggaagcagccgccgcttttgcgcctcgtggataa

SEQ ID NO: 12602 - DNA, 1101 bp, Escherichia coli
gtgaatttcagttctgaactgcttaacaaaggtaacaaaactcccgcattcagcatcagtattgagggcagggatatcaccacagtgctggataaccgcctgatggggctgacgctgacggataaccggggatttgaagcggaccagcttgatctggagctggacgacgccgatggaaaaatcgtgctgccgcgccgtggtgcggtcattacgctggcgctgggctggaaggggcagccgcttttcccgaaaggggcattcacggtggacgagattgaacacactggcgcaccggaccgcctgactatccgggcgcgaagtgctgattttcgtgaaacactgaatacccgccgcgaaaaatcgtggcacaagaccactgtcggggaagtggtgaaggaaatagccgtacgtcacaagctgaagatggcactgggtaaagacctgtcggataagcccgtggagcatatagaccagactaatgagagtgacggtagttttttgatgcggctggcgcgccagtacggtgctattgcgtcggtaaaaaatggcaatctgttattcatccggcagggacagggcaaaagcgccagcggtaaaccactgccggtgatcactatcacgcgtaaggacggcgacagtcaccgctttaccctggcagatcgcggagcctatacgggcgtaatggccagctggttgcatacccgcgaacccgcgaagaaagaaagcaccacggtgaagcgtaagcgcagaactaagaagcagaagaaagagccggaagcgaagcagggcgattacctggtggggacggatgaaaacgtgctggtacttaatcgcacttatgccaaccggagcaacgccgaacgagcggcgaaaatgcagtgggaacgcctgcaacgcggcgttgcgtcattctcgctacaactggcggaagggcgggcagatctctacacggaaatgccagtgaaagtcagtggctttaaacagccgatagatgatgcggaatggaccattacgactctgacgcataccgtcagcccggataacggttttacgaccagtattgaactcgaagtgaagattgatgatcttgaaatggaataa

SEQ ID NO: 12603 - DNA, 432 bp, Escherichia coli
atgcccctgaccacctggcaatggatgtggaggagcagtagcaatcagtgcgggtgtcacaataaaccggaccactgtttcatgggtaacaaaagtgctcccgcagttaatattttggcactggcagtaacgctctttggtgctttcagttacttgaaaactgctccttgtgtgtgccgcatgaccacactttggacaattcatcatatccagatccctacctttgctatcagaatcattgtaatgatacacaaaatatcaatattgagaacactttattccatttcaagatcatcaatcttcacttcgagttcaatactggtcgtaaaaccgttatccgggctgacggtatgcgtcagagtcgtaatggtccattccgcatcatctatcggctgtttaaagccactgactttcactggcatttccgtgtag

SEQ ID NO: 12604 - DNA, 483 bp, Escherichia coli
atggaagaacttcactttgtttacatcaatgcaaatggtcgtatcggagttcactcaatacagagcatcagttatagcgaaaatcatatacagggcatttgtaagaacaccgatcgaataaaaaccttccgaaaagaccgcattcttaaacagtacgattcaccagaacaagccattcaggaatgcgcgtcattcctccccgaaaactactcacatctcactaagcagtctggtccgaaaaaaaatacattcgatgtgtgtttcaccggatttaagaaagcagataaagaaagattggttgataaggcgaatgaacaaggattaacggtaagaacctctgtaacccaaagccttcagatgctctgttgcggttacaatgcaggcccatcaaaagtatcggcagccaggatgaaaggcacaatcatcatagatgagcctggctttatacattttcttgaaacgggtgagatcccagatgaataa

SEQ ID NO: 12605 - DNA, 723 bp, Escherichia coli
atggataagatattgaataaaaaggttaatgtaaaacaggctaacgaattgactgaagccgcatattatctctctttgaaggccaagcgcattctgtggctgtgtcttatgcaaacttacttcaccgcttcatccactgatgatagcgataaacctgatgtagtattgggagatgctgtattcaaagtatccgttgctgaatatgcaaccgttttcggtgtgacacggaatcaggctgtcaaagatgtaaaagatggaataattgaattaagccgttcttcagtcgttttttacccaaaagaaggtcgatatgattgtgttgccagaccctggcttactgaagctggcaaccgttcagcaaggggggtatgggaaatagagtttaaccataagctacttccgtacatttatggacttaccagtcagttcaccacttattcattgcatgattgtggaagtctacgaaatccgcgcacaataagactctacgaaagcctctgtcagttcaaatcaactgggctttggataaccaatcatgcttggctcaatgagcggttcgtgctacctgagtctcaacagaaaaatttagccgaattgagacgatcttttttagatccagcgctaaaacaaatcaatgaaaaaacccccttaaaagcatcttactctattgatagtaatggtaaatttatattcagtgtcatcaacaagccattagctgcatag

SEQ ID NO: 12606 - DNA, 420 bp, Escherichia coli
atgaagaaatctctattcagtatcatcctgctggctaccacgtaccaggcaagcgccgaaccttgcatggtgatctttgaacatggtcagttaattacgttacctgcggctgtcacacaggctgaccaggtgaaaggtatgtcaggtgaaaatcacagcaccggcttaatcctcgcatggaaaacagcagaaccccgcgcggtctggatgaaagatacgccaaccccacttacagccgcgttcatcggtgctgatggtgttatccagagtattcaggatatgcagcccaacagcgacacagcgcattcatcactacatcccacgatagcaatcatcgagatgagaacggaaaaatttaaacagttcaggctatccaaaggagacaaaatcatatccagccaatgtttccccctcaaataa

SEQ ID NO: 12607 - DNA, 288 bp, Escherichia coli
atgaatacgactcttgttgttttagtcctcgccataacaggcgcgttatatctcccctggcgtcttgtgcgcgacggttacaaagaactggtgcagatgtgcctgttttgctcctgtatcgtcacgctggctgctgtatatgccgtgttagtcaatctcgatactccacacccgtttatgccaatgtttatcgcggtaacggcgttcggtgctgctttcgtggctgactgcgctttatctctctggctctatcagcgtaaagctaacgctaagacggctaaccactaa

SEQ ID NO: 12608 - DNA, 243 bp, Escherichia coli
atgggaaatatcatcctgatggccgagaaagcaaaaggcgcgattgatgaagaggctgaagtgtatgaatttgagggaatggatgatctgatccagtttcgtaagaaattccctgaacagatgaagtatgaatatcattacatcctttccggcgacacgaaaaattttcggcatatcgcgcttgttgaagccaaccattttaagcagttcaaaaagctggttaatctgtaccaggatcgctaa

SEQ ID NO: 12609 - DNA, 156 bp, Escherichia coli
atgaaaaaatttatctgcaaccgcaacggcaaggcggtttttcaggaaggtgatcgggagctggtagccgcttaccagatgaaatcctctccggttccggtgacaccccgcaagctgaaagctgaaatggaggctatcgccagaacagcccgataa

SEQ ID NO: 12610 - DNA, 258 bp, Escherichia coli
atgtgtattgatcacgtcctcacctttcccgttcccctggaagatgccagcttgctggcagactactgcgggtttgaagtgtatcccacctacagcacgaaccgggccgatgaaacgccccgtttttccgtggtggcacttcatcgccacaaagccaggttggaaacgttagccgtggccgacacggagaaaagcgcccatgctttccgcgatatggccgagattaccgccgcttattacttacattttcggcggtaa

SEQ ID NO: 12611 - DNA, 252 bp, Escherichia coli
atgctttccgcgatatggccgagattaccgccgcttattacttacattttcggcggtaataagatgaacgattatctatccctcatggaacaggcacgacaggcagaggatttgcgcgactggaaaaccgccgcgcagctctacactcaggcaatggccgttagtcaaaaagccagaacgatgcgccagcgccgcgaaaggctgaacctacagcagcgtatcgacttttgcgaacgtaacgcgaggacgtaa

SEQ ID NO: 12612 - DNA, 771 bp, Escherichia coli
atgatcatccctacccaggaaacttacgacgagcttcaacgcgcctacgaatttttcaatcaacgcctatttgaaagtgcgctgccgccttgccttatcacccttcagcgcgaaaaacgaacgtatggctatttctcgaatggtcgctttgttggtcgctcaaccggacaaatcgttgatgaaatcgccatgaatccggtctatttctcgatccgcacgatacgcgacacgctttccacgcttgtgcatgaaatggttcaccagttgcagcaacacaccggcaaaccgggccgccgtggataccacaataaagaatgggcggcgatgatggagcgcatcggcctgataccatccgacaccggccagccaggaggtaagcgcgtcggtgagtccatgagtcattacatcgaggacggcggcgcgtttgataccgcctgcaaggagctgcttaccacggagtttaagctgagttggctggatcgattcccgccacacaaaccaacgccaccaacgccaaccggcgcagacggtaaaggatatgtcgatgatgaagattatgaagatgagggatacggcgacgatggcgagctggatgatgagatcacacaagccctttcgctggtaaacccgccgccagatacgccggtgaataaatcaaaccggacaaaatacacctgcccgaaatgccatacgaacgtgtggggaaagccgggcctgatcctgtactgtggcggcgaacactgcggaaaggcagaataccagccaacctaa

SEQ ID NO: 12613 - DNA, 369 bp, Escherichia coli
atggaaaagcaacctgataaattagatatcctgatggactggtttttaggcgatgcgaaagaaatcacctcaaaactggaaagcgtaaccacaagcgttaccgaaacagtagaacggctggataaagcctccgatgaaataaagaaatcatctgaggtggcgaaaacagaagtgatcgcaagccagcgcgagctggtcaacactctgaagaaggagcagaaggttagcgaccaattttttgaacgtctggccggggcgcaaacagggttttcgcaagcgcttatcaggcagattctgattatcacggttgtctgttccttcgttggtggagcgctcggcgcggcggctataacgttcctgcttcactga

SEQ ID NO: 12614 - DNA, 711 bp, Escherichia coli
atgaaaattgcagtaatgaactacagtggcagtgtcggcaaaaccattatttcgtcatacctgctgtatcctcgcatggctggcgctaaattctttgccatcgagacaatcaatatgtcggctgcggatttgggtgttgatgaagtgatgagattaaccggcgataactttggtcaactcgttgaagaaatcgtatttgaagataatgccatcgtggatattggcgcgtcgaacgttgagcgctttctttctaccatgacaaaatatgagggtgcaattgacgaatttgataaatatctgattcctgtcaccccggatgataaagcatggcaggaaagtattaagaccgccctcgcgttaagtgccgttggcgttcctaaatctaaaattgttcttctgcctaaccgcattaaatcgactccgcaggaggatatttcttcagtgtatgaatgggcgaaggattctaaaaaagccactattcataaagatgccgccgtttttgaaagtgaaatttatgaatacctcgcgtatcacaaaatttcgtttgaagaactgctggctgaagatccagaaacatttaaagcgaaagctaaatcctgcactgatgccgacgaacgcgcggcggctgcgcgacgttatcgctggatgaaattagcgctgccggttaaacgtaatcttgatcgtacctttgaaatattaacggctgaataa

SEQ ID NO: 12615 - DNA, 435 bp, Escherichia coli
atgaaaaaagaccttttactggaacctcgcaatctcgctgcggctgtaagagcgcgtcttgatgagattgaaggtttgttagacaagggtattagtaggcaagaaattgctcaacttcttgatagtgaatacagcttttctgtgactgtgaaagcgttagatatggctttgtaccgggcaagattgaaacgcaaaaaaggtggattgcacaatccagaaagtacggtaaatactggattgcacaacccaaaagagcaggagaaagcggaaccggtggaaactggattgcaaaatccagaaccagaaaaattagttgaggatatgggcgggaacaaagaatttttatccgatacagattttaaaaaaatcggggatgaggcaaaaaaagttgcgtcctcattcaaaggtaacgtaggtaataaaaaaggtttctaa

SEQ ID NO: 12616 - DNA, 348 bp, Escherichia coli
atgccatctatcagtttaagagtgaccgaagagcaaaaaatcgaccttgaataccgttcggagggcaacgtatcggagtacatcaagcaacagctttttggacaaaaagagagtgccagtgaagtgatcgcccggcttgataaattgctgaaacgttcatcttcagagcagcaagccgccggacgagatcgatacatcgaggcaatgttgattgaggtgttattgatacttcgccaggtgagtaaagcagatgcgcagaaagttgccggtggtgaaattcgccggttagggctggagccgtggtcagcagagctggcccgggagagagaggaacagagtcatgaatga

SEQ ID NO: 12617 - DNA, 1578 bp, Escherichia coli
atgaatgaagcggataagggcaaaatttgcctgggggcattgctttttaccccccttgttacgtggtttatctcggcgaaagccttgtatggttttacgccaaaagatgcgcgtgaacgtctggttttacttattcagcagacttttgatttatggcctttatggggtgctttattagtcggtgaaattattgccatcataggcttaatcatatttttcaaatttaatcaccagatatttaaaggtgcaccatttaagaaaatatatcgtggtacgcggcttgtttctcagcgggctttagcatcaataactaaagaaagagagccgcaaataacaatagccgatattccaatccctacaaaagcggaaggtacacatatttcaatagccggggcgaccggtgttggtaaatcaacaatctttgctgaaatgatgaaatgttgcttgatgcgtggaaaaaagcaacgtattgcctcaaataaagaccgcatgataatcctcgatccagatggcgatttcctttctcgtttttataaaaaaggcgataagattttaaatccctatgatgccagaacagaagggtgggtatttttcaacgaaataaaaagtgattttgactttgagcgattcggtgtttctatcgtacctacagcgaaggattcgcaaacagaagaatggaatggatatggtcgtcttttatttaccgaggtatcccgtaaagtatttaacacaagtcgaaacccaacgatggaagaagtattctactggacaaatgaagtaccactggaagaacttgaagaatatgtcagaggcactaaagcacaggctttatttgctggtagcggtcgggccgttggtagtgctcgctttgtgcttagtaataaacttgccgctcacctgaaaatgccagcagggaacttctcaattcgtgaatggctggaagatccgaaaggcgggaatctgtatatcacctggacagatgaaatgcgtgaagccttgaaatcgcttatttcatgctggacagatagcatattttctattgtgttaggtatgagcaaaagcaactcccgtaaaatctggacgtttatagacgaactggaatcccttgattacctgccatcattacgtgatgcgttaacaaaaggtcgtaaaaaaggactacgggttgtcaccggctatcagtcgtattcgcaggtcattagcatctatggcagtgatgtagctgaaacccttctgtctaaccatcgtacatcggttgttatggccgctggtcgcctgggtgaaagaaccctcgaatttgtctctaaatcattgggggagattgagggcgaaagagaaaaaacggggattagccgccgctttggtcagttgggaaccaaaaataccaatgatgatcacaagcgcgagcgggctgtaacgccaaccgaaatcgccacgctggatgatctgaccggctacatcgcgtttccaggaaatctgccagtggctaaatttgagactcatcacgttaactacactcgttctaaccctgtaccgggcgtggtcttacgtgaaagcaccgcatttgcaggaatgtaa

SEQ ID NO: 12618 - DNA, 2907 bp, Escherichia coli
atgctgaatattacgacgattacccgccagcgtgtcgatagggttgttgattactatgctgatggcgcagacgattactatgcgaaagacggtaacgcgatgcagtggcaaggcgctggcgcggaagaactgggcttaaccggcgaggtagaacaaaaacggtttgcgaaattgcttgatggcaaagtaacggatgacatttccgtgatgcgtaaaacggccaacagcgaaagcaaagaacgattgggatacgatcttacgttttccgcgccgaaaggcgtttcgcttcaggcactggtcaacggtgataaacgtatcattgaagcgcacgatcgggcggtcactaaagccatcgaggaagcggaacggctggcactaggccgctttaccgtcaataaaaaaacgcacgttgaaaacacgaataagctgattgtcggcaagtttcgacacgaaacgtcacgcgagctagacccggatttgcacacccatgcctttgtaatgaacctcaccaaaaccagcgatggtaaatggcgttcgctcacgaatgacggcattgtgaactcgcttacgttattgggtaacgtttacaaatccgagctggcaagagagctggagctggccggttacaacctgcgttatgatcggaatggtacgtttgatttggcgcatttcagccaggagcagatagcccaattcagccagcgcagccagcagattgaggcagagttagcaaagaatggtttaagccgtgaaacggccagccatgagctaaaaaatgcggccgcgctgaaaactcgtaaaagcaaaggcgaagtagatcgcgatgtactctatgagggctggaaaaaccgcgccaaagagcttcagattgattttgatagccgggagtggaaaggtgcggccaacgacgatatagcgcggaatacgcagccagcggcgctggaaaagcctatcgagtaccaggctgacaaggtaatgacctttgccattcgttcacttaccgaacgtcaatcagtgattaccgagcgggagctgatggacgtggcgatgaagcatggctatggccgcttaaccctcgatgatattcgggctgcgagagaacgggccataacatccggcaacctcatcaaagaagaagcaacatacgcagcggccacgaccaataaaaaacagcagaacgtagcaatgacccgcgaacaatgggtaacggaactggtgaaagctggccgcagtaaagatgaggcccgtaaactcgtagataagggcatcacaaacgggcggctggtacagcaaaagccgcgttttaccacacagttagctcaacaacgcgaacgcaacatactgaagatggagcgggaagggcgcggaaagatccagaccccatacactcgcgagtttagcgagggctggttagccagcagaacgttaaaacccgaacagttaaaagcggttatgggaattattcatactcccaaccagtttatttctgtacatgggtttgccggtactggcaaaagttatatgaccaaatcggcagcggattttctaaaagagcagggcgtacacgtcaccagtcttgccccctacggtagccaggttaaagcgcttcaggctgaagggctggaatctcgcacactccagtctttcctccgggcctcagataaaaaaattggccccggctcagtagtttttattgacgaagcaggggtaatcccggcccgccagatggaggaaaccatgcgcgtgatccgcgatgcgggcgcacgagcggtattcctgggcgataccaaacagactaaagccgtcgaagcgggtaaacctttcgagcagcttattaaagccggtatggaaacggcctatatgaaagatattcagcgccagaaagacccggaattgctgaaagccgcgctaaatgcagcagaagggaaaataaaggcgtcgttgacccacgtaaccagcatcgtagaggaaaaaaatcatgatcagcgctaccgccgcattgtcggggattacgtggcaatgccgccgacagaccgggctaacgccctgatcatcaccggcacgaacgacagccggaaaaaaattaatgagtacattcaggccgagctggggctaaaaggccagggtatcaattacccgcttctgaaccgtcttgataccactcaggcccagcggcagcacagcaaatattacgaaaaaggagccgtgattatcccggaacgggattacagcaacgggctgaaacgcggggccgtttataccgttctcgataccggccccggcaataaacttacggtaagcgacggcagcggcgacacaatcgcattttcaccggcgcgattttccaaattatccgtgtactccgttgaaaaaacggagctggccgtgggcgaccaggtaaggatcacccgtaacgatgcacatctggatttagcgaacggcgaccgttttaaggtaaaaagcgtccagagtggtgaggtactgctggagaacgagaaagggcggctggtaaaaattgatgccaacaaacctatgtacttagggctggcttacgcttcgaccgttcatagtgctcaggggctgacctgcgacaaggtttttatcaatatggatacccgatcactcacaacggccaaagatgtttattacgtggctgtcacccgcgctaaacacgaagccgtcatttacaccgacgatgagaagaagctggataaagcggccagccgggaagggttcaaaaccgccgcgcttgagctggaacaactcaaacgctatgccaaagagcagcagcatgatacccgcgaaaaaggccgagacaaagccgagccgacgcaggataaaggtaatgcccggcctaaagataaaggccatgaaaaaaataacgatgacagagccttgagattatag

SEQ ID NO: 12619 - DNA, 288 bp, Escherichia coli
atgacggtaaggctttattacaacgccgccgattcacgcgctaaagcaagcgctgaatggcacgataactggataagtaaaagtggattgaaagcgcggtactggactgataaagccatatctgactttctcgaccaaccacaaaaagctggccccataatggcctggaagcggaaggatgtgctgaaggttgagagcacctctgaatttcagcagtggatggcaaaacgccgcaggtggcttatcgcgcatggaaaattacttgctgaagatctcccctcaaagtga

SEQ ID NO: 12620 - DNA, 195 bp, Escherichia coli
atggggcaaggtatcaatacgttgtctttagagctggatgacaaagaagcgctggcgctggcgcagtttgttaagcggttgacgtggagtgatttacgggggtgtgccgttgatgatgacgaggcgtatgtcatcaaggatgccgtcgataaattacagagggcaatggctgaagaaggtttttccccgcgatag

SEQ ID NO: 12621 - DNA, 483 bp, Escherichia coli
atgcttgatatgcgattaggaaacagcggcgatattcctttcatcatgaacctggtgcgcgatggggtaatatctggcgcatttttctatgccgagggcaacggtcttgaaacagtgagatctgagctacaaagtgtcacccaacaatacagagataatatccccgtaggggattatctctttgtctttgccgagaagttaacgcggcagccggtgggattttcgctgttaaccggccgcaatgattttgcgggccgggcatctcatcttgagatccgtatgttcgctgttgcggctgatgagcagggtaaaggcattggcaagagtatgcttgcctcaatcatcgaagccacgcccggacaccggctggaagcctcctgtctccccccggccacaaaaatgatgagactgctggccggaagcgggtttaagctgattcatgaaacgcagggcggtaagaaaacgtaccgctttacagactaa

SEQ ID NO: 12622 - DNA, 555 bp, Escherichia coli
atgatccagcgtttaaaaaagcgcaactttctctttaaagcggcactggttgccgccgtactttacggggcttcggccccgtctctttttgctgcatcggcgcaagtaggtttctcgccggaaggaaccgcgcagcagctcgttatcaacgttatcggctcggcaaaagataacatcagaatgatggcctacagctttactgcccccgatattatgaaagcgctgattgcggccaaacgccgcggtgtagacgtgaaaattgtcgttgatgagaatggcaatacgggccgcgcaagtcgtgcggcaatgaatcttgttacgaacgcgggtattccgctgcgggttaacagtaactacaaaatccagcatgacaaggtgatcatcgttgatggccgtcatgtggaaactggcagttttaactacacggccagtgccgagaaatataactctgaaaacgcgattgtgatgtgggacgcgcccgaactggccgggcagtacctgaagcactggcaatcacgctggaatcagggccgggattttaccccgtcttattga

SEQ ID NO: 12623 - DNA, 1032 bp, Escherichia coli
atgactgagttaaccagtaatattcaagatattcgccagcgcccccgccgtgagcagggggtatggctgacgctcgaaccacttcagcgctacctgagtgatcccgatgtgtgggagctgagaattaacaagtatcagcaggttgtttgtgaaacgtcgaaaggccgtattttccacgacgatgagaaaattacggctgaatatatatcacgcttaaccgacacgctttgtggttataacggactaccgaaagagtccgttaataacgtgcttctgccggacggctcaagggggattatttgtttaccccctgccgtactggagggaacagtagccatcgcgtttcgtaagcatctgccagttgataagtctcttgaacaacttcgcgatgagggccgtttcactggctggaaacgaaagattcagggtgaagtagcccttcagccattcgagcaagaattgctggaattgctcgataaagacgacctcgtttcgttttttaaaattgcggtacgcaacaagctgaacatcgttgtatcagggtctaccggttcgggtaaatcaacgtttacccgctccctgcttcgggaagtaccttataccgagcgcattgtagtttcagaggacgttcacgaaattgggtctgatctgcatcacgaaatggtttatatgctgtacggcgatcaggatggccgtctggccccggcggtcagcctgaaagcgtgtatgcgtctttctcccgaccgtatcatgatgacagagcttagggatgatgcagcatgggattacattaactcgctgaataccggacatccgggcgggatcacatccacccacgccgacgatgcaaagtccactttcagccgtattgcgctgcttatcaagcaaaccggtgtcggccagacgctggattatgacgtgattatgaaaacgctgtacaccacgatagatgtcgtggtgtacatggaacatcgccagattgttgaggttctttatgatccagcgtttaaaaaagcgcaactttctctttaa

SEQ ID NO: 12624 - DNA, 1155 bp, Escherichia coli
atgagaaaagacagagaggaaaatttagattacctcgatgaagaagataccagcatcgaggatgagcgtcagggcttcagcggttcccctaaaaaacgtattgccggtgcgcgggcctttgtcgggctgatggtgttgataggttcagcaatggtgggatggttcatctataaccagatgcacgttaagaagctggccgacgatcccaaaaagggtaaagagcaggttatgaccagctccttaccgcgccagtcatttgatgatgtgccgccaaccattgacaatacgccgaaaaatagcgtcgttcctccgttgcagacgacgcaggagccgcagcagcaggttgcccggcaaacgttaaataatcagaaaaaggagctaacaccggaagaaaaaattatgcgcgcccggctaggtgtgtccttcaacggtgtcgatcctgagaaacaggctacgactgcgaaagaacaggagcgccggtcaggtcaggacaatacagaaaccagttcaaacagccaggcactggcgagccgaatgaaaccggcgcgtatggctgtcgctcaggcatctgtaatgccacatccaaatctgaccattgcgcagggaacaatgattccttgcggtacaaatactgagctggataccaccgttccgggccaggtgaaatgtactgtaagccgtgatgtgtactctgctgacggtactgtaaaactgattgataaaggggctgtggtcactggcgagcagaatagcggtatccagaacggccagaatcgtgtgttcgttctctggtcacgcttgcgtaatccggatcagaccattgttaacctcgacagcagcggcactaacgctttaggtagtgcgggcgtacctggtcaggtcaactctcacttttgggaacgaatgggcgatgccattttcttctctgtgctgactgatggcatgaaagccggtatcgcgtcgattaacaacaacaactccgatgtgacgtttaacacaacggaaaacagtaccgaccagcttgctactgaggcattacgggcgaagattaatatcccgccaacgctctacgctgcgcagggcgatgccgtatccatctacgtagcccgcgatctggatttcagcactgtatatgggttagaaatgaatgactga

SEQ ID NO: 12625 - DNA, 888 bp, Escherichia coli
atgaaaaaacaattaatcgccggtttaattctggtcagcctcggcctctctggtcaggcgctggcgctggaagtgggaaaaggtagcccatacgactaccgtattaaatccgtggtgtataacccggttgacgtggtgcgtattgattccgttgccggtgttgcaactcatatcgtggttgcgcccgatgaaagctatgtgacacacgcttttggtgacagtaatagttatgcgtttacccatgttgaaaacaacatatttatcaaaccgaaaggggaagttcccagcgatactaaccttgtactggtcacgaacaagcgcacctataacatagtgctgcactatgtaggtgactacaccacgaaagacgcccagggtaacgttaaagccaactttatcaagacgccctggagcatgaaaaatgccactctccagcttacttacctctatccatttgaggatatgaaaaaggctaataaaacgctggaaagtaaccgcgtgaaaaaggcgttaaaagaccttcagaatgggccttacaacctactctataaaatgtcagatgaagataaatatcggaatttggccccggtaaacgtttgggataatttccgttttacttacttcaaattccctgcaaacgcagatttacccgttgttttctatatcggtgatgatggtaaagagcataccgttaaccagcatccagccggggaatataacaacattgttgtggctgaaacggtagcaaaagaatggcgtattcgttacggaaataaagtcgtgggtgtcctgaatatgaattacaacccaaatcttggggcgatcagtaccggcactacgtcaccagacgttaagcgcgtgaaaaagggtgagggggataaatcatga

SEQ ID NO: 12626 - DNA, 717 bp, Escherichia coli
atgctgaagaaaaacaaacatcaagcgatatcgcgggaagatctgaataagtaccatgaggaaactcaagggcttgagcgcgatatggttaatgagatccttaattcccgctctcgcgcctggaaaattgccacggcctttttcgtctttgccgttgtgagcatgattactgcggtcggcgtcattatccgttttgcgcagccgttaccggcatacctcaccacgattaacaaagatacaggcgaagtatcgcaggtgaaaattacccgcgatgaagcgacttatggcgacgtgatagaccagtattggatttcacaatttgttattcaccgtgagtcctacgactacaacagtattcaggttgattatgacgccatgagcctgatggcttccggcgatgtagccgatgaatatctctccatgttcaaaggcccgaaccgcattgataagcggttgggtgactctgaaagaacgaccgttcatatcaactcggtgatcaccgaccgcgaacacggtgttgccaccgttcgctttaccacgcagcagcgcattcgccagcgtccgaaccctgagccgccgcgctactggattgcaacgattgcgtatgagtacaaagcgttaccaatgaccgcgcagcagcgctatatcaacccgcttggcttccgtgtaacgagttaccgtaagaacgctgagaacgttggcgcagtgggaggctga

SEQ ID NO: 12627 - DNA, 171 bp, Escherichia coli
atggtgcatttcttcaaatacacggcaatggcacttatcgggctgctgttggccgcctgttccagtagcccgacgccaccgccagaacccaacatgaaaaagctggttgatgttaataagacgtatcccgccgagctgtatcgtgcagatgccgctaacaacggagagtaa

SEQ ID NO: 12628 - DNA, 1044 bp, Escherichia coli
atggccttttcatttacaacggatattttcaattacatggatacggtcacaaaggaatttgtggcctctaatctcggagttgttatatccaccatttcaccggtaattgggttggcgttgatttgcaaactcaccctggacgggctgtttacattagcccggccacacggtgagccgctctcatcgttgataaaaaaattcattgtgtggtcgatgataatcagctttgccagcgcgggcgggctgtatcaaacccaactggctgatgcggccatgaagatcccggatgagttttcctcggtactggttattaacggttcgtccggtggcactgaagatgcaatgggtaacaacatcgacaaggccatacatgacgggatgcaggttgcgcgtactgcgtttgataacgccgatatttatagcggttccgggctggcgtcattattcctggcttgcgcggtcattatttccacggtgttgatctgtggtatcggggccgggctggtactgatggcgaagttactgctggcaatcactgtgtgctttgggcctatcttcatcttctgcctgttgttcaagccgctgtatggcatgttcaataaatggcttggctcgatggttaactatgggctggtaacaattctgctgtcgatgctatttggcctgatgattaagttctatcaaaaagcgctcgatgccgtcaccgcttccggggctgacagtagcctgttagggccggtttttgcttgtctgctgataatgattgtctcttacctgatcctgatgcgcattcctgaagtagcctcccgttggggggatggtatctctgcgggtattcaggagctgatacctaacgccggtggcggtggccgtggagctggcggtggtggctatcagcctggtggtcaaaaaggcgctacaggtgccgggggcggtactggcgctaagactgcggcggctacggctgccggtggccccggcgcgggagcggccaccgctgcgggttcccaaatgcagggtttcgcaaagggttcacggcgctaa

SEQ ID NO: 12629 - DNA, 237 bp, Escherichia coli
atgaaaaaactgattttacctttagctcttttcctgctggccggttgtgattctgaacatcctgtttcctggtacaaggaacacgatcaggagcgtaaagcgatggtggaaaaatgccgtgatgatgcggcgctcaaagtgaagccggattgtcagaacgcgctggaagcagagaaagatttgaaagtgtttggcaaaaatgatgatggcctctcaatgccaaaagtcacgccctga

SEQ ID NO: 12630 - DNA, 708 bp, Escherichia coli
atgaaaaagacacttgcaagccttgttttagctctggctatttcgccggttgcagttaatgcgcaactggtagttaacgatcctgcaaatctggcccaggcgcttgagcaggtcacattaatgacgcagcaaattgaacagctcaaatctcaattgctgaagcaggagcaaacgctggcttccttaaccggcagttctggtatcggtaatttgctgaatgacgatattagtacgctgaaaggcaatttaccgtctgactggacgcaggtatacagcgacgccatgaacagcagttcaggtatcacttcatctgctcaatccatgctgaaggaatttcagtcgcagattgacggtatgaaccgttccgaagcgatgagtttcattaagcagaagttggcggagaaaggggcgtatgaccgtgtgatggcgcagaacgcttacaacaatgaaatggcggagctgaataacattcaggagctgaccaatcagattgattcaaccacagacatgaaacaaatcgctgaccttcaggcgcgtatccagaccgcgcaaggtgctattcagggggagcaaacgaagctgcaactgatggcgatgctgcaaacctcgcaagacaagattttgcaggaacaaaaacaatacgcccagaagcgctttgtcctcggcgctgacggtgaagatctttccatgcctaacgtaacggaataa

SEQ ID NO: 12631 - DNA, 2631 bp, Escherichia coli
atggccgtagcggaaatgaaaaaaaggggggtgaaagatttcaaaaaagaaccttcctctttgaaatatattccttactcctaccatgtcacgccccatgttatcagtacggtaaatggggaatacctttctatatttaaaatccgtgggcgaacccatgactgtgcttctgatgccgagctaattaagtggcatgcggatttgaatcagcttttaaaagggattggtagtgagcatgtaaaattatggactcacttacaccaccgcgaaattaataattatcctgacacgcattacaatatgacgttcccacgcatggtgaatgaatattatcgtgatcagtttgatgataccccaatgatggtaaatgacctgtacctgacggttgtttataaccctgttggggatgccgctcaaaagatgctggcaaagtttgataagccatcggctagcgagctgcgcgaaatgcaggctgatgctattggtgcgctggaagatatttgtgaacaggtcatgaactcgctgcgtccttatggcattgaccgtttaggctactacttccgcgacaaacgggggaatgtcattcctgagcagaaaaaggatgatgcagaagatgatgaggacattatcgatctgcgtgaagatttgctggccgatgtggaatatcaggacgttcaggaagataaagaagtctttagtggtactcaacacacctattctaaagcgctggagtggctctattacctcgttaatggtgagtgggcaccagtgccggtttgtcgtggccgaatccgtgaatatttggctactacccgcccaatatcttcattttggggggatggtatcgagattcgcggtactgacgaacgccgctatacgtctgccgttgaaatccgggattacgattccgatactgagcctggtcagatcaatatcctgatggaagcaccgtttgagtttgtgttaacgcaaacgtattgctgtatgtcccagcaagcggcaagaacttacctcactaaccaacaaaaagctctgctggaaacaggcgatccatcctttacgcagataaaccagatgagtgacgccgttgatggcgttgtttcacgtacctttatcatgggctggcatcaccttacggtacacacctttggcaagacgcttaaagaggcccgttcaaacgccggtgttgccagaaatatgctgaacaactgcgggctgattgccagccaggtagggttagcttcagaagcggcatattatgcaaaacttccggctaatcaacacctgtcgccacgaccttgcccgctgaatagctggaattttctttgcttctcccccttccataattttatgtccgggaaagcaaataataacccgtgggggccagcgctgacgctgttcaaaacggtggcaaatacgccgctgtatatgaacttgcatgtaacgccagaagatgaaatgtctttcggtaagcgaccgctggcgcatacgttaatgcttgggcgttcgggggcaggtaaaactacgctgcttaacttcctgctgacgcaagcgatgaagtataacccgcgcatttttgcctttgaccgcgatcagggcatgatgccgatgattaaagcgttacacggtcactacacggttctgaaagagggcgttgcttccgggtgggcacctctacagatgcctggcaccaaagttaacattgcattttgtaagcgcctgatgcgcctgtgcgctgaaattaccaaaggcagcgtactcgatgctgatcaggttaatgaccttaaccgcgccgtcgatgctttgatggatgagaactccctcattccgacagatttacgcaccgtggatatgttaattcagcagatgccgaatccatatcaaacagcgggcagtaaacaaacactggcgtcattgcttgttccgtggactcgcggccatgaaaacggttggttgttcgataacgatgcagattcactgaatcttggtgaatacgatatttacggctttgacctgacagatttcattgttgcagataatgagatcccccctgcaacacgtactccgctcctgatgtatctcaatttccgtgtgcgtcagtctattgatggccgtcgccgtgtgattcaggtattcgatgagtttcaccagtaccttgacgatccaattatgagtgtggaggtcaaacgtggccttaaaacagaccgtaagaaagatgcggtttacgtattctccacgcaagagccgaacgatgcgctggatagctccatcggtaaaaccatcatgcagcagtgcgtaacgaaaattcttctggaaaacccggatgcggattatgaggactacgttactcgcctcaaattgacaccggcagagtttgacgcgctgctgtctattcctgagaactcccgccagttcctggtgaaacaaggcagccaaagcgcgatggcgcaattcaacctggccccgcgcgttaagacgccggagaacttcaggaagctggataagatccttagcatcctgtcaggggaaacccaaaacgccgaaacactggcgaaaattattgagcaaattggggatgataaccctgataaatggctcgaaccctactggaaatctgtactcgcagcgtga

SEQ ID NO: 12632 - DNA, 315 bp, Escherichia coli
atgaatttatccggtaaatatccgttatttaaaggcgctacgcgactgccgacatttgccggtgttccgcgaacagtaattattgccaccttcatattttgtgcgacgttatttatgacgatccacctttgggccttagttctttttggcttgctgtggtttattgagttttgtattagcaagcatgatgaccgcatgtttcgtattatatggctggctatcatgacgaaagggctaaatatgattaactccccatttactaaactgtggggcggctctagttactcacctactgattatggagataaaaaataa

SEQ ID NO: 12633 - DNA, 291 bp, Escherichia coli
atgaatacagcgattaaacgttttttcccggtggcaatgttcatgatggttgctctgtgtgttcctgagctggcgctggccgccggtgcagataccggtgaatcatccatgaattccgttaactcctggttaatgacgtggattccggttgcggccactgttcttatcatcgtgagtgctatcgcatggatcgctcatatgctcccggcgagctgggcggttcgtattgttgtcggtctgattgttgtcggttccgcgtcttatcttgttggcctgttcgggctgagttaa

SEQ ID NO: 12634 - DNA, 318 bp, Escherichia coli
atgcgcgtttatctcattttgttgaagcagttagaagaagtattcaatcaaaacaaagttgttcggatcgcaattcaacggatggataaaaagaaatggataccgctttttgatgtgaaaaatagtgaagggggcgtaatcacttgctctctgcgagttcagtctggagagggggttagaacgtgggccgatctgcggatactggccgacatgctgagagacgattttaatgcaagagaagtggggcttttcctggatgagcctgattttatttttcctgatgatggagtgttagaaaaagatgaatacagcgattaa

SEQ ID NO: 12635 - DNA, 741 bp, Escherichia coli
atgaagcaggttgttgcccttttcccactgttgattgctggtcttttggatgccacatccgcaaatgcggaactgtcagcgccggttatggctctggcaaaacgttgtgcgccagaagtgcatcctttaactattgggtacctggttagccatgaatcgcgcaacaacccatacgcgataaacgtcaacgttcctaaaggaacaaaatcaccgttagccagacagccgcgtaccctagatgaagctgttaaaacgacaaaatggctaacggctcatggttataactttgacgtaggtttagggcaaatcaactctgcgaatttcccaaaattgaatgtttctgccgcagatttgtttaatggttgtaaaaatctcgaagctgctcaatacgttcttaattattgctaccagctcgcaacaaaagaatatgcgccggggcagtcagcgttgagacacgctttatcttgttataatacgggttcactaaccgccggatttacaaacggttatgtatcaaaggtggttgctcaaattgggcaatcaaaacccgtaatccctgctttgaaagccgatgatggctccactgatgtgaaaagtgttgatacagctatagatgctgtgccggtagatgctgctgatggtgaagaaaaaccaaaagacgccggtatgactgatgcctttggtggctcggataaagacgcttttggtgcatctgatggtgacgctttccggcagaagtag

SEQ ID NO: 12636 - DNA, 234 bp, Escherichia coli
atgtcaagacaagatgaaaagaagcacaaaacagagcaggagcgcgaaacatcagtgcctaaaagaaaaatcatattcgtacccttgcagtcagaaaaaagtcccaaaggggagcctcgctaccgagatccagccaatccatttaacacatgggttgggagaggaaagcgccctgactggctaaaaaaatatcttgatgaaggccgcgagctttcggagtttgagatcggataa

SEQ ID NO: 12637 - DNA, 438 bp, Escherichia coli
atgagtaaaattattgatttccctaccggaaaaaagagggagagaagggctaaagctatccgagcgcaacgtgataaagaagcgatgcagcggagcaaaattgctacctcccaattttggtgggctaataaaataaagttactcaccgttattaaacagtcggtgcgatttctcttaatatatttagggttattagctaccgacatatttatctatctcgtatttattctaggaaaactcctaaaattctttgcgatgactggtatcatcgctgcgcttttatttctggttatggaatataggaatggttggcattatacgcaatcaatattccatgccgcagcaatatttttcggcctaatcgccctgcgtatcgggcatgacaaactactgaatggcctaataaggcttaaatcctatctatccagaaaagggtga

SEQ ID NO: 12638 - DNA, 315 bp, Escherichia coli
atgaagattaaaagcattctctttacgacagttctcttattatcaggatgcgctagtcagtcgcaggtagagcaattatcaaagcaggttaatacgctaaaaacagacctgtacaatctgcaaatccagcagcgcaatgatacacaggcacttcagcgagaagtacagaaatcgcgtcccatcggggtttgctatcttgacggccacccctactcacaaggagcggttattgctggccgcatttgtgccagcaatggcgttatcgtcaatggcaaacctacagaagtttcatggcaggtttatcaccgccgctaa

SEQ ID NO: 12639 - DNA, 726 bp, Escherichia coli
atggcaggtttatcaccgccgctaacaacgcgcgttcggggcttcggccccgttttttatggtacaggtagcatggatatactttcccttttccctcctaacgtaatcgcattgtgggccgtgtcatttggttttctggccgtcctgtattggtggaagatcaccgccagaaaacgcagacacaaacgcaagcaacaacaagcccggcgtgtgctcgcaaaaattcagaccctaccggcgttcggctacaagatcgcgtatctcaggaagatagaccctttcacctttgaggaactgttactggaggggtttgagtcgcatggcttcagaactatcagaaataaacgctataccggtgatggaggcattgacggacaggtaataatcggaaaacatcgttatctcatccaggccaaacgctatcgcggccatattgctttacagcacgttcaggagttcgatacgttgcttaaacgacataactgtcgcggtttgttttgccataccggaaaaactggcgcagcttcaaaagctgttagcttcgccagtgatcggatggagattatcagcggccagcgcctaattgatttgctcacgcccggcagctccttcaccatcgcaaccgcaccgcagacaatgatgaggcgtaccgcagcaacgcgaggaacgaacatcattgtcgaggaagcggataaaaatacaaccgatagcatgagagttaattaa

SEQ ID NO: 12640 - DNA, 402 bp, Escherichia coli
atgaagtcagtaactatagaagcaaaaacttttgctgaaatgttaggaataacagaaggtgagttaatcttcgccattaagacaactggcacatttaaaaacaaaactattccacagcctcatgagacacataaatcaaataacagatttttatattcagacgtaatgaaatttatcgaatcaataaaagacaaagaaaacctacaaaaaaaatatctgatgcgtttccgtcgatgcagctcgttggacactcttgaaaaagtatttgatagcttacgcgataagctatcaggtaaagaactggatgcaatgatgagcgcctcagaccatcggcgagccgaaatcactcacaatactttatgggataaagtcccggcctccgcatggagaaatgtaaaataa

SEQ ID NO: 12641 - DNA, 327 bp, Escherichia coli
atgaagcgtgattatattcctgatgccggtgatattgtatggatggattttgatccgcaagccgggcatgaacaagcgggccatcgaccagctttggtgttaagtcctgcggtatataacggaagaatagggctgttgttgtgctgccctatgacaacaaaaataaaaggttatccattcgaggtgcggaacggagaggggagcgctgtactcgctgaccaggtgaaaagtcttgattggcgtgaacggggggcagttaagaaaggaaaagtgtctgctgctgtgttggctgaggtcaggtctaaattaaaagtattgattggatag

SEQ ID NO: 12642 - DNA, 258 bp, Escherichia coli
atgctgaattttttgaaaaaactttatagctatctagagtttttaggtgctcttatttgggttggtgttgggttgtattccatctggttagggtttagtaaattatttaaagataactcaatctctattggtggtattgaggctgtatctctgcttgacacaactccgtttgcaataatgttcattttttgtggagtgcttataattacatttatatgggttgggtatatcagcaagagactaaaaaatgaagcgtga

SEQ ID NO: 12643 - DNA, 543 bp, Escherichia coli
atgaaaaaagaggatagatcctttattagatgggtcagccttagcagtaggatttttactgctgtcttagctatcggggtgatgtgctacgctgcaatgggagtgttaggcttagttaataatccagttccatattatttttctgaatggattaactggatgcaacctaagttaaaactacctgttacttatcatgattcgagcttataccttgataacggaacttacagtataggtgattatattctctcggttggttatcttttcgttattttcatggctcaatcgtatgcggctgcatattttcttgggcggcttaatcataccttaatcagcaagataataatgtataaggcaactaaagaatttcaccaaagatattcaggtataaaagcggctcatttcgaaaggttattgagtgaaaatcttacagatacagatctagaagatgtaagccgcaagcattgggagaagtggcgggaacattacaaaagtaatatgagttacgatgagtggaagcagaaattcaaaaaggttctttag

SEQ ID NO: 12644 - DNA, 246 bp, Escherichia coli
atgactcaagtaataattaaaaaatgggggaatagtctatctgttcgccttccttctgcgattgtgaaagccgcttcgttaaacgttgatgatgtagtggagctgtcagtaaaggacggcgcaattactatcgtgcccgttaaaacgaaggagtattcactggatgctctgatggccggtgttactaacgaaaatattcatgaggaaatttctttcggcgctcctgttgggaaggaattgttgtaa

SEQ ID NO: 12645 - DNA, 207 bp, Escherichia coli
gtgtttggccttatgtttcacatcatgtttgggattgttttcatagtgatgagtgtggcttctttggttgggcttgttttacacggccatgaatacacgccgggacactttgggaatatgaccgcaatgtgtatcgcatcgactctggcgtgggtttgggcgctttcagcagcgaaagaagcctggtacatcctgaagagtcgctaa

SEQ ID NO: 12646 - DNA, 585 bp, Escherichia coli
atgaaaataggctacgccagaaagtcaaccaaagagcaggacacatcccttgagtatcaaatcgaggctttacaaaaagctggctgcgaaaaatggtatgcagagcaggtatcgaggggcggtaataagcgcctgaaaacaggtacaccagagttggaaaactgtctgaaagcgcttcgcgccggtgacaccctggtagtatgggcgctagatcgattaggtggcactctcttgcagctcttgcagctcatgaatgagctacgcagtaaaggtattcactttgagagcctcaaagagcgcatagacacacaaagcccaatgggtgaaatgtactattccctcatcgctattttttccaatttcgaggtagccagaaaccacgaaaggacaatggccgggcttgcagccgcaaagaagaaaggacgcattggaggcagaaaaccaaagctatctccacaggacattaaagaaattaacgcgcttgttaaatcgccagaaattacagtaaaagaaatcgcggcccgttttaaagtttctcgacctacgatttatagacatatttcatccgatatacaggatgaataa

SEQ ID NO: 12647 - DNA, 507 bp, Escherichia coli
atgttaaaatcaactttggggattgctattgctttttcattgtgtgctgttgcacatgcagccaatcaagggcaaggtgttgttaattttaaagggacggtaattgatgcaccatgcggtattgatccggactcagcagatcagactattgacttcggtcagatttctaaatcacatttagatgctgatggtatttctgttaagaaagatttaaatatcaagctagttaactgtgagccaaataaaagtgtcaaagtaactttttctggagcaacgattgctagtgctgcaaatgaactggggacggccggtgatactggtactgcggttgtgatttccggtcaggacggtaagctagtttcttttggtactgaaggttctgctcaaagtttacaggaaggtgaaaatacgctgcattattcttcatgggtaaaaaaagctactggtggtactgtaaaagaaggtgattttactgcagttgctaactttaatctgagttatcagtaa

SEQ ID NO: 12648 - DNA, 2511 bp, Escherichia coli
atgaaaaaaaataaatcgacttttaccatcaattttattacgtattcattgatgctttctctggcaggagtgcctgtctatgccgtcgattttaatacggatgttctggatgccgcagacagacagaatattgatttttcccggttctcccgggccggctatattatgccaggacagtatcagatggaaataagggtgaatggccaggatatttctccatcggcatttcagattgcgtttcttgaaccacctttttcggattcggataacgagaaaccgttaccagaaccctgcctgacaccggagatagtcagccggatgggactgactgaggcgtcacaggaaaaagttacgtactggaataacggacaatgtgcggatttccgacagttatccggagtggagatacgcccgaatccggcagaagggatgctgtacatcaatatgccacaggcctggttggaatattccgatgcatcctggctgccgccgtcccgctgggataacggtattcccggactgttgtttgactacaacatcaacgggacagtgaataagccgcatcaggggaaacagtcccagtcgctgaactataacggaactgcgggggctaacttcggtgcctggcgtctgcgtgcggactatcagggcaacctgaatcacaccaccggcagtgcgcaggggacggacagccagttcacctggagccgtttctacatgtaccgcgccatcccgcgctggcgcgcaaatctcacactgggtgagaactacatcaattctgagattttcagctcctggcgctacaccggtgccagtctggaaagtaatgaccgcatgctgccgccaaaactgcgcggttatgcaccgcaggtctcagggattgcggatacgaatgcgcgtgtcgtgatttcgcagcagggacgcatactctatgactccaccgtgccggcaggtccgttcaccattcaggacctggacagctccgtgcgtggccgcctggatgttgaagttatcgagcaggacgggcggaaaaaaacgttccaggtggacactgcatatgtgccgtatctgacccgtccgggccaggttcgttacaagctggtttccggacgttcacgtaattatgagcactccatggaagggccggtctttgctgccggtgaggcatcctggggtatcagtaacacgtggtcgctttatggaggcagtattgttgccggggattataacgccctggctgtggggctgggccgggacctgagtgagttcggcactgtttccgctgatgtaacccagtccgtggcccgtataccgggttatgacacaaaacagggaaaatcctggcgtctgagctattccaaacgttttgatgaagtgaatacggatatcacttttgcgggttaccgcttctctgaacgtaattacatgacgatggaccagtacctcaatgcccgttaccggaatgattttacgggacgtgagaaggagctgtacaccgtcacactcaacaagaacttcgaggactggaaggcatcggtcaacctgcagtacagccatcagacttactgggaccgccggacatctgactattacacgctgtcggtgaaccgctacttcgatgcgttcagctttaagaatatcgcgctgggaatatctgcatcccgttcgaaataccagaaccgggataacgattcggcgtttgttcgtctgtccgtgccgtggggaaccggtacggccagctacagcggcagcatgagcaacgaccgttacaccaatacggtgggttacagcgacacactgaataacggcctgagcagttacagcctgaatgccggcgtgaacagtggcggtggtcagccgtcacaacggcaaatgagtgcctattacaaccataacggttccctgacaaacctgtcagccagtttctctgccgtggagaacggatacagctcattcgggatgagtgcatcggggggggcgacggtcacgatgaaaggagccgcgttacatgccggagggatgaacggaggaacccgtcttctggtggataccgatggtgtcggaggtgtgccggttgacggtggtcgggtttataccaaccggtggggaattggtgtggtgacggatgtgagcagttattaccgcaacaccacatcagtagacctgaacaagctgccggaagatatggaagccacccgctcggtggtggagtcggtcctgacggaaggggccattggttatcgtgagttcgaagttctgaaaggtagccgtctgtttgctgtgttgcggatgtctgataacagctatccgccctttggtgccagcgtgacaaatgcgaaaggccgtgaactggggatggtggcagacagcggtctggcctggctgagcggagtgaatccgggagaaaccctgaacgtcggctgggacggccggacacagtgtgtggtggacatcccggcacatccggacccggcacaacagttgctgctgccctgtcgtcaggtgaagtga

SEQ ID NO: 12649 - DNA, 732 bp, Escherichia coli
atgcagaaaatgaaaccggcgctgaaaaaaacgctgatggcggtagcgtgtctgagcgcagcacctgcagcccaggctgctgtctccctggaccgtacacgtgcgatttttaatggcgatgagaaatcgatgacactgaatatcgccaatgataacaaacagcttccctatctggcccaggcatgggtggagaatgaaaagaaagaaaaaatcaccacaggcccgattattgccactccgccagtacagcgtctggaacccggctcaaagagtatggttcgtctgaccagtacacctgacatcagtcgcctgccacaggacagggaatcccttttttacttcagtcttcgggaaattccccctaaaagcgataaggcaaatgtgttgcagatagccctgcagacaaaaataaaactgttttatcggcctgaatccattaaagcaaagcccaatgcggtatggcaggaccagttggtgctgaataagaccagtggagggtatcggattgataatccgacaccgtattacgtgactgtaattggcattggcggcagcgaaaagcaggccagagaaggtgaatttgatgctgtgatgctggcaccgaagtcaacgcagatggtgaaatcaggaacatacaacacaccatacctgagttacatcaacgactacggcggacgtccggtgctgcagttctcctgtggtggtagccgctgtaccgcagtgaagaaataa

SEQ ID NO: 12650 - DNA, 564 bp, Escherichia coli
atgaacagggcaacgataggattttatctggcagttgtgctggggagttgcagtatgaacggtgtctcacaggcggatgaattgttgacgcgggatgattttttcgtagcagatgaaagccgtcatcagtgggtcactgagcacaatgggcggacaggagctctgaacgtcaaaggtgcattagtgtcatctccgtgcatactggatacgccagaagttaacttccccctgcagaaatataaagggagatatgtactcaatcttaaggtatcacgttgtggtgatgggcattctgacataccggaacgccagtcaacagagcatgggaatattgttgtgaagcaaagcgctgtgttgaaaacaggcaaagatcaaattctgctatccgcatggcgaaacggtggattaagtagaaagaatttacaacatggtgataatcagatcacttattatataaatgaagctcaatatcaaaagatagctaaaacacaaatgcctgttactgcgcataaaacatctgacagtaacaggggggtactgcatttgaatataatgtatgaatag

SEQ ID NO: 12651 - DNA, 519 bp, Escherichia coli
ttgagaataacagtctttttattaacgttcctttcctttttatctgatttatgggcggttgatattccaatcaacatcacgggaacgattataattccgccatgccagataaataacagtaatcctgttgatgttgattttggtaatatcagggtgagtgaacttgacacaaaggaacatatcaaagtagttagtttcccggtttattgtccatatcatcagggcgaggcatatgtaaagatgactggacagagtatgaccgggaaagataatgttctggcgacaaatattgatggacttggcattgaactttatcaggggggggagggaactggaaaccatcttatcttaagtagtggctcatccgggtatggatacgaagttattaatgcgctctctgaaaaaaatgttgagaggacgacgttcacgtttacagcaaaaatatataaggctgaaggtgttacaattaatagcggggagtttagtgccagtgcacttataaacatagtttatttgtga

SEQ ID NO: 12652 - DNA, 993 bp, Escherichia coli
atgaaatatgtcaaaaaaatattgggaatatctttcttttctttactcccattatctgcagaagctgaaagctactgtaacctcctttgggcgaataatactctaccaagtgcctcagtcaatgtcagttttgatggcaatacatccgggatttttcctctcaatttacaggcgggtggcctgtcaactgtaataaaaagagctgcaaaaaatatggatacttttgtaacgcttgatggaacttatcgatactggatacagtatccggaagcatggcagacaacccctgacggactaaaatatcgaataaccagcgaactggaggtttcgggcactcaaactgcaggtgtcaaaacagttgtaacgcctgtaggttaccatacatgggtaaatacatacggatgcagggatgtcgggggaacttatgattttggggttgcatctgtcagtggggtgaatattgaaatagacaggggcactgcatggccgggggtttattctatacagttaccagtaaaagttgcatatgaagagaataaagggaattatgacggtaaaaatggcggaggctggcaagaatttcctgtatccatgaaatctttttctccggtagactctaaaggcatcagcataacgataagctcaaagtgtaatgttggtgaacaaagtttgagtgttaatatgggtgataatattactccggatgaagcaaaatcaggtgtggagaaaaaggttaatttttctcttacttgtaatgccccggcaaaggtatcactatctcttaaaggtaccgatatcgtcgatggggtcaataacaaaacaaaatgtggttctggtagctgctctctgaattttgataatgatagttcatctaaaattctggaagtaaatcaaggaacatatcaggtgccgattacagtacgttttcaggacgcaaaccccgttgccggagggtttgatggtagtgctgtattatccgttgatattctataa

SEQ ID NO: 12653 - DNA, 783 bp, Escherichia coli
gtgtttaatgatatcagaggtgacgtcacatcgggttctgatagtttattgcaggcaatacagaaacgagaattcaaaccatacattcagcctattgtttgtgccagcaaccataaaattattggtggcgagttgcttgtccgttggcatacatctcatagaggagtaatttatccagatagttttatagataatatggagaaagctggaattctgtctgagcttacttgttctataatcaatgaggtggttgttaattttgatggtgagaataaatttaatggtgaggattttattcttcacgtaaatgtcgctccatctctattgcataataaaaaattcatatccacctgtataaacgctgcaaaaaaaaacaacctgtcattagttcttgaattaactgaacagtatttttttactgtggatagcaaaaccatatccacctttcattgtctaaaggagtcgggtgtgcaatttgctttagatgattttgggacggggtattcaaacttattttatctaaaatattttacagtggattttataaaagtagataagatgtttacccaggatttagaaggttgtaaacagtctcgttacattatagaagcaattcttgaattatctaggaagttaaatataaaaactatcgtggaaggagttgaaaccatggagttagtaaataaattaatgttgctgggggtcgattattttcaaggttattactttggtcaggctattgagctatgttcgtttattagagaatatagaaagactgtatag

SEQ ID NO: 12654 - DNA, 690 bp, Escherichia coli
gtggcagagcgatacccacgatacggttttccgaaacttttccaggttttgcggcggcagggatacccgtggaatcacaaaaggatccatcgtatttattgtctgctgaagctgaactttcgccgtaagggcaaacagcggttgctggtgcgtaatccctcgccactggccacgccggaagcgctgaaccagagctggtctgtcgattttatgcatgatgccctagtctgtggccgtcgttttcgcacgtttaatgtcgttgatgactttaaccgtgaggcgttgtcgattgaaatcgatctgaatctgccagctctgcgagtggttcgtgtactcaacaggatcgcgtcaaaccgtggctatccggtcatgctacgtatggataatggtccggaatttatctcactggcactggctgaatgggcagagaaacatgcagtaaaactggagtttatccagccgggtaagccgacgcagaacgctttcatcgagcgttttaacaggacataccgtacagaaatactcgatttttatctgttcagaacactgaatgaagtgcgggaaatcactgaaagatgggtgtcagaatataactgtgaacgcccgtatgaatcactaaacaatatgacgccagaggaatatcgtcagcaccattatttggccgggatctcaaaaaatgcatggaactaa

SEQ ID NO: 12655 - DNA, 279 bp, Escherichia coli
atgcgtaaagcccgttttactgagcatcagatcatcgctgtgattaagtcagttgaagccggacgaaccgttaaagatgtctgccgggaggccggtatttctgaagccacctactacaactggaagtccagatacggtggcatggaggcttctgatattaaaaagatcaaggatcttgaggacgagaacccacgtctcaaacagatgtttgccgacctgagtcttgagaacagggcgctgaaagacgttatcgaaaaaagctttaaaactagcctttaa

SEQ ID NO: 12656 - DNA, 5511 bp, Escherichia coli
atgattaataaaaataaagtaactgaacgttcaggtatacatgataccgtgaaaagccttagtgagaatctgagaaaatacattgaggcacaatatcatatccgggatgaagggttaattgctgagcgacgagcgcttttacagcaaaatgaaactattgctcaagctccttatatagaagcaaccccaatttatgaacctggtgcgccatacagtgaattacctattcccgaagcagcaagtaatgtgctaactcaactatcagaacttggaattggcctctatcaacgcccctataaacaccaatcacaggcacttgagtcatttcttggcgaagacgcttctgatctggtcattgcaacaggtacaggctccggtaagactgaaagctttctaatgccaattattggtaaattggcgattgaatcttccgagagacctaaatctgcatcccttccaggttgtagagcaattttattatatccaatgaatgcattagttaacgatcaacttgctcgtatcagacgtctttttggtgattctgaagcctctaaaatactgagatctggaagatgtgctcctgtacgctttggcgcttatacgggaagaacgccttaccctggtcgtcgtagctctagacgagacgagctttttatcaaaccccttttcgatgagttttacaataaactcgcaaataacgcccctgtacgtgcggaactgaaccgcattggtcgctggccaagtaaagatcttgatgctttttatgggcaaagcgcatctcaggctaaaacctacgtctcaggcaaaaaaacgggtaagcaatttgttttgaacaattggggggagaggctaattacccagcctgaggatcgtgagctaatgacccggcatgaaatgcagaatcgctgtccagaattactgataacgaactactccatgcttgagtatatgctgatgcgacctatcgagcgtaatatttttgagcagactaaggaatggctcaaagctgatgagatgaatgagcttatcttagtgcttgatgaagcgcatatgtatagaggagcagggggagcagaggtagcccttttaatacgtcgcctctgtgctcggttggatattccccgggaacgtatgcgctgcatccttaccagtgctagtctagggtccattgaggatggagaacgttttgcccaagacttaactggcttatcaccaacctcttcgaggaaatttcgaattattgagggtacaagggaatcgcgtcctgagtcacaaattgttaccagtaaagaagctaatgcactggctgaattcgacctaaattcatttcagtgcgtagctgaggatcttgaatctgcatatgcagcaatagagtctcttgccgaacgaatgggctggcaaaagccgatgataaaagatcatagtacactacgtaattggttatttgataatttgactggttttggtcctattgaaacgcttattgaaatagtttcaggtaaagcggttaagctaaatatcttgagtgaaaacctttttccagactctccacagcaaattgcagagcgagcgacagatgcattactcgcattgggttgctatgctcagagggcatccgatggcagagtgcttattccaactcgcatgcatcttttttatcggggattaccaggtctttatgcctgtatagatcccgattgtaatcaacgtttgggtaaccatagtgggccaactatacttggccgcctttatacgaaaccactggatcaatgtaaatgcgcttcaaaagggcgagtctacgaattatttacccaccgtgactgcggtgcggcttttattcgtggatacgttagttccgaaatggactttgtatggcaccagccgaacggaccattatcagaagatgaggatatcgatcttgttcccatagatatattggtcgaggaaacacctcatgtacatagtgattaccaggacagatggctacatatagcaacaggacgcctttctaaacagtgtcaagatgaggattctggttatcgtaaagtctttatacctgaccgagttaagtctggatctgaaattacatttgatgaatgccctgtttgtatgcgtaagacaagaagtgctcagaatgaaccgtctaaaattatggatcatgttacaaaaggggaagcaccttttacaacgttagtacgtacacagatatctcaccagccagcgagtcgtcctattgatggtaaacatcccaatgggggaaaaaaagtacttattttttctgatggccgacaaaaagcagctcggcttgcacgtgatattcctagagatattgagcttgatttgtttcggcaatccattgctctcgcctgttctaaactgaaagatatcaatcgggaacccaaaccaacatcagtactttaccttgctttcctatcagtcctttctgaacatgacttgcttatttttgatggggaagattcacgaaaagttgtaatggcccgtgatgaattttatcgtgattataatagcgatctggctcaagcttttgatgataacttcagtccccaagagtcaccgtcacgatataaaatagcgttgcttaaacttttatgtagcaattactattctctttccggaacaacagttggttttgttgaaccatcgcagcttaaatcaaaaaaaatgtgggaagatgtgcagtccaagaagctaaatattgagagcaaggatgttcatgctttagctgttgcttggattgataccttactcactgaatttgcttttgatgaatctattgattcgacactacgaatcaaagccgctggattctacaaacccacttggggtagtcaaggacggtttggaaaagctcttaggaaaaccctgatacagcatcctgctatgggggagctttatgtggaagttttggaggagatttttcgtactcatctgacattaggaaaagatggtgtctactttcttgctccaaatgcactacgtctgaaaatagatctcttgcatgtctggaaacaatgtaatgactgcacggcactaatgccatttgctttagaacattctacttgccttgcttgtggtagtaacagtgtcaaaacagtcgagccgtcggaaagcagctatattaatgcacgaaaaggattctggcgttcgccggtagaagaagttttggtttcaaattcgcggcttctaaaccttagcgttgaagagcatactgctcaactctcacatagagatagggccagcgttcatgccactacagaactctacgaactgagattccaagatgttcttattaatgataacgacaagcccattgatgtacttagttgtacgacgacgatggaagtgggggttgatattggatctctggttgctgttgctttaagaaacgtccctccgcaacgagaaaattatcagcaacgtgctgggcgagcaggccgccgtggcgcatctgtttcaacggtggttacatattctcaaaatggccctcatgatagttattatttccttaatcctgaacgcattgttgcaggttctcctcgtacacctgaagtgaaagtaaataatcccaaaatagccagaagacacgttcattcttttttagttcagaccttttttcacgagttaatggaacaaggaatttataatcccacagagaaaactgccatacttgagaaagcacttggtactacacgagatttttttcatggagcaaaagatactggcctaaatctcgatagctttaataattgggttaaaaaccgtattctatctactaatggtgatttgagaacaagtgttgcagcatggcttcctcctgttcttgaaactggagggctttctgccagtgactggtttgctaaggtagcagaggaatttttaaatacactccatgggctggctgaaattgttccacaaattgccgctcttgttgatgaggaaaatgaagatgatgagcagacttctggtggaatgaaatttgcacaagaagaattacttgagttcctgttttaccatggtttattaccaagttatgcatttcctacaagcctctgtagtttcttggtagaaaaaattgtaaagaatattagaggttcttttgaggtgcgaacagtacaacagcctcagcaatcaatttctcaggctctgagtgaatatgccccgggacgtttgattgttattgataggaaaacctatcgctctggtggtgttttttctaatgcattgaaaggcgaactaaaccgggcaagaaagcttttcaataatcccaaaaagtttattcattgcgataagtgctcttttgtccgcgatcctcataataatcagaatagcgaaaatacttgtccgatctgtggtggcattctaaaagtagaaataatgattcagcccgaagtctttggacctgaaaatgccaaggaacttaatgaggacgacagagagcaagaaatcacctatgtaactgcggcacaatatccacaacctgttgatcctgaagattttaagttcaataatggaggtgctcatattgtttttactcacgcaatagatcagaaactggtgacggtgaaccgagggaaaaatgagggggggtccagtggtttttcagtatgttgcgaatgtggtgcggcctccgtttatgattcctactcaccggcaaagggggcacatgaaagaccgtataaatatatagcaactaaggaaacgcctcgcttatgctctggcgagtataaacgcgtttttctcggacatgatttccgtactgatttgcttttattacgaataaccgttgggtctccgcttgtaactgatacttcaaatgctatcgttttacggatgtatgaagatgcattatatacaatagcggaagcactaaggcttgcagctagtcgccataaacaactggatcttgatcctgctgagtttggctctggtttcagaattttacccactatagaggaagatactcaggcattggatctcttcctttatgatactttatctggcggtgcgggttatgcggaagtagcagcagcgaatctagatgacattcttactgcaacactcgcattgttagaaggttgtgagtgcgatacctcctgtacagattgtctcaatcatttccacaaccagcatatacaaagccgtctcgataggaaactaggtgcatctttacttcgttatgctctatacggaatggttcctcgttgtgcttcacctgatattcaggtagaaaaattgtctcaattgagggcaagtctggaattggatggttttcaatgcctaattaagggaactcaggaggcacctatgattgtgagtttgaatgaccgttctgttgcagtgggaagttaccctggtcttattgatcgacccgactttcaacacgacgtatataagtcaaagaatactaatgctcatatagcctttaatgaatatcttcttcgttcaaatctgccacaagcgcatcaaaatattagaaaattgttgcgctga

SEQ ID NO: 12657 - DNA, 1044 bp, Escherichia coli
atggagtggagagcagtatcacgagacaaagcactggatatgttatcaactgcattaaattgtcgatttgatgatgaagggttgagaatttcagcagtttcagaatgcttaaggagcgtattatatcaatattctatatctgaaacagaagaagctaggcaaactgtaacctcgcttcgactcactagtgcagtaaggcgaaaattggtacctttatggccagacattgctgatattgataatgctatacatccgggcattatgtctatattgaacagcttggctgaattgggtgacatgattaagttagaaggtggtaattggctcacagctcccccacatgcagtacgaattgacaataagatggctgttttttttggtggagagccttcctgtacattttcaacgggcgtggtagctaaatctgctggaagagttcgcttggttgaagaaaaagtgtgtactggaagtgttgaaatctgggatgcaaatgagtggattggtgccccagcagaaggcaatgaagaatggtcatccagactactatctggaactatttccggctttatcgatgcgcctagcaatatgagtgaaacgactgcatatgtgcggggaaaatggctccatttgtcagaactttcttttaataaaaagcaaatctacttatgcagaatgtccgttgataatcacttttcctattatttaggagaaattgaagctggacgcttatgtagaatgaattcgttagaatcgtctgatgatgtcagaagattacgtttttttctcgatacaaaagataattgtccgctaaagatccgtatcaaaatatctaatgggctagcaagattaagattaaccagaagattaccaagacgagaaacgaaggtactcctgctaggctggagagaatcaggttttgaaaatgaacattcaggaataacacaccatgtattccccgaggaaatattacccatagtgcgtagcgcttttgaagggcttggtattatttggattaacgaattcacgcgacggaatgaaatatga

SEQ ID NO: 12658 - DNA, 849 bp, Escherichia coli
  misc_feature (29)..(38): n is a, c, g, or t
atgaaaattatgaatatctttcatcctcnnnnnnnnnnatctaatagaatttcttcaaatttacaggctgttgggttaacaaaaaattcagcagaaacattggctagattgacattagctaccttcgtttctggacaaatcattcaattcagtggctctttggcagatattatcgcggatgcaattgccattgctattggtgcaccacgttatcacatatggagagttccagttggtattatttctgacatggattcttttgattttatagagactatagctgaatcatctcgctgtctccttttgaaaggggccaatctttcagcatttgagatttatggagcggcaattagagatatagttgttcaacggcaaatacatccaacaaattatgaccatctggcattgatagctacttggaaacaaggccctgctacattccctgatggaggaatgttggccgagttgggaccagttattgatactgatacattaaaaatgcgtggtttatctgctattttaccccaattgaaaccaggttgtcttgccaaggataaatggacaaatattgatggactacagcttgatagtgttgatgattatgtagatgaattaagagcattactggacgaagctggatttgatgggggaactttgtggaagagaatggttcatattttctatacttcactcataagagtccctaatggaaattatatttatgatctttattctgtcttgtctttttatactcttacatgggcaaaaattaaaggtggccccgtccaaaagatagaagatattgccaatcgtgaattaaaaaattatagtgcaaaaatatcttcttga

SEQ ID NO: 12659 - DNA, 279 bp, Escherichia coli
  misc_feature (264)..(273): n is a, c, g, or t
atgaatgacatttctgagcatgaaaaattgataaaaagtatggctaatgaaatttcagagttaaaaaatgcattaactatcttgtgtgataataaaagaaagaataacgagttagattatatcaatgaattaaaaaaactcactgaacgaatagatacacttgaaataaacacatctcaagctagcaaagtgagtgtcaccaatagatttacaaaattccatgaaatagcgcactatgaaaattatgaatatctttcatcctcnnnnnnnnnnatctaa

SEQ ID NO: 12660 - DNA, 1134 bp, Escherichia coli
atgcattcggaaaatattgcggcttacgtcgggctggatgtgcataaagaaacgttggcggttgctattgctgcacctgaacggcttggcgaagttcgttattatggtacgattaacaacgaagcccaggctgtacgtcgattatttcagaaattgcagggactttacggaaacattctttcctgctatgaggctggcccctgtggttttaggctatatcatcaactcacagcgatgaatataaaatgccaggttattgccccttcccgcataccaaaatcaccgacagacagaatcaaaaatgatcatcgggacgcaatttctctcgccaggttactgcgggctggagaacttacccctgtctggatccctgacctgactcatgaagctatgcgggatctaatcagagcccgtgcagcagctaaacgagacagcagagttgcccgacagcgaattctgagcatgctattgcgaacagacaaacattatgcaggaaagcactggacaggaaaacatcgaacctggttagctaatcaatcatttagtcagccatctcaacagattgcttttcaacactattgtcaaagtctggagcagattgaagatcgcatacttcaactcgaccaggaaatatctcgcctgttacctgagtggtctctgtgcaatctggtctgccagttgcaggctcttaaaggtgttggtcagctaattgcaataactctggttgctgaactgggtgatttttcgcgattttccaatcccaaacagctcatggcttttctgggactggtgccaggtgaatattccagtggaaacagtattcgtcccagaggaataacaaaagttggaaacagcgaactgagacgtctgctttacgaagccgcctggtcttatcgtacacctgcaaaagttggggcatggcttatatattaccgaccggactctgtaacacaatattccaaagatattgcatggaaagctcaacaacgattgtgttctcgttaccgaagtctgacagcaaaagggaaaaaatcacaagtagccattacggcggtggctcgtgagttgactggatttatgtgggatattgcacttgctgcccaatcatcattcagtcagcagaagcaaaattaa

SEQ ID NO: 12661 - DNA, 894 bp, Escherichia coli
atggtactttctgattgttattcatgggataacgagcagtctggacatgcccgtctcggtgatccgcgtcgtacacgacgccttgtgtcactgacctcttctctcgctcagcatgcaggtctttctattgtgaaatcatcccagtccactgctcaggttgaaggtgcgtaccgcctgatacgtaacccgtctgtgtccccgcaagccattgccgaagccggatttaccgccactgtaagggcatgtgaggctcatccgctgctcctcgcactggaagacaccaccaccattaacttcagccacagtacggcatctgatgaccaggggaataccaccactaacccgaagacgcgcgggctgctggctcactctgtcctgatgtacgcccctgacagcgccctgccagtcggttttatcgaacagcagcgctggagtcgggtcacggacacctacggtgttaagcaccagcgaaaagaacgtccctgtgaagaaaaagaaagttaccgctggcagcaggcttcggagcgtatggccgaacggctgggggagatacagaaacgggtaatcactgtctgtgaccgggaagcggatatctggcattacctgcattataaagtcagccacggacagcgcttcgtggtgcgtgctgcacagaatagccggctggaagaagcacccggcaagctcttcgaactgccggaagtcctggcaaccgcgggaagccacacgctgaatgtgatgcaaaaaggagggcgggcagcccgccaggcccggatgttcatcaggtacagcgaagtcagcataaaaatcgcgacaacagcggccaggcgctcccgctcacgtatgtctgttgccgggagcagtcagaggacggtgcctgctggcatctgctga

SEQ ID NO: 12662 - DNA, 345 bp, Escherichia coli
atgcagacccgggataaccttgagcgcatggtggttatcaaggcgtttatcgcggtacggatgctgggcctgcggcaggaaggtatcagtgaagaaacacaaaatgacagctgtaagaaaatactgacgccgacagagtggaaactgctgtgggttaagctggaaggaaaacagcttccgtcacagacgccgacactgaaatgggcctgtctgaaactggggcgatggcatgacagcaaacgcacaggccgccctggttgggtagttatgtgggatggctggttcagacttcaggatatggttgagggttatccggtgatgaagtctcttgatcaggagatctga

SEQ ID NO: 12663 - DNA, 525 bp, Escherichia coli
atgaaaaagataagaggtttgtgtcttccggtaatgctgggggcagtgttaatgtctcagcatgcacatgcagctgataatctgacctttaaaggaaaactgattattcctgcctgtactgtaacaaaggcagaggttgactggggaaatgtagagattcagacattgagcccagatggaagcggacatcaaaaagacttttctgtcggtatgaactgcccctatagcctgggaaccatgaaagtcacaataacatcaaatggtcagactggtaattcgatactggtgcctgatacttcaagcgtttctggtgatgggttgctcatttatctttacaacagtaataacagtagtattggtaacgcagtcactttaggaagtcagtttacgcccggaaaaatcacgggagtagggctgtctaaaaatattactctttacgcaaaacttggatataaaggggatatgagaaagctgcaggctaaagcattttctgcaacggcaacgctggttgcatcatattcgtaa

SEQ ID NO: 12664 - DNA, 537 bp, Escherichia coli
atgattaagtcagttattgccggtgcggtagctatggcagtggtgtcttttggtgtaaatgctgctccacaggggcagggaaaagtaacttttaacggaactgtagtagatgcaccatgtggtattgatgctcagtcagctgatcaatctattgagtttggtcaggtttctaaagttttactgaataatggtggatcctcaacgcccaagaattttgatataaaacttaccgattgtgatgttactaactataagaaggctggtaaagcggggactgtatctctgacattctcaggggttcaagctggtaccgatatgttgcaaacagttggtacgactaatacagcaattcttgttacagatcctcatggcaaagcagtaaaatttgatggaacaacagcgacaggtgtgtcaagtcttgtcgatggggataatacaatccattttactgccctagttaagaaagacacaagtggcaatgatgtagctgaaggtgccttctcagcagttgcgaatttcaaccttacttatcagtaa

SEQ ID NO: 12665 - DNA, 465 bp, Escherichia coli
atgaatgcacgaaaagcggtactggcagacaatccggaattgatcctgcgtgtgctacaactgagatttgacgagtcactgtcgtacccgcgcatttctgcgcagaccggtatcagcaaaaccgccattttttctctagtgaggcgatttcaccaggtattcactgactggcctctttccggggaatattcctgcgtgcaactggcccgggctctgttcccggggcgatacccttcagccccgacagtaactcagactgtgaaaacagagaaaacccgccggaaccaattttcaccggagtttaaatggagacttgttcagcaaactcttttacccggtgcctgtgtcgcacaaatagctcgtgagaacggaatcaacgataacctgctctttaactggggcatctctggcgtaacggcggcctgcagtcgcccggcgaacatgaaacatcgctacttcccgtga

SEQ ID NO: 12666 - DNA, 621 bp, Escherichia coli
atgactcagcgtaagaacggtataacccagcatatctcggtcatgaaagcgggtatctcagtccgttctggtcgtcggttcgaaaaaggccagagagcaaaaaatagtgttcggcactggcgcacacgcaaagatcctctggaagcagtgtgggacagcatgcttgttcctctgttgaaagagaggcctgctctgacaccaacaactctgctggagatgctacaggataaatatcccggtcagtaccccaaaagccttcgaagaacaatgcaacggcgggttcgcaaatggaagctacagtctggtgcagagcaggaggtcatgttccgccagtggcatcagcccggtctgcgaggcctgttggattttaccaaactgaaaggtgtggtggtcaccatcgccggtaatttgttggcgcataagttgtataacttccgtctggaatggagccactggagctggatgcgagttgtgctgggtggtgagatcttctctgctctggctgaaggtttgcaggaagccctcggacaactgggtggagtgccggcagaacataaaacggacagcctgagggcggcatggaaacaacaaggcaaaagatggacgctgcgagttgactga

SEQ ID NO: 12667 - DNA, 600 bp, Escherichia coli
atggctccggaggactggctgcaggcagaaatgcagggtgagattgtggcgctggtccacagccaccccggtggtctgccctggctgagtgaggctgaccggcggctgcaggtgcagagtgatttgccgtggttgctggtctgccggggggcgattcataagttccgctgtgtgccgcatctcaccgggcggcgctttgagcacggggtgacggactgttacacgctgttccgggatgcttatcatctggcggggattgagatgccggattttcatcgcgaggatgactggtggcgtcacggtcagaatctctatctggataatctggaggccacagggctgtatcaggtgccgttgtcatcagcacaaccgggcgatgtgctgctgtgctgttttggttcatcggtgccgaatcatgccgccatttactgtggtgatggcgagctgctgcaccatattcctgaacaactgagcaaacgagagaggtataccgacaaatggcagcgacgcacacactccctctggcgtcaccgggcatggcgcgcatctgcctttacggggatttacaacgatttggccgccgcatcgaccttcgtgtga

SEQ ID NO: 12668 - DNA, 156 bp, Escherichia coli
atgattttcttatatctcagggcacatcatcatcttgttctgattatgagtgatacatctaatcggttgaatgttgctgtaatgctcgcttttgatgcttatatggcagcgttaccgtttattgttttagttacaaattggtcgtcatggacataa

SEQ ID NO: 12669 - DNA, 441 bp, Escherichia coli
atgagcaagaagaagttttctgttgagaatgaagatctcgctactgttcgtacatcacttcttaattccaaccttgtccggaagttgatcatggaaatgtctgatgaagacttcaatcaagttaaggataaccttgaaaaggccattgagcagcgtaatgagttgaaggattctttggcaattatcaaaaagtacatggatgacgcaggtgtaacggcggaagatgtgtatcgtgaatttggcaaaaaattacagacgggcagaaaaaacgattcaggagagtctaataagtacaggtatgagtataacggtcaaataatgtactggagtggacaaggtcgtcggccttctgttattgcagaagcaataaaagccggaggttctcttgatgattttcttatatctcagggcacatcatcatcttgttctgattatgagtga

SEQ ID NO: 12670 - DNA, 180 bp, Escherichia coli
atgattgatgcctcaggaccggagaaactcagacggcgtactgcacaggaaaagatcgctaatgttcagaagagctttgaaccaggaatgatggtctccctcgttgcccggcaacatggtgtagcagccagttacttctctggcgcaagcaataccaggagggaagtcttactgcggtga

SEQ ID NO: 12671 - DNA, 219 bp, Escherichia coli
gtgatctatacgacaaatgccatcgagtcactaaacagtgtgatccgccatgcgatcaaaaagcgtaaagtgttcccgacagacgactcggtgaaaaaagtggtgtggctggcaatccagtctgcgtcccagaaatggacagtgccattgaaggactggcgtatggcaatgagccgctttattatcgagttcggtgaccgcctgaacggtcacttctga

SEQ ID NO: 12672 - DNA, 264 bp, Escherichia coli
atgacctgctccccgttgtttcacacaaaatcgtgtacagggtcgaagttctggctcaatgtgctggctgaactgaaaaacagcggcctgaacgatatccttatcatctgtgcagatggcctgaaaggcttcccagatgccatcaacacagtatattcggagacccacatccagttatgcatcgtgcatatggtgcgcaacagtctgcgcttcgtgtcatggaaggactacaaagccgtcactcgcgacctgaaagagatttaa

SEQ ID NO: 12673 - DNA, 513 bp, Escherichia coli
gtgcaaataaccgaagccttactttcagagccgggggaaatccggcgttttgttcagcaggcggtggatcactggccgcatctgctggcaatccacttcacacttcattcgacagaaggatacatcaacgggcaacagattcagacattctgtagttcctttcaccgacgggtgcacgaacgtattacggagcgtaatcacactgcctgtccatcctcgccggtggtattacgctggttgcaggaacaacatagaggagcaacaatgcgatgcctgttgctgctcagccagacgagcatttgccatccgcgggccagtgtcacagttgatgaagcatgttcgcaagtggcggatttactgcaacagacctggccggtgataagcgctggcggacaatgccgggtggaaggctgttttcgggttgtccggcctgatacatcagagcaatacgttgcgttaaaaactgctgttcagtctctgatgccacggggtattgcaacaatcatccggtga

SEQ ID NO: 12674 - DNA, 357 bp, Escherichia coli
atgttgactacaacaagccacgacagcgtatttctgcgtgccgataattccctgattgacatgaactatatcaccagtttcaccggtatgaccgacagagggttttataagctgatcagtgaagattcatcaagccgggccgatccagccgcaggtataaaagcgaagtgtcacagtagatacagtaacgaatcgaagaatcacgggggcagaagtatgaaacgtgttgtgataccggtacgctggcaatgttcaacgtgtcagcgctggtattgtggcgctgttccctggtgctggttcccccgtgaatcttcctgcgtcccctccggtcagccggcactttgtcatcctgactga

SEQ ID NO: 12675 - DNA, 567 bp, Escherichia coli
atgtatacagaatcaaacgttaagctttccagtaacgccctctggcaaaagtgtgtccttgcaactctgtatcgggctgcagccacacatcctgaaattaaattattacaatttaaattaataccttgccctggtattaataaggccattccctctctgatggcggattttactggtgaactgcatagactcatttctgaatatttgcagtgtaggcgacgtaaagataaatctgttgagcccacccctttatattatctctggagtagggaggctgtggctaacgataccactccttatcttatggtgctgctacttaataacgatgtctggtgtaagagtcgtgaggtggtggttctcagaaatctgattgagcaggcgtggggaaaagtattgggtgaagataactccattacacatctggttgtgtatcctgaagtgctgtcgttggtatttgatgcagctaacacatacaacgctgagcctggtgtactggaacagacagcccgggcttacattgaatcgcatggtgctgttgaacgtcatcttgggtgtagtgacttttaa

SEQ ID NO: 12676 - DNA, 426 bp, Escherichia coli
atgaacggtataaaaacggggctggggatcacgccgggtgaacacattatcagtgctgattctgcgctcagcagaaatatccggcagtgtttctgcctttcctgtcatggccggttgattttgcagacagatgctcagggggcgtggtttgagcatgatttatatgccctgagcgagcaacagaaggcggcctgcgtggcgctgaatccggagaagtcccacccttacattgaggatatggcgatgtttttatcgccattaccggtcgtgctggagtggcattgtgtgatgtgtgagcagttttttcatgggaagaaattctgtgaggcctgtggtacggggatttattgcagagcggtatgtacgaagtctgtttacagctaccagccagacttgtttcaggactgcggaggtgcgagtacttaa

SEQ ID NO: 12677 - DNA, 570 bp, Escherichia coli
atgacctacaaatacaaccccttctggcagcaacgtattcgtgagatggtgctgtgcgcactgaatgttcatccccgcctgacggcacttcgggttgatctgcgtctcccggatgtaccggcagctacggatgcggctgtgatatcccgcttcatcaatgccctgaaagcccgaatcgatgcttaccagaagcgtaagcggcgtgaaggtaaacgcgtacatcccacgaccctgcattacgtctgggcccgggagtttggggagtgcaaaggtaaaaaacactatcacctgatgctgctggtcaaccgggatacctggtgtcgtgccggtgattaccgcgctccggggtcactggccgggatgattaaacaggcgtggtgcagtgccctgggggtggataccggagatcataccacgctggcgcattttcctgacacgccggcggtgtggctggaacgcgatgatgacaccagctttcagcaggtgctggagcgtgctgactatctggcgaaggagtgtaccaaagcttacggcaccggtgagcgcaactttggctgcagtcgtggctga

SEQ ID NO: 12678 - DNA, 1494 bp, Escherichia coli
ttgaaaggaaatattgacctttctgacagcaaatcttctacgttattgaaatttgttacgccattgttaactcccggtgaggaaattcgtgaaaggaggcagtccggaaaatatgaatatattaccgagttattagtcaagggtgttgataaatggacggtgaagggggttcaggacaaggggtctgtatatgattactctaacctgattcagcatgcatcagtcggtaataaccagtatcgggaaattcgtattgagtcacacctgggagacggggatgataaggtctttttatctgccggctcagccaatatctacgcaggtaaaggacatgatgttgtttattatgataaaacagacaccggttatctgaccattgatggcacaaaagcaaccgaagcgggtaattacacggtaacacgtgtacttggtggtgatgttaaggttttacaggaagttgtgaaggggcaggaggtttcagttggaaaaagaactgaaaaaacgcaatatcggagttatgaattcactcatatcaatggtaaaaatttaacagagactgataacttatattccgtggaagaacttattgggaccacgcgtgccgacaagttttttggcagtaaatttactgatatcttccatggcgcggatggtgatgaccatatagaaggaaatgatgggaatgaccgcttatatggtgataaaggtaatgacacactgagtggtggaaacggagatgaccagctctatggcggtgatggcaacgataagttaattgggggagcaggtaataattacctgaacggcggagatggcgatgatgagcttcaggttcagggaaattctcttgcaaaaaatgtattatccggtggaaaaggtaatgacaagctgtacggcagtgagggagcagatctgcttgatggcggagaagggaatgatcttctgaaaggtggatatggtaatgatatttatcgttatctttcaggatatggccatcatattattgacgatgatggggggaaagacgataaactcagtttggctgatattgatttccgggatgtggccttcaggcgagaaggtaatgacctcatcatgtataaagctgaaggtaatgttctttccattggtcataaaaatggtattacattcaggaactggtttgaaaaagagtcaggtgatatctctaatcaccagatagagcagatttttgataaagacggcagggtaatcacaccagattcccttaaaaaggcacttgagtatcaacagagtaataataaggcaagttatgtgtatgggaatgatgcattagcctatggaagtcaggataatcttaatccattaattaatgaaatcagcaaaatcatttcagctgcaggtaattttgatgttaaagaggaaagagctgcagcttctttattgcagttgtccggtaatgccagtgatttttcatatggacggaactcaataactttgacagcatcagcataa

SEQ ID NO: 12679 - DNA, 2124 bp, Escherichia coli
atggattcttgtcataaaattgattatgggttatacgccctggagattttagcccaataccataacgtctctgttaacccggaagaaattaaacatagatttgacacagacgggactggtctgggattaacgtcatggttgcttgctgcgaaatctttagaactaaaggtaaaacaggtaaaaaaaacaattgaccgattaaactttattcctttgcccgcattagtctggagagaggatggacgtcattttattctgactaaagtcagtaaagaagcaaatagatatcttatttttgatctggagcagcgaaatccccgtgttctcgaacagtctgagtttgaggcgttatatcaggggcatattattcttattgcttcccgttcttctgttaccgggaaactggcaaaatttgactttacctggtttatccctgccattataaaatacagaaaaatatttattgaaacccttgttgtatctgtttttttacaattatttgcattaataaccccccttttttttcaggtggttatggacaaagtattagtacacagggggttttcaacccttaatgttattactgtcgcattatctgttgtggtggtgtttgagattatactcagcggtttaagaacttacatttttgcacatagtacaagtcggattgatgttgagttgggtgccaaactcttccggcatttactggcgctaccgatctcttattttgagagtcgtcgtgttggtgatactgttgccagggtaagagaattagaccagatccgtaattttctgacaggacaggcattaacatctgttctggacttattattttcattcatattttttgcggtaatgtggtattacagcccaaagcttactctggtgatcttattttcgctgccctgttatgctgcatggtctgtttttattagccccattttgcgacgtcgccttgatgataagttttcacggaatgcggataatcaatctttcctggtggaatcagtcacggcgattaacactataaaagctatggcagtctcacctcagatgacgaacatatgggacaaacaattggcaggatatgttgctgcaggctttaaagtgacagtattagccaccattggtcaacaaggaatacagttaatacaaaagactgttatgatcatcaacctgtggttgggagcacacctggttatttccggggatttaagtattggtcagttaattgcttttaatatgcttgcaggtcagattgttgcaccggttattcgccttgcacaaatctggcaggatttccagcaggttggtatatcagttacccgccttggtgatgtgcttaactctccaactgaaagttatcatgggaaactggcattaccggaaattaatggtgatatcacttttcgtaatatccggtttcgctataagcctgactctccggttattttagataatatcaatctcagtattaagcagggggaggttattggtattgtcggacgttctggttcaggaaaaagcacattaactaaattaattcaacgtttttatattcctgaaaatggccaggtcttaattgatggacatgatcttgcgttggccgatcctaactggttacgtcgtcaggtgggggttgtgctgcaggacaatgtgctgcttaatcgcagtattattgataatatttcactggctaatcctggcatgtccgtcgaaaaagttatttatgcagcgaaattagcaggtgctcatgattttatttctgaattgcgtgaggggtataacaccattgtcggggaacagggggcaggattatccggaggtcaacgtcaacgcatcgcaattgcaagggcgctggtgaacaaccctaaaatactcatttttgatgaagcaaccagtgctctggattatgagtcggagcatgtcatcatgcgcaatatgcacaaaatatgtaagggcagaacggttataatcattgctcatcgtctgtctacagtaaaaaatgcagaccgcattattgtcatggaaaaagggaaaattgttgaacagggtaaacataaggaactgctttctgaaccagaaagtttatacagttacttatatcagttacagtcagactaa

SEQ ID NO: 12680 - DNA, 1437 bp, Escherichia coli
atgaaaacatggttaatggggttcagcgagttcctgttgcgctataaacttgtctggagtgaaacatggaaaatccggaagcagttagatactccggtacgtgaaaaggacgaaaatgaattcttacccgctcatctggaattaattgaaacgccggtatccagacggtcgcgtctggttgcttattttattatggggtttctggttattgctttcattttatctgttttaggccaggtggaaattgttgccactgcaaatgggaaattaacactcagtgggcgtagcaaagaaattaaacctattgaaaactcgatagttaaagaaattatcgtaaaagaaggagagtcagtccggaaaggggatgtgttattaaagcttacagcactgggagctgaagctgatacgttaaaaacgcagtcatcactgttacaggccaggctggaacaaattcggtatcaaattctgagccggtcaattgaattaaataaacttcctgaactgaagcttcctgatgagccttattttcagaatgtatctgaagaggaagtactgcgtttaacttctttgataaaagaacagttttccacatggcaaaatcagaagtatcaaaaagaactgaatctggataagaaaagagcagagcgattaacaatacttgcccgtataaaccgttatgaaaatgtatcgagggttgaaaaaagccgtctggatgatttcaggagcctgttgcataaacaggcaattgcaaaacatgctgtacttgagcaggagaataaatatgttgaggcagcaaatgaattacgggtttataaatcgcaactggagcaaattgagagtgaaatattgtccgcaaaagaagaatatcagcttgtcacgcagctttttaaaaatgaaattttagataaactaagacaaacaacagacagcattgagttattaactctggagttagagaaaaatgaagagcgtcaacaggcttcagtaatcagggcccctgtttcgggaaaagttcagcaactgaaggttcatactgaaggtggggttgttacaacagcggaaacactgatggtcatcgttccggaagatgacacgctggaggttactgctctggtacaaaataaagatattggttttattaacgtcgggcagaatgccatcattaaagtggaggcctttccttacacccgatatggttatctggtgggtaaggtgaaaaatataaatttagatgcaatagaagaccagaaactgggactcgtttttaatgtcattgtttctgttgaagagaatgatttgtcaaccgggaataagcacattccattaagctcgggtatggctgtcactgcagaaataaagacaggaatgcgaagcgtaatcagctatcttcttagtcctctggaagagtctgtaacagaaagtttacatgagcgttaa

SEQ ID NO: 12681 - DNA, 435 bp, Escherichia coli; identical to SEQ ID NO: 5090

SEQ ID NO: 12682 - DNA, 621 bp, Escherichia coli
atgaccacatttaccgataaagaactgattaaagaaatcaaagaacgaatcagcagcatggacgtgcgagacaatgttgagcgccgtgcttatgaaattgctctggcatcgctggaagaggatccggtggcatggctgcattcagacaatggcttaggtattccggcaataaccaggagcaaaaacattgctgacagttggttatcaaagggctggtatgttcagccgctatatatggctcagccagtgtcggtggtgccggatgctcttccgtctttaaataatggcatagtcggctttgatgaaggctggaacgcctgccgcgccgccatgcttcatggtgccaaacctgtaagccagacttacaagttgaacgagctgtcgggcaactctccggtaactccggatggttggataagctgtagtgagcgaatgccgaacgataaacagtatgtttggtgttgggggaagtcttacggctggactgagtgcgataccttcgaagggtattacgattggtcgagaaacaaatggtgggcagttactgacgatgtggaagaaccggcatcgaaagtaacccactggatgccgctaccggagccgccgcaggaggtaaagtaa

SEQ ID NO: 12683 - DNA, 552 bp, Escherichia coli
gtggacacttggagtttgagaaaaatagcaagaattcctcctatcgtaattctgagtgcatgtttaacatctgccctaagtggttctcatgcctctgttgctaatggcttcgttataagtggtgcattaagtgtcatcggaacattactgccagtaaatgcgatagactctgctgtttttgtaagtcggttgatctaccggttttacgagtttccttcgacgctatctacaaattttacacatgttaatgtaaggctttttctttctgtttttcttaggatgtcctatgcaagcgatttaataagaggatttttatctgaagatttgataccgaataattcatgggagaaagatgcagttgatattaacatgtatataaacatgcttcaccatgattggtatgattatgtaattaacaaattgacgatgttaacggggctcacgaaaaaagatgtacttgattttatcgatagaaaattattcataaccgaaactatgtgctatagccaaattggatttccagatgcaatcacaattagtcttaaagattga

SEQ ID NO: 12684 - DNA, 1527 bp, Escherichia coli
atggaactgttacaggaacacggggcgatacttaaagttgtaatcatgcctactactggggaacaaaccataatccaaggtttcgatactggcctcctcaacccagagatatctaacattctttttttattggccaaaacaccaaaagaaattagtgagatttttgtcaatgaaaatgataactttcagcctactctaagcgggctaaatcctatttttttaatatctaaagaaaatcttgaaaaaataccaaatatttatcaaacgccattttgcttaattttttgtgctaaagaagatttttcgtatgtttgtgctttaaaaaaacattttgctataccacctataatttgttgcaattctaaacgcgctgatctaccacttaataagattaatagtatatactcatttgataagatgctcttctctcggttgaaattcattgaggataaaataagaaaaaatcacagtgaaaagaaaatatcaacgaagttgaagcgaagaggggctttatttaataaatcaccttggagatcgacgcttaacaattcaacactacccaatgagttgttaattgaatcacttggctatatgctatctccaccaaaaagaattaaagatggtagtagcaaaagagagtttatagaaataatacttcatagcgttgatgcatacaccgaatgtttaaaggaattagatataccacttccaacggaagtcttactttttgctccgggtatgcactcttttttatatgataaaaataatgacttttatgagttaataacggaaaatttatccacaattgagaaaaaattccttattgatggagtgttgaggaatccaggctattctggaattagacttgatataaattcagatagaaaagaactttttaaaagtcctgctttccgttacctcacctcactaagacgcgctgaaatgcgattaacaacagctgcgattactttatttagcataaataaaaaaatcccagcaataagattgccaaatgcaataaatcattactccaattatttgaaaaatcttgaagatctttcaacttcttctgggataaatagtgaagcattcatcactaaatctaaagcattcaatactgttattcgaagagcccttggttgcaagttgagaacatatataagtaaaaactatagcgatttgtcctttgtttgtgatgtaccattggattggattaggtttaataacatacctataatgttcagtcatgagatatcaagaataaatgctacgcctggtaacgttcttctacagagcgcctctgcttttccgcgcgttttagtaaaagcatctgagttgagaaaggttttagttatacgttcttttgagcctgatgatcacttaaagttcatattagagaacgcaattgagatatttaaaaaacagatgccagatcttgattgcgagattattgatgttagatcgaaagctgagtttattgatgctctaaggtcatattcttgttatggattgtcatggaaaccatga

SEQ ID NO: 12685 - DNA, 1926 bp, Escherichia coli
gtgaatatatcgaacagtcaggttaacaggctgcggcattttgtccgcgccgggcttcgctcactgttcaggccggagccacagaccgccgttgaatgggcggatgctaattactatctcccgaaagaatccgcataccaggaagggcgctgggaaacactgccctttcagcgggccatcatgaatgcgatgggcagtgactacatccgcgaggtgaatgtggtgaagtctgcccgtgtcggttattccaaaatgctgctgggtgtttatgcctacttcatagagcacaagcagcgcaacacccttatctggttgccgacggatggtgatgccgagaactttatgaaaacccacgttgagccgactatccgtgatattccgtcgctgctggcgctggcaccgtggtatggcaaaaagcaccgggataacacgctcaccatgaagcgttttaccaatgggcgtggcttctggtgcctgggcggtaaagcggcaaaaaactaccgtgaaaagtcagtggatgtggcgggttatgatgaacttgctgcctttgatgaggatattgaacaggaaggctctccgacgttcctgggcgataagcgtattgaaggctcggtctggccaaagtccatccgtggctccacgcccaaagtgagaggcacctgccagattgagcgtgcagccagtgaatccccgcattttatgcgttttcatgttgcctgcccgcactgtggggaggagcagtaccttaaatttggcgacaaagatacgccgtttggcctcaaatggacgccggatgatccctccagcgtgttttatctctgcgagcataatgcctgcgtcatccgtcagcaggagctggactttactgatgcccgttatatctgcgaaaagaccgggatctggacccgtgatggcattctctggttttcgtcatccggtgaagagattgagccaccggacagtgtgacctttcacatctggacggcgtacagcccgttcaccacctgggttcagattgtcaaagactggatgaagacgaaaggggatacgggaaaacgtaaaaccttcgtaaacaccacgctcggtgagacgtgggaggcgaaaattggcgaacgtccggatgctgaagtgatggcagagcggaaagagcattattcagcgcccgttcctgaccgtgtggcttacctgaccgccggtatcgactcccagctggaccgctacgaaatgcgcgtatggggatgggggccgggtgaggaaagctggctgattgaccggcagattattatgggccgccacgacgatgaacagacgctgctgcgtgtggatgaggccatcaataaaacctatacccgccggaatggtgcagaaatgtcgatatcccgtatctgctgggatactggcgggattgacccgaccattgtgtatgaacgctcgaaaaaacatgggctgttccgggtgatccccattaaaggggcatccgtctacggaaagccggtggccagcatgccacgtaagcgaaacaaaaacggggtttaccttaccgaaatcggtacggataccgcgaaagagcagatttataaccgcttcacactgacgccggaaggggatgaaccgcttcccggtgccgttcacttcccgaataacccggatatttttgatctgaccgaagcgcagcagctgacggctgaagagcaggtcgaaaaatgggtggatggcaggaaaaaaatactgtgggacagcaaaaagcgacgcaatgaggcgctcgactgcttcgtttatgcgctggcggcgctgcgcatcagtatttcccgctggcagctggatctcagtgcgctgctggcgagcctgcaggaagaggatggtgcagcaaccaacaagaaaacactggcagattacgcccgtgccttatccggagaggatgaatga

SEQ ID NO: 12686 - DNA, 207 bp, Escherichia coli
atgacgcgacaggaagaacttgccgctgcccgtgcggcactgcatgacctgatgacaggtaaacgggtggcaacagtacagaaagacggacgaagggtggagtttacggccacttccgtgtctgacctgaaaaaatatattgcagagctggaagtgcagaccggcatgacacagcgacgcaggggacctgcaggattttatgtatga

SEQ ID NO: 12687 - DNA, 465 bp, Escherichia coli
atggctgccgctgtaaatcagcgtgatttccacgccctgtttctccagggcagcaccgtaattactgtgagccatcatgacgccgatggagcctgtccgggcggtctgcgtgaccagacgccgggaggcggcactggcaagcagctgacctgcactgcagttcatgtcgttggccagcgcccataccggttttatgtcacgcacacgggcgatgatgtcagcgcagtcaaatgcccccgccaccattccgcctggcgtgtccatatcgagcagaatgccgtccaccatcgggtcgctggcggcctgttgcagacgggcgataatgccgttgtaaccggtcatccccgagtacggctgcagcgcccgcgtccggctgaccagcgtgccggacaccggcagcacggcgatgccgttcatgacctgataactgcgggcctgtcgtggtccgtcatcatcaccggataa

SEQ ID NO: 12688 - DNA, 222 bp, Escherichia coli
atgtgcatccagtgcatcacgcatgacggtgatcgcatcggtgctgttaacaagttcatcagccagtccggcatcaatggcctcctgaccgctgtacactgcagcctcggtatccagcacagcctgcacagacaggccggtatatgccgacaccttctgcgcaaacatccggcgggttgcatccatccgggactgcagtgtctcccggacatcatccggtag

SEQ ID NO: 12689 - DNA, 396 bp, Escherichia coli
gtgtctgaaaagacagaacttgagatagcaaaacagacgcttaaaaacagtaaagatccggcagaacgtgaaaaggtacagcagaaatatgatgcattgcttgaaaaagatattgccagtgataaggaggttattgctgcctgcagtaatggtaatgcggggagttcagcgtgtgctagcgcaaggctgaaagttattgcgtcgaaagaagggtacgaagatggcccttataactcgaaatacagccagcaatacgctgatgcgtatggccttctgccagcgctcgtttttccagagcgtgccattcagctccaactcgtgtcaggcgtagtttacgcaggctgcgttcaaggtgatggatattgctcactgcgaaccgcccttgccacgcagtag

SEQ ID NO: 12690 - DNA, 192 bp, Escherichia coli; identical to SEQ ID NO: 12354

SEQ ID NO: 12691 - DNA, 633 bp, Escherichia coli
gtgtcagcagggctggcctgcggtcttaccggaaacagcaccgcatcagcagcagtgggagcacaaagcgggaagaatgctgttgagaataactcactcagtgatggctggaacaatatcctgccatcaggaacacaggattacggacaggccgtagcctcgtggaatcagtatgctcaggacaataatctgacaccggagcaggttcaagaagggatgaatcgtatagctattggtgaagggccttcttgggggacaacatataaagtacacccggtagttcaggctggcggtgatgttagctttatccggggttatactttaagcggaactatagatgacaatcatatttcagttaatcaaggggatatttatagtataggtgctcatggcggagcctcgatcggattatcctttggcccgtatttcccgggattaataaattcaaatgataacgattattcgataaatggtggttttggcgttggtgcagtggggctttctacgggtaaagatggtgttagtttcacttttggttttggcccaagttggggttggagtgcaactgaaattaaaggcgttgacgttaatggcacttcaacaagtgaggtttatcgatatgattttaaataa

SEQ ID NO: 12692 - DNA, 171 bp, Escherichia coli
atgaaaaaattattacttgctatttttataatattaccacttggtggctgtaccgttcatggtaataaatccctaactgatgaaaatcatcagacggttaaagttaaaatcgtcaagggaaaaacaacccaacaagaaattcttgctgcctttggagagcgctacgaatga

SEQ ID NO: 12693 - DNA, 312 bp, Escherichia coli
  misc_feature (292)..(301): n is a, c, g, or t
ttggaagcagtaggtatcgtatttttagtggtgctcttcatcatcatcatgacagcagtagatatacaaaagaaaaagcactacaacagctttacggaagttctggacggcgacattctttcgtatgaatgccaacagacaggtattgttattgatactcaaaaacatactgtccgtattttcaataaagataaagacagcacatatacttttgatcaaattcgagaaataaattatacgctttcagaggggggtaagttttatggcaatggaacattacgaggtatgaatnnnnnnnnnnggtatgaataa

SEQ ID NO: 12694 - DNA, 837 bp, Escherichia coli
atggcgaaagttaattttttcgataagcgtatacttaaaaaattttcagactacacatcaactattagtaccatattttcactttttttgatttttgtagacattccaacagaaaacaaactaacacttggtattatatttttaattattttattcttactgtatttcggcatatggtttaaatcaaataatctttcggaaattaatttagatgttgagggcagcattgttactgtaaaagcaggcgatttattcagacaagatggattcaaggtcattgcttttaatgaatattttgacacgcaagttgatgatgttatcatttctcataattcacttaatggattatatattgataactatttagcgggatccgtatctgatttggaccatcgtatttcaaatcatcagtttgaagaagatgaactgcttgaggtcaaccataaaagaaaagtgggtaaaacacaaaaatattcgctaggaactatcttcgttaataatgattatctattaactgcgttttcaaaatttgacgacaaaaatagagcttttcttacaatgccggattatctagcatttttaataaatttttgggacaaagttaatcgtatatatgctcaaaaaagtgtctctgttcctatctttggatctggaatcactagaataaaggaacataaaaatattagcgatgaggatttacttaaaataatgttgtggacttttagaataagtgaaatgaggtttaaatttccggcaaagcttactatcgttatccacaaagataagatagataaaataaacttattggatataaaatcagcgagaaatggtctttag

SEQ ID NO: 12695 - DNA, 1044 bp, Escherichia coli; identical to SEQ ID NO: 3485

SEQ ID NO: 12696 - DNA, 1647 bp, Escherichia coli
gtgaattacgctattgataagttcaccgggacactgatattagcagctcgagcaacgaaatatgctcaatatgtttgcccagtttgtaaaaaaggtgttaacctccgtaaagggaaggttatacccccatattttgctcatttgcccggacatggtacgtcagactgtgaaaattttgttcccggaaattccatcattatcgaaactattaaaactatttcaaagcgatatatggatttgcgcttattgattcctgtcggaagtaatagtcgagagtggtcattagaattagtgttgccaacctgtaatttatgtagagcaaagataacgttagatgtaggaggcagaagccaaacgcttgatatgaggagtatggtaaagagtcgccagattggtgctgaattatcagtaaaatcttaccgtattgtttcatatagtggtgaacccgatccaaaatttgtaacagaagttgaaagagaatgccccggtttaccttctgagggagcagcagttttcactgctttagggcgtggggcatcgaagggatttccacgagcacaagagttaagatgtactgaaacatttgcctttctttggcgacaccctgttgctccagattttcctgatgaattagaaataaaaagtttagctagtaaacagggatggaatttagctcttgttacaattcctgaagtcccttctgtggagagtatttcatggctaaaatcttttacataccttcctgttgttcctgccagaacatctattacagcaatttggccgttcctaaatcaaaaaacaagtattaatcatgtcgaatgtgttcattctgacacaatattgttgtcagcaaatatggcaccaacatcatcagaaaatgttggaccaactatgtacgcacaaggttcctctttattactttcagcggttggtgttgaaaaatcacctgctttcttcattcttaatcctggagaaaatgactttgtgggcgtttctggctcaattgagcaggacgtaaacttatttttttctttctataaaaaaaacgtttctgtacccagaaaatatccctcaatagatttggtttttactaaggggaataaagaaaagaccatcgtttccttacatcaaagaagatgcattgaagttatgatggaagcacgaatgtttggccataaattagaatacatgtctatgccttctggtgttgaaggagtggcaagaattcaaagacaaactgaaagtagtgttattaagttagtttctaatgatgacattgcagctcatgataagagcatgcggttactatctcctgttgcgttatctcaattatctgattgcttagcaaacttaacatgtcatgtagaaatagattttttaggtcttggtaaaatatttttacctagttcttctatgttatcattagatgacggggaatttattgaattatctcctaatcttcgctcacggatattaagttttatacttcaaatggggcacaccctccatggttttagtttaaataatgattttttattagttgagaatttagtggatttgcagccggaaccacacttattaccgcattatagggcattggtaaaagaagttaagaccaatggatttgaatgtaaccgctttagataa

SEQ ID NO: 12697 - DNA, 1215 bp, Escherichia coli
atgcacaaagatccctctataatagttaatatcaaccttcgagaagccaaactgaaaaagaaggtacgtgagcatttacaatccttgggttttacaagatctgattctggagcgctccaggccccgggaaataccaaagatgtaatacgggctcttcatagttctcaacgagctgagcggatatttgcaaaccaaaagttcataacgctaagagcggcaaagcttattaaatttttcgcatccggcaatgaggtcattccggataaaatttcaccggtacttgaacgtgtaaagtcaggaacctggcaaggagatctctttaggttagcagcattaacttggtccgtacctgtttcaagcggatttggaaggcgtctccggtatcttgtatgggatgaaagcaacggaaaattgatagggctgatcgcaattggtgaccctgtgttcaaccttgcagtccgagataatttgattgggtgggatactcatgccagaagttcccggcttgttaatttgatggatgcatacgtcctcggtgctcttcccccttataatgccctgctgggaggaaaattaattgcatgtctgcttcgtagccgcgatctttatgatgactttgcaaaggtctatggtgataccgttggagtaatatctcaaaaaaagaaacaagcacgtcttttggctattacaacaacatcgtctatggggcgctcatcggtatataaccgtttaaagctggatggaattcaatatttaaaatcgattggatatacaggcggttgggggcattttcatatacctgatagcttgttcattgaattacgtgattacttacgtgatatggatcacgcttatgcagatcattatatgtttggtaatgggcctaactggcgtttacgtacaactaaggcagctttaaatgtactaggatttagagataatttgatgaagcatggaattcaacgtgaagtttttatcagtcagctagcagaaaatgcaactagtattctgcaaacaggcaaaggtgaaccagatctaacctctttgctttctgctaaagagatagctgagtgtgcgatggcacgatggatggttccacgatcaattcgcaatccagaatatcggctttggaaagcaagagatctatttgattttattagtaatgactcgctaaaatttcccccgtctgacgagatagcgaaaacagttgtctaa

SEQ ID NO: 12698 - DNA, 972 bp, Escherichia coli
atgaacagggaaattcagcagcggctacagtgggtaaaactctatgaaacgtctagtgacgcggggttcgtatgccgtcgctgcggtatttcccaccccacattgcgtaaatggtggcgcagatatctggctcagggcatcgctggtctggaaagccatagccgtcgccctaaacattcaccatcaacgaaaaccggcgctggcgaagtcgctctgattctggagttacgttccctgcgaaatttgggtgcaaggaggattcagagcgagttaaaacgacttcatgcaatctcactggcagtggcaacgatccacaaagttctttgccagaataaggttaaacctgtcgttaaattccggcgtaaagcagattttattcgctacgaacgccctgttcccggtgatcgggtccagatggatacctgtaaaattggccccggtttgtatcagtacacatctgttgatgactgcactcgctccagagtcctgagactctactctcgtcgcacggctgcaaacacactggattttatcgattgtgttattgaagaaatgcctttcccgatacagcgcttacagacagaccggggaagagagttttttgccgttaaggtgcaggagaaattgaaagaatacagcatcaagtttcgtccaaataagccagcctcacctcatcttaatggcaaagttgaacgttctcaaaagacagacaaagccgagttttacgctaccgtagacctctcaactgatgacctgaaagaactgctggcagaatggcagcattactataactgggaacgccctcatagcgctcacaacggtaaaactccgatggagcgctacttcgaacttgcagagcaaacaccatactctgatgccgttcacgcaagctatcagcccaatgaagagcatatacaggaacagaattacaagcttgaacttgaactgagaaaattgaaacgatgtctatga

SEQ ID NO: 12699 - DNA, 345 bp, Escherichia coli
atgcgtgatatgtatgaagttttggaccgctggggagcatgggcggcagcagataacagtggtgtggactggcagccgatagcggctggtttcaagggacttttaccacacggtaaaaagtcacgtctccagtgtgatgatgatgaaggcatcatgatagatagttgtgtggctaggttgcgtaaatataagccggaagagtatgagctgataattgctcactttgttgttggcatctcacttcgtgctattgctaaaaagaggaagtattctgatggtacaattagaaaagaattacaaatggccattggatttattgaaggctgcctttgtgtaataaattaa

SEQ ID NO: 12700 - DNA, 462 bp, Escherichia coli
atggacactgacgttactcagaatttatggacaatgcctgcaacgattatagcgattgttggcatttttttaacaatattaggctggatagttacagcaatacttactcgcattaacaatgcgaagaatttaaaaaaactagaaataaatagacttattgatgagttattttataaattagattttatttatagcgaaatgcttgaattgctgcgagacgataaaaaagacaaacaagtcctatattacatttttacatcatcagtaaggcatgttgagtttatttgcgagcgaattgaactattagacaacaaaaaaaacaaagacaatggattaatatctgaattaagacaagcatgtactaacgatgcgaaatatgaaaaagaaaaaattggaacaacattacatgaaatccaaagcgctaatgaaaaactcaaaaacaaatatctgaaatcattttaa

SEQ ID NO: 12701 - DNA, 318 bp, Escherichia coli
atgaaaaccttatttatcaaggacttttcaagattcccggggcctagatacgaaaggttaggtgaaaacagtggcgaaaaattccgcgatttatttttgataccagcacttaacgaaaatccagacttagtcattgactttgatggtgtttttggctatggctcatctttccttgaggaggcctttggaggtttggtgcgtaaagggatagagcgcgaaaaattggagaagcttaagaagaatctcaaaagtaaagatcaatacattattgaggaagtaatttcatatattgatgatgctctgcgagatctaaaataa

SEQ ID NO: 12702 - DNA, 1092 bp, Escherichia coli
atgaagaaaatcgaaaaactgttcactgaagtaatacggaagttgcgccataagaaatttatgcgctcgatagctagtaaaagaagcacaacagaaagaaagctaaaacgtaatggaagtttaaaaaaaatcgctccagagaaaatacttgctccaaccatacttgatatttacaaggcggaatatcatgagaatgtggttaattttatagaaaaaatagaaaacaaagcaaagacaggaaataaaaagatatatatatgttttagaaatacaattcatatatcggctgctgctggcttatttcttcttgcaaaactagagacgttaaaaagcaatcatagggacttaaaatatatcgtagccaaaccgccaatcaaaacttcatcaaaaggagaacagcacgttgttgattctgttttgaacagaatcggaatctatgcagcattaggtgttaaatcaagagaaatgagagaaactccgtctgtaaaatgttgggaggtaattcgtggcgaactagtagattcggaaattgcaggaaacttattagaaacaatcacagaaaaaatgggtaccgattatacagatttatatcgtcccttgatagaagccatgtctaattcagtagaacatgcatatcgagacgatttatatgactcaaataaaaataacaataaaaataaatggtggtgctttgctgcaattatgaacaacaagttaatattactaatttgtgacctcggtgtaggtatacctaaaacgttaaaacttactcaaggtgaaaaggttcttgcaaagctaaccgagttccttggtaagccattagtccttgattcagaacatataaaagcctcattgcaggttaaacgaacccgaacaaagcttggatacagagggaaaggaggaactgatttacaatctatcatagaaaactttgaaaatgcacaattacgaattatatccaacaaaggaaattacagatatactcatcgtaagaaagcaagaccagagttaatgtgggatgccaaacattccatcaacggtactatagttgaatggagcgtaccgctaccaaatgaaggagactctcaatga

SEQ ID NO: 12703 - DNA, 327 bp, Escherichia coli
atgcctcataacccaaatacctggctggagttggtccagagctggtggcgtggagacacaccgctgggcgcagtgattatgtcgatcgttatggctggtttacgtattgcctattttggcagtggtggtggctggaaacgaaaaacgctcgagattttgctctgtggtgctctgacgctgacttttgcatccgctcttgagtatgtcggatggcctaaatcgctttctgttgccattggtggcggcgttgggctgatcggtgtcgatgctattcgtggggctgcaatgcgagtaatcggtaacaaatttggtagctcgaaggagtaa

SEQ ID NO: 12704 - DNA, 324 bp, Escherichia coli
atgcaaaacagcagatcgcactggagtcacagagaacccaggaagatatcaaagtggctgttgagaatgatgattgcgcttcccgtcttgttcctgctcgtgcaactgagcggctgcgccggtacgcggacaatttacgtgccagttccggcggtaccactaccggcgaacctgaccgctgaaaccccacagccagctattcctgatccgctgacttacaaagatagtctggatttaaacgtgagcctgctgtcagtgctggctgcctgtaatagggataaggctgatattcgtaaaattgaagcagagaagagtgagccatga

SEQ ID NO: 12705 - DNA, 594 bp, Escherichia coli
atgacggactatacttttttttactggatagagatgcttcttaaagaaggcaatgttttatttattgttcttgcttgtttgattgtcttttttactttaaaaaaagaaataataatggttttaggtcgtcttaatacagttaagctaggtgactatgagattaaatttaaaaaagaaatgtttgaaatagaatctaaaagtatagaggttattaaaaatttacctggaacaaatcctgtcctgccgactcaactcattgagaatttcaatatttttgagagtcttgctagtactcagcctaatgttgctgtactttcagcttggcgcgaattggagttaaccgctataacgcttgcatctaaaaaggggattgagatcaacgggacatctttagggcgggcttcaggtatcgctgccttgaaaaatgtccaatctgcaaacaaaatttctagtgacattgttaagctctatgaaaaaacaggagagtctattaagcctatatcccaaggaaagctcttatgtactcaggaagatgctttggcattctgtaagaatgcaaaaagacttagcaattatttaacatccatattttag

SEQ ID NO: 12706 - DNA, 213 bp, Escherichia coli
atgacaagcgataatctggactccaagcccacaattgaagatgttgatttcaagcatttgatctgcgtcgcaggaggaatcatcgaggatctaaaaggcccatttatattcaaggctccagaaaatattaggcgattacttaatcataagggagtgaatgaaataagtaatctctctcaaaaatttaatgcagattctccatcttgctattag

SEQ ID NO: 12707 - DNA, 528 bp, Escherichia coli
atggtgaaggatattattaaaacagtgacattctcctgcatgctggccggcagtatgttcgttacctgtcatgtctgtgcagtgggttctgtggtgaatattacaggcaatgttcaggataacacctgcgatgttgacattaactcccgaaactttgatgtcagtctgggaagttatgacagccgacagtttaccgcagctggtgataccacacctgcgtcggtatttcatgtcgggttaacctcctgcggcagtgctgtcagtgcagtgaagctgacatttacgggcacaccagataatcaggaggcggggcttattcagataaacagcgtaaatggtgcacggggtgtggggattcagcttcttgataaggataaacatgagctgaaaattaatgtgccgacaacaattgcgttaatgccgggaacacagaccatagcgttttatgcccgtctgaaagccacttatcttccggtaaaggccggtaatgttgatgcggtggttaattttgtacttgactatcagtaa

SEQ ID NO: 12708 - DNA, 2631 bp, Escherichia coli
atgttttccggagatggcggacaactcctgtctgataaatcactgaccggctctgctggcgggggtaataacagaatgaaatttaatatactgccgctggcattttttatcgggataattgtttctccggcccgggctgagctctattttaacccgcgttttctgtctgatgacccggatgcggttgcggacctgtctgcatttacacaggggcaggagcttccgtccggcgtgtaccgggtggatatttatctgaatgatacgtatatctcaacccgtgacgtgcagtttcagatgagtcaggacgggaagcaacttgccccctgcctgagtccggagcatatgagtgcgatgggggtaaaccgttatgccgtgccgggtatggagagactgccggctgacacctgcacatcactgaattccatgattcagggtgccacattccggtttgatgtcgggcagcagcgattgtacctgaccgttcctcagatatatatgagtaatcaggcccgtggttatattgcgccggaatactgggataacggaattacagcggcattgctgaattatgacttcagtggtaatcgggtgcgcgacagctatggtggcaccagcgattatgcctatctgaatctgaaaacaggactgaatatcgggagctggcgtcttcgggacaacaccagctggagttacagtgccggaaaggggtacagccagaataactggcagcacattaacacctggctggagcgggatatagtttccctgcgctcccgtctgacgatgggggacagttatacccggggggatatttttgacggtgtaaatttcagggggattcaactggcctctgatgacaatatggttccggacagccagagagggtatgcacctacaattcacggtatttcccggggaacatcccggattagtatccgccagaacgggtatgaaatttaccagagtacgctacctccaggcccgttcgagataaacgatatttatccggccgggagtggaggtgacttacaggtaaccctgcaggaagctgatggcagtgtacagcgatttaatgtgccatggtcttcggtgcctgtactgcaacgtgaagggcatctgaaatatgctctcagtgccggagagtttcgcagtggcggacatcagcaggataatccccgttttgctgaaggaacgctgaagtatggtctgccggcaggctggacggtgtatggaggagcctggatagctgaacgctaccgtgccttcaatctggggatgggtaaaaacatgggctggctgggcgctgtttcactggatgtcacccgtgcgaatgcccggttaccggatgaaagccggcatgacggtcagtcatatcgttttctgtataacaagtcactgacggaaacagggacaaatatccagttaatcggataccgctactccacacggggctatttcagctttgctgataccgcctggaagaaaatgagtggttacagtgttcttacccaggacggagtgatacagatacagccgaagtatacggattactacaatctggcttacaacaagcggggaagggtgcaggtgagtatcagccagcagacgggggaatcgtcaacgttgtatctgagtggcagccaccagagttactggggaacggacaggacggaccgtcagcttaatgctggctttaactcatctgtgaatgacatcagctggtccctgaactacagcctgtcccggaatgcatggcaacatgaaactgaccggatactgtcatttgatgtcagcattccgttcagccactggatgcgttcggacagcacatctgcatggagaaacgccagtgcccgttacagtcagaccctggaggctcacggacaggctgccagtacagcagggctgtatggcacattgctgggggacaataatctgggatacagcatccagagtggttatacccagggagggtatgaggggagcagtaaaacaggatatgcctctctgaattacagagggggatacggcaatgccagtgcaggatacagtcacagtgggggttaccggcaactgtattatgggctgagtggcggtattctggcacatgccaatggtctgacactgagccagcctctgggagatacgctgattcttgtccgtgcaccaggtgcatctgatacgcgcattgaaaaccagacgggggtgtctacagactggagggggtatgctgtactgccttatgcaacagactatcgtgaaaaccgggtggcactggataccaacacccttgcagataatgttgatatagagaataccgtggtcagcgtcgtgcccacgcatggtgccgttgtgcgggctgactataaaacccgtgtgggtgtgaaagtgctgatgacgctgatgagaaacgggaaagcagttccttttggctctgttgttacggccagaaacggggggagcagtattgccggagagaatggtcaggtttatctgagcggaatgcctctgtcaggacaggttagtgtgaaatgggggagtcagaccacggaccagtgtactgcagattataaattaccgaaggaaagcgccggacagatattaagtcatgtcacggttagttgcaggtaa

SEQ ID NO: 12709 - DNA, 696 bp, Escherichia coli; identical to SEQ ID NO: 11074

SEQ ID NO: 12710 - DNA, 447 bp, Escherichia coli; identical to SEQ ID NO: 988

SEQ ID NO: 12711 - DNA, 930 bp, Escherichia coli
atggcacaacagagaactacctccctcagatccatacctttagacttagatgttaagcaagaggctgtcattaacggtatagaaatgggggtactcgataacggaattccgtaccttactcagaatgggttggcaaatgtttgtggtgttcagcgtttgcgaatcaaggaaattaccgatgagtgggctcaatctgttgagaacggtattttcaaaaaaggaagaatgacttttattggtacatatcttcttaatgaaggttttacagatgaaaaactttatataccaataattcgaaatggtgttgagtaccatgcttatccagatgttgtatgcatggctatacttgaatactatgcctttgaagcaaaacaagcagaaagtgagactgcaattagatcttacagagagcttgctaaaaaaggcctcaagacatttatatacgaggcgctaaaatatcaaccggaggacccgtggaggcattaccatgacagagtatctttattaaaagataagggaaccatacctgatgggtatttcattatatttaatgaaattgcaggtatgatggtagatctcatcaatgctggattagcgattaatcagcataccgtacctgatggcagtgttggttcttgctgggcgcgtcactggaaagcaaaggggttagcaacagaatttggagaaagagtagactgtgagcattattaccctgaagattttcttcaggcaagttccaatcctcagatcattaatgcctatcctgattctgcattgtcagagtttcgtagatggtttaagcatgaatatttaaccacaaagttcccaccgtatattcttaaaaaatcaaacgtgcttcctggtggtacagaagatgctaatcgtctgatagaagctttcaaaaaatcagagctagaaaataaaccataa

SEQ ID NO: 12712 - DNA, 318 bp, Escherichia coli
atggatgctggcgttctcgttctagcagttcaacaatccccaatcacaaaacaattcactgataacgaactttgcacactcgcctggttatggcgagcagggaatgtgatgttaattgcctaccagaacgttactcatcttcttcaggatgcggagcatggtgaagctggtcacttcacttccatcgagcaagaatatccccagatactcaacagagcgcgagcaatcctcgtccgagaaacggcacatgtaaaacttcagccgtggcaggatgataagtggagtcgagtattgccgtatttgcgtcaaatctgttag

SEQ ID NO: 12713 - DNA, 213 bp, Escherichia coli
atgctcaaccccggctttgggttcaccggcaatcagggacacatccacggtctgacatttcgtggcggcactgatgcttttcaccacggcccgcccaatcaggccgaggagttgtcgctgcatggcttcaatcgtcctcatcagaacggatcctcctgtactctggcttttttctttttccgcgcgccgggggcttcgggttcaggcagataa

SEQ ID NO: 12714 - DNA, 2079 bp, Escherichia coli
atgccggaggcattgcgtcgttttgaggaaatggtggaagaagcggcacgcaacgctgaagccgcctctcagagcgcagcggcggcaaagaaatccgaaactgcagcggcatcatcgaagaacgcggcgaaaacctcagaaacgaatgcagctaatagtgcacaggcggcagcgacctcaaagactgcatcggcaaactccgcgacagcagccaaaaaatcagaaaccaacgcgaaaaatagcgagacagccgcaaagacgagcgaaaccaacgcaaagtccagccagacggcagcgaaaaccagcgaaacgaatgccaaagccagtgaaactgcggcaaaaaacagccaggttgcagcagcccaaatcgagagcgcggcagccggttctgcgacttcagcagctggatcagcaactgctgcggctaacagccagaaagctgcgaagacgagtgaaactaacgcaaagttcagccagacggcagcgaagaccagcgaaacgaatgccaaagccagcgaaactgcggcgaaaaacagtcaggatgcagcagcccaaagcgagagtgctgcagctggttctgcaagcgcggcggctgcttctgccactgcatcagccaacagtcaaaaagcagcaaaaaccagtgaaaccaatgcaaagacaagcgagactgcagcggcgaactcggcgaaagcatcggcagcaagccagacagcagctaaagcaagtgaagacgcagccagagagtatgcaagtcaggcagcagagccgtataaatatgtcttacagccgctgcctgatgtgtggataccatttaacgattcgctggatatgattacgggcttttcgccatcatataaaaaaattgttattggtgacgatgaaataacgatgcctggcgacaagattgttaagtttaaacgtgcatcgaaagcaacctatattaacaaatctggtgtgctgacagaggctgccattgacgagccacgatttgaacgtgatggcctgcttattgaggggcaaagaacaaactacatgctcaattcggaaagccctgcaagttgggggcgatcatcaaatatggatgtgcccgaaacagggacggataattttggttttacctatggaaagtttgtctgcaacgattctctgattgggcaaacctcagccattaatatggcatcaattgctgcaacaaagtcagttgatgtctcaggcgataataaacacgtgacaacctcatgtcgttttaaaacagaactgcaggtaaggttgcgtatccggtttgataaatatgacggtagcacaacaacttttcttggtgatgcgtatattgatacacaaacgcttgaaattaatatgacaggcggtgctgcctcaagaattacagcgagagtcagaaaggacgaagctaccggatggatttttgcagaggcaacaattcaggcaattgatggggagttaaaaataggctctcagatacagtattctcctaagcagagcggggcaaccgtatctggtgactatatttatctggccaccccacaagtagaagatgggccttgtgtatcatcttttattatatcaggagcgacggcggcgacccgcgcaagcgatatagttacagttccaattaagaataatctttataatcttccttttacggttctttgtgaggtacataagaactggtataaaacgccaaatgcagcgccacgtgtttttgataccggcggtcatcaaaccggagcggctattattcttggcttcggtcgttcaacagattacgacggatttccttattgcgatattggaggagctaacagacgggtaaacgaaaacgcatcgcttgaaaaaatggttatggggatgcgtgtaaagtcagagcagtctacgtgctcagtaagtaacgggcatatatccagcgaaacaaaaaccacatggtcctgtattcagaacaccgcaattatccgtattggaggccagactacagccgggttacgtcatttatttggtcatgtcaggaattttagaatatggcacaaggcattgactgatgctcaggtgggggagtcaatctaa

SEQ ID NO: 12715 - DNA, 282 bp, Escherichia coli
atgaaagatttaacactcaaatttgccgacagggccgacttttcggcctttatggagagtattggctattatgatgacgagtcgatgcaggatgatattcttattgacgtgataggtaacgcgtacaaagaaaccggagaactgactgaagatggcgaaccggtatgtgttaaggaagacggatattttgtaaacgtgcgcatcattaatgattcgcaaatatcgtcattattcgatgaatacgtggttgctgttgagcatcaacttcgtggctggatgtga

SEQ ID NO: 12716 - DNA, 357 bp, Escherichia coli
atgcgtgatatgtatgaagtaatggatcgttggggagcttgggctgcttcagacaatagcggagtggactggcagccgatagcggctggtttcaagggacttttacctcatggcaaaaagtcacggattcagtgtgatgatgacgaaggcatcatgatagacagttgtgtggctcggttgagaaggtataaaccagaggaatatgagctcatcatcgcccactttgttatcggtatctcattacgcactattgcgaagaagagaaaatgctctgatggcacaattaggaaggaactgcaaactgcaatggggtttgttgacggctgtttagcaatgttagcttatagtatggcataa

SEQ ID NO: 12717 - DNA, 1215 bp, Escherichia coli
atgacaattgctgatgacttatcaagattagcgcagattattaacggagcctcaagcagagttgagggctactacactgtcataagtcttgaagaaagcattgttattgtaaatagttctgaaataattagactgttacaatctataggttataaaaaggcaacaacctgcatcgaaaataatgaaatttggctagatcgccaagcttcatcttgggatgatgctataatttatgagaatgttgagtctttttggtctagagtaaacacccaaaacgctcttccgaaaaattatatcatcggaacgccgttaatactccctacttctaagaatgaaagcatcgaaaaaatccatattttctttatgtggaaagatatcctttcattaattgctgatcatcataacagtgactgctctgtcttatttttcaccaatgaagacaaaagttatacagtcgaactcacgcattttttacaatatagcgagattaatcgcttatcgaactcgtctcttaaatatgaaattataaaggagcttctcgacacaataaaaatcaatgatttacacaaaagcgagcgcaagctcgttatacgctcagccataaacgaagtatttaaagcaaatggtacgttcaatttctttgacttgcttaactctactgaactcgtcaggaaaaaatatgatgaactatatgagatttacacaaagaggttttctgtaaataaaattcttaacgaactcgatgagaaaaatcttgagttcacgagtaaaattaacgaattcatatcatctaatcagacaaaagcattgactattcccggtgcattaatagcagctggtggcttagtgaaggctaatgaaacaaccgaagcaatattgattatcgcaggactttggatgataaaaaaagtcaattacatttctattgagatattcaatgaaacattcgacaacttacgttctcgagtggagtccgctttcgataagtatttaaagtttgaagaaaataaagaaatcaaagataatgcagatagtattaagagtagcattacaggtttgattgataaagctaaaaaaaggatgagaactgttaaatatctcgcatcagccatgttttatggaggccttatttacgttggatataaacagttcccagtcttttttgaaaaatcggcagtaaatctattttattttttatgccatactataagctaa

SEQ ID NO: 12718 - DNA, 1176 bp, Escherichia coli
atggatataacttgtttagaatgtggcaatgttcttgacgacccaactgtagcttgcgataaatgcggtgccacgcctcatgttgtagtgctgggcaaacaatcgtactttcctattggtgctgtaacagcaaatcttgaaaaaaatgattcaagagcatttgattatcgattaggtgaagtttgggatctaaaaaatgaagtcacatctgaattcataaccagaattgagaaaaaatttagccgaaaaaacaaatttcataacttcctagactcagatcacaacccttcatccattcctacgatcctaaaaaaatacattaataagaataatgaattcattgatttatctagagctataatagagaagcttaaacataatgctaataacgaatcgagagttgcccaacttcagggggggagcgttgttttcatccactataagtctaccgaaccagaggatttggggaaacttctaatcgtaatggttgataaacaaagcgcctatgactttgattcggataagttgaccccaacaagattaaatccaattaataccgatgccttacggcaggctgcgatgttcgatttaactttattcgaagccagttatccagaaaacaagggtgactcatatgtacatttcttgcaaggtaaatctaaaagcgattttttcaaagactcattaggttgccgacatgattcggacaataaaagaagcattcagcaattattcagtgctatagatatttttgctagtaaaaactcactcggtcgtgtactgcgtgatactattgacaatgaagttaaatccttactggaaaaaaaatcaaaagataaacacggaaataagtccgttaagatagaggatatttcaaaaataattgactcatgcctgactgattcacacaaatgtaagggaacgtttgtcgattttgttaatcttaatggtttccagattgaccctcaatttgaaccaactcctaaagcagctgaaagcgcgcttacaattgaagtggcagataacgacaataattttaagttgaaaataatgcgtggagctattggagacgaaaagtcaaataagcctgtaattctcactgacaacaaatgcgaaattgtgataaaattgagtcaggcaaattatgatgaactcaaaagatatagagacagctaa

SEQ ID NO: 12719 - DNA, 327 bp, Escherichia coli
atgcctcataacccaaatacatggctggagttggtccagagctggtggcgtggagacacaccgctgggcgcagtgattatgtcgattgttatggctggtttacgtattgcctattttggcggtggtggcggctggaagcgaaaaacactcgaaattctactctgtggcgctctgacgctgacttttgcatccgctcttgagtatgtcggatggcctaaatcactatctgttgccattggtggtggggtggggctgatcggtgttgatgctattcgtggggctgcaatgagagtaatcggtaacaagtttggtggctctaaggagtaa

SEQ ID NO: 12720 - DNA, 270 bp, Escherichia coli
atgtccgatccgatgaaagagctggaagcagcgattgaatcgggacgctttcatcatgacggcaatcccatcatgacctggtgtatcggcaatgtggtcggcaaaaacatgccaggtaacgatgatttagtgaagcccgtcaaggagcaggcggaaaacaaaatcgatggtgcggttgcactgattatgacgatcggtcgggcaatgctcaaagaacctgacgatttcctctcatctcttgatccggacgatgatctcttaattctatga

SEQ ID NO: 12721 - DNA, 552 bp, Escherichia coli
gtgggtaagcatcactggaaaatagaaaaacagcctgagtggtacgtgaaagctgtcagaaaaactatcgcggcgttgccggggggttacgctgaagcggctgactggctcgatgtaacagaaaacgctttattcaaccgccttcgtgcagatggcgatcagattttcccgctgggatgggcaatggttttacagcgtgctggtggcactcacttcattgctgatgctgtggcgcagtctgcaaatggcgtctttgtgtctcttcctgacgtcgaggatgtggacaacgctgatatcaaccagcgcctgctggaagtcattgaacagattggcagttattccagacagattcgttcagcaatcgaagacggtgtagtggaaccgcatgagaagacagcaattaacgacgagctgtatctctcaatttcgaagctgcaggagcatgcagcactggtctacaaaatcttttgcatttcagaaagtaatgacgcccgcgagtgtgcagctccgggcgccgtggcgtgtcgtgactgtggagaaactaacgcatga

SEQ ID NO: 12722 - DNA, 339 bp, Escherichia coli
atgaacagtttaacaacacactaccgtcgctcgcaactgattgcgcttcctgtaccgggtggaaaagcgaaggtggagtattgctatgcagtgaatgtaccaggtgacagggaaattgtaacccacagctttgctgagtgggctgtgggtgatttcaaccggcagaaggagacagtcctttgcgagaagttaaccgctggttcaaagatcactacggagtgcccgtcagagtcattcgttgggagccggaaacacaacgggttatctatctccgagaaggctatgagcatgagtgcttcagcccgctcgaacagtttcgtcgtaaattcagggaaatag

SEQ ID NO: 12723 - DNA, 387 bp, Escherichia coli
atgcaggacgaccgactattttcaggatcaattcgtgaaaatatctgtgggtttgcagaagaaacagacgacgaatggatgacagaatgtgccagagcaagtcatattcatgatgtgataatgaaaatgccaatggggtatgaaacgttaataggtgaactgggggaaggtctttccggcggtcaaaaacagcgtatattcattgcccgagctttataccggaaacctggaatattatttatggatgaggctacaagttctcttgatacagaaagtgaacgtttcgtgaatgctgctataaaaaagatgaatatcacccgggtgattatttcacatagagagacaactttaagaacagttgatcggatttttagaattacaaattag

SEQ ID NO: 12724 - DNA, 324 bp, Escherichia coli
atgagacatataacaaccgatgaacttgctttaatacatggtgcaggattagataaagatgcatccgttgcaataggtactgcggctggtggttttttaggtaaagcaacaaaaatccctggtgcggatatagcaggaagtgcaattggaggatatattggaggagttattgctgatggttcaaataggacaataacaataccatcaaacggtattaactataatccgggtataggacttggaagttttaatccaaactacaatggaggtttattaaactcaggatttaactcatcaacatcctcttctagtagtggaagttga

SEQ ID NO: 12725 - DNA, 531 bp, Escherichia coli
atgaaaggctatatcacagcaagtgtaattcttggagcagcggctattttttcatctctcataatctctggcaacatctcctttaaagatgaacatattattcagttatctggaggagccataaaacttggtgatgtttataaagaaaataaattgataagtgcaaagattatttttccagataatcagggtgaacagattcttgttgtcgacggcaatcctgaaaactttaaggaggattttcaggagaaattaaataaagtaataaaaactttaaatgcgtcaaagaaaaaagatgaagagaaagttagcctggataatttaagtgttgttgaagagtctaaactagagctcgtttctgcggtgcgttactctgctcagtatgttcctatgtttactctgacgctggacaaaaaagaaattaccatgcctaaaaatacggtaatatttccatttgccagcgatgaaacagctaagtatttaaatgaacaacagcaaaagtataaagattcgttgtttctgactcgctaa

SEQ ID NO: 12726 - DNA, 342 bp, Escherichia coli
atggcaaaagttagatttgaaaactcacttaataagatgatttttgaaattcgtggttatgaatcattttccgaaatggaaacagcattactagatttttgtgatgaaactatgggggcaaaccatcctgatatagtggtggaatatccggtttattataagcattttattaatgataaaatttcatatgagcatataggttatgtgaatttaggaatagatcaggatgatggttcttgctatacgattgaacatctgacattagaccgcaaaacacttaaaaaccactggcatcctttctatttttataaaggcgaatgtgagtacggatttaaaaattaa

SEQ ID NO: 12727 - DNA, 303 bp, Escherichia coli
atggcagtagaacgcatttcccctgaagaatggcagcgtattgcaccggcattacgcacatgcagccaggtaacgatcgatatggcatacgccgtactggttgacggtcgcaaacaagtcgatgtggctaaagagttcgaccgatcaaagcaaacggtcaatgctgcaatcaggcgcgttactgcgatttttaacgaagttatcccggaagatgagcagttagaatttgtgcaagtctggttgccgccagagctggcgaagcaggttaaagaaatggctaaaccatatcagaataaaaattaa

SEQ ID NO: 12728 - DNA, 531 bp, Escherichia coli
atggcaaacgccccgcttgatcgcggggcttttatcaacccgaaaaaggtgattatcatggcttcaagaggtgttaacaaagtaattctggtcggcaatttaggccaagatcctgaagtgcgttatatgccgaacggcggcgcggttgccaatattacgttagccacgtctgaaagctggcgtgacaagcaaaccggcgagatgaaagagcagactgaatggcatcgcgtagtattattcggcaagctggccgaagtcgccgttgaatatctgcgtaaaggctcgcaggtgtacattgaaggccagctcagaactcgtaaatggactgatcaagcgggcgttgagaagtacaccacagaggttgtggttaacgtcggcggtactatgcagatgttaggcgggcgctcacaaaacgcttctcagactggtaatcagccgcaagggggccagcagttcagcggccagccacaaaccaccggcacagcggcaggaaacgaatcgcctccgttcgacgctgatataccgttttga

SEQ ID NO: 12729 - DNA, 825 bp, Escherichia coli
atgttatctagccgttttcgttctgcaaatattctgcgttctgaccgccctcttaacgatgatcagatcatgcgttatgccccgtctatctttgccactgaagcgcatgaaagccgctccgaccgttacgcctacattgcgaccagcgaagtattaaatggtctgcgtgataacggttttcatccattcatggtttgccagactcgcgttcgtaacctggataaacgcgaacacaccaagcacatgatccgtctgcgtcatgccgggcaaattaacggcactgaagcgaaggaaatcatcctgcttaactctcatgatggcagcagcagctatcaaatgctggccggtgtattccgtttcgtctgccataacggtttagtctgcggtgataccgttgctgatattcgtatcccgcacaaaggcaacgttaccgagcgtgttattgagggcgcttttgaagtgctggatcagttcgataacgttgaaaaccatatggatgctatgaagtctgtcacactgaatgcgctggaaaagcgtattttcgctgacgcggcgttagcactgcgttatgacgagaaagacggccccgcaccaatcgccgcgagccagctccttgaggcgcgtcgtttcgaagatcgcaaagatgatttgtggacgacgtttaaccgcgtacaggaaaacatcatccgtggcggtttgagtgccagaactaagcagggcaaatcaacccgtacccgcgccgttaccggaatggataaggatacttctttaaaccgcgctttatggattctcagcgagcgcatgaatgaactcaaagccgcttaa

SEQ ID NO: 12730 - DNA, 216 bp, Escherichia coli
atgtcagtaaaagatttcacccctaccctggaaattaaattccatcgtcgccgctggcgtatcatggtcgggcgttcaagcctggcctctttccgctccgaacaggacgcaattgatgctctcaataaacgccgctcattctatgagtattgggccggttctgccggtgtacaggcagagaacacagagccggtgattgtccacgtaacatattga

SEQ ID NO: 12731 - DNA, 270 bp, Escherichia coli
atgaaattaaccacgctgctgaaaaaacattttgatattgaggaaattaccgatgtggatagcaccgtaaaccgggaggtgtataccatttgggtttatgaaaaaggcgaagattgcgagccgctattaattctcaaagatgcacaggattttatgggtgtggatggctggcttgtcgggaatatctattccacgttgcaacatggcttattgctacagcatgaagaactgaaaacgatgatccgaaacggcgagattaagagccgttaa

SEQ ID NO: 12732 - DNA, 654 bp, Escherichia coli
atgatgaacatgagtgatcgtattcgccaaaggcgaaaagaactgaacctgacacaacaagcactggctgatttgactggtgtgaaccgtgtcacggttactggatgggaaaaggacgactaccaaccaaatggagccaaccttcaagccctagccaacgcacttaaatgcgatcctctgtggcttgttagcggaaaaggctcgcctgaaccaaagataaatctaaaacctgaaatattcgcagttaaaaaagtccccctcatctcgtgggttcaggcgggttcatggacaatgacggagcctggtgtcaggaaagaagatgctgaagagtgggtttatactaccgcccttgtatcagaaatggcatttgcactacgggtccgtggtgattcaatgaccaatcccctcggctcaccatcgataccagaaggttctatcgttatcgtagagccagatattattgatacagagtgtattaacggaaaaatcgttgttgcccatatcaatggtgggcaagaagcgacactcaaaaaatttgttgaggactggccgaacaggtatctcgtcccactaaatcctaactataaaactattgaatgcggtgagaactgcagaatagttggtcttgtcaaacaagtaataatggatttttga

SEQ ID NO: 12733 - DNA, 198 bp, Escherichia coli
atgcggaaatccgacgtgattaattatttcggcggagtttgtaaaaccgccgaagccctaggtattaagcatccgtctgtttcagagtggcctgagattattcctgaaggccgagcgtaccagttagaaaaaattactaacgggaaactgaaagttgacgtgtctttatatcaaaagactaacagtgctgcggcataa

SEQ ID NO: 12734 - DNA, 1608 bp, Escherichia coli
atgctgtctccgggtgaccgcagtgcaattcagcagcaacagcagcagttgctggatgaaaaccagcgccagcgtgatgcgctggagcgcagtgcgccgctgactgtcataccgtctccggaaatgtctgccggtactgaaggtccctgctttacggtgtcacgcattgttgtcagtggggccacccgactgacgtctgcagaaaccgacagactggtggcaccgtgggtgaatcagtgtctgaatatcacgggactgaccgcggtcacggatgccgtgacggacggctatatacgccggggatatatcaccagccgggcctttctgacagagcaggacctttcagggggcgtactgcacataacggtcatggaaggcaggctgcagcaaatccgggcggaaggcgctgaccttcctgcccgcaccctgaagatggttttcccgggaatggaggggaaggttctgaacctgcgggatattgagcaggggatggagcagattaatcgtctgcgtacggagccggtacagattgaaatatcgcccggtgaccgtgagggatggtcggtggtgacactgacggcattgccggaatggcctgtcacagggagcgtgggcatcgacaacagcgggcagaagaataccggtacggggcagttaaatggtgtcctttcctttaataatcctctggggctggctgacaactggtttgtcagcgggggacggagcagtgacttttcggtgtcacatgatgcgaggaattttgccgccggtgtcagtctgccgtatggctataccctggtggattacacgtattcatggagtgactacctcagcaccatagataaccggggctggctgtggcgttccacgggagacctgcagactcaccggctgggactgtcgcatgtcctgttccgtaacgggaacatgaagacagcactgaccggaggtctgcagcaccgcattattcacaattatctggatgatgttctgcttcagggcagcagccgtaaactcacttcattttctgtcgggctgaatcacacacacaagtttctgtggggtgtcggaacactgaatccggtattcacacgggggatgccctggttcggcgcagaaagcgaccacgggaaaaggggagacctgcccgtaaatcagttccggaaatggtcggtgagtgccagttttcagcgccccgtcacggacagggtgtggtggctgaccagcgcttatgcccagtggtcaccggaccgtcttcatggtgtggaacaactgagcctcgggggcgagagttcagtgcgtggctttaaggagcagtatatctccggtaataacggtggttatctgcgaaatgagctgtcctggtctctgttctccctgccatatgtgggaactgtccgtgcagtgactgcactggacggtggctggctgcactctgacagagatgacccgtactcgtccggcacgctgtggggtgctgctgccgggctcagcaccaccagtggccatgtttccggttcgttcactgccggactgcctcttgtttacccggactggcttgcccctgaccatctcacggtttactggcgcgttgccgtcgcgttttaa

SEQ ID NO: 12735 - DNA, 543 bp, Escherichia coli
atgaaattcatcgtaaaagcacttatttatcttgctgtcatgttatcattcacagccaacgctgctgaatataaagaatatccacaaggagaaattacctattacaaataccttcccaggaacggctggacactgcctgcaggctataccgtagaacaattttccagtgccatttacaaagggcaaatacggaataacttcccctggacaaatcagttcatcgtgcgtgggaacggggtacttttcctggccaacaaagtcaataaaacctggcatgttcttccggtggattatcagagattaaacttcgggagattgacgacccattatcaacatgtaaacaaaggcgacggttgttacttttacatcctcgatggccatggttcagatgcaaaaccaattttaaaaattgaagaaaactgcgttgacatgaaaatgtacaggaaaatggttgcagagaaaaaggaacgcgaacaaaaagcgaaccaatggctccagcagcagattcttgcagaacattgccgtcgctacggtaactgctaa

SEQ ID NO: 12736 - DNA, 483 bp, Escherichia coli
atgaaacgtttacatactctgatgctctttctggttttcctgtttattggtgtaagtcctgacacaaacgccgccactgtaaatcagacacttaaatgcgactcaaaagcccgggctggccagcctggtgcatgtccaacaacgtacgagttatacgaaggtgacgctacctacagagctgctatcgacaaagcattaaaccctgttgggttaaacggaatgtttggggaagacggctatatggatggtcctgatggtggtgcgtatcctgtaaacattaacggaacgacctgggtagaaggtggcggttgtaaagcccacgcctgcggctgggactatatcgtaacactctataacccaaaaacgcataaagtcgttggttactattacaacatcgaccctggttacctgatttggtttggtgaaactggcgttcacgaattcgcgtacctggtcagggactacgtaaacaaaacaaattaa

SEQ ID NO: 12737 - DNA, 315 bp, Escherichia coli
atgagagttcagcaggatgatttcagggacatgttgtccgtttatctctccggcccgccgcagacgcagcatgtgtttggtgtatctccgacggcccgggtcgcgcacatgggtctggcaggcgaagaatggctggaagccttcccgctgcagactttccagcacggtgatggtggggatgtacgtatagttctggcttcgggacgtgtgtttatcttctccgaaaatccccggcacatggtgcatcagctcttcatgtgtcagtggacggtcacggcgtatctggtttgcagcataaccaaaacgactggctaa

SEQ ID NO: 12738 - DNA, 303 bp, Escherichia coli
atgtctcatattcagtggtattatggggataataaaaaaggtggtatgtggtcacaggattatacaactactgataaatattcaacgtgcaaagaggatgaagtttcatatgacgaacatatccgtattgcaactaaactgatctctaaacaaaaagatcaaatatttgagaatgcatataacatagaaagatattttgaaataagattaattgaaagtgagatagactcgattgatgatgaaatattaagcaattcagttaagaaaaaaatagcggaattagaaaaagcacttctccattaa

SEQ ID NO: 12739 - DNA, 486 bp, Escherichia coli
atggctggaacggcggggcgttccgggcgtcgccccaagccaacggcgcgcaaggcgctggccggaaaccccggcaagcgagccctgaacaaagatgaacctgtttttacgcccatcaaaggtgttgagccaccggagtggttcgctgaagaagagcttcctctcgctacgatcatgtggcaactgacaaccaaagaactctgcggtcagggcctgctgtgcgtgactgacctcgcagtgcttgagcggtggtgtgtggcctatgaattctggcgacgtgccgtgaaaaatattgccagacagggcaacaccatcaccggtgcaatgggcggcatggtcaaaaatccggagctgaccgccaaaaaagaacaggagtccgagatgagcagtacgggggcaatgctcggactcgaccccagcagccgccagcgtctgattggcctggcggggaagaagaaagccactaacccgtttctgacaatctga

SEQ ID NO: 12740 - DNA, 1023 bp, Escherichia coli
atggtcacttttgagacagttatggaaattaaaatcctgcacaagcagggaatgagtagccgggcgattgccagagaactggggatctcccgcaatacggttaaacgttatttgcaggcaaaatctgagccgccaaaatatacgccgcgacctgctgttgcttcactcctggatgaataccgggattatattcgtcaacgcatcgccgatgctcatccttacaaaatcccggcaacggtaatcgctcgcgagatcagagaccagggatatcgtggcggaatgaccattctcaggggattcattcgttctctctcggttcctcaggagcaggagcctgccgttcggttcgaaactgaacccggacgacagatgcaggttgactggggcactatgcgtaatggccgctcaccgcttcacgtgttcgttgctgttctcggatacagccgaatgttgtacatcgaattcactgacaatatgcgttatgacacgctggaaacctgccatcgtaatgcgttccgcttctttggtggtgtgccgcgcgaagtgttgtatgacaatatgaaaactgtggttctgcaacgtgacgcatatcagaccggtcagcaccggttccatccttcgctgtggcagttcggcaaggagatgggcttctctccccgactgtgtcgccccttcagggcacagactaaaggtaaggtggaacggatggtgcagtacacccgtagcagtttttacatcccactaatgactcgcctgcgcccgatggggatcactgtcgatgttgaaacagccaaccgccacggtctgcgctggctgcacgatgtcgctaaccaacgaaagcatgaaacaatccaggcacgtccctgcgatcgatggctcgaagagcagcagtccatgctggcactgcctccggagaaaaaagagtatgacgtgcatcttgatgaaaatctggtgaacttcgacaaacaccccctgcatcatccactctccatctacgactcattctgcagaggagtggcgtga

SEQ ID NO: 12741 - DNA, 138 bp, Escherichia coli
atgtttgagtcttatatggcagaacgtcttcgccgccgctgggtgcgcctgcgcttatatcgttttcctagttctgttttgaccgattaccggatactgaagaattacgccaaaacactgaaaggagctgccgcatga

SEQ ID NO: 12742 - DNA, 192 bp, Escherichia coli; identical to SEQ ID NO: 8982

SEQ ID NO: 12743 - DNA, 459 bp, Escherichia coli
atgaaaatatactggacaagaaaaagcattcctgaacattcagcacttccaccttcattaagaaagaaaaattttactgacgcatataatgctgcatcttcccatatcgaatactggataggtgctggcgtctcatttatctcgatgatgattttattcagagtatataattttcttttacccgcccaagatactttcccgggtgatatcatcagaagtttatgtgttgtgtgtccatccatattaatctggtttcagttttcggtatatgtcatgaggaaatattacagacatattctggtgcgaggaaaagaaaccgaaaccatttcagaaaggttgatacgtgaggctgatacacgagaatatgaactatggcgtccggtccgtcgctttttctccattgtttttctcattgttctattagtttgcattcattcactgataacaactataaaataa

SEQ ID NO: 12744 - DNA, 375 bp, Escherichia coli
atgactttatttgatgagtgtcgggaagcactgagtgctgattttaatatagtagaggggctggctcagcaggaggctctgggcattttaaataagtatcctctcgcgaaaggaagtgttacttggtcagagattagacattctgattatgagagttttgatgagttattgagtgcaaactctgtaaaaaacgatgacatgtttgtctttgcagatgatgcaagtattccagtttttaggtcaaatctaagattaatcgctgaaaatatctatgacgtaacagctttatcgcccaaattattcatttttaatgatgaagtgataatacaacctttattcccaactgatatgttccgtttaggaatcaagaaatag

SEQ ID NO: 12745 - DNA, 570 bp, Escherichia coli
gtggattacgtcaccagttttgaactgccttttcgtctgcttttaacccggacgccacagctgattgttacacttcgggaagcatgggatatcagccagaaaaatgtggtgttcaacgataaacggtttggctgcgtgtacagcctgaaagccagtctttctggtgtgccggatatattccggtatcatctgtctcatcgtattcgccggatggttgggagtgaaaatacatcatcgccatggcagcaaattgcccgggaagtgaaagcgccccgtgaacgactgaagtatgcgctggaaacgggattgcaggtgatcgcactgaacggcctgttttggtcagacagtcagcgtctggtggtggatattctgaggctaagcgccaacagacgtgatacaggaaatcgtccgcatccccatttaccgtcttatatcactggcgctgacactgaaagcatggtcgtcagagactctgtctggcaaccaagggagcagaggccggaggtaattgacaggagccttgcgccgggttacgtatgttctccccggacagacagtctcagttcgtag

SEQ ID NO: 12746 - DNA, 423 bp, Escherichia coli
atgagcgcatacgtagtatctgataaagccatttctactatcgttaaaactctggtgctgaccggcacacttcagcctgtcgaggctgtttcatttggtcagatgatgcttaatctgaatacccattctgttaatgttcgctatcaagaaagcagcccggcgcacgcttttgaatacagtgaaccggaactaaatattaacgacccaaaaacacaaattcaggtgattgtctgcattgatgagtatgaatatcagtcctgcgagtttgccgaatactatgaaacgatggtgcatacagtcctcaaagccataaaatcagcgttacatgaggcttatactgaaacattgcctaatcccgcccagtggaaagctaaaaaatcctatgaactgccgggctattcagaagctgaatggagtttatga

SEQ ID NO: 12747 - DNA, 327 bp, Escherichia coli
atgacgacgttaactcaatgccagcagcaggtgctggatatgctgatttcttaccagcaagagcgtggctttccgccaaccaatcaggaggtggcaaccatgctgggataccgttcagtgaatgcagcggtggagcatcttcgcgcactggagaaaaaaggcgtcatcacgataaagcgtggcgtggcccgggggatcacgcttcataccgcagtgaaggacgacgacagcgaagcggtcggtatcatccgcgcactgcttgccggtgagaagaacgccaggctgcgtgcagcccactggttacatgagaggggcctgaaagtatga

SEQ ID NO: 12748 - DNA, 654 bp, Escherichia coli
atgagtaataaatattgccgggcgctggtggaactgcggaacaaaccagcccatgaactgaaggaagtgggcgatcagtggcgcacaccggacaacattttctggggaattaacaccctgtttggcccgtttgttctggatctgtttactgacggtgataacgccaaatgcgccgcgtattacacggcggaagacaacgcgctggcgcatgactggtcagaacgtcttgcggagcttaaaggtgctgcctttggaaatcccccatacagccgcgccagtcagcatgaggggcaatacatcaccggcatgcgttacatcatgaagcatgccagtgccatgcgtgataaaggcgggcgctatgttttcctgatcaaagctgccaccagcgaagtgtggtggccggaagatgcagatcatattgcttttattcgcgggcgtattggttttgaactgcctgcctggtttatcccgaaggatgagaagcaggtgccgacaggcgctttcttcgctggtgctattgctgttttcgacaagacctggaagggaccggcaatcagctacatcgggcgcgatgaacttgaggcatgtggtgaggcgtttctggcgcaggttcgccagcaggcagaaaaacttgtcagggagatggcggcatga

SEQ ID NO: 12749 - DNA, 336 bp, Escherichia coli
gtgaccctggagccccgtgtcttcggctggatggaccgtctgtgcgaagactactgcggtggtatctggaatctgtacaccctgaacaacggtggcgcatttatggcacccgaaccggatgaagatgatggaaaaacctgggtactgttcaatgccatgaacggtaaccgcgctgaaatgagcccggaagccgccggtattgccgcctgtctgatgacgtacagccatcatgcctgtcgtacggagtgttatgccatgacggttcattattaccgtctgcgggattacgccctgcagcatccggaatgcagcgccattatgcgcatcatcgactga

SEQ ID NO: 12750 - DNA, 483 bp, Escherichia coli
atgagtcttttgaatgaagttcagaaattcattgaagcccatccggggtgtacttccggagacattgcggatgcttttgcaggttactcacggcagcgcgttctgcagtcagcaagcaagttacgtcagagtgggcgtgtggcttaccgttgtgaaggagatacacgcagacatttcccgcgcctgactgagagagcgcaggagccggaaccagttcgtgaaaccagacctgtgcgcaatttctatgtcggcactaacgacccgcgggtgattttgtgcctgatccgccaggctgaagaactggagtccaggggcttataccgtcgtgctgcaacggtgtggatggcggcattccgtgaaagccactcccagccagaacgaaacaattttctggcacgtcgtgagcggtgcttacggaaaagcagcaagcgcgctgcatcgggtgaagagtggtatctgtcagggaattacgtgggggcttaa

SEQ ID NO: 12751 - DNA, 261 bp, Escherichia coli
atgctgatggcggggattcagttcaccgctggtgagcatgagttccagttgtttcatcagcagcggaaaggcctggtccagatggtacgcatccgcgtcgctgaaccggcctctgataccggcgcggtcggcaaggtaatacaaccggttaccctcctgcaccagacgggcgccaaaacagggtgttatggtgcagggcagcccccaccaggggcggttgttatagtcgtcgggataatttgtctcatggtgcgtgtctga

SEQ ID NO: 12752 - DNA, 654 bp, Escherichia coli
atggtcgatcaggactggatggattccagtaaccccggaacctggacggatgaaagtagacaccctgatacacaactcaattatgccaacgaatttgatctgaatatcaaaggctggctcctcaacgaacccaattaccgcctgggactcatggccggatatcaggaaagccgttatagctttacagccagaggtggttcctatatctacagttctgaggagggattcagagatgatatcggctccttcccgaatggagaaagagcaatcggctacaaacaacgttttaaaatgccctacattggcttgactggaagttatcgttatgaagattttgagctaggtggcacatttaaatacagcggctgggtggaagcatctgataacgatgagcactatgacccaggaaaaagaatcacttatcgcagtaaagtcaaagaccaaaattactattctgttgcagtcaatgcaggttattacgtaacacctaacgcaaaagtttatgttgaaggcgcatggaatcgggttacgaataaaaaaggtaatacttcactttatgatcacaatgataacacttcagactacagcaaaaatggtgcaggcatagaaaactataacttcatcactactgctggtcttaagtacaccttttaa

SEQ ID NO: 12753 - DNA, 672 bp, Escherichia coli
atgtttgtggcgcagggcaatcagatattcatgaacgacgtgttcctgaagcgcctgacggcccccaccattaccagtggtggcagtcctccggtattttccctgacatcagacggaaagctgaccgctaaaaatgcggatatcagtggcagtgtgaatgcgaacgccgggacgctcaacaatgtcacggtaaatgaaaactgtacgattaagggcatgctggaggcgactcaggtcagaggtgacttcgttaaagctgtatccaaatcatttccgaaacaggctggtacgtggggtaacacggaaacaccaaacgggacggttacagtcaccatcagcgatgatcataactttgaccgtcaaatcattattccgcccattatctttaacggaatagcgtatagcgatccgggaagtggtaataacccgggaggtacaagatacacgggttatggttttgaagttcgcaaaaacggtgtattaatcgcatccagagaaactaaaggggccattcccggtagctacagtgcggttattgatatgccgagtggcaggggaagcgtcactctggagtttaaggttttccataaaggcaatcagtgggcaggtaatatcaccgactgtacggtgattgtgaccaaaaaagccgcttccggcatcagtattcgttga

SEQ ID NO: 12754 - DNA, 579 bp, Escherichia coli
atgcaggatattattgactgcattcgtgctgaactgggtgccggaaccacgaaaaacgccgtttttcagcatatccagagtctgccccgcggacagcagaaagaggctctgcttgcgtcagccgcactgcccctgttgttccgtccccgtgaggttcaggggacaatgttctgtgatggtggtatgggaggatggcgaaatatgcagggaaatacccctgtaacacctctggtcgatgccggatgcaatatggtgattgtgacgcatctgagtgacggttctttatgggatcgccaggcttttccggacaccacaatccttgagatccgtccccggaaaaggctgaaatatgcaggtgatggtgacaacagcggcggtctgctcagttttacatcggcacataccgacatctggcgtcagcagggctatgaagacacgatgctgacgatggagcatatccggaaccccctggcggcgcgtcaggcactgacccggtcagaggcggtattgcagaaaagccaggatataacggaagaggcagattcggcactgaaaaacgcgatggcccggattaaataa

SEQ ID NO: 12755 - DNA, 333 bp, Escherichia coli
atggcgacaaaagaagagtttaaccattaccagccgctgggtaacagtgatccggctcatacagcaattgcgcctggcggattgagtgcgaaaacgcctgcaatgaccccgctgatgctggatggcactacccgtaagctggttgtgtgggatggcaccaccgacggtgcagccgttggcattctggcggttgctgctgaccagaccagcaccacactgacgttctacaagtccggctcgttccgttatgaggatgtgctctggccggaggctgccagcgacgagactaaaaaacggaccgcgtttgccggaacggcaatcagcatcgtttaa

SEQ ID NO: 12756 - DNA, 333 bp, Escherichia coli
atgacgagcaaagaaacctttacccattaccagccgctgggcaacagtgacccggctcataccgcaaccgcgccaggcggattgagtgcgaaagcgcctgcaatgaccccgctgatgctggacacctccacccgtaagctggttgcgtgggatggcaccaccgacggtgctgccgttggcattcttgctgttgctgctgaccagaccagcaccacgctgacgttctacaagtccggcacgttccgttatgaggatgtgctctggccggaggctgccagcgacgagacgaaaaaacggaccgcgtttgccggaacggcaatcagcatcgtttaa

SEQ ID NO: 12757 - DNA, 207 bp, Escherichia coli; identical to SEQ ID NO: 3489

SEQ ID NO: 12758 - DNA, 543 bp, Escherichia coli
atgaagttaaaattcatctccatggctgtattttcagctctgaccctgggtgttgcgacaagtgcgtctgccgcaatcgtcaatggcggtactgttcactttaaaggagaggttgttgaggctgcatgcgctgtgaatatgaactcagcagaccagacagttcaattggggcaagttcgagcggcaaaattagatgctgacggaaaaatgagttcacctgttggttttgatattgaattaaatgattgtagctcagccgcctcatcaggagcttcaattattttttctggcccccagggtgggcaggcagacattttatccttgcagggtagctcagcgggttcagcaacaaatgtcgggataaaagtaatggattataaaggtgtagcagtcaagttcgatggggttacagctagctcagaatataccattactgatggcacaattaaaatcccattccaggctcgctatgttgctgtaggtggtgcagctggtgctggtattgccaacgccgacgccacctttaaagttcagtaccagtaa

SEQ ID NO: 12759 - DNA, 336 bp, Escherichia coli
gtgaccctggagccccgtgtcttcggctggatggaccgtctgtgcgaagactactgcggtggtatctggaatctgtacaccctgaacaacggtggcgcatttatggcacccgaaccggatgaagatgatggaaaaacctgggtactgttcaatgccatgaacggtaaccgcgctgaaatgagtccggaagccgccggcattgcggcctgtctgatgacgtacagtcatcacgcctgtcgtacggagtgttatgccatgacggtccactattaccggctgcgggattacgccctgcaacatccggaatgcaacgccattatgcgcatcattgactga

SEQ ID NO: 12760 - DNA, 222 bp, Escherichia coli
atgcgtgaacgtgacggacgtaaccaccgcgacatgtgcgtgctgttccgctgggcatgccaggacaacttctggtccggtaacgtgctaagtccggccaaactccgcgacaagtggacccaactcgaaatcaaccgtaacaagcaacaggcaggcgtgacagctagcaaaccaaaactcgacctgacaaacacagactggatttacggggtggatttatga

SEQ ID NO: 12761 - DNA, 222 bp, Escherichia coli; identical to SEQ ID NO: 3488

SEQ ID NO: 12762 - DNA, 1959 bp, Escherichia coli
atgatagtagggatttttttaaggtattttaaaacatacaacggaaatcattacataccgttatcttctggaagtcagttttgtggaattgttggtaacaatggaattggcaaaagttctgttcttgaggctttagattcgtttattaataacaaaccatggaatattaattcttcatttaaaagaacctccagtgacagaccttctccacatattgttcctttatatcttataaagcgagaggaattacatgaagatcatcatgctaaagctgaaatcttaacgcaattagtattagaatatagcaatagtaatgctgatgttacattgacgccaacaacacgaaatataattaatacgttttttgaacatattaacaaattaaaaagaaatttaaatctccaagattattttttgatccctctgggtgtcgagaaagatggtgatgtaagtatttcgattcttaatgggaagagtttatgtcgacttttggaggttgataatcccgataataaagtttcgagcgagttgcttagtaagcactttgggtatttattacatcatgtccgccataagtatgaatatatatatattccaaaggatatagactctgaatcgtttacgaagctagaaacaagtgaagtacaaaagttgatgggtgagtctttagagcagataattaaagatagaatatctgatagaaccataagtcaaatcaatacagggcttgccaaatttctggatggtgttgaagaggagcttgaagaatatggttatagaacatctggcgagagacaatcgcgattaaaaaagaaagatgtttataatttgattatcgaagcattcttcaaagttaggaaattaaataaaaagcagaattcaggttggattgaaattagctcgctaagttcaggggagaagcaacgtgcaataatggatattgcatatgggtttcttaccaatcatagagaaaatggcgataatctgattattggaattgatgagccagaatgttctcttcatatgtctgcatgttttgaacaatttgaaaagctctattctattagtggtatatgtgaacaattaatatttacttcacattggtatggctatcttccaaccgtcgaaaatggatgtaccacaactatccttaaaacagattcaactcatcattttgaattatatgatcttgccagttatagagaagaagtcaggaagaaagtaaaaacctcttccccgggtatgccatttgatataaaaataaaaagtgtaaatgaccttatacaatccataatatctagctgtttggctgagaaaccttacaattggttgatttgtgagggtactacagaaaaaatatatctttcgcattatctaaaggacttggtagaaaataaaaggctaaggattgtgcctgtagggggagctagtgaagttaaaaaaatatttaagcatttagaagcttcttatgaagagttcaaaaaagacctcaaaggaaaagtgttcttactaaccgatacagattcagagttggtgtcatatgataccccagttatgccgcatgttgtttgtaagcgaattgttagtgtaggtgattcagtgaagttggttgatatttcttccaatccagtttctcctgcaacagaaatagaggattgtcttaatcctgtatcgtttatagaggctttaacatcattttcttcacgttttcctgagcttcaggcattgctgcctaatagtaatgttatgatagatgaaagacattcatcgtttgctgcgatggatttgtcacccaagaacaaaaaaacgcttgatgctttttttgaccgtgaaggaattaagtttgatttttcaaaggaatatatttcaatctgtgagcgaaatgagcggaaaaggccagagtggattgccaaaattgaaaatttttttataagtgataaacctgtaaagtttaattga

SEQ ID NO: 12763 - DNA, 438 bp, Escherichia coli
gtggctgaactgcagaaggtggatgagtggctggcggccttgctggcgaatctggagcctgccacacgccagcgtatgatgcgggaactggcgcaggagttgcgccgcaatcagcagaagaatatcaggctgcagcttaaccctgatggcagcggctttgagccgcgccgggtagcagcccgcagtaagaaggggcgcatcaaacgccagatgttcgccaaattgcgcactaataaatacctgaaaactgccgccacagcggattatgcctgcgtgtattttgatggaaaagtccagcgcatcgcctgtgtacaccactatggactgcgtgaccgtgttagtcgaagaggtttaaaagtacagtaccctgagagaaggcttttaggatttactaaggatattagtaacttgaacttgggtgtttacttaaaacgctaa

SEQ ID NO: 12764 - DNA, 447 bp, Escherichia coli
atgattgctataccaaatgaagatgctgagtcttggttgtccactttaaaaacgtatcaatcttcatctgtcaggaattttctcgaaaatggcgatgaagaaaaggctcttgagctatggctaactgcatctggcccaagttcagttgctcaatttggcggtgataattcaaaaatgccgggaagaaaagcgtttgttgagcagtttaaattagagtttaaggcttttgtatgtggaggtgataaatatgcagaggagagggaatgtttaggagcactgactggtgatgttaaaacatactttgtaggggtgatctcttcggcaattgcgggttctttgggggcaacagcaacatttattgctccagctgtagtaattatgttgatagctgtctcaaaaatgggaattaatgcttggtgttcattagagacaacgacagaatcttag

SEQ ID NO: 12765 - DNA, 648 bp, Escherichia coli
atgattggtcctgaatatgtcgtagttgttggcgtgcttaatgcaggtttggttagttttttaggaacaggtttttttatttctaaggataaaataattacttcccgccatgttattaatgggttttcttctaacttagttatttctccatctaatataaataactttaatagttatcaggatacaagtgttgataaatttcaatgtattggagttgatgttattgatgaagatccaataaaagacttatgtgtgttaaaaattaaaaatgcacctgtttatgaaccttgcctaaaaattgctactcttgacgatgttaatgtcggtgaagatgtgggtattttaggtttcccacattgtaatgaaaatagaaaagtattgacatttcaaacggcaaaaataggtgcaaaagttttactttcaagcagtaatattcaatctaaacatgccgttataaatatccaaaccagacctggtcaatcgggatcgattgtatttaatttaaaaaatgactcggtaataggcgtcttggttggcgcttatgcaaataattctggaggttctgttttggttggaggtattaatccagctgaactacatcagacaacttatgcggtttctgcagaatatgttaaggatatgttatga

SEQ ID NO: 12766 - DNA, 1218 bp, Escherichia coli; identical to SEQ ID NO: 7337

SEQ ID NO: 12767 - DNA, 2109 bp, Escherichia coli
atggaacaggatgctcgtttactcagtgcaatgcaaaagatgtgtgaccaaaaaatgccacttaatactcttgagagaaaatggcaaatcgcaaatattccttatatgttacaagaaaaacgttatcaggaactagatgaaatttataaccaggtattacaggagagtttcacttctcgtcaggctgaaaagcgctattttttatcctggacccaaatgtgcaactatttttatgatatgaacacgctagttgatgccggaacagaaggtttaagactcattaaaacctggcagcaagcaagacctcattctacacatgcctggcttgccgaagcacaatactggaatcaccgtgcatggttatatcgcagttatggctgggcaaatgataccacacatgcaatgtggctttgtgctggtgcatgtaatgaacaaatggtcatcgctacacttaaagcaattgattgtgacccacgacaatggatggctgcattacttaccagcaccaactcaaaagtatttggtcagccagcctggctggcggcacaccttaacggtgatagtgtcgcaggaataccattaatgatcgcactgaaaaattatcaccgccgctccccgcaagaagtggaagcgttgatggcgtattccggactttcgtttgagcatgcaatatgccccgttttgcctcgccccaatatacttcctgagtatgatgatgatggtgggcaaaaatattggctttctgtttgcctgactatttttcctcacactttttatccttttgttgaatatataccatttcgaatgccacgctggggagggtcgcataaagaaatttccgaattgctggattcagtaacctgtaagcacttatctaccgaagaacatgactatatggatctcttactttggtgggatgattaccgagatgtcagcattgaggacattgcgcccgaggagcaacaatatgcaatcgacttagcagagaatattgctcagtacgcacaatttcaggaatgtcgccataatgccctagagtggttacttgcctgctataacaagcagaacgatcacgataagttgtggtgctgtatacagcgagcggtgatggaagacatgaagctcaataattattacactgcgtacgcgataaaatttgcattaagttattatccagattcattctggatatataattttatctgccaaaattcacagaatacaacttatgctacacctgttatttatagggggtttttccagcgagagggtattttgggttttgaaaaagatgaagggcagggcgatgcttggctggaaaaagctagtgacattaaatacaatcataattggcggtcggcaataaaagatttgagttggtttgacctttctgattatttcattccgcttgcgacaattggtaagcaaagaaatattcctgccgcattaaatttagttgctcttgaatatttggataaggaagacaatacaaaattaccttatgaaccatctacagctttggagtattttcgacgggcacttaaaatacttcaagatgacctaaatttccatagctcggtatcttatccactggtaaaaaattatggttatagcgaacatcaacaagatctacaaaatatttattttagcattgctatctgctaccaggcactaaataaacaagaaatttctaaagaaacacgggctatttatgaaaaaaatctccttgacaatttatttctggctcatgaagctggacatgaaaaagcatgggggctttttttacttaatatctttgaggtgaaagaactctcacttgctcatttgcacctccaacaggtacaagaagaagcgaataaaggtacgctcgaagcaatgattactttgtcgcgcctgtatggtaacaaagaagatgaaaaactgtttaacatgaaactcagtgcgcgctggacacattttgccgagtctttatatccagataacgaaattattgcagattgcctttatcatctccatttctccagcctgtggaaacgctgtcgttatgcctggtatacctttcgtattccagctagcgaattacccggccaggttaacagtatggtgtaa

SEQ ID NO: 12768 - DNA, 717 bp, Escherichia coli
atgagtcttatcattgttctcctggtcgcaatatttatttttatctatagatacaaaaaaaacaaaccacaaatcgatgcttttattgctaaagaaaaagaaaaggatctaatcaaggacaaaagacgagcaacaaagagacgtaagtgggcattagcaattggtgatatagttgctcgtcgtaatggactgtcagtaaatggcttcacgttagatttaaagttgactgatgataagcgtcaacaacttgcactacaggttaaacaagagctaggaacagaaacttaccaaagcaacgaagatttccgtcaacaaattggcgttatattacagcgctgggctacagggcttggtaattctccacatgatttttacgaacaactggcagcacaaggccaggttctggatgggctggcgtttgactgtatgcgcactgcttttttaactcgttgcatcgccggtttaggctggtgcgatgaaaaccaggcctggatagtgttattactgaatgctcaaagagcacaagattgtttcgcttcatgggaagattatgccagtgcttatgttcgcgcccgacaaaaatggttaatgatatacgatacccccgtcgccactgcgaaccgtgatttaaaggaagtcactgcatggttgaaagatccatccagtaactggaaaaaattgccgtggaatgaatttaaaatttttgaacctaattaa

SEQ ID NO: 12769 - DNA, 1215 bp, Escherichia coli; identical to SEQ ID NO: 421

SEQ ID NO: 12770 - DNA, 219 bp, Escherichia coli
atgtttcattgtcctttatgccagcatgccgcacatgcgcgtacaagccgctatatcactgacacgacaaaagagcgttatcaccagtgtcagaacgtgaattgcagcgccacattcatcacttatgagtcggtacagcgatacatcgtgaagccgggagaagtccacgccgtaagaccgcacccgttgccgtcagggcagcaaattatgtggatgtaa

SEQ ID NO: 12771 - DNA, 2448 bp, Escherichia coli
atgagtaacaatgtaaaattacaggtattgctcagggctgttgaccaggcgtcccgcccgtttaaatccatccgcacagcgagtaagttgctgtcgggggatatccgggaaacacaaaaatcactgcgcgagctgaacggtcacgcatcccgtattgagggattccgcaagaccagtgcacagctcgccgtgactggtcatgcacttgaaaaggcacggcagcaggccgaagcccttgccacacagtttaaaaacaccgaacgcccgacccgtgctcaggcgaaagtgctggaatccgcaaagcgtgcggcggaggacttacaggcgaaatataaccgcctgacagattccgttaaacgccagcagcgggaactggccgctgtgggaattaatacccgcaatcttgcacatgatgagcagggactgaaaaaccgtatcagtgaaaccaccgcccagcttaaccggcagcgtgacgcgctggcgcgtgtcagtgcgcaacaggcaaaacttaacgcagtcaaacagcgttatcaggccggaaaggaactggccggaaatatggcctcagtgggcgctgccggtgtggggattgcggcggcgggaacgatggccggtgttaagctgctgatgcccggttatgagtttgcgcagaaaaactcagaattacaggccgtgctcggtgtggcaaaagattctgccgaaatggccgcgctacgcaaacaggcgcgccagctcggcgacaacacagccgcctcggcggatgatgctgccggtgcgcagattatcattgcgaaagccggtggggatgttgatgccattcaggcggcaacgccggtcacgctgaatatggcgctggcgaaccgccgcacgatggaagaaaacgccgccctgctgatggggatgaaatccgcctttcagctttcaaacgataaggtcgctcatatcggggatgttctctccatgacgatgaacaaaaccgccgccgattttgacggtatgagcgatgcgctgacctatgccgcacctgtggcaaaaaatgccggtgtcagcattgaagaaacagccgcaatggtcggggcgctgcatgatgcaaaaattaccggttcaatggcgggaacgggaagccgtgccgtgttaagccgcctgcaggcaccgacgggaaaagcatgggatgcactcaaagagcttggtgtgaaaacctcagacagtaagggaaacacccgaccagtatttaccattctgaaagaaatgcaggccagttttgagaaaaaccggctcggtactgcccagcaggctgaatacatgaaaaccattttcggggaggaggccagttcagccgccgccgtgctgatgactgccgcctcaaccggaaagctggacaaactgaccgctgcgtttaaagcctcagacggaaagaccgcagaactggtaaatatcatgcaggacaacctcggcggtgactttaaggagtttcagtccgcttatgaggcggtggggactgacctgtttgaccagcaggaaggcgcactgcgtaagctcacgcagacggccacaaagtatgtgttaaaactcgacggctggatccagaaaaacaaatcactggcgttaaccattggcctaattgccggtggtgcactggcgctgactggcatcattggtgccattggcctcgtagcctggccggttatcaccggcatcaatgctattatcgcggcagcaggcgcaatgggggcaatcttcacgacggttggcagtgctgttatgacggccatcggggcgattagctggccggttgtggccgtggtggctgccattgtcgccggggcgttgcttatccgtaaatactgggagcctgtcagcgcattctttggcggtgtggttgaagggctgaaagcggcatttgcgccggtgggggagctgttcacgccacttaagccggtgtttgactggctgggcgaaaagttacaggccgcgtggcagtggtttacaaacctgattgctccggttaaagccacccgggacaccctgaaccgttgccgtgacacgggcgtcatgttcgggcaggcactggctgacgcgctgatgctgccgcttaatgcgttcaacaaactgcgcagcggtattgactgggtactggaaaaactcggtgttatcaacaaagagtcagacacacttgaccagaccgccgccagaactcatgccgccacgtatggcaccggtggttatattccggcgaccagctcttatgcaggctatcaggcttatcagccggtcacggcaccggctggccgctcttatgtggaccagagtaaaaacgaatatcacatcagcctgacgggtggtactgcgccggggacacagcttgaccgccagttacaggatgcgctcgaaaaatacgagcgggataaacgtgcgcgcgcccgtgccagcatgatgcatgacggttaa

SEQ ID NO: 12772 - DNA, 378 bp, Escherichia coli
atgaaatcaattttagaggtctttactcaaggaaatactaaagaaaaactggctgttatcgccgatctcacaaccattgcgggaatatcgattgcaactattattgctggtttgttaaccctagttgcaaaaacagataaactagatgttggaaatctgtttggagttgtcataatatctctgctcggattggctggtgtttgctgttttgtggccttatttatttgggttataacccaaatgtctaaaccatggggaacacctcggggggttcagcccttagttaagtgtgctatttcccttatctttatctgtatgtttttgctggctgtctttacattttatgagtttatttcttcgatgagcatacgctattga

SEQ ID NO: 12773 - DNA, 843 bp, Escherichia coli
atgaaaaaagaattgtttggacgttgcccgtttgatcttgacgaagatgtaaaaaaaatagccgcgataaataaatatatccatgcaaaatttgaggagcataaaaataaaatagacaacctaaagggtgtggaacaaaaattgatggtcttacagtactttaatgtactgaatgaacttagtaatcaggctatctcttctttgaatataggagccttttcagcatcggaagtattagctagggttataatagaacaggctgccaatcaattttatatagcaatagatgatggcgaaaatgcacaagcattactcaaggctagtaagaaattagttcatagtaatggaaaacggtggctggagtgtttaaaatccaaaggaatgactaatccagcagcaaatgaaaggattcgcatgggaaaagaactaactgatctatttaatagattgtggccaaatacacctgaatatccaggaaccagaagactttttgaattaattggctgggaaacacactatcatgcccattacgttcccctttgtgattcaatacatacattctctgatgatatggtaaatatagtatctctatataatgcaatccaaagtgatgaaaatactgctatcgaattcattcttgcagttaaacaagaaaataaacggctggcaatttataattttgtaattgctacggcccttcggtgtgaggccttagtaaatgtatttaactctttaggttatcaggatattataacagaaatgacaccaacaatagatacagtcaaccagactataattcgatatgatgattttgatcattccagaattgatgattgtcaataa

SEQ ID NO: 12774 - DNA, 528 bp, Escherichia coli
atgcagcatttaaaaaatattactgcgggtaatccaaaaactgttgcccaatatcaactgacaaaaaattttgatgttatctggttatggtccgaagagggaaaaaactggtatgaggaagtaagtaattttcaggaagacacgataaagattgtttacgatgagaataatataattgtcggcatcaccagagatgcttcaacgctcaaccctgaaggttttagcgttgtcgaggttcctgatattaccgccaaccgacgtgctgatgactcaggtaaatggatgtttaaggatggtgccgtgattaagcggatttatacggcagacgaacagctgcaactggcggaattacagaagtcagctttgctttccgaagctgaaactatcattcagccactggaacgctctgtcagactgaatatggcaacagatgaggagcgtagccgactggaagcatgggaacgctacagtgttctggtcagccgtgtggatcctgcaaatcctgaatggccggaaatgccgcaataa

SEQ ID NO: 12775 - DNA, 2730 bp, Escherichia coli
atgagcacgaaatttaaaaccgttatcactactgccggagccgcaaagctggcagccgccactgtccccggcgggaaaaaagtaaccctgtctgcaatggccgtgggtgacggtaatggcaaattgccggtgccggatgccggtcagacgaaactggtgcatgaggtctggcgtcacgctctgaataaagtcagcgtggataacaagaataaaaactatatcgtggctgaactggttgtaccgcccgaagtgggcggcttctggatgcgtgagcttggtctgtatgacgatgccggaacactgattgcggtatccaacatggctgaaagctataagccagaactggctgaaggctccgggcgtgcgcagacctgccgcatggttattattgtcagtaacgtggcgtccgttgagctgagtattgatgccagcacagtgatggcgacgcaggattacgtcgatgacaaaatcgcagagcatgagcagtcccgccgccatcctgacgccacgctgacagaaaaaggttttactcagttaagcagtgcaacaaacagcaccagtgagtcattggcagcaacgccaaaagcggtcaaggcagcaaatgacaacgcaaattcacgtctggcgaaaaatcagaatggtgcagatatccaggataaatcagcttttctggacaatgttggcgttaccagcctgacgtttatgaaaaacaatggcgaaatgccggttgatgctgatctgaatacgtttggttctgttaaggcttattcaggtatctggtctaaagcaacgtccaccaacgcaacactggagaaaaacttccctgaagataatgctgtcggtgtgcttgaggtttttactggcggcaattttgcaggcacgcaacgctataccacacgtgacggaaatttgtatatccgcaaactcattggaacatggaatggtaatgatggaccatggggagcatggcgccatgttcaggctgtaacgcgagctctaagtacgaccattgaccttaactctctcggtggcgcagaacatttaggtctatggagaaacagcagttcagcaatagcttcttttgaacgacattaccccgagcagggaggagacgcgcagggcattctggaaattttcgaaggtgggctatatggacgcacacagcgttatacaacccgtaacgggactatgtatattcgcggcctgacagccaaatgggatgcagaaaatccacagtgggaagactggatccaaattggttatcagaccagtagtaccttctatgaggatgacctggatgatttgatgtctccaggtatttacagtgtgacaggcaaagcgacccacaccccaatccaggggcagtctggttttctggaagtcatcaggcgcaaggatggtgtctatgttttgcaacgttacacgaccacaggaaccagcgcagctacaaaagaccgtttatatgagcgagtgtttcttggtggctcatttaacgcgtggggggagtggcgacagatttataactcaaactctttgccgttagagttgggtatcggtggcgcagtggcaaaactcaccagcctggactggcagacatacgattttgtgccgggcagtctgataaccgttcggctggataacatgaccaatattcccgacggtatggactggggcgtcattgatggcaacctgataaacatctcagtcggtccgagtgatgattctggttcgggacgctcaatgcatgtatggcgcagcactgtaagtaaagccaactaccgcttttttatggtgcgtatttcaggaaatccgggaagccgcacgatcacgacaagacgtgtgccaattatcgacgaagcccagacatggggcgcgaaacagacattcagtgctggcctttctggtgaactgtccggcaatgcggcgacagcaacaaagctgaaaacagcccgtaaaattaataacgtttcgtttgatggaacatcagatattaacctgacgccgaaaaatattggtgcatttgcttcaggaaaaacaggagacaccgttgcgaatgataaagccgttggatggaactggagtagcggagcctataacgcaactattggtggggcatcaacgttaattcttcattttaatatcggggaaggaagttgtcccgccgcccagtttcgcgttaattataagaacggtggtattttttatcgttctgctcgtgacggttacggattcgaggctgactggtctgagttttataccacaacgcgaaaacctacagcgggagatgtcggtgcactgccgttatctggtggtcaattgaatggtgctctgggtataggaacatccagtgctcttggcggtaattcgattgttttgggtgataatgacacgggctttaaacaaaatggtgatggtaatctggatgtttatgctaatagcgtccatgttatgcgctttgtctccggaagcgttcaaagtaataaaaccataaatattacggggcgtgttaatccctcggattacggtaactttgattcccgctatgtgagagatgtcagacttggcacacgtgttgtccagaccatgcagaaaggggtgatgtatgagaaagcagggcacgtaattaccgggcttggtattgtcggtgaagtcgatggtgatgaccccgcagtattcagaccaatacaaaaatacatcaatggcacatggtataacgtcgcacaggtgtaa

SEQ ID NO: 12776 - DNA, 531 bp, Escherichia coli
atgagtgattcgcgcctgctgccgaccggctcatcaccgcttgaagttgccgccgcaaaagcctgtgcggaaattgaaaaaacgccggtcagtattcgtgagctgtggaacccggacacctgtccggcaaatctgctgccgtggctggcgtgggcgttttctgttgacaggtgggatgaaaagtggccggaagcaacaaaacgcgccgttatccgcgatgcgtatttcattcactgccataagggcactataggcgcaatccggcgtgtggtggagccgctcggctatctcattaacgtaaaggaatggtgggagacaaacgacccgcccggaacctttcgccttgatatcggtgtgctggaaagcggcatcacggaggagatgtatctggaaatggaacggcttattgccgatgccaaacccgcaagtcgccaccttatcggtctgaacattatccaggacattcccggctgtctgtatacaggcggtgtggtctgtgatggtgatgttattactgtttatcccggataa

SEQ ID NO: 12777 - DNA, 2217 bp, Escherichia coli
atggaacttagattaaaaaatgttaccagttataagaaagacgccttcacaatactgaatcttgaaaaaagagtaaacatactatacggccaaaatggttgtggcaaatctaccatttcaaattatttctacgactctacacacacagattataacgagtgtgaatgtacccttcttgacaattacaaacctcttgtttacaacactaaatttattgaagataacttctataatgcacaggaacaaaaaggtgtttttacattaagtaaagaaaatgcagatattgaaaaacaattaattgaaaaagaagcaattaaacagcaactcacagagcaatatagacaaaaaaaaggagtgttattgaaattagaagcagaaatggaaaaaaaagaaaatgaatacatcgaatcgatctggaaaaaaacagaaccaatcagaaactctgtactaaaaaccttaatgaaaggtaaagttggctataaaagacctttttttgagatgataaaatcatcctcaccaatcacctttattaatttaaatgatatagcaaaagaatactctatactattagaaaatagaaacaatgaaaccgcattaataactcctttacatccatataccccatcaattgatgatgtaaatacattagcaacacctataatagatacaagcaatagctatttatcagaaaccattaataaacttcataatcttgactgggtaaaaaaaggtaaagaacattatttagacggttctacatgtccgttttgtcaggaaaaaactattagtcacgaatttttaaatgcccttaaatcaatatttgacgaaagttattcaaagaaagtaaaacagctctcagatataaagtcagtttatgagaaaaataccatatatcattttaacgaaatacaaaacaatatatcatcatgtgcactaatcaatgagaaagataaagagaacattatttccaatattaaaatattgcaaaacattgcagaaaaaaatttaataaacattattgataagatcaacaatccatcaacatgcgttacattagaaattgataaagaactagaaaatcatgttcaggaaagcataggcgctgttaacaagaaaataagagacataaatgataaggttaaaaaactcaaagagtatgagaataaaatcggaaaacaagtttggggggctctccatgctttttgcagcgatgatttagagaatttatccaaacacaaagaaaaattctttgatatcaaaaagaaagttcatgatgaattaaataatattgagcaacaaggaaaagaaaataatctcacaataaaagcattgcgagataaaatatctaacattgattctacgatagactcaataaacacccatttaaaaaatctagggatctctggtttttgtattgaaaaacatgcagaaagaaaagatatgtacattatatctcgaccagggcatacaaaaaaccaaaatgtttatagatctcttagcgaaggtgaaaaaacactaataacgtttctttattttttagagtgctgtaaaggtaaaaccgataaaaatgataccgatagcagggatatttttattgttattgacgatccaatatctagtctatcgcaaaactatgtctacgacatcgcatcaattattcatcaccacattataaaaaatgaattaacaaagaaggtattaatccttactcacaatctttatttctttcatgaacttattaagctatctcctaaaagcagagaagacaaactatttaagaaaaactattatctaggtagagtaacgaaaaatgattttagtataattactgaaatacaaaaaaacagcatacagaatgaatatcaatctttgtggcaaatattaaaagatgcaaaagatggcaaagcaaacaaaatcataataccgaatattatgagaaacatactagaatattattttgcatttgttcatagaacagatgctctacaagatgaattaacaaagttggcacgcgacgatagcaacagtgatttcaaagcattctacagatacattaacagaggttctcactctgatgcggtaaatattactgatatgggcgacatagacccagataaatacctaaaacaattgagaacaatattttcagctactggtgacgaaatgcattatttaaaaatgatggacgaactagaagaggaaaacgttaccgcttag

SEQ ID NO: 12778 - DNA, 276 bp, Escherichia coli
atgagcaagcaagtaacactcatgactgatgcgattccttatcaggagttcgcaaaactaataggaaaatcgacaggagcggttcgtcggatgatcgataaaggaaagctgcctgtaattgatatgaccgatccacaatcagcttcaggtcgtgcaggtgaatattgggtataccttccggcatggaataacggactaaaactggcttatgaaagccgccctaaagagattcgtgacggctggttgatgtggttaggtctcggtgaaccacgttaa

SEQ ID NO: 12779 - DNA, 300 bp, Escherichia coli
atgtcaaacacgataagcgagaagatagtcttaatgcgaaaatcagagtatttgagcagacaacaacttgctgatttaacaggggttccgtatggcacgctgagttactatgaaagtggtcgttcaacacctccaacagatgtcatgatgaacatcctgcagaccccacaattcaccaaatacactttatggttcatgaccaatcaggtcgctcctgagtccgggcaaattgcgcccgctctcgcacactttgggcaaaacgaaacaacgtcgccccactccggtcaaaagactggttaa

SEQ ID NO: 12780 - DNA, 1014 bp, Escherichia coli
atggcaatcaaaaaactcgatgatggtcgatatgaagtggacatccgccctactggacgtaacggaaaacgcatccgtaggaagtttgataagaaaagcgaagctgtcgctttcgaaaaatacacgttgtacaaccaccacaataaagaatggctatcaaaaccaacagacaaacgacgtctgtcggaactgacacagatctggtgggatttaaagggtaaacacgaagagcatgggaaatctaatcttggaaaaattgaaatcttcacaaaaataacgaatgacccatgcgcatttcaaatcacgaaatcccttatcagccagtactgcgccacccgaagaagccagggtattaaaccttcgagtatcaatcgtgatttaacatgtattagcggcatgtttacagccctgattgaagcggagttattctttggtgagcaccctatcagagggacaaagaggcttaaggaggaaaaaccagaaacaggctatctcacacaggaagaaattgccttactgcttgcagcacttgacggcgacaataaaaagattgcgattctttgcctgagtacaggagcacgttggggagaagcagctcgtttgaaagcagaaaatatcatccataaccgcgtcacgtttgttaaaacgaaaacaaacaaaccacgcaccgtcccgatttcagaggctgttgccaaaatgatcgcggataacaaacgaggttttttattccctgatgctgattaccctcgcttcagacgaacaatgaaagcaataaaaccggatttgccaatggggcaagccacacatgcactaaggcacagctttgccactcatttcatgattaatggaggaagtattatcacgctacaacggatactaggtcacacgcggattgagcaaactatggtttacgctcattttgcgccagagtaccttcaggacgccatttctcttaatccgctaagaggtggtactgaggccgagagtgtccacacagtgtccacagtagagtaa

SEQ ID NO: 12781 - DNA, 243 bp, Escherichia coli
atggacaaggaattaccgtggctggcggataacgcccaactggaacttaaatataaaaaaggcaaaacaccactcagccatcgcaattggccaggcgaaccggtgcctgttatcactgaaagcatcattcagacactgagtgatgaattgctacaaaaagcagagaagaaaaaaacattgtctggcgttatgaaaacttttcactggagtggcagtccgccatcacgcaggccatcaacttga

SEQ ID NO: 12782 - DNA, 498 bp, Escherichia coli
atgactgctattaatcgcatccttattgtggatgatgaagataatgttcgccgtatgctgagcaccgcttttgcactacaaggattcgaaacacattgtgcgaacaacgggcgcacagcattacacctgtttgccgatattcaccctgacgtggtgttgatggatatccgcatgccagagatggacggcatcaaggcactaaaggagatgcgcagccatgagacccggacacccgttattctgatgacggcctatgctgaagtggaaaccgccgtcgaagcactacgctgcggagccttcgactatgttatcaaaccgtttgatctcgatgagttgaatttaatcgttcagcgcgctttacaactccagtcaatgaaaaaagagatccgtcatctgcaccaggcactgagggcacattctcaccaacagcccggcgatgatggacatctgcaaagacaccgccaaaattgccctttctcaggccagcgttttgattag

SEQ ID NO: 12783 - DNA, 1185 bp, Escherichia coli
atgaaaaattgtgtcatcgtcagtgcggtacgtactgctatcggtagttttaacggttcactcgcttccaccagcgccatcgacctgggggcgacagtaattaaagccgccattgaacgtgcaaaaatcgattcactacacgttgatgaagtgattatgggtaacgtgttgcaagccggactggggcaaaatccggcacgtcaggcgctgctaaaaagcggactggctgaaacggtgtgcggattcacggtcaataaagtgtgtggttcgggtcttaaaagtgtggcgcttgccgcccaggcaattcaggcaggtcaggcgcagagcattgtggcggggggtatggaaaatatgagtttagcgccctacttactcgatgcaaaagcacgctctggttatcgtcttggagacggacaggtttatgacgtaatcctgcgcgatggtctgatgtgcgccacccatggttatcatatggggattaccgccgaaaacgtggctaaagagtacggaattacccgtgaaatgcaggatgaactggcgctacattcacagcgtaaagcggcagccgcaattgagtccggtgcttttacagccgaaatcgtcccggtaaatgttgtcactcggaagaaaaccttcgtcttcagtcaagacgaattcccgaaagcggattctacggctgaagcgttaggcgcattgcgcccggccttcgataaagcaggaacagtcaccgccgggaacgcgtctggcattaacgacggtgctgccgctctggtgattatggaagaatcttcggcgctggcagcaggccttacccccctggctcgcattaaaagttatgccagcggtggcgtgccccccgcattgatgggtatggggccagtacctgccacgcaaaaagcgttacaactggcggggctgcaactggcggatattgatctcattgaggctaatgaagcatttgctgcacagttccttgccgttgggaaaaccctgggctttgagcctgagaaagtgaatgtcaacggcggggccatcgcgctggggcatcctatcggtgccagtggtgctcgtattctggtcacactattacatgcaatgcaggcacgcgataaaacgctggggctggcaacactgtgcattggtggcggccagggaattgcgatggtgattgaacgattgaattaa

SEQ ID NO: 12784 - DNA, 1554 bp, Escherichia coli
atggatatcattggcggacaacatctacgtcaaatgtgggacgatctggcggacgtttacggtcataaaacggcgctgatttgtgaatccagcggcggagtcgttaaccggtatagttatcttgagttaaatcaggagattaaccgcacggcaaacctgttttatacgctggggattcgcaaaggcgacaaggttgctctacatctcgacaactgcccggaatttatcttttgctggttcgggctggcaaaaattggcgcgattatggtgccaattaacgcccgcctgttgcgcgaagaaagcacgtggatcctgcaaaatagccaggcgtgcctgctggtgaccagtgcgcaattttatcctatgtatcaacagattcagcaggaagatgcctctcagttgcggcacatttgcctgatagatatggcacttcccgctgatgatggcgtgagttcgtttactcaactgaaaaatcaacaacctgccaccttgtgctatgcaccgccgctatcgactgacgatacggcggaaattctcttcacctccggcactacctcccgaccgaaaggggtggtgattacccattacaacctgcgcttcgctggatattactccgcctggcagtgtgcactgcgtgacgatgacgtctacctgacggtaatgcctgcgtttcatatcgattgccagtgtactgcggcgatggcggcgttttctgccggggccacctttgtgctggtcgagaaatacagcgcccgcgccttctggggacaggtgcagaagtaccgcgccaccattaccgaatgtattccgatgatgattcgtacgttgatggtgcagccgccttcagcgaacgatcggcaacaccgcctgcgggaagtgatgttttatctcaacttgtcggaacaggaaaaagacgcgttttgtgaacgcttcggcgttcgcttgctgacgtcttatgggatgacggaaaccattgtgggcattatcggcgatcgccctggcgataaacggcgctggccgtcgattggtcgggcgggcttttgctacgaagcggagatccgcgacgatcacaatcgtcccctcccggctggtgagctcggtgaaatctgtattaaaggcgtaccagggaaaaccatcttcaaagagtattttctcaacccgaaagccactgcgaaagtgctggaagccgatggctggctacataccggcgataccggataccgcgacgaagagggctttttttatttcgtcgatcgccgctgcaatatgatcaaacgcggtggcgagaatgtctcctgcgtggagctcgaaaatatcatcgccacccatccaaaaattcaggatatcgtggttgtgggtattaaagattcgattcgcgatgaagccatcaaagcatttgtggtgctgaatgaaggtgaaacattgagcgaagaggaattcttctgcttctgtgaacagaatatggcgaaatttaaagtgccctcttatctggagatcagaaaagatctgccacgtaattgctcggggaaaataattagaaagaatctgaaataa

SEQ ID NO: 12785 - DNA, 390 bp, Escherichia coli
atgaactacgcgcactttgtcaacaatctgacgttagcttcagaagtgagtattaatgctcatataccacgtacgtcccggctcgttataggtatacgccccggcacctgcgatatagttggctcctgccagatcgcccgtggtctgggcattacccgcacgccacaaacgtttgtcgaacaggttgtccacgccgccggtcagactgacattcttggtcacatcccaggtcgcgctcaggccaacaatgctgtacggactgatttctttggtttccggtccaaccgctggctgacctttatagttgtacttcttcggctgctgtttgccgtactaggtgaaggtcgtttgcatcgacaaatcttcccgtgcctgccagctcagcgttga

SEQ ID NO: 12786 - DNA, 306 bp, Escherichia coli
atgaccacttttaccgacaaagaactgattaaagaaattaaagagcgtatcagcagccttgacgtgcgagacgatattgagcgccgtgcttatgaaatcgcactcctatctctggaagtagaaccagatgaacgcgaatcttatgaattattcatggaaaagcgtttcggtaacttagtagatcgtcggagagcaaaaaacggcgataacgaatacatggcatgggatatgactctcggttggatcgtctggcagcaacgagctggtatccatttttcaacaatgtcacagcaagaggtgaaataa

SEQ ID NO: 12787 - DNA, 363 bp, Escherichia coli
atgcgcatgaatgttttcgaaatggaagggtttcttcgtgggagatgtgtaccgcgagatctgaaagtaaatgaaacagatgctgaatacctggtgcgtaaattcgatgcgcttgaagctaaatgtgcagcacaggaaaacaaagtaataccagtgtcaactgaactgccaccagcaaatgaaagtgttttgttattcgatgctaacggagaaggctggctaattggctggcgttctctctggtacacctggggacaaaaagaaaccggagaatggcagtggacatttcaggtcggggaccttgaaaacgtcaatatcactcactgggcagtaatgccaaaagcaccggaggctggagcataa

SEQ ID NO: 12788 - DNA, 162 bp, Escherichia coli; identical to SEQ ID NO: 8606

SEQ ID NO: 12789 - DNA, 297 bp, Escherichia coli
atgcaagcgataggattcattgtttatatcgtcgttggcctttttcagttggcagcaattatggctgggcttgaatcatggtggggattgcactggataattgcagcccccattgctttcatcgtgagctatattccatttgttggagcgattgttggtatggttggtgctgtggatgtatggcggtgggagtggtggcaggctggccttctcttctttggtgggatcatctttgctattgtctgcggtggaatgtcatcatttttcgaacggctatcattcagaaaaggaacgtga

SEQ ID NO: 12790 - DNA, 306 bp, Escherichia coli
atgacgatcacaaaacaacgggtagaagaaatcatatcccgcattgaaatgtatgggcatggcgcagggtataccgccgaagaggtttatgccctagctgtactggcgctgaatttatcaaatatcgcaaacctgaagcgatacgagcttgatatggatggttgtgactcgttcggtcaggagtgtggcgctgacatgactgaagatcctgatggcgattatgtcctgtttgatgacgtggttaagttgtttgagtttgatacattcgaaagccctgcaagggagacaaccagtgaacaagattga

SEQ ID NO: 12791 - DNA, 831 bp, Escherichia coli
atggcaagcagctggattaaggttgaagttatcactcctgataaacctgaaatttttcagatagcagaaattctgggtattgatccagatgctgttcttggaaagctggttcgtatatgggcatgggctgaccagcaaacaatagacggtaacgctggcagcgttacaaaaggagtacttgatagactcgcttttattacaggatttgctgacgccctcattagcgtcggatggcttgcttatcatgacggcaaactaattcttccaaactttgagcgacataatggagaatcatcgaaaaaacgtgcacttacgaatagaagagtggcagagcatcgaaaacgagtaacgcaaaaagtaacgccaacagcgttacaaaaggagttaccagaggaagaggaagaggaagatatatataaaaccccacacatagcgcacgtgtgcgagggtgctccgaccagtgaagcgaacagtacgccgttgcaggtggcagaacctgaatttctggatggcctgagtgaacccatcgggaaatttccgatgacagatggctggctaccgtcgccagattttcggcggcgtgctgcgctgtggggaacggccctgccggaaccggaatttacacctgctgaacttgctgcattccgggattactggatggctgagggcaaagtgttcacgcaggttcagtgggaacaaaaattcgccaggcacgtaaatcatatcaggggaaaatcaaaaaatgccgggaaaagcgatgagcttgactggaataacactgactggatagaaggggtgtgggatgaaatcaactccagaacttctcaatga

SEQ ID NO: 12792 - DNA, 162 bp, Escherichia coli
atgggtacaaaagcgcatgacctttttgtgttgcctttgtgcagaaagcatcacgacgagctgcatgcggataccgtggcatttgaagagatgtatggctcccagctggagctgatatttcgttttatcgatcgtgcgctggcaattggcgtactggtgtaa

SEQ ID NO: 12793 - DNA, 753 bp, Escherichia coli; identical to SEQ ID NO: 9218

SEQ ID NO: 12794 - DNA, 240 bp, Escherichia coli
gtggattttcatatccgtgtgacgccggatacaccggaaatacgggctgccatcaccgcggagttgcgttcgttcctgctgcgtgatggttatccgcagggagaactgaaggtgtcgcgtatcagtgaagcgatttccggtgcgaacggggaatacagccatcaattgcttgcaccggcggaaaatatctccattgcaaaaaatgaactggcggttctggggacgatttcatgggcgtga

SEQ ID NO: 12795 - DNA, 597 bp, Escherichia coli
atggcgaaagcaacattgaataaaatcggtattgccacaaaagccggtgatatgactgtttataactacgacggggaaacgcgcgagtttctgtcgacttccaccgagtttctagcggtgggcgtggggattccagccaactcgtgtactgatgcgccggtcgatgagaaagaaggttttgccatttgccgcacggccagccttgatgggtgggattatgttgtcgaccaccggggcgagaccgtgtatgacaccgaaaccggtcagcctgtcgagattaccgggcttggtgattatcctgataatgtgaccaccatcgaaccgatgacgccttacgaccgctggaacggtagcgaatggattatggatgcggatgcacagaaaggcggtcaggttgcgacagcagaacagaataaagcctcattgctggccgaagcgcaaagcacaatcagcctgtggcagactgagctgcagctcgacatcatcagcgacgatgacaaagccaacctgattgcatggatgaaatacattcaggcactgaacgcggtcgacacctcaacagcaccggatatcgagtggccggtaaaaccggaataa

SEQ ID NO: 12796 - DNA, 522 bp, Escherichia coli
atgactgaaagaaaaaaaaccttaggcgatgatgaggttgtgccttattttaataacgattgtgaacaaataaaattcgaatttgcttatttaatagttctttttgtaataggttgcattctcgcctttctttttcaatttgtttttgagctgtcatataataataaaatatctttgttttctattcttggtggtttttttggagggtgggtgtataatgcaaaatggttttatagagtaactgctagagggaaaaacaatcagtataatttcccttgggaatcccataagttctactggaggatttttattccgttcttagctgctttagtggctttttgttcttatacgatattatctccggatacgtttgtatcctccattaaagggcatggtaagaccaaaattgcattctcgatttgttttatattaggatatttttcagacttagttctaagccgactcgcatcttgggctgaaaaattgctccctaaaaaaccaggagacaataaacgtgaataa

SEQ ID NO: 12797 - DNA, 645 bp, Escherichia coli
gtgaataattcttgtaattcgttctgtggaatatgcgatgaaataaatggcattagccttatcaaaggatacgatgaaatcgtaaatgacaagaaaaatatcattgcagaaacaaatgattttctaattgtacctagtattggcccgctaaataattcgcatgtgatgctgattcctaagcggcatatcaactcctttgctgctcttgatcgagatacccggagtaatggcaaggagattctgcgagaacttaatgaatttataatccaccaatctggtagatctctaattttctttgaaagcggagcaggtgaaaatatagatcgttcaggagggtgcatttctcacgctcatatacactgtgtttattatacacaagagtttgaaaatgctctaaataaagaaattaactttaagaaaattgaaggtgagaatttaagttttgacattaaaaatggatatgtgtggtatatgagtaatagttatgatgaatttttatgcaacaaaccactcttaccatctcagttccttagatatctttattctaatgcaaatttgatacatggcaattggaattggcgcagagataacaacatcagcggtgttctagaggttattgataattacgcagatttcaaactataa

SEQ ID NO: 12798 - DNA, 942 bp, Escherichia coli
atgcaaggtgaagttgacgaacagcaacccaatgagattatgtcggagtttggatactatccagtagaagttaacattgagactgaacaattttctttgcttactttacctggtctcaatgagaaagtggagcgtgttaataatgataaaaacgttgtgaaaggttggatataccctggaaaccaagatgtatataaccttaatggtggcatatccacaatgccttatagtcaccgagtattcagtatgcccaaaacgcacacactaaaattaaaaaatacatcctcgttagaaactctcaactttattgtgtggtgcctttcttttttcaagggaataagattgacaaccactgacgctggttttttagatgcaaccactatcaagcccactaagttaaccgactttattctcgttggatgctctgaaaaagaagtcatagaactggctcttaattatataaatggcaaacataaggatgcgcactcccccaaaagaattgcggcagtggtgcatgcactattcttatctcaaaacccacaatacctttcttttgaaaaattccagtatctttacatggcacttgatgggtgctttgctttgtcgtgggctgagcatgacaaggctcctgataaaaaaccgccaaatcattacaagcgattaaagtggatgtgcaaaatttatgggttatcaatccccacatgggtgtcaggtaaaaaaaacatttctggcatccgcaatgataattttcatgaggctattttttttggtcaaccgcttggtttctcaagtgttaacaacagtcaatatggtaacgatatattgctgcaaatgcaggcactggtatgtcgcctattagcggcaatactgtcggttaatgattgcagttatctcaaatcttcggtcaactcacgagattaccattcattaaaaataaattaa

SEQ ID NO: 12799 - DNA, 231 bp, Escherichia coli
atgagaatcaatatcacgttggataaagagcaaaaattagggcaacagatcattgatgcttttcagaatgaaataacacatcgagtacaatgcgtttttcctgcaacaaaagttaacgttaagaaagggtcaatgactggtgtagaggctatcggattcgataaagaggcggacagagaaacattaggcagcatattacaagagatttgggaagacgatagctggcgttaa

SEQ ID NO: 12800 - DNA, 192 bp, Escherichia coli
atgactgactctgagaaacaaatggccgctgttgcaagaaaacgtcttacacacaaagagataaaagtttttgtcaaaaatcctctgaaagatctcatggttgagtactgcgagagagaggggataacacaggctcagttcattgagaaaattatcaaagatgaactgcagagactggatatactaaagtaa

SEQ ID NO: 12801 - DNA, 729 bp, Escherichia coli
atgagaaaaaataatacggcaataatattcggcagcctgtttttttcctgcagcgtgatggccgcaaacggtacgctggcccccaccgtggtgccaatggtgaacggtggtcaggccagtattgccatcagcaataccagcccgaatctgtttaccgttcccggtgatcggattatcgccgtgaacagtctggatggtgccctgaccaataatgagcagaccgcctccggcggtgtggtggttgccaccgtcaacaaaaagccctttacgttcattctggaaacagaacgtggtctgaatctttccattcaggccgttccccgtgaaggcgcggggcgtaccattcagctggtcagtgacctgcgcggaaccggagaagaagccggtgcgtgggaaacgtccacgccttacgaatccctgcttgtgaccatcagccaggccgtccgtggcggaaaattacccgcaggctggtatcaggtcccagtgacaaaggaaaccctgcaggccccggcggggctgtcttcagtggcagatgccgtatggacggggaatcacctgaagatggtccgctttgccgtggaaaataaaacgctgtctgccctgaatatccgggaaagtgacttctggcagccgggaacccgtgccgtgatgttcagccagcctgccagccagttactggcaggtgcgcgcatggatgtgtatgtcatccgtgacggggagggcaactga

SEQ ID NO: 12802 - DNA, 822 bp, Escherichia coli
atgcgattagcttcccgttttggtcggtataattccatccgccgtgaacgtcctttaacggatgatgaattaatgcagtttgtgccttcggtgttttccggtgataaacatgagtcccggagtgaacgttatacgtatatttcaacaatcaatatcatcaataagttacgtgatgaaggtttccagccattctttgcctgtcagagtcgggttcgtgatttgggacgtcgcgaatacagtaaacatatgttacgtcttcgcagggaagggcatattaacgggcaggaagttcctgaaattatcctgcttaattcacatgatggttcatccagttatcagatgatccccggaatttttcgttttgtctgcacaaatggcctggtgtgcggaaataattttggcgaaatccgcgttccacataaaggtgatattgtcgggcaggttatcgagggagcgtatgaagtgctcggtgtctttgataaggtcactgataatatggaggcgatgaaagaaattcatcttaacagtgacgagcaacatttatttggcagagctgcactgatggtcaggtatgaagatgaaaataaaacgccggtgacgcctgaacagataattactccccgtcgtcgggaggataaacagaacgatctctggacaacctggcagcgggttcaggagaatatgataaaaggtggattatcggggcgaagtgcctccgggaaaaataccaggacaagagccattacaggtattgatggtgatataagaatcaacaaagcattatggatgattgccgaacagttcagggagtggaagtcgtga

SEQ ID NO: 12803 - DNA, 564 bp, Escherichia coli
atgcacagtcagttaagagaacgtatccggctgatgcgcgcaaggctggataacgccgcgccggttgctgaaatccgggctgaatctcagctttttgtgagtcctgccccgatctgtgatcgcctggtgacgctggcggaaatcagcaaccgtgatcacattctggaaccctctgccggcaccggggccatactgcgggcgattcgggataccgcgccggaggccatgtgtgatgcggtggagattaacagcgggctggtccggtatctgcgggaaaattttaacggtgtcagggttcagtgtggcgacttcatggaatggcagccggtgcagtattacagccgggttatcatgaatccgccgttcagccacgggcaggatatccggcatatcctgcgggccttttccctgttgcgtccgggtggcgtgctggtcgccgtctgtctcaacgggccacgccagcaggagaagctgttaccgttttctgacgtccgcgaggagctgccgcgcggcacatttgcttataccgatgtcccgacgatgattattcgtctgcgtgcctga

SEQ ID NO: 12804 - DNA, 1362 bp, Escherichia coli
atgacattagcagcaatcaccatgaccgccccggaagccgccagccctgtgcagatgtaccgcgcgacctactcaccggatgacaacaaactgcgcctgtatgctgcgtcacgtcttgacccggagacgtataaaaaagtgcatgatgccggttttcgctgggcaccaaaacaggcgctgtttgtggctccagcctggacaccgggccgggaagacgtgctcctctcacttgccggagagattgaggatgaagacagcacgctcgctgaacgtcaggaagcacgggcggagcggtttaccggatacagcggaaagcgggccagtgaatccgcacaggcacttgatgaagtggaaagactggccgcgatgatcccgcccggtcagcccattcttgtggggcatcacagcgaacgccgcgcccgtcgtgatgcgcagcgtattgaaaacggcatgaaacgtgccgtgatgctctttgaacgtgcggaatactgggaagaacgggcgcggtcggcactgcttcacgcgaagtataaagaacgcccggacgttcgctggcgtcgtatcaaaaaaatcgaagctgatttgcgcaaggctgaaaagaccatcgcacagtcgcagaaatatctgacgatgtggcgggctgaatcgctggatctgaatatggcaaaactcatcagcagtcatgaccatatcagcgcctgtttcccgctggatacgtatccgcgcccggcagaaaaaagccagtatgaagggagccggtcgttatggtcggccctggatgatgacatcatcaccacggagcaggcccgcgaaattgcgatccgctgtcatgaacggcagattcagcatcagcaacgctgggttaaccactatcagaaccgcctgatctatgagcgtgccatgctggacgaaagcggcggcgtggttacccggacacaggattttgagccgggcggacaggttttcagccggggcgagtggctgactatcatccgcgtgaacaaaagcaacggggcggtgagttcagtcacaacgccaaattacagttttctcgggtacagcggcacgatgaaagtgacgcccgatcgcatcacggactacaaagcaccatcggcagaagaggctgccgtcgccagtcaggccgcgaagcgtccgccggtagtcaactatccgggggaaggtttccgggaaatgacaaaggcgcagtgggccgccctgccccgggactgtaaggccgtgcgcagtgtggaagaagcagaagaccacggggcataccgctaccgccgcacaatggacaataatttccgtctggtgaatgtgtatatcaccgacatgaaaatcacggaaatcccacagaaataa

SEQ ID NO: 12805 - DNA, 372 bp, Escherichia coli; identical to SEQ ID NO: 5344

SEQ ID NO: 12806 - DNA, 426 bp, Escherichia coli; identical to SEQ ID NO: 5355

SEQ ID NO: 12807 - DNA, 972 bp, Escherichia coli; identical to SEQ ID NO: 5242

SEQ ID NO: 12808 - DNA, 213 bp, Escherichia coli; identical to SEQ ID NO: 5241

SEQ ID NO: 12809 - DNA, 576 bp, Escherichia coli; identical to SEQ ID NO: 5240

SEQ ID NO: 12810 - DNA, 339 bp, Escherichia coli; identical to SEQ ID NO: 5239

SEQ ID NO: 12811 - DNA, 384 bp, Escherichia coli
atgggaaaaaagaaacgtaataacttaaaacgtattgaaaaaaacagtaacttcaattcaacaagacaacgtccaccgacacacaccaataacgaaattccaggggaagagataatatttattcttgaagcagaatcccctgaattaagcgatgaagaattagaaataatccagtcaatgccaggcgtttactttcgcccaagaacaagaaaacaaactatcatttctgatggcactctgaaacgttggcagcttttagggtttagctcctatcatcattttttgggatttaacgctttcaataattgtgtaggtggtgcatcggaagtcgatctgatggctcatttagaagatacattagcttctaacaaacgttctaactaa

SEQ ID NO: 12812 - DNA, 3222 bp, Escherichia coli
atgccaaaacgtacagatataaaaagtatcctgattctgggtgcgggcccgattgttatcggtcaggcgtgtgagtttgactactctggcgcgcaagcgtgtaaagccctgcgtgaagagggttaccgcgtcattctcgtgaactccaacccggcgactatcatgaccgacccggaaatggctgatgcaacctacatcgagccgattcactgggaagtggtacgcaagattattgaaaaagagcgcccggacgcggtgctgccaaccatgggggggcagacggcgctgaactgtgcgctggagcttgagcgtcagggcgtgctggaagagttcggcgtcaccatgattggtgccactgccgatgcgattgataaagccgaagaccgccgccgtttcgacgtagcgatgaagaaaatcggtctggaaactgcgcgttccggtatcgctcattcaatggaagaagcgctggcggttgccgctgaagttggcttcccgtgcattattcgcccatcctttaccatgggcggtagcggtggcggtatcgcttataaccgtgaagaatttgaagaaatttgcgcccgcggtctggatctttctccgactaaagagctgctgattgatgagtcgctgatcggctggaaagagtacgagatggaagtggtgcgtgataaaaacgacaactgcatcatcgtctgctctatcgaaaactttgatgcgatgggcatccacaccggtgactccatcactgtcgcgccagcccaaacgctgaccgataaagaatatcaaatcatgcgtaacgcctcgatggcggtactgcgtgaaatcggcgttgaaaccggtggttccaacgtccagtttgcggtgaacccgaaaaacggtcgcctgattgttatcgaaatgaacccacgcgtgtctcgctcctctgcgctggcgtcgaaagccactggtttcccgattgccaaagtggcggcgaaactggcggtgggttacaccctcgacgagctgatgaacgacatcaccggtgggcgtactccggcctccttcgagccgtccatcgactatgtggttactaaaattcctcgcttcaacttcgagaaattcgccggtgctaacgaccgtctgaccactcagatgaaatcggttggcgaagtgatggcgattggtcgcacgcagcaggaatccctacaaaaagcgctgcgcggcctggaagtgggcgcaactggcttcgatccgaaagtgagtctcgacgacccggaagcgctgactaaaatccgccgcgaactgaaagatgctggcgcagagcgtatctggtatatcgctgatgccttccgcgcgggcctgtctgtagacggtgtatttaatttgaccaacattgaccgctggttcctggtacagattgaagagctggtgcgtctggaagagaaagtcgcagaagtgggcatcactggcctgcacgctgaattcctgcgccagctgaaacgcaaaggctttgccgatgcgcgtctggcaaaactcgcgggcgtgcgtgaagcagaaatccgcaagctgcgcgaccagtatgacctgcacccggtttacaagcgcgtggatacttgtgcggcagagttcgccaccgacaccgcttacatgtactccacttatgaagaagagtgcgaagcgaatccgtccaccgatcgtgaaaaaatcatggtgctcggcggcggcccgaaccgtatcggtcagggtatcgaattcgactactgctgtgtacacgcctcgctggcgctgcgcgaagacggttatgaaaccattatggttaactgtaacccggaaaccgtctccaccgactacgacacctctgaccgtctctacttcgagccggtaactctggaagacgtgctggaaattgtgcgtattgagaagccgaaaggcgttatcgtccagtacggcggtcagaccccgctgaaactggcgcgcgcgctggaagctgctggcgtaccggttatcggtaccagcccggatgccatcgaccgtgcggaagaccgtgaacgcttccagcatgcggttgagcgtctgaaactgaaacaaccggcgaacgccaccgttaccaccatcgaaatggcggttgagaaagcgaaagagattggctacccgctggtggtgcgtccgtcttacgttctcggcggtcgggcgatggaaatcgtctatgacgaagctgacctgcgtcgctacttccagacagcggtcagcgtatctaacgatgcgccagtgttgctggaccacttccttgatgacgcagtagaagttgacgtggatgccatctgcgacggcgaaatggtgctgattggcggcatcatggagcatattgagcaggcgggtgtgcactccggtgactccgcatgttcactgccagcttacaccttaagtcaggaaattcaggatgtgatgcgccagcaggtgcagaaactggccttcgaactgcaggtgcgcggcctgatgaacgtgcagtttgcggtgaaaaacaacgaagtctacctgattgaagttaacccgcgtgcggcgcgtaccgttccgttcgtctccaaagccaccggcgtaccgctggcaaaagtggcggcgcgtgtgatggctggcaaatcgctggctgagcagggcgtaaccaaagaagttatcccgccgtactactcggtgaaagaagtggtgctgccgttcaataaattcccgggcgttgacccgctgttagggccagaaatgcgctctaccggggaagtaatgggcgtgggccgcaccttcgctgaagcgtttgccaaagcgcagctgggcagcaactccaccatgaagaaacacggtcgtgcgctgctttccgtgcgcgaaggcgataaagaacgcgtggtggacctggcggcaaaactgctgaaacagggcttcgagctggatgcgactcacggcacggcgattgtgctgggcgaagcgggtatcaatccgcgtctggtgaacaaggtgcatgaaggccgtccgcacattcaggaccgtattaagaatggcgaatatacctacatcatcaacaccacctcaggtcgtcgtgcgattgaagactcccgcgtgatccgtcgcagtgcgctgcaatataaagtgcattacgacaccaccctgaacggcggctttgccaccgcgatggcgctgaatgccgatgcgaccgaaaaagtaatttcggtgcaggaaatgcacgcgcagatcaaataa

SEQ ID NO: 12813 - DNA, 183 bp, Escherichia coli
atgacgcaatcagagatgctgaaattaatcgcccgacatggttataacgttggatttggcgctaagaaaaactttgccacctatgatcggcatccggttggattagctttatttctcttgctgtcggtgtgttcgccctttttattcctgagctggccacaaacgtcatttccgcgatattaa

SEQ ID NO: 12814 - DNA, 168 bp, Escherichia coli; identical to SEQ ID NO: 4934

SEQ ID NO: 12815 - DNA, 1047 bp, Escherichia coli
gtgcgagtattacttcgacctgttctggtaccggaactcgggctggtgatcgttaagccgggccgtgaatccatgccggtattccacaatacccgggtactggtggagccggaaccgaaaagcatgcgtaatctgccgtccggggttgttcctgccgttcgccagccgctagtggaagacaaaacattgctgccgtttttcagtaacgcacgggtgattcgtgctgctggtggtgctggtgcattgtctgactggctgttgcgccatattaaatcctgccagtggccacacggcgattatcatcacagcgaaaccgtcattcaccgttatggtaccggcgcaatggtgttgtgctggcactgcgacaaccagctgcgtgaccagacatccgaatcactcgagcaacttgctcatcaaaacctgtcagcatggatgattgacgtcatactccatgcaatgaatggctcgcaggaacgggaattatcgctggctgaattatcctggtgggcggtccgcaatcaggtggcggacgcgctaccggaagcggtattacgtcgttcgctggggttgcgtgcggaaaaaatccgctcaatgtaccgtgaaagcgacatcgtaccgggagagcagaccgccaccagcatactgaagcagcgcacaaaaaatcttgcgccgctgcctcacgcccaccagcaaaacccgccacaggaagagacggtggtcagcattgccgttgatcctgagtctccggaatctttcatgaaacgacctaaacgtcgccgctgggttaacgagaaatacacacgctgggtgaagacacagccgtgtgcgtgttgtggtaagccagccgacgatccccatcacctgattggtcatggtcagggcggaatggggacaaaatctcacgatattttcacgctaccgctgtgtcgggagcatcacaacgagcttcatgcggatcctctggcgttcgaagaaaagcatggttctcaggttgatttaatttttcgttttcttgatcacgcctttgcaactggcgtgcttgggtaa

SEQ ID NO: 12816 - DNA, 210 bp, Escherichia coli
atgatgaaagtaactgcaaatggtaagacatttacctttcctgatggtacgagcacggaagatattgggtccgccattgatgagtattttgctggtcagtcagcgccaacacaacaaggtgttcagcaatcgccagcagacaactcacttgcatcaggatatgcacagcttgccactcagcagaaggaaggactagatcagctctgctga

SEQ ID NO: 12817 - DNA, 387 bp, Escherichia coli
atgctctatctgattgaggacaacgagtacagtcgaagagccatcggcaagtatattgatgtctggcattatcctgacggacataaggagctgcgactaaatggcgtgctgctgccctactccacctatgaccggctttctgaggttgatcccgtcgccattgtagataacaagagacttggccatgtgttggatgttgcccgtcaggtccagagaaaacgggacaataatcgctcacaatcgttaccttgttctggtgatgagccttcccgcagacggcacgcccctagcatcaacaaatctcagcgctcactgaacgaagatgacctacttgaagccatgataaagcttcagggaagctctgaggccatctttggtaaaaggtga

SEQ ID NO: 12818 - DNA, 888 bp, Escherichia coli
atgccactgctggataagctgcgtgagcagtacggggtcggaccgctatgcagcgaactgcatattgccccgtcaacgtattaccactgtcagcaacagcgacatcatccggataaacgcagtgcccgtgcgcagcgcgatgactggctgaagaaagagatacagcgcgtatacgatgaaaatcacaaggtatacggtgtgcgtaaagtctggcgtcagttgttacgggaaggtatcagagtggccagatgcactgtggcacgtctcatggcggttatgggacttgccggtgttctccgtggtaaaaaggtccgtacgaccatcagccggaaagccgttgtcgcaggcgaccgcgtaaaccgtcagttcgtggcagaacgtcctgaccagttgtgggtggctgattctacttacgtcagcacatggcagggggtcgtctatgtggcgttcatcattgatgtgtttgccggatacatcgtggggtggcgggtctcatcgtctatggaaacgacatttgtgctggatgctctggagcaggcgttatgggcccgtcgaccgtccggcacagtccatcacagtgataaaggttctcagtatgtatcgctggcctacacacagcggcttaaggaagccggattactggcatcaacaggaagtacaggcgactcgtatgacaacgcgatggcggagagcatcaatggcctttacaaagcggaggtaatacaccgtaagagctggaaaaaccgtgcagaagtggaactggccacactcacgtgggtggactggtataacaatcgacgattgctggaaaggctgggccatactcctccggcagaagcagaaaaagcttattatgcttccatcggaaacgatgatctggcagcctga

SEQ ID NO: 12819 - DNA, 1362 bp, Escherichia coli; identical to SEQ ID NO: 12804

SEQ ID NO: 12820 - DNA, 1362 bp, Escherichia coli; identical to SEQ ID NO: 12804

SEQ ID NO: 12821 - DNA, 972 bp, Escherichia coli; identical to SEQ ID NO: 5242

SEQ ID NO: 12822 - DNA, 213 bp, Escherichia coli; identical to SEQ ID NO: 5241

SEQ ID NO: 12823 - DNA, 576 bp, Escherichia coli; identical to SEQ ID NO: 5240

SEQ ID NO: 12824 - DNA, 339 bp, Escherichia coli; identical to SEQ ID NO: 5239

SEQ ID NO: 12825 - DNA, 312 bp, Escherichia coli
atggtctccctgaccattgtggcgacgctgaaagcggtaggtatcattctctctatttctcttctcattgcgcctggtgccattgcggtactcctgacacaacgctttcatattgcgctcctgctggcgactggcatatcgatattggtctcaatgactggtgtctggctgtccttttttatcgacagcgcgccagctccgacaattgttgtcttattcgcggtcatgttcatcatgacgtttaccgttaccagcatcaacgcacgcacaaaggaaaatgccgaaccacgggatttgttatcatccgattag

SEQ ID NO: 12826 - DNA, 399 bp, Escherichia coli
atgaaacaccgtgaaatacgggcggcagttctgtctgccctgaaagacaatatttctgagcgggtgagctggtttgacggccgcccggtttttattgatgaacaggaactgcctgctgttgctgtttacctgactgatgcgtctgctgctgacgagttcgttgatgaggggacctgggaggcgacactgcatattgaagtttttctcagggcaaaagaaccggactcggcactggatatgtggatggaagagaaaatccttcctgcgctggaggcggttcccggcctcagtgcgttactgctgaagatgaatcttcaggggtatgactaccgccgggatgatgagtttatgatgtggggatcggcagatctcctgtggaaaattacctacgagatgtga

SEQ ID NO: 12827 - DNA, 624 bp, Escherichia coli
atggcaataaaaggtctggcgcaggccatgaaaaatctggatgcaattgaccgccgtgccgttccccgggcctctgccacgacactgaaccgcgtggcgggggccatcattgcgaaaacggccacttcagttgccagggagctggccgttccccgccgtcttatccgtgcccgcatccggttaagtccggcacgaccggataaggtttatgcaaaggtttacatcaataccggcaacctgcctgccatcaaactgggggaggcccgcgttcgactttcccgcagaaaacggagaaagaaaggacagcgtgcggccctgaaagggggaggcagtgtgctgattgtggggaaaagacggatcccggacgcctttatcacccggctggctaacggacgctggcatgtgatgcagcgtatgccgtgggcaccatcgtccaccggcgctgacagcaaagggaggccgaaacgccaccgtctgccaattgaagtggtgaaaattccgactgccggaccgctggcagaaacctttgaacgtgaacgggaccggatgtaccgggaaaaattaccagtgcagatgatgaaagccatgacgcatcagttacgcctggtgctgaaaagaaaatga

SEQ ID NO: 12828 - DNA, 282 bp, Escherichia coli
atgtctgatctgtttacgcgaatgtgttgccggatggacggggcgaccgttcgggtgatgggcaaacaggcggagattaacggcgtcgtgtatgacgtgatgcctgaggaagagtccgcggagatgggggcgctttcgggcagccagttgtcactggtggtgttttcagcccggtaccgtccggcccgtcatgatgttgttgtgtttgagggccgtacactgacggtgacccgttatgacacgtacaacggtaaaccccggatttttgtcgaacaggaatga

SEQ ID NO: 12829 - DNA, 327 bp, Escherichia coli
atggcgaaaaattttgtacaggacggtaccaccattgaactggtgaatgccggagatcagaccatcctgagcggtgctgcggtggtggtcggcagtatggtggccgtggccattaccgatattcctgccggtgatgccggtgacggttttgccgaaggcgtgttccttctgcccaaacagtctgctgacgacattcagtccggcgcggtggtttatctgaaggacggggttgtgcagctggctgcagagggtgcggtggccgcgggggtagcctgggaaaatgctcctgcaaacagcgccactgtggcggtaaaaatcaatgtctga

SEQ ID NO: 12830 - DNA, 1926 bp, Escherichia coli
gtgccggaactgaacaacagcgtcagcaggccaccgacagccagcatgaagaataaatcctggttcaggatgcaggcgggtggtcagggtgaggcggatatttatatttatgacgagattggtttctggggagttaccgcgaagcagtttgtcagcgatatgaatgccatgggtgatatcacccacattaatctccacatcaactcaccgggtggcgatgtttttgaaggcatcgccatttttaatgccctgaaaaatcacggtgcggccattaccgtgtatgtggatggcgttgccgcctcgatggcatccctgattgcgatggccggtgacacggtcattatgccggaaaatgccttcatgatgatccataaaccctgggggatcagcggtggtgatgcggaggaaatgcgcacttatgccgaacgtctggacaaacttgagtcggttatggtgccggtatatgcgcagaaaaccggaaaaactaccgatgaaattgccgccatgctggcggatgagacctggatgtccggtgccgagtgtctggcacacggatttgcagaccaggtgacgccagccgttaaggcaatggcatgtattcagtcaaaacgtacagaggaatttaaaaagatgccggaatccatccgaaatatgatcacgcagccatacaacagtgccccgcgtgataccacagtgacaatccctgcaccggcggtaacagaaccatcaccggtaccggcagtgtctgatgaggcgaccattcgcgcccgcgttatggctgagcagaaagcccgcatgtcaggcattaacgatctgtttgccatgtttggcggtcgctatcaggcgcttcaggcgcagtgtgtggctgatcctgactgttcgctggaaatggcccgtgaacgtctgctgaatgaaatgggcaaggagtcatcgccgaccaacaaaaacacaccggcccatatttatgccggaaacggcaattttgtgggggacgggatccgccaggcgatgctggcccgtgccggatttgaaaatgtcgagaaggataacgcctataacgggatgaccctgcgtgaatgggctcgcatgtcactgacggagcgcggtattggggtggccagttataaccccatgcagatggtcgggctggcgctgacgcacagcacctctgattttggcaatattctgctggatgtgtcgaacaaggggctgatccagggctgggaggaatcagaagaaaccttccagaagtggacccgtaagggacgcctgtcagacttcaaaacagcgtatcgcgtggggatgggcggttttggttctctgcgccaggttcgtgagggggcggagtataaatacatcaccacctcagatcgcaaggagaccattgcactggccacttacggggagattttctccatcacccgccaggccattatcaatgatgatctgaatatgctggtggacgtgccgatgaagatggggcgtgcggcgaaggcaacgattggtgacctggtttacaaggtgctgacggataacccgaaactgtcagacggtaaggcgctgttccatgccgatcacaaaaatattgccaccggtgggatttccgtttccggactggatgcggcccgtcagatgatgcgcctgcagaaagaaggcgatcgcgccctgaatatccgtccggcctttatgctggtaccggtggcactggagacggtggcgaaccagaccatcaaatcggccagtgtgaaaggggcggatgcaaacgccggtgtcattaaccccatccagaactttgctgaggtgattgcagaagcgcgtcttgatgcggcagatccgaaaacctggtatctggcggcggcacagggcactgacaccattgaagtggcctggctggatggtgtggacactccatacattgatcagtag

SEQ ID NO: 12831 - DNA, 1503 bp, Escherichia coli
atggcaattattgatgatgtgataggcgtgttttcccccgggtggaaagcagccagactgcgttcaagggcgttaatcatggcctatgaggcggtgaaaccgacccggacacataaagcccggcgggaaaatcgctctgctgatcagctcagtaaatacggtgcggtttccctgcgggagcaggcccgttttctggatatcaatcatgacctggtgattggtgtgtttgacaagctggaagagcgggtgattggtgccaggggaattattgtggagcctcagccattacgaaaaaacggggaaatggcggcagagctggctgcggatatccgccggttgtgggctgaatggtccgtgagtccggatgtgacagggcagtatacccgtcccgtgcttgaacgtttactgctgcggacctggctgcgggatggtgaagtgtttgcgcagatggtcagtggtgcgggaaacggtctggaacggacggcgggagtgccattctggcttgaggcgatggagccggattttgttcccatgcgcactgatgaatccgccgggctgaatcagggggtttttcttgatgagtggggaagaccgaaaaaatatctggtttataaaaattatccggtcagcggtcggcagagtgatacgaaagaaatcgctgccggaaaaatgatccacctgaagttcatacgccgtctgcatcagacgcgaggctcatccatgttatcgggggtgctgatgcggatcagtgcccttaaggaatatgaggatgcggaactgacggctgcgcgtattgccgcggcgctgggactgtatatccgtaaaggggacggacaggactatgaagatccggggatcaaagataccgaccgggaagtccatatcaccccgggtattatttatgacgatttgcgcaagggcgaggatatcggcatggtcaaatcagaccgtcccaatcccaaccttgaaactttccgcaacggccagttgcgtgcagtggcagcgggcagtcgtctgagtttttccagtgcggcgcgtaactataacggcacctacagtgcccagcggcaggagctggtcgagtccacggatggttacctgatcctgcaggactgttttattggcgcggtaacccgcccggtgtaccggacatggctgaatatggtggttgcggcaggtctgctgaaaattccggcggatgtggagatgaaaacgctatataacgcgacgtattccggtccggtgatgccgtggatcgacccggttaaggaagctgaagcctggagaattcagatccggggtggtgcagcgacagaatctgactgggtgcgtgccggcgggcgcaatccggatgaggtcaaacgtcgccgcaaggctgaaattgatgaaaacagcagactggggctggtctttgatactgaccccgtcaacgacaaaggaggcaacagtgccggaactgaacaacagcgtcagcaggccaccgacagccagcatgaagaataa

SEQ ID NO: 12832 - DNA, 213 bp, Escherichia coli
gtgagcacagaagaagccagagaaatgatacagcggtaccgtgaagcggaaatggccgtactggaggggaagtctgtcaccttcaacggacagcaactgacgctggaaagcctttctcagatccgcgccggacgtcaggagtgggaacgcaggcttgccgcgatggtgagccgcaggcggggaaaaccaggatttaaactggcgaggttttaa

SEQ ID NO: 12833 - DNA, 2124 bp, Escherichia coli
gtgaatcaggtgaacgagagccatagccgcgcatccgatatctggcgcgaagtggcctcgctgtttcgcccgcccagccggttaccagtagcggaagccatcaggcgttatatgcgggtaccacggggagccaatacttccggtccgtgggagtcatcgctgacgccctatatgattgaccctattaatacattatcagcccgtgaatatgacgcggtggtgtttgtgggacctgcgcgaaccgggaaaaccgaagggctgattgacggctggattgtgtacggcatcatctgtgatccggcggatatgctggtggtgcaaatgaccgagacgaaggcgcgggaacactccagaacgcgtctttccagaacgtttcgtcacagcccggaggtcagtaagcgtctcagtccttcccgtaatgacaacaacgtccacgataaaatgtttcttgacggctccttcctgaagattggctggccgtcgatcactgtattttcttcttcggattaccgtcgtgtggcgctgacggattatgaccgtttccctgaaaacgtggacggggaaggggatgccttcaccctggcatcaaagcgtaccaccacctttatgtcctcggggatgaccctggtcgagagttcgccggggcgggatatcactgacaccaaatggcgctgtggcggcgcacatgaggcaccgccaacaacggggatcctgtcactgtataaccggggagaccgccgccggtggtactggccgtgtccgcactgcggggaatattttcagccggtgatggataacatgaccggataccggaataacccggattttgtggctgccggtcaggctgcccgtctgatgtgtccgcattgtcgcgggctgattgcccctgagcagaaacgcgaactgaataacaaagggatctggcttcgtgaaggtgaacgggcggtggcggacggcagtatcaccggaacgccacgaaattcccggattgcgtcattctggatggaggggccggctgcggcgtttcagacctgggaacaactgatttttaaactgctggcggcagaagaagagtatgagcgaaccggcagtgaagagaccctgaaagcggtggtgaacaccgatatcggacgcccctatctgccccgttcagccacggaacagcgtaaaagtgaactgcttgaacagcgtgccgagccgtttccccggcgatctgtgccggatggtgtgcgttttattgaggcaacggttgacgtacagggcggtaaaaatcgccgttttgttgtgcagatcaccggatacggagagcagggggaacgctggattgttgatcgctataacatccggcattcactgcgctgcagtcccaacggtgaaagtctgccggttgatccggcggcatatccggaggactgggatttgttgctgacggatgtgttccataaaacatggccgctggcttctgatccggatgtgcgcatgcgtctgatggccatggcggtggatacgggaggggaagccggggtgacagataacgcctatcgtttctggcgtcgttgccggagtgacggactgggcaacagggtgtttctgttcaagggggatggacttcgccgtgacaggctgattaaccgtaccttcccggataataccggcagaagtgcccgccgtgccagagccagtggcgatgtcgcgctgtggctggttcagacggatgcgtttaaggaccgtgtaaataatgccctgtggcgtgacacaccagggccgaactatatccactttcccgactggctggggcgatggttttacgatgagctgacctatgaagagcgcggcagtgacggaaaatggcgaaaaccgggcaggggagctaacgaggcgtttgacctgctggtttatgcggatgcgcttgccgttctgcatggttacgaaaagatccgctggccctccgcaccggactgggcacagcgggaaacgtggctcgtcttcccgcaggagcgttctggtgaaacggtatccccggaactgacggccggggcagaaaaacgccgtcgccggaagaaaaaactgcggacggagcgtgcggaagataatccatggataacatcaggaggctggttgtga

SEQ ID NO: 12834 - DNA, 477 bp, Escherichia coli
atggacggcgagctgaaaaatatgaagttaaatattaatcaactggcagccctttcaggtctgcaccggcagactgttgccgccagaatggcggatgttcctcttgcaccaggcagtaatgaaaagaaaaaactgtatctcctgacggatttgattatttcgttgctggaaaaaccaccgacttccgaagatgaagagatgaacccacatgatcggaaggcatggtatcagtccgagcgcgagcgtcttaaatttcagcatgaaactgttcagcttgtgcctgtcagtgatgtcaggcggtccttttctgtcgtggtgaaagcgatagttcaggtactggaaacctggcctgaccggctggaaagggacagagggtggaccgcatcacaactgaatgaagtacagattgtggttgatgagatccgcgacacactggaaaaggcagtcattgactgttgtgatgaggccgatatgtga

SEQ ID NO: 12835 - DNA, 468 bp, Escherichia coli
atgaaccgcgtactgtgcgtggtcatcattgccctgctggtggcctgtggtgcgcttagtctggggctgaatcattaccgtgataacgccataacctacaaagagcagcgcgataaaaaagtcagtgagctggagctggcgaacgcggccattactgatatgcagcagcgccagcgtgatgttgctgcacttgatgccagatactcgagggaattagccgatgcgagaactgaaaatgaaactctgcgcgctgacgttgccgctggtcgtaagcgcctgcggatcaacgccacctgccccggtaccgtgcgtgaagcccccaccacctccggcgtggataatgcaaccggcccccgactggcagacaccgctgaacgggattatttcactctcagagagcggttgatgctgatgcagaagcagctggaagtggcgcaggaatatatccgcactcagtgcctgaaataa

SEQ ID NO: 12836 - DNA, 534 bp, Escherichia coli
atgaacgcaaaaatcagatacggcctgtcggctgccgttctggcgctgattgccgctggtgcgcctgcgcctgacattctcgaccagtttctggatgaaaaggaaggtaaccacaccacggcataccgtgatggtgcgggtatctggaccatctgccgcggtgccatcctggtggatggcaaacctgtcgttccgggcatgaagttgtcgaaggaaaaatgcgaccgggttaacgccattgagcgtgataaggcgctggcatgggtggagaaaaacatcaaagtgccattgagcgaaccccagaaagcggggatcgcgtcattctgtccgtacaacattggtcccggtaagtgtttcccgtcgacgttttataaacgaattaatgcaggtgatcgcaggggagcgtgtgaggcgattcgctggtggattaaggacggtggcagagactgccgtattcgttcaaacaactgctacggtcaggtatcccgtcgtgaccaggagagcgcgctggcgtgctggggtatcgacagataa

SEQ ID NO: 12837 - DNA, 873 bp, Escherichia coli; identical to SEQ ID NO: 5046

SEQ ID NO: 12838 - DNA, 480 bp, Escherichia coli
atggcgactgagtgggtggatgtggctgataatgccgtaaaaataggtttggggtcgttgctgactattttaggggggtggctgactcttaagctaacacaaaagcacgaattaaaaaaagaagcggcagtacagggattaaaagataaagaaataaaaaccaaacgatatgtggaatttctggccttgtctcaatctctcatgcaaaaatatttatatgagcagtgtgaagcaaataacgatgattatcttgcctatcttcgcatacataatgagataacgatcacgtcaggtttagccataaggaaagcagcatttaaactccagtttgatgtttctactttcattttctacaacaaaatacacgacacagaactcattaatgcactgagggataaggctagaaattctgtttccatgtttcaggccattgtgaatgaggaaatctgcaacggaaagtttggcacagcaagccagtag

SEQ ID NO: 12839 - DNA, 195 bp, Escherichia coli
atgaacgtcaagaacatgttttacggtgccattctggtaagtgctgtatgggcggttattttgctctcatggtttgaatccagccttaccttaagcgattacctcaggtacgaatcggtaatcctgatcccatgcctgctgtgggttgctgtttatgggttaggtaaacgttacctccaaagaacatcaaactag

SEQ ID NO: 12840 - DNA, 663 bp, Escherichia coli
atgacgaagaagaccttagctgaaagatttgaagtgcttgaacaagagtacaattctgtcatgtcgacaaaatatatgggaacaagtgcatttagtcacagaagccaggaatatattgattcggctaaaggtaataactggattgcaagagcaaaaaagttacttgaagacagttatggaaaggaatctgattactacaaagattttaatgatacacaaaggattgcttggtctagtaattatcagggattggttagacattacaaacctatttttgatgcagccagagacgatttaacttactccggcacggcatcgactatagcaacaaaacatgccgaactggatttgattataaatatactcaataaatttccagctttttgtcgtcaattaaagcaacgatacaatgacagaacgccgcttgaaattaatgacgagtatgatgtacaggatcttgttcatgctcttctgctgctgcattttaatgatgtcagacctgaagaaaattcacctagcttcgcaggttcatcatccagacaggattttcttctgaagaaagagaagattgtcattgaagtgaagaaaactcgccgctctctaggggcaaataaaattggagaggaactgctcattgatatggcccgttaccgtgcacggtaa

SEQ ID NO: 12841 - DNA, 2439 bp, Escherichia coli
atgccggtatggaacgggcagacgctgacattcgtgcaggaccgaccgtcggataaggtgtggacctataaccgcagtaatgtggtgatgccggatgatggcgcgccgttccgctacagcttcagcgccctgaaagaccgccataatgccgttgaggtgaactggattgacccggataacggctgggagacggcgacagagcttgtggaggacacgcaggccattgcccgttacggtcgtaacgtcacgaagatggatgcctttggctgtaccagccgggggcaggcacaccgcgccgggctgtggctgattaaaacggagctgctggaaacgcagaccgtggacttcagcgtgggtgcagaagggcttcgccatgtaccgggcgatgtcattgaaatctgtgatgatgactatgcggggatcagcatcggcgggcgcgtgctggcggtgaacaaccagacgcggacactgacgctcgaccgtgaaatcacgctgccatcctccggcaccacgctgataagcctggctgacggacaggggaatccggtcagcgtggaggtccagtccgtcaccgacggcgtgaaggtaaaagtgagccgtgttcctgacggcgttgcagaatacagcgtgtgggggctgaagttgccaacgttgcgccagcgcctgttccgctgtgtgagtatccgtgagaacgatgacggcacgtatgccatcactgccgtgcagcatgtaccggaaaaagaggccatcgtggataacggggcgcactttgacggcgaccagagcggcacggtgaatggtgtcacgccgccagcggtgcagcacctgactgccgaagtcaccgcagacagcggggaatatcaggtgctggcgcgctgggacacgccgaaggtggtgaagggggtgagctttatgcttcgcctgaccgtggcagcggatgacggcagtgagcggctggtcagcacggcccggacgacggaaaccacataccgcttcaggcaactggcgctggggaactacaggctgacagtccgggcggtaaatgcgtgggggcagcagggcgatccggcatcggtatcgttccggattgccgcaccggcagcgccgtcgcagattgagctgacaccggggtattttcagataaccgccacgccgcatcttgcggtttatgatccgacggtacagtttgagttctggttctcggaaaagcggattgcggatatcaggcaggttgaaaccacagcacgctatcttggcacggcgctgtactggatagccgccagtatcaatatcaaaccgggccatgattattatttttacatccgcagtgtgaacaccgttggcaaatcggcatttgtggaggctgttggccagccgagtgatgatgcatccggctatctgaattttttcaaaggagagatagggaaaacccatctggctcaggagttgtggacgcagattgataacggtcagcttgcgcctgacctggctgaaatcaggacgtccattacgggtgtcagcaatgaaatcacgcagaccgtcaataagaaactggaagaccagagtgcagcgatccagcagatacagaaggttcaggttgatacaaataataacctgaacagcatgtgggctgtgaagctgcagcagatgcaggacggacgcctttatatcgcgggtattggtgccggtgttgagaatactcctgacggtatgcagagtcaggtgctgctggcggcggacaggattgcgatgattaatcctgcgaatggcaacacaaagccgatgtttgttgggcagggcgatcagatattcatgaacgaagtgttcctgaaatatctgacggctcccaccattaccagcggtggcaatcccccaacgttttcactgacacctgatggtcgactttctgcgaaaaatgcggatatcagcggtaacgtgaacgcgaactccgggacgctcaacaacgtcacgattaatcagaactgtcggattctgggaaaactgtcagctaaccagattgaaggtgatattgtcaaaacggtgggaaaagcctttccgagaaatggcagttatgccagcggtacaataacggtcactgtgtacgatgaccaggcttttgaccgtcagatagtagtcccccccgttctgtttcgtgggggtaagcatgaaaacttcaacagcaacaaccaacagtcatactggtattcaacctgtaagctgcaggtactgaagaacggacaggaaatctttcagcaacccgcgacggatgtcagcagggtattttcatcagtcattgatatgcctgccggacacggccatgtcaccctgactttcaatgtttcttcatatggtgctaataactggacgccaacgaccagtatcagcgaccttcttgttgttgtgatgaagaaatctacagccggtatcagtatcagttga

SEQ ID NO: 12842 - DNA, 390 bp, Escherichia coli
atgaagctgattctgcctttcccgcccagcgtgaacacgtactggcgacaccccaacaaaggggcgtttgctggtaagagcctgataagcgcggcggggcgaaaattccagagcgcggcgtgtgcagcaatagttgagcagttacgtcgtctgccaaaaccaacgtcggcacctgcttcagtggagatcgtgttgtttcctccggataaccggatccgcgatctggacaactataacaaggcgctgtttgacgcgttgacccacgcgggtgtgtgggaagacgacagacaggtgaaaagaatgctggtggagtggggaccggttatcccgaaagggaaggtcgagatcactatcagtaagtatgagaaaacggcgggtgcagccgcctga

SEQ ID NO: 12843 - DNA, 996 bp, Escherichia coli
atgagccgttacgcccccacaccggaagttatggctattggtcaaattaatatttccggcaatgttacacctgcgacctggtggaaatatattcgactacccagtgggcgtccggatgcgacggctatcgctctgctttcagagatcgtttactggtaccgcccgacagaggtcagggatgagcacaccggagcgttgctgggatatcgcaagcgttttcagggcgacaaactgcaaagaagctaccaggcgtttgctgagcagtttggtttcgggaaaagggaaaccgcagatgcgctgaagcgtctgcgcgatgcagggtttattactctggatttacgcacggtggaaatgctcgatggggtgaaatgcagcaatattttgtttgtcgggatcaacccacaggcaattgcggccatcaccacaccttcttctgtttcgccagaaagtaacagcaataatgcaatcagcgatacagctattacgttaaaacggaacaccccccgacgtcataacggaacaggggatacgccgaatgttgatacaaatacagagattactacagagattactacagagattacaacggagactaaaaacactattggcgcatccgctgacgcgtctgcaccagcgcgttctgccagacaggaatattcaccggaatttgaacaggcctggcaggaatatcccaaacgtgctggtggtaattcaaaatccgccgcttttaaagcctggaaagcccgaatcagggaaggtgtgacacccgaaaccatgctcgacggtgtgaaacgctatgccgcctgggtgcgtgtctctggaaataccggtacccagttcgtgaagcaggcgtcgacgttctttggtccggatcgtcatttcgaagaatcctgggaagttcctgcggtatctgcagtcagacgcgaggacccgtacttcaaagccagttacgacaacgtggactacagccagatcccggcaggattcagggggtga

SEQ ID NO: 12844 - DNA, 369 bp, Escherichia coli
atgattttacagcgcgcggctggcactcactacattgcggatgctgtcgcacagtctgctggtggggtgtttgtatcgcttcctgaaattgaggaagtagagaacgccgatataaaccagcgcctgctggaagtcatcgaacagatcgggagttactcaaagcagattcgttcggcaatcgaagatggggtagtggagccacacgagcagacagcaattaatgatgagttgtatctgtcaatttcgaagctccaggagcatgcagcactggtctacaaaatcttttgcgctccagaaaagagtgacgcccgcgagtgtgcagctccgggcgtcgtggcgttttgtgtctgtggagaaactaacgcatga

SEQ ID NO: 12845 - DNA, 1224 bp, Escherichia coli; identical to SEQ ID NO: 8782

SEQ ID NO: 12846 - DNA, 267 bp, Escherichia coli; identical to SEQ ID NO: 8781

SEQ ID NO: 12847 - DNA, 270 bp, Escherichia coli
atgtcagaaatcacatccctggtcactgctgaggcagtgaaggaagtcctgcgctctgaagaagtccggagtgcactgaaacagaaactccgccagaaccttgaggcgcgtcttgatgcagaagtggatgccattctggatgagctgctgggcgtaccagcggttccggagccggaaggcattgcggatgacagtactgtttcagatggcgtcgggtctcagcctgacggtagtgaagagcctcagcctgacggcgaaatgatgatgtaa

SEQ ID NO: 12848 - DNA, 1971 bp, Escherichia coli
atggcatttaaacactatgacgtggtcagggcggcatcgccgtcagaccttgcggatgcgcttgctcaaaaaattcgtgaaggatggcaaccatacggcgggccgttttcttcgtatacggatgatggcgcagcacttattcaggcgattgtcgcagaaggtaatgtcaccacacctgtggtggtgaagccgtcggatggagaaggcgcagttatcagcaccaccagcaacccggagtattactttgttgttgccctggccgggcagtcaaacggtatggcgtatggtgaagggcttccgctgccggagacatatgaccgtccggacccgcgtattaaacagctggcgcgtcgcagcactgtcacgccgggtggtgcgtcctgtaactacaatgacattattcctgcggaccactgcctgcatgatgttcaggatttgagtaagttttcacacccgaaagccagcgcagctcagtatggatgcgtggggcagggattacatatcgcgaagaaattgttgccgtttattccggcgaatgccggtattcttctggttccgtgctgccgtggtggttctgcatttttggcgggcgatgaaggtaccttcagcgaatccaccggcgcaagcgagacctcggcacgctggggtgtagataagccactgtacaaggacctgcttacccgtactcaggccgcactgaaggccaaccctaaaaatattctgcttgcagtggtctggatgcagggcgagtttgatttgaaacagggtgcatacgccactcagccggggctgtttgattccatggtggaaaaatatcgttctgacctgtcggaattcggaggtcagtgtctcgggggctctccgtcatcagttccctggatttgtggcgacacgacctactactggaagcagacttattcttcgcaatacgatgcggtgtatggtgcatacaagacgaaatccgcaaaaaaaatcttctttgtgccgtttatgacggatgaaaacgggcgaaatgtgggtaccaacgagccgtcagaagatccggatgttgcggatattgggtattacggagccggtggtcgaacggacgccaaaacctggacgacggctgaccgtaaaacgcattttggatcatgggcacgtcgtgggattatttccgaccgtctggcaacggcgattcttgtgcatgccgggagaaacgctgaattcattaccggaaaacagcctgatacggtgaagcccaccggaccttccggtgaaggtacggagagagagccggaagccccggtcagtaaccgaaccctgatgagtctgctggcgtccggcgaagacctggcatcacagggctggcgctattatcacaaaccggcgagcggagacaatgttaacaaaaacattgctgaagcggtggtcagtgatgcgggggctacgggaggtaaggccctgcaactgaataaaccggaaaaccacatctggtttctggagcatgatgcagccggacagggagtggagttactgaagaaggggggacgtgtgagcgtacggtttaagttgccgggttcactggtgccgaatcagtttgccctgggcatttactggcagttgtcgtccctgccggagggagtgacgctggcagaggaaggcaacgacatgctgatgtccttcttcctgcagacggatgcgacgaacctgaacgcgatgcaccacaagaagccgaatgcgaagctggatacgttcggggtctttgataacggatggcacacactggcttttgagtttgccggaaacaacagcattcaggtgacgccggtactggatgagaaacgggggacgccgttcacactggtgaaatctccggcatcaggggcggcggacaaactgcaactgacaggcatatcaaaggcggcgacatatacgctgctgattgacagtgtgaaggtggaagtgaacaacgcggatgctgcggcatga

SEQ ID NO: 12849 - DNA, 279 bp, Escherichia coli; identical to SEQ ID NO: 4986

SEQ ID NO: 12850 - DNA, 162 bp, Escherichia coli
atgggtacaaaagcgcatgacctttttgtgttgcctttgtgcagaaaacaccatgacgaactgcatgcggataccgtggcatttgaagagaagtatggttcccaactggagctgatatttcgttttatcgatcgcgcgctggcgattggtgtgctgtcctga

SEQ ID NO: 12851 - DNA, 585 bp, Escherichia coli; identical to SEQ ID NO: 5290

SEQ ID NO: 12852 - DNA, 738 bp, Escherichia coli; identical to SEQ ID NO: 5288

SEQ ID NO: 12853 - DNA, 600 bp, Escherichia coli
atgcgtaaagtttgtgcagtcattttgtccgcagccatctgtctgtccgtatccggtgcgcctgcatgggcgtctgaacatcagtccacactgagcgcggggtatcttcatgcccgtacgaacgctcccggcagcgataatctgaacgggattaacgtgaaataccgttatgagtttacggacgcgctggggctgattacgtccttcagttatgccaatgctgaggatgagcaaaaaacgcactacagcgatacccgctggcatgaagattccgtgcgtaaccgctggttcagcgtgatggcggggccgtctgtacgcgtgaatgaatggttcagcgcgtattcgatggcgggtgtggcttacagccgtgtgtcgactttctccggggattatctccgcgtaactgacaacaaggggaaaacgcacgatgtgctgaccggaagtgatgacggtcgccacagcaacacgtctctggcgtggggggctggcgtgcagtttaacccgaccgaatccgtgaccattgaccttgcttatgaaggttccggtagtggcgactggcgaacggatgcatttattgttggtatcggataccgtttctga

SEQ ID NO: 12854 - DNA, 549 bp, Escherichia coli
atgaaggttaataaaaagaggcttgccgaaatttttaacgtggacccgcggacgattgaacgctggcagtctcaggggctcccttgcgtctccaaaggcagtaagggcattgaatctgtatttgatactgccatggcaattcagtggtatgcgcagagggaaactgatatcgaaaacgaaaagctccgcaaagaactggccgatttgcgtgcggcagcggagtcagatttacaacccggcaccattgactatgaacgctaccggctcacaaaagcgcaggcagatgcgcaggaactgaaaaatgcccgtgaagacggagtggtgctggaaactgaactgtttaccttcattctgcaacgtgtggcacaggagatttcggggatacttgtgcgtgtgccgttgacattacagcgtaaatatccggacatttcaccatcacaccttgatgtggtgaaaactgaaatcgcgaaagcctccaatgttgcagctaaggccggtgaaaacgtgggcgggtggatcgatgatttcagacgcgcagaaggcagctaa

SEQ ID NO: 12855 - DNA, 1929 bp, Escherichia coli
atgatttcagacgcgcagaaggcagctaatgcagccggtgcgatagctacagggcttttatctctcattattcctgttccactgacgacagttcagtgggccaataaacattattaccttcctaaagagtcgtcttataccccggggcggtgggaaacactgccgtttcaggttggcatcatgaactgtatgggcaacgatttgattcgcactgttaacctgattaaatctgcccgtgttggttatacaaagatgttgctgggagtggaggcttattttattgagcataaatcacgcaacagccttctttttcagcccacggactcagctgctgaagattttatgaaatctcatgttgagccaacgataagggatgttcctgcattgctggagctggctccatggttcggaagaaaacaccgcgataatacgctcaccctgaagcgtttttcctccggtgtgggtttctggtgtctggggggagcggcagcaaaaaactaccgtgaaaaatccgtggatgtggtttgttatgacgagctttcctcgttcgaaccggatgttgaaaaagagggttcgccaaccctgctgggggataaacgtattgagggctctgtatggccaaaatccattcgcggctcgacgcctaaaatcaaaggctcctgccagatcgaaaaagccgctaacgagtcggcacatttcatgcgtttttatgtgccctgtccgcactgtggggaggagcagtatctgaaatttggcgatgatgcctcgcctttcggtcttaagtgggagaagaataagccagaaagtgttttctacctttgtgagcatcatggctgtgtgatccatcagtctgagcttgaccagagtaacgggcggtggatctgtgaaaacacgggcatgtggactcgtgacggtctgacatttttcagcgccgcggataatgaaattccgccgccgcgctccatcacattccatatctggacggcgtacagtccgttcaccacctgggtacagattgtctatgactggctggatgcactgaaagatcccaacggcctgaaaacctttgtgaacaccacgctgggcgagacctgggaagaggctgtgggcgaaaaactcgatcaccaggtgctgatggataaggttgtgcgttacacggctgcggtgccttcccgggtggtttatctgacggcgggcattgactcgcagcgaaaccgttttgagatgtatgtctggggatgggctccgggagaggaagcctttctggtggataaaatcatcattatggggcgtcccgatgaggaagagacgctgttacgtgtggatgcggcgatcaacaaaaaataccgccatgcagacggaaccgaaatgaccatttcccgtgtctgctgggacaccggggggatcgatggcgaaattgtctatcagaggtcaaaaaaacacggtgttttccgggtgctgccggtaaaaggtgcatctgtttatggcaagccggtgatcaccatgccaaaaacccgcaatcagcggggcgtgtatctgtgcgaagtggggacggacaccgcaaaagaaattctctatgcccgtatgaaagccgatcccacgcctgcggatgaagccacgtcgtatgccatccgttttcctgatgatccggagattttttcgcagacagaggcgcagcaactggtggcggaagagcttgtggagaagtgggaaaaaggaaagatgcgtctgctgtgggataacaaaaagcggcgtaacgaagcgctggactgcctggtgtatgcctacgcggcattacgtgtgtccgtgcaacgctggcagcttgatctggctgtactggcaaaatcccgggaagaagagacgacccggccaacccttaaagaactggcagcgaagctgtccggaggagtgaatggttacagtcgctga

SEQ ID NO: 12856 - DNA, 207 bp, Escherichia coli
atggttacagtcgctgaactgcaggcgctgcgtcaggcgcgccttgatttattaaccggtaaacgggtggtgtctgtccagaaagatggtcgcagaattgaatatacggcagcttctctggatgagcttaaccgggcgatcaatgatgcggagtcggtactggggacaacccgccgtcgccgtcgtccgctgggagtgaggttatga

SEQ ID NO: 12857 - DNA, 2064 bp, Escherichia coli
atggcagcagtaaaaatctcaggtgtgctgaaagatggtgcgggaaaaccaatacagaactgcactattcaactgaaggcaaagcgtaacagcaccacggtactggtgaacacggtggcctctgaaaatcctgatgaagccgggcgttacagcatggatgttgagtatggccagtacagcgtcaccctgctggttgaaggttttccaccttcacatgccgggaccattaccgtctatgaaggttccagaccaggtacgctgaatgattttctcggcgccatgacggaggatgatgttcgtccggaggcactgcgccgttttgagctgatggtgaatgaagtggcacgtcatgccggagcatcatcacagagcgcagcggcagcaaagaaatccgaaactgcagcggcatcatcgaagaacgcggcgaaaacctcagaaacgaatgcagctaacagcgcacaggcggcagcggcctcgcagactgcatcggcaaactccgcgacagcagccaaaaaatcagaaaccaacgcgaaaaatagcgagacagccacaaaggccagcgaaaaaaacgcaaaatccagccagacggcagcgaaaaccagtgagacgaatgccaaagacagtgaagccaacgcaaaggtgagcgaaacagcggcggcgaactcggcgaaagcatcggcagcaagccagacggcagcaaaagcaagtgaagatgctgccagagaatacgcaaaccagacagcagagccgtacagatatgttttacagccgctgccggatgtgtggataccctttaatgattcgctggatatgattacgggctattctccgggttataaaaaagtgaagattggtgataatgtggttcaggttgccagtgataaacaggttaatttcagtcgcgcatcaacggcaacatatatcaataaatctggcgaactgaaaacggcggaaattaatgagccacgatttgaaaaagaaggtttattgattgaaggtcagcgaaccaactacatgttgaattcagcaactccagcttcttggggtaaatctgcaaatatgaatgtcgctgaggttggaactgatagttttggttttacttatggaaagtttgtttgtaatgaatcattaattgggcaaagtacaacccttaatatggcagtagtttcaacctcgggggctgtcgatgtatcaggcgataataagtgtgtgacgacatcgtgcagatttaaaacggatttggaactcctgttaaggatcaggtttgaagccttcgatggcagcgcttcatctaatcttggatatgccattgttaatacgcggtctttattggttgaaatcaccggtgtagctgccgacaggctcaccgcacgagttaacaaagatgaagctacgggctggatttttgtagaggcaacgattcaagcaagtaaagaaacttacataacctctgcaatacaatacgcaccaaaaaaaggtggtgtcgttgaatctggtgactatatttatctggccacccctcaggttgaggatggttcgtgtgtatcatcttttattatatcaggaacgacggcggcgacgcgcgcaagcgatatggttacagttccgattaagaataatctttataatcttccttttacggttctttgtgaggtacataagaactggtataaaacgccaaatgcagcgccacgtgtttttgataccggcggtcatcaaaccggagcggctattattcttggcttcggatcttcggcagatgggccagacggatttccttattgcgatattggtggatcaaatagacgtgttaacgaaaacgcatcgttgaaaaaaatggttatggggatgcgtgtaaagtcagatcagtctacatgtgcagtaagtaacgggcgtatatccagcgaaacaaaaaacacatgggaatatatccggagtacagcaaccattcgcattggtggacaaactacagcaggattacgccatttatttgggcatgtgaggaattttcgtctctggcataaagagctaacagatgcgcagcttggggaggttgtggagtga

SEQ ID NO: 12858 - DNA, 513 bp, Escherichia coli
atgtttcacatccgtcgtccggtcgttaagtacctccgtgtccatgttcttctgcgcgtggatatagacctgttcaccgcccgtcgcatcctcaaagcgcaactcattaaaaccgcttcctttataggtcttcgaccgtatcgtcatctgcgtcttcgtccccggcaggtcccccggcgaacggttgtcctcatggtacgtccggcccatgaccagcggctggtccgggtccccgttcagaaaatcaacaatcacctcctggcccacccgcggtatcgccagattaccaaatcccggccccgcccacgcctgcgacacacgcacccagcacgaactctcctccgtcatcccgtgataacggtcccagtgaaacttcacccgtacccggccatgttcatcacagaagatttcctctcccgcaggcccggtgacaatggcgctctgtggcccgtccaccttcggtttgctttgcagccgtggacgccacgtccggtccgccggtatcacctctaa

SEQ ID NO: 12859 - DNA, 300 bp, Escherichia coli
atgaggtggaatggcacaagagacttacaaaagaatcaggaaaaacgcctgattgatgagagccccaagccactgaaatctgtcgtcaagtttgcgctggtaactgttctgagaaagtcgaacatcataaatctggagtggcaacagattgacatgcagcgacaagttgccagggtgaatccagaagatagcaaatcaaatcgcgccattggtgtggcgctgaacgataccgcctctaaagtgctgcatgatcaaacaggcaagcatcacaaatgtgggtgtacataccagggcggctaa

SEQ ID NO: 12860 - DNA, 348 bp, Escherichia coli; identical to SEQ ID NO: 5342

SEQ ID NO: 12861 - DNA, 249 bp, Escherichia coli
atggccattgacgggctcaaggaggttcaggaatcagtgatgcgcattgaggccggactgagcacgtatgagaaagagctggcgctgatgggcgaggattatcaggacattttccgccagcaggtcagggaatctgcagagcgggaaaaagccggactctcacgtccggtgtggatagcgcaggcgtatcagcagcagatagcggagagtcgcaggccggaagaggagacaacaccacgtgagacgtaa

SEQ ID NO: 12862 - DNA, 228 bp, Escherichia coli; identical to SEQ ID NO: 4959

SEQ ID NO: 12863 - DNA, 201 bp, Escherichia coli
atgaaagcgtattgggactctttaaccaaagaacagcagggcgagttggccggaaaagttggctcaacacctggctacttacggctggttttcaatggctataaaaaagccagttttgtgctggctaaaaaacttgagcaatgcacgtcaggtgcaattacgaaatctgacttaagaccggatatctatccgaaagattaa

SEQ ID NO: 12864 - DNA, 375 bp, Escherichia coli
atgaaaacattacctgtattacccgggcaggcggccagttctcgcccgtctcctgttgaaatctggcagatactgctgtcccgactgctggaccagcactatggcctcacactgaatgacacaccgtttgccgatgaacgtgtgattgagcagcatattgaggcaggcatttcactgtgcgatgcggtgaactttctcgtggaaaaatacgcgctggtgcgtaccgaccagccgggattcagcgcctgtacccgctctcagttaataaacagcatcgatatcctccgggctcgcagggcgaccggcctgatgaccagcgacaattacagaacggtaaataacattaccctgggtaagtatccggaggcgaaatga

SEQ ID NO: 12865 - DNA, 489 bp, Escherichia coli
atggtccggcacccggatatccaccaggcccagtgcctgtaccagacgttccgtgataaggcggtctgccttgctgggtgtgacttcaccggacgggtgattgtgcgccagtaccacggcagcggcattgtggtacagggcgcgtttaatcacttcccggggatggacttccgtgcggttgatggtgccggtgaagagggtttcaccggcaatcagcttattctggttgttcagatacagcacccggaactcttcacgctccagtcccgccatgttcagaatcagccattctcgtgccgcacgggtggaggtgaaggccacaccgggttcatgaagatggcggtccagggttttcaggacccgctgaatgaggctgcgctcgccgggcgtcatctctcctggcagaaaggaaagctgttgcattgttccagcccctttcagtcgatgatgcgcataatggcgttgcattccggatgctgcagggcgtag

SEQ ID NO: 12866 - DNA, 261 bp, Escherichia coli
atgctgatggcggggattcagttcaccgctggtgagcatgagttccagttgtttcatcagcagcggaaaggcctggtccaggtggtatgcatccgcgtcgctgaaccggcctctgataccggcacggtcggcaaggtaatgcaaccggttaccctcctgcaccagacgtgccccgaaacagggcgtcacggtgcagggcagcccccaccaggggcggtcgtgattgtcgtcgggatgcgttgtcccgggcagtgtgtctga

SEQ ID NO: 12867 - DNA, 222 bp, Escherichia coli
atgaaaatcatcacccgtggtgaagccatgcgtattcaccgtcagcatcctgcatcccgtctttttccgttctgtaccggtaaataccgctggcacggtagcacggatacatataccggccgtgaagtacaggatattccctgtgtgctggccgtgtttgcagaacgccggaaggacagttttggtccgtatgtccggctgatgagcgtcaccctgaactga

SEQ ID NO: 12868 - DNA, 516 bp, Escherichia coli
atgagaattacaccaccccatctgcagccagttttatccagggttaaacgttttgttgaacgaatgccggaaggcgcaacactgacccagatatcacagaaagtgcaggcgtacagtctactgaataaaagggataaggagatactcattggcattatccgcgacagtggacttctggtcgttgcgaatgatggaagaactacaacgttacatcatcctaaatttggacatcaggcagtaaatagtgaaataccagtaaaaacagaggaacccgttgtgattaaaaagaccgttactccggatgaattacgcaggcatgctgaggagctgatcagggctgcggaagaagcagagaagaaatttaatgatcgtgcggaaattaaaaagcaactggatcctctgaaactggaaatcctccaggcgtatggaatggcaagtcgtaaatttgatgagtttgttgatgctatggcggatatggggaaagcggtacagaaactgaaacagattgtgctgtga

SEQ ID NO: 12869 - DNA, 393 bp, Escherichia coli
atggattttatcgaaaccgtcagtgcgctgatgaatgcgaaacccggacgcgacctttgctggctcctgacccgtcatcctgaaaaaccggaataccacgtggtgttatgcgtcagacaagagtatttcgacggccctgaactggatcggctgattctggatgcctggagcaacgtactgggcttcgcatcaccgggtgaagcaaagcagtaccagaagcagatcacccgggatgtggtgctggacagtcgttcaccggactgtgaaaacatcctcaaagagttgatatgggcgttcagtgatttcgcccgcgatcgtcgtggtgtgtgcgatccggaagcccgttgcctcgccggtaatcccggctatcccggatctgcaggactgttctga

SEQ ID NO: 12870 - DNA, 228 bp, Escherichia coli; identical to SEQ ID NO: 4959

SEQ ID NO: 12871 - DNA, 318 bp, Escherichia coli; identical to SEQ ID NO: 9188

SEQ ID NO: 12872 - DNA, 312 bp, Escherichia coli
gtgggtaaaccttctgtagcggaagaacgcagcaaaattacgccggtcactgcgattaaggtaacgccgacaggtacggttgaaaaagggaaaacaaccaccctgaccgttactgtggaaccggaaaatgcaacggataagacattcagggcgatttccgccgatccatcgaaagccaccattagcgtgaaagatatgacgattactgtgacgggggttaaggatggaaaagtcagcatccctgtgatttccggtaatggtcagtttgctgcggtggctgaaattaccgttaataatgtgccgggtggctaa

SEQ ID NO: 12873 - DNA, 261 bp, Escherichia coli
atgctgatggcggggattcagttcaccgctggtgagcatgagttccagttgtttcatcagcagcggaaaggcctggtccaggtggtacgcatccgcgtcgctgaaccggcctctgataccggcacggtcggcaaggtaatgcaaccggttaccctcctgcaccagacgtgccccgaaacagggcgtcacggtgcagggcagcccccaccaggggcggtcgtgattgtcgtcgggatgcgttgtcccgggcagtgtgtctga

SEQ ID NO: 12874 - DNA, 240 bp, Escherichia coli
atgcatccctctgatttcagtctgctggcaccccgacgtgatgatgagcagacggagatgccggatgaggacgatatgctgatgcggaaagcggcaggtctttctggtggtgtccgctttggggctgacgggaaggaaatcgttatggtcagtgatgacatgcggagcagtacagaggatgaagccatgctgatgatggtgtctgagggaattccaggaggtgtacgctatggcgggtaa

SEQ ID NO: 12875 - DNA, 261 bp, Escherichia coli; identical to SEQ ID NO: 5351

SEQ ID NO: 12876 - DNA, 1248 bp, Escherichia coli
atgagtttaatcaaaaacagtttttggaacctttgcgggtatgtacttccagctattgtgacactaccagctttgggtattatggggcgaaaattaggcccagaattatttggtgtattcactttggcattagctgttgtgggttatgcaagcatttttgatgcaggccttactcgcgcagtgatacgagaagtcgcaattgaaaaagataatgaagaaaataagttgaaaattatttcttcagcgacagttgtaattatttatttgagtttggccgcctcactcttattatttttttttagtggtcatatcgcattgctactgaacattagtgagactttttttcataatgtaagtgtctcgcttaaaattctcgcagcatccataccattatttttgattactcaaatatggttgtcaattttagaaggtgaagaaagatttggtttacttaatatctacaaatcaattacgggagtgatattagcaatctcaccggcattatttatacttattaaaccctctttgatgtatgcgataataggcttagttctagcaaggtttttatgttttattttggcttttataatttgtcacgataaagtgcttaaagctaaactaacaatcgatataccaacaattaaaagattgtttatgttcggtggttggattacagtaagtaatatcatcagccctgtgctatcatattttgataggtttattgtttcaaatcaacttggggctgctaatgttgctttttatactgcaccatcagaaattatttctcggcttagtataattccaggtgcgttttcaagagccttatttccaagattagctaatgcaaataattccgctgaaagatataaaacgaaaagattaattacaatttcacttttaataatcatcacccctattttttgtattggcgtgttattttcagagaagataatggttttatggatgggggcatcattttttggtgagcctggtttggtattatcaatattactgattggctttatttttaatggattggcacaagtaccatttgccagtattcaatcccgaggtcatgctaagataactgcatttgttcatctcttagagttgtttccttatttattacttttattttacctcataaaagcacatggggttgttggcgcgggtattgcgtggtcagtgaggatgatagtagattatatagcattaagtcttttggacggtaagtatattaataaataa

SEQ ID NO: 12877 - DNA, 246 bp, Escherichia coli
atgaccattctggactatatcgccgccaatccggggtgtagtggtggagaaatcgccgcagcactgaataccccaaccacagccattaatgcggagttacgccgactctggcgcagcggttcagtcataagaaaagagcgcaaaacaggcggtcgcttttcttaccagataaacccgatgccgttcgggtgcggcaatccacttaccaacatgtttaaccagctactaaaggaagccagagcatga

SEQ ID NO: 12878 - DNA, 1122 bp, Escherichia coli
atgggcgacttaggtggtattcagtcagatttagcccaactagttagactggtaatagctgaacagtatgatgacgttcggttatatgtcgctcgcttggtgcgtaaatatcgggaaactatgcctgctctatccgagcagcttgatctttatctacgaaataaaccgcaaaagcctgcacaaagcctgcgtaaggttaccgcaccaaaacaagcgctgcctcaaaccatgcctgtggacgaggagtcaaggcttaccttgcttaaagcaccaaatgaaaagattgtgagcaaacctctactgtccagtcagatagaagactcactggatcaaattattcttgagcggaagcacatcgatcgcctcaaggctctcggcttacaaccaacacgctctgccatttttgttggccctccgggtgtaggtaaaacacttacggcaagctggttagctcagaaattaggggttcctttttacgttcttgatttaacggcagtaatgagcagctatctgggcaaaagcggaaataaccttcgggcagctctagattttgcgaagaaagggccgtgcgttcttctgttagatgaaattgattcaatcgccaaaaagagaagtgatgattctgatgttggagaattaaaaagacttgttaccgtgatactccaggaggttgacgaatggccgtcttctagtttgctacttgctgcaactaacttcgctgagttgattgatccagcactatggagacgttttgatttagtgctcaattttgagaagccagatagcgaaagtattaaagaagcaattaaacgcttttcaggtcccgactacgcgatttttgcacgttggatagatctactggctattatgttcaaaaatgaatcttttagtaatattgagcgttctatcaacaaattccgacgttcggtcgctttaggtatttcctcagatgaagagttgattgggtcgttcattaaagatggtttatcagaattagacaggaatgaacgtaaagaaattgcagttactctaaaaagaaattctaaattatcccagcatgccatatcagacttaaccggagtcagtagggatacaattagaaaatacagtcaaaaaatgtaa

SEQ ID NO: 12879 - DNA, 2226 bp, Escherichia coli
atggcgaaaactaattttctgattggacgcggcgaattattaaccagcgatattcctggtcctaaaagagtgcccggaaaagctgaggtttattctctttacgaatcgaaacaacgtttattgccgcaaattgcatctactatagaaaattttgatgatttacccagtcaggcatgtccttatgattatgctgtggctaagttgacgttgaatccgagctatattgcacgctctttttttcctgcaaaaatgcttaagtctaccgggttaacgtctattggcagcaggacggtaaaaattacgcctcaaagctggaagcgaaaagttactgtgtcagaagtaactacgacacaaatgtttgttgctggtaaaagagaatccttcaaagagttacctcattgggtgtcaggactcaaagagttttctgacgaagcgattgattttgcacgcatagaacggttcgatgcctatttacccgaagagcgtattattaccattggtgagcaggattcttcgtattttgaggttggtgttcatttactgccagataatgaacaagacttggttcagcaacaatttgttcagtttgcatcaaatttgaacatcaaagtacatacttcattagcttttaccgctggtacattatggttcgtgccaatccaggccgatagaattactattagtaagcttgcgaaatttacatttgtacgagtaataagaccggttccaagattgcgtgggattagaccaatacaaaggaactacggtcctttagctcagtgtaaattgcctgctgagggccccgtatcttcagaaataaaagttgcgattcttgatggtggtttaccatcagagcacgctatatcgccatggttaaaatcctatagagttttggacgatcatgcagaggatgatccagacggtttagagcatggtttagctgtgtcttcagcctttttatttggaccaataagtaataaatcggaagcgaaaagaccatactcttatattgataacttaagagttttggacaacaagacctgccaagaagagccgctggaactatatcgaactttgggctttattgaagaggtattgttgtctcgccagtatcagtttatcaatctaagtttaggtccagacctaccaattgaagatacggaagttcatgcatggacttccgttattgatgatttgttaagtgatggtgaaacattaatgactgttgctgttggcaacaatggagaaatggatcgcaagtctggtaatgcaagaattcaagtaccagccgattgcgttaatgctcttgctgttggtgcttgtgatacagttaatgatacggaatggaaacgagcaccatatagcgccattgggccaggcagaagtcctggcgtgatgaaaccggatttagttgcgtttggtggtgacacagacgagtactttcatgttttaggtaaaggtaagaagcctgtaatcataccccagctaggaacaagctttgcctctccttacgccttacgagcagctgttggtgttcgggcaattttagggaacgatttgagcctactagcaatcaaagctttgttaattcatgcgtcaaaacagcttgatcatccttgtacagaagttggctggggaaaactgcctgaagacttgaacgacattatagtcagccctgatggtgttgcccgtatcgtctaccaaggtgaattgaaaccaggaaaatacttacgcgcttctcttccaatacctgaaggtggcttgaaaggtagaataaacttagcggcaactttctgttatgcaacaaccactgatccacaagacccagcttcctatacaaaagctggtttggaagtgacattccggccaaatgattcaaaaatcaaagacggaaaacaaaatgctgaaaccaagggattctttgaactggccaaatattcaactgaaagtgagcgacgttctgacatgggcaaatgggagaccgtcttacataattcgaagaacatgctaggttcaactctaaaaaatcctgtatttgacattcattataacgctcgtgaggccggtgcaagcatagccagccataaggcagaaaaaatcaagtatgctcttataattaccattaaggcatcaaagcaccaagacctgtataacgaaattttacgtacttataatcaggtgctcgtgccaattcaaccgcaaacatcaattcctattcgttcgtaa

SEQ ID NO: 12880 - DNA, 1341 bp, Escherichia coli
atggtggtgatgcttttcggctggttctggctggtgtttggcccgtatgccaaaaagcgtttaggtaacgaaccaccagaatttagtaccgccagttggatctttatgatgttcgcctcctgtacgtctgctgccgtactgttctggggatcgattgagatctactactacatctccaccccgccgtttggcttagaaccgaactcaacaggcgcgaaagagttggggctggcttacagcttgttccactggggacctctgccgtgggccacttacagcttcctttcagtcgccttcgcttacttcttctttgtccgcaaaatggaagtgattcgccccagctccaccctggtgccgctggtaggtgaaaaacacgccaaagggttgttcggcactatcgtcgacaacttctatctcgtcgccttgatcttcgcgatgggtaccagtctgggccttgccacgccgctggtgaccgagtgtatgcaatggttgtttggcattccgcataccctgcaactggacgctatcatcattacctgctggattatcctcaacgccatttgcgtcgcttgcggtctgcaaaaaggggtacgtatcgccagtgacgtgcgtagttacctgagcttcctgatgctgggttgggtgttcatcgtcagcggtgccagcttcatcatgaactacttcaccgattcggtggggatgttactgatgtatctgccgcgcatgttgttctataccgatcccatcgctaaaggcggcttcccgcagggctggaccgtgttctactgggcatggtgggtgatttacgctatccagatgagcatcttcctcgcccgcatctcccgtggtcgtaccgtgcgtgaactgtgcttcggcatggtgctggggctgacagcgtcaacctggatcctgtggactgtactcggtagtaacactctgctgttgatagataaaaacatcatcaacattccaaatctgatcgaacagtacggtgtggcgcgcgccatcatcgaaacctgggccgctctgccactcagcaccgccaccatgtggggcttcttcatcctctgctttattgccaccgttacgctggttaacgcctgctcttataccctggcgatgtccacttgccgcgaagtacgcgatggtgaagaacccccgctgctggtgcgtatcggctggtcaattctggttggcattatcggtattgttctgctggcgctcggcggcctgaaaccgattcaaaccgccattatcgccggaggatgcccgctgttcttcgtcaacatcatggtgacgctctcctttattaaagacgcgaaacagaactggaaagattaa

SEQ ID NO: 12881 - DNA, 543 bp, Escherichia coli
atgaacatttcgctttataccatcaccgtatggataccgaccatatttgttaactccggcattgatgttgataaatcaatattaatgaccgctgttattatgattggcgctccggtagggatatttattgcggcattaattattgatcattttcctcgtcgattatttggctctgccttacttattattattgctgtgttaggctatatctattcaattcagactacagagtgggcgattttaatctatggcctggtgatgatcttctttttatacatgtatgtgtgcttcgcgtcggcggtttatatcccggaactttggccaacgcatttacgcctgcgtggttcgggtttcgttaatgccgtcggacggatcgtcgcagtcttcacgccctatggcgttgcggcattattaacacattatgggtcgatcacggtgtttatggtgcttggtgtcatgttagtgctctgtgcgctggttctctccatttttggcatcgaaacgcggaaggtgtcgctggaagagatttctgaggtgaattaa

SEQ ID NO: 12882 - DNA, 480 bp, Escherichia coli
atgacaacaagtgatgccatcgctttagctgcgcttgtagtatcgatttacactatcatatcgtcagaaatgaaatcgagaaaaagcgatagagaacaaaaggttataaaggatgagcaagacaggttacgtaagttgcttctggaaaaagaaacaaagtcagcaattaatgagatgaaagctgagcttggtgctcgcctcgtaaaaatagccaaaaacaactataggctcaagatatttaatagagggagggttgaggctaaaaatatagagattcatttccctgataacgatggaaatgaatatctttcaatgcatgatgtagaagataaatttccatatgaggtattacacccgcaacatgggattgaaattttagcgggaataagctttggaagtaaaactaaataccgaataaaactcatatgggatgacaattataaaagaagaaatgaagaggagtttttcatttctatataa

SEQ ID NO: 12883 - DNA, 276 bp, Escherichia coli
atgaaactgaatcctgagaaatacaatagaaacatcaccctgctatgtcctgtgtgcggaaatacagagatggaacacgaggaagagtctgaagtcgtcagatgtgtaggctgcgggaaagaatttactaacgatgagttaatccaagaaaacggggtgagtattgacgcccatgtagatgaaataaaagaagagttaacaaaagacattcaaaaacagtttgatgacatgctcaaaaaggcatttaagggaagtaagaatataaggatcaaataa

SEQ ID NO: 12884 - DNA, 726 bp, Escherichia coli
atgattacttataccggatataagctgaaagttatttttataatctttttattcttgggttaccatgttgtagcctatgctgaaatgggccgggatcgtgagttttgctatcctggatctccagaaaacaataccacaccggctgttttttattataattttggcacaacgattatttcagatataaataataatataccaggtactattctgcccgaaaaaaactggaaaattggtctgtataaggcttattgtaattccattagcaattatgaggtatattttagcggagtgtcaggtattgatccatctggtacatctggtattcaacaggggagtgatatatttgttccagtgacgcatgaaatatcaatttctacacatgttaaactctataataaaaatgggacacagacagataaaacagtaccattttataattatagtactaattatccaacggatagaagtaaaccatcaaattggtcttcaggaacagagggctatattaaaattaaattggataaaaagattatctctgatatctctctgaataatgtacttttagtttcattgtatgccagtcagcggcaaacggaacatgggccagtaccattatttaatgcctggatcagcaacctggatattcaggttccgcaaggttgcacaattaatgaggtacgagttttactgttaatatgccggatgtgtgggccagtgaattga

SEQ ID NO: 12885 - DNA, 573 bp, Escherichia coli
atgccgggcaagcaaatgctctgttgtattttgatatcgattatcagtgagggagatatgaagatattcattagtttatttttgtttataatatcaacaaattcttttgctgatgatatcactcatgccggagtggttcgtattgaagggttaattaccgaaaaaacctgcattatttctgatgagtcaaaaaattttacagttaatatgccagacgtacccagtagttcggtaaggagtgcaggggatgttactgaaaaggtttatttttccataacgttaacccgctgtggtagtgatgttggcaacgcgtatataaagtttaccggcaatacagtttctgaagatgccagtttatataagctggaagatggctcggtagaggggcttgcacttacgatttttgataagaacaaaggcagtattagtaatgatgttaaaagcatgggtttttcacttacatcatcagttgataatatattgcatttttttgcggcttacaaagcattaaaaaataatgtccaaccaggggatgcaaatgcgtcagtatcgtttattgtcacctatgattaa

SEQ ID NO: 12886 - DNA, 1230 bp, Escherichia coli
atgtctaatatttggtcaaaagaagaaactctgtggagtttcgcgctctacggcacagccgttggtgcaggcacgctcttccttcctattcagttaggttcggcgggggctgtggtcctgtttattactgctctggtcgcctggcctttaacatattggccacataaagccttatgccagttcatcctctcatcgaaaacatcagcaggtgaagggataacgggcgcggtaacacactactatggcaagaagattggtaatctgattaccacgctgtacttcatcgccttttttgtcgtcgtgttgatatatgcagtggcaattaccaactcacttacagaacagctggcaaagcatatggttattgatcttcgcatccgtatgttggtgagtctgggggttgtattaatcctgaatctcatttttctgatgggacgccatgccactattcgggtaatgggatttttggtattcccattgattgcctatttcttatttctttctatttacctggtcggtagttggcaacctgatctattaacaacccaggtagagttcaatcagaatacccttcaccagatatggatatcgattcccgtgatggttttcgcttttagccatacgcccattatttctacgtttgccatagacagacgtgaaaaatatggcgaacacgctatggataaatgcaaaaaaattatgaaagtcgcttatctcatcatctgcataagtgtattgttctttgtctttagctgcctgctttctattccaccttcgtatattgaagcggctaaagaagaaggggttaccattttatcggcgctttctatgctgccgaacgccccagcatggttgtcaatttccgggattattgtcgcagtagttgcgatgtcgaaatcattcctgggtacgtactttggcgttattgaaggtgccacagaggttgtcaaaacaacattacagcaggttggtgtaaagaaaagtcgtgcatttaaccgcgcactatcaattatgttggtatcgctgattaccttcattgtttgttgcattaacccgaacgcgatttcgatgatttacgcgatcagcggcccactcattgccatgatacttttcatcatgcctacgctgtcaacgtatctcatcccggcgcttaaaccctggcgttccatcggaaatctgattacgctgatcgtgggtatcctgtgcgtatcggtaatgttctttagctaa

SEQ ID NO: 12887 - DNA, 186 bp, Escherichia coli
atgacaaaaacttatctgttcatggtcatatctgaagaaagcgtatgtcgcacttcgtcattaacacctttgactgctgatctggcaggtacagtatgtaaagtaagccatttgtcaatagctgatgaacgccagcccacagaaccactaccaagacgtaccggcctggggaaggttgcatcgtag

SEQ ID NO: 12888 - DNA, 1131 bp, Escherichia coli
atgttgcttaatatgatgtgtggtcgtcggctgtcggcaatcagtttgtgcctggccgtaacattcgctccactgttcaatgcgcaggccgatgagcctgaagtaatccctggcgacagcccggtggctgtcagtgaacagggcgaggcactgccgcaggcgcaagccacggcaataatggcggggatccagccattgcctgaaggtgcggctgaaaaagcccgcacgcaaatcgaatctcaattacccgcaggttataagccggtttatcttaaccagcttcaattgttgtatgccgcacgcgatatgcaacccatgtgggaaaaccgtgatgctgttaaagccttccagcaacagctggcagaggtggcgattgccggtttccagccgcagtttaataaatgggtagagttactgaccgatcctggtgttaacgggatgacacgcgacgtggtgctctctgatgcgatgatgggctatctccatttcattgcaaatattccggtcaaaggcactcgctggctatatagcagtaaaccttatgcgctttcaacgccgccgctttcggtgattaaccaatggcagctggcgctggatcaaggtcaattgcctacgtttgttgcaggactggcaccgcagcatccgcaatatgcggcgatgcatgaatcgttactggccttactcagtgacaccaaaccgtggcctcaactgaccggtaaagcaacgttgcgcccaggacagtggagtaacgacgtaccggcgttgcgcgaaatattgcaacgtacaggcatgttggacgggggaccgaaaattacgctacctggcgatgacacgccaactgacgcggtagtcagcccatccgctgttactgttgaaacagcagaaactaagctgatggacaaacaaactacgtctcgtagtaaacctgcgcctgccgttcgcgccgcctacgataatgaactggtggaagccgttaaacgttttcaggcatggcaaggattgggagcagatggtgctattggcccggcaacgcgtgactggttaaacgtaacgcccgcccagcgtgctggcactcaacatccagcgattgcgcttgctgccaacagagctttctaccgggatcatggttaa

SEQ ID NO: 12889 - DNA, 339 bp, Escherichia coli
gtgctcttcctgtttgaggttatcggtaatgatacgcagacgacggtaggccgggtcgttcagctgagccggatcttcaccaggaaggcgctcaaccgcctgctggtaattaaattcgtgtttcggcttgacgtagcccggacgcaacacgcgggtttcaccaccgcgatggcgaagcacttttccttcaacgatcggggagacataggccgccaccggcgtttttccggtaattttgtccagcatcacctcttcggtgtggaaattcaccgtacggcggaaaaacagctccagaaacagcgcacggaatttcactttttgttcggtataaccgagtaa

SEQ ID NO: 12890 - DNA, 309 bp, Escherichia coli
atgaaaaagttattactctgtaccgcactggtgatgtgtgcgggaatggcctgcgcacaggccgaggaaaagaacgactggcactttaatatcggcgcgatgtacgaaatagaaaacgtcgaaggttatggcgaagatatggatgggctggcggagccttctgtctattttaatgccgccaacgggccgtggagaatttctctggcctattatcaggaagggccggtagattatagcgcgggtaaacgtggaacgtggtttgatcgcccggagctggaggtacattatcgagttcctcgaaagcgatga

SEQ ID NO: 12891 - DNA, 1764 bp, Escherichia coli; identical to SEQ ID NO: 8638

SEQ ID NO: 12892 - DNA, 543 bp, Escherichia coli
gtggaggccgcctgtcagcccgcgcgaacccccctggcaggctggcgcctgccggaagggaagcgggccacgctggcgcgtcgcccgttacccttcccgtttgtgatgtgtccggaatgttttttcctgatgttatgtttctgtggttactgttcttcttcttcctcttctttccgttcctctcctgtttatggctttcccgggcgtcccccaggcggggcgggctgtcgtgaacggagccagcggagctgtctccgccctggcgggcttccatccctgacgcaaaacccccggcttgcagcgaccgttccggtcgcgccgcctctgtcgcgccgcctctgtcgcgccgtggcctgcgctcctggcatcccggcaaaaggccgccgggatgtaaggcgcaacgccgtttcgcaaaccgcgcttcacgtcgttgcggcgggtccctgcccgttgttgtgtccggtgccattcacctgtttaagcccctgtcgccgggggctgatacagccacaacctgccgcactgactgtccagggtaaatga

SEQ ID NO: 12893 - DNA, 1485 bp, Escherichia coli
atgtcagtaaaggaagaaattgctcccgtcagcgcgtctcaaaccgccgcgcccccatctctgcttgatgaaatcatggcgcaaacccgcgtccagcctaaatcagaaagctacgatatcacccgccagggcgtgagcgcctttattgccgccatgttacagggcgacagtagcgctgaacctatcaatatcctggccgttgacgccatgattgctgatattgatgcccgaaccagcaggcagatggatgccattattcatgccccggagtttcaggaactggaatccctgctgcgctcgctgaagctgctggttgaacgcgcggatacacgggaaaacatcaaagtccatttcctgaatgtcactcaggaagaactgctggatgatttcgaatttgcacctgaaatcacgcagtctgcgtattacaagcatgtatattcaagcggttacggacaatttggcggtgagccagtggcggcggtaatcggcaactttgcctttaagaacaccacgccggatatgaagctgctgaaatatatcagccaggtcagcgcgatggcgcacagcccgttcctgtcgtcagtatcatccgaatttttcggtctggattcatggacagagttaccggggatcaaagaaccgggtgccatctttgaaggcccggcctactcccgctggcgcgccctgcgtgaatcggaagattcccgttacctgggcctgaccgccccccggttcctgctgcgccacccttactcaccggatgaaaaccctgtcaaaaccttccgttaccatgaagatgtcagccagagtcatgagtcttatctgtgggggaatacctcgtttttactggccgccaacctggcggaaagttttgctaagtatcgctggtgcccaaatattattggcccttccagcggcggcgcagtcaaagacctcccggtgcatctgtatgaatccatggggcaaatgcaggcaaaaattccgactgaagtgttgatcactgaccggagagagtatgagctggcggaagagggctttatcacactgaccatgcgtaaagggtctgataatgcgtgctttttctcggccaactcggtgcagaaacccaaaacattccccaaaacccccgaaggcaaggctgcggagaccaactataaactcggcacccagctgccatacttgtttgttatcagcaggttagcgcattacatcaaggtaattcagcgcgaacagcttggctcatggaaagaacgtagtgacctggagcgtgagctgaacacctggattcgccagtatgttgctgaccaggaaaatccgcctgccgaagtccgcagccaccggcctttgcgtcaggctaagatcgaggtactggatgtggatggtgagccgggctggtaccaggtcgcgatttctgtcagaccgcattttaaatacatgggtgccagtttcgacctgagcctggtcggacgactggataaggaataa

SEQ ID NO: 12894 - DNA, 213 bp, Escherichia coli
gtggcttttgaagaacgttactaccgcgaagagctggattatcttcgccagctaggcaaactgctggcgcaggaaaaaccacatctggcccactttctggccgagaaagagggtgatccggacgtggagcgtctgatggaagcctttgcctttatgtccggtagcctgcgccagaaacttgaggacgaattccccgagttcacccatggctga

SEQ ID NO: 12895 - DNA, 699 bp, Escherichia coli
ttgttcggtcacgaaaaaggggcgtttaccggggccgacaaacgccgggaagggcgctttgttgaggcggacggcggcacgttgtttctcgatgaaattggcgatatctcgccgatgatgcaggtgcgtctgctacgtgcgattcaggagcgcgaagttcagcgtgtcggtagcaaccagactatttcggttgatgtccggctgattgcggcaacccatcgcgatcttgccgcagaggtgaatgccgggcgttttcgccaggatctctactatcggctgaacgtggtggcgattgaagtaccatcgctgcggcaacggcgggaagatattcctctgctggctggccattttcttcagcgctttgccgaacgtaatcgcaaggcggtaaaaggctttacgccccaggcgatggatctgctgattcattacgactggccgggaaatattcgtgaactggaaaacgcggtggaacgggcggtggtgctgctgaccggggaatatatttccgaacgcgagctgccgctggcgattgccagtacgccgatcccgctggtacaaagtcaggatattcagccgctggtggaagtcgaaaaagaggtgattctggcggcgctggagaaaacgggcggcaacaaaaccgaagccgcccgccagttagggatcacgcgcaaaacgctattggcaaaactgtcgcgttag

SEQ ID NO: 12896 - DNA, 1320 bp, Escherichia coli
atggatatctgctcccgaaacgagaaattagcgattagaagaccagcgatactggttgcactggcacttttactgtgtagttgtaaaagcacgcctccagagtccatggtgacaccaccagcgggctcaaagccaccagccacgacgcaacaatcgtcacaaccgatgcgtggcatctggctggccacggtgtctcgcctcgactggccaccggtttcctcggttaacattagtaaccccaccagccgggcacgtgtacaacaacaggcgatgatcgacaaactggatcatctgcaacgtctcggcataaacacggtctttttccaggtcaagccggatggtactgccctgtggccatcgaaaattttgccgtggtccgatcttatgaccggtaagattggtgaaaatccgggttacgatccgctgcaatttatgctcgacgaagcccacaagcgtgggatgaaagtacacgcctggtttaacccctatcgcgtatcggttaatacgaagcccggtactatcagggaactgaatagcactctgtctcaacaaccggcgagcgtctatgtgcaacaccgcgactggatcagaacgtccggcgatcgctttgtcctcgacccgggcatccctgaggttcaggactggatcacatcaatagtcgcggaagtggtttcccgctatccagtagatggcgtgcagtttgatgactatttctatactgagtcaccaggttcacggctaaatgataacgaaacgtaccgcaaatacggcggcgcatttgcgtcaaaagcagactggcggcgcaacaatactcagcagttaattgcgaaggtatcgcacaccattaaaagcattaagccggaagtcgaatttggcgttagcccggcaggcgtgtggcgtaaccgatcacacgatccgctcggttccgatacccgaggtgcggcagcctatgacgaatcctacgctgatacccgtcgatgggtggaacaagggttgctggattacattgctccccaaatttactggccattctcacggagtgccgcgcgttatgacgtgttggcaaaatggtgggcggatgtcgttaaaccgaccaggacccgcctgtatatcggtatcgccttctataaagtgggtgaaccttcaaagatagagccagactggatgattaacggcggcgtaccggaactgaaaaagcagctcgatcttaacgatgctgtgccggaaattagcggcacaatcttgttccgtgaggactatctgaataaaccgcagacgcaacaagcggtcagctatctgcaaagtcgttggggcagttaa

SEQ ID NO: 12897 - DNA, 1104 bp, Escherichia coli
atgacagctagaacaactaaagttttgcacttacaattactcccactcttaagtggcgttcaaagggtaacattaaacgaaattagtgcgttatatactgattatgattatacactagtttgctcaaaaaaaggtccactaacaaaagcattgctggaatatgatgtcgattgtcattgtatccccgaacttacgagagaaattaccgtaaagaatgattttaaagcattgttcaagctttataagttcataaaaaaagaaaaatttgacattgtgcatacacattcttcaaaaacaggtattttggggcgagttgctgccaaattagcacgtgttggaaaggtgatccacactgtacatggtttttcttttccagccgcatctagtaaaaaaagttattacctttattttttcatggaatggatagcaaagttctttacggataagttaatcgtcttgaatgtagatgatgaatatatagcaataaacaaattaaaattcaagcgggataaagtttttttaattcctaatggagtagacactgataagttttctcctttagaaaataaaatttatagtagcaccttgaatctagtaatggttggtagattatccaagcaaaaagatcctgagacattattgcttgctgttgaaaaactgctgaatgaaaatgttaatgttaagctgacacttgtaggagatggtgaactaaaagaacagttagaaagcaggttcaaacggcaagatggacgtataatttttcatggatggtcagataacattgttaatattttaaaagttaatgatctttttatattaccttctctttgggagggtatgccattagcaattttagaagcattgagctgtggacttccatgtatagtcactaatattccaggtaataatagcttaatagaagatggctataatggttgtttgtttgaaattagagattgtcagttattatctcaaaaaatcatgtcatatgttggtaagccagaactgattgcacagcaatctaccaatgcacgatcatttattctgaaaaattatggattagttaaaagaaataataaggtcagacagctatatgataattaa

SEQ ID NO: 12898 - DNA, 924 bp, Escherichia coli
atgaaaagtatagcaacagcagtatctactatcaatgtaccattccacggcgcagagctttatgttgtcaatcacaacggcgaaccgtataccccaatgaaacctatcgttgagggaatggggctagactggaaatctcaacataagaagatttctcaacgattctcgaatggtatggtggaaatcaccataccttctgccggtggggtgcaagccatgatttgtatggctttacgaaaattggcagcttggttgaacagcatcagtcctaacaaagtccgccctgaaatccgcgacaaggtaatccagtatcaggaagagtgtgacgatgtgctctacgagtactggactaaaggccatgtagttaacccacgcaaagctaaaaaggcgttgcagggtaaaatcaccactgaacagcaggaagccattaaacaactcgtcatgagtcgcggtcagtctctgccaaaagaaaaacaggctaaggcgatgatcaccatgtggtcgtcactgaaatcccattttggatgttcgtacaaagaaatcagtgaggagcagtttaccgaagcactatcacttgcagctcgagttccacttgaaggtgagttcattggcaaacaagagaagaaaaccaacgagctttctgcaaaagaagtaaacagccttgtatggctatgggattatgccaaccgctcacaggcattattccgcgaactgtatcaggcgctaaaacaaattcaatcgaactattccggcagatgctacgactacggtcatgaattctcgtatgttatcggaatggcgagagatgttttaatcaaccatacacgagatgttgatattaatgagccagacggaccaacgaatctttccgcatggatgagacttaagaataaagaattacctccttcagtacataactactga

SEQ ID NO: 12899 - DNA, 204 bp, Escherichia coli
atgagtaaagaatgttgtttctgcggcattagcgaatcagacgctgatcaaacatacatttactctaaagaaacaggtcggatgctgtgtagtgactgcgtgttggacatcataagatacaagcatcttggatgttctgccagcattagcaatataggtgaagtatacgaagggaaagatataactgatagagcagaaagttga

SEQ ID NO: 12900 - DNA, 141 bp, Escherichia coli
atgaaggtaaaaacactgcgtatgccagagaagttagaaaaaatccttgaagagaaagcaaaggaagagtgtcgatcgtttagcgcagaagtaattaaacgggtgctggacagcttgaagagagagggggtgatggtatga

SEQ ID NO: 12901 - DNA, 258 bp, Escherichia coli
atgtctgatcgtaagtacaaaaaccctcaagtgaatctgaggcttcctgtagagataaaggaacgtcttattgaactggctgaggctaattctcgttcattaaatgctgagatggtcgctgcacttgaagcatggaccgaaaaaaataaacacattcaagcactagaccttgcaactatagcatcacgattgatagatcttgaacatgatgttgagaagttgaaatgcatgtatggcaacaataaagacgaaagttag

SEQ ID NO: 12902 - DNA, 324 bp, Escherichia coli
gtgtatacaacagttatcgcgatagctatcgcactcattgtggttcagtaccaactggcatctttaaaacaaaagatatctgacctcaagactgagaacgaagcacttaaaaactcaataaaagatgagaagaacaaactatcattcactatatctgatattgagcaatccattgaaattattgagaataatattaacagattaaaaaaagaagatattcatgaaatcaatgacaatatcaaggatttgaaatcttggcttaggaatgtaggacaaatcgccacatcaacacgagataagctcaatacatccatggatgattaa

SEQ ID NO: 12903 - DNA, 2160 bp, Escherichia coli
atggctaaagcatggaaagatgttatcgcttctccacagtatcaggcgttaactgaagaacagaaagcacaggctcaagcgcaatattttgatgaggttgttgcccctaaggctggtgacaaatgggctgaagcaagagatcagttttatgcagcataccctccgcctcagcagcagaaagaagaaccatcattgatgcaacaagctggtgattggctcacaggtggtcaaagtgcagggcaaattgcagaacaggctggtcgtggtctggtaaacataccatttgacgtattgcagggtggcgcaagtctgattaatgcaatcagccaggggcttggcggccccaaggttttggatgatgtttatcgccctgccgagcgaccgacagacccttacgcgcaagccggtgaaacaattggtgggtatctcctgccaattggcacagcggcaaaagctgctggagcgacagcaaagctcgctggagatatcggttccgccggaaacatgattgcaggttctcttgctgatgctgcaaatcaggagggcgactttgcacaaaatgctgccattaacggtggtatcaatattggtgctcaaggcgttctttcaggtgtcgggcgcgttattgcgccaagggtttcacaggctcttggtggtgcagcactgaattctgctaatgatgtttctaggatggcaaagtcaggtgctgggcgtcagtcaattgccagtcaggccgctaatgtgtccgaagatgtagcaaaagcggctgagtctgctggaattgatataaacgcattaacaccaggaatgcgatctggaagtcgtggaattgcacaagccgaaggcgcattggcatcaacaccaggaattgttcaggacgcccatcaggcagcatttaacgaaatatcatcaaagttaagtcgaaaccttgatgaatttggggccgcatctggaacggcatcagaaaaaagtgcggctataaaacaaaggattcttcaaaatcttgatcagatgaaggatgccgagcgcgcggcatgggatgacgtgcggtcaacaatgccaaatcaaaaagcaagaatgctaaatggtaatgccgttattcaggcagagcgatctgccggcataccgcttactcctgaaatgaaacagtttgttcaggcaaacaatcaaggtggagtaacatttgacggcatgaaagcatggagagcgaaatttgctgatgcggagcaaaaatataagcgtagcggagaggcaaatgcggcaaggagagcaggggaaatacgccgggcaattactgatgatatgcgcacaatggcggaaaacggcggatttcttgatgactggcaaaaagctaatgatctgtctaaagcgaggttatcagcacaagagagtgcagagtctgttttcgggcgtgatttggcaacagatgcactgattacgaatggagtaaaatcccttcaatcatcgtcagctaaaggtcttaatggtcctgctggattccattctatgatccgcgcgctgccagaatcagagcgtgttcctgctatatcatcaatgttgcaagatgctatctcgcatggtgtacgtggtggtaaagctgatgcagcaggaattaaccatatcgcagagatactcactccacaaaatgtaaaagccattagccgatattcctcagagcttggaagaattgcagatgcatatggcactcttgcaagagcagcagtgaaacctcagcagtatattgaaagaacagggagaactgccaatgtactacgcgatctggatgccggtttatccaacgtcacatcaacagtgttaaatgcaattgccaattcaacatcaggtgccattgttggtggagcaggagggggcattgcaggcgctgccgcaggtgctttagttggcgccgggctaaaaggtgctgtatctaaaattgccaccacacgtagtggtcggtatgcgatagagaaagcagttcaggaagccacgaaagcagtaagagctggcggaagtaaagaagcattagcggcggcggaacgcagatttatggcaaataaagccgccgtaaaagcaatacgcgatgcagttggaaacgaagagttcaatcgcttagcgagggctggcattgtagcgtcgctaagcggaatggcacaggagtaa

SEQ ID NO: 12904 - DNA, 1350 bp, Escherichia coli
atggctacgtggcaacagggtattaattctggtggttttctggctggaattggtgcgcaaaatgagaatgcgccaaaggcaagcgacattaacgcaacgcttggtctgatccgcgaaaacaatgaactggctcaatcaggtgcaaataacgttggtctgaccgcgttacgtggtctggctggagttgctgatatttataagcaggaccagcaacagaaagcgattaatgcgttcaataaggttcatgctgatgcatgggcttctggtgatccatcgggactatttaagtttgccaaggaaaatccagcgtttgttgcgcaggcacaacaggcattttccggtcttaatgagcagcaacgcaacgatatgggcgatttagccatgagggctaacgtcgctctttctcagggaccggaagcctacagtaaattcattactgacaacaaggacaggttaaatcgcgtgggggcgaatgctgattggatgattcagacaggtatccagaatccagagcagctatcacacatgctgactactatgtctctcggtgcgcttggaccagaaaaggcgtttgctgttcaggacaagatggttggtcgccagcaggagcagcaaagaattaacgaaaccattcgcaataatgacatgacgaatgcgagggctattagggggcaggatctttcctataaggctcaaatggcaagactgaatcacgacaagtatgtgtttaagcagtcacaggcggcccttgaaagagcaggacaacttcaggatatggatgttttgtctcttaactcacagatagcagcgacgggaattgatcctctaaccggtaaagctgcaacgtcagccagaatgtctcaggctaagagatggcttgatggcaacaataattacaacaatgcgttgattactggtgagcgagggatagagaaaatagattctttgcttggtaagaaggagcttgaaggtatcggtcgcttcgaaggaagaaatatagatggcttcacaagtgctgaagggcttgcaaaccgtaatgcgatagaagaattaaagtcgggtgcgtttgtccagaacgtgcagattatgcgaggtatggggagcctctccaatgctgaaggccaaaaactggaaaacctgatcgcgaaactcgatataacacagcctgaagaggtcgtcagaaaacagttatctgaaatccgatcgcaatattctgtatttcaaaaggttgcagcaagggaggctgaatcaatgggatatagttcatcaggttatgacacatatgttagtgagcgaaaatcaggaagcgacagcaataagtccggtttctcgtctttatggggtgattaa

SEQ ID NO: 12905 - DNA, 348 bp, Escherichia coli
atggattattcacagttaagtgattttgaaattaacaagcgagtatttaaagcgatagtgggggcaataccattaggttatccgcacaacgcagatggacggtctgtcggcaatgaatcaaatggtaattatcgatggtacgactactgcaataatcctgaagacgcagagccgattatcgtagagaacagaattggcattattccagcgccagaaaatggattatggaaggcagcgcatagaaaagttggcagtgatagcaccccatatcatatgactcaagatgaaaaccaactccgcgccgccatgattgtctttctcatgatgcaggacgccaataatgcttag

SEQ ID NO: 12906 - DNA, 786 bp, Escherichia coli
atgagtacagcactcgcaacgctggcagggaagctggctgaacgtgtcggcatggattctgtcgacccacaggaactgatcaccactcttcgccagacggcatttaaaggtgatgccagcgatgcgcagttcatcgcattgttgatcgtcgccaaccagtacggccttaatccgtggacgaaagaaatttacgccttccctgataagcagaacggcattgttccggtggtgggcgttgatggctggtcccgcatcatcaatgaaaaccagcagtttgatggtatggactttgagcaggacaatgaatcatgtacatgccggatttaccgcaaagaccgcaatcatccgatctgcgttaccgagtggatggatgaatgccgccgcgaaccattcaaaacccgcgaaggcagagaaatcacggggccgtggcagtcgcatcccaaacggatgttacggcataaagccatgattcagtgtgcccgtctggccttcggatttgctggtatctatgacaaggatgaagccgagcgcattgtcgaaaataccgcatacactgcagaacgtcagccggaacgcgacatcactccggttaacgatgaaaccatgcaggagattaacactctgctgattgccctggacaaaacatgggatgacgacttattgccgctctgttcccagatatttcgccgcgacattcgcgcatcgtcagaactgacacaggccgaagcagtgaaagctcttggattcctgaaacagaaagccactgagcagaaggtggcagcatga

SEQ ID NO: 12907 - DNA, 372 bp, Escherichia coli
atgctaaggtttgtgctgtttttttttactctatctgtatctgcagttgttcagggtagtgtagttatcatgggaacccgtgttgtttatccggcgactcaaaagagtattagcatacgtttaaataatgacaatgaatctccggcattagtccagtcctggttagacgatggagatgcagcagctccccctgagtcagtccacgttccttttatcattactccgccaatatttcgtatggactctaaatcaggacaaacagtcagaattgtatatacaggcgagtcactaccgaaagaccgagaatctcttttctatctaaatgttctggatattccagcaaagcccagggcaaaaaaaagactccgataa

SEQ ID NO: 12908 - DNA, 231 bp, Escherichia coli
atgcattcggaaaatattgcggcttacgtcgggctggatgtgcataaagagcagttgctattgttgcatctgaacggcttggcaaggttcgttattatggtacgattaacaacgaagcccagtctgtacgtcgattatttcagaaattgcagggactttacggaaacattctttcctgctatgaagctggcccctgtggttttgggctatatcatcaactcacagcgatga

SEQ ID NO: 12909 - DNA, 123 bp, Escherichia coli
atgttagatgttgaactgagtgttgaagagattgcatgctatttgatggttcgatccggtaggcaactagttgatgcacctgaaatcgacctgaaatatcaaatacccaagtctaacgaataa

SEQ ID NO: 12910 - DNA, 888 bp, Escherichia coli; identical to SEQ ID NO: 8663

SEQ ID NO: 12911 - DNA, 219 bp, Escherichia coli
atggtgatcctgatggacaccgttaacggaatgtgttcagacgcaccgcgtgccaaaaaatgtaaatgcggaaaatcaccgacaatattcgacatggagaacgggtgccaaatctactgcgctaaccacgctgctgtggtggccgcgaattatcgcagtgcggtaacggagtggaataacctgaaatctgttagagagggaagtcatgaaaaaacgtaa

SEQ ID NO: 12912 - DNA, 1065 bp, Escherichia coli
atgaaaactcaaataactttcgctgcgcttttgccagcattagcgtctttcataccgcttcatgctcatgcctcgtctacttctgaagatgaaatgattgtcacgggcaacaccgccgccgacaccaccgattctgccgccggtgccggtttcaaaacgaacgatatagatgtcggcccgctgggaacgaaatcctggatcgaaacaccatattccagcaccactgttactaaagagatgattgaaaatcagcaggcgcaaagcgtcagcgagatgctgaaatactctcccagtacgcaaatgcaggcgcgcggtggaatggatgtcgggcgtccgcaaagtcgggggatgcagggcagcgtggtggccaacagccgtctggacgggctgaatatcgtttcaacaaccgcgtttccggtggaaatgcttgagcgcatggatgtgcttaacagtttgaccggcgcgctgtacggcccggcgagcccagcagggcagtttaatttcgtggcgaagcgcccaaccgaagagacgctgcgtaaagtgacgctgggctatcaaagccgcagtgcgtttaccggccatgccgatctgggtggccattttgatgaaaacaaacggtttggctatcgcgtgaacctgcttgatcaggaaggggaaggcaatgtggatgacagcacgctgcgtcgcaaactcgtttccgttgcgctcgactggaatattcagccgggcactcagctacagctcgacgccagccattacgaatttatccagaaaggctatgtcggtagctttaactatgggccgaacgtcaaactgccgtctgcgccgaatccgaaggacaaaaatctggcgctcagcactgcgggcaacgacctcactaccgataccatcagcactcgcctgatccactactttaacgacgactggtccatgaacgctggcgtgggtgatgcgccgcgcgataaatgcactctatcttgtgcgataaatggcatccacgcggcgtttcattatttgaaaaagaattacatttcaggttgcgttatgacagtcccaacagggtga

SEQ ID NO: 12913 - DNA, 375 bp, Escherichia coli
gtgctccccgccttgctgacgaaatgctggagttcaatatttaaaaccattgctgccagcctgcgtcgtcaggggctgcgggcgaaagccagccggaagttcagcccggtcagctaccgtgcacatggcctgcccgtattggagaatctgctggagcaggacttcagcgccagcggcccgaaccagaagtgggcgggtgacatcacgtacttgcgtaccgatgagggctggttgtatctcgcagtagtcatcgacctgtggtcacgcgccgttattggctggtcgatgtcaccgcgaatgacagcacaactggcctgtgatgcactgcaaatggcgttgtggcggagaagacgcccggaatgtcagcgccagtga

SEQ ID NO: 12914 - DNA, 315 bp, Escherichia coli
atggcgcgactgtcgcaactggcggggaacctgtggatcgtcttcccacccactgtaacgatcgctgtcctgtcggcgttgattcagcagggcctcagcctgttcaacttcacgacgcagtttttcagaacgggtaccgaacagcatccggcgcagtttttctatctgggccctcagatgttctgtttcccgctcctcctcttcgatcttttcttcggcacgtgccagtgcagagcgcaggaaggcctccgtctcttcaaccagactcagttgctgatctttctgacggagggcttcagcctgctcagagagtag

SEQ ID NO: 12915 - DNA, 2520 bp, Escherichia coli
atgcgtggaatgaaagacagaataccttttgcagtcaacaatattacctgtgtgatattgttgtctctgttttgtaacgcagccagtgccgttgagtttaatacagatgtacttgacgcagcggacaagaaaaatattgacttcacccgtttttcagaagccggctatgttctgccggggcaatatcttctggatgtgattgttaacgggcaaagtatttctcccgcatcgttacagatttcatttgttgaacctgcgttgtcaggagataaggcagaaaaaaaattgccgcaggcctgtctgacatcagatatggtcagactgatggggttaacagcagaatctctggataaagttgtttactggcatgatggtcagtgtgcggattttcatgggttgccgggagtggatattcgtcctgataccggagcgggcgtattacgcatcaatatgccgcaggcctggcttgagtattctgatgccacctggctgcctccctcacgctgggacgacggcattcccggactgatgctggattataacctcaacgggacggtttcccgtaattatcagggaggagactctcatcagttcagttataacgggactgtgggggggaatctggggccctggcgcctgcgggctgactatcagggaagccaggagcagagccgctacaacggggaaaaaacgacaaacagaaatttcacatggagtcgcttttatctgttccgtgccattccacgatggcgggcaaacctgacgctgggcgagaataatatcaactcagatatattccggtcatggagttatacgggagccagcctggaaagcgatgaccggatgctgccgcccagactgcgaggctatgcaccgcagattaccgggattgcggagactaatgcccgtgttgtggtgtcgcagcagggacgggtgctgtacgactcgatggtccccgcagggccattcagtattcaggacctggacagttcagttcgcggacgtcttgatgttgaggttattgaacagaatggacggaagaaaacctttcaggtcgatacagcctcggttccttatctgacgcgtccgggacaggtccggtataaacttgtctccggtcgttcccgtggatacgggcatgagaccgaagggcctgtatttgcgaccggagaggcatcctgggggctcagtaaccagtggtcgctgtatggcggggctgtgcttgccggtgattataatgcactggcagccggtgccggctgggacctgggtatgccggggaccctttctgctgatatcacgcagtcagtagcccgtattgagggagagagaacgtttcagggaaaatcctggcgtctgagctactccaaacggtttgataatgcggatgccgacattacgttcgccgggtatcgtttctcagagcgaaactatatgaccatggagcagtacctgaacgcccgctaccgtaatgattacagcagtcgggaaaaagagatgtataccgttacgctgaataaaaacgtggcggactggaacacctcttttaacctgcagtacagccgtcagacatactgggacatacggaaaacggactattatacggtgagcgtcaaccgctactttaatgttttcggactgcagggtgtggcggttggattgtcagcctcaaggtctaaatatctggggcgtgataacgattctgcttacctgcgtatatccgtgccgctggggacggggacagcgagctacagtggcagtatgagtaatgaccgttatgtgaatatggccggctacactgacacgttcaatgacggtctggacagctacagcctgaacgccggccttaacagtggcggtggactgacatcgcaacgtcagattaatgcctattacagtcatcgtagtccgctggcaaatttgtccgcgaatattgcatccctgcagaaaggatatacgtctttcggcgtcagtgcttccggtggggcaacaattaccggaaaaggtgcggcgttacatgcagggggaatgtccggtggaacacgtcttcttgttgacacggatggtgtgggaggtgtaccggttgatggcgggcaggtggtgacaaatcgctggggaacgggcgtggtgactgacatcagcagttattaccggaatacaacctctgttgacctgaagcgcttaccggatgatgtggaagcaacccgttctgttgtggaatcggcgctgacagaaggtgccattggttaccggaaattcagcgtgcttaaagggaaacgtctgtttgcaatactgcgtcttgctgatggctctcagcccccgtttggtgccagtgtaaccagtgaaaaaggccgggaactgggcatggtggccgacgaaggccttgcctggctgagtggcgtgacgccgggggaaaccctgtcggtaaactgggatggaaaaatacagtgtcaggtaaatgtaccggagactgcaatatctgaccagcagttattgcttccctgtacgcctcagaaataa

SEQ ID NO: 12916 - DNA, 654 bp, Escherichia coli
atgtttgttggtcagggcgatcagatattcatgaacgacgtgttcctgaaacgcctgacggctccgaccattaccagcggcggtaatcctccggcattttccctgacaccggacgggcggctgacggcgaaaaatgccgatatcagcggtaacgtgaatgcgaactccgggacgctcaacaacgtcacgattaacgagaactgtcgggttctgggaaaattgtccgccaaccagattgaaggcgatctcgttaaaacagtgggcaaagctttcccccgggactcccgtgcaccggaacggtggccatcagggaccatcaccgtcagggtttatgacgatcagccgtttgaccggcagattgttattccggcggtggcattcagcggcgctaaacatgagcgggagaataacgatatttattcgtcatgccgcctgatagtacggaaaaacggtgctgaaatttataaccgtaccgcgctggataatacgctgatttacagtggtgttattgatatgccagctggtcgcggccacatgacgctggagttttcggtgtcagcatggctggtgaataactggtatcccacagcaagtatcagcgatttgctggttgtggtgatgaagaaagccaccgcaggcatcagtatcagctga

SEQ ID NO: 12917 - DNA, 1245 bp, Escherichia coli
atggggtttctggttattgctgtcattttatctgttttaggtcaggtggaaattgttgccactgcaaatgggaaattaacactaagtgggcgtagcaaagaaattaaacctattgaaaactcaatagttaaagaaattatcgtaaaagaaggagagtcagtccggaaaggggatgtgttattaaagcttacagcactgggagctgaagctgatacgttaaaaacacagtcatcactgttacagaccaggctggaacaaactcggtatcaaattctgagcaggtcaattgaattaaataaactacctgaactgaagcttcctgatgagccttattttcagaatgtatctgaagaggaagtactgcgtttaacttctttgataaaagaacagttttccacatggcaaaatcagaagtatcaaaaagaactgaatctggataagaaaagagcagagcgattaacaatacttgcccgtataaaccgttatgaaaatttatcgagagttgaaaaaagccgtctggatgatttcaggagtttattgcataaacaggcaattgcaaaacatgctgtacttgagcaggagaataaatatgtcgaggcagcaaatgaattacgggtttataaatcgcaactggagcaaattgagagtgagatattgtctgcaaaagaagaatatcagcttgtcacgcagctttttaaaaatgaaattttagacaagctaagacaaacaacagacagcattgagttattaactctggagttagagaaaaatgaagagcgtcaacaggcttcagtaatcagggcccctgtttcgggaaaagttcagcaactgaaggttcatactgaaggtggggttgttacaacagcggaaacactgatggtcatcgttccggaagatgacacgctggaggttactgctctggtacaaaataaagatattggttttattaacgtcgggcagaatgccatcattaaagtggaggcctttccttacacccgatatggttatctggtgggtaaggtgaaaaatataaatttagatgcaatagaagaccagaaactgggactcgtttttaatgtcattgtttctgttgaagagaatgatttgtcaaccgggaataagcacattccattaagctcgggtatggctgtcactgcagaaataaagactggaatgcgaagcgtaatcagctatcttcttagtcctctggaagagtctgtaacagaaagtttacatgagcgttaa

SEQ ID NO: 12918 - DNA, 1572 bp, Escherichia coli
atggacacctcacttgctcatgagaacgcccgcctgcgggcactgttgcagacgcaacaggacaccatccgccagatggctgaatacaaccgcctgctctcacagcgggtggcggcttatgcttccgaaatcaaccggctgaagacgctggttgcgaaactgcaacgtatgcagttcggtaaaagctcagaaaaacttcgcgcaaaaaccgaacggcagatacaggatgcacaggagagaatcagcgcacttcaggaagaaatggctgaaacgctgggtgagcaatatgacccggcactgccatccgccctgcgccagtcttcagcccgtaaaccgttaccggcctcacttccccgtgaaacccgggttatccggccggaagaggaatgctgcccggcctgtggtggcgaactcagttctctgggatgtgatgtgtcagagcaactggagcttatcagcagcgcctttaaggttatcgaaacacaacgtccgaaactggcctgttgccggtgcgaccatatcgtgcaggcaccagtaccttcaaaacccattgcacgcagttatgccggagcggggcttcttgcccatgttgtcaccgggaaatatgcagaccatctgccgttataccgccagtcagaaatataccgtcgtcagggagtggagctgagccgtgccacactggggcgctggactggtgctgttgctgaactgctggagccgctgtatgacgtcctgcgccagtatgtgctgatgcccggtaaagtccatgctgatgatatacccgtcccggtccaggagccgggcagcggtaaaacccggacagcccggctgtgggtctacgtccgtgatgaccgcaacgccggttcacagatgcccccggcggtctggttcgcgtacagtccggaccggaaaggtatccatccacaaaatcacctggccggttacagcggtgtgcttcaggccgatgcttacggtggttaccgggcgttatacgaatccggcagaataacgaaagccgcgtgtatggctcatgcccggagaaaaatccacgatgtgcatgcaagagtgcccaccgacatcaccacggaagccctgcagcgtatcggtgaactgtatgccatagaggcagaagtccggggatgttcagcagaacagcgtctggcagcaagaaaagccagagccgcgccactgatgcagtcactgtatgactggatacagcaacagatgaaaacactgtcgcgtcactcagatacggcaaaagcgttcgcatacctgctgaaacagtgggatgcactgaacgtgtactgcagtaatggctgggtggaaatcgacaacaacatcgcagagaacgccttacggggagtggccgtaggccggaaaaactggctcttcgcgggttccgacagcggtggcgaacatacggcggtgttgtactcgctgatcggcacatgccgtctgaacaatgtggaaccagaaaaatggctgcgttacgtcattgagcatatccaggactggccggcaaaccgggtacgcgatctgttgccctggaaagttgagttgacctctcagtaa

SEQ ID NO: 12919 - DNA, 348 bp, Escherichia coli; identical to SEQ ID NO: 7898

SEQ ID NO: 12920 - DNA, 1536 bp, Escherichia coli; identical to SEQ ID NO: 4326

SEQ ID NO: 12921 - DNA, 492 bp, Escherichia coli
atggctgagaatgaccactcaacatttttatctattttagggctctatatttattcaccaataattgctttaggccagttgaatgaagtaaatagtagtcattttggtgagtatacgtttagattcatatatgctataactaataaaattggccttattaaagaattgccagtaaatactattcttgactattcatacgttcctgtaccaacaaatgtatatactgcacttcaaccattttaccaggattttggttatactggcatcatatttggagcagtattatacggactaatatatgtgagtttatacacggccggtgttcgtggaaataatacacaggcattactgatttacgcattgttttcagttagcagtgcaacggctttcttcgctgaaacgctagtaacgaatttagctggaaatgtgaagttagtattatgtaccatcttactatggcgatttacagtaatatgcaaaccagtacagtaa

SEQ ID NO: 12922 - DNA, 1293 bp, Escherichia coli
atgcgcgatgatgttgcatttcagattatcaatgatgaattatatcttgatggcaacgctcgtcagaacctggccactttctgccagacctgggacgacgataatgtccataagttgatggatttatccattaacaaaaactggatcgacaaagaagaatatccgcaatctgcagcaatcgatctgcgttgcgtaaacatggttgccgatctgtggcatgcgcctgcaccgaaaaatggtcaggccgttggcaccaacaccattggttcttccgaggcctgtatgctcggcgggatggcgatgaaatggcgttggcgcaagcgtatggaagctgcaggtaagccgactaacaaaccgaacctggtgtgcggtccggtacaaatctgctggcataaattcgcccgctactgggatgtggagttgcgtgagatccctatgcgccccggtcagttgtttatggacccgaaacgcatgattgaagcctgcgacgaaaacaccatcggcgtggtgccgactttcggcgtgacctacaccggtaactatgagttcccgcagccgctgcacgatgcgctggataaattccaggccgacaccggtatcgacatcgacatgcacatcgacgccgccagcggtggcttcctggcaccgttcgtcgccccggatatcgtctgggacttccgcctgccgcgtgtgaaatcgatcagtgcttcaggccataaattcggtctggctccgctgggctgcggctgggttatctggcgtgatgaagaagcgctgccgcaggaactggtgttcaacgttgactacctcggcggtcagattggtactttcgccatcaacttctcccgcccggcgggtcaggtgattgcacagtactatgaattcctgcgcctcggtcgtgaaggctataccaaagtacagaacgcttcctaccaggttgctgcttatctggcggatgaaatcgccaaactggggccgtatgagttcatctgtaccggtcgcccggacgaaggcatcccggcggtttgcttcaaactgaaagatggtgaagatccgggatacaccctgtatgacctctctgaacgtctgcgtctgcgcggctggcaggttccggccttcactctcggcggtgaagccaccgacatcgtggtgatgcgcattatgtgtcgtcgcggcttcgaaatggactttgctgaactgttgctggaagactacaaagcctccctgaaatatctcagcgaccacccgaaactgcagggtattgcccagcagaacagctttaaacacacctga

SEQ ID NO: 12923 - DNA, 354 bp, Escherichia coli; identical to SEQ ID NO: 5338

SEQ ID NO: 12924 - DNA, 654 bp, Escherichia coli
atgtacagggatgatgtacatttttaccgcaagggtaaacccaattactgggtacctaaccttaatctgaaaccagaaaataacattacccgtgagattggcgcaggtattcaactggacggcctgcttacaggcaatgatcggctgcagttgaaaggcggatatttcggaacggatgccagaaactatattgccacgcgcgtggatatgaaacggatgcgttcttattcttataatgtatcccgggcccgtatctggggatgggatatgcagggaaattaccagtctgattattttgactggatgctttcttataaccgcacggaaagtatggatgccagcagcagggaatggctgggctccggcaatcctgacacactcatcagtgacatcagtatacctgttggtcatggaggagtttctgccggatggcgtgctgaactttcggcagcagccacgcatgtgaaaaaaggcgatccccatcaggctggctatgccgtacattccttttcactgtcttataagcctgtaagtgttaaaggctttgaggcatcagtgactctggataatgccttcaacaagcttgccatgaatggcaaaggagtgccgctttcaggcagaactgtcagtctttatacccgttatcagtggtaa

SEQ ID NO: 12925 - DNA, 285 bp, Escherichia coli; identical to SEQ ID NO: 12547

SEQ ID NO: 12926 - DNA, 519 bp, Escherichia coli
atggctgtaccgcctgacgcggatgcgccgccaccaacagccccgccaatagcgctgccgatactcccgacaatccccaccattgcctgcttaagcagaatttctgtcatcatggacagcacggaacgggtgaagctgcgccagttctgttcactgccggtcagcatcgccgccatattctgcgcaataccatcaaaggtctgcgtggcagcacttttaacctgcgacatactgtccgtggcactctcttcccactcactccagccggacttcaggcctgccatccagttcccgcgaagcaggtcttcagccgcccaggtctttttctgctctgacatgacgttattcagcgccagaggattatcgccatactgttccttcaggcgctgttccgtggcttcccgttctgcctgccggtcagtcagcccccggcttttcgcatcaatagcggcccgttttgcccgttgctgctgtgcgaatttatccgcctgctgcgccagcgcgttcaggcgctcctga

SEQ ID NO: 12927 - DNA, 246 bp, Escherichia coli
atgcaatctgtccctgaaggcgtgattcaggcaccagaatcacccgacgccccggaggcgctgccggggtgtcgttccatttctgatgatgacctgtgcgcctggtgtacccgtctgctttaccgtcccggagaaatcagtctgtgcagactgagtacaggcaatggcatctggccatccgtctgtgaccggaacggttacgcgtacggctgtccggaatttcagccgaatatcattcatccctga

SEQ ID NO: 12928 - DNA, 324 bp, Escherichia coli
atggatgccagcagcagggaatggctgggctccggcaatcctgacacacttatcagtgacatcagcataccttttggtcatagaggcgtttatgccggatggcgtgctgaactttcagcatcagccacgcatgtgaaaaaaggcgatccccatcaggctggttataccatacattccttttcactgtcttataagcctgtaagtgttaaaggctttgaggcgtcagtaactctggataatgccttcaacaagcttgccatgaatggcaaaggtgtgccgctttcaggcagaactgtcagtctttatacccgttatcagtggtaa

SEQ ID NO: 12929 - DNA, 336 bp, Escherichia coli; identical to SEQ ID NO: 5363

SEQ ID NO: 12930 - DNA, 336 bp, Escherichia coli
gtgaaagatctgggcgcagtggtgtccttcaaggggtattacggcgatctggccattgtggtggcgaaaacgtcttatatagcagaagacggtatcgaaaaacgttatcttccagatggcatgctggttctggggaatactgctgcagatgggatccgttgttacggtgccattcaggatgctcaggcgttgtccgaaggtgtggtggcctcttcccgttatccgaaacactggctgacggtaggggatcccgcccgtgaatttaccatgacgcagtccgcgccgctgatggtgttgccggacccggatgagtttgtggtggtacaggtgaaataa

SEQ ID NO: 12931 - DNA, 1284 bp, Escherichia coli
atgacctggtttattgaccggcgtctgaacggcaaaaataaaagcatggtgaatcgccagcgtttcttacgccgttataaagcgcaaattaaacagtcgatctccgaggccattaataagcgttcggtgactgacgtcgacagcggcgagtccgtatccattcccacggaagatattagcgaaccgatgtttcatcaggggcgtgggggcctgcgccaccgtgtgcatccgggcaatgaccatttcgtccagaacgaccgaattgaacgtccccagggtggtggcggaggttccggcagtggtcagggccaggccagccaggatggtgaaggtcaggatgaatttgtctttcagatttcgaaagatgagtatcttgatctgctctttgaagatttggccttaccgaatctgaaacaaaaccaacaacgccagctgaccgaatataaaacgcatcgggcgggttataccgctaacggcgttccggccaatatcagcgttgtacgttcattgcagaactcactggcgcggcgcacagctatgacggcgggcaagcggcgggaacttcatgcgctggaagagaatttggccatcatcagcaacagtgaacctgcgcaactgctggaagaggaacgtctgcgcaaagaaattgcagaattacgtgccaaaattgaacgcgtccctttcattgacaccttcgatttacgttacaagaactacgaaaaacggcccgatccctccagccaggcagtgatgttttgcctgatggacgtttccggttcaatggatcagtccactaaagatatggctaaacgtttttatattctgctgtatctgttcctcagcagaacgtataagaacgtggaagtcgtatacatccgccatcatacccaggcgaaagaagtcgatgaacatgagtttttctactcgcaggaaactggcggcaccattgtttccagcgccctaaaactgatggatgaggtagtgaaagagcgttataacccggcacagtggaatatttacgcagcccaagcatcagacggcgataactgggccgatgactctccgctttgccatgaaattctggcgaaaaaaatattacccgttgttcgttattacagctatatcgaaattacacgtcgcgcgcatcagacactgtggcgagaatatgagcatctgcaatctactttcgacaactttgcgatgcagcatatccgcgaccaggatgatatttatccggtgttccgtgaactgtttcataaacaaaatgcaacagctaaagactaa

SEQ ID NO: 12932 - DNA, 1935 bp, Escherichia coli
atgaatatattcgatcactatcgccagcgatatgaagctgccaaggacgaagagttcacactgcaggagtttcttaccacttgtcggcaagatcgcagtgcttatgccaacgcggctgagcggctattgatggctattggtgagcctgtcatggtcgatacagcccaggaacccagactttctcgactcttttctaaccgggtcattgcacgttatccggcgtttgaagagttttacggcatggaagacgcgattgaacagattgtttcttatctgaaacacgcggctcaggggctggaagagaagaaacaaattctgtatctgctggggcctgtgggtgggggtaaatcatcacttgctgagcgactgaaatcattaatgcagctcgtaccgatttatgtattgagcgccaacggtgagcgtagcccggtcaacgatcatccgttctgtcttttcaatccgcaggaagatgcgcagattctggaaaaagagtacggcattcctcgccgttatctcggcaccatcatgtcgccgtgggcggcaaagcgcctgcatgaatttggtggcgatatcactaagttccgggtagtgaaggtctggccgtcaattctgcaacaaattgccatcgccaaaacggaacccggagatgagaacaaccaggacatctccgccctggtagggaaagtcgatattcgtaaactcgaacactacgcgcagaatgacccggacgcctacggctattccggtgcgctgtgccgcgccaatcaggggatcatggaatttgtcgagatgtttaaagcaccgataaaagtgctgcatcccttgttaaccgccacccaggaaggtaactacaacgggacggaaggtatctccgccctgccgttcaacgggattattctcgcccactcgaacgaatccgaatgggtcactttccgtaataacaaaaacaacgaagccttcctcgaccgtgtttacatcgtgaaggtgccgtattgcttgcgcatttccgaagagatcaaaatctacgagaaattgcttaatcacagtgaattgactcacgccccctgcgcccctggcacgctggaaacgctgtcacgtttttctattctttcgcgtctgaaagagccagaaaactccagcatttattcaaagatgcgcgtttatgatggtgaaagtctgaaagacactgatcccaaagccaagtcgtatcaggaatatcgtgactacgccggtgtcgatgaagggatgaacggtctgtcgacgcgttttgcgtttaagatcctctcccgcgtgttcaacttcgatcatgtagaagtggcggcaaacccggtccatctgttctacgtcctggaacagcagatcgagcgcgagcagttcccgcaagagcaggctgaacgctatctggagttcctgaaaggttatctgatcccgaaatatgccgagtttatcggcaaagagatccagacggcctaccttgaatcctattcagaatatgggcaaaacattttcgaccgttatgttacctacgcggatttctggattcaggatcaggagtatcgcgatccggataccgggcagctgtttgaccgcgagtctcttaacgccgagctggagaaaatcgagaaaccggcggggatcagtaatccaaaagatttccgcaacgagattgttaacttcgtactgcgagccagagcgaataacagcggacgcaatccgaactggaccagctatgaaaaactgcgcacggttatcgagaagaaaatgttctccaataccgaagagctgttgccggttatttcgtttaacgccaaaacgtcaaccgacgagcagaagaaacacgacgactttgtcgaccgtatgatggaaaaaggctacacccgtaaacaggtgcgtttactgtgcgaatggtatttgcgcgtacgtaaatcgtcttaa

SEQ ID NO: 12933 - DNA, 855 bp, Escherichia coli
atgcaacaaaaaatgattcaatttagtggcgatgtctcactgccagccatagggcagggaacatggtatatgggcgaagatgccagtcagcgtaaaacagaagttgctgcactacgcgcgggcattgaactcggtttaaccctcattgataccgccgaaatgtatgccgatggcggtgccgaaaaagtggttggggaagcattaatcggtctgcgtgagaacgtctttctcgtctctaaagtctatccgtggaatgctggcgggcaaaaagcgataaatgcatgcgaagccagtttacgccgtctcaatactgattatctcgatctctacttattacactggtctggcagtttcgctctcgaagagactgtcgcagcgatggaaaaattgatcgcccagggaaaaatccgccgctggggcgtttctaaccttgattatgccgatatgcaggaactctggcagctgccggggggaaatcagtgtgccactaatcaggtgctttaccatctcggttcacgagggattgagtacgatctacttccctggtgccagaaacagcagatgccggtgatggcttacagtccattagcccaggccgggcggttgcgcaatggactgttaaaaaatgcggtagtcaacgaaattgcacatgctcacaatatcagtgcggcacaagtattgttggcgtgggtaatcagccatcagggtgtgatggcgattccaaaagcggcaactgtcgcacatgtccaacaaaatgcggctgtgcttgaggttgaactttcgtcagcggaattagttatgctggataaagcgtatccggcaccaaaaggaaaaactgcgctggatatggtgtga

SEQ ID NO: 12934 - DNA, 1179 bp, Escherichia coli
gtgagttccatccttgagatttttttcccgctttgcgactccgacaccgtccgctggcagcgccgtacacccgatgtggaacacggtatctggcctgacgttgctgacgaacgtctccagcaatggctgcaaaccgatgcgattcgactctacattcccggcgaatggatcagcgtctggcaggttgaactgcctgatgtcgcccgcaagcagataccgactattctgcccgccttgctggaagaagagctgaatcaggatatcgatgaactgcatttcgccccgttgaaaatcgaccagcaactggcaaccgtagcagtgattcaccaacagcatatgcgtaacattgcgcaatggttgcaggcaaacggcatcacccgcgctaccgtcgcgccagactggatgtccattccttgtggctatatggctggcgatgcgcaacgggttatctgccgcatcgatgaatgccggggatggagcgccgggcgggcgctggctccggtcatgttccgcgcacagctcaatgagcaggatttaccgttttcactaaccgtggtcggcattgcaccggaagaactgtctgcatgggctggtgcagacgccgaacgcctgacagtgacggctctgcccgccattaccacttatggcgaaccggaagggaacctgctgactggaccgtggcagcctcgcgtcagctaccgaaaacagtgggcgcgctggcgggtgatgattctgccgatattgctgattctggttgcgctggcagtggaacggggcgtgacgttatggagcgtcagcgaacaggtggcgcaaagccgcacccaggcggagaaacagttcttaacgctattcccggagcagaagcggattgtgaatttacgctctcaggtgacgatggcgctgaaaaaatatcgcccacaggccgacgatacccggctgctcgcagaattgtcagcgatcgccagtaccctgaaatcagcgtcacttaccgacatcgaaatgcgtggtttcacctttgatcaaaaacgccagacgcttcacctccagctacgggctgcgaactttgccagcttcgataaactgcgtagcgcactggcggcagattatgttgtgcaacaggacgcgttacagaaagagggtgatgcggtttccggcggcgtaacgttgcggaggaaataa

SEQ ID NO: 12935 - DNA, 783 bp, Escherichia coli
gtggcctggaaatatcaacctgtagctcaggttgccgaagtgaaggcgattcagtttgcggtgggtaagagcggtaaaatatcggtggttgcgtcacttgtacctgtcatgctggatgataaaaaagtccagcgggtgaatattggttccgtcaggcgctggcaggagtgggatattgcgcctggtgatcagatcctcgtcagccttgccggtcaggggattcctcgcattgatgatgtggtctggcgcggagcagaacgtacaaaaccgacaccaccagaaaaccgctttaactcgttgacctgctactttgcttctgatgtttgtcaggaacagttcatttcacgcttagtctggctggggtcaaaacaggttctggggcttgatggcattggtgaggccggctggcgcgccctgcatcagactcatcgctttgagcatatcttttcctggcttttattaacgccagagcaattacagaacacgccggggatcgcgaaaagtaaaagtgcgcagttatggcatcagtttaatctggctcgtcagcagccttttactcgctgggtgatggcaatgggaataccgctaactcgggcggcgcttaatgccagtgatgaacggtcctggtcgcaacttttatttagcacggaacagttctggcagcagctgccggggactggatcggggcgcgccagacaggttattgaatggaaggaaaatgcgcaaatcaagaagctgggcagttggctggctgcccagcagatcacaggttttgaaccttag

SEQ ID NO: 12936 - DNA, 1533 bp, Escherichia coli
atgaagaaaaaccccgtaagtataccacacaccgtctggtacgccgacgatatccgccgcggagaacgcgaggcggcagatgcgctggggctcacactctatgagctgatgcttcgcgctggcgaagccgcattccaggtgtgtcgttcggcttatcctgacgcccgccactggctggtgctgtgcggtcatggtaataacggcggcgatggctacgtggtcgcgcggctggccaaagcgatcggtattgatgtcacgctgctggcccaggaaagtgacaaaccgttgccggaagaggccgcgctggcacgcgaagcatggttaaacgcgggaggcgagatccatgcttcgaatattgtctggcccgaatcggtagatctgattgtcgatgcgctgctcggcaccggtttgcagcaagcgccccgcgaatccattagccagttaatcgaccacgctaattcccatcctgcgccgattgtggcggttgatatcccttccggccttctggctgaaaccggcgctacgccaggcgcggtaatcaacgccgatcacaccatcacttttattgcgctgaaaccaggtttgctcactggaaaagcgcgggatgttaccggacaactgcattttgactcactgcggctggatagatggctggcaggtcaggagacgaaaattcagcggttttcggcagaacaactttctcagtggctgataccgcgtcgcccgacttcgcataaaggcgatcacgggcggctggtgattattggtggcgatcacggcacggcgggggctattcgtatgacgggggaagcggcgctgcgtgctggtgctggtttagtccgagtactgacccgcagtgagaacattgcgccgctgctgactgcacgaccggaattgatggtgcatgaactgactatgggctctcttaccgaaagcctggaatgggccgatgtggtggtgattggtcccggtctgggccagcaagagtgggggaaaaaagccctgcaaaaagttgagaattttcgcaaaccgatgttgtgggatgccgatgcattgaacctgctggcaatcaatcccgataagcgtcacaatcgcgtgatcacgccgcatcctggtgaggccgcacggttgttaggatgttccgtcgctgaaattgaaagtgaccgcttacattgcgcccaacgtctggtacaacgttatggcggcgtagcggtgctgaaaggtgccggaaccgtggtcgccgcccatcctgacgctttaggcattattgatgccggaaatgcaggcatggcgagcggcggcatgggcgatgtgctctctggtattattggcgcattgcttgggcaaaaaatgagcccttatgatgcagcctgtgcgggctgtgtcgcgcacggtgcggcagctgacgtactggcggcgcgttttggaacgcgcgggatgctggcaaccgatctcttttccacgctacagcgtattgttaacccggaagtgactgataaaaaccatgatgaatcgagtaattccgctccctga

SEQ ID NO: 12937 - DNA, 1848 bp, Escherichia coli
atgccaattcaggtcttaccgccacaactggcgaaccagattgccgcaggtgaggtggtcgagcgacctgcgtcggtagtcaaagaactggtggaaaacagcctcgatgcaggtgcgacgcgtatcgatattgatatcgaacgcggtggggcgaaacttatccgcattcgtgataacggctgcggtatcaaaaaagatgagctggcactggcgctggcgcgtcatgccaccagtaaaatcgcctctctggacgatctcgaagccattatcagcctgggctttcgcggtgaggcactggcgagtatcagttcggtttcccgcctgacgctcacttcacgcaccgcagaacagcaggaagcctggcaggcttatgccgaagggcgcaatatggacgtgacggttaaaccggcggcgcatccggtgggaacgacgctggaggtgctggacctgttctacaacaccccggcgcggcgcaaattcctgcgcaccgagaaaaccgaatttaaccatatcgatgaaatcatccgccgcattgcgctggcgcgtttcgacgtcactatcaacctgtcgcataacggcaaaattgtacgccagtaccgcgcagtgccggaaggcgggcaaaaagaacggcgcttaggcgcgatttgcggcaccgcttttctcgaacaagcgctggcgattgaatggcaacacggcgatctcacgctgcgcggctgggtggccgatccaaatcacaccacgcccgcactggcagaaattcagtattgctacgtgaacggtcgcatgatgcgcgatcgcctgatcaatcacgcgatccgccaggcctgcgaagacaaactgggggccgatcagcaaccggcatttgtgttgtatctggagatcgacccgcatcaggtggacgtcaacgtgcaccctgccaaacacgaagtgcgtttccatcagtcgcgtctggtgcatgactttatctatcagggcgtgctgagcgtgctacaacagcaactggaaacgccgctaccgctggacgatgaaccacaacctgcaccgcgtgccattccggaaaatcgcgtggcggcggggcgcaatcattttgctgaaccggcagttcgtgagccagtagctccgcgttacactcctgcgccctcctcaggcagtcgtccggctgccccctggccgaatgcgcagccaggttaccagaaacagcaaggtgaagtgtatcgccagcttttgcaaacgcccgcgccgatgcaaaaaccaaaagcgccagaaccgcaggaacctgcacttgcggcgaacagtcagagttttggtcgggtactgactatcgtccattccgactgtgcgttgcttgagcgcgatggcaacatttcacttttatccttgccagtggcagaacgttggctgcgtcaggcacaattgacgccgggtgaagtgccagtttgcgcccaaccgctgcttattccgttgcggctaaaagtttctggcgaagaaaaatcggcattagaaaaagcgcagtctgccctggcggaattgggtattgatttccagtccgatgcgcagcatgtgaccatcagggccgtgcctttacccttacgccaacaaaatttacaaatcttgattcctgaactgataggctacctggcgaagcagtccgtattcgaacctggcaatattgcgcagtggattgcacgaaatctgatgagcgaacatgcgcagtggtcaatggcacaggccataaccctgctggcggacgtggaacggttatgtccgcaacttgtgaaaacgccgccgggtggtctgttacaatctgttgatttacatccggcgataaaagccctgaaagatgagtga

SEQ ID NO: 12938 - DNA, 1506 bp, Escherichia coli; identical to SEQ ID NO: 5600

SEQ ID NO: 12939 - DNA, 1476 bp, Escherichia coli
atgattcggtcaacacgtatttccctggggttattctttaattattttttatcgttaacgaaaattgatcttggtcaaaactatatatctctgccatcaataaaatccagcactcacattgctctcctttttatggcttctatgggtacacaaaaattaaaagctcaaggcttttttattttcagcttattgctgacgttaattttattttgcattactaccttatataacgaaaacacgaatgtaaaactcatcccacagatgaattacctgatggttgttgtggctttgtttttccttaacgccgtcatttttcttttcatgttaatgaagtatttcactaacaaacaaattttaccaacactcattttaagccttgcatttttaagtggccttatctatttagttgaaaccattgtaattatccataaaccaatcaacggcagtacactgatccagacaaagtcgaatgatgtttctattttctatattttccgccaactcagtttcatttgtttaacctcgctggcgctcttttgttatgggaaagacaacatccttgacaacaataagaaaaaaactggcattctgttgctggcgctgattccttttttagtttttccccttctggcacacaatctgagcagttataacgctgactattctttgtatgtcgtcgattactgcccggacaaccatactgcgacctggggaatcaactatacaaaaatattggtttgtttgtgggcatttttactgttctttattatcatgcgtacacgattagccagcgaactatggccgttaatagcattattatgtctggcatcgctatgctgcaacttacttctactgactctggatgagtataattacaccatctggtatatcagtcgcgggattgaagtttccagtaaactgtttgttgtgtcttttctgatttataacatttttcaggaactgcaactctccagcaaactggcagttcatgatgtgctgaccaatatttataatcggcgctactttttcaacagcgtagagtcattattgtcgcgacctgttgttaaggacttttgtgtcatgctggttgatattaatcagttcaaacgcatcaatgcccaatggggacatcgtgtgggtgataaagtgctggtatcaattgtcgatattatccagcaaagcatccgccccgatgatattttagcgcgactggagggtgaggtgtttggcttgctatttaccgaactcaatagtgcccaggcaaaaatcattgcggaacgtatgcgtaaaaatgtcgaactcctgaccggctttagtaacagatatgatgttcctgaacaaatgaccatcagtattggcacggttttttcaacgggtgacacgcataatatctcgcttgtcatgacggaagcagataaagccttacgcgaagcgaaaagcgaggggggcaacaaagtgattattcatcatatttaa

SEQ ID NO: 12940 - DNA, 1491 bp, Escherichia coli
atgaaattgcaccatagaatgctccggcattttatcgccgcaagtgtcattgtgctgacatcttccttccttatttttgaacttgtcgccagcgacagagcaatgagtgcctatctgcgctatatcgtgcagagagcagactcttcctttctttatgataagtatcagaatcagagtattgccgcgcatgtgatgcgcgctctcgctgctgagcagtcggaagtaccgccagaacaacggcgcgctatctgcgaggcttttgagtctgccaataatacccatggcttaaacctgactgctcataaataccagggcttacgcggcacactacaaaccgcatccactgactgcgacacaattgtggaagctgcagcactattacccgcttttgatcaggcagtggaaggcaaccgccaccaggatgattacggttcaggtcttgggatggccgaagagaaatttcactattatctcgatctcaatgaccgctatgtctatttttatgagccggttaatgttgaatactttgcgatgaataactggtccttcctgcaatcaggaagtattggtatcgatcgcaaagatattgaaaaagtatttaccgggcgtaccgtattatcgagcatttaccaggatcagcgtactaaacagaacgtgatgagtttgctgacgccggtatatgtcgcagggcagctaaaagggattgtgctgctggatattaacaaaaacaatctgcggaatatcttttacactcatgaccgccctctcctctggcgttttctcaatgtcacgctaaccgatacagattcggggcgcgacattatcatcaaccagagcgaagataatctgttccagtatgtcagttacgtccatgacttaccgggcggcattcgtgtctcgttatccattgatattctttactttatcacgtcttcgtggaaaagcgttctgttctggattttgacggcgttaattttgctgaatatggtgcggatgcacttccgcttataccaaaatgtgtcgcgagaaaatattagtgatgcgatgactggactctataatcgcaaaattttaacccctgaactggagcagcggttgcagaaactggtgcaatccggttcttcggtgatgtttattgctattgacatggacaagttaaagcaaataaatgacaccctcggtcatcaggagggggatttagcgattacgttattagctcaggcgattaaacagtcgattcgtaaaagtgattatgccatccgactcggtggcgatgaattctgcatcattcttgtcgattcgacgccgcaaattgcagcacaactgcctgaacgtatcgaaaaacgtctgcaacatatcgcgccgcagaaagagatcggcttctcttccggtatttacgcgatgaaagaaaacgatacgttacatgatgcgtataaagcttccgatgagcgtttatatgtcaataagcagaacaaaaacagccgttcatga

SEQ ID NO: 12941 - DNA, 447 bp, Escherichia coli
atgtttgatgtcactttgctgatcctgctcgggttagctgcgctgggctttatcagtcataacaccactgtcgccgtttcaattctggtgttgattattgtccgcgtcacaccgttaagcacctttttcccgtggattgaaaaacaggggctaagtatcgggataatcattctgacgattggcgttatggcccccatcgccagcgggacgctaccgccctcaaccctgattcactcgtttctgaactggaaatcgctggtggcaattgcagtcggcgttattgtctcctggctgggggggcgcggcgtgacgttaatgggcagccagccgcaactggtcgccgggctgctggtgggcactgttttaggcgtggcgctgtttcgcggcgtaccggttggcccgcttattgccgcgggtctggtttcgctgattgtggggaaacagtag

SEQ ID NO: 12942 - DNA, 819 bp, Escherichia coli
atgcacaggttgaatctcaatggctatgaacccgaccgacaccatgaagccgcggtcgcattttgtattcacgccggaacggatgagttaaccagtcctgtacatcagcaccgcaaagggcagttgatactggcactacatggtgcaattacctgtacggtagaaaatgctttgtggatggtgccgccacaatatgcggtttggataccgggcggggtgaaacatagtaatcaagtgacagctaacgccgaactctgttttctgtttatcgagcccagcgcagtgacaatgccgacaacatgttgcacattgaaaatatcgcccttatgccgggaattaattttaaccctggcaaacaggacgacgactcagcgtgctgagccgatgacccgcagattaattcaggtcctgtttgatgaactccctcagcaaccacaacaacagctgcacttgcccggttcttctcatcctaaaatccgcacgatggtggagatgatggcgaaagagcccgtcgagtggggctcattgaggcaatgggctggcttttttgcgatgagtgaacgcaatcttgcccggctgatagtgaaagagacggggttgagttttcgccagtggcgtcagcagttacagctgattatggcgcttcagggattagtgaaaggcgatactgtacagaaagttgctcatacactggggtatgattcaacaacggcctttattactatgtttaagaaaggcctggggcaaacgccaggccgatatattgcgggattaactactgtttccccacaatcagcgaaaccagacccgcggcaataa

SEQ ID NO: 12943 - DNA, 1752 bp, Escherichia coli
atgttaatagcatgtttatcacttggggttgcgatgacgacgaacacgcattttagaggtgaagaattgaagaaggtttggcttaaccgttatcccgcggacgttccgacggagatcaaccctgaccgttatcaatctctggtagatatgtttgagcagtcggtcgcacgctatgccgatcaacccgcgtttgtgaatatgggggaggtgatgaccttccgcaaactggaagaacgcagtcgcgcgtttgccgcttatttgcaacaagggttggggctgaagaaaggcgatcgcgttgcgttgatgatgcctaacttattgcaatatccggtggcgctgtttggcattttgcgtgccgggatgatcgtcgtaaacgttaacccgttgtataccccgcgtgagcttgagcatcagcttaacgatagcggcgcatcggcgattgttatcgtgtctaactttgcccacactctggaaaaagtggttgataaaaccgccgttcagcacgttattctgacccgtatgggcgatcagctatctacggcaaaaggcacggtagtcaatttcgttgttaaatacatcaagcgtctggtgccgaaataccatctgccagatgccatttcatttcgtagcgccctgcacaacggctaccggatgcagtacgtcaaaccagaattggtgccggaagatttagctttcctgcaatacaccggcggcaccactggtgtggcgaaaggcgcgatgctgactcaccgcaatatgctggcgaacctggaacaggttaacgcgacctatggtccgctgttgcatccgggcaaagagctggtggtgacggcgctgccgctgtatcacatttttgcactgaccattaactgcctgctgtttatcgaactgggagggcagaacctgcttatcactaacccgcgcgatattccagggctggtaaaagagttagcgaaatatccgtttaccgctatcactggcgttaacaccttgttcaatgcgttgctgaacaataaagagttccagcagctggatttctccagtctgcatctttccgcaggcggtgggatgcctgttcagcaagtggttgcagaacgttgggttaaactgactggacagtatctgctggaaggttatggcctgaccgagtgcgcgccgctggtcagcgttaacccgtatgatattgattatcatagtggtagcatcggtttgccggtgccgtcgacggaagccaaactggtggatgatgatgataatgaagtaccacctggtcaaccaggtgagctttgtgtcaaaggaccgcaggtgatgctgggttactggcagcgtccggatgctaccgatgaaatcatcaaaaatggctggttacacaccggcgacatcgcggtgatggatgaagaaggattcctgcgcattgtcgatcgtaaaaaagatatgattctggtttccggttttaacgtctatcccaacgagattgaagatgtcgtcatgcagcatcctggcgtacaggaagtcgcggctgttggcgtaccttccggctccagtggtgaagcggtgaaaatcttcgtagtgaaaaaagatccatcgcttaccgaagagtcactggtgaccttttgccgccgtcagctcacgggctacaaagtaccgaagctggtggagtttcgtgatgagttaccgaaatctaacgtcggaaaaattttgcgacgagaattacgtgacgaagcgcgcggcaaagtggacaataaagcctga

SEQ ID NO: 12944 - DNA, 216 bp, Escherichia coli; identical to SEQ ID NO: 5123

SEQ ID NO: 12945 - DNA, 1053 bp, Escherichia coli
atgaaagatacaattactccactaaattacactaaggaagccataaaagacctgtctgtcatggaaaaaggattaaggtcaaatgcacctcttacatcatatattatgcgtcaggtcattgatatgctggacagtagtgttaagttcatcttaccgaactgctgcgatattattgaaccagaagaataccgccagacacatttcgatttggcacgattaccatatccagttgtaacatttgaaataccatggttcaaagacaatgtagaaacccaaataggtgattttaatatatcaccatcatccagaagaattgccctgtgctgggaggccagacagagttttgaacccatcccgggatgtaattcaatccttaacacttatattgatggcggagtgtttatccttcctgtttcatggtctgatgatttaaaaatatggattcttggtgtcggtggaatgtttttcccatataacaacaaactcactaaatacgaacctgacaggacattgcctgcatccaggcttgtaatcgacacattaaaagagaatggagtagccaaatataatgcagcacacttcaaagcagagccttttataacaagcatggaatttaaagatgatttgataaagcaggtgggaagtattgaaagattatatgcgcaaattattatggatactcgcgatgaactacaggctttcatacaggcatgtagcgtgttaaattgcgaaaatgtgtgtcctgtcacacttagcactaaaccagaaagaaaattcataaatggtcgtaaagttcagccacctgaaaaaaacaagcgcccttcatatacttataaagtattgcaactgtctgaaactaaggtgcaaagtaatcatactggaacaggaaaatccggtgggacgaaaaggatgcacttacgcagaggacatattcgcaggaaaaataacaaactaatatggatcagaccagcaatgattaatgcaaacagtagagcaggcattgttgataaggattaccagataaatataagaaaagaagaaaacaaaccttag

SEQ ID NO: 12946 - DNA, 156 bp, Escherichia coli
atgaccgggcgggatgaaatggatatcaagcgcattctaaaaacaaaggaagcacttgataacatcaggaattttattgataaacagcagttaacgaatagtgatactccgaagaaaagcacggtcccaaatgaagataaaaaaggcataagatga

SEQ ID NO: 12947 - DNA, 267 bp, Escherichia coli
atgatcacaggaaatggaataaacactgtaactgtcaatggaaaagtgaaacacatcacagaactggattatataacactttgtttagagtggacaaaactacgagaggaaaacaatcgtctttatgaaattaataacaaggcaaacagaggatggcgtggtttcatcctaagattgataggggttaacctgccagataaaaggactgagtttacacaacgtctcttattgacgcgcaaaatttcgggttcggtcatgaaaaagtaa

SEQ ID NO: 12948 - DNA, 276 bp, Escherichia coli
atggaactgaagtggaccagtaaggcgctttctgatttggcgcggttatatgattttctggtgctggccagtaaacctgcggccgccagaacggtgcagtccctgacacaggctccggtcattctgttaactcatccacgtatgggggaacagttatttcagtttgaacccagggaagtcagacggatttttgctggcgagtacgaaatccgttacgaacttactggccagactatttatgtattgcgcctgtggcacacacgagaaaacaggtag

SEQ ID NO: 12949 - DNA, 279 bp, Escherichia coli
atgaaaaacaataccgcacaggcaacaaaagtcattaccgcgcatgtgccattacctatggctgataaagtcgaccagatggccgccagactggaacgctcccggggctggattatcaaacaggcgctttctgcatggcttgcccaggaggaggagcgtaatcgcctgacgctggaagccctggacgatgtgacatccggacaggttatcgaccatcaggctgtacaggcctgggcggacagcctcagtactgacaatccgttaccggtgccacgctga

SEQ ID NO: 12950 - DNA, 318 bp, Escherichia coli
atgaatatcaaccgcattatttttgccattgaagactgtatcagtaccctgtcacggtattccgtttccgcattcttccccgattactgtgatctgcacaccgtcatcggtctggaccagcaggaccgcgaacgccgcccctggctgaaagccccctacattgccaccacaaaacaggggtattacctttccgtctttgaaatcagcggtgccctgaaagaaatggatgaaaacccggaccagacggcccccgggacactggagtcactgattgcagcactggctgagcgaatgaacacggcctggaaaaattcgtaa

SEQ ID NO: 12951 - DNA, 528 bp, Escherichia coli
atgatatttaaccgtaataaaaaacgagatgaacaacataattctgctgttgttttgccatcagctgaaaatgtattctctgattttattaagaacaatccagctttgacaaccaatgcttttacagccattggggaggttgattgttttactaaagtacccttactctcaaataatgaatcagagtttttaggcattctttcacgtaatattatacctgattattccgtttttcccaaaatacggctcattgaatttgttcgtcctcatggtagtgaggaagctgtaaaagatttaatccgtgaagtgcagaatataacctgtgattttgtcctgaaatcatatgatgaaacagtcctggctgttatccagtttggtgaaaccgcaaccgtcagacagcaaaagaaaaaactgattatccagcgcgtgtgtgctatgacaggaatttcttttttcgaatttaaaaacactgtcgatatgatggggagcgaagatttttgtcagttcctgcgggatgatgaagagtaa

SEQ ID NO: 12952 - DNA, 252 bp, Escherichia coli
atgcttatgaaggccattaaatctgtattcaatttttacatgctcaatttgcagccttttattggagtggttcttgcgggttatggtgtatggaaattttcaggtgacagtatctcagcattactggaaccagcatcgtactttgtcattggaactgttgttttgtttgtatggtatatagcatggcaaaaagaacgttctaaagaagaagagtttaaatcaagtataaaaccagaagattttgtgaagtga

SEQ ID NO: 12953 - DNA, 495 bp, Escherichia coli
atgagacattttcttaaggctctttcctttgttgtttccctgttaccagctacattgtgtgcggctgaaatccaggggaaagttattcgcgttctcgatggcgacaccatagaagttaaaacactacccgcaaaaattgttgtgtatgaagttccgattcgagtccgattgataaatattgatgcccctgaaaagaaacaaccttttggacgctggtcaacaaatcaacttaaaaccctgctcgcaggccaatccgttaccgtctcttatacgcagacagaccgctacggacgcattatcggtcgtgtgttcacgacgaacggcacggatgccagccgctttatggttcagtctggcgctgcatgggtatatgaacgttacaacgaggatgagtcattaccggctctgcaacgggaagcgcaggaacaaaaacgcggtttgtgggccgacgcaaatccagttccaccgtgggagtggcgatacaaacataactaa

SEQ ID NO: 12954 - DNA, 309 bp, Escherichia coli
atgaaagcaagaagtgtgagagttgccggaattgaaattatcgatagtgttaaaacggtcgcttttgtttttactgaaaccttactgtttatggtctggttttcggcaattgtctatgggctttatcgtgttgttatcgttttatgggatgatcctttaaagccgcaatcgctcatggaatttcttaatttcatagttgagttgtatagctatgtacttccttcgttggctgttatcgcagtggctttaatcgccgttttatccatttgtaaaatactctcagcaatatgggagggaagaaagcaatga

SEQ ID NO: 12955 - DNA, 240 bp, Escherichia coli
atgagcgaaatccgatttgtaactctggcatccgacattaacaatattaaagaagtttattctgatgatgagttaaaacgtttgctggaagctgttaatcagaattgcccagccagaattgtgttgggtagtgtggagaaggggaaagaagtaccactcaagtggtgttttaggacaataccagagcgtatttcagttgaagaaatcaatgaggttaaaatttatccagagttattctga

SEQ ID NO: 12956 - DNA, 306 bp, Escherichia coli
atgactggaaaaaatagagtggttttacctgtctttctggcgttaggattaatatcaacaaatgctaatgcatctgacccttgcgcttcggtactttgcttatatggaaaagcagtcgggcaaggtggagggagtgagtgcagaagtgctgaaaaggatttttttaatattctgaaaaagaaaaaaggaagcattcgctggagtaaaacttttgatgcccgtaaagcatttctgaatcagtgttcaacggctgatcctgctgctatatcgaaaatcatgagtaagtttggtcgtgtcagaggttaa

SEQ ID NO: 12957 - DNA, 420 bp, Escherichia coli
atgaagaagttagtgtttttattgatttctatccttgctggttgttcatcaccgccagagccaacacccgcgcagtttgaaaaggcaaatgaagtgatcaatccctcattgccgtatgtccccgattttcacggcgtcataaagtcagaagttagcggtaaaggatgggtttatgagatcacttccttatccggtgtacaggccagaacgccgacgttctattacgctctggctcatgcggacagggtggtagtgacaacacatgatgctgggctgtggtttcgaatcagagatctgttgaagatggaaggggcaacagcagtcgtggaatggcgaaacgagaaaagttttttacctgaacaggtaaaaatagttttcattaaagcacaaaatgaggtgaaaaatgactggaaaaaatag

SEQ ID NO: 12958 - DNA, 1863 bp, Escherichia coli
gtgaaaacttttaataagtcgcaatctgtttttatattcgctgttatgcttgttgcggcatggtttgcaggttcatttattttctttgtgctttacttcagccagataaagaatctgaaaccattgaaggctgtgttcagatccattgatgcgtacaggatggatatttttacagacagccttactttatctgttgtgactacggatatcagagttttagcctttgttgcacttggagcaggatttgtcgtgtctcttatcatccctgttgcggcgttgataaaactgaacgagaagaaagaaaatattttcggtgatgcgcgatttgcaacaattaatgatattcgtgagtctaacagtttcacgcttgacggtgacgaaaaagacgggattatcgttggtataaaagacaagaaaataatacgctatgtgggagcagcattcagtgctatgggagccggaacaagggctggtaaaggtgctggtatagtcatcactaatcttatgaagtactggtggagtgttattattctcgatccaaaaagggagtgttttaatatcaccagtcttatcaggaaggtgattttaggtcatgaggtttataaatttgatccctttagtccggtaacgcaccgctttaaccctttgtattatgtcagcatgggaacgagtgaaggttttaaccagcttgaaaatctttcgttgattatttacccctataagacagatggtgcggatgctggtagctatcttaataagacggcgggtggtgtttttaaatcttatgctgtcgctttatggtttatgattaagaatgataaggctggactaaaaacgcttgatattgagcctgtcttctcaatgtctaaaattaatcagctttttgagcgtgcagaacccgaacatcttctttcattcatgaatgatattcgttcagaattaagggggaaagacaaaacgcttgctgatattggtgtcgctggccttaaggcattcattgagatggaggataaaacaaaagcacaactcaaaagcaactttcttaatggattatcaccgtttgctaaccccaatgtggcgaatgctactgatggaaatgattttgatttgcggcaggtgcggaaaaaacggatgacaatttatttctgtatttctggtgataatgccaggttggctgaaaaaataacaaatattttctttcagcttggtatacaggtgaatcttgaaaagatgccaacggatgatccggaaataaagcatgactgcctttttctactggatgaattcccgtcaattggtgctgtagattacatcaagagtaaatctggtcttattgctggttacaagctgaaattgttgattgtttaccaggtcggctctcagcttgaggaaatctacagttatgcaggcagtaaaacattactggcaagtgcaccctgcaaaatcgtttattctgcttctgatgttaaagatgcacgggagttatcagaggcgatgggaacacgaacagtaactatcggttcgaaaagcaaaagtcgtagtcgtggaggaacatcgagatctgaatcagaaaaccttattgagcgtccactggtaacaacaaatgaactactgacactgaaatttagtgaagaaatcctggcaatgaagggagaaaacccgattcgttgtgaaaaggcattctactatctccatgagtatttctttggtgattttgtgaaggttgctccggaacttgcaaatattttccccaggaagaaaggaaagctggttatgcctccacagaaagtatttgaaaatgaaatcgtcgcaaaagggtatctggcagtaaaagatgttcctgatctcgataaagcggcataa

SEQ ID NO: 12959 - DNA, 1029 bp, Escherichia coli
atgaatggcgttattcctgtcagcattagcaataaatcgctcgatttttataaaaatcaagtattccagtcttttcttgatattgaagggctaacagaaattgctgtcaaccgtcctggtgaaatctggacggaaattaatggtgactggacattccataataatgacagtgtgacctttgatttttgtaaacgtttttctcagacgctggcatcatttcggggagatgaaatcagcgataccaagccattactttcagcaacactggaatcaggagaacgtgtacaggtcgtttttcctcctgcatgtgagagaaatactatttcaatcaccatacgtaaaccatcgacacggcagataacgcataaagaatatgtggcgaacggtttttatgattatgtccagtcaggaaaaaaacacaggacatacgatgatgagcttcttgatttattcagagcgagaaatatcgctgcttttatggagcttgccgtagcagcagggaaaaccattgtatttgccggagcaacgggttccggtaaaacaacatatatgaagagtcttatcgatttcataccattgaatacacggctgattacgattgaagatgcagaggaaatcaaattttttatccataaaaattatgtgcatcttttttacccttcggaatccggcagtgattccggctctatcataacagcagcgaaattaatcaaatcctgtttgaggatgaaacctgacagaattttactggcggaaattaaaggtggcgatgcctgggattttgtgaaagttgctggttctggtcacagtggaagcatgacgtccattcacgcggcctcggcaaaagatgccatcattcagatggtgacaaaatgttatcagaacagagaatgtcagaatcttccttttgatgttcttcgtaaaatcattatggacagtattgatattgttgttcatgtaggcagggatggtgttgtcaggcatatgagcgacatctattacaaaggggctgaatgtgaaaacttttaa

SEQ ID NO: 12960 - DNA, 1110 bp, Escherichia coli
atgactgatatgaaaaaaacagatgatttagttgatgatgcgaatcagtcaaagctggaaagtaaacccgttcatgatatcggtgatatcaggaacaaaaataatcgtatgcgttctggctttctgtttggtctgatggctgtattagttattggtatttttgcgctgaaaacatataaaaattattttgcagatgaccagcagaaagcatcagaatcaacaggcgataccagcatttctcaggtaagtaaaatccgtactggtcttggtcagaattttgaccctgttgagaacaaagcaattatcaatccaggcgcttctggttctggtaatactgtttctgacggtcataaagaagtgccacaggaggggttcaggaaatatttgtcaatacctgttgctggtcagggagggagtcagactggcgcgagtggcagcagcaggacatcagagccacaggaagaaaggaaagaatcaaaagaaaatgtgcctggtaaatcaggaatgaaagtgactgcgattaatctcgatcctgatctctatattgaggaaaacaggcttataccgtgtgctttaaccacacgctttgtttctgatgttgcaggtcgtatcagttgtgtttttacagaagatgtatggagtgctaatcaccacacaaaattactggaacagggaactaaggcttttggtcgttaccagaccggaacgctgaatcatggacagggcagaatgttcgttatgtgggagcagttgcggacgcctgataataaacgaatcgatatggtaaatacagcagcggctggccccctgggagaagcgggcattgatggatggatcgattctcacttctgggagcgttttggtggttctcttatgctcagtatggttcaggatgtagcggctgcggcggcggataatgcacctggtaaagatcgtaatgtggattataccgaaaactcacgacaggcaatggctgaaatggctaaagtcgcacttgagaattcgataaatattcctccaacaatgtataaaaaccagggtgacataatcactattatggtcggggaagacattgatttttctgatatctatgagttaaaggtaaaatag

SEQ ID NO: 12961 - DNA, 807 bp, Escherichia coli
gtgagttataacggtgcgaatacgaccgttatccggtcaaagacaggatttctcacatcagttgttttcgatgaaggtgaggctgttatcagtgcaaaggctggttttcctgccggatgggaaatcacaactgatgataatgttgtttacatcaatccgcgtcccgttgttcaggaacaggaaggcgatgaaggcgaaaaactgaaaaaggttttccagccaacagaaaaggaatgggatacgaatctttttgtcagaacaacaaagcggatttacagtctggatctaatccttctgtcagaagaaaaacaagcgcaacctgcttatgttgtacaattccgctatccatcagaaatagcgaaaaagaatgcagaagaagtaaggctggcaaaagaaaaacaggaaaaactcagacagaagaaactgatttctgaaagttttgaaaaagccgatgcgcctaaaaactggaattatttcatgcgagtcaatgaaaaatatgacagccgtcgtatcgcccctgattttgcttatgataatggtatatttacctttttaggttttaactcagggaaagcattcccagctccatttgctgtaagagatggtcaggaacagacacttgcttttaatgtggaaacaaaaggcaagtataaaattatggttatccacaacgttaatgataaatttgttttacgctatggaaacagcgttgttggtgttgtgaataaatctttcggaaaagtattaaccgaccagaggaatacatcttctcctgcggtagaacgtgttgaggtgaataatgactga

SEQ ID NO: 12962 - DNA, 687 bp, Escherichia coli
atgagtgaaaaaatcgaaaagaagattgagacagctaaatccttcgaaagacaactctatgcagaaaatgaacggtctaagaaaaatgcatggcgtgttgcagtggcagcatcattactgtccttatgtcttggggctgcaatttgtgttcttgtgccattaaaagaaaaagagcttgctattgtggctgttggcgaaaaaacaggccgtacagaactgattactcaggttaaacaggaaaagatcctgcaatctgaagcactagggcggtattttgtaaacacgtatattaccttacgtgaaggttataattatccgtctcttcagtatgattatgagactgtacagctatatagttcgaatacagtaaaggacgattatcttcgtctgtataacagcgatatggctcctgataaaatttatcataataatggttcttacgttgcggttgaggtcatctccaatattatttctgacgcaaccgcgccagataaactggcctctgtgcgctttaaaaaaacgacgagaaacttcacgaccggacaggtttcagtttcatactggacggctcgtgtgacatatcgttttgaaccagaaaagtcggttaaaagttccagtcgtgagcttaatcctctcggttttactgtaaccagttaccagacagatcgggaagccaggggggaatga

SEQ ID NO: 12963 - DNA, 204 bp, Escherichia coli
atgcttcattattttgtcatgatactttattttgtcctaatccttcttttaggagtgtttacctgcttcgcaggaataagacttggtttagggcttgcggggaaatggagaaagggtatggatcttcgctttttgcttcttattggtgggattctttttcttcatcttggcctttatctcttcaaggtgttcgtgaacgcttaa

SEQ ID NO: 12964 - DNA, 180 bp, Escherichia coli
atgaatataatgaaacgttttttttatgtgatgtccctgaactggatactgacgtttgttgataaacatatcacctccggatggagcaggaagagaaagctaataacccagcttattattttaatcacgggaattaccttatttaaggtcttaggtggaatcagtcagagctggttgtga

SEQ ID NO: 12965 - DNA, 1095 bp, Escherichia coli
atggctcagggttttttcgttaaatataattctaccgttatggattcggtagataaaatcagctccagttatcaaacacaatttgctaatgatattatgtcgttagtgacggtatcggttacgttatatgtactatggaaaggatatcaaatacttgccagtaaaactcagacgcccttgcaggatttagtatgggatctatcaaaatttgcaatcataatcatgtttataactaatgcggatgggtatttaactgcggctactgatgcgttgcaaggcatgaaagatggtttttctggaggggtgagtgtctggcaaactttagataacttatggaaaagtacgcaaaatcttggtgcggaaatatactctttagataaatcaacatatgttaaagatcaaggtgtagttggacagtttttaatatggactggctcgcttattttaatggctgttagtgtggttgtttttttaacagcagatgtaacgatgaaactcctgattattacagcaccgatatttatcttttgtctcatgtttggttttattcggagcatgtttaataattggttacaatcgttattctccagtattctgacagttctatttgccagtttagtgattcggatagcaatggattttcaagggatgatcctttcccatgctattcgtgctgcacaaacagggaatgtaaatcttgtatctacaggtgctatgggctttatggctggttttttgggggctttattggttcttatagctaaaggttttgctgtccagttagcaggtgcaggtgttgaaggtgctgttcagggcgcagccatgatggggctgggtgctgcgggtatggctactggtaagtctctgatgcttggcggtcgtgctggtttaggttttggcttagggatggccggaagaacgggcatgaattctttatcagggaaagcagggaatctgatggggcgtggtgcgagaacagccgctgaatgggcgggtgaaaagggatatcaggcgctggctccgacaggtgctttggggatgaaggcgagaagacttgcatccctggaaaaagcacgagcgaggaatgccgcatga

SEQ ID NO: 12966 - DNA, 717 bp, Escherichia coli
atgaaacgtgtaaaaacatttatgctgatatcattattgacggcttcattttatagcagcgcaggtattccggttgctgtagatgccagtccggaatgggctgttgaagccgcaagatggacagaacgactcaaacaatggtccgaaactgcgaaacattatcagggtcagattcaggcatataaagaccagttagccacggcaacaggtataaggaatattgcggcattcacaaatgaactaagtaatctgcaatcagaactgacaaatatttataagcaggggaacagttatatttctgattttaccagtaatcccgaaggtgcattaagcagccaggctaaaaatctgttcagcaagtatggagcctttgatatgtgtaatacgggctatgaacgtaatgataatctctgtaaagcacggattgtgtcaacggctgccagtattgaacagggaaatgagatcaataagcagttatcaagtgcaatgtctcagattcagagtttaagtagccgaattgaggcttcaaaggatatcaaagaatcccaggatttggctaacgcattacaggcgcagtcgttaaaaatgcaggcgataaaaatgcagtatgatgtctggaataataaaaataaagcagatcatgagatgttgctcacacatgaacaagaggcctttattaaacagcagaaagaagctgaaccattaacttttgattaa

SEQ ID NO: 12967 - DNA, 2748 bp, Escherichia coli
atgtctacactttataaagcgatgacacgccctgctatgtatgtgggtgttcctgtcgtccctcttactgtggttgcaggggcgttatttctggcgggggtttatatcagcaagctgatctggctggctattcctgtcgcagtttttattctcagaatgataactaagcaggacgaccacatttttaatctttactttcttaagctgaaaatgctcggaaactcagtgtgtaatcgtttttttggcgcacgagcgttcctctccggacaatatgaagctgttgaaattgatgagtttgttaatgccatgaaactgaatgagcgaatcactactggtaaatatataccctattcaagccatgttgataaaaatattgtcaaaacaaagaacggtgattatgtagcgacatggcaactgatggggattaactttgagtcaatctctgcggagatgttagaaactattgactcacaggttgccactcttgttcgttcattttccggactgcccgtttcattttataaccattcatgcagggcgagtttttatgatgcctttaccacaaaatcaggtaataaatatgctgatataatatcagattgttattatggttcgatgaagaaaaataaattcaaggggaacactctttactttacgctgatctacagaccagacgggcgtgtagaaaaactggaaaaacgcaaaaaaagtattaaagaaaagaaagatgatattcacattcatgtgaagagaatgaatgaaatgattaatacattctctggcgctcttgataaatttacctgtaaacttcttggtatgtatgaggagaacggaaaggtattttcttctcaactgtcattctataattatcttctgacagggaagttgcaaaaaatcagagtcactgattctccggtgtataacgttcttggtggagtggatgtattttttaatcatgataccggacagatatgccgcattgatggaaataaattctttcgttctattgaaattaaagatttctgtagtgagactgcatccggtgtttttgatgtgctccagtattctgatgctgactatattattacgcattcatatacatccatgagcaaatcagaagcattgagtaccattaaacgtgcggaaaaacagttaaagagtacagaagatgatgcggtcactcaattgcaggaactggaaaaggcaaaaaatgatattgtgtccggtgatatatcctttggttactaccatttcacgataatggtaatggcggacagtatcagggagcttgacgaatctgtaagtaaaattacggcagactttactgacctgggcattattccggcattgtcaaccatgtcattgccagcggcatattttgcccaacttccggcggtttttcatttaaggccgcgtttatctccggtatcgaatgtaaattttgtcgaactggcatcattccataatttctaccaggggaaacgcgataaaaactgctggacagaagcggttgctattctcaaaacaccaagcaaacaggcgtattatctgaatttacataactcagtactgtttaaagatgaaacaggtgaaaagaatcttgctaatactaaagttataggaacggcgggttcaggtaagacaatgtttctgtcatatcttgcctgttcattacagaaatacaataaccccgaaacttttgctgattctgcaaaaaataagaagttaacgtgtgtctttcttgataaggacagaggggctgaattatgtatccgaatgcttgggggggaatattacaccgtaaaaagcggtgagccgacaggatggaatccttttgctctggaggcaacaaaacgtaaccgtatttttgtgaagcaactgatggagattctgtgtaccagaaatggtgaaagattatcgacaagagaaagattgcttattagcgaaagtgttgatgctgtgatggattttcctcctggcgaaatgcgggaatatggcattaccagaatgcttgagcatcttatgcagagagatgatcgggatgagcaggagaacgggattatccttcgtttgtcccaatgggctaatagtcaggctcatggctgggtttttgataatgctaaagacacattcaatattcagcatgtcaataattttggcattgatggcaccgagtttcttgatgatccgatggtatgtgcaccaattactttctatctgctgtatcgcattacgcagcttctggacggtcggcgtcttgttattttcctggatgagttctggaaatggctacaggatgaagcattcagcgattttgtctataacaagctgaaaacaattcgtaagctgaacgggctggttattccggcaactcagtctccggatgaaatactgaagaataagatttcacgggctgtggttgaagtatgcagcaccagtatttatctggctaaccctgatgccgattacaatgattatgtggaagggcttaagctgacaccagaagaatttaatattattaaaaatcttgatccaatgtcgagacagttcctgattaaaaaaagcagtcttaaaaagggggatggtaaatcattttcagcacttgcgacactcgatttatcgggacttggtggatatctgaaaatattgtctgccagtgcagataatctggaaatttttgaaagtatttatcatgaaggaatggagcctgatgactgggttcctgaatatctcgaacgggcaatctga

SEQ ID NO: 12968 - DNA, 327 bp, Escherichia coli
atgtcatttaagaaatcagtatgtaattgtatcagttcatctgtcactgctgtaatgcagcgtaaaaataaggtagttatggcagtcgccggggcaacagtcgcatcaccggcctttgcggatggattttcaaaagcggaaacactgctgcaaaaggtcaaaacagggcttggtggcctttcactggtaacggtgactattgcctgtctgtgggtcggctacaaggttctgtttggtggaagcacgattcgtgaatgctcacctatcatcatcggggcaattgttatcgccagtgcggctgaagttgcatcaatgatggttaactaa

SEQ ID NO: 12969 - DNA, 621 bp, Escherichia coli
atggcgtctttattcccagccttgttgctgtgtgcggcgtcagttcatccggatacgataaatgatattgcacgggtcgagagtggcttcaatccttatgctgtggctgaaattattcctgaaagggaacgcggtagctatggcaaaagtgttatcagtcatatgcccaaaagtaaggaggaagctctaacagttatcagagaaattgaaaacagaaaaagacgttattctgtcggattgatgcagattaccagcagtaatttttctttttattccacgtccgcagaaaaactccttgattcgtgtgaaaacttgtctgttttcgaaaagattatcgtggattgttataaacgagggaggagcctggagaatgcgcttagttgttactatacaggaaattttagtaacggtaagcgaaaagaaaaagaatttaataatacaagttatgttgagcgaattggttatacagggaacgaaaaaaaatatgttgtaccaggtacaagaagcaacggaggagaacagcgaaaaaatcgttcacacaatgcgtcagttatctggcccgaaaccattctgaaatctgcttttgttgataactcacatccaacaaaagttattaattaa

SEQ ID NO: 12970 - DNA, 177 bp, Escherichia coli
atgaaggagaaaccagataagtcatcggaaaaaggggtttatgtcacgataaaactcgatcccaggttgaatgcatttatcgaagagaaaacgaaaacatctttgcttagtaagaggaagcaaattatttacttattaatgcagagtatgcgtattgatggatatatggagcgttag

SEQ ID NO: 12971 - DNA, 216 bp, Escherichia coli
atgaaaaaatatctgctttttgctttgccgttcttcgttgttggttgtagtgaagaagtaaaaagtgtggattggtgggggcagcatcttacggaagctaaacaaaagcaggcagagtgtgagaagtctggctctgattctcagaactgtaagaatgttaaacaagcattgtttattcagtctcagaaggatgctccagtccctacattcgattaa

SEQ ID NO: 12972 - DNA, 294 bp, Escherichia coli
atgactgagcatgatgctatctgcatttctgcacttcatcaaatttttagtgatgaagaacatttgagtgagcaacaaaaagacattattctgatgtacgcttatggctataccctgaatgaaattgctgatttcaaaggactaaagccttcaactgtcagaaaatatctcgattctgtaagagctgaactgggaggtgtctcgttggcagggatcagaacactggtactcattcggactaatgcccttctcgtgtcaagtctttccaggatcagtgagaggggaaatttatga

SEQ ID NO: 12973 - DNA, 1230 bp, Escherichia coli
atgggtgtgtatgtagaacaggaataccgtattaaacgcgctaaagggactgggcgtgatccgaaatctcctaagttatcgggaagacatatacatgccagtaaatcggcttttaatcataaagtcagacatggtgcggacaagaaagcatatacctggacacctacaaaagaagtcacttttaaaatcactggctcaggtaaaacagccgcaggtatcaaaaacggtattgattacattacccgtaatggtgaacttgaggcttactgttatgatggaaaaggttcagagcaaacagggaaaggagaagactttaacagggagtttacttcaactttatctaaaggaaatgattactccaggacatatcgtggagaaaacatcgatcatgtgaaaaacatggtcttttcaccaccaccagaagctggagtaagcagggaagacgctctgaaagctacggtagaatttcttaaagagacttatccaaaccatgctttcgttgccgtataccatgatgataaagaagatcatcctcatgtacatgttaatattaaacttcgtgatgaagaaacaggaagaagattaagacttaccaaatctgaaaccaggaagttcagaaacggttttcatagaaaactgaaaggtatgggatatgatgttactgctacctggaaaaaagatcccgaacgtaaacgggagattgagcgattacaggctgaaaatccgaaaagactccggaatgtttacaaggttgtggattttggggagacttcatatcagaataaggcaggggaaaaacgaacacctttcctcacttatgaaactttaaaaggtggaaaacaggttacgatttggggtaaagacctgaaaaatcatttcgagtctgaaaagctccagccaggaacgcttatcaaagttaaaaaactggctcccacgcttgtacatagcccgatgtttaatgatgatggaactgttgcaggctacagggaaacgcatcgcaataactggcagattgaaaatattgcccttgagcggaacagagaacgtcaggttcatgagcgtgaaaccaggcaaccggaagagagcgacgttaaaaaacagctatccagaaaacatgagcaaggtcacaatatcggttttgctcttgaatacgggtttacaaaggattcagaagaacataaaaaactaagaatacagcaagagaggaactggaaaggcctgggattttaa

SEQ ID NO: 12974 - DNA, 504 bp, Escherichia coli
atgaagatgatagcgttcaggctaagtgatgatgagttaaaatttgcagaacataacgctattttaagtggatttaccagtatcaatgcttttgctaagcataacgtgcttaatattgaaaccaagcctgttaacatcccagttaataatgaaccagcaaagctggtatcagtgcgtctttaccctcatgaaatagaacttgttaaacgtaatgctgctcttcacggcatgagcatgagcagagaaattgctattcgtgtgcgtcagtctttgttaaagagtgaagtctgtctttaccctgatgaagttaaggaacttaaaaaactatcaactgctgtagatcgtgttggtcgcaacattcattttatcataaaaggtgaaagattctgtacggttaacgatccagatttcagaaaagacgttattgaagtgattgaactgtgtaagcgaattgattcaaaacttgaaacgttaaccaagagtgttgttaacagatttgggtga

SEQ ID NO: 12975 - DNA, 138 bp, Escherichia coli
atgtcaacgcggcagatcgtacagcttgctgactcccttgtcaaaggctgggaaaccagaattccggcaatgaaatttagcgaatgggatcaattccggtggtggttaaactacctgcaagggtatgaaatgttttaa

SEQ ID NO: 12976 - DNA, 873 bp, Escherichia coli
atgagaatgacgacaaataagacttccctttctcgcttaacaaaagtgagacatcgaaatgaattgaattcaacgctgtcaacattgcctatggctgctaaaaaagtcttatttttagccatgtgccagataaactctaaaaatgaattcgatgatgatcacatattttatgtgacagttgccgattacattaaatgggttcaggttaagcctgatgcggcttatcttgctttgagggatggctctaatatattagatacgacgcttcttaagctgaaacatgatgaaatattagaactgagtagtgatttgggatttaagttcactaaaagtaatgtacctgattcaatgaatttgagtctgactgttttttctacttattacaggaatgaaggtagagtggggatcaagtttacaaaagaagcgaaaagatttttatgtaaacttattggtgaagaaaaacgttatacaacgcaagttttattatctgttgttcgactgacaagtgttaatgctgcatcactatatcaactcattcgtaaaatatatagtaataattctcgcgcgaatagttttgaaatgacaatagatgaacttaaagatgaattgaatctttatacaataggggcggggggggtgaaggattataagtatccagattatcctgcttttaaaagagatgttcttaataaatcagtaaaagaaatcatgaaacatacggaagtaaagaacttaagtttcgtagtttcagaaaaaattgggagaaaagtttataaattaaaattctcttatacaattggttatgagggcgataccagggaagactcagagtttactaatatgtttgataaaatgtacccacctgaaaattga

SEQ ID NO: 12977 - DNA, 405 bp, Escherichia coli
atgaaggataatatcgtagattttcaaagaatcagggacagcatgaatgatcattcaaccgatgttgcaaatgatgccgtttattctgacaaaaagaaaatatccaggttcttttatctgctgacacctgtcagataccttctggctgcttccctttatctggttgttgttattccattggggattcttgcgggatttcgtttcttgttgcagtttttaggcggtatcgcagtgatgggtttaactatcgcctggtacatgggtgcagatgtcagtagttacgttgttcttgctgcatggatcgccttaactgtttgtggttgcgcagagcagatttttgaatggtggatcgaaagccgttttgcgttccgtctttttggtatcgggagaacgccggaagaatga

SEQ ID NO: 12978 - DNA, 369 bp, Escherichia coli
gtgtcagacaaactccatgagacaaattatcccgacgaccataacgaccgcctctggtggggactgccctgcaccgtgacgccctgtttcggggcacgtctggtgcaggagggtaaccggttgcattaccttgccgaccgcgccggtatcagaggcctgttcagcgatgcagatgcgtaccacctggaccaggcctttccgctgctgatgaaacaactggaactcatgctcaccagcggtgaactgaatccccgccatcagcataccgtcacgctgtatgcaaaagggctgacctgcaaagccgataccctcagcagttgtggttacgtttatctggctgtttatccgacgcccgaaatgaaaaattaa

SEQ ID NO: 12979 - DNA, 558 bp, Escherichia coli; identical to SEQ ID NO: 7707

SEQ ID NO: 12980 - DNA, 210 bp, Escherichia coli
atgacggatggctggccgctgtatgaatcacgcctgaagagaaagctgcacgttatcagcaagcgttacactcagcgcattgagcgacataatctgaatctgagacaacatctggcaaggctgggacggaagttactgtcgttctcaaaatcggtggagctgcatgacaaggtcatcgggcattatctgaacataaaacactatcagtaa

SEQ ID NO: 12981 - DNA, 255 bp, Escherichia coli
atggatgaagaaagggtgttttcactcagctatgagcagttgacccgaatagcggaaaaaaatatccgtgaatgtgggctggacagccagagcgccaggtgcctcaatgaactgagggcctcagctctgctgtggttgtggtatgaactggccattcatggtgcgccacagaacaatcacgcacaggcccgggaacgcatcgataccgattatcagcgcctcaaaaaactcatctggtcggagggtgacagttaa

SEQ ID NO: 12982 - DNA, 1500 bp, Escherichia coli
atgaatgtggaagagtcagagcagcgctgggtttgtgcttgttgtattggcgaagaatttttacgccacaaggtcgagaaagaaggacgtatacaaacctgtgattactgcgatgagattcacacctgtttttccctggaggaggtatgcgacctgacagaaaaggctattgaagctcatttttaccggactgacactgaaccgaacgatatggagtatgccagtcttcgtcatattgacggttataagtggttccgtgagggggagaatgtagtgcagctcattgaagatttgctccagtctcgtcgtgcactcgcagacgatattcagcagctgctcgaatacagacattcagattttgattccgatgtgatgggacttgagaccgagtttgcccgcgagtcctgttacgcagaacgcaaacagatcagtaccggccgtctcgattccatgtggataaattttgttacctccctgaaaacagaatcacgcttcatcaataatgccgtgagctccaccctggacggtatattccagggggtagagacaatgcgcgcccgtggaaaagaacctgtgatcattgacgctggaccaggtacagctatcccgtcactgtaccgtgcccggtggtgccggaatcatcatgagctggagcaaatacttgtgacgccggacaaagaattaggtccgccgccgcatcagttcagcggctctaaccgtatgagtgcaaagggcatttcggtattctatggtgccagttcagtcgatacggctatatctgagatacgtccaccggtaggctgcaaagtggtgtgcgcgaagttcagtcttatccggtcgctccgtctcctgaacctgccggcgcttgaaagtgttctggagagcggaagtctgcttgatccggactacataaaaagacgtgagcaggccgcattcctgtccacatttaccagccggattgtcgagccggttctgcctggcgaagaagatttcagctatataccaactcaggtcatcgctgaatacctggcagatcctctccgctttaatcttgacggtatcctgtatccgtccgtgcagttgccgggggcggatcaggaggaacggtacaacgttgtgttgttccataaagcctcccgtgtcgcctttatgacgctaccggcaaaggatgactgcatgatcagatatggccatcagtatgccgaagacgaatgggagactgatatctgtgtgacagaggttatctctgctcaggaagaccctcctccagccaggcatgatctgtctgacctttcacttcccgacgacccacgggagcctgctctggagatagatctcgattctgtcagcgttcacggtatacgggcagcccggtttgaatactccactgatgccgtcaggcggagcacataccactatactccgcggacttcagaaccagccggtactataactcagttatgggacaccgcctctggtcatgacgattttccgttctga

SEQ ID NO: 12983 - DNA, 864 bp, Escherichia coli
atgaaagaccaacgtattgaactccgtcttcctcagcagcaacttgatgagctggataatttcattaacaacattgacggtcagtataagccgtcccgctcggatgttctgcgttcgtttatagcgcagggtgttcgcgggaaatttactccggccagccaggaagcggagatgtttcccctgtcagcgcgcctgaacatctttttccagctctgccagttgctgcgtatggagtgcggtaaagacggacgttctgtccagcctatcaaccccacttatggctataacaatcgtgtcgccagtactgtcacagcagaagctctggtgcgtcaggtttatctgcaacgcatgacatggttctttgagctcgatgccgtgcacctgcaagccattaaccctaacctgggccaggacatgattgtatccctgatgaatccgcagcccagtccggtgatctgtaataccctggacagcgtgatagcgcttcgtgacatgttctcgaatatcaggatggtacttgcctcggccgagaaaacagtgaacgattggaatgaccagaagacccgcgacgcgctggcccgcattcagggctatgtagaagacaacggactgcagttaactttcaaggggtatcctgacacagaagactatgcgctgcagattgacatgtggtcgctgcttaactggattgataacggacaaggtgatcaccgcatcggcgattacggtctgcgtaatgacaaggatctgacagataagtacgccgtcatgcttgaggtgtaccagaatatccgcagtaaccatcagttcgatcttaacggactcgaacagatggtgaagagccgtcagttccacatgatctga

SEQ ID NO: 12984 - DNA, 1110 bp, Escherichia coli; identical to SEQ ID NO: 6006

SEQ ID NO: 12985 - DNA, 666 bp, Escherichia coli; identical to SEQ ID NO: 7649

SEQ ID NO: 12986 - DNA, 222 bp, Escherichia coli
atgaaaatcatcacccgtggcgaagccatgcgtattcaccgtcagcatccggcatcccgtctttttccgttctgtaccggcaaataccgctggcacggcagtgctgaagcgtataccggtcgtgaagtgcaggatattcccggtgtgctggccgtgtttgcagaacgccgtaaggacagttttggtccgtatgtccggctgatgagcgtcaccctgaactga

SEQ ID NO: 12987 - DNA, 300 bp, Escherichia coli
atggaattacaggactggcgaaaagaacctcgtaaaaactattcgaatgaattcaaacttcgtatggtggaactggcatcacaacctggagcttgtgttgcacagattgcacgtgaaaatggcgtcaatgataatgttattttcaaatggctcaggctctggcagaacgaagggcgtatatcacggcgtcttccggtaacgaactcttctggcattggcgttgaattattacctgtggagatgacgctggatgagcggccttaccccgtttttacgcgaggtaattatgaagatcaatga

SEQ ID NO: 12988 - DNA, 888 bp, Escherichia coli
atgctgcgggcgttgtttatgtcgatgatggtagcggtaattctggcaacagcaggcatgaccggcattacgcttatagccgttggctctttggttgttggcgtggcaatggtctttttcccggctattgctcatccgtacatgaagaaagtgaccggttctgatgacgttgccatcggccacttctcaacattatcttatgtattggccggtttcatcggcagcaagtttggtaataaagagcactcgactgaagacatgaatgtgccgaaaagtctgctgttcttgcgcgacacgccggttgctatctcttttaccatgatcataattttcctgctgacgtgcctgtttgcgggtgcagatgcggtgaaagagcttagcggtggtaaaaactggttcatgttctctatcatgcaatccattaccttcgcagctggcgtgtacatcattctgcagggtgtgcgcatggtgattgcggagattgtcccggcattcaaaggtatttcagacaagctggttccgaatgccagacctgctctcgattgcccggtcatcttcccttacgcacctaacgctgtactggttggtttcctgagtagctttgctgcaggtttaatcggtatgttcacgttgtatctgctgaacatgatcgtgattattcctggtgtggtgccgcacttcttcgtaggtgcagctgcaggggtattcggtaatgcaacgggtggacgtcgtggtgcgattttgggtgcctttgcgcaaggcttgcttattaccttcctgtcagtattcttattgcctgtgctgggtgatattggttttgctaacaccaccttcagtgatgctgactttggcgcactgggtattttgttagggattatcgttcgctaa

SEQ ID NO: 12989 - DNA, 972 bp, Escherichia coli
atggcaggctatgccacgcacgcgaactttgccgggatcgtgatcgtgggactgggatgtgaatcattccagattaaggacatgatgaatgcccacggattacatgaaagtcctgtattccatacaatgactattcaggaaagcggcggaacacgtaacgctatagaaaaaggtatttccttcattctcgacatgctcccggaagccaacaatgtcaaacgagaaccagttccggtatcagaaatcattctggctcttgagtgtggcggctctgatagctattcaggaatttccgctaatccggctctcgggtacgcagttgatcgcctggttcgccagggaggaacggctattctgtcggaaacatcggaaatttatggagcagaacaccttctgacacgccgtgccattagtcgcgaagttggcgagaaactaatccgcagaattaagtggtgggaagagtactgtaaacgtacagggagtgaaatgaataacaacccttctgcaggtaataaagcggggggactgaccactgttctggagaaatcgctgggagggatagcaaaagctggtacaaccagcttaatggatgtgtatgaatatgctgaaccggtgacagcaaaagggcttgtctttatggatacccccggatatgacccgatggcagtaaccggacaaatcgccggaggagccaacctgctgtgttttaccacgggcaggggatctgcctttggcgcaaaacccactccttgtctgaaactgtcaaccaataacgcactatggcaacggcagcgcgacgacatggatttaaactgtggcacgattgttgatggcgaagaaacaatagaacaggttggagaacgtatttatcagagaattattgagctggcttcaggtcatcgtagtcgaagtgaagagctgggttatgggagccaggaattcgttccttggataatgaactcaatcatgtaa

SEQ ID NO: 12990 - DNA, 573 bp, Escherichia coli; identical to SEQ ID NO: 7694

SEQ ID NO: 12991 - DNA, 1020 bp, Escherichia coli; identical to SEQ ID NO: 5522

SEQ ID NO: 12992 - DNA, 381 bp, Escherichia coli
gtgggttttcacctggtcttccaccaccagagtcagcgtcaggatgaacgggcaggaaatggacatttccgggttcagcagattgctgtagttgtcggccatgttccacaggaaggcgatttccgggttacgggccagatggaaattcaggatgcgggccgtgctgttcctgccgttctcacgcaggcccagcgtcaggtaatcagcccggacattcaggtcaaaactgtcctccacacactgataattcagatcagaatacgggtccagctgacgtcttttcgggtacagggagtccgggttatgattaatcatctccccgacaatctcgatgaaagcctgtgcatccactgtctgtgtggcgatactggccccctgtaa

SEQ ID NO: 12993 - DNA, 276 bp, Escherichia coli; identical to SEQ ID NO: 6180

SEQ ID NO: 12994 - DNA, 1101 bp, Escherichia coli; identical to SEQ ID NO: 7335

SEQ ID NO: 12995 - DNA, 123 bp, Escherichia coli
atgcaatgtgaatttaaaggggtcatatcagcattacccactccttatgaccaatcccagcaaatcgatatggagagtcttcgaaaactgatccgttttaatatcgaacaaaatattaggtaa

SEQ ID NO: 12996 - DNA, 1452 bp, Escherichia coli
atggccagtatcaacaccattgtgaaacgcaagcagtacctgtggctggggattgtggttgtcggtacagcctccgcgattggtggggcactgtatctgtctgatgtggacatgtccggtaacggggaaaccgtggctgaacaggagcctgtgccggatatgaccggtgtggtggatacgacctttgatgacaaggtgcgtcagcatgccaccacagagatgcaggtgacggcagcgcagatgcagaagcagtatgaggaaatccgtcgtgagctggatgttctgaacaaacagcgcggtgatgaccagcgtcgtattgaaaagctgggacaggacaatgccgccctggcagagcaggtaaaagccctgggtgctaatcccgtcacggcgaccggtgagcctgtaccgcagacgccagcctcaccgcccgggccggaaggcgaaccacagccgggaaacacccccgtatccttcccgccgcagggcagcgttgctgttccaccgccgacggcgttttatcccgggaatggtgtcacgccaccaccacaggtgacgtaccagtctgtgccggtgcctaaccggatacagcgtaaggtgtttacccgtaatgagggaaaacagggaccatcgctgccgtacattccgtcaggaagttttgcgaaagccatgctgattgaaggggcggatgccaatgcctcagtcaccggtaatgaatccacggtgccgatgcagttgcgtatcaccggcctggtggaaatgccgaacagcaagacgtatgacgcaacgggatgttttgtggggctggaagcctggggggatgtgtccagtgaacgtgccattgtacgcacccgcaatatcagttgcctgaaggacggcaaaactattgatatgccgattaaggggcatgtcagcttccggggtaaaaacggtatcaagggcgaagtggtgatgcgtaacggcaaaatcctcggctgggcatggggcgcgggatttgttgacggtatcggtcagggaatggagcgcgcctcccaaccggctgtcgggctgggtgccacagccgcttacggggctggtgatgtcctgaaaatgggtatcggtggcggcgcatcgaaagccgcacagacgctcagtgactactacatcaaacgtgccgaacagtatcacccggtgataccgattggtgcgggcaacgaagtgaccgtggtgttccaggacggcttccagctgaaaaccgtggaggaaatggcactggagcagtcacagagtacagcggaagagggtaacccggaaagcccggtgccgaatcctccctcggcagaaagccacctgaacggttttaacaccgaccagatgctgaaacagctgggcaatctgaatccgcagcagtttatgtccggagacaagaacccgctgggcggggatgccggcaaggagggcggaaatggcgggtga

SEQ ID NO: 12997 - DNA, 729 bp, Escherichia coli
atgagaaaaaataatacggcaataatattcggcggcctgtttttttcctgcagcgtgatggccgcaaacggtacgctggcccccactgtggtgccaatggtgaacggtggtcaggccagtattgccatcagcaataccagcccgaatctgtttaccgttcccggtgaccggattatcgccgtgaacagtctggatggtgccctgaccaataatgagcagaccgcctccggcggtgtggtggtggccaccgtcaacaaaaagccctttacgttcattctggaaacagagcgtggtctgaacctttccattcaggctgttccccgtgaaggcgcggggcgtaccattcagctggtcagtgacctgcgcggaaccggagaagaagccggtgcgtgggaaacgtccacgccttacgaatccctgcttgtgaccatcagccaggctgtccgtggcggaaaattacctgcaggctggtatcaggttcctgtgacaaaggaaaccctgcaggccccggcggggctgtcttcagtggcagattccgtatggacggggaatcacctgaagatggtccgctttgccgtggaaaataaaacgctgtctgccctgaatatccgggaaagtgatttctggcagccgggaacccgtgccgtgatgttcagccagcctgccagccagttactggcaggtgcgtgcatggatgtgtatgtcatccgtgacggggagggcaactga

SEQ ID NO: 12998 - DNA, 435 bp, Escherichia coli; identical to SEQ ID NO: 8357

SEQ ID NO: 12999 - DNA, 216 bp, Escherichia coli; identical to SEQ ID NO: 5123

SEQ ID NO: 13000 - DNA, 297 bp, Escherichia coli; identical to SEQ ID NO: 5319

SEQ ID NO: 13001 - DNA, 315 bp, Escherichia coli
atggatacacaacggaataccgcgcggcagtttggtgcgcagcatgtgatcgagtgcctccacaatggacttattcgccccattgatgggaatggcttccagcataaagcccatcgtggtgtcattcatgaacagaccggattcctggttgtaatcacggtacggcagcagacggctgaactgcgggaagctcatttcgcccagaacttcattggcctttgcggattcgtcaggcagtttcagtgctgtgacgagggagttaaccgcctgagtgacggcctcaagtgggttattactcatatgagtattccttag

SEQ ID NO: 13002 - DNA, 477 bp, Escherichia coli
atgcataaatcagaaaatgaaaaaatagattttattctggatgagcatgagcggatatccagaaaacagggttctttgtgtatggcactgggtaagggatttttagttatagctattctttgtggtgttgccacattctgtgtttctggcctgtatctgaaatccctgtgcctgtccgttgcctgctgttgtggggtattcagtcgtatttttaattattacagcgtaccggaggaatcacgcatggtactcagtcgtcaggaattactccggcttatgcgtctgactgaagacgtaccagatgtgagacaggaactgcttaaccgtttgttgtccggtaaaaaactgactggtcgggatgaacaggatatccggcgtctctggcaggagaaagtggatgcaatgcaggagtctgccacccgtcagcgtgaacaggatactattcggaagtttactgaagggaataaatccgaatga

SEQ ID NO: 13003 - DNA, 366 bp, Escherichia coli
atgatcccgggcggcccattcacgtttccacaatgcctgttcagcggtctgaatcagggacgccagcagttcagccggaacggtcacctggcggttttcgctcacgttgctgataatctccatcgccgcggcggaagaaataccggactcaattcgctggtcttccgggatgtcctccaggcgcgccaggacggtcctgatttcatgatcggacagggaaatatccattccgtcagcgagggcctggatctcttccggggaccagacaaccagcatcagcggcgcgtctcccggatactgcgctgccagctcccggcagagcgtttcgcatgttccgtacattctcgtctccttctcaatctttga

SEQ ID NO: 13004 - DNA, 1023 bp, Escherichia coli; identical to SEQ ID NO: 6152

SEQ ID NO: 13005 - DNA, 1332 bp, Escherichia coli
gtgtttgaagccgcctgccagtcgggatggggcggtaaaccggaagtacagaccattcgtcgtctggtgaccgaaagtgaagtggcggtggcagggaacagtaaattccgcttcgtgggggctgatgccttctcgccagatgaactgcgcactgatttgttcagcgacgacgagggtggctatgtggactgcgtggcgctcgatgccgccctgctggaaaaactccaggctgttgctgaacaccttcgggaagccgaaggctggggatggtgcgccggacgcatggagcctgtcggtgagtgccgtgaggatgccggaacataccgctgtctgccggagccggaagcggtgctgacggaggcggaagaagaacgtctgaacgaactgatgacgcgttacgacgcgctggaaaaccagtgtgaggaatctgacctgctggaagcagaaatgaagctgatgcgctgcatggcgaaggtcagggcgtggacgccggagatgcgtgccggaagcggtgtggtggtgtcctggcgttatggcaacgtgtgtgtccagcgtggtgtgcagttgcgcagcgaggatgatgcggctgacgacgctgaccgcacggaacaggtgcaggagaaagcgcccgtggaggaaatcagtctgccactgctgacgaaaatgtcttccgaacgcacgctggcagtccaggcagcactgatgcagcaaccggacaaatccctggcactgctggcatggacgctctgcctgaatgtgtttggcagcggagcgtacagtaaaccagcacaaatcagcctggaatgtaaacattattcgctgaccagcgatgcgccatcggggaaggacggtgccgcattcctggcgctgatggcagaaaaagcccgtcttgcagccctgttaccggagggatggtcacgggatatgacgacgttcctgtcactcagccaggaggtactgttatccctgctcagtttctgcaccgcgtgcagcatccacggcgttcagacccgcgagcatggtcacacgtcacgcagtccgctggactcgctggagagcgctatcggattccacatgcgcgactggtggcagccgacgaaagcaaacttcttcggacacctgcaaaagccgcagattatcgatgccctgaatgatgccggactgtccggtgctgcgcgggacgcggagaaaatgaagaaaggcgatgccgctgaacatgcagagttccacatgaaagacaaccgctgggtgcctggctggatgtgtacaccacgtccacaggcagagacggaaaccacggagtaccgtgacgaccaggcagaagccgcctga

SEQ ID NO: 13006 - DNA, 450 bp, Escherichia coli
gtgaaaaagcagaagctggccgagaaagcagcccgggaagcagagctggcggcaaaaaaagcgcaggccagacaggcgctgtccatttatctgaacctgcccacactggatgaggctgtgaacaccctgaagccctggtggccgggattatttgacggtgacacgccccggcttctggcctgcggtatccgggacgtgttactggaagacgtggcgcagcggaatatcccgctctcgcataaaaaactgcgcagggcgctgaaggccatcacccgttcagaaagctatctgtgtgccatgaaagccggtgcctgccggtatgatacggaagggtatgtgacggagcatatttctcaggaggaggaagcgtatgcggcagcgcgtctggataaaatccgccgccagaaccggataaaggcagaacttcaggccgtgcttgatgagaaataa

SEQ ID NO: 13007 - DNA, 369 bp, Escherichia coli
atgacggattcaattccatcaggttacaagccgctgacatgtgacacgctgccgggttatctctcgtccagactgaccccttcatgcgaaccgggagggttacctgaagagtggaaagtttcagaagtgggggacggaaacctgaacatggtgtttatcgttgaggggacacataaaaccatcattgtaaaacaagctctgccctggcttcgtgcagggggcgaaggatggcctttatctctgagccgtgcgggctttgagtacaacgtcttatgtcaggaagccaagtacgcgggtcacacactgattccgcaggtctatttttacgacccggaaatggcgctgtttgccaggcactgttgcaaatag

SEQ ID NO: 13008 - DNA, 192 bp, Escherichia coli
atgaatatcagcaaggaaacccgcgaaattctgcgtaattacagggccgtgattaatgcgcggcgtcgtgaaatggggcagaaaccgctcaccaccgcgcagattgttgatgaaatatgtgattttgtggtgaatcagcaggctgttttcctcggtggtcactacatccttcagggcagcaggcacaggtga

SEQ ID NO: 13009 - DNA, 297 bp, Escherichia coli; identical to SEQ ID NO: 5319

SEQ ID NO: 13010 - DNA, 192 bp, Escherichia coli; identical to SEQ ID NO: 10832

SEQ ID NO: 13011 - DNA, 423 bp, Escherichia coli
atgtactgtactgttaaagaaatcatccgcgatgtactggatacagacgtgccggacagtgaatgcgtttttgccgtggtgctgacccgtggggatgtgcgctacatagctcaggactggaacctgtcagacgatgagctggaaaccgtcatgcagcggctggacgatgcctttgagcatggtgcggatgtcagcgttgttcacgacgttgttcgtgaactgatggaggaaaagcacgccagccgtcaggtgacagtcccggcggtgatgctggaaaaagtgatggcgctggcaggcagtgaaatgaagcgcctgtatgccgtcgggagtgagaacgggggcgacggtgatgcattcgtcagggaggaacgcgaagcaatggacgttgtgttacaggcgctggacggggagcacatgtcatga

SEQ ID NO: 13012 - DNA, 747 bp, Escherichia coli
atgacaacggataacacgaacacgacacgtaacgattcactggctgcacggaccgatacctggttgcagtcgtttctggtctggtcacccggacagcgggatatcatcaaaacggtggcgctggtgctgatggtactggaccacatcaatctgatattccagctgaagcaggaatggatgtttctggccgggcgaggagcctttccgctgtttgccctggtgtgggggctgaatctgtcccgtcatgcgcatatcaggcagtcagccattaaccggttatggggctgggcagttttttcccagttcgcatattatctggccggatttccctggtatgaggggaatatcctgtttgcctttgcagtggcggcacaggtgctgacatggtgtgaaacgcgcagtgggtggcgtacagcagcggccattcttctgatggccctgtgggggcctttgtccggcaccagttacggcattgccgggctgctgatgctggcagtcagccaccggctgtaccgggcggaagacagagcggaacgtctggcgctggtcgcctgcctgctggctgttattccggcgcttaaccttgccaccagtgatgcagcggcggtggctggtcttgtgatgacggtgctgaccgttggtctggtgtcctgtgcaggaaaatcattaccccgtttctggcccggggattttttcccggtattctacgcctgtcatctggctgtgctgggcgttctggcgctgtga

SEQ ID NO: 13013 - DNA, 621 bp, Escherichia coli
atgaacgaaaacagcacgctgaacgcactgatttgtcgtcacgcccgtaacctgctgctggcgcagggctggccggaagagacggatgttgtactgtccggcagtcagtggcagtcgctgccggtacttccggcagacggaacgcaggtgtctttcccgtatgccggagaatggctgaccgaagacgaaatcagggctgttcttgatgcggtgcacgatgcggtacgaagcatctgttaccaggtggcagaagatgcgcggcgtatccgtgcggcgctgaccaccaccggtcagacgttgctgacccgccagacgcgccgctttcgcctggtcgtgaaggaaagcgatcacccctgctggctcgatgaagatgacgaaaacctgcccgtggtgctcgatgccatcgtgaaccggggagcacgtttttcgtcggtggaaatgtatctggtcagtgagtgtattgagcatatcctgtccagtgggctggcctgcgatgtgctgcgtataccggatgaaccgccccgccgctggtttgaccgtggtgttctgcgggaggtggtccgggaagcccggaccgaaatccgcagcatggcggatgccctggcaaaaatccggaaatga

SEQ ID NO: 13014 - DNA, 423 bp, Escherichia coli
atgtactgtactgttaaagaaattatccgcgaagtgctggatacagacgtgccggacagtgaatgcgtttttgccgtagtgctgacccgtggggatgtgcgtcacatagcccaggactggagtctgacagacgatgagctggaaaccgtcatgcagcggctggacgatgcctttgaatatggtgcggatgtcagcgttgttcacggcgttgttcgtgaactgatggaagaaaagcgcgccagccgtcaggtgacagtcccggcggtgatgctggaaaaagtgatggcgctggcaggcagtgaaatgaagcgcctgtatgccgtcgggagtgagaacgggggcgacggtgacgcattcgtcagggaagaacgtgagattatgcgggtgatgcgtcaggcgctggacggggagacgatgtcatga

SEQ ID NO: 13015 - DNA, 282 bp, Escherichia coli
atgcttcgcctggctcgcgctgtgatccctgctgctgttctgatgatgttcttcccgcaactggcaatggcagcacagggccaggacctgatggcaagcggtaacaccacggttaaggcgaccttcggtaaggactccagtgttgttaaatgggttgttctggctgaagttctggtcggtgcggtcatgtacatgatgaccaaaaacgtcaagttcctggccggttttgccatcatctctgtatttattgctgtgggtatggccgtcgttggcctgaaataa

SEQ ID NO: 13016 - DNA, 819 bp, Escherichia coli; identical to SEQ ID NO: 6059

SEQ ID NO: 13017 - DNA, 465 bp, Escherichia coli
atggcgctgatggcagaaaaagcccgtcttgctgccctgttaccggagggatggtcacgagacatgacgacattcctgtcactcagtcaggaggtgctgttgtccctgctcagtttctgcaccgcatgcagccttaacggtgtccagacccgtgagtgtggtcacacgtcacgcagtccgcttgactcgctggaaaccgctatcggattccacatgcgcgactggtggcagccgacaaaagcaaacttcttcggacacctgaaaaagccgcagattatcgcagccctgaatgaggcaggactgtccggtgctgcacgggatgcagagaagatgaagaaaggtgatgcggctgaacatgcagagcaccatatgaaagacaactgctgggtgcctggctggatgtgtgcaccacatccacagacggataccactgaacgcaccgataacctggctgatgccgcctga

SEQ ID NO: 13018 - DNA, 255 bp, Escherichia coli
atgcctgtctgcccgcgccgggaaaaaacgcgcgccggtggcgctgaaaggggccgcgctcacgcgccgcccctttcattacgcggacgttctgatgggggcttctgtttcttcatgcctgtcatttgtctgttactgatgttgttgttcctgctactgctactgctactgctactgctactgctactgctactgctactgctactgctactgctactgctactgctactgttcttctttttcctgctgctctga

SEQ ID NO: 13019 - DNA, 339 bp, Escherichia coli
atgtgtgatgcggtggaaatcaacagcgggctggtccggtatctgcgggaaaattttaacggtgtcagggttcagtgtggcgacttcatggaatggctgccggtgcagtattacagccgggttatcatgaatccgccgttcagccacgggcaggatatccggcatatcctgcgggccttttccctgttgcgtccgggtggcgtgctggtcgccgtctgtctcaacggaccacgccagcaggagaagctgttaccgttttctgacgtccgcgaggagctgccgcgcggcacgtttgcttataccgatgtcccgacgatgattattcgtctgcgtgcctga

SEQ ID NO: 13020 - DNA, 174 bp, Escherichia coli
gtgctggttctggtgaatgccggtggtgagccgtttgcggtggttcaggtacagcggcggtttgcaccggaagccgtcagccattcactggcactggcggcgtcactggacgcgcaggggtacagcgtcagtgacatcatccatatcctgatggcggaaggaggtcaggcatga

SEQ ID NO: 13021 - DNA, 453 bp, Escherichia coli
gtggcaaacctgcaggtcgccacgtcggaaacctggcgtgacaaacagacaggggagatgcgggagcagacagaatggcatcgcgtggtgctgttcggcaagctcgcggaagtggctggcgaatatctgcgcaagggcgcgcaggtctacatcgaaggtcagcttcgcacccgtagctgggaagataacggtatcacccgttacgtcaccgaaattcttgttaagaccacaggcaccatgcagatgctgggacgtgccgcaggtgctcagactcagccggaagaggggcaacagttcagcggtcagcctcagccggaaccacagtcggaggccggtacgaaaaaaggtggcgcaaaaacgaaaggccgtggacgtaaggccgcgcagcccgagcctcagccgcaaccgccggagggggaggattacgggttttcagacgatatcccgttctga

SEQ ID NO: 13022 - DNA, 141 bp, Escherichia coli; identical to SEQ ID NO: 11045

SEQ ID NO: 13023 - DNA, 246 bp, Escherichia coli; identical to SEQ ID NO: 4533

SEQ ID NO: 13024 - DNA, 432 bp, Escherichia coli; identical to SEQ ID NO: 8375

SEQ ID NO: 13025 - DNA, 339 bp, Escherichia coli
atgtgtgatgcggtggagattaacagcgggctggtccggtatctgcgggataattttaacggtgtcagggttcagtgtggcgacttcatggaatggcagccggtgcagtattacagccggattatcatgaatccgccgttcagtcacgggcaggatatccggcatatcctgcgggctttttccctgttgcgtccgggtggtgtgctggttgccgtctgtctgaacgggccgcgccagcaggagaagctgttaccgttttctgatgtccgcgaggtgctgccgtgcggcacatttgcttatacccgtgttccgacgatgattattcgtctgcgtgcctga

SEQ ID NO: 13026 - DNA, 438 bp, Escherichia coli
atgccgtttgacctgctgacggttttgccgacccgcctggatattgaagtgaatggctttaacggcggtgttctgaacggtgttccttctgcatatcactggtatacagaacggtatggcgtgaagtggccttgtgggtatgacctgaatatcagcagtcagggggaaaacttcattcaggtagatttcgacacgccgtggtgtcagccggaaagcgacgttgttgcagaattaagccgccgtttcggctgcacgctggagcactggtacgccgaacagggctgcaatttctgtggctggcagttgtatgagcgcggagagcttgttgatgtgctgtggggggaactggaatggtcttccccgacagatgacgatgagctgccggaagtcaccggacctgcgtggatagtcgacaatgtggcgcattatggcggatga

SEQ ID NO: 13027 - DNA, 303 bp, Escherichia coli; identical to SEQ ID NO: 5063

SEQ ID NO: 13028 - DNA, 357 bp, Escherichia coli
gtggtgctgttcggcaagctcgcggaagtggcaggtgaatatctgcgtaagggcgcgcaggtctacattgaaggccagcttcgcacccgtagctgggaagataacggtattacccgttacgtcaccgaaatccttgttaaaaccacgggcaccatgcagatgctggggagtgcaccacagcagaacgctcaggtgcaaccgcagcctcagcagaatggtcagtcacagagtgctgacgcgacgaaaaaagggagcgcgaaaacgaaaggccgtggacgtaaggctgcgcagccggagcctcagccgcaaccaccggagggggaggattacgggttttcagacgatatcccgttctga

SEQ ID NO: 13029 - DNA, 294 bp, Escherichia coli; identical to SEQ ID NO: 7755

SEQ ID NO: 13030 - DNA, 246 bp, Escherichia coli; identical to SEQ ID NO: 5353

SEQ ID NO: 13031 - DNA, 246 bp, Escherichia coli
atgcaactggtcaccgcattctgggcaacactggcactgatgtatgtctcgctggcagcgatcaccgggaaatatccggtgcgacccggaaaaatgaaatgtgtccgggtgggaaccgcagatgaacatctgaaggaagtttatacggaagatacttctctgtcggaaaaaatcaggaaatgccatgtttatttccctgatgacagggcaaacagaaacaacggagataaaaatgaacatgcgtaa

SEQ ID NO: 13032 - DNA, 222 bp, Escherichia coli
atgattgccaccgggaactatccgcaggctgtgatggacaatgttctggagaatctgaatcaggcacagcaacagattgccattttccagagccaggtacaggtccagcaggatgcgctgctggttgtcgaacgtcagatgagctacatgcgccagcagctttccgcccgtatgctcagccgttaccagaacaactatcacttcggagggaattcactgtga

SEQ ID NO: 13033 - DNA, 273 bp, Escherichia coli
atggactcagccagttcgctgacggactccacagaatacggcaccgtgcgcacattcagcggtgatttaatcagtgaggccagcggcacgctcacttcctccgtctgcgccagcagggcagacaggactgtttcctgcgtttttgcaggtttacggctggatttacgctccgtttttgccttagactctgtaactgacatagttagtacctcccaaaacggtaataatgattgtctgccggacgtgtccccgtccggcacctctcttacttaa

SEQ ID NO: 13034 - DNA, 165 bp, Escherichia coli
atgcaatctcaggtaaatgaacaaactaatgaagatttgcatctggattttgataatatggattttcatcgtactaatcctgcaacagggttacctatgtcaggtattggtgtggatatcggtggtaattcatatggttatagttcaaaacgatatgatgagtga

SEQ ID NO: 13035 - DNA, 159 bp, Escherichia coli
atgaatggcctgctgtgccggcgtgtgcagcccggttttctgcagactgatagcggtttccagcgatgtctcaccggcccgcgcctttatctgctcagaaaccaccgtaaaggagggatggcgggcaagtttttccgcagtacgggtttcatccagtga

SEQ ID NO: 13036 - DNA, 420 bp, Escherichia coli
atggtcataatcctgaccgactccctgctttcccgctttaataaactgaatgtgccactctatcttcatcccgggttaccgcttaaaagcgtacagcaggcctacttcacgggcttcagcgcagaggtcaactccaggctttctatgtttgcctggggctggcatcacgaagcggggatccatttgttgcggctgatgttatcgggtgcatttgataaatatccccacttgcaggtaatctgtggccactggggtgagatgttacccttctggctccagcgtcttgatgacagcctgccactggctgcaacgggtctgtcacgcacgctaacgagaaccttccaggaacacgtttacgttaccccgtcatatgctaacactgccgcacttccagtttatctacgcgttaatgggtgctga

SEQ ID NO: 13037 - DNA, 900 bp, Escherichia coli
atgaataacgctctttataaccagattcgcatcttccagagcattgcgcgggagggcaatatttcggcagccgcaaggaaactggaaattacgcctccctccgtcagcaatgcactaaagctgctggaagagtatatcggtcatccgctttttgtgcgtacgacccgccgtatagagctgacggaaaccggtcaattattgctggaacagaccgctgcggcggtggagtcgctggaaaactcacttgaaagcattcgcgaccagcatcaggagccctctgggatggtgcgaattacgctctcgcgttttgcctacctgttaattcttaagcctgcgatggcagaattctgtcagcaatatccgggtatacagttagaaatttcggtctacgacggtaccgtgaatatcatcaaagagcgttttgatctggggatccgttttggcgatattcttgagggaggggtggtggcccgaccgttaatgaaaccgtttcgagaaggattatatgcatcctcagcgtatctctcccgacatggaacgcctgaagtgccggcagatctctgtcatcaccagctgattggttaccgttttatcaccaacaaccgcatccttccgctgctcctgaacgatcgcggtgagcagttgaccgttgagatgccggggcagttaatcagcaacgatattgacgttatggcagacgggatccgtaacgggctgggaattgggcgcttgtttgagcctgtctggcagttacagccggacagggagcgctttattccggtgatggagagctactggaaaacctacccgccagtgtatctctattaccccaaaaacgcgggtaaaacgaaaagagtgaaggccctgattgattttctgatatccactacggggcgataa

SEQ ID NO: 13038 - DNA, 1593 bp, Escherichia coli
atggctcgactctttaccccttcagaatcaaagtactacctgatggcgctggatgcaggcaccggaagtattcgggctgtgatattcgacctggaaggcaatcaaatagcagtgggacaggcggagtggcggcatctggcagtaccggacgttcctggttctatggaatttgatctcaacaaaaactggcaactggcgtgtgagtgtatgcgccaggcgctgcacaacgccggcatagccccggagtatatcgctgccgtttcggcatgttcgatgcgcgaaggcattgttttatataacaatgaaggaacaccgatctgggcctgcgccaatgtggatgccagagcggcgcgcgaagttagcgaacttaaagaactgcacaacaatacctttgaaaacgaagtttatcgcgccaccggacaaacgctggctttaagcgctattcccagattactttggctggcgcaccatcgttctgatatctaccgacaggcgtcgaccatcaccatgatcagcgactggctggcctatatgctcagcggcgaactggcggtggatccctctaacgctggcaccacgggacttcttgacctaaccacccgtgactggaaacctgcattgctggatatggccggactgcgggccgatattctttctcctgtcaaagaaaccggcacattgctgggcgtggtaagttcacaagcggcggaactctgcggtctgaaggcgggcactccggtggtcgttggaggaggcgacgtgcaacttggttgcctggggttaggcgttgtgcgtccggcacaaaccgctgttcttggcggcacattctggcagcaagttgtaaacttagccgcgccggtgacagacccagaaatgaacgtgcgcgttaatcctcatgttattcctggcatggtacaagctgaatctataagcttttttaccggactcaccatgcgctggttccgcgatgctttctgtgccgaagaaaaactgattgccgaacgtttaggcatcgacacctatacgctgctggaagagatggcaagtcgggtgccgcctgggtcgtggggcgtaatgccgatattctccgacagaatgcgctttaaaacctggtatcacgctgcgccttcctttattaatttgtctattgatccggataaatgtaacaaagcgacgttgttccgtgcgctggaagaaaatgcggcgattgtatcagcgtgtaatttgcaacaaatcgctgatttctcgaatattcatccttcatcgttagtctttgcaggcggaggttcaaaagggaaattatggagtcaaattctcgctgatgtctcgggattacccgtcaatattccggtggtcaaagaagccaccgcattaggatgtgccattgcagctggcgtcggtgccggaattttttcatcaatggcagaaaccggagaacgcctggttcgctgggaacggacgcacacaccagacccggaaaagcatgaactttatcaggattcacgggataagtggcaggcagtttatcaggatcagctggggctggttgatcatggactgacgacgtcgttatggaaagcgcctgggttatag

SEQ ID NO: 13039 - DNA, 405 bp, Escherichia coli
atgctgaagtttatccagaacaaccgtgaaatcacggcactgctggcggtggtgttgctgtttgtattacccggttttctcgaccgccagtatttaagtatgcaaacgctgaccatggtttatagcagcgcgcaaatcctgatcctgctggcaatgggcgcgacgctggtgatgctcacgcgcaatatcgatgtttcggtaggttcgattaccggaatgtgcgcggtgctattggggatgttactgaacgcggggtattcactacctgttgcttgtgtcgcgactttactgcttggtttgctcgcgggattttttaacggtgtcctggtcgcgtggctaaagatccctgccattgtcgccacccttggcacgttagggttgtacagaggcatcatgttgctgtga

SEQ ID NO: 13040 - DNA, 459 bp, Escherichia coli
atgacaatcacggacctggtactgattcttttcatcgccgcactcctggccttcgcgatctacgatcagttcatcatgccccgccgtaacggccccactctgctggcaattcctttgctccggcgtggtcgcatcgatagcgttatcttcgtcggattgattgtcattcttatctataacaacgtcacgaatcatggcgcgctaataacaacatggttattaagtgcactggctctgatgggtttttatatattctggatccgcgttccgaagatcatctttaaacaaaaaggttttttcttcgccaatgtctggattgaatatagccgaatcaaagcgatgaacttgtcggaagatggcgtgttggtgatgcaattagaacagcgtcggctgttaatccgcgttcgaaatatcgacgatctggaaaaaatttataagcttctcgtttcaactcaataa

SEQ ID NO: 13041 - DNA, 1494 bp, Escherichia coli
atggcacaagtcattaatacaaacagcctgtcgctgttgacccagaataacctgaataaatctcagtcttctctgagctccgccattgaacgtctctcttctagcctgcgtattaacagtgctaaagatgacgcagcaggtcaggcgattgctaaccgttttacggcaaatattaaaggtctgactcaggcttcccgtaacgcgaatgatggtatttctgttgcgcagaccactgaaggtgcgctgaatgaaattaacaacaacctgcagcgtattcgtgaactttctgttcaggcaactaacggtactaactctgacagtgacctgacctccatccagtccgaaatccagcaacgtctgagtgaaattgaccgtgtttctggtcagactcagtttaacggcgttaaagtgctggcttctgatcaggatatgactattcaggttggtgcaaacgacggcgaaacaattactattaaactgcaggaaattaattccgacacactgggattatctggttttggtattaaagatcctactaaattaaaagccgcaacagctgaaacaacctattttggatcgacagttaagcttgctgacgctaatacacttgatgcagatattacagctacagttaaaggcactacgactccgggcaaacgtgacggtaatattatgtctgatgctaacggtaagttgtacgttaaagttgccggttcagataaatcccctgaaaatggttattatgaagttactgtggaggatgatccgacatctcctgatgcaggtaagctgaagctgggggctctagcgggtacccagcctcaagcaggtaatttaaaggaagtcacaacggtgaaagggaagggggctattgatgttcagttgggtactgataccgcaaccgcttctatcacaggtgcaaaactctttaagttagaagacgctaatggcaaagatactggttcatttgcgttgattggtgatgacggtaaacagtatgcagcgaatgttgatcagaaaacaggtgcagtttccgttaaaacaatgtcttacactgatgctgacggtgtcaaacacgacaatgttaaagttgaactgggtggaagcgatggcaaaaccgaagttgtaactgcaaccgatggcaaaacttacagtgttagtgatttacaaggtaagagcctgaaaactgattctattgcagcaatttctacgcagaaaacagaagatcctttggctgctatcgataaagcactgtctcaggttgactcgttgcgttctaacctaggtgcaattcaaaaccgtttcgactctgccatcaccaaccttggcaacaccgtaaacaacctgtcttctgcccgtagccgtatcgaagatgctgactacgcgaccgaagtgtctaacatgtctcgtgcgcagatcctgcaacaagcaggtacttctgttctggcacaggctaaccagaccacgcagaacgtactgtctctgctgcgttaa

SEQ ID NO: 13042 - DNA, 1413 bp, Escherichia coli
atggcttcatttacatctcttggcgttggttcgaatctgccgctggatacattgctaaacaacctgaccatcgctgaaaaaaaacgcttaaacccaattactcagcaacagagtgacaataccgcacgtctgacagcctatggcacattaaaaagtgcattagaaaaattccagactgcaaatactgcgttaaataaagccgatctgttcaaaagcactaccgttaccagtagcaatgaagaccttaaagtttccaccgaagcaggtgctgcccccggtatctataccatcagcgtaacccaactggcgcaggcgcaatctttacgaactgattccccgacaatcattgcatcaacaaaagatgcactgggtgatgagtcatcagatacacgcacaataaaaattacccaagacggccgtaaagagccgctggaaatcaagctcaataaagatcagacgtcattgggtgagatcagcaaagccattaacgatgccgatagtggaatttccgctagtatcgttaaagtcaaagatggtgactatcaattggtattgaccgccagtgaaggtctggccaataaaatgaccatatctgttgagggtgacagtaaattaaatgatctgctggcttatgacagcaagaccaacaccgggaatatgaaggaactggttaacgcgcaaaatgcacagctaaacgttaacggtatcgatattgaacgttcaagtaacaaaattaccgatgctcctcagggagtgactctcgatttgaccaaaaaagtcactgacgtccgggtcacggtgacaaaaagcaacgataaagcaaccgaagcaattaaaggctgggtggattcatataactccctcattgacacctttaacaccctgacaaaatataaagaagtagacccaggtgctgaagcacaagataaaaataatggtgcacttctcggagacagcgttgtacgtacaattcaaagcggcatccgcgcacaatttgcaaacggtgccagcgacggtgccttcaaaacattaaacgagatcgggattaagcaggacggcacgacgggtaagctgaaaattgatgatgataaactcaaaaaagtcctgaatgaaaatacagcatccgtacgtgaattgctggtaggcgatggtaaagaaacaggaattaccaccaaaattaccaccgaggtaaaaggttaccttgccgatgatggcattattgatagcgcacaggacagtattaacgccacactgaaaaaactgaccaaacagtatctatccgtcagtgccagcattgatgacaccgtggcgcgttacactgcacagtttacgcaattagataccatgatgagcaaactgaataacaccagtacctatctcagccaacaatttactgcaatgagtaattcctga

SEQ ID NO: 13043 - DNA, 414 bp, Escherichia coli
atgaaaaaactcgcaattgcaggtgcgctcatgttgctggcgggctgtgccgaagtcgaaaactataacaatgtcgtgaaaacccccgcgccggactggctggcgggctactggcagaccaaagggccgcaacgtgcgttggtcagtccggaagcgataggcagcctcattgtcactaaagagggcgataccctggattgccgtcagtggcagcgggtgattgccgtgccgggtaagttgacattgatgtctgatgatctcactaacgttaccgtaaaacgtgagctgtacgaggttgagcgtgacggtaacaccattgagtacgatggtatgacgatggagcgtgtggatcgcccgacggcagagtgtgccgccgcgctggataaagcgccgttaccgacgccactgccgtaa

SEQ ID NO: 13044 - DNA, 531 bp, Escherichia coli
atgaaccgattctcaaaaactcaaatttatttacattggataacgctgcttttcgttgcaataacctatgccgcgatggaactccgtggctggtttcctaaaggtagtagtacttatctgctgatgcgagaaacacattacaatgcgggtatattcgtttgggtgttaatgttttcacgcctgattataaaacaccgttatagtgatccttctattgtaccaccgccacctgcctggcaaatgaaagcggcttcgctaatgcacatcatgctttatataaccttccttgcacttcctctgctggggattgctttaatggcttacagtggaaaatcgtggagtttccttggtttcaatgtgtctccctttgttaccccaaacagcgaaattaaagcactgataaaaaatattcacgaaacctgggcaaatataggttactttttaatcgcagctcacgctggcgcagcactctttcatcactacattcagaaagataatactctgttacgaatgatgcctcgccgcaaataa

SEQ ID NO: 13045 - DNA, 1236 bp, Escherichia coli
atgatcaaagaaattttctccgatggcattttttcgctatttaataaaatatgttacttcggttttaaaacacttgcaataattctgattactcgttccttaggagaagatgtaggcggagagttcatttttttagttggttttctcgaagtccttcgggtggttactgattttggtgtggatctgtttgttataaaaaaatataatgattctacagataaaataaaactattaaatgtaacgtttgcacaaaaaattctttctggagtaattgttttactactgttttgtttgtattcttttgttcagggttatcaatataatgtctatattcctattgtgttagccttacctgttgctttattttttaatttctcaaatagctattttcaatctctcaattccaataaatctctcacgtttccgatcgcaattgcatctattgcaacgtgtacgatcttcgctattcagtattttttaaacgttaaatttaacgcatgggattacctgtgtgttgaactattattcgtatcgctggttacactaaaactattcgttagtgtcaagtttaggtttattagaacgtcagcttttgatgtgctaatgtcaattctttctttatataaatatacattaagtataggtcttacagctgttgttgtaattatttatagccgtatagataatttttatctcaagacatttgccccaggggatcttgcagcatatggccagatatttaggatggttgatccactggttatggtttcttctgtattttctacagttgcctatgcaagattttgccgaattaacttacaagaaaaaaatgcttttactaaggtgtttcagttcctgttatgtattgtggcatatggcgtgctgagttcattagtttatttctttataataaaatacctgggtcattttgtattgatttctaatgttaataatgatttcttgataatgatgttcttgattgttgcatgtgtgaaatgtatcaatggtggtacaactgcaataattcagtcacaggggttttataaagtgggtttgtatgtttcgtatgtttgcattttgacatcgataccaactatgtatttcttaataatgaagtacggtgttaaaggtgctgctatgacgattctgcttgtagagtgtattagtttcatattacttctctgcagcttttttatgataaaaaagatgcgtcctaaaaaaacattcgaaatgtaa

SEQ ID NO: 13046 - DNA, 1332 bp, Escherichia coli
atgcataagcaatattattcattattgtgcaataaaatacagtttaaacatctggctatatatttttctgtatttctttcactatcctcatgtttcttgtggggaggggcggatacatttgtatcgcaagtgtatattgatattttagccactatatctacagcgctattagttgttttgatgttctattattatattaatagagttcgctatttatcactaaccttactttttgcattcgttttttctttgattattggtttgccatcgatttatctttactattttaaaaacgcaaatcatgggtttgaaataatttgtatctgggggatgttgatcaattccatcctttacttgcaaacaacagagactgtcataaaagaagaaaaaagatatttaactagtttattttatattttgttttctattgttgcactgtgtcaattatacaaaatattaatttatcttatgtttatattgaattcaggagaagggcatttagcaatttatactgaaagcgaagaattgctatcccaagttccattttttattcgtgctattagtggttttgcagttgtaatgtcattgtccactttttattttaaaacaccgacctacattaaagttattgcatttgttttacttgcatctgatttagctattggaatacgtaataagtttttcttttcagtgatttgtatttttatactatatatgtactctaatgagtatagagtaagaaatttatttaagcaactctcaaaaccaatatttctcatcgccggttttttatgcttctcgatggtatcgtatttccgtgaagggtaccaaatcgattttatgatttatattggcattgttttagattcgctatcctctactcttggggggatgcagaatttgtttgatatgcaatcatcaggatgggatcaacttcatcccgctgtggtattcacacaagtattaccgctaagcggtcttggttttcttgatgatcaacaaatcgcaaaagatttttcaataattgttttaggtgatgtatcctctggtattgcgttgtcatcttcaggattgttagagtcatcgttgctgagtctaaacttgggagtgattatttatttactgtatttatcaggggtgatgctttttattaaatggggactaaataatcaacgaataataataaactttgttgccatctccatgatatctggatttttttatgctgttcgtggtgaactgattttgccattggcttttcttctaaaatcattgccgattgttcttatatctccattacttgttaaaaataaaatttatcatggtcagtaa

SEQ ID NO: 13047 - DNA, 1422 bp, Escherichia coli
atgaatattaccaatgatgtaattaaaaatagcggaattgcatttggtacaagtggtgctcgtggattagtgaaagattttacacccaacgtgtgtgctgcattcacttatgcttttatcgatgtaatgatgaaggatttttcttttaaagaggttgcgctcgcaatagataatcgcccaagcagctatgctatggcacaagcttgcgcagcagcattgttggaatgtagtattaaacctatttactacggtgtaattccaactccagctttggcaaatcaagcgattgccgatgggattcctgcaataatggttactggaagtcatattccatttgatagaaatggtttgaaattctatcgtccagacggggaaatttcaaaagaaaatgagaacagcattatacatgctgaaaaagagtatcctgatgtaactgtattgccagaattacaatgttcaaagcgtgccgctgatacttatatcgagagaaacacttcaattttttcaaatatatttaaaggtaaacgtatcgggatttatgaacattcaagtgcgggacgggatctttattcagaaatattcagtaagcttggtgctgaagttgtaagtattggtagaagtgatgagtttgtgcctattgatactgaagcagtatcaaaagaagatgaagaaaaagctttacactggtcatctgagtatgacctcgatatgattttttctaccgatggtgatggcgatcgtcctttggttgctgacgaaaatggcgtttggttacggggtgatatattaggactattttgctcaaaggcaatgaatattgaagcggtagctgtacctgtaagttgtaatacggttattcagacttgcgggtggtttaatcatgtaacgctgactaaaattggttcaccatacgtcatttcagcgtttgattctctgaataatagttttgatagggttgcagggtttgaggctaacggtgggtatcttttaggtagcgatgtaaattataacagcggtatgattaaagcgcttccaacaagagatgctgttttgcctgctttaatggtactggcactggctataaaaaataatgtgactatttcaaaactcttggcggagttgccaccacgatttacctactcaaatagagttcaaaattttgcaacaagcaaaagcaaaagcattattgcgtcagctcaagaaaatcctcaagaatttatcgaaagaataggctttgtcgatcttcatgtacaatcggtggatacaattgacgggttaagattgacactaagtgatggttcaataatccatttgcgaccgtcaggcaacgcacctgaattgcgatgctatgcagaagcagataacataataaaagctgaaaaattagtgttagaagttttgcataaagttactcttttgtaa

SEQ ID NO: 13048 - DNA, 1416 bp, Escherichia coli
atgattatcccaattattatggccggtggttctggtactcgcttatggcctctttcgcgttcgttatacccgaaacaatttttatcattgattaatgaaaatagtttgctccaggaaacgttgaagagacttgatggattaaattgtttgcctcctgtcattgttagcaataatgagcatagatttattgttgctgaacaattgcgacagttcggtgtggatgacttccagattattctagaacctgtaggtagaaatactgcgcccgccgttgcgctggctgctctaaagtctctagaactccatggcgatcatcatatgctggttcttgctgctgaccatgctattcaggatattgaagccttccatgcagctgttttagctgcagaacaagagtccgttgacaataagttagtgacttttggcatcgtcccgaccaaacctgaaactgggtatggctatattaaaaagggcgaacaagttaaaaactctgtatttaaagtaaattctttcgtcgaaaaacctgatttagaaacggctaaaaattatctcgaacaaaaatgctatttgtggaatagtggtatgttcatgttcaaggcgagcgtatatttagatgaattgaaaaaatttcgccctgatattttagcagcgtgtaaagagtcgctttccagtgctagtactgatctagattttatcagattaaattctgatgtctttgcagaatgtcccgatgagtcaattgattatgcggtaatggaaaaaactcaggattgtgtagttattccacttgatgctgactggagtgacatcggttcatggacatcactttgggaaatatcagagaaagatgaacatgaaaacgtatcgtatggcgatgtaattaactataacagcaggaacaactacatttactctgaaggttcactgatcagcactgtaggagttaataaccttattatagttcaaactaaagatgcgctcctggtagcacagcaagacaacgtacaagacataaagaagattgtcgaaattcttaaaaagcaaaaacgtagcgaacatatatcccatcgcgaagtctatcgtccttggggacgttatgattctgtagaacgtggcgaccgttatcaggtaaagcgtattaccgttaagcctggtgaatgtctctcaacacaaatgcatcatcatcgagctgagcattgggtggttgtcgctggtactgcaaaggtgacttgcggcgaacgcacttttttcgtcactgaaaatgagtcaactttcataccaattggcacagttcataccttggaaaatccaggaaagataccattagaagtaattgagattcagtcgggtgtatatctaggtgatgatgatattgtgcgcctaagtgataaatatggtcgtgttgaggataaataa

SEQ ID NO: 13049 - DNA, 1212 bp, Escherichia coli
atgagtaatattgatataaataagaaacagatattagttttgactccacggttcccgtttcctgtcattggtggggatcgattacgtatctataagatctgtaaagaactgtctaagcattatgatcttacgttgctgagtctgtgtgataaacgcgaagagctcaactatgaatatgatcgtgaagtttttagtagtgttcacagagtatatctttcaaagaaaaaatctattttaaatgtcatattctctttgttttcaaatactcccctacagattgggtattataaatctaaagaatttgaagataaacttaagcagttattacctgaacattctgcaactctttcacatttgataagggttggtgattatgtgaaagagaataaagatataaattttttagagatgaccgatgccatttcacttaattataaacgagtaaaggaaaaagcatctttattgagtttaaaaacatttgtatattcttttgaacaaaaaagactcgaacgatatgagcgaactataaataacaagttcagcttgactactttggtatcacaggttgactccgattatttatatccagaccgtccgaataatgtattagtctgtggaaatggtgttgatgccgttagcttacctttttcagaacgaaaaatagctaaagataaaaagataacccttgtatttataggtaatttatattctttgcaaaatatggatggtgtgagatggttcaccaaggaagttttaccatttcttaacaagcatggtaattttgaatttaaggtcatcggacgtattacagataaagataagagttggttagaaagccagcctggcgttgttgtcacaggtgaagttgatagcataacttatgcagcagctgatgggcatattggtgtatgtcctattagattaggggcaggtatccaaaataaggtacttgaatatatggcgttgggattaccttgtatctcttctactgtaggctttgaaggctttgaaggcttgggagcagaggagggtaaggagatttatgttgccaatacaaaagaagaatatttacgtgtattaaattattttataacaaatctggataaatataccgaaacagcattagttgcgaaaaagtttatcggtgagaatttttcatgggaagctaaattgagcccatatatccagaaaattaaggagtctgttaaataa

SEQ ID NO: 13050 - DNA, 1005 bp, Escherichia coli
atgaaagtaattgtaaataatttttttgatggtattttgaaaagaggaataccgatctatacttctgaacttgtgcaaaagttaagagacaataatgttcaggttatttatgttgcatgtccaaaagcattccataagctgccttcatggtttctgaatgttctttttataatagtagagcagcttttaataccaattatgggtatattttatagaactaagtataatatatatccctataatagtagttccatcattgacttgttattaggtaaggcaattgttataattcatgacttcattagtattaagaaaaataaacgaaatcttgctgccatttatgtgaaagtctgtatttatttttcatcttttttagcaaagaaagtaatatttatttctcaaagcactcagcgagtatctaagagaatatcgctatttaagtgtatagaatctatcctgctcccaaatccatttttctcatttgagaaaattgctaatgttaccgaaataaaagatcttggatatttacttctagtttcaggtttaggggataataaggatctaggcacagctctggactattatttttcaatcccaagggaagaaagaataccattaaaaatattaggttgtgggaatggtattagcaaggttaacgacttaattgatgggcgggatacagataaagaaattgaaattattggttttgtttctttagaggaagtcgtcaaactatattgtaattctaaaattgtttgggctcattcgcttgccgaggggtatggaaggactttagctgaagcaaaactcacatgcaaaaatgttatatgcacacggatctctgctttccgcgaacaaaaggattcgaatattttcttttatacttactattctgagtattatgaagtctattcatacttggtagataattcacccagtgtcgaaaggaaagctctgcatgaacatattttatttgaaaatgaattgagaaagatttatgagtaa

SEQ ID NO: 13051 - DNA, 3318 bp, Escherichia coli
atgagcaaacaatcacagcatgtattaattgccctgccccacccgctgcttcacctggtcagtttaggtttagtctcgtttatctttacccttttctcgcttgagctttcgcagtttggcacccaactcgccccactgtggttcccgacgtccatcatgatggtggcgttttatcgccatgccgggcgtatgtggccggggattgcgctgagctgctcactgggaaatatcgccgcatccatcctgcttttttccaccagctcgctgaacatgacctggacgaccatcaatattgttgaagccgtggtcggggcagtgctactgcgtaaattgctgccgtggtataacccattgcaaaatctggctgactggctgcgtctggcactcggcagcgccattgttccgcctctgttggggggtgttctggttatcctgctgacgcccggagacgatcctctcagggcatttttgatatgggtactgtcagaatccatcggcgcactggcactggtgccgctggggttgttatttaaaccacactatctgctgcgccatcgcaacccacggttgctttttgagtcgctgctcacgttagccatcacactgacgttaagctggctttcgatgctgtatctgccgtggccttttactttcattattgtgctgttgatgtggagcgccgtgcgcctgccacgaatggaagcctttttgatcttccttaccacggtgatgatggtgtcactgatgatggccgcggatccctccctgcttgctacgccgcgtacatacctgatgagccatatgccgtggctaccgtttttgctgatcctgctgcccgccaacatcatgaccatggtgatgtatgcctttcgtgcggaacgcaaacacatttccgaaagcgaaacccgctttcggaacgcgatggaatattccgctatcggtatggcgttagtgggcaccgagggacaatggctgcaatccaacaaagcactctgccagtttctcggttacagtcaggaagagctgcgcggactcacctttcagcaactgacctggccggaggatctcaataaagatctgcaacaggttgaaaagctgatcagcggtgaaataaacacctattcaatggaaaaacgctactacaaccgcaatggcgatgttgtctgggcgttgcttgccgtctcactggtgcgccacacggatggcacgccgctctattttatcgctcagattgaagacattaacgagctaaaacgcaccgaacaggtgaatcagcaactgatggagcgcatcacgctggctaacgaagcgggcgggattggcatctgggagtgggagcttaagccgaatatttttagctgggataagcggatgttcgagctgtatgaaattcctccgcatatcaaaccgaactggcaggtgtggtacgagtgcgtgctgccggaagatcgccagcatgccgaaaaagtgattcgtgattcgttgcaatcacgctctccctttaaactggaatttcgcattaccgtgaaagacggcattcgccatatccgcgccctcgctaaccgggtactgaataaagaaggcgaagtcgaacgcctgctcggcattaatatggatatgaccgaggtaaaacagcttaacgaggcattgtttcaggaaaaagagcgcctgcacattacgctggattccatcggcgaagccgtggtctgtattgatatggcaatgaaaattacctttatgaatccggtggcggagaagatgagcggctggacgcaggaagaagcgttaggtgttccactcctgacggtgttgcatattacttttggcgacaacggaccattaatggagaacatttacagtgccgacacctcacgttccgcgattgaacaagatgtggtgttgcactgccgaagcggcggcagctacgacgtgcattacagtattacgccgttaagtactctggacggcagcaatattggttcggttctggtgattcaggacgtcaccgaatcgcgcaaaatgctgcgccagctgagctacagcgcctcccatgatgcactgacgcatctcgccaatcgcgccagttttgagaagcaactacgcatcctgctgcaaacggtaaacagtacacatcagcgacatgcactggtgtttatcgatcttgatcgctttaaagcggtgaatgacagcgccgggcacgccgctggcgacgctttactgcgcgaactggcgtcattgatgctgagtatgctgcgctccagcgacgtgctggcgcgactcggtggcgatgaatttggtctgctgctgccagattgtaatgtcgaaagtgcgcgttttatcgctacacgcattatcagcgccgtgaatgactatcactttatctgggaaggacgtgtacatcgggtaggtgccagtgccgggattaccttgattgatgacaacaatcatcaggcggctgaagtgatgtcgcaggctgatatcgcctgttatgcctccaaaaatggtggccggggccgggtgacgatttacgaaccgcagcaagctgccgcacatagcgaacgggcggcgatgtcgcttgatgaacagtggcggatgattaaagagaatcagttgatgatgatcgcccacggtgtcgcttcgccgcggatcccgcaagcgcgtaatttgtggctgatttcacttaagctctggagttgcgaaggcgagattattgatgaacaaacatttcgtcgtagcttcagcgatccggcacttagccatgctcttgaccgacgggtattccacgattttttccagcaggccgccaaagcggttgccagtaaaggtataagcatcgccctcccgctttccgttgccggtttgagtagcgccacgctggtgaatgaactaattgagcagctggaaaatagccctctaccaccacggttattacatctgattattccggcagacgcgattttagatcacgcagaaagcgtgcaaaaactgcggctggcgggatgtcggatcgtattcagtcaggtgggccgcgatctgcaaatcttcaactcgctgaaagcgaatatggcagattacctgctacttgatggtgagttatgcgccaacgtgcagggaaatttgatggatgagatgctgattacgatcattcaggggcacgctcagcggctcgggatgaagaccatcgccgggccagtagttttacccctggtgatggatacgctttctggcatcggcgtcgatctgatttatggcgatgtgattgccgatgcccaaccgctggatttgctggtgaatagcagttatttcgcgattaactga

SEQ ID NO: 13052 - DNA, 147 bp, Escherichia coli
atgactaagagcaccacgatgatgatccacttcatcatgaccctttccttatttaaggccccttcctcgggaggggctttcccgtttcagcgtcccgctgaaatcatcggcttacctcctttcgccctgaatgcagtctatcgctga

SEQ ID NO: 13053 - DNA, 243 bp, Escherichia coli
atggcaactgccaggataaatgttttttgcacgaacgaggaactgtctaattggctcgcgattgtagcctcaaaatacaaattacattcaatttggtttacactacaagatgaatactctaagcaattaaatgtcttaacagaaaagatccctgccgtagcacatcgaatttatcttatgcccagcattaaacctaacaatagaagaataaagtttagtagcattgatcgttattgtggttga

SEQ ID NO: 13054 - DNA, 447 bp, Escherichia coli
atgaatatgactaaaaaagaagcattagcattccttgctctaaaccaacctatgccaaatgattatgacatcactcaggaacttatcaataaatataacaatgtaaggctttatttttctgcaaatcctgctgaagaagccataccgttatttttacaatcgtttggggaaggtgatggcttcggtgtatatcagttggtcgaagattttttgtacaagtgtgataaaaacattatagcttcaaatatcgccaacatactggaaaatcctctgacaataaaaagtgtccgatgttggtgtacattattggcaatggcttttcccgataacaccttaattaaaggattaaatatttctctacaatctgatgatgaagatacccgagacatggctatgttaagtttaaagatgattacagaggaatataaaacatttgaattccaataa

SEQ ID NO: 13055 - DNA, 429 bp, Escherichia coli
atgacaaaaacacaagcaaagttgcttatttataaagcaaacaaatttatgcaaaagcttgacggaattgactcgtttagtataaccctgctatatgataactcttcattaatgagaaaagagtttcatcaaacacataatattgattgcctcaacgacagactttttttacctcatccggtaaatataaatcttctaatcagtcagatagtgacattatctggtacagctgaatgttttcgttgctggcttatctatgaaggtaaagtaaaaatagttataaatgggaataatttcacgtcatttgcgcagagtattttcagagaacagggaacctatgatttaacgttattttttgacataactcgtagagtaatagtagtctgtgataatgagtatgacattgatatttacaccaccacctattaa

SEQ ID NO: 13056 - DNA, 537 bp, Escherichia coli
atgcaatcaaccaatagcgaatccccttataaatttgcgaacaaactactgattggcctgttagcatgcatgctatacagaataattaccatcataattacaatcagttatacctattttacagttcctcataaagtacatatatcaacaaatatttacatatttttttctttcttatttatatcattgatattttttgtcgttactttcacctctagtaaaaaagtggcaattataattgcaacgctatcgacaatattattaggagtcgaaacctttaattcaggactgccatatcgcgccttatcaatgatgttttcagccatgctttcatatttctttatatttttatgtaattttaactttaaagataaagagaattctaaacatataaacgtcctgaaagttgcgtgcccaattttgtacgttttttatcttttttatgagcacgtatttttcaggaatgtctctttgattgttttttcctttgttattttaacgttctttatttcctggttgaatattaaacttaaataa

SEQ ID NO: 13057 - DNA, 1890 bp, Escherichia coli
atgaaaaaaaatgcccagtccgtggaagcctggctggaggcgatgatcgccgtggcgcgttattaccgccttgatttttctcaggagaatgtgcgcgcgaccgtcaactgggagcgcgacagtaagcgggaggagttactcaccgacatggcgcggcagttggggatggggcttcggctggtggagttctccaccgactcgctcaacccgtggcggctgccgttgatcgccgtttttgataatcaacaaattggcgtgatcacccgccgtgacaatcacgacaatatcagcattcagtttagcggtgacgaagggctggaaactacgcttaacgttacggatattgaagataacatcgtcgaactggcgctgttgcgcccgctcagcgctattcctgacgcgcgggtagacgactatattcgcccgtatcaggcgaactggttctggaatctctcgctaaaagactggcggcgctacggcgatattatgctggcgtcactggtggcgaacgtgctggcgctggcggcgatgattttctcgatgcaggtttacgaccgcgtcgttccggcgcagtcctacccgacgctgtgggtgctgttcgccggggtgatgatggcgatcctgtttgaattctgtatgcgcatggtgcgcacgcacctttccgatgtgattggtaagcgggcagatctgcgcatttcggatcgcgtttttggtcacgcattacggctgaaaaataacgtgcgatcgaaatccaccggctcgtttatctcgcagatccgcgaactggaatcggtgcgggagctgatcacctccaccactattggtgcagtggcggatctgccgttcttcctgctgtttgtctttattttgtggatgattggcggctggctggtgctggtggttttgctggcgctgccgttattggtgatccccggcctgctggtgcaacgcccgctggcgcggctggcgaacgaagggatgcgcgagtcggcggtacgcaacgctacgcttgtcgaagccgtgcagtcgattgaagacattaagctgctgcgcgctgaacagcgttttcagaatcagtggaaccacaccaacgacgtggcctcgtccatcagtatgaagcaacgttttctcaccgggctactgctcacctggactcaggaagtgcaatccatcgtctacgtcgtggtgctgttggtgggctgctttatggtaatgaacggtgacatgaccaccggcgcgctggtcgggacgacgatcctggcttcgcgcaccatcgcgccgctgtcgcagatatccggcgtgctctcgcgctggcagcaggcgaaagtggcgcgcaacggacttgatgaactgatgaagcgcccggtggatcagccggaacacggcaaactggtgcataaagcggtgctacacggcaattatcagttcagcaacgctatcttttattacgacgaagaagagaaaattgccgatgtggcgattggcaaactcaacattcaggccggagagaaaatcgccattcttgggcgcaacggcgcgggtaaatcaacgctactgcaaatgctcgccggaatgcgtatcgcccagcaggggcaggtgctgctggagaacatcagcatcggtcagcttgatccggcggatctgcgccgcgacatggggctactcagccagaccgggcgactatttttcggttcgctgcgggaaaacctcaccatggggatgccggaggccagcgatgaagatatcgaacgcgcattaacactcagcggggcgctgccgtttgtgcagaagcagaaaaacggcctcaactacatgattcaggaagggggatttggcctctctggtggtcagcggcaaacgctgctgctggcgcggctgctcatctcttaa

SEQ ID NO: 13058 - DNA, 1356 bp, Escherichia coli
atggcgcgattccagtttaaaagccgtaaaaataatgggtttatttttttaataagttttatggtgatgggagaagctacaattgctgcaccgctgccacaatgggcgaatgccccagcggtaacgccagttgcccaattatctttacaggaaagtatattacgcgcctttgcgcgaaatcccgacgtcactcaacaggcggcgcagataggtattggcgaagcgcaaattgatgaagccaaaagtgcctggtatccgcacgttggattaaccggcaatgcgggaccgtcccgacaaacggactccagtggcagacttgataacaacgtttcgtatggcataaccctgacacagctggtgtatgactttggtaaaactaacaacgatatcaaactgcaaactgccgcccgtgacagctaccgctttaaattgatggcaaccttaaccgatgttgcagagaaaacggcaactgcctatatggaagtcagtcgttatcaggctttgtgcgatgcggctcaacgcaatattcactcgctggaaaacgtctacaacatggcagcattgcgtgctaacgctggcctgaactcgtcgtcggatgaattacaggcccagacgcgcattgccggaatgcgctcaacgctggagcaatatcaggcgcagatggcaagcgccaaagcgcaactggcggtgctcactggcgtacagccggaggcgatagccgcgccacctgctgaattagccgagcagtcggtatcgctgaaaaatattgattaccagtccatcccgctggtgctggcggcagaaaacttacgccagtcagcacagtacggcgtggaaaaaacgaaagcgcaatactggccaacgctgagtattcaggggggcaaaacgcgctaccagaccagcgaccgctcgtattgggatgatcagctacaactgaacgttaacgcgccgctgtatcagggcggcgcggtttctgcccaggtgcaacaggccgaagggcaacaaaaaatctctgcctcgcaggtcgaacaggcaaaactggatgtgctgcaacgagcgtctgtggcatatgccaactggacaggcgcacggggtcgcgaagaagccggtttagcacaatccgaaagtgcgcacaaaacgcgagatgtgtaccaaaatgaatataaattgggcaaacgcagtctgaatgatctattaaccgtcgagcaagatgtctttcaggcgcaatcggctgaaataaatgccaattatgatggctgggtcgccgccgtaaattatgccgctgcggtgaataaccttattctattagcgggaattaaacagggcttatacaacgacttacccgacttgaaataa

SEQ ID NO: 13059 - DNA, 1593 bp, Escherichia coli
atgcatcacgccaccccgcttatcaccaccattgttggcggccttgtgctcgcctttatcctcggcatgctggccaataaactacgtatttctcctctggtgggatatctgttagcgggtgtgctggcaggaccattcactccgggctttgttgccgataccaagcttgcgccggaactggctgaactgggcgtcattctgttgatgtttggcgtgggtctgcacttttcgctgaaggatttgatggcggtaaaggccatcgccattcccggcgcgatcgcccagatagccgtggcgacgctgctgggtatggcgctctccgccgtgctgggctggtcgttaatgaccggtatcgtgttcggcttatgcctttccaccgccagtaccgtggtgttactgcgcgcacttgaagaacggcaattaatagacagtcagcgtgggcaaatcgccatcggttggttgattgtggaagacctggtaatggttctgacgctggtgttgctgcccgcagtggcaggaatgatggaacaaggcgatgtgggctttgccactcttgctgtcgatatggggatcaccatcggcaaggtgatcgcatttatcgccattatgatgctggtaggtcgccgtctggtgccgtggattatggcacgtagcgcagcaaccggttcccgtgagctgtttaccctgtcggtgctggcgctggcgttagggattgcctttggtgcggtggagctgtttgatgtctcctttgcactcggtgcgttctttgccgggatggtactgaacgagtctgaactgagtcaccgtgccgcccacgatacgctgccattgcgcgacgcgtttgcggtgctgttttttgtctccgtcgggatgttgtttgatccgttaattctgattcaacaaccgctggcagtgctggcgacgctggcgattattctgtttggtaagtcgttagccgcgtttttcctggcgggactgggcatggcgctggatctgttgccgcaagccgggcagaacctgatactggcaggggcgattttgtcgattatgctcaatccggtcctgtttgcgctgctggagaaatatctggcgaagaccgaaacgctggaagagcagacgctggaagaggctatcgaagaagagaagcagatcccagtggatatttgcaaccatgcgctactggtaggttacggtcgtgtaggcagcctgctgggggagaaattgctcgcctctgatattccgctggtggtgattgagacgtcacgaacccgtgttgatgaactgcgagagcgcggggtccgcgcagtattgggcaatgcggcgaacgaagaaattatgcaactagcgcatctggaatgtgcaaaatggctgatcctgacgattcccaacggttatgaagcgggtgagattgtggcatctgcccgcgcgaaaaatccggatattgagattattgcccgcgcccattatgacgatgaagtggcgtatatcaccgaacgtggtgcaaatcaggtagtgatgggtgagcgggaaatcgcccgtactatgctggaactgcttgaaacgccaccggcgggtgaggtggtgacggggtaa

SEQ ID NO: 13060 - DNA, 648 bp, Escherichia coli
gtgaaatttctttggttatcgctgttgtttctgagtcaggccgtcctggcaacttgccctgctggaaattcacaacacgaatgcgaggcggtgcgcatacagcccctggtcacgccggagcagaaaaaagatgccttaacgcaattgcaaaagtttcagcaagcgctgagtgcaaagaatgccacgaaactaaaaaccttcttaaaattcccctacgatacctatttcggctttctcgctgagattgagttgcctgaatctgaacccttcacagaagcactatttgatcgccattcagaaaccattatgcggcgtctgcataatgtcacaaaattcacgatacatccgggtacccaatggattgatgattatctcagtcattcgctgacgccagcggagcaaaaaagaaaatattatcccctcaatgatggacgtttctattacgaagagaaaggggagcgccactacgtcacgggaatatgtgaactggcgatgtcggggaatatttctgacgatggcattacgctgaatattggttcgcaggctaatgaacaaattccaccggctgtttgtgatggcacaactatactggaatttggcatgattaacgggcagttaaagttattgcgtgtttcttttgcggggtaa

SEQ ID NO: 13061 - DNA, 561 bp, Escherichia coli
atgataaaaaacacacggtataaaatagtactcctggcaggtatttttttactgcccggcgcactggcacaagatattaatgttgattttgttgccacaatcaaaggcacgacatgtaatatcactctggaagggacacgcgtcaccgctgatggcaataatcagtacacgctacggatattaaatgttgctctggataaaatcataaacaagatgccagaagcacaagccgactttaaactggtcgctaattgtgatggtaacataggcaagattacgacatcgctggcagggaatccttcagtagagttaccctatttaatttctccattaacttcagataattcatccaccacagaatatattgctatggggattaaacttcgaaatgcctctgacactgaatttattcccccagatggttctaaaaagatttcctggggagagggattaacaaaaccggaacttgagatgacggtagcacttcgcgaaacccgaccaggttcaggaagagcaggtaattttaaagcacttgcgacattcaatttcacctacgaataa

SEQ ID NO: 13062 - DNA, 591 bp, Escherichia coli
atgtctcgaatttttgcttactgtcggatatcaactctggatcagaccaccgaaaatcaacgccgggaaatcgaaagtgcaggttttaaaatcaaacctcagcaaataatcgaagaacacattagcggctcagcagcaaccagtgagcgtcctggttttaaccggttgcttgctcgcctgaaatgtggtgatcaattgattgtgacaaaactggatcgccttggttgtaatgcaatggatatcaggaaaacagtggaacaactgaccgaaacaggtatcagagtgcattgcttagcattggggggcattgacctgaccagtccaacaggaaaaatgatgatgcaagtaatttcagcagtcgctgaatttgaacgagaccttttacttgaacgcactcattccgggatagtaagagcccggggcgcagggaaacgttttggtcgaccacctgtgttaaatgaagaacagaaacaggtggtattcgaacgaattaagtcaggtgtaagtataagtgccattgcccgggaattcaaaacctcgcggcaaaccattttaagagccaaagcaaaacttcagacacctgacatataa

SEQ ID NO: 13063 - DNA, 1041 bp, Escherichia coli
atggctacatcgacagtaattcctgatgacatcaaaacgctaaaatccgacgttagcaaattaaaaaacgatcaaggaagctacgcaacaaaattatatgtagacagcaaagatgaaatcgttggtgactggtctgcttcatggtatcagcaggtattgccaactagcggagctatatttgggagaaaactccgctcaactcacaggacggcaggtgttgaggatgcgtattgcgaactatacctcaaaaaatggatagacagtccaggtaacgcaatggcgcgccttaacctgaacgataacgggacaaacatttgctgggactttaccaacctttatggcggtacgatgatttttcccggtgacagcggatacctcaaaatgggtaactgccttatgtcatacagcaagcgtggaagtaacgcgcttattaaatttgattacaccgacacattacagatcaaatatgccaatcatgggtcaaccatgacattaaacacacagggaaccgcttatgctggtgttactgctcaattgtggggcaactccagccgtcctgttgtttatgaagtcggtgttgatggtggcgcttatatgttctatgcgcaaaaaaataccgataacacctatatgttaagcgttaatggtgcatgtcatgccaccgcatttaaccagcattccgaccgggatctgaaagacaacattcaggtgatcgataatgcaaccgaccgcatccgtaaaatgaacggctatacatacacgcttaaagaaaacggtatgccctatgctggtgtcattgcacaggaagctctggaagcaatcccagaagttgtaggttccgcaatgaaatatcaggacggtgcaagcggatcggaaggtgaagaaggtgaacgttattacacagtagattattctggtgttactggcttgcttgttcaggtagccagagagtcagacgacagaataacagcactggaagaagaaaacgcagaattaagacaaagattatctgcaattgaggcggcgcttgcgtctaaataa

SEQ ID NO: 13064 - DNA, 1131 bp, Escherichia coli
atgcttacttatttttggggaaatataaaagcaatttgtatattgtttgttcttttagtcagtagctgctataacatagtatatgctgaagatatgggacgggatcgcgccttttgttatcctggtgcaccaggtaataatactactcctgcgacattttcttataattttggtacggtaattgtctcagatgttaataataattcgcctgggacagtattaccctcgcaggactggaaaatagggcattataaggcttattgtaattctctggatgattatgaggtttatttttctggtgtttctgggattgatccgtcaggagcgtctggtgatcatcaggggagcgatatatttattcctttgactcatgaaatatctgtctcgacacatgtaaagctctataataaaaatggcacaatgacagataaggcagtaccttttgacaactatagcaccaattatccagcagacagaagtaaaccatcaagttgggcctcaggaacagaaggttatataaaaatcagacttgataaaaaaataatatccgatatatcaataaataacgtattgctggtttctttgtatgtcagccagtttccaacagagcacggaccaattccagtatttaatgcttatattggcaacttaaatattgaagttccacaaggttgcacaattaatgagggaactagttttaccgttaatatgccggatgtctgggccagcgaattaagtcgggctggtgctggagtgaagcccacgggcgtttctccagtggcaaccactattccgataaactgtacgaacaaagatattgatgccgtaatgacgctggtttttgatggcaatatttcatcaacgagagatgttaatggtcggcaaagcattattcaggcggaggataaccccgacgttggcattatgattatggatagccaacaggaatccgtagacttgaacgctcttgctgcgcatgttggtgtgccatttaagttagttgaaaaccgggctgagtcagctcagacggcagatgtgacttttctgtctctccctgtaagtaccacagggcgacgccctgctgcgggtcgttataatgccctggctgttttgcgggtggaataccagtga

SEQ ID NO: 13065 - DNA, 780 bp, Escherichia coli
atgcatcagtttcctttatcgtcacttatgattaacgtgctgatatgcattttaatatgttgcacaaatgcgcaggcaggagttgttgttggcggtactcgttttgtttacccagaaaagcagtcatcaatttcggtcgagcttaaaaatactgccagtaaagatatgctggttaaaatttccgtgacacctgatgatggacgtcagttaaaagggacactggaatcccagcctttacttccagataaggcgtttattgccacaccaccattattggtacttaaacaagataaaaataccaaaataagaatcaatcgcgtgggggggcagttacctatagatcgtgagagtttatttatattgaatattgcagcgttacctgctcaggaacaaaactcacagcttaagaatgaaaatcaactccaggtggctgtacgtaataggatgaaaatattttaccgcccagagacgttatcaggtaatccacttgacgcttatcaacagttacgctggtcgcgaaacaatgaagctgtcaccgtttttaaccctacgccctggtatgtgacactctataatttatctattgatggtaaaagcataaatggtggcatggttgcaccatttagtcatcgccaacaggattggtgtcagcggcaaggatattgtgagattaactggcaaacactagatctttacaataatgccttacccgtatggagcgtaaaattaaatgttttacaaaataatgctattatgggtgcagtagcgatacatggataa

SEQ ID NO: 13066 - DNA, 525 bp, Escherichia coli
atgacacgatattggaatttaattgccctattattctctgtgatatctatgtcatccattgctgatgatacaacgcatgcaggtgttgtacgcatcgaaggaattataacagcaaagacttgtattgttgccgatgagtctaaaaatttcacagttaacatgcctgatgttcccagttatacggtgagaaattcagggagtgttactgaaaaaattggcttctctttaaagttaacccgttgtggcagtgatgtcagtaatgccaatgtcacgtttgatggaataccagttagtgaagacgcagccctatataaactggaagagggctcagtcgatgggttagcactggctatttttgataacaacagacaaagtattagtaatggtataaagagtacaagttatgcccttacaccattggtagataatacattgcatttctttgctgcttataaagctataaaaaatgatgtacaaccaggagatgcgaatgcatcagtttcctttatcgtcacttatgattaa

SEQ ID NO: 13067 - DNA, 564 bp, Escherichia coli
atgaatatattacaaaaatttattctattaatgtttagatcattgttcatgatggtgatttcatataacgcactggctaacgatactgtagtggtcacatttacaggacaattattagcgaaaacgtgtgatattacaactggaagtaaagaccagccagtaaacatgggaacttatgacgtcaatgattttttgaatgtaggggatgtttctggcagccatacatttacgatcaatctggaaggatgtcctacaacaaccagtactgtttatagttcaggagtaagtgctaatgtgcagtttaccggggatgctgatgctataaataccactttattacgccttacttccagcgcggatagtgcaactggagtgggcatcgaaattttagacagtaatgataaaattatagcaattaatagtgaatcaggattcaaagagttaattttaaataataatggcgatgccagtttaacctttaaactccgctataagtcaactcagcaaaacgtacatgcgggacaggcgaacgcactattgtactttgatatagactatcagtga

SEQ ID NO: 13068 - DNA, 2529 bp, Escherichia coli
atgctgcttctactgacacttttgcctgcgtgttcagtggcgggtatgcgctttaaccctgcattcctgtcgggtgatacagaagctgttgctgatttatctcgttttgagaaagggatgacatatctacctggtagttatgaggttgaaatatgggtcaatgattcgcctttgacatcacttaaggttactttcaaagctgatgagcagaatcagttgatcccctgtttttcgctcgatgagttagttactttaggaattaacaaaagtgcattgccggaacaggcgcaagcagagggaaataattgtctcgatttacgtatatggttcgcagaagttcaatacactcctgaactggatgcgcaacgactcaaactgacctttccgcaggcaatattaaagcatgaagcccgtggttatattccacctgaggaatgggataatggtatcccggccattcttattaattatgatttttctggcaacagtgatcgtggagactatgcgtctgatagttattatttaaatctccgttcaggtttaaatttaggggcgtggcgttttcgtgattattctacatggagtcgttcaggtaattcaccgggtaaaattgcacatgtgagtagtacgttacaacgagtaattattccttttaaaagtgaattaacactaggtgatacctggtcttcatcggatgttttcgacagtgtgagtattcgtggtgctaaacttgaatccgatgaaaacatgctacccgatagccaaagtggttttgcccccactgtgcgcggtattgctaaaagcaatgctcaggtaacgatcaaacaaaatggctatgttatttatcagacatatactccaccgggaccctttgaaatcaacgatctgaaccctacgtcttccgctggggatttggaagttacgatcaaagagtctgataattccgaaactatctataccattccttacgccgctgttcccattcttcaacgcgaagggcatattaaatattcggcaactgccggtaaatatcgtagcaatagctataatcaaaacagtccgaatgtctttcaaggagatttgatttgggggttaccctgggatattaccgcctacggagggatgcaatactcaaataattatcgggcaatagcactcgggcttgggttcaaccttggtatgtttggtgcgacgtcatttgatttaacgcaagccaatagcacgcttgccgatggcagtaaacatcaagggcaatcgtaccgtttcctatattcaaaatcgttagtgcagacaggtacggcttttcagattattggttatcgctattcgacggagggattttattcgttgagtgataccacatacaaacaaatgtcgggtacggttatcgatccagatacccttaatgaaaaagactatgtttataactggaatgatttttataatttacgttataacaaaagaggaaagtttcaggaaaatatatcgcaaccattgggcgaatatggctctatgtatttggcggcaagtcaacaaacttactggaatacgaataataaagataccttgtatcaggtcggctataatacgagtgtacatgggatttatttaaatattgcttataattatagtaagtcaccaggttcagatgcggacagaatcttatccgtaaatgtctcattgccgatcagcaattggttatcaccagctgtcgatgggcgtactgcgacaaattctatgacagcaacttatggttatagtcaggataatagcggtcatgtaaatcagtatgccggagtatctggatcgctgctggaacaacataatctcaactataatattcaacaaaattttgccaaccagaataatggcgaaaatggctcagtagggataaattaccgtggtacatatggttcactaaattctggatacagctacgataataatggtaaccagcaatttaactatggtttaagtggtgccctggttattcacgaaaatggtctcacgttaagccagccgttaggagaaacaaatatactgataaaagcacctggggcaaacaatgtaaatgtggaacgcggaacgggggttaaaacagactggcgtggctatgctgtcgtaccttatgccacggaatatcggcgtaataatatctctttagaccctatgtctatgagtatgcatacagaattagatgctactactatggaagtgatacccagcaaaggtgctttagttcgtgctgagtttaatgcacatgtcggtattcgaggtttatttaatgttcactatcgtaataaaccagttccatttggtgcgacggtcagtgtacccactgaggggacaactcagattacaggaatagtgggtgacagtggacaggtttatctctccggtttgcctttacaaggcataataaatatacagtggggagaaagttcttatcagcaatgtcgggcaaactatcaattaccggaaagtgagttggataatgccattagctatgcaaatctggagtgccgctaa

SEQ ID NO: 13069 - DNA, 753 bp, Escherichia coli
atgagatggatttcaaaaaataaatatttttcgaatagaaacattaattctttgctgaagacccaatatatcataagggccggtgctctatttttactatccgccatatctatcaatgctattgctgcgggtggcttcggtcttggttctacgcgtctggtttatccatctgacagtcagcaaattacgctaagtgtacagaatggtggggctaacaccagctatttaatccagtcatggattgatgacaatcaaagcagtaaaaaaagtcaggattttgtggttacgcctcctttatttatgttaccaacgcgaaaagaagcctcattgaggataatgtttattggtaaatcacagttaccgactgatcgcgaaacattattctggatgaatgtgaaagcgattccgccaacggatgagaagaatacccagaaaaacacgttacaactggcgttacaaaacagaattaaattattttaccgtccgactaatttacccgttcaagctggtaaagcacgggatatgctgcgatttaaatacgaaggtaaacagctaagagtcattaacccttctccctattatctgacggtgactggaatcagggtgcaaggggcaaaattacccaatgcgtttgttccaccgaaaagtgacgtaacagtgtcttcaccagtgatgctagccggtgaaattacttatcaaactatcaatgattacggtgccacaacggccaggcaaaagggaacgatgcaataa

SEQ ID NO: 13070 - DNA, 261 bp, Escherichia coli
atggatatgggaataaattggggcctgttcttccggcttcgcatggcggcgaaaaatatgcgcgacatgccagctatccttgcggttaagtacatacggcagatggtaacgggtggtgcttttgccgaagccaataaaggcgcagttgatgaccatgatttcgtcctttttaaggtgattatttacaccttagcgcaaagcggacgtggttcctactggagtgcgcataacgaacacaagcacttcccgtggataaattga

SEQ ID NO: 13071 - DNA, 309 bp, Escherichia coli
atggattatttaattccagtttgtctggcattgctgggattactcgcgatcttcacccccaattggctgatccctgtttttatcgtcgtggggggatggctgggggtacttgcctggggttggctctggctaatgatttttttacctttacttaacggtgtcgggcttgcttatgccctgtggttgatgttcaaaaggccatctatagcatcccgcctggttgctgcatgctgtgttgtctctgtcattctgatgttagcgctttattatgctttcctgactatgccgccgttcccgcctcagcactaa

SEQ ID NO: 13072 - DNA, 1260 bp, Escherichia coli
atggtaaaaatgaaacactgttgtaaaaatgtggtgatcctcatgcccgaacccgtagccgaacccgcgctaaacggattgcgcctgaatttgcgcattgtctccattgtcatgtttaacttcgccagctacctcaccatcgggttaccgctcgctgtattaccgggctatgtccatgatgtgatgggctttagcgctttctgggcaggattggttatcagcctgcaatatttcgccaccttgctgagccgtcctcatgccggacgttacgccgatttgctggggcccaaaaagattgtcgtcttcggtttgtgcggctgctttttgagcggtctggggtatctgacggcaggattaaccgccagtctgcccgtcatcagcctgttattactttgcctggggcgcgtcatccttgggattgggcaaagttttgccggaacgggatcgaccctgtggggcgttggcgtggttggctcgctgcatatcggacgggtgatttcgtggaacggcattgtcacttacggggcgatggcgatgggtgcgccgttaggtgtcgtgttttatcactggggcggcttgcaggcgttagcgttaatcattatgggcgtggcgctggtggccattttgttggcgatcccgcgtccgacggtaaaagccagtaaaggcaaaccgctgccgtttcgcgcggtgcttgggcgcgtctggctgtacggtatggcgctggcactggcttccgccggatttggcgttattgccacctttatcacgctgttttatgacgctaaaggttgggacggtgcggctttcgcgctgacgctgtttagctgtgcgtttgtcggtacgcgtttgttattccctaacggcattaaccgtatcggcggcttaaacgtagcgatgatttgctttagcgttgagataatcggcctgctactggttggcgtggcgactatgccgtggatggcgaaaatcggcgtcttgctggcgggggccgggttttcactggtgttcccggcattgggcgtagtggcggtaaaagcggttccgcagcaaaatcagggggcggcgctggcaacttacaccgtatttatggatttatcgcttggcgtgaccggaccactggctgggctggtgatgagctgggcgggcgtcccggtgatttatctggcggcggcgggactggtcgcaatcgcgttattactgacgtggcgattaaaaaaacggcctccggtggaagttcctgaggccatctcatcatcttaa

SEQ ID NO: 13073 - DNA, 1590 bp, Escherichia coli
atgaaagtatttcacaatatatttaagcacttctcttcaaaccatcaagataagcattcagataaagttaacagtcatcaacaccatggcaatgttgataaaaaacatcgttcaaagatagttgaaattgataagctggataaacattcgcaaatagataacgattttggcctgcatatcatctatttcctgcaacatggctgctggaacgtaactgaacatagtcctcagatagaaaaactgtggttttacaatagtgagccatctatagatattaaagaatataatagtttcgccgataatactactgacacgtttatctttacaattataccagacaataaccatgtgataaaattatcgtctcccattaccgttacgattgagcgtaaggacggttattattttattaatttctccggggataaatcagacataatttataaagttgatgggttttctatcatacctgaaaatttttttactcttcttagcggtaattttaaagctgactggcgttgggctgtctctaaagagacgtttactaaggaaaagtttgatagctatgttgaatctgttttttcaaaaatagacttttataaacagtgtggtgtgattaacccaaaaaatcccaacacggcttattttggcgatacagatggaagagtgggcgctgtactttatgcattgctcgtttcagggcatataggcatcaggggagaggggtggagtttattatgtcaattattaaaacacgaagacatggcgtcattcgcatatgaaaataaaaaattgaaaaaactcttcactttattagatacgagagacatgatcttgaatgagttgcatcaacatgtttttttaaaaggcgatgcgattaccccttgtatcttccttggggatcatacaggcgatagatttagtactatttttggtgataaatatatccttactttgctaaattctatgcgaaatatggagggtaataaagatagtcgtataaataaaaatgttgtcgttctggctggaaatcatgaaatcaattttaatggtaactatagtgcacgactagcaaatcataaactctcttccggtgatacatatgacttaattaaaacgctcgatgtttgtaattatgactcagaaacgaaagttttaaccagtcatcacggaataataagaaatgaagaaaatgaatgttattgtctaggtgctttgcaggttccatttaatcagatgaaagacccaattgatcctgaggaattagcaaatatatttaataaaaaacataaacaacacatggatgatcgtcttatccatctaattagaagcaatgctatagcatccacacctgtatatgacaattattttaataacactactgctttcagaccaaaacctgaagatatcttcaaatgtggacagacgctcaaaaaaagtaaacagaaatatggccattatggattaggggtagatcagcatcaaaaaattgataattataccatggggctaaattcctggaagatagcacctaacgaacgtggtgataaaaaaggtgtcccagggcttagttgttttcaatctcattaa

SEQ ID NO: 13074 - DNA, 1224 bp, Escherichia coli
atgtcaattgactttaccccaggtatgataaatacatatcacggcgatatttataaccgcacaacagataccgacaatgttaaaacaccagacacaccgatgtggccttgtgataatcaggaagaacagcaacccattaatttttcattgtctgaagaaggatataacgctgaacaatttgatttagcgcaacaacaactccaacaaattaatgcgtgccacacgaacactacatatacaaatgcagactactcaaaagttgtggctcaacttgtaagtcttattactaacattgaaacgataagttcgacaccacttacgcaacagacacaatcaatacttaatcagattaataacattagatacgaaaaaaacaaaagtgctgaatgtcgaatcattgttgtcgctaatcctaaacccgacaaggcaatcataactaaaattagcgtagaagagggaataccagtaagattcagtgtccaaaccatgttttcagatactaattttattgctgaacaacaggctgacttaccgactaatataaaagatattcaaaacctgtatcaaaaaatgacgaagttatatattaagcacagtgaaaataaaaacaggatgaaagtctttgccggaaccaactttattgatttcaatatgacaggacagaacctgtccgggttcgttctaaccttgtcaaggttttatttcgaagatctacttaatataaatttcactgacgcaaatttaggtgacactattttttcacataaagaacaccctaccccaaaattatataaagacgaacaatatcttgacaaacaaatcgaaggtttattttcaacattattaaccattaatgacaactttttacgagcaaaagcggaaattgcttcgacaataattaaattcttagaggccaggataaccaatctttcatacaatgacatattaaaatatcagcaagaattccaaaaacaatgttataagcaagttaaagcctttacgacactctcccgatacaataaaattcaaacatgggcagaaatgtctgaatatcaattcgaagtatttcaatacgagacgcttaacccaaaaaaaatgtcatacgcaccttatttaaagagatcgctacctgatgaaaaaactataaattatggggtggaaatagaaacaccatctggcaaaagaattcgcttatcaaatcattaccagaatataatcccataa

SEQ ID NO: 13075 - DNA, 2283 bp, Escherichia coli
atggaaaacaatcgcaatttccctgccagacaatttcattcgctcacgttctttgccggtctttgtattggcatcacgcctgtggctcaggcactcgccgccgaagggcaaactaacgcggatgacacgctggttgtcgaagcatcaacgccttcgctttatgcgccacaacaatctgcagatccgaaattctcgcgtccggtagcggatactacccgcacgatgacggtgatttctgaacaagtgattaaagatcagggcgcaaccaaccttaccgacgcactcaaaaacgtccccggcgtgggtgcgttttttgcgggtgagaacggtaactccaccactggcgacgccatttatatgcgcggtgctgatacctctaacagtatttatattgatggcattcgcgatatcggcagcgtctcgcgcgacaccttcaataccgagcaggtcgaagtgattaaagggccgtccggcaccgactacgggcgcagcgcaccgacaggctcgatcaatatgatcagcaagcagccgcgcaatgattccggcattgacgcctccgccagtattggtagcgcctggttccgccgcggcacgctggacgtcaatcaggtcattggtgataccaccgcggcgcgcctgaatgtgatgggcgaaaaaacgcacgatgccggacgcgacaaagtcaaaaatgagcgttacggcatcgccccttctgtcgcttttggccttggtacagcgaatcgtttgtatcttaattatctgcatgtcacccagcacaacacgccagacggcggcattccgaccatcggtttgccgggctattctgccccatctgcgggaacggcggccctgaatcattccggaaaagttgatacgcataacttttacggcacggattccgattacgacgattcgaccaccgacaccgctaccatgcgttttgagcacgacatcaacgataacaccaccattcgcaatactacccgttggtcgcgcgtgaagcaggattacctgatgacggcgattatgggtggggcgtcgaatattacccagcccaccagcgatgtgaatagctggacctggtcacgcacggcgaatactaaagatgtgagtaataaaattctcaccaaccagaccaacctgacctcgacgttctataccgcttctatcggtcatgatgtcagtaccggcgtggaatttacccgtgaaacgcagactaactacggcgttaatccggtgacgttacctgcggtaaatatttatcatcctgacagcagcattcatcccggcggcctgacgcgcaacggcgcaaacgccaatggtcagacggataccttcgcaatttacgccttcgatacgctgcaaatcacccgtgattttgagctgaacggcgggatccgtctggataattatcatactgaatatgacagtgccaccgcctgcggcggcagcggacgcggtgccatcacctgccctgctggcgtggcaaaaggttctccggtcaccaccgtcgataccgccaagtcgggcaatctggtgaactggaaagccggggcgctgtatcacctgacggaaaacggcaatgtctatattaactatgccgtttcccagcagcctccgggcggcaacaacttcgcccttgcgcagtctggcagcggtaacagtgccaaccgcaccgattttaaaccacaaaaagccaacaccagcgagattggcaccaaatggcaggttctggataaacgcctgttgctcaccgccgcgctgttccgtactgatatcgaaaatgaagttgagcaaaatgatgacggaacttactcgcaatacggtaagaaacgcgtcgaaggctatgagatatccgtggccgggaatatcactcccgcgtggcaggtgattggcggctatacccagcaaaaagcaaccatcaaaaacggcaaagatgttgcccaggatggttcctcatcgctgccgtataccccggagcacgcctttaccttatggagccagtatcaggcaaccgatgatatttccgttggtgcgggcgcacgctatatcggcagtatgcataaaggttctgacggcgcggtgggaacgccagcgtttaccgaaggttattgggtcgccgacgctaaactggggtatcgggttaatcgcaatctcgacttccagctaaacgtctacaacctgtttgataccgattacgtcgcctcaatcaacaagagcggctaccgttatcacccgggcgagccaagaaccttcttgctcacggccaatatgcatttctga

SEQ ID NO: 13076 - DNA, 471 bp, Escherichia coli
atgtctatcgaggaaaaattttttagtgatatcgatttaaaagatccgttttttaacagcctaagagctgattatgaaggatttgatgtttggtttctctcaaaaggtaaaaataaggcgtttgtatcacgtaatgaattaggtgaaatcgatggttttctctatttgaaaatagaagatgaagagttgagtgatatgactccaacgtttccaaagatgaagcgagtaaagcttggcacatttaaaatcgatgctcatggaaccaaacttggagagcgttttattagaattatgtttcaatttgctatgagaaacaaactaaaagaagtatatgttactatatttgataagcattcaggattaattcgcttattaactaaatatggttttgttttaaaggcgaggaaaaatctttctacgattaatgggcaagaaggtgtatactttaaaaacttggtatggaaggagtaa

SEQ ID NO: 13077 - DNA, 582 bp, Escherichia coli
atgagctatgctaattatcccttagtcaaattgcaggggagaaattatttattaagtatttatcctgcatggcatacacgtcttttccctgagtcaaaactccacaatgagagtgctggtatcatcgctgatatatcacataccaacagtattgaaaaagtatacttaacaaaaatgcatggggtagccagcctaaagcctggagataatttgcttatttatcgtacttcagatggacaaggtccagctcggtttagatctgttgcaacttcagtgtgtgtggttcaggaaattaaagatattcacgatttcttaacttatgaggaatttaagaattactgtgaaccttatagcgtttttgatgaagatgagttacagcttctatatatgaaaaaaaattatccgataattatacggtttacttataatttccctttggaaaaaagagttattcgtgatgaaatcatgaatattacaggttataccaatagtgattattggggttttttaccactaactgattcagcatttaagcagattgtcttacagggaggtgttgatgaaagttttattatcgattaa

SEQ ID NO: 13078 - DNA, 372 bp, Escherichia coli
atgaaagttttattatcgattaagccagagtatgcagagagtatactttctggtaaaaaaaaatatgagtttcggaaaaatatttttagaaataaaaatgttgatacgatagttatttacgcaacgatgccggttggcaaagtaataggtgaatttaaagtaggagatattcttgctctatccccttcagaattgtgggataaaacgaaagctcatgcaggaattacacattctttttttaaagattatttccaccaaagagaaaaggcttttgctatttccatcaaaagccctaaaagatataaattccctgtcgacttaaatgagttgattcccggcggcgtcgccccacagtcttatcgttatttataa

SEQ ID NO: 13079 - DNA, 546 bp, Escherichia coli
atgttaattttcatagcaggtgttcatggtgtaggcaaaggttacttgtgttcatttgcaaaagatgatttcggggtaactcatgtaagcgcaagcgaacttataaaaaataattctaatattaaatttgataacagtaagttaacggccacacctgataaaaaccaatcaatattacttacggcacttaatgcattaaagttaaaggtatccaatattttattggatggtcattttaccttaataaataaaaatggagatattgaagttctcaagcaagaagtatttgaggaaatggggctagatggagtaattttagttgaggagtctcccgatacaattagagaacgaataatgaaacgagatgggagtgatattacttatgatttaaataagctgatggaagctgaaagagaaaacgcaaaatatgttacaaataaaatcaatgtaccattaattatcttagaatccccaacaacaaacgatttatctattgccctagaaaaactgggcatggttaagaaacatgcccagacaacattataa

SEQ ID NO: 13080 - DNA, 378 bp, Escherichia coli
atgaagtttcaagctatatcgattttgactccagcggtagaaaatattataaatggttctaaatctatcgaaatacggtcgtggtatcctgaaacgataccattaaaaaacgtcattcttgttcagaatgataaatatcttaaaaatcaaagcgatatagatcatggggtggctatggctattgtcgattttgtttcagttagaaattggtcatatgaggattacttaaaacaaaaccaagaaacaactcttaataagccttggtctccaggttattatgtgtgggaaattaaaaatgttagaattttaaaaaaatctattccttgtgtggcgaggaaaggtatttatacaatagatttaaatatggattatatataa

SEQ ID NO: 13081 - DNA, 792 bp, Escherichia coli
atgtgtggtgccattcttcgaaatattaagcgttatgccattatttattcactgttgtttttggcttttattttaatgctgatagtgtttgttagctatgtttgtaaatttggaatgtattcatggagtgattccgtagagaaatggggacagtttggcgattatattggtggtgtactgaatcctgctctggcctttatctctatcatgcttgtttgtttcacactatattctacatctaggcagtcatctattcagtcattcgagtctgtgttatttgagttactaagatttcataaagataacttatcagaaattaaaacaacgtattcagatggaaaagtgtatgtaggacgggaggctctttcattatacattaccgaagtgaagtttaacctacttaatattgtggatgattcacttcctttggatgaaaggttagagctttcagttaatatggtttatctggaaggtgacaattttgcgaatgtgggacattatttcaggaatatttaccatatttttaaacatatcaatgactctaactatttgactgagaaagaaaaaaccaagtatgcgaaattagttagagcacaaatatcttctatagaatctggcgcgatgctattaaatggtttttcatcggtaggaaagcctgccaagaaatttattgaaaaatattctctccttcaggggtttagtttaagtaaggaattcaagcagcaattacatgatttaggtgccttaaaattatacgatgacgttgcttatgaggataaaaaagggcattaa

SEQ ID NO: 13082 - DNA, 444 bp, Escherichia coli
atggtcgactatgtattcagcccgacggaaaatgctttttatcttgtggcactgaaatatgattatttaactgctggcacatggccgtcagacggcatcaatataaatgctgaagatgcactggttttcatgggaaacgctcctgagggtaaaatgcgtggcattggtgatgatgggttgccttgctgggtagatcttccgtcacctacgcataaagaacaacttgctgcggctgactcagagaaaaagtcgagaattgaccatgccaacgaatacatgaacggtaagcaatggcctgttaaagcagctatcggtcgtctgaaaggtgaggaactggcacaatataatttgtggctggattatctggacgcactggagctgatcgatacttccggtgcgccagatattgaatggcctacgcctccggcagttcaggccagatga

SEQ ID NO: 13083 - DNA, 1326 bp, Escherichia coli
atgtttgccaaattcatagatgttattcaaacgtttttaaccgaacccgcaatattaattggtttgctggtgggcattggttatgcccttgataagaaatcgccaataaaaattattaccggtatggtcagcgccatggtgggattaatgatggtgttatttggtgggtttcaattctccgcaacatttaaaccggtagcagaggctgtaagtaaagcctatggcgttcatggttatttaatggattcctacgccatgaaagccgcaacgcaaattgcgttgggggataattttggttacgtaggttatgtttttgttctggcattttttaccaacctgttactggtactgtttggtcgctataccggtgccaaagggatattcctgaccggtaatactggggtgtcacattcgcaggccgtattatggttaattgttttttggttaggatttagttggaccacgtcgattattatcgccggggtattaacgggtatattctgggctttttccaccacgctcattgttaaacctatcgccaaagtgactaaagatgctggttttactattgcccataaccagatgttgggattgtggtttttctccaaattcgcccataaatttggcgacccggaaaagcacgatgctgaaaacctgaaacttcccggctggctggcgatttttaaccacaacgtgacggctatcgccattgtgatgacgctgtttgtgggcggtttcctgctctccacgggcattgataacgtccagatgatggcgaaaggtaaaccctggtacatctatatcatcaatctgggcttacagttctccatgtacatggtcattctgttgcagggcgtgcgcatgatggtcggtgaaattaacggttcttttaaaggctggcaggatcgctttattcctaacgccattcccgccgtcgatgtcgccgcactgttgcctttttcacccaatgccgcaacgttaggttttgtcttctgtacttttggcaccattttctcgatgggtatcttattgctgatccacagccccattatggtattgccaggctttgtacctttatttttctcaggcggcccgattggtgtattagcaaaccgaatgggcggataccgctccgtaattatctgtaccttcttgctgggtattattcagaccttcggtacggtgtgggctattcctttaaccgggcttgctgaaaatggcgtcggctggacaggaatatttgactgggcaaccgtatggcctgctatttgtgaagttctgaaatttatcgctgcaacattccatcttggtccttacgcgggataa

SEQ ID NO: 13084 - DNA, 321 bp, Escherichia coli
atgaaagatacaattaatattttgtttgtctgtggttatggtgtcggtagtagcgtgatgttacaaacggttgttaaaaaagcgctgacgaaatatgagttcaaagttgaaatggaacataccgccgcaggcgaggtgggaggctttaccgattgggcggatatttttgctatttccaaaaaattactcgacgtggtcagcctggacccaaaacacgggcaatatctgattccgattgaaaatattatggatggtgaaacgattggcgcgcagatttatgaagtcgtccagcagcatttccctcatctgctaaataaataa

SEQ ID NO: 13085 - DNA, 1482 bp, Escherichia coli
atgaaagccattattctcctgttcgatagcctgaacaaaagatatttacccccgtatggcgatttattgacaaaagcagagaacttccaacgcctggcggcacatgccgccacctttgaaaacagctacgtcgggagtatgccctgcatgcccgcccggcgagagctgcataccgggcgatgcaacttcctgcaccgggagtgggggccgttagaaccgtttgacgactccatgccggagctgcttaaaaaggcggggatctatacccacctgataagcgatcatttgcattactgggaagatggcggcgggaattatcataatcgctacagttcatgggagattgtgcgcggccaggaaggcgatcactggcaggcgagcgttgcgcaaccgcctattcccgaggtgctaagggtgccacaaaagcagaccggcggcggtgtttctggcctgtggcgtcatgactgggccaaccgggaatatattcagcaggaagcggattttccacaaaccaaagtctttgatgcgggttgtgcttttatccacaaaaatcacgcggaagataactggttattgcaggtcgaaacgtttgatccgcacgagccgtttcacacaacgcaagagtacctttcgttgtatgaggatgactggagcgggccgcattatgactggccgcgtggtcgggtgctggaaagcgacgaggccgtggagcatatccgctgccgctatcgctcgctggtgtcgatgtgcgatcgcaacctggggcgcattctggacctgatggatgagcacgatctgtggcgagacaccatgctgattgtcggcaccgatcacggttttttactcggtgagcatggctggtgggcgaaaaaccagatgccttattacaacgaggtagcgaataacccgctgtttatctgggatccgcgcagcggcgtaaaaggcgaacgtcgtcaggcgttggtgcagatgatcgactgggcacctacgctgtatgacttttttcagcagccggtgccgcccgatgtgcaggggcaaccacttgcgaaaacggtcagccacgatgaaccggtacgcagcgcggcgatgtttggtgtctttagtggtcatgtcaacgtaaccgatgggcgttatgtgtatatgcgtgccgcgctgccgggtcgtgaggatgatattgttaactacacattaatgccgattaaaatgaacagccgctatccggtggatgagatgcggactttatcgctggcccctccgtttcgttttaccaaagggttacaggtgttacgcatcccggcgcaggagaaatataaggggctgaatcagtttgggcatttgctgttcgatctgcaaaacgatccgcagcagttgcatcctattgatgatgatgcgatcgaggcccggatgatcgcgttgctgatccagttaatgaaagataatgatgcgccgccagagcagtttcagcgcctggggttagcgtag

SEQ ID NO: 13086 - DNA, 1089 bp, Escherichia coli
atgatgaagcgcaatattctggcagtgatcgtccctgctctgttagtagcaggtactgcaaacgctgcagaaatctataacaaagatggcaacaaagtagatctgtacggtaaagctgtcggtctgcattatttctccaagggtaacggtgaaaacagttacggtggcaatggcgacatgacctatgcccgtcttggttttaaaggggaaactcaaatcaattccgatctgaccggttatggtcagtgggaatataacttccagggtaacaactctgaaggcgctgacgctcaaactggtaacaaaacgcgtctggcattcgcgggtcttaaatacgctgacgttggttctttcgattacggccgtaactacggtgtggtttatgacgcactgggttacaccgatatgctgccagaatttggtggtgatactgcatacagcgatgacttcttcgttggtcgtgttggcggcgttgctacctatcgtaactccaacttctttggtctggttgatggcctgaacttcgctgttcagtacctgggtaaaaacgagcgtgacactgcacgccgctctaacggcgacggtgttggcggttctatcagctacgaatacgaaggctttggtatcgttggtgcttatggcgccgctgaccgtaccaacctgcaagaagctcaacctcttggcaacggtaaaaaagctgaacagtgggctactggtctgaagtatgacgcgaacaacatctacctggcagcgaactacggtgaaacccgtaacgctacgccgatcactaataaatttacaaacatcagcggcttcgccaacaaaacgcaagacgttctgttagttgcgcaataccagttcgatttcggtctgcgtccgtccatcgcttacaccaaatctaaagcgaaagacgtagaaggtatcggtgatgttgatctggtgaactactttgaagtgggcgcaacctactacttcaacaaaaacatgtccacctatgttgactacatcatcaaccagatcgattctgacaacaaactgggcgtaggttctgacgacaccgtagctgtgggtatcgtttaccagttctaa

SEQ ID NO: 13087 - DNA, 342 bp, Escherichia coli
atggccactatctctccaacttcaattccttccatacaaacacagagtagtaacagggcatcagaaggtagcgatgttgcttcacaaattgcgcggataagtcagcaaatcatcaaactcactcaacaaattaaagagattgcagacactagcggcagtgctgaagacaagcaaaaacaggccgaattgattcagcagcaaatcaccctactggaaacacaactggcgcagttgcaaagacagcaggcagaaaaagcgcaggagaaagagcagcgtttgtctctgaatgcatcccttccaaatcctgttgaaaaaacgactcagatcgatatctatatctga

SEQ ID NO: 13088 - DNA, 999 bp, Escherichia coli
atgaaactttttcgtatcctcgatcctttcaccttaaccctgatcacggtggtgttgctggcctctttctttccggccagaggcgatttcgtccccttctttgaaaatctgaccactgcagctattgccctgctgttctttatgcacggcgcgaagttgtcgcgtgaggcgattattgctggcggtgggcactggcgactgcatttgtgggtaatgtgcagcaccttcgtattgtttccgattctgggcgtgctgtttgcctggtggaaaccggtaaatgtcgacccgatgctctactccggttttctctacttgtgcattctccccgctaccgtgcagtctgcaatcgcctttacttcaatggcgggcggtaacgtcgcggcagcggtttgttctgcgtcagcatccagcctgttggggattttcctttcaccattgctggttggtctggtgatgaatgttcacggtgcagggggcagccttgagcaggtcggtaaaattatgctgcaactgctgctgccgtttgtgttggggcatctttcccggccgtggattggtgactgggtgtcgcgcaataaaaaatggattgcgaaaactgaccagacgtccattctgttggtggtttatacagcgttcagcgaagccgtcgttaatggtatctggcataaagttggctggggatcattgctgtttatcgtggtggtcagctgcgttcttctggctatcgtgatcgtagttaacgtctttatggcacgccgactgggcttcaataaggcagatgaaattactatcgtcttttgtggttcgaaaaagagtctggcaaatggcatcccgatggcaaacattcttttccccacatcggtgatcggtatgatggtgctgcctctgatgattttccatcagatccaattgatggtctgtgcggtgctggcgcgtcgatacaaacaccagaccgaacagttacaggcgcagcaggaaagccgcgccaataaagcttaa

SEQ ID NO: 13089 - DNA, 1389 bp, Escherichia coli
atgcaaatcgtctctgtcgatattggatcgacgtggaccaaagcagccctcttcacccgggagggggacgcgttaacgttggttaaccacgttctgaccccaaccaccacccatcatctggcgaaggggtttttctccagcctggaccaggtgttaaacgtagataatgccctccccctgttaaacagtggtgaggttgcattgaagtattcctcctctgccaaaggtgggctggcggttgccgcaatgggattggtgccttctatcaccctggaaaccgcgaaagtaaccgctcactctgcgggtgctaaaattgcgcaatattacgcctacaagctgaaccgccgtgatatccaggcactggaagaaacgcagcccgatattctcttgttcaccggcggtaccgacggcggagaagaaagctacggactgaataacgcccgtgtgctggcagaatccaaactcgactgcgccattatttatgccggaaaccgggatattcaggacaaggtgcaggagatcctcgggcataaagacctgaccatcgtcgacaacgttctgcccgatcttgaccatccgaaccctttagctgcacgccaggctatctgtgacatattccttaaacgcatcgttaaagggaaagggctggatgtcattgttgataaaacaggcgaagaaccaatgccgacaccatggacggtctttgaactggttaaggcaatcagtaacgtcgatcacagctggaaagagttcatgctgatcgacatgggcggcgcaaccaccgatgtctattccgcctgtgccaacacgctctcgcccgacactgttttacatggcgtaccggaacccttcgtaaaacggacggtggaaggcgatctgggaatgcgcgtctcggcaatggtggttggtgaaagtgcgaaagagttagtcaatgtgaattttgctcagcaacccgcacagctggacgctttttatcattacctccgccatctagtcgctcatcccgactacttacccgcgaatgcagaagaaaaatatttcgataccgtcctggccggactgtgtgtgggttatgccaccgaaagacatgcgggcaccaaaaaagaggtctgcacctgcgtcggcaatgtcgatttacagatgggacgtgacctgacaaccgtgcgtaaagtcgtgggttccggcggatggctctcgcgtgccagtcagttcgatatgcatcactggttgaaataccgcgagttaaacgacgacggtaaacgcattctcttaccgaccgaatttgaatattaccgcgattcccgggggctattaccactgctggcaaacgtcgccagagtcgatccactggccgccgcgcgcaccagtattcaatgcttaaccctataa

SEQ ID NO: 13090 - DNA, 1857 bp, Escherichia coli
ttgaatcagaccgatagcgatgataaccatgaacagtcaggcgaaatatcacgcacctatctttttcgtccattaccgcaattaggttcaaaattaacccttggtgaaacggatttcagttccaatattttcgacggcttttcttataccggcgcggcactggcaagtgacgatcggatgttaccgtgggagctacgcggctacgccccacaaatcagcggcattgcacaaaccaacgccaccgtcaccgtgagtcactcagggcgagttatttaccagaaaaaagtcccaccaggtccgtttatcattgatgaccttaatcagtccgtccagggtacgttggatgtcaaagtgacggaagaagatggtcgggtgaacaatttccaggtttcggcagcatcgacgcctttccttacgcgccaggggcaggttcgctataaacttgctgccggtcagccgcgaacatctatgtctcatcaaactgaaaatgaaaccttttttagcaatgaagtttcctgggggatgctgtcaaatacctcactgtacggcggcctgctgatttcgggtgacaactaccattctgccgcaatgggtatcgggcaaaatatgctctggcttggtgcattgtcgtttgatgtcacctgggccagtagtcagtttgatactcagcaagacgagcggggcttaagttaccgctttaattacagcaaacaagtggatgccactaacagcacgatttcgctcgccgcttatcgcttctcagatcgtcattttcacagctacgccaactatctggatcacaaatacaacgacaacgatgcgcaggacgaaaaacagacgatcagcttatccgtggggcaaccgattaccccactgaacctcaatctgtacgccaacctgctgcatcaaacctggtggaatgcagacgcctccacgaccgccaacatcacggcgggttttaatgttgatattggtaactggagagatatctcgatctcgacgtcattcaatacaacccattacgaagataaagatcgcgacaatcagatttacctgtcgatttcgctccccttcggtaacggggggcgggtcggttatgacatgcaaaacagtaatcacagcaccacgcaccgcatgtcgtggaatgatacgttagatgaacgtaatagctggggcatgtctaccggactgcaatccgaccgtccggataatggagcccaggtgagcggtaactatcagcacctgagttcagcgggtgagtgggatatttctggtacctatgccgccaatgattacagttccgtcagcagcagctggagcggttctttcacggcaactcaatatggtgcggcgttccatcgtcgcagctccaccaatgaaccacgtctgatggtcagtaccgatggcgtggcagatattccggttcagggcaatctcgactacaccaaccattttggcattgcggtggtgcctttgatttccagttaccagccttccaccgtggcggtgaacatgaatgacttacccgacggcgtaacagtggcagataacgttatcaaagaaacgtggattgaaggcgcgataggttacaaatcgctggcttcccgttccggtaaagacgttaacctcatcattcgcaacgccagcggtcagttccctcccctcggtgcggatatccgccaggaggatagcggcattagcgtgggaatggttggcgaggaaggacacgcctggttaagtggagtcgctgaaaatcaacaatttaccgtgatctggggtgatagccagcgttgctcgatccatcttcctgaacatatggaagacaccgcaaatcgcctgattttaccttgtcattaa

SEQ ID NO: 13091 - DNA, 153 bp, Escherichia coli
atgctgacgaaatatgcccttgtggctgtcatagtgctgtgtttaacggtgctgggatttacgcttctggtcggagactcgctgtgtgagtttacggtgaaggaacgtaatattgagtttaaggctgttctcgcttacgaaccgaagaagtag

SEQ ID NO: 13092 - DNA, 300 bp, Escherichia coli
gtgctggggggggaatataccgaaggcaaagcgcctacaatttgtctggaaggaaaagacaatcgtactggttcacatggtgcattacactcagctacaggcactctaatagaagaaaagcattttggaaaagaaatgagttataaagatgccagatgtatggtaattgatgaggttgcattaatgtacggttgtgataaatcttgtttgaaagcgcaactggataaagcttaccaagacgcttatacctgtggtgatttaactctgcaaaaatcaatgcaggtgatgggggtgttataa

SEQ ID NO: 13093 - DNA, 1041 bp, Escherichia coli
atgatcatagatatagaatcgtatcagaaatatctcaaaggcttttatatatatgactgcacctatggttacgagcatggaaaagtaggtctttcattgattgaagtggtagatgaggagcatgccgaatatgaaaaccctttttacccacctgaaaagagattaatttccattacgtttaccctctccaaaaaatatcgcatatatggtcgtcgcgcaacagggatatctctgatgactatatcttctggttggcccccatctcagaccgaatatgttatggtcagtcaggaccgtgatgttatgagttataaagaagatgtatacaaaggagtagaagaaagtataaatatactcataccaggttctatcgatatgttttccgttataataaaagtagtacgaattgaaaacagtgtttacgctatcggtagtggtttcagaatatacaaacgtgttgatcaccaaatttggcgggaacattctacatacctgcctgtccccgatggattgttagataggaaggtagaagcaataaccagaagtcgattccgagatttatctggtttttccgaatcggatatgtatgcagtgggcggaacgggaacggtttatcactttaatggtgagcaatggaaacaactcccttttccgacaaataaacttctgtacacagtttgctgtgccggtgacggatttgtttatattgctgattttgacggtgctatatggaagggtcgcaatgaacaatggacacaaattacgcatggtggaatgaccatgccattcctcgacatgggatggtttgatggacgtctctggtgtgccagtgattatggcatctgggtgctggaagatgacaaactggtgcttgccatgcatgcaaaacataaacccgtccctcctgaagtggccgttttaagtaaaagaattgatgtttcacccgatgggaccgtgatgatggtttgtggttccagaggagctgctatttatgatggtaatgcctggaatgtcctctttgattcaatggcgtttgaatag

SEQ ID NO: 13094 - DNA, 1041 bp, Escherichia coli
atgattattagtcaagaacgttgggataaaacctttaaaaattttgaagtatatgattgtacatatggctttgaacatggccgcgttggcttattattaattgaaaaaattgatgaaaatcatatcgaatatggcaacgactattacatgcctaaacacaagctggtatcaatagttattgacaaccctcctgaaaacaaggtgtttgggatgtctttcggtaatttgagctatccaacgatatcggctggatggtcaccttcccaaactgaattagttatagttgatatcgactgtgaagtcataagctacaaaaccagagaatacaagggacgagaaaataatctggatattcctatttctaaatcctcagacatgagaacagctataattaaggtagtcagagtaggaacaagtgtctatgcaattgggggagggttaagaatatataaacgaattaatcatcaggtttggctggatgcttcacaaactattcctgttcccgatggattcctggaacggaaggctgagtcgatgtccagaagcttatttcaggatttatctggtttttccgagtcagatatgtatgcagtgggtggaacgggaaccgtttatcactttaatggtgagcaatggaaaaaactcccttttccgacaaataaacttctgtacacagtttgctgtgccggtgacggatttgtttatattgctgattttgacggtgctatatggaagggtcgcaatgagcaatggacacaaattacgcatggtggaatgaccatgcctttcctcgacatgggatggtttgatggacgtctctggtgtgccagtgattatggcatctgggtactggaagatgacaaactggtgctcgccatgcatgcaaaacataaacccgtccctcctgaagtggccgttttaagtaaaagaattgatgtttcccccgatgggacagtgatgatggtttgtggctccagaggagctgctatttatgatggtaatgcctggaatgtcctctttgattcaatggcgtttgaatag

SEQ ID NO: 13095 - DNA, 282 bp, Escherichia coli
atggaaactaacgtttatatcaacgggcgggaagcctgctccagagcgtctgacgggaaatctgctggcgcatttcccgatccctgctggtcccctcctcctccgcccacaggcccggtcgttgtgccttattccaacacggcgtatgcccgggatttgcagaacggaacagctaccgtatttatctgtaagtcgatggtggcacagaaagatcgctcgtatttctctaccagtgaagggaatgttccggcgacaccgggattccagaaagggcatgggtga

SEQ ID NO: 13096 - DNA, 1011 bp, Escherichia coli
atgattattactcaagatgagtacaatgaaatattcaaagggttttatattaatggtgttgcagtaagagacactggttatatttatataactacacgagaaaagcgagatgatatagaccctgtaatggaagaacatctggcaagaaaaaattttgtttcctttttttttgatgaaccattaggagagcaatggggatacagcggttatgaaggaatggacaagatattttcggctacaaccagtattccattcagtcagtacgtgggcgttacaatggaaaatgaggtttttgctataggtagtggttttgaagggcttgaagaaccgatcccatatgaatttgccattagcaatacccggactattggtggtcgattgtatgttgtaggatccgcacgtagtgttgttcgcaggatagatagaaataattgggagaaactaaataaaggtatccatctccctgcgcaagatgaaattaaaacaatccgtgaacagatgctattcctggatgctgctggttttagttgtgtggatggcttctctgaaaatgatatctatgccgcaggcggtaaaggagatgtctggaatttcgatggtgatgaatggaggcaaattcattttcccagcaacatgctcattgaatctatctgttgtggtcaggatggctatgtttatatcggtgcgcaaagcggtactgtatttaaaggtcgaaaagatcaatggaagatgattcatcggggggagttaaccttaccgttcaggcaaatggtatggtatgaaaattgtgtctgggcaacgtctgattatggtgtgtggcaaataatcggggatgatgttgttcagccagatttacccagcgaggtaaaaatgtgcactggttatatcagttgtacagaaaaaaccctggttctggctgggtattatggtgtagctcgcttagagaacggtcactgggatatattgattaattgtgttcaggcagagaaaggtgatttctgttctgaatag

SEQ ID NO: 13097 - DNA, 279 bp, Escherichia coli
atgaaagcccgcgtcctggctgtcctgcgttctctggaacataaagtggcggattaccctcatctgatgctcacttcctgtaccggtgaggttggggctgcctccggcccactgatgctggcatatctggcgtctgtgatgtcccgcaccgatggtccgggaaaaaaaggactgctacatctgagtgccgataatggtcagcgtgctgcggcaattgtcagggaaagagcatggtgtgccgtaggcacaaagatgcaaaacgggacgttttgcatgtaa

SEQ ID NO: 13098 - DNA, 1698 bp, Escherichia coli
atgcaactgcaacatggaaaaaatactacacaacaatatatatttggcaactttgtattaaaaaacaatggaatattattattcaaaaacaaagaatatcatattccaccgaaagaacttggcgttatcattctattacttaatgctgacggtgaaattgttagcaaagaagagattatcgataaggtctggagcgcgagtgttgccagtgatgaatctctaacacgatgtatttatgcattgcgcaaacttttgcatgagaataaacagtgtaagtatatcgaaacggtctatggtcgtggataccgttttactgtacctattgtgattgtgaccgataatgaaccggtaaagtcgaccaccactcttgccgtttttccctttcgtaccgaaggttcgatcaatgttctaaaactccattacgaacttgtccagggcctttcaaaatatgctttttgtggtttagatattttacccgcttcggtaacaaatgaggccagtgatttctccactatccatcagtttatcaataaaacaggtccagaatattatattatgggtcaggtcgttcactatggtaaaaactggcgtttatttattgagttaattcatgccagaacacataaattgattgatcatcaaagcattgatttcaatcccgataatcctctttccgtattattatcacaagtaattaatattcttattgaaaaaatacccaacattaattttaaatctattaatacacaacaaatgccatctctggattctgctgttatgtatatgaatggcagaatggaaatgtaccgttatacaccagagagtttgaaacgagcattagtaatatttagagattgtgtaagtacgcaaccgcaaaataccttgccctactgttgcctggcggaatgccatatatcattagccctccttggactcagtgaacaaaaacaagcaataactacggcagtaacctccattgaaaaggctcttgaaattaacccttcaaattctcaggcattgggtttactgggtttaatcagtgggctaaaagatgaacattcagtgtctaatgtgctatttaagcaagcacatttactcaaacctaattcgccagacgtttattattatcagtctctgctatgttttttgaacggtgaccttgcaagagcatttaatctaatagaaaaaagcattgctcttgaacccaataaaatgggtataagcattcttaaattaattatactttattacacatcccccctcgataacgcgatatcttttgcattaaatcttaacagtcaaaacacctgtaacaatccaattattacctctattctggctatgttcatggcactgaaaggacataatgataaagccaaaagtttattgcttaaacttgagcctgaacatggtcttgattacacctgtgttaactcgctttatacgaagtttctgatctatggcgcatctataaaaaatgacattatgaagttactggcaaatattagcaccaacaaaatcaatggtgttattttgccgttaatttacactgtgtatggtaaaaaagaatatgaaaagcgctggcaacaattaattaaagagaatgatttatggtcaaatgttttgcttcatgacccccgtttgctcagtgtgaaaaacgaatttaatactattggtgtgatgcgtacttctgcgtaa

SEQ ID NO: 13099 - DNA, 1152 bp, Escherichia coli
atggccacctatgaaattaaaaatgcgaccagcacacataatattaacaatctcgataaaacaatctttgatagagattatagtaaagaaaacaacataccaaatgataataaaattgtgcaatactataaccttaaagatattaagcatgacataagctctcagtttataatattaaaaaatacagacagagaagtctgtccggaactaagagtaaaactattggataatcttaattattcaaggaatacgctagataatttgaggggtgaccttaacaaacctacaattacatccagtcaatcaagcagttctacagagcagaccactattaaaatatctaaatttaatatccttgatatgctagataatttgaccatgcgacaacaagctgttatggaggaatttttaagggtattcacatcaatgtataaagcctcagctatgtctgaggctattatgagcaatgtttttgaacaacttgtccagtatcagagaaaagaaaccgaacgcgccacagcagcaagttcgataggtgttattatcgggtcaggagttggcgcagtcggggcctcggcatctgccgtagcaaattacagaagccatcccaaaaagatggtaacccttacacctgaccaagagcatactatcgaaagaactgatgataatgcacagcgcgcgtcaaaaagggaagttatagagcaacaagcttctctcaaacaaatagatgaaaaaataaaaaatacaacgaaagatacgaatcttaatgaaaaagaaaaagaagaggcgctgaaatcatatgataaagaaaaagaagctactctagaaaagattagagatacaaacgagaaaattagcacaaaacataacaataggtataataaatattttactataggtaaagcagatgtactttcacagcttagcaatgaatcaattcgagcaacatctagatatctagaaagcactactcatgcagaaaaagacattgttgaacaggctaaaaatgttatgcattcagttatgagtagctatctggatcaaattagtcgtgatgttcaaggaagagatcaggcacttaatttattacagcaaataatacaaaccattattgatactgatagcgctatcgttcaaggcattcgctcataa

SEQ ID NO: 13100 - DNA, 1008 bp, Escherichia coli
atgtctcaactcaatgatagtgacatcatcctttttgagtataactttcattatcaaaatataagatctaaaaatactcttgatatcgcatttggtattgacagaaattttctttttggatgtggtgtagccatcgcatctattctattaaacaatagcgaaatctcttgtgaatttcatgttttcacagattatatcagtgataaagacaagttatatttttccgatttagcaaaacaatataattcaagaattaatatttatgttatcaattgtgataagctgaagtcattaccaagcacgaaaaactggacttacgctacatattttcgatttataattgcagattatttctataataaacatgaaaaaatactataccttgatgcagatattgcttgcaagggtagtattaaagaactcttagattatcaattctctactaatgaaattgccgcagttgtagctgaaagagatgttgaatggtggcagaatcgagcctcggtattaactacaccacaattagcttctggatatttcaatgctggttttttgctgataaatattgatgagtggaatctaaataacatttcgtcaaaagctattgaaatgttgcgtgacccagattgggtaagtaaaatcacccaccttgatcaagatgtactgaatgtattattgaatggtaaagtgaagtttatttcggggaaatataatacccgatatagtattaactatgaattaaaagacaaagttgataatccagtcaatgatgacaccgtgtttatacactatgtgggacctacaaaaccctggcatgagtgggctgattatccggtgtcacgtagttttttgatcgccaaagcagcttctccgtggtgtaaagaagatttacttaaacctgtgaatagcaatcagtatcggtattgtgcaaaacataaatttaaacaaaagcattatatggcaggcatttttaattatttaaagtattataaagaaaaatgcttctaa

SEQ ID NO: 13101 - DNA, 708 bp, Escherichia coli
atgatatataataaaacgataaatgggttgaaagttttcataaaagataatgatcccttttatgagcaagtgctgaatgactttttaacttgcagggttaaaacattaaaagtttttcgttctattgatgatactaaagtcattcttattgacactgctcgtggacctcttgtacttaaagtttatgcgccaaagcataaaatgatcgaacgtttcttaaaatcttgcgtaaaaaaagattattatgaaaatttaatttatcaaaccgatcgggtacgtggtgaaggcattcaatcaattaatgactattttttgcttgctgaacgtaaaacattaaatttcgcgcattattatattatgctcattgagtatattgaaggtgtcgggttaaatgagtatttggaaatttctgaagatctgaaggaacaattatcagaatcgataaaagagttgcatcagcatggaatggtgtctggcgatcctcataaaggaaattttatagtatccgaaaaaggtttaagactaattgacctttcaggtaaaaaaacaaccgcagttttaaaagcaaaagatcgcattgatcttgaacggcactataatataaaaaatgaattgaaagactttggctatacatatctcatattcaaaaagaaaattaaaaaagcaatcagggatgtaaaagtaaaactaggattgaagagcaaataa

SEQ ID NO: 13102 - DNA, 1014 bp, Escherichia coli
ttggattttaaacatcttactcaatttaaagatataattgaactggacaagcgccccgttaaacttgatgaacgggaaacgtttaatgtctcatggggtattgatgagaactaccaggttggggctgcgatttcaattgcttcaattcttgaaaataataaacaaaacaaatttacctttcacataatcgctgattacttagacaaagagtatattgaattattatcacaattagcaacgaagtatcaaacagtaattaaattatatcatattgattctgagccattgaaggcgctacctcaatcaaatatctggccagtatctatttattatcgtttgctttcatttgattatttttctgcgcgattggattcattattatatcttgatgctgatatcgtctgtaagggttcattgaacgagttaatagcattagagtttaaagatgaatatggggctgtggtaattgatgtagatgctatgcaaagtaaaagcgctgagcgtttatgtaatgaggattttaacggtagctattttaactctggtgtaatgtatattaatttacgggaatggttacaacaaagactaacggagaaattttttgatctattatcagatgagtcaattatcaaaaaattaaagtatccggatcaagatattttaaacttaatgtttttacatcatgctaaaatattaccgagaaaatataattgtatttatactataaagtcagaatttgaagaaaaaaatagtgaatattacacccagtttattaatgatgaaactgtcttcatacattatactggtgtaactaagccatggcatgattgggcggactacgcatctgcagattattttcgtaatatttataatatatctccatggagaaatataccttataaaaaagctgttaaaaaacatgagtacaaagaaaaatataaacacttgctttaccagaaaaaatttctcaatggtgtttttacagcaattaaatataatgttatgaaaggttaa

SEQ ID NO: 13103 - DNA, 1143 bp, Escherichia coli
atggttgataaaataatatttacagttactcctattttttcaattcctccccgcggagcggccgctgttgaaacgtggatgtatcaggttgctcagcgtaccaatttcccaaatcgcattgtttgtatcaagaatccaggatactcaaattacacctttgttaatgataattgtagtattcatagggttggattcagtcgcatatataagcggttatttcaaaaatggacaagacttgatcctctaccatattcacagagaatattgaatattgcccatgattttcctataacgaaagaaagtattattgtagttcataatagcatgaagctatacactcaaattcgtaagcgagctcctcaggcaagagtggttattcatatgcataatgcatttgaaccaaaattgcttgagcaaaatgttaaaatgatagtgcctagtttatacttgaaaaagtattaccaatcttatttagcaaatgcagatattgagattgtaccaaatggaattgatttagaaacctatcaatctacttttcagccgatcactagaagcgaacttaatatctcccctgaagagaaaattattttttatgctgggcgtatcgtccctgacaaaggcatattactgttgatgcaatcattcgaaaaattggccgttgctcacaaaaatttaaaattagttgtgattggtgattatacagaaatgagtaaaagtgacaaaggtgcatatcaacacaatgtcagggaaattgcaaaacgtttgaaggatcgttgcattatgttaggaagcataccgcctgaaaagatgcattgttattacccactggcagatttagttgtcattccttcccagttccaggaaccattttgcatggtggcaattgaagctatgggggctggtaagcctgttttagtgagtacgcgtggggggatgacggaatttgtcaaagaaaatactacgggattccatttaaaagaacctatgactgcagactccataagcagcgatattttaaaaacgttagcgaatcctgaattaacagcagttgcaaagcaaggtcaggattttgtgtttgatcactacagttgggatggcgtaactcaaagattcgaagaggtcattcataattggtttgaataa

SEQ ID NO: 13104 - DNA, 1209 bp, Escherichia coli
atgacctcaacattatttttctctctcgagaaaaaaaactggatagcgtactggaacagagctctcgtattcttattcattaccacctattttttgggtgggattacaaggtataaacatcttattgttattcttatgacaataacgacaatcgtctatctctgcaaacggccaaaacactatctttcactatttaaaacatgtctttttggtagtgttgccatattaactattgctgcattgctatcacttcttcaatccccagatgcaggtgctagcatgaaggaaattttcaaagctatcattgaaaatactttactatgcacaatagcaataccggtcatattgagagacgagaaaagagaagatgtcgaaaaaatcgttttcttctcatttataagtgcgttgggcttacgttgtttttctgaattgattgcctattataaggactatcaacaaggggtaatgccatttgcagattatagacaccgtagcatttctgactcgatggtctttttatttcctgcattgttaaatctctggcttatcaaatcagcaaaataccgcatttcttttgcggttctaagcgttatttttatttttctgatattaggaactttatccagaggagcctggctttccgtgttagtcattggattaatatggattctgatgtttaaacaatggaagttactattagtaggagtaatggtttccatcattgcattatcggttattttcacacataaggagatgaccgcaaatctaacgtataaacttcaacaaactaatagttcttatcgctatgcaaatggtactcaaggcagcgcactcgatctaatattagaaaatcctgttattggttacggttacggtaacgttgcatataaagatgtctataataaacgtgtcgttgattatccagaatggacctttagacaatcgatagggccacataattttgcgctattcatctggtttggcactggtttattagggctgataagtcttatgatgctatactgcgcaatattgaaagagtgtataaaaaatggcgtccagaataaaaaccgctcaccatataatgcatattatataatcttactatcttttataggttattttgttatccgtggaaacgtagaacaaattgaaccaaatttattaggcgtttacgccggcttattattagcaatgaaaaacaagtaa

SEQ ID NO: 13105 - DNA, 858 bp, Escherichia coli
atgaaatcatccaccacaattatcactgcatattttgacattggtagaggggattggactgctaataaagggttccgtgaaaaactagctcgttcagttgatgtttattttagttactttgagcgtctggccgcacttgaaaatgagatgattattttcacttctcccgatttgaaaccaagggttgaagcgattcgcaacggaaaaccaacaacggttatcgttatcgatataaaaaagaaatttagatatatcagaagtcgtatcgaaaaaattcaaaaagatgagtcgtttacaaatagacttgagcctcgacaattaaaaaacccagagtactggtcaccagagtatgttttggtatgtaaccttaaggcctattttgtaaataaagctatcaacatgggcttagtgaaaactcctcttgttgcgtggatagattttggctattgccgtaagccaaatgtaactcgaggattgaaaatttgggatttcccatttgatgaaaataagatgcatcttttcactataaaaaaagggcttactgtcacatctcaacaacaggcttttgatttcatgattggcaatcatgtatatattattggtggcgcaattgttggttcacagcataaatggaaagaattctataaattagttctggaaagtcaaaaaataaccctaaacaataacattgtggacgatgaccagggcatctttgtcatgtgctattacaaacgttccgatctcttcaacctaaactatctggggagaggaaaatggttcgatttgtttcgctgcttcaggagtaacactttaggggcaaaaatgcaggcgctgagaattttcctttcaagaaaatag

SEQ ID NO: 13106 - DNA, 630 bp, Escherichia coli
gtggcagccaacaccaccaatatcgccacgaataccaccaacatcaccaacctgactgacgcagttgacagcctcggtgacgattccctgctgtggaacgctacagcgggggcattcagcgccgcacacggtactgatgccaccagcaaaatcactaacgtcaaagacggtgacctgacggctggcagcactgacgcggttaacggctctcagctcaaaaccactaacgatgccgtggcagccaacaccaccaatatcgccacgaacaccaccaacatcaccaacctgactgacgctgttgacagtctcggtgacgattccctgctgtggaacgctacggcgggtgcattcagtgccaaacacggcaccaacggtactgacagcaaaatcaccaacttactggcaggcactgtatcctctgatagcactgacgctattaatggctcacaactttatggcttagctgattcatttacgtcataccttggcggtggtgctgatatcagcgatgcgggtgtattaaccgggccaacctacactattggtggtactgattacaataacgtcggtgatgctctggctgccattaacacgtcatttagcacatcactcggtgacgccctactctga

SEQ ID NO: 13107 - DNA, 1287 bp, Escherichia coli
atgaaaacctctctgtttaaaagcctttactttcaggtcctgacagcgatagccattggtattctccttggccatttctaccctgaaataggcgagcaaatgaaaccgcttggcgacgggttcgttaagctcattaagatgatcatcgctcctgtcatcttttgtaccgtcgtaacgggcattgcgggcatggaaagcatgaaggcggtcggtcgtaccggcgcagtcgcactgctttactttgaaattgtcagtaccatcgcgctgattattggtcttatcatcgttaacgtcgtgcagcctggtgccggaatgaacgtcgatccggcaacgcttgatgcgaaagcggtagcggtttacgccgatcaggcgaaagaccagggcattgtcgccttcattatggatgtcatcccggcgagcgtcattggcgcatttgccagcggtaacattctgcaggtgctgctgtttgccgtactgtttggttttgcgctccaccgtctgggcagcaaaggccaactgatttttaacgtcatcgaaagtttctcgcaggtcatcttcggcatcatcaatatgatcatgcgtctggcacctattggtgcgttcggggcaatggcgtttaccatcggtaaatacggcgtcggcacactggtgcaactggggcagctgattatctgcttctacatcacctgtatcctgtttgtggtgctggtactgggttcaatcgctaaagcgactggtttcagtatcttcaaatttatccgctacatccgtgaagaactgctgattgtactggggacttcatcttccgagtcggcgctgccgcgtatgctcgacaagatggagaaactcggctgccgcaaatcggtggtggggctggtcatcccgacaggctactcgtttaaccttgatggcacatcgatatacctgacaatggcggcggtgtttatcgcccaggccactaacagtcagatggatatcgtccaccaaatcacgctgttaatcgtgttgctgctttcttctaaaggggcggcaggggtaacgggtagtggttttatcgtgctggcggcaacgctctctgcggtgggccatttgccggtagcgggtctggcgctgatcctcggtattgaccgctttatgtcagaagctcgtgcgctgactaacctggtcggtaacggcgtagcgaccattgtcgttgctaagtgggtgaaagaactggaccacaaaaaactggacgatgtgctgaataatcgtgcgccggatggcaaaacgcacgaattatcctcttaa

SEQ ID NO: 13108 - DNA, 426 bp, Escherichia coli
atgcttgtgttaaaatcacaatcgattggattcaggatttccacaacttatttatctttaacatatacagagtctgatggcgtcaacattaaagtagatgctctggagttaatatcaacagagaaagattatgttcaaattgaactggtcttcactacagttgctgaagttaagtgtgctaccgtcaattttcatgaagccaactataacaatattgttattaagaaggttgatggtgaaaatctggactccggtatatatcaagtaatgaattctgtaccgcttgaagaaaaagagagattatatgaccctaaaaaacggttaaagttaaaacattatattatagcaggttatgatagttatgttgagattttagctactggttttagctgtatacgatgccaggcaatagatggtgttaaataa

SEQ ID NO: 13109 - DNA, 255 bp, Escherichia coli
atggcctatcatatagaaatattgaaaattgaagaaactgataaagtagtaaaatatgaatttggacctacatcttctgactattgtagatctgattacggcgagttcgtgatagataaaagaacgggtgagatgacattagtcagaatggttaaaaacgattcggctaataaattttatttgcgagcgagttttaagattctgacctgttggcgaaagggctatttgccaaaaaatgaggaatgggcttcttaa

SEQ ID NO: 13110 - DNA, 480 bp, Escherichia coli
atggattttcacttggatattttactccctacacgattcgctccagaggaactagatctacaagaggttatggttcactggggtggggaaacctttcatcgcgaccctccggtatacgcctggtgtaatcatcatcttttgcagagatgcaatctaccgattacttatggcccacctttagatgagcacatagactttaatgaatatcatgtttacaacttcaatggttctttagtcgatgacctggaaatggctgtgaataaaggaaaggatatttcaaccaatcctataattaaatttattaacaacctggttagcaaaaattacggggggtgggtaatcttgtcattagatgatgaaaaaatagaagtgattaaaaatataagcttccagtattcttttctatcattattagttgatggactaaaatgggaaagatcgcatggggtggcaatattatataattcacacttaatttaa

SEQ ID NO: 13111 - DNA, 303 bp, Escherichia coli
atgtatcgtgtaaaggttgtttggcttacagaaaatgaaggtggcagaaggagcgcacctcctatcggtagatattatcccgtctccaggtttccagaggagaaaactgactggcaaaataatgcatggagcgttgtttttgaattggaaaaacctaatgtaaccgatggacgtatcgtttcaatggggtgcgttcagttccttttcgataccgcccctgaacaatggatgactaagtacgaggcatttgagatctacgaaggaccaagaaaagtcgcagatgtattattgatagggaattaa

SEQ ID NO: 13112 - DNA, 585 bp, Escherichia coli
atgcgtaacaaaaaacgcatactattcttgctaacagtcattctttgcttaacaggtctttattcctgcaacaaaaactttctcttactctgggatgccaataatatgtatgtcagcacaagaaataatatcgataaagacaaggtaaaaatagaattcggtatcagcgtcaacacgatcaaccgagaaactgatgccgaattatttgctgacaaagataagtatgcagtgctcttcgatggtagcctgaaaaataagatgataaacgaatacggagaaaatgattttttaattacctacgataaccgctgctatttatcatttcgtcaatttaaaaccaatcgtcgtcatcaacatgactattattttggcttctttaacaacaatgggaatgtcttcgtcacggtcgaaattaaaggtgagaacccgcttaaatttacgcgtagtttgaatgatatgcgtcagcagtttacttcaaattatcagcatagttcggttcacccctgcaaggcgattaacggagaacgaatatctacccgttctccgtcaaaaaccattattccggcattgcctcacgcgggataa

SEQ ID NO: 13113 - DNA, 309 bp, Escherichia coli
gtgagtaccgctgatttcaataccgttagccgtgctcgtctggagagcggcatcgctgttctggatgatatctgtcgctttgccattatcgttgactgtcaacgtaccgccttcattaatcgttgtttttactgcctcaccgttagccgaaactgtttgtattccgccgtcgttaatcgttgtctcattcgccacaccctcgacgatttgttcaccgccggtaagcatcgtgccagtcgcagtggcttttgttttgacgatctcccgtccgcccgtattgacctgtgttttggcggaagtggtgtctga

SEQ ID NO: 13114 - DNA, 1455 bp, Escherichia coli
atgttagttagtaaaagcaacgaaattaacactagcacatttataaatagtggaaattgtaatgaaagaaaatcttctaaatccatggagttactagcttatagtattataaaattaatttgtaaagaagctgcctcagggacgtataacggtgctcttgaaattttacaaaaaatgatgtctgaatgtaaatatcatgaaggcaatgcttttgtcattatgggagccggagaacaattaaaacgtattaaatatgatgctaatgaaaataaattaaaagtatacaacgtacactttgataataatcaagagttagttgctgatggtgagcctgacgtagtatttttaaaaaaaacggtgtgggaagaccttctcgttaaactaaagctggagaacaaagaaaatgcggtttctgaaattaacctgtcatctaataaaaataatgttgatcagtttattgaatgcgctaagagaaatgaacagaccctattcggcaatataagaaaaagtgattttcatgttgcttcacttcagccaggtagaacgcgtagtgttatttcagaaacgccgccaaatgactgtatggaatcacataatttatatgaaaaccacacagatacggtttcaactgtaactaaaaattctcagcaagttaaaggtcactatggagataagttgaaagaaatgcagttgttcctcaaccagatgagcaatgcacttcaacaggattcatctttgttagagtcaaaggaacacaccatagatattcaagaaaaaacgaataagtttgtgcagcattttcagcgggtattatttgataaaaatggaaggtcatcagagtttctacttaatttttatgagtgttgctataagtttttaccaagagcgcagcctcaagataaaatcgatagctataattcagcactgcaagctttttccatcttttgttcatctacgttgacacataataatgtagggtttaatttcaaattatttccagaagtcaagctgtctggaggagagcttgaaacggtattcaaatacaaaaatggtaattttgtctgggagatagccagaattaaaattactctcccaaaagaagagggtggtttatataatttacgtggattggattttaagggatgcttcttttctggacagaacttcagtaactatgatattcaatatgtgaactggggaacgtcattgtttgatcttgatactccatgtatttttaatgcgcctgcttacaacaagagtaatgaaaaatcattagaacgcgtcagcgaaaacggtttaagtggagtcttgtctgatcgtaataaaaaaataaaactaatcacgggtgtggcaccattcgatgatattttatttatggatgatgactttgatgataactcccctgatgatggtcccgttgagaatagtcctgttgtgaatagtccccttgtatga

SEQ ID NO: 13115 - DNA, 864 bp, Escherichia coli
atgagaataacgattgcatcaataattttaataattagcgccactgcaataggcgccgaagataccccttcacattttgatattcccgagcaagtattaaataatattacgaaggaatcacgaaataaactgcaggatatcattgccaaggctcaacatggcgataaagcctcacaaacggtgatgggactcatatacctgaatggtctatctgaaagtccttcagtgaaggatataaacaaagcattttattggctcaaccttgcagcaaagcaaaattatgatgaagctgaattttacttaggacagatttatcattacggatatgataatacggggcctaactatcgtattgcgatatactggtatgagaaagcggcagaaaaagggaatgaacaagctcaaataaactgtgcgaatatttatcaatttggcccacaggaattccaaaacattaacaaagccaagtattggcttcagaaagcagtacagaaggacaatcctattgcacatgcaaacttagggattatcggaattcaagagaataagtatgctgaagctatccctcacttaaaaatagcggcagaaaagggtcagcgactcggccaatataattacgggacacttttttttaatggtcagggcgttcccaaagatatacgacaggctaaatactggtttgagaaagctgctactcaaaacttacctattgcacaaattactttaggacaaatttatgcctgggggcttgatggaaatggcataaataaagaagaagcgttgctctggttaaataaagccaaagcccaaggtcaatttactgataaacagatcaacgccattatttcaaaaaaaatagactaa

SEQ ID NO: 13116 - DNA, 198 bp, Escherichia coli
atgatcttgcgtactgtcagagcactgatttctctgacagtacgtgctgcgtgcaaaatcactacatcaaataaaccagccaaatctcatagagataagagtaaacaaaccaacagcagcaaagacatttatcagtactacagttctactggaaacattcatttttgccaccttttatcattgcccctatgtgtatag

SEQ ID NO: 13117 - DNA, 810 bp, Escherichia coli
atgaaagttcaattgtataaattcacggaagataaaaataaaacccttaccttcaggtggacgaaaaaacactttgagttttgtatggataataaaatctttttaaatcataaggggaagaagtcgtataaagaaagaaatttatttcttttctcaaaaggtgacaagataacaattgaagataatgttattgctgaagaatattcaacaatgcctgtaaaaaatttctccagtgtcggcgctttttcattcccgacctgtcattttacagggaatatacatataggtcgattttgtagtattgcatcaaatgtaaaaataatgggaggaaatcatcctttgaatcgttttactactcacatgatgacttataacggtgaatttgataagtttgctaagagtgagtttgaacgtagctggacattgaaaccattcattaccaaacctgaaaatccgattataggaaatgatgtctggataggaaatgatgttgtactgaaaggtggcatcgcaataggtgatggtgctgttattgctgccaattccgttgttaccaaagatgtgcccccatatgccatagttgcaggagttcctgcaaaaataatcagatttagatttgattcaaatgttattgatgaattgttgagaataaagtggtggaattataattactcagatcttccggataataacaaatgtgatgatataaattattttgttgaagagatgaatcgattgatatcaaatggaaatattcaagagatggactataaaaaattcaatctttctgagatatttagagacctataa

SEQ ID NO: 13118 - DNA, 495 bp, Escherichia coli
atggaaaaaatgtttcaaattttagaaaccgcctggcctgccgtaaaaacaacaggacttacaggttgcgtaaccgctccggaaactgaagataaccttcttttatttgaggataaatacgcaacacatattccaaaagactatcggcagttattgtctcattttggcgcatgtcattttgtcgatcctcaaatttatactttgaaggatctggacagatattaccctctatttttgcaacaatgggaagattataaaaaagaatatccattattgaacaacattgatccttttcctgttggcagttttggcgatgggagtgtagcttttcttgaccgcaacagcctaaaaatttatattctcattcatgattttggtatattttccgatgatgtcggtgatttcccttgtgagttatgctttgaaaattttggtgagttagtggaaatgcaagttgaaattattctttatttacagcaatgtggagtctcatga

SEQ ID NO: 13119 - DNA, 300 bp, Escherichia coli
atgaataataaaataatcgctcctattcttactgaaaacaaagtgaattcgatagcagaaaaatattgtaaaaagtataatcttaatggctcgctggcatacaaaatcactgctattaaatttcttcctgatggtatgaaatcatacggccttgatattccattatggatggtagtcagagatgttaaaggttgggatgatatggaaattacgatttttatttctgacaaaaacagtgaagttctttgttgcagtaatatttggtatccagtatatcgtcctcatcaagcagatttgtaa

SEQ ID NO: 13120 - DNA, 1758 bp, Escherichia coli
atggaaaattcacgcatccctggggaacatttttttaccaccagtgataatacagcgttgttttatcggcactggcccgctttacagcccggggcgaaaaaggtcatagtcttatttcatcgcggtcatgaacattccgggcgtctacaacatctcgttgatgaactggcgatgccagatactgctttttatgcctgggatgcccgagggcatggaaaaacgtcagggccgcgtggttatagcccatctcttgcgcgttcagtgcaggatgtcgatgaatttgtccgttttgctgccagcgacagccaggttggactggaagaggtggttgtgatcgcgcaaagcgtcggcgcagtgatggttgccacatgggttcatgattatgcgcctgctattcgcggactggtgctggcatctccggcctttaaggttaaattgtatgtgccgctggcacgtcctggactggcgttatggcatcgtctgcgtggtctgttttttattaattcctatgtgaaagggcgttatctgacccacgatcggcaacgggtggcgagtttcaataatgatccgctgatcacacgggcgattgccgtcaatatcttgctcgatctctacaaaacgtctgaacgtattattagagatgcggcggcgattacgctccccacgcaacttctgatatcaggcgatgactatgtggtgcatcgccaaccgcagattgatttttatcagcgtttacgtagccctctcaaagagctgcatctgctgccaggcttttatcacgacacgttgggtgaagagaacagggcgcaggcatttgaaaaaatgcaaagctttatcagccgtttatatgctaacaagtcgcaaaaatttgattatcagcatgaagaccgcacaggaccatcagcggatcgatggcggctcctttctggtggacccgtgccgttatcgccggttgatttggcgtatcgctttatgcgaaaggcgatgaaactgttcggggcacactctgcgggcctgcatctcggaatgagcaccggctttgattcaggcagttcgctggattatgtctatcaaaatcaaccgcaaggcagtaacgtattcgggcgctttatcgacaaaatctacctgaacagtgttggctggcgcggtattcgccagcgcaaaacccatttacaaatgctgattaaacaagccgttgccgatctccacgccaaaggtttagccgtccgcgtggttgacattgccgcagggcatgggcgctatgtactggatgcgctggcaaacgagcccgccataagcgatattttgttacgtgattacagtgagttaaatgttgcacaggggcaagagatgattgcccaacggggaatgtctgggcgggtgcgttatgaacagggcgatgcgtttaacccggaggaactcagcgcgttaactccgcggcctacgctggcgattgtctctggactgtatgagctttttcccgaaaatgagcaggtaaaaaactccctcgcaggtcttgccaatgccatcgaaccgggtggcattctcatctacaccgggcagccgtggcacccacaactggagctgattgccggggtgttaaccagtcataaagatggtaaaccgtgggtgatgcgcgtgcgttcgcaaggggagatggattcgctcgtgcatgatgccggatttgataaatgcacacaacggattgatgagtggggcatttttacggtttcgatggcggtgcgtcgtgataactga

SEQ ID NO: 13121 - DNA, 897 bp, Escherichia coli
atgctggaaaaatctctggcaacacttttcgcgttgttaattttagcaacgctgataaaccgttttctggtatggcggttaccggagagaaaagggggggaggttacattacgtattcgtacctggtggggcatcgtcatttgtttttcactggtgatttcaggtccacgctggatgacgttgacgttttttgcgctgataagttttctggcattgaaagaatattgtacgcttatatctgtacattttccgcgttggttatattggggtattcctcttaactatttgcttatcggttttaattgttttgagctgtttctgttatttatacctttggctgggtttctgatattagccacctggcgagtttttgtgggtgacccctccggttgtctgcataccgtgagcgccattttttggggctggataatgaccgttttcgccttgagtcatgccgcctggttgttaatgttgccaaccataaatatccagggcgaggcgttactggtgttatttcttttggcattaaccgagtcaaacgatattgcacagtatttatgggggaaatcctgcggcagaagaaaagtggtccccaaagtcagcccgggaaaaacgctggaaggtctggtggggggcgtaatcactactatgattgtgtcactgattattggaccgttactgacaccgctaaatacattacaggcattattagcgggtttgttaattggtattagtggtttttgcggcgatgtagtgatgtcagccatcaaacgagatgttggagttaaagatagtggaaaactattacccggacatggcggactccttgacaggattgactcattaattttcaccgctccggtatttttttattttattcgctactgctgttactga

SEQ ID NO: 13122 - DNA, 861 bp, Escherichia coli
atgagcagcaatacatttactctcggtacaaaatccgttaaccgtcttggttatggcgcgatgcaactggcaggtcctggggtttttggccccccaagagatcgccacgtcgctataaccgtgctgcgtgaggcgctggcattgggcgtcaatcacattgataccagcgacttttatggtccgcacgtcaccaatcagattatccgcgaagcgctttatccttactctgacgacctgacaattgtcactaaaattggtgcgcggcgtggagaggacgcatcctggttgcccgcattttctccggcagagctgcaaaaagcggtgcacgataatctacgtaatctcgggctggacgtactggatgtggttaacttgcgcattatgatgggggatggtcatggcccagcggaaggatcgatagaagccagcctgaccgtgctggcagagatgcaacaacaaggcctggtaaaacatattggcctaagcaacgtcacaccgacgcaggttgcagaggcgcgcaagattgtcgaaatcgtctgtgtgcagaacgaatacaacattgctcatcgtgctgatgacgcaatgattgaagctttggctcgtgacggcattgcctacgtgccgttctttccgctcgggggctttacgccgctgcaatcttccacgctttccgatgttgctgcgagcctgggtgcaacaccaatgcaggtggcgctggcgtggctgttacaacgttcaccgaatattttgctgatcccagggacgtcttctgttgcgcatttacgggagaatatggctgctgaaaaattgcatctttctgaggaagtgttgtctacgttggatggtatttcgcgagaataa

SEQ ID NO: 13123 - DNA, 363 bp, Escherichia coli
atggataaaataaaatcaaatgcgcgtgatttaagacgcaatctcacttcgcaggaacgaaagctctggcgatatcttcgcagccgacgttttggtgatttcaaatttcgccgtcaacatccggtggggagctacattctcgattttgcttgctgctcggcgcgtgtagtagttgagctggatggtgggcagcatgatttggcagttgcctatgattccaggcgcactagctggcttgagtcgcagggctggaccgtgctgcgtttctggaataacgagattgattgtaatgaggaggcggtgctggagattattctgcaggaactgaaccgcctgtcaccctcaccccaaccctctccctga

SEQ ID NO: 13124 - DNA, 786 bp, Escherichia coli
atgtcttatcagtatgtgaacgttgtcactatcaacaaagtggcggtcattgagtttaactatggccgaaaacttaatgccttaagtaaagtctttattgatgatcttatgcaggcgttaagcgatctcaaccggccggaaattcgctgtatcattttgcgcgcgccgagtggatccaaagtcttctccgcaggtcacgatattcacgaactgccgtctggcggtcgcgatccgctctcctatgatgatccattgcgtcaaatcacccgcatgatccaaaaattcccgaaaccgatcatttcgatggtggaaggtagtgtttggggtggcgcatttgaaatgatcatgagttccgatctgattatcgccgccagtacctcaaccttctcaatgacgcctgtaaacctcggcgtcccgtataacctggtcggcattcacaacctgacccgcgacgcgggcttccacattgtcaaagagctgatttttaccgcttcgccaatcaccgcccagcgcgcgctggctgtcggcatcctcaaccatgttgtggaagtggaagaactggaagatttcaccttacaaatggcgcaccacatctctgagaaagcgccgttagccattgccgttatcaaagaagagctgcgtgtactgggcgaagcgcacaccatgaactccgatgaatttgaacgtattcaggggatgcgccgcgcggtttatgacagcgaagactaccaggaagggatgaacgctttcctcgaaaaacgtaaacctaatttcgttggtcattaa

SEQ ID NO: 13125 - DNA, 1044 bp, Escherichia coli
atgcactaccgacaattactcccctttcttttatcaggatttcttctgttatctccctcgatttttgctgctgaaaaaattcttcgttatacagaccatgaaccctacgggggaatgcgtacacaaataattaaagaaatattttttgcagaaattgaaaaagagtcgcaggggcgtttgaaaatcgaaccacactggaacggtgaaaccgccatcagctatgacgctctgacgacaataagcgatggcagcaaagctgatatgggtatagtggtgccggaatacaccgcgaaacaattgccgcttcatcaaatcttcaagagctttgctattggcccggatcatggagccagtcaggtagaattctttcgtcgcgtatatgcggaaattcccgaatttaacgctgaacttgagcgtaacaatatcgtgaatttacagtttttccttggctacccggtaggctttttctctaccaggcccattgataaattgactgcgcttcagggaaccacctggcgaacagccagtttctggcatcgggcttatttaactcatacgggggcaaaaaccgtaactttaccgtggaatgatcaaataactaaagcactcatggatggaaaactggatggtttaatggtcaatctcgatagcggatatgacatccatgctgaacgtgctgcgccgaatgtgttgctctcaccttctctctggcttggtcatgtttatctgttggtaatgaataaacaatcgtgggaaaaccttgataacagagatcgtgaggctattcaacgagctgccattacaaccgagaaagcactgggcaaggcattagataacaacctgatcagcatggtaaaaacgcttgagcaggaaggtgcacaggttcgctatctgaaaaaatcagggctggacgcctggcagaaagcgatcggttatcagcaagaacaagcacagtgggtagaaaagcaaaataaggaaggcgtggagaaagccggggaagtcatgcaaaaagttgccaatatactcgatgaaacaatgcgttaa

SEQ ID NO: 13126 - DNA, 264 bp, Escherichia coli
gtggctaacgataccactccttatcttatggtgctgctacttaataacgatgtctggtgtaagagtcgtgaggtggtggttctcagaaatctgattgagcaggcgtggggaaaagtattggatgaagataactccattacatatctggttgtgtatcctgaagtgctgacgttggtatttgatgcagctaacacatacaacgctgagcctggtgtactggaacagacggcccgggcttacattgaaatcacatggtgccattga

SEQ ID NO: 13127 - DNA, 1152 bp, Escherichia coli
atgagacgaacatttacagcagaggaaaaagcctctgtttttgaactatggaagaacggaacaggcttcagtgaaatagcgaatatcctgggttcaaaacccggaacgatcttcactatgttaagggatactggcggcataaaaccccatgagcgtaagcgggctgtagctcacctgacactgtctgagcgcgaggagatacgagctggtttgtcagccaaaatgagcattcgtgcgatagctactgcgctgaatcgcagtccttcgacgatctcacgtgaagttcagcgtaatcggggcagacgctattacaaagctgttgatgctaataaccgagccaacagaatggcgaaaaggccaaaaccgtgcttactggatcaaaatttgccattgcgaaagcttgttctggaaaagctggagatgaaatggtctccagagcaaatatcaggatggttaaggcgaacaaaaccacgtcaaaaaacgctgcgaatatcacctgagacaatttataaaacgctgtactttcgtagccgtgaagcgctacaccacctgaatatacagcatctgcgacggtcgcatagccttcgccatggcaggcgtcatacccgcaaaggcgaaagaggtacgattaacatagtgaacggaacaccaattcacgaacgttcccgaaatatcgataacagacgctctctggggcattgggagggcgatttagtctcaggtacaaaaaactctcatatagccacacttgtagaccgaaaatcacgttatacgatcatccttagactcaggggcaaagattctgtctcagtaaatcaggctcttaccgacaaattcctgagtttaccgtcagaactcagaaaatcactgacatgggacagaggaatggaactggccagacatctagaatttactgtcagcaccggcgttaaagtttacttctgcgatcctcagagtccttggcagcggggaacaaatgagaacacaaatgggctaattcggcagtactttcctaaaaagacatgtcttgcccaatatactcaacatgaactagatctggttgctgctcagctaaacaacagaccgagaaagacactgaagttcaaaacaccgaaagagataattgaaaggggtgttgcattgacagattga

SEQ ID NO: 13128 - DNA, 966 bp, Escherichia coli
atgggacgctggcttgctggcaggctcatgaaagagctggggctggtcagctgtcagcagccgactcaccggtataaacgtagtggtcatgaacatgttgctataccaaaatcaccgacagacagaatcaaaaatgatcatcgggacgcaatttctctcgccaggttactgcgggctggagaacttacccctgtctggatccctgacctgactcatgaagctatgcgggatctaatcagagcccgtgcagcagctaaacgagacagcagagttgcccgacagcgaattctgagcatgctattgcgaacagacaaacattatgcaggaaagcactggacaggaaaacatcgaacctggttagctaatcaatcatttagtcagccatctcaacagattgcttttcaacactattgtcagagtctggagcagattgaagatcgcatacttcaactcgaccaggaaatatctcgcctgttacctgagtggtctctgtgcaatctggtctgccagttgcaggctcttaaaggtgttggtcagctaattgcaataactctggttgctgaactgggtgatttttcgcgattttccaatcccaaacagctcatggcttttctgggactggtgccaggtgaatattccagtggaaacagtattcgtcccagaggaataacaaaagttggaaacagcgaactgagacgtctgctttacgaagccgcctggtcttatcgtacacctgcaaaagttggggcatggcttatatattaccgaccggactctgtaacacaatattccaaagatattgcatggaaagctcaacaacgattgtgttctcgttaccgaagtctgacagcaaaagggaaaaaatcacaagtagccattacggcggtggctcgtgagttgactggatttatgtgggatattgcacttgctgcccaatcatcattcagtcagcagaagcaaaattaa

SEQ ID NO: 13129 - DNA, 219 bp, Escherichia coli
gtgatctatacgacgaatgccatcgagtcgctaaacagcgtgatccgccatgcgatcaaaaagcgtaaagtgttcccgacagacgactcggtgaaaaaagtggtgtggctggcaatccagtctgcgtcccagaaatggacgatgccgttgaaggactggcgaatggcaatgagccgctttattatcgagttcggtgaccgcctggacggtcacttctga

SEQ ID NO: 13130 - DNA, 531 bp, Escherichia coli
atgagtgaaccggcttccttttttcttcatgcacatattaccgagagtaacctcgagaagtttttccattcaccagcaacaaatatcaaagaccatgacgactggttgccatggtttatcgagaagcagcggttgtacggcgatcctgcaaaaatgcttaacaatcttgcagcttgtaattctggtgaaagtgaaaagaatatttatgccgaacatatcaactttaataaagaaacacagatagtcacgatggatcacatatttctctcagagagctatgaaatcttcatgccactcatggcctgtgtgcggggaatcgagaagtttattacgccaggggaaaataattttgcgctaatttattattactggtggggttcggagaccgctatcgcgctcgaatttgatgccaatggtagcaaaataacggcaaatcctaaggcagaaaatttaactatcgccgatgcttttttcgatgagcacggggaagctctcgctgaagaactttataataaacaggggtttatttga

SEQ ID NO: 13131 - DNA, 720 bp, Escherichia coli
atggggcgtaaaggactacttgctattgtattgttgagcctgtttatcgccatgatttttcaatttttctggcctgccccacacgatgaacacgttttcctgccagttgaaaaacctgtcgcaccgtctttaaaaatcattcatcctggtgaccagttatttatccgcattctgaaagcggaagataagctggaactgtgggcaagcaccaacaacaagccttacgaactctataaaaccaggactatatgcgcgtggtctggtggcttagggccaaaacacaaacagggggatggtaaaagcccggaaggtttttatgccaccaacaaagagttgcttaacccaaacagccgctatcatctggcatttaatattggttacccgaatgcttacgatcgggcaaacggctacaccggtgatttcattatggttcacggaaactgcgtttcggcgggctgctatgccatgaccgatgctggtattgaagagatttatcaactggtggcgcaggcgctgaatagcgggcagaagagcgtgccggtgcatatcttcccgtttgcgatggacgaagaaaatatgcgccaggcgcaggtatggccggaatataatttctggcgtatgttgaagcccggctatgattactttgaaaaaaatcgccgattgccaaccatcaccgttgaaaaccggcgttataaaatcagcccaacaactcttccttaa

SEQ ID NO: 13132 - DNA, 1008 bp, Escherichia coli
atgactgataaaaccattgcgttttcgctactcgatctggcccccattcccgaaggttcttcagcgcgagaagcgttctcccactctctcgatctcgcccgtctggctgaaaagcgcggctatcatcgctactggctggcagaacaccacaatatgaccggcattgccagtgctgcaacatcagtattaattggctatctggcggcgaataccaccacgctgcatctgggttccggcggcgtgatgttaccaaaccactcaccgttggtcattgccgaacagttcggcacgctcaatacgctctatccggggcgaatcgatttggggctgggtcgtgctccgggtagtgaccagcgaaccatgatggctctacgtcgtcatatgagcggcgatattgataatttcccccgcgatgtcgcggagctggtggactggtttgacgcccgcgatcccaatccgcatgtgcgcccggtaccgggctatggcgagaaaatccccgtgtggttgttaggctccagcctttacagcgcgcaactggcggcgcagcttggtctgccgtttgcgtttgcctcacacttcgcgccggatatgttgttccaggcgctgcatctttatcgcagcaacttcaaaccgtcggcacgactggaaaaaccgtatgcgatggtgtgcatcaatattatcgccgccgacagcaaccgcgacgctgaatttctgtttacctcgatgcagcaagcctttgtgaagctgcgccgtggcgaaaccgggcaactgccgccgccgattcaaaatatggatcagttctggtcaccgtccgagcagtatggcgtgcagcaggcgctgagtatgtcgctggtgggcgataaagcgaaagtgcgtcatggtttgcagtcgatcctgcgcgaaaccgacgccgatgagattatggttaacgggcagattttcgatcaccaggcgcgcctgcattcgtttgaactggcgatggatgttaaggaagagttgttgggctga

SEQ ID NO: 13133 - DNA, 240 bp, Escherichia coli
atgtgcaataacacccgtccggacgcagccgccgaagccatcataacgctaatgcacgcgctgattgatatttctgttatcgcagacatggcgcataagcacgccaccagtgaaacagaatatgccggggctttcgttcctcattcgctggcggttatgcaacttagtgcggatatggcgctgaatgaggccaaagccatcctgattgctgattgtgaaaatggggggggttatgcgtga

SEQ ID NO: 13134 - DNA, 306 bp, Escherichia coli
atgtccaggagttctgttaacaataagtcacagcaactgaatgccagatttccacatgaagtagtgagtggcattgaggcatccctacagccaggggaaactaaagcgaattttatagttacggctgtacgcggtgagatcgcccggcgccaggcagaaggaagtggagaaaatcccctggtttcttcgctcgatgcactggcgcaggtggaaaaactcggaatcaaagccgccgaggagatcgggcagctcgtcactgtcgcacgtgaagaactccagcgccgcaagaccaaagaaccagagtaa

SEQ ID NO: 13135 - DNA, 240 bp, Escherichia coli
atgtgctacgcttatcaggcctacaaggggacgcaattaattgaatttgcgggttttgtgggccagataaggcgttcgcgccgcatccggcataataaacgcacactttactgcctcttttaccgtttactcgtcaataacaacgcggcaataaacgtacagacaccaatcagccctgcccagagcggcgatattctggtaatcgcaaagctattatcgatgtacaaacataaagcctga

SEQ ID NO: 13136 - DNA, 1392 bp, Escherichia coli
atgctggctttcttaaaccaggtccgcaagccgaccctggaccttccgctcgaagtgcggcgcaaaatgtggttcaaaccgttcatgcaatcctacctggtggtctttatcggctacctgacgatgtacctgattcgcaagaactttaacatcgcgcagaacgatatgatttcgacctacgggttgagcatgacgcagctggggatgatcggcctgggcttctccatcacttatggcgtgggtaaaacgctggtttcctactacgccgacggcaaaaacaccaaacaattcctgccgttcatgctgatcctgtctgccatttgtatgctgggcttcagcgccagtatgggcagcggctcggttagcctgttcctgatgattgccttctacgccttaagcggctttttccagagcaccggcggttcgtgcagttactccaccatcaccaaatggacgccgcgtcgtaagcgcgggaccttcctcggtttctggaacatttctcacaaccttggcggtgcaggcgcggcaggtgtagcgctgttcggcgcaaattacctgttcgatggccatgtcatcggcatgtttatcttcccgtcgattatcgcgctgattgtcggttttatcggcctgcgttacggcagcgactccccggaatcttatggcctcggcaaagctgaagaactgttcggcgaggagatcagcgaagaggacaaagagacagaatctaccgatatgaccaagtggcagatctttgttgagtatgtgctgaaaaacaaagtgatctggctgctgtgcttcgccaacattttcctctatgtggtacgtattggtatcgaccagtggtcaactgtgtacgcgttccaggaactgaaactctctaaagcggtggcgattcagggctttacgctgtttgaagctggcgcgctggtcggtacgctgctgtggggctggctctctgacctggcgaacggtcgccgtggcctggtggcctgtatcgcgctggcgctgattatcgccacgctcggtgtgtatcaacacgccagcaacgaatatatctacctggcttctctctttgcgttgggtttcctggtctttggcccgcaattgttgattggtgtggctgctgttggctttgtacctaaaaaagcgattggcgctgccgatggtattaaaggcacctttgcttacctgattggcgacagctttgccaagttaggtctgggaatgattgccgatgggacgccagtattcggccttaccggctgggcaggcaccttcgctgcgctggatatcgccgcgattggttgtatctgcctgatggcgatagtggcggtgatggaagaacgcaaaatccgccgcgagaaaaaaattcagcagttgacagtggcataa

SEQ ID NO: 13137 - DNA, 2499 bp, Escherichia coli
atggctatatcatcatatagtacagttacagataaatttgctactctgactaaaatgcaagatgaaaatctgaatgaaaaaaatagaacgcaaaaatattcaggaaaaattggtttgtctgttgatgatgtgggtaagtattcagtaactcataaagatataacaaacattttagctggtgatagtcaatctttccttaaacgaagtctttgggaatttatactcgatctttttcccatgtatcatattaaggaggctaaacaagccattatagatttcgtgtcggaaactggtgataaagctgatatatttaataaaattaaatctctcgccgatcaagatcaacaatggcgctttaatgcgacgacagaatttattgtagatgaaaataaagatattattgttagtagagtatttaaaataaatattaatgcgcaagatcatcatattgatgctgaaaaaaagacaatgcattctttattttcagaaaaaatcagttttgatatttataagcatgatattcattttgatgagaaagcttttcaatcagggatgttgaaaatacagttcccaaatgataatgaaaagcttagcgtatatttaaaaaataaaatcccctttgaaaatatcacaattgatttatctgcactggaaaaagaagccctggcatctttaaaatattgtaactttaaaaatgtgacattcactggtaatatatcttacgaaaatcttaatggttcagtatttgaaaattgtttttttgagggctgtaaatttgagaatgtgtcacttataagctccaggtgtcgagtaaaactaaataatgaaatacctatttacggcgtgtttaaagagtgttttctgtatcgatgtgaaataaaaaattttaacatagatacatcaaaaatatactctgtaaatcaagatcccaatgtgggtaagccagttggtgcatatctgtttatgcaatcatttgtatatgaatgtactcttctgaatggagtgtgtaaaaatgcaagtattattgcaagcagtttgttatgttgtaaaatagcaaagcttaatggtgctgaaatggatttcatagggacttcgttttatcacaaatatagatgtgaattaaaatatgataatcatttttatatgtgtgattttagctcctctgatatgacatgcaaacgaaatggaattcgcaaagatttactggattttgatcccagagaatatttcaaaaaggatggaggtaaacttaatctggataaacacatttcaaaccttatctacgttaatcttttccctaatatgagtggcggtcgttatataaatgataaatacgttgctgatgatatagataaatatttaaaacttagtaattgcaatttacttaaaacttgtttgggcgagtcaatcaatggaattaaattggatgattgtgctattgatccttcaaccacttggttaagtggtaatcttgctgcgaataaccagattagaattcctgtttatatggacatgaaaggagctatagctgaaaatggcatttcagatttcatggaaaatttaatggaagttaattcatgggtagaagaattcaataattatggcaaggatgcgataagtcattacgaaaaggaactgttatatttacaatctttgttggtcaagctgggtagcttcaatcttgatgatgaaggcaaaaaatatcaacttaatggtgaagctatccagtatattatattaaatgttttgtacaatatagaaaaagatatagccaatgaaatagatattgataaagtaaatttcatgcataacctctatactggattcttttggcaaagacattacgatgaacgtaactatttaaaaataaatcgttctgctatttcaaacagcgcaagatttcacttccactttaattttaatgatttgcgggatatttacaaagactataataataatcatgaagatgataattttgataaaatgcaaaagatttttttagcattgaatgaatttaaggaaagaacggaaataaattacagggattataggaaagtatcaaaatatgtagatgataaagtcgatttattctctagcattgagcaatatttacggtgggtaattgagaaaaataatgactataataaggaaaattatggcgatataaaagacaaatatgccaaacttattgtcgaaagaaatgatttagtcgatactaaggatcaattaattaaagaggatttttacttaaataataaagacaataaagataaaaaagatgcggaaagaattaatgagattaaggggataataaaggtgatagatggaaaaataccaaatataagtaaagagattctacatcttaaggatgaaacagagagattggagaaagagtatcaacaagaaaatacacttaatgatgtagttcaaaatatcaggagttggctaaaagaaaatgaaaatatggtgaaagctattaagaaaactgatactgaataa

SEQ ID NO: 13138 - DNA, 1266 bp, Escherichia coli
atgctcacgaaaaagaaatgggcgttatttagtctattaacattgtgtggcggtacaatttataaattaccgtcgctgaaagatgcgttttatatcccgatgcaggaatatttccatttgaccaatggtcaaattggtaatgctatgtcggtaaactcatttgtcacgacagtgggcttttttctgtctatttattttgccgataaactaccgcgcagatacaccatgtcattctcactcattgcgacaggattactgggtgtttatttgacgacaatgccgggatattggggcatcctctttgtctgggcgctatttggcgttacttgcgacatgatgaactggccggtcttgctcaagtcggtaagtcgattgggcaatagcgaacaacaaggtcggttgtttggcttcttcgaaacagggcgtggcattgtcgataccgtggtggcattttctgcgttggcagtatttacctggtttggcagtggcttattgggttttaaagcaggcatctggttctattcccttattgtgattgccgtaggcattatcattttctttgttctgaatgacaaagaagaggcaccgtccgttgaggtgaaaaaagaagacggagcatcgaaaaacaccagtatgacctcggtgctgaaagacaaaactatctggcttatcgctttcaacgtcttcttcgtttacgcggtttactgtggcctgacattcttcattccattcctgaaaaacatctatctattgcccgttgcgctggtgggggcttacggcatcattaaccaatactgtctgaaaatgattggtggaccgattggtggcatgatttcagataagatcctgaaatcgccgagtaaatatctatgctacacctttatcatcagtaccgctgcgctcgtactgttgattatgctgccgcacgaaagtatgccggtatatttagggatggcatgtacgctgggctttggcgcgatagtctttacacagcgagccgtattttttgcacctatcggcgaagcaaaaattgctgaaaataaaacaggcgcggcgatggcgttgggtagctttattggttacgccccggcgatgttctgcttcagtctgtatggctacattctggatttaaatccggggattattggctacaaaattgtgtttggcattatggcctgcttcgcattctgtggtgcggtggtttccgtaatgctggttaagcgtattagccaacgtaagaaagagatgctggcggctgaagcttga

SEQ ID NO: 13139 - DNA, 795 bp, Escherichia coli
atgatggcaacgccagtgaaaaagtggttattgcgcgttgccccctggtttttaccggtgggcatcgtggcggtgtggcaactggcctcctcagttggctggctgtcgacgcgtattttgccctcaccggaaggggtagtgatggcgttctggacgctctccgccagcggcgaattgtggcagcatctggcgatcagctcctggcgggcgctcattggcttttcaattggcggatcgctgggcttgattctgggactgattagcgggctgtcgcgctggggagaacggctgctggatacctcaattcagatgttgcgcaacgtgccgcatctggcgctgatcccgctggtgattttgtggtttggcattgatgaatccgcaaaaatctttctggtggcgcttggcacgctattccccatttatatcaacacctggcatggcatccgtaatatcgatcgcgggctggtggagatggcgcgtagctatggattatccggcataccgctgtttatccatgtgatcctgcctggcgccctgccctcaattatggtcggcgtgcgttttgcgttgggcctgatgtggctgacactgatcgttgccgaaactatttctgccaattccggcattggttatctggcgatgaatgcgcgggagtttctgcaaacggacgtggtggttgtcgctattattctttacgccctgctcggcaaacttgctgacgtcagcgcgcagctgttagagcgcctctggttgcgctggaacccggcttatcatttgaaggaggccacggtatga

SEQ ID NO: 13140 - DNA, 3963 bp, Escherichia coli
atgggaaccaccaccatgggggttaagctggacgacgcgacgcgtgagcgtattaagtctgccgcgacacgtatcgatcgcacgccacactggttaattaagcaggcgattttttcttatcttgaacaactggaaaacagcgatactcttccggagctacctgcgctgctttctggcgcggccaatgagagcgatgaagcaccgactccggcagaggaaccacaccagcctttcctcgactttgccgagcaaattttgccccagtcggtttcccgcgccgcgatcaccgctgcctatcgccgcccggaaaccgaagcggtttcgatgctgctggaacaagcccgcctgccgcagccagttgctgaacaggcgcataaactggcatatcaactggccgataaactgcgtaatcaaaaaaatgccagtggtcgcgcaggtatggtccaggggttattgcaggagttttcgctgtcatcgcaggaaggcgtggcgctgatgtgtctggcagaagcgttgttgcgtattcccgacaaagccacccgtgatgcgttaattcgcgacaaaatcagcaacggtaactggcagtcacacattggtcgtagcccgtcgttgtttgttaatgccgccacctgggggctgctgtttactggcaaactggtttccacccataacgaagccagcctctcccgctcgctgaaccgcattatcggtaagagcggtgaaccgctgatccgcaaaggtgtggatatggcgatgcgcctgatgggcgagcagttcgtcactggcgaaaccatcgcggaagcgttagccaatgcccgcaagctggaagagaaaggtttccgttactcttacgacatgctgggcgaagccgcgctgactgccgcagatgcacaggcgtatatggtttcctatcagcaggcgattcacgccattggtaaagcgtccaatggtcgtggcatctatgaaggtccgggcatttcaatcaagctgtcggcgctgcatccgcgttacagccgcgcccagtatgatcgggtaatggaagagctttacccgcgtctgaaatcactcaccctgctggcgcgtcagtacgatattggtattaacatcgatgccgaagaggccgatcgtctggagatctccctcgatctgctggaaaaactctgtttcgagccggaactggcaggctggaacggcatcggttttgttattcaggcttatcaaaaacgctgtccgttggtgattgattatctgattgatctcgccacccgcagccgtcgccgtctgatgattcgcctggtgaaaggcgcgtactgggatagtgaaatcaagcgtgcacagatggacggccttgaaggttatccggtttatacccgcaaggtgtataccgacgtttcatatctcgcctgtgcgaaaaagctgctggcggtgccgaatctaatctacccgcagttcgcaacgcataacgcccatacgctggcggcaatttatcaactggcgggtcagaactactacccgggtcagtacgagttccagtgcctgcacggtatgggcgagccactgtatgagcaggtcaccgggaaagttgccgacggcaaacttaaccgtccgtgtcgtatttatgctcctgtcggtacccatgaaacgctgctggcgtatctggtgcgtcgcctgctggaaaacggtgctaacacctcgtttgttaaccgtattgccgacacctctttgccactggatgaactggtcgccgatccggtcactgctgtagaaaaactggcgcaacaggaaggtcaaactggattaccacatccgaaaattcccctgccgcgcgatctttacggtcacgggcgcgacaactcggcagggctggatctcgctaacgaacaccgtctggcatcgctctcttctgccctgctcaatagtgcactgcaaaaatggcaggccttgccaatgctggaacaatcggtcgcggctggtgagatgtcgcccgttattaacccggcagagccgaaagatattgtgggctatgtgcgcgaagccacgccgagtgaagtagaacaggcgctggaaagtgcggttaataacgcaccaatctggtttgccacgcctccggctgaacgcgcggcaattttgcatcgcgctgccgtgctgatggaaagccagatgcagcaactgattggtattctggtgcgtgaagccggaaaaaccttcagtaacgccattgccgaagtgcgcgaagcggtcgattttctccactactacgccggacaggtgcgagatgatttcgctaacgaaacccaccgtccattagggcctgtggtatgtatcagcccgtggaacttcccgctggcgattttcaccgggcagatcgctgccgcactggcggcaggtaacagcgtactggcaaaaccggcagaacaaacgccgctgattgccgcgcaagggatcgccattttgctggaagcgggtgtaccgccaggcgtggtgcaattgctgccaggtcagggtgaaaccgtgggcgcgcaactgacgggtgatgatcgcgtgcgcggggtgatgtttaccggttcaaccgaagtcgctacgttactgcaacgcaatatcgccagccgcctggacgctcagggtcgccctattccgctcatcgctgaaaccggcggcatgaacgcgatgattgtcgattcttcagcactgaccgaacaggtcgtcgtggatgtactggcctcggcgttcgacagtgcgggtcagcgttgttcggcgctgcgcgtgctgtgcctgcaagatgagattgccgaccacacgttgaaaatgctgcgcggcgcaatggccgaatgccggatgggtaatcctggtcgcctgaccaccgatatcggtccggtgattgatagcgaagcgaaagccaatatcgagcgtcatattcagaccatgcgtagcaaaggccgtccggtgttccaggcggtgcgggaaaacagcgaagatgcccgtgaatggcaaagcggcacctttgtcgccccgacgctgatcgaactggatgactttgccgaattgcaaaaagaggtctttggtccggtgctgcatgtggtgcgttacaaccgtaaccagctgccggagctgatcgagcagattaacgcttccggttatggcctgacgcttggcgttcatacgcgtattgatgaaaccatcgcccaggtcactggctcggcgcatgtcggtaacctgtacgttaaccgtaatatggtgggcgcagtggtgggtgtgcagccgttcggcggcgaagggttgtccggtaccgggccgaaagcaggcggtacgctctatctctaccgtctgctggcgaatcgcccggaaagtgcactggcagtgacgctcgcgcgtcaggatgcagagtatccggtcgatgtgcagttgaaagccgcattgactcagccgctaaatgcactgcgggaatgggcggcaaaccgtccagaattgcaggcgttatgtacgcaatatggcgagctggcgcaggcaggaacacaacgattgctgccagggccgacgggtgaacgcaacacctggacgctgctgccgcgtgagcgcgtgttgtgtattgcggatgatgaacaggatgcgctgactcagctcgccgccgtgctggcggtgggcagccaggtactgtggccggatgacacgctgcatcgtcagttagtgaaggcattgccatcggcagtcagcgaacgtattcaactggcgaaagcggaaaatataaccgctcaaccctttgatgcggtgatcttccacggtgattcggatcagcttcgcgcattgtgtgaagccgttgccgcgcgggatggcgcaattgtttcggtgcagggttttgcccgaggcgaaagcaatatccttctggaacggctgtatatcgaacgctcgctgagtgtgaataccgctgccgctggcggtaacgccagtttaatgacgatcggttaa

SEQ ID NO: 13141 - DNA, 1344 bp, Escherichia coli
atgagaccaatatccaaccttaatacgagcgcagcaacctatattccaccgcagcaactcccgagtagttgtctggaaactttgacgcttctggtgcagatgaataattatatcaaaagggatgcggactacagcacgggcatggctgttactccactggttcctgaagaggttcacttgctggctgttgcgatgacaaccgaactacatcgacatcagtttcaaccggtggtaaatgcaaatgatctgcaacttcctgaaccgttcaccttcgatgttgccggtttcaccatcaccttcacgaagacgcaagagcatgacaacacgggcactctcgtgaaaattgcagtcagtaagaacggtgtatgcaccagcacaaatattgctcttgagctgtttcactccatcgtcacaacactgatgtcacgcagtcagtatggaacatttgatctctggtccgtacggccaatactcacggatgaaagtcaaaacagggtgcatgaagcagctcgctactccccggcccaacaatacggaggagaagaaacacacattaccaacaacggaatgcgagaatttggaaatatgtccccgctggcgtggcgtaacgatggggaattacagcaatcgtgtaatacaagcaacatcccaccaaatactgcgaatgacgacataaacaacaccaggcagaccaccgaggaccagccagaggcggacgagccacagcaatatgttaaattgactgtcgacgacatgcgaaaatgggcggctatggaccagcaggcgcgaaacgatctagggggagttcaaggatggtgtacgcgcaatcattttaatatcaaaaatgccaggaattacctgaccgatcacggcctgaactacgcgggagaggtaaaggtaaacgggccgcatgaatatgccaaattcacccttgaacatatccgccagtgggcagccttagacaagaaggtgcgaaaaccggttggttatttagaaaagtggtgcaagaaaagaaacctctcgcggactactgccaggaactacctgaagaacgacgggcttaccgccctgggtgagttgaagctgaaagggccgcagaaatgtgtctctttcaccttcggggacatcgtgcaatgggcgaatatgagccaggaggatcgtgaccgcgcagggggagcccacaagtggagtaaaggacgcggcttccagtggtctacttccagatcctacctgaaattgagcggattgacggtacaaggcgcgaaaaaactggcgtggctgaacaagagcgggaatatgtcgaatccacactatctcgcccaacctaccagccgcaggacataa

SEQ ID NO: 13142 - DNA, 147 bp, Escherichia coli
atgcaaagaaaagtaaatcgcagtgatagcgattatcattacggcaaagaaaaatacaagcggaatgtttataaaatgatgttggaatgtaaaaacgaggagttcaaatcaggagataaaagcgattattttaaggtatttagctga

SEQ ID NO: 13143 - DNA, 261 bp, Escherichia coli
atgtttatagttctgaatactatggtgttttacacgttcattctggttattatacgtagaaaagaatttatcgggcaacgccgagatgacgcggccccgttaaaccgtgtagtggtagatgatgagatcagatacagggatcaactgacggtgagcgcagtccccacattttatccggagtttaccgctattcccggctgccattcgttagcacaggcccgcaagtaccctgatttgccgctggttttgctttcccattga

SEQ ID NO: 13144 - DNA, 4959 bp, Escherichia coli
atgtgggatggtggcttacaagaacaggaagtattggctatcgagaaaataaaagctgctttttcagtcaacgtatctaagcctgacaagcctttccgtagcggttcaattagtgagcagctaaaaagctatggttttatcggcaatgaaatgttcccttggaaaggttatgcaggttttcgatttgttgaggcaaaaaaagagggggaattcgatttagttattgtaacacactgcaacgtgatcattgttgaactgaaagactggaaccatcagcctgtaaccgcacgcggagatacttggtttaaaggcgataagaacatggggcgctcgccagtaagcgtgactcgtagcaaaaaattcatgctggacaaaaaactcaagcgtctggtagaccgttttacgaacaaaggctatatcccgattgttcatttttttgttgtgatgaccggcaatgcagatttcagcgcgctgccggaggaacaacggcgccatacgatctcgttaaaagatttcctgaagtttgccgatcgcgggagcttcaatagctatttcaaaccgcacccagctaccaaggttcttaacaaggatttccatcttttcgatgatttgttcctagggcctcagacggcaccaaaagccttgagagttaatggctatgaagctaatgatatgattttcgaacatcctaaaaaggtgtatcgagaatatctggcaaaatctgagatatcaacgaacagcgaagcgctactcagagtatggaattttagaaatataacgggaacgaaagcgaataccccggaaggacgagctcagattgtttcacgtgagcgcgaagtgttacagcacatcaatcaccagaatcgtgacctgtataaccactgtctcaggtctttgacgagttttcagaaagacgaggtgacggccgagtatagcgaagtctacgaagttccgccgggtcatgtccggtttaatgagtttatcggaaaatatggtaagaacttttctgatatggaccgcttgaatgtggtgaaactgctcattgcaaagtttagtgatctccatgagatgaaaattgcgcacagggatgtcgccgatcacagtctgtggatttcaccttcaaaagaagttgctctttcgaactttatttcggcttaccaccagccagccggaacggttggcgattaccgtaagcttttatccgtaggtgcagtccacgtaaaagacatgcttgataagggcgagcttacgccttttcagcaagatgttcatactctgggccttgtcgcctggcacttatttagcggtatgcgcatgtcgccaaagagtctggagaaagtacaggacaacatgctaaacagccagcactggtattcatctgtattacgggatgccgttgccgcaaaattcacttctgcaacagaattctttgatgccctgaaacaagccgaacctgctggcaaggatattccaacatttgatgatactgagcttgacccttaccgacatgctatcaatcacgctcgtcaatacccggaagacgatggctttcagtttcaggtcgaaacagtcgacaaagaagtctatatctcgaaaggaaggctcgtgaaggcttggctgaatgttgggggacagggatacgatccgtcaattaatttccaggttctgaagtttttaaagcaggttgagcggctttcttcagttaaaacaacgtatctacctcaaattcgtgaattcggtatcgcatcaaaatcatcaagcctatatatggtcacggatcaggtacagggagaaacctgggataaaatagcggtccccgatgatgaaaaaatcgacctcattggtaagtttgtcgccgccgttgagcacttacatggtctgggtgtttctcacggggacatccaccctggcaatgtgatatttgagacacagagccgtttgctttttctcatcgatatccccgatttttcaccgtccggtgacgaacctaaaaatcacagttacagccctgaatacattgataattgtacttcttttgaacgtgacaactatgcagtgatgaagatgtcctgcgagttgctaggcatgtcatgggggctggaatcagacatttatccgacaatcgcgaatgctatccgagcagagctggaagatccggtttttgggtttaaggatttaggccgctttaaaaaagcgatagatagtaatgacctggtgccagaacaagacctgatagagattactgcaggaaatgccgatgaaataatctctattctgcctgataacgggcatctgtatgtcaaagttaagtcaaatcctaaagcgccagctgaagtaaatgtgactttctctgggattggtggcagttttactgcggtgttcaacaaagatcagaagacgctggttcatggcttcaggccacgggctcgcgtcacaattcgtaagcaagatattgatgaaagccagttcgaaattgatactggtatcaagattattcccggcagtccgcaggatctgtcggcgttgacagtattgcttaatgaagaagaatcttttgcgcgggcaatcgagttgattgccgcaactgaagatgttcaggtacaagagccacttacgcttcagctaaaagatacctttgcaaggcttgataagcagacgcttgaaccttctttaagagaagtgctggaaatcccaacagtgaaactgtggcgcgccattctggatactgaaacagaatcttatccaaacattgaaatcagcggtgaagtggtcccggttgcagatgctcatggagagcttcttctcccttactctgctgatgttgatccactcggtgctttcagaagtagtgatgaagtcgaagccttacaggtcgatcaggaaggtgttgagcgatttattggtgaagtgtcacttaagaagtcagagctcaaagagattcgtcttgtcaaagttagttcagcagccttcaagctgaaggattctgatattgtcttcttccgtacaagaccgactcgtgcatcttatcagaaacgtaaacgcgcactggaacgtctcctagatcgagaaagtgtgctgcctgacttaattgacttgttcgatccatcctgcaaacaggcggctcaaaattatggtatcactctcagcgataccgattttgccagatacgaccgtgaagatcagcacggaaacaagatcagtctgaatgaacagcaaagaaaggcgtttaacaaactggtcaataatggccctctctccctgcttcaggggccaccggggaccggtaaaaccgagttcatcgcggcctttgttcactacctgatcgagaaacagaataccaaacgcattttactggtcagccagtcacacgaggctgtgaatacagcggccgagcgtatcagaaagcattgttcccggcttggtacagagttggacgttgtcaggttcagcaaccgagagggagccgtttcccctggcttaaaagatgtgtactcacacgcaatcacaacagagaagcgcgaactcttcaatgctgaaattaagtaccgtgttgaagcattgagtgaagctattggtctggagccgggatttatttcgggtgttgttcttgcagagctcaatttgttcagacaaatcgatcaccttgagaaattgctctatcaggttaacaatttaacggattcaaatgagagcaatgaactgaaagatattgcagtcgaactcgatttttccatccgctctaagctgagtcaggagtatgggattaacttggacaatggcgtgaaggtctcagcagcaaaagacattctgatttccaagctatgtacagagtatggtgtcagacctgatgaggcaagacgagtaaaagcattagctaaaatatcccgtgatatgcaggatgctatgtcgggagagcgagtgaacctggacgagttttattcgcgctccaggcagttagtggctggcacatgcgttggtattggacaagggcacattggcattcaggagaatatctatgactgggtgattattgatgaggcggcgcgctcgatttcaagtgagctggccattgcaatgcagtcagcccggcgtgtcctgttggtgggtgaccacatgcagcttcctccattgtactcagatgcccacaaggcggcattagcgaggaagctgggtatcaataactcccgcactgaaattgacgaggtattacgaagtgactttgcccgagccttcaactctgcttatggtgcgcagacgagtgcagctttgatgacccagtatcgtatggctccaccgattggtaatctcgtatcgaagacgttttatgacgggaagcttctgaatggagtacgggcaattccggatgtctatcagcaagctccggaagcgttacgtagcgttgtaacctggcttgatactgctaatcagggccaccgagcacatcatcttgaagatcgcggaacaagcatttacaaccgatgtgaagctgacgagattatttctgttcttaaacaggtgtcagagaatgaagaatttgtagctaagctttcaaaacttgttagcaaagatgaagccgctatcggcgtgatatgtatgtatgccgaacaaaagcggttactccgtcagaaattcaatcaggaaatctggagcgagggatttaaggacattgttaaaattgacactgttgacagttatcagggaaaggaaaatcggatcattatcctgtcactgacgcgttcggataagcagcatagcccaggtttcttacgcgttccaaaccgtataaatgtcgcgatgtcacgcgcaatggatcgactgttgattgtgggtaatgccgatatctggaagggaaacaataaagaattgccattaggctacgttgtaagttatatggctgagcgaggtcaggaagctggatacaggttcctctctgctcagcagggaggcaaaaagaaatga

SEQ ID NO: 13145 - DNA, 1437 bp, Escherichia coli
atgatatctgataacaaagttacctatcatgaggttgacttcctgctgccagcacagaggtttaacattcagttttcctatgtttcccagaaggggctgccatttatccgggagtttgtgctgagacttgttcatgtagcttcgatgagcaaagcacaaatagcaacctatttcggcctgacccaccgtgagacagaggaggcgatttccgatcttgtgcagcgtggcgaattgacgctctcctcagacggcagactggccttaacagacaaatcaaatggctatttttcagaggttggcgagataccgcatctttcaactattcaggacagtggctgtactttatcctttgatttagccacatttagttgcttcagcaaccaggcttttcaggaccactggaggggaggggtaacattaaaggttgatgacaacaacatttctcaaagtgagaaactggttgagaagcactttcaataccagtttaatcaaatcctggataaaggttacctgtctcacctgcaggttcaggtcggaaaagaacaaccttctatctataccgttaattctgttaataagctgcggcaaataccactccgtttaacaacggaatttaaaatggatagcgatggtaaggctgtcgagcgtgaagactatgaacagttaaatagttcggaatgtgttcatgagttaatggctgttgagatagccaggttatcacggcataacaataccatgagtatttttaaggccatgcaatccattaacgatgaccttacgcttaagctgtttgactctaaaacgaatcgacttaatccgttgtttatcaaagatatgcaagcactggaagaatactcgtcctcaggcagaacgacttttttaggtccggtttattctaaaaacaactgggaaaagctgcagaaagctctggcaccagcgctcaatcagcgtatcagagataaaactgattatggaggtagcccgttcatctgggtggcaccatcagatccctactggtcaaaaagcattcgatttatctcaagcctgagcaattttcttagcaagtcggctacgaaggataagcagctgtataaaccggtgctgtacgtacctgtccgggatgcagctgatgctcgggttgccagacagtggaagtatgaacttgggcaattccatgagtacgctaaaggactagttgaggggctgttagatggtaatgttgagatccttcatcttgaggatgagttatctgccgttatctatcatatttctcaacccgaaatattgcctgtaacgatgccactgggctttatcacaacgaacaaagaaacggttaagattattggtactctggttactgaatatatcaaaggcaccactggttttgataagtttcatgactgtggcgcaatttcggcaatgattaagaaaggttga

SEQ ID NO: 13146 - DNA, 1572 bp, Escherichia coli
atgacacaaaaaaaatcttttaaatcaaaattatgggagtttttacaaagtctggggaaaacctttatgttcccggtttcgcttcttgcctttatgggattgctgctgggtatcggtagttcagtcaccagcccttccaccattactagttttccctttctgggcggcgaatttacccagttgacctttggctttatcgctatggtcggtggctttgcttttacctatctgccgctgatgtttgccatggcgatccccatggggcttgccaagcgcaacaaagcggtcgctgcctttgccgggttcgttggctacatgctgatgaacatgagcattaattattacctgacggctacccaccagcttgccgaccccgccaccatgaaacaggtaggacaatcgatcgtgctgggcattcaaaccctggagatgggggtattaggtggcattgtggttggggttatcacctattttctgcatgaccgttttcaggacacggttctgcatgacgccttcgccttctttagcggcattcgtttcgtgccgattattaccgcgctcaccctgtcgctggtgggtctgttcattcccatgctgtgggaatacgtcgcgctgggcatcgcgggcattgggcatatcatccagagcaccagcgttttcggccccttcctctacggcgtaggcgtgctgctgcttaaaccttttggtctgcaccacatcctgctggcgatggtgcgttttaccccagcaggcggcattgaaatggtaaatggccatgaggtcgccggggcgctgaatatcttctacgccgagctcaaagccggcctgccgtttagcccgcacgttaccgcgtttctgtcacaagggtttatgccgacctttatcttcggtttacccgccgtggcttacgccatctaccgcaccgcgcgtccggaaaatcggccggtcattaaggggttgctgctttccggcgtgctggtttccgtcgtcaccggtatttcagagccgattgagttcctgttcctgtttatcgcccccgcgctttacgccttccatatcgtcatgtctggcctggcgctgatggtaatggccctgctgggagtgaccatcggcaataccgacggcggcattctggatctgctgattttcggcgtgatgcagggaatgtcgaccaaatggtatctgctgttcccggttggtattgcctggtttgccatctacttctttgtcttccgctggtacatcctcaaacacaacatcaaaacgccgggccgcgaggtggatgttcagggggcacagcaagccgtcgaggcgaacacccgcgcgcgcggaaaatcaaaatacgatcacgagcttatcctacgtgcgctcggaggtaaagagaacattgagtcgcttgataactgtattacccgcttgcgtctggtggtgaaagatatgggccttatcgatcagcaggcgctgaaagcggcaggcgcgttgtcagtggtgatgcttgatgcgcatagcgtgcaggtgatcatcggaccgcaggtacagagcgtcaaaaccggcattgaagccttaatttaa

SEQ ID NO: 13147 - DNA, 339 bp, Escherichia coli
gtgaaacatctgacagaaatggtgaggcagcacaaagcgggcaaaacaaatggaatttatgccgtttgttttgcccgctttgtgctgcatggggcgagcgatgtgccggatgagtatgttcgtcgcaccattgggccaggcgtctgcaaagtcgacgttgcaaccgagttgaagatcgccttctctgacgctatcaaagcttggtttgctgaaaatcagcagagcaacgatccgcgcttttacatgcgggttggcatggacgccatgaaagaggtggtcagaagcaaaatcgccgtctgcggctcggcaaatcgattacggctaccggcggaggcctga

SEQ ID NO: 13148 - DNA, 5241 bp, Escherichia coli
atgtcttcaacaaatgcgcatcaaataaaaaataatgatcaaaactctttatgtggtctgggtgacaaaatacgccgcctgaccgccggagtttgtttatttacccaaatttttttccccgtcatggcgacggcacaaaatgtggtacacgctaaacctcagacgacagtttcatctgcgccccctctactagaaaataatactgtgccttacacgcttggtgcgctggaatcagcgcaaagcgttgctgatcgattcggtatttcactggaggagcttcgtcgtcttaatcagttccgtacttttgctcgcggctttgataacgtgcgccagggtgaagagctggatgttccggcaacaaccttgcagaaaagtcatgagcaacaaaatgccgtaccgcctgcgaatggcgaaaacacgctggagaatcaaatagccagcacttcgcagcgagttggcaccctgctttcacaagatatgaatagtgagcaggccagcggcatggcgcgtggttgggcgtcttcagaagcctcaggcgcgatgactgattggttaaataactttggcactgcgagaatctctctgggtgtggatgaagatttcagcctgaaaaattcgcaattcgacttcctgcatccgtggtatgacacacccgattatctgctcttcagccagcatacccttcaccgaacagacgatcgtacccagatcaacaccggtttgggctggcgtcatttcacccccagctggatgtcaggcatcaacctgttttttgaccacgacctgagccgctatcactcccgcgcggggcttggcgcagaatactggcgtgattatctgaagttgagcagcaacgcttatatcggcctgaccggctggcgtagcgcaccggaattggataatgactacgaagcccgcccggccaacggctgggatttacgcgcggaaggctggttaccagcctggccacaactgggtggaaaactggtctatgaacaatactatggtgatgaagtggcgctgtttgacaagaatgatcgccaaagtaatccccatgctattaccgcgggcctcaactatacccccttcccgcttctgactctcagtgcggaacagcgtcagggaaaacaaggtgaaaatgacacacgttttgccgttgatctgacctggcaacccagcagttcaatgcagaaacagcttaacccggacgaagtggccggacggcgcagtctggccggtagtcgttatgacctgattgatcgcaacaacaacatcgttctggaatatcgcaagaaagagctgattcgcctgagtctgctggatccggtgaaaggaaagtctggagaaataaaaccgctggtttcctcgatacagaccaaatatgccctgaaaggctataacatcgaagccgctgcgctggaagctgccggaggtaaagtcagcacgtctggaaaagatatcacggtcacgctgccaggttaccgcttcactaacactccagaaaccgataatacatggtcgatagacgttaccgccgaggatgtaaaaggtaacctgtcacgtcatgaacaaagcatggtcgtcattcaggctccgacattaagccagaaagattctctgttatccgttaatccgctaaccgtagctgcagataaaaaatcgacgaccacattgaccgttactgcgcacgattccgacggaactccggtgccggggctggcgctgcaaacccgcagtgaaggcgttcaggatatcaccctgtctgactggacagataacggtgatggtagttacacacagatgctgaccgccggaacgacatcaggttcagtaacactgacgccgcaaattaacggtgagagtgcggtaaaagaatccattgtcgttaatatcgtccctgttgtctcatcccgcgaccattcatcaataacaattgataacgtatcgtattatgccggagacgacatcaaggttagggtggaactgaaagacgacagcaatcaaccggttgcatatcaaaaagaggaattggtaaaagccgttactgtcgaaaacagcaaacctggcgccacgattgtctggcacgaagagcagcctggcgtttataccgcgaattatccggcccataagcaagggacagcactaagggcacaacttagccttcacaactggaatgctccactgcaatcacatatttataacattgaggcaaaccagaataaggctcgcgttgccacattatcagcgacaaataatgacgtttacgccgataaaaagacatttaataccctcacgatcaacgtcactgatgagagtgataatcccctgacaaatcatcaggtcacctttaagaatgaaaaaggaagcgctgaatttgtcgaaccgccgcagcaaaatacggatgcatatggtgttgccacaatcaacatggtaagtcaggttgcggaagaaaatacgattagtgccacgctgccaaatggtttctcacaacggataattgcgaaattcgttagcgattcgagtacgccaaaattcaaacaactggttgccgatccagataccattattgctggcaacagccagggcagtactctgaccgccaccgtcacagactttcataacaacccgttaaaagatatgaaagtgaattttgtggcacctggtggctcgcaactggacaacacgtccgccacaacagaccagtccggtattgtgcgagtgcacctgaccagttcaaaagctggtagctattccgtcgatgcctcgcttgaggcggataaaaatattcaccagtcggtcacgatcaccgtggtcccaaacagggaacaatcggtaatgaccttgaatgccgggtcgggcagtgcgatcgctaacaatacaaataccgttatcctgacagctagtgtgaaagatgtttatggacacccgttgccggatgaggatgtgaaatttaccttgccagcctccatcaccgggaacttcacgctaagtagtgaaaccgcccgcaccgatgcaaacggcgatgccgtggtcacattgcgtggcacaaaagcgggtgagtttacagttacggcgacgctgaccagaaataataccgttgctcatcagcaagtcacttttattggggatacaaacagcgcgcagctccagccgctgactgcctcattaaataccattgttgcgggtaacagtacggggagtaccctgacggcaacgatcctggacgcttaccaaaatccgcttaaagaccagctggtcactttccagagtaacgatgtcactctaagcggaacagaagtcaccaccgatacgctgggtcaggcgacggtaacaatgaccagcaatattgccggacaacataacgtcgtggtgagccggaaagcgcaaccctccgataataaaacgtttagtttatcagtgctgccggatgaaagttcggcgaaggtaataagtataaccggagccgaaaaaacgataacggttggcgaaaacatcacgctacggatactcgtccaggacgcgtttaacaatgtaatagcgggtcaacgcgtcagattaagtgcgcagccaacagctcacattacgataggcgatacggcttacactgataataacggttacgcgtacgttaaccttctcagcacccagcctggggtttatcaggtgacggcaacgctggacaataacagtagtagtaaggttgacgtgaatgtggcaaatggcaagctcgagttaacatcatcgaagccagaaaccacggtccataacagtgaaggtattacgcttaccgcaacggcgagaaatgctcaggatgaattgatgcctgggcaaattatcacctttagcgtaacgcctgaaggtgcaacgctaagcaatacaggggaaatacttactgaccagtatggtcaggccaaagtgacgctgaccagtgacaaagtgaatgtctataccgttacggccacaatgggcaaagatgttcccgttcagagccaggtaacggttgcggttaaggcagatgctaaaacggcacatgttgtgagcgtcgtggcctcccctgacaccataaccgccgacggcgttgatagcagcaccatcacttcacgagtagaagatgattacggattcccggttgaaggtgtcgatgttagttatgccttagacaccaaaggcagcccggtagttaatattccaactacgcgtaccgatcagtccgggcaagtcacggcgacaataaccagtacattggcagaaaccttaacagtcaatgtgcaagttcctggtacagccaaccaatccgcaaccattacattggttgccggcacggccgatgaaagtaagtcaattttgaaatccgacgttgacactctgaaggctgactaccagcagagcgcaaaacttacgctaacattgcaagacaagtacggtaacccgatagtgacgtctgatcatctggaatttgtccagtcaggcccctttgtgaactttctcaagttgagcgatattgattacagccagagaaattatggcgagtacaccgtgactgtcactggcggaaaagagggaacagcgactctcattcccatgctgaacggggttcatcaggcaaacttaagcgtatcgctgaatctcatccgctcgataaaagaaatgtccggtcatgtcactgcaaacaaccataccttctccacggctcaattcccgagcgaaggttttgcaggagcgtattacacactcaacaatgataactttgaagcgggtaaaaccgttgatgattatatgttttcaagttcacagagttgggtgtctgtcgatgcttcaggtaaggtttctttcgcaaatatcggcgatcaaacgtcagtcacaataagcgctgttccccgacaaggaggtacaacctaccagaccttaattaagctgaaaggctggtgggtgaataatggaaatcataccaatatctggctagctgccaatgcgctctgtcatgcgaaaaatgatggatataatcttcctggcatcacacatttgacgtctggcgaaaacaaacgcacgcagggatcactgtatggtgaatgggggaacgttggagcgttttccagtaattcgcaatttacacaaggagcttactggacaagtgaatctgatgattacaatcggcactactatgtgcagatgctaacgggtatgaccggaagcgacgctgattccagcccccaactgaccgcctgccgtaaatcactttaa

SEQ ID NO: 13149 - DNA, 1179 bp, Escherichia coli
atgaattcgacatcgcatcccgtagaacgtttttctttcagcaccgcgttattcgggatgctggttctgaccttaggtatgggtttaggccgctttctctatacgccgatgctgccagtcatgctggcggaaggcgaattttcctttagcgaactctcatggatcgccagtggtaactatgccgggtatctggcggggagcctgctgttttcattcggcgcgtttcatttaccctcacgcctgcgcccgttcctgttagcttccgacctcgcaaccggattattaatcctcgcgatggcgtggctaccgccgtttcttctggttttcatcattcgctttctggcgggagtcgccagcgccgggatgttgattttcggctcaacgctcatcatgcaacatacccgccatccctttgtccttgcggcgctattttctggtgttggcgtcggcatcgctctgggcaatgaatatgtgctggcaggcctgcattttgccctctcttcacaaacgttgtggcaaggtgccggagcactttctgccattatattgcttgctctggcgctgctcatcccgtcgaataaacacgttatcccgccagcgccattggcaaaaatcgcgcaacaacccatgagctggtggttactggcgattctgtatggtctggcgggttttggttatatcatcgtcgccacctacctgccgctcatggcgaaagacgcgggccagcctgtgctgacggctcacctttggacactggttggcttgtcgattgtcccaggttgctttggctggctgtgggcagccaaacggtggggagcattaccttgcctgaccgcgaatttgctggtgcaggcgatctgcgtgctgttaactctcgccagcagctctcctttattactcatcatcagcagtattggttttggcggcacctttatgggaacgacctcgctggtgatgaccatcgcccgccagcttagcgtgccgggaaatcttaaccttttgggctttgtgacactcatttatggtatcgggcaaattcttggcccggcgctgaccagtatgctcggcaacggaacgtcggccctcgccagtgccacgctctgcggcgcggcggcgctatttatcgcagcattaatctgcgggatgcaaatattcaaattgcatacgaattattcttaa

SEQ ID NO: 13150 - DNA, 843 bp, Escherichia coli
ttgaaaaagcgcatcacctttatcgtttttctttgcgccatcgtggcagtgagcctgttttttgtgcaatcctgcgtccgtaaaagccagcatgtcgcagggtttcagaattatcaggccactatcgatggtaaagagattacaggagtaactaaaaatatctcctcactgacctggtcagcgcagagcaataccttgtttagcactatcaacaaacctgcaaccatcgttgaaatgacgaccgagggtgacctgatccgcaccattccgctcgattttgttaaggatctcgagacgattgaatacattggtgataataaatttgtcatcagtgatgaacgtgactacgccatttatgtgatttcacttaacgctgagtcggaagtaagcatcctcaaaaaaattaaaatcccattgcaggaaacaccaactaactgtggctttgaagggctggcttactcctctcaggaccataccttctggttttttaaagagaaaaatccgatagaggtctacaaagtaaccgggctattgcgtagcgatgagttgcatatcagcaaagataaagcgttgcagcgtcagtttactttagacgatgtttctggcgcggaatttaacccacagaaaaatacgttgctggtgttgtcacatgagtcacgcgccctacaggaagtgaccatgacaggtgacgtgatcggcgaaatgtcgttaaccaaaggcaagtatggcctttcacacaacatcaagcaggcggaagggatagcgatggatgacagcggcaacatctatatcgttggcgaaccgaatcttttttatcgctttacgtcgacaaaatcacgataa

SEQ ID NO: 13151 - DNA, 2115 bp, Escherichia coli
atgggttccctaaacatataccaggatattttcccaacactcggcatgtattcgggactaaaagcttgccatgaaaaaaacaaccaaccatttgatattaacacggaaattgaaaccatacaaaaacaaattaattatgatataaatcatttgaatgatggtttgattaagcgtgtactgaatgtttttattcaccttatctctaatcccgacaatctcgaattaaccttaaatcgatattcatcaacaacagaacaaatcatcgccaaaaccaaaagaaatggtttaaatgagtttgaaattaacgatctaaaaataatatttaatcgacaagataataatgaaagcgtattaactgttaaccacaaagatataagtcatagttgcaatgttaaaaccgcgcaactgcagcagtttattaaaataatggaacaaaaagcgcaactaccaatctatattgacaagaacaatttgaaagagagtattttctctgttttgcgaaatgacccacagcatgtagaaaaagagcaatatcttccctttgataagtttttaacacatgcctgcaaaagttcaaattcatttgaagtgaaattagatgccactcatcaatatcaacatctgaataacttcatgatttcttttgacccagtagaaaatcaattaacaatacgggataacaataaagagactgaaactatctcgttgacaaacttacaatgggaaaatgtactgcaatactatagagaaaaccaccagcagccaaatatagcaggatcacgaaatatcacggataatagagataaaattaaaaatacaatatccacctctgaaattattgagtgcgcctctcctgaaataagaagtagcgtcctgaacgatctttatagcattgctaatttcctcccggacaataatctgacaccaaatgagagctggaaaagattttgtaacacatgcgagcgcttttacgttgctcagaagagtatcactggagataagagtgaacgtcttacgcgaaaactctctatctctgatgcaggaattacaatgaccttcacgataggtgatgttgtcatcaatactattagcactgctattcctgaagattcaacggggcaacggtgtatcgaagggttgaatttagcgggaatggatttaaccggcatagacttgtctaaaatggttctaaggaatgtcaattttaatggcagcattcttagaaatgccaagttctccggtacgatctgtgaaggcgtggattttaccgattgtgatctgcgtaatgcagaattcgaaaatgcctcattagaaaaaatcgattttcgtaaagctcgtcacttgcttaatataaattttacaaatgcaaatctacggaacagtaacttcagcggaaaagttctcactggcgttaattttactggaagtgaccttagtaacgcttatcttgcacacatagatttcacaaaagtgattttctttccgtcattaattattggagcagtatttgattattccaatctatcagagaaaaatctttcagacaaagatcttactaatattagctgcatgtataccaattttactaacgctaatttaacaaaatgcaaattcttaaatacaaacttttcggctgcaaaattggacaatactaattttactggtacagaaggttctaatattctatttaaccatgcatggttattcaatacgatatttatagatgcgatttttaaaaatgcctgttttttcaatgccaaagtgaataatgtttctcttaagaatgcatatctttacaatgataatatcaataaaaaagccaatgacagtgccgagaaacaagctagtgacagtatcgagaaacaagctagtgacagtatcgagaaacaagccagtgacagtaccgagaaacaagccagtgacagtatcgagaaacaagccaataacagtactgataaacaagccaagaacagtaccgataaacaagccaagaacagtaccgagcaacaggacagtaccagtttaaatcaagcccgtttaaagaaagaagtgaatagcagtttttccattccgggtttaacgtcttatcagccaacttatatagttgaagaatag

SEQ ID NO: 13152 - DNA, 267 bp, Escherichia coli
atgaaagagtttttatttttatttcactccacggtcggcgtcatacaaacccgtaaggcgttgcaggcagcgggcatgacttttcgcgtcagcgatattccccgtgatttacgcggcggctgcgggttatgcatttggctgacctgtccccccggcgaggaaatacaatgggtgatccctgggcaaaccgaagcgatatattgccagcagggcagcgactggcagtgtgtggtgcattacgattcagaagcgtcaaccaggcaataa

SEQ ID NO: 13153 - DNA, 1233 bp, Escherichia coli
atgccacgtttttttgcccgccatgccgccacgctgtttttcccgatggcgttgattttgtatgattttgccgcgtacctgtcgacggatctgatccagccagggatcattaatgtggtccgtgattttaatgccgatgtcagtctggcccctgctgccgtcagtctctatcttactggcggtatggcgttacagtggctgctggggccgctttccgacagaattggccgcaggccggtgctgattaccggggcgttaatttttacccttgcctgcgccgcgacaatgttcaccacgtcaatgacacaatttcttatcgcgcgtgcaattcagggcaccagtatctgttttattgccaccgttggttatgtcacggtgcaggaggcgttcggacagacaaaagggatcaagttgatggcgattatcacctccatcgtactgattgcgccgattatcggcccgctttccggcgcagctctgatgcactttgtgcactggaaagtcctttttgccatcattgcggttatgggttttatctcatttgttggcttactgctggcgatgccagagacggtgaagcgcggcgcggttccatttagcgccaaaagcgtcttgcgcgattttcgtaatgtcttttgcaatcggctgttcctctttggcgcagcaaccatctctttaagctatatccccatgatgagttgggtggctgtctcgccggtgatcctgattgacgcaggcggcttaacaacttcgcagttcgcctggacacaggttccggtgttcggcgcggtgattgtcgcgaatgccatcgtggcgcgtttcgttaaagatccgaccgaaccgtgctttatctggcgtgctgtacccattcaactggtcggcctcgcgctgttgattatcggcaatctgctgtcaccgcacgtctggctgtggtcggtgctgggcaccagtctgtatgctttcgggattggtttgatcttcccgaccttattccgctttacgctgttttccaataacttaccgaaagggaccgtctccgcatcgctaaatatggtgatcctgatggtgatgtcggtctcggtcgaaatcggccgctggctgtggtttaacggcggtcgcttgccgtttcatctgttagccgttgtggcgggcgttatcgtcgttttcaccctggcgggattgctcaatcgcgtgcgccaacatcaggctgccgagctggtggaggagcggtga

SEQ ID NO: 13154 - DNA, 687 bp, Escherichia coli
atggcctttcgccttatgcgctattccatggcggtgatgcagcgccatatcgagcatgataaacgccggccgctaccgctggtcatcccgatgctgttttatcacggtagccgtagtccttatccctggtccctgtgctggctggacgaatttgctgacccggctaccgcacggaagctttataccgccgcgttcccgctggtggatgtcactgtcgtgccagacgacgagattgtgcagcatcgcagagtcgccctgttggagttgatccaaaagcatattcgccagcgcgatctgatggggcttatcgaccaactggtactattactggttacagagtgtgctaatgacagccagataactgcgctgttaaattacattttactgactggcgatgaagcgcgttttaaagagtttatcagcgaactaaccagtcgaatgccacaacaaagggagcgaataatgacgattgcagagcgaattcataatgatggatggctgttgggaagggagagggggaggaaagaagggaaagtagaaggggaacggagcctcctccgattgttgttgcagaatggggcggatcctgaatggatacaacgatataccggactttcggcagagcaaatgcaggcattagatcagcccttgcctgaaagcaagcgcgatccatggatcgagtactaa

SEQ ID NO: 13155 - DNA, 714 bp, Escherichia coli
atgctgaagatgattaaagattttaaattcaaaaaatacattaaaaaattacgtgaagaaggtttgtttttttatgtttctttcgggtttatattaacattgttaatggaagttgatgaccgattaccgtactatcttcaacaagacttcttttttgatacacttataggatttatgccaatcaatatattctttgttttgatttgcacatatatatttttcaatgccgtccatgagtttatttcaccctataaatttcaaagaattggtgagaaatttctctctgaacttgataaaagaacacaacaaattggctttattatttcatttatatgttttggcatgacattgttttgtgctctggcgtggttgctgttttttgagatgaatactgaaagttactacgcaaaatatacattagattttttggctgtttttatcattatgattttgttttcttcagcagttaatccagtcatgagaagaatattccaaaaaataaaggaatcggactcacatggaaattcaaaaataattcttataattataatcattacattattgctactattaccaattgcgtgcattatcaataaaaataaaacaattgaaatcaacattaagaaagaaacttatcagcaaataaaagaaaaaacaaagatgaaaccagaagattatatcaaaaaattgattgctgatattaaattcaactaa

SEQ ID NO: 13156 - DNA, 2856 bp, Escherichia coli
gtgccggaactggtctacagcccgtatgcctcaaatagcgtctttgcagaaacgggcgtgaaagccaaaaaatggcgcatcgacctggtgctgtttatcaacggcctgccaattgccacgctggagctgaaatccgaattcaaacaggcggtgcagaacgccattgcgcagtacaaaaagacccgcctgccgaaagatcccgccaccaataaaccggaaccgctgctgacctttaagcgcggcgcgctggtgcattttgccgtcagccagtatgacgtctttatgaccaccaaactcgcgggtgacagcaccttcttcctgccgtttaacaaaggcaccaaagacggcggcgcaggcaacgagatccccgaagatacccaccgctacgccacagattatctgtggaatgaagtgctgctgccggacaacttattaaaaatcctcgccagttttgtccatttgcatattgaagaaaaagaggagtggaacgggctgaaagcgaagaaagagagcctgattttcccgcgttatcatcagtgggatgtggtcaacaaactgctggaggccgcgacggtcgaaggcaccggctataaatacctgatccagcacagcgcaggttccggaaagtcgaactctattgcctggaccgcccaccagctttctcgtctgtacgacgtgaaaggggaaaaacagttccactccgttatcgtggtgacggaccgcacggtgctggacgaccagcttcaggacaccatctggcagttcgaacacgccgacggcgtggtcgggcgcatcaataacaaagagggcgatggctctaaatcggaaaagctggccaacgcgctggaaaactcgcagccaattattatcgtcaccatccagacgttcccgttcgtgctgaaagctatcgaaaacagcgttagcctgaagcagcgtaaatacgcggttatcgccgatgaagcgcactcctcgcagagcggttccaccgcccgtcagcttaaagaagtgctgatgagcgaagaaatggataatgacgtggtgctgtcgtcagaagatattctggatgcgaccattgccgcccggaaaggcagcagtaacctgaactactacgcctttaccgccacgccaaaatccaaaaccctcgaactttttggtcgccgtccacgtcccgatgaaccggcgtcaaaaaccaataaacctgaggccttccacgtctactccatgcgccaggcaatcgaagaaggctttatcctcgacgtgctgaaaaactacaccaactacaaagtggcgtatcagttgctgcaaaagctggaagacaaagaccgcgaagtcgatagcaaacgggcgaagattaagctcaaccagtgggtgacactgcacgaccacaatatctcgcagaaggtgaaggtgattgtggagcacttccgcaaacatgtgatgcacctgcttggcggccaggctaaagcgatggtggtcaccagttcacgcaaagccgctgtacgctacaagctggcgtttgataaatacattagcgagaacaattaccagaaaatcagcgcgatggtggcgttttccggggaagttgaattccaggaaggcgaccataacagcctggcattgttaaaccagaaatttactgaaataaacatgaaccccggcctgaaagggcgggatatgcgcaaagccttcgacagcgatgattatcaggtcatgttggtcgccaataaattccagaccggttttgaccagccgaaactgtgcgcgatgtacgtggataaagccctcggcggcgtcgagtgcgtgcagacgctctcccgcctgaatcgcacctatccgggcaaagcggaatcaggcacttttgttctcgatttttataacgatccggacgagatcctcggcgcattccagccctatttccagacggcggaactgaccgatgtcagcgatccgcagcaggttttcgatctgtttgaaaaactgcgcgccacgcagatctttcagtggcatgaagtcgagcagttctgcgaggcattcttcatcaaaaataaatcgaatgcagcgatcagtaatatatgcaaaccggcggtagaacgctggaaaaagcgttatctgatggcgatagacgcttatctgaccgccaaagagatgttcgagcgcaccaaaaaaacgggcgatacggtgttaatcactaatgcggaaaacagttttaaagcctgtaagcaggagaaagatcgcctggaaatattcaaaaaggatctcggcagctttgttcgcttttatgaatttatgtcgcagatcgtcgagtacgatgacaaagatctggaaaaactgagcctgtttgcccgccatttgcgtccgctgctgcatgaacaacgtctggaagaggatgaggttgatctcagtaacgtggagatgagtcactatcgcttatcgaaaatccatgaacaagatttacgcttacaggaagaaacgcctgactatacgctggatgcaagtaatgatattggtacggcaaaagcgaaagataaaaaagaggagtttttatcgcaggtgctttctcggatgaatgaattattcattagcgaccatttgaccgacaaagatatgatcagcaatgctttttcggtgtataacaaaataactgaaaatgaaaatgttatgacacaaattaaaaataatccgccagaacaagctattcttggtgatttcctccaggcagttgataatgctgtaatggacagtaatgacgctcgacaagaatttatgttgcaatatttatcagttccagttcgggcaaagggctttgcttatctgatgtttgatatgctaacggggaaaattgctttgccaacataa

SEQ ID NO: 13157 - DNA, 309 bp, Escherichia coli
atgagcaacgacatcgccaaagaggtcaacttacaaaaagacatcatcgctcagatgttggaaaaaggctggattgtcggcaaaagtgacggctacgaccgggaacgagcaatatacgcacaggataccttaaacttcgttcagaccacccaaccgcaggagtgggagaaattcgcccgcgtctaccccaacgacaccgagcgccatttcctcgacgcgctggttgcgcagttaaaaaagccgacagcaacgccaccgacatccagtcgcgcacctggggtacgctcggcgtacttcgccacggactga

SEQ ID NO: 13158 - DNA, 1404 bp, Escherichia coli
atggcggggttaaataaatatcaggcgtatccggagtatagggattctgggatggagtggtgtaatgaattaccactaaactggaaaaaaactaagctgaggtggctatccaatatttttgcaggaggaactccctccaaaaatgttattgattattgggagaatggtacagttccctggattagttctggagcagtaaatcaaggttatatagtcgagccatccacatatatatctaacgctgcacttgaaaatagtagtgccaagtggataccaaaaggggcacttgttgtcgctttagctgggcagggaaaaaccaaaggtatggttgcacaacttggtattaataccacttgtaaccaatccatggcggccattgtattgtataaaaagaatcaatctcgctatatattttggtggctcatttctaattatcagaatatacgtaacatggctggcggtgatttacgagacggtttaaaccttgaacttttaggcgatatacaatgcccaaaacctcgtaatgatgaatcttctaagattgcacttttccttgatcatgaaacagcaaaaatcgatgacctgatcgagaaacaacaacaactcattgaactactaaaagaaaaacgtcaggcagtgattagccatgcggtgaccaaagggctaaatcctgatgtgccgatgaaagattctggtttaacaggattaggcgaagcaccctcccactggtttaagagtaaattagccaatactggtgatgaaactaaaggatgcttcgtaaatgggccatttggaagtgatttactagcaagtgaattgaaagaagaaggggtacctgtcgtatacattcgagatataaaagcgacaggttataacagaaaaagtactgtatatgttactcatcaaaaagcccaacagcttgaaatatgtaaattatcctcaaatgatgtgattttttcaaaagtcggagatcccccaggagaagcgtgcgtttatcctaaaaatgaaccagatgctgtcataacgcaagatgttatgagagtaagagttaataaaaaaaccttcaatgcacatttcatagcatatctattgaactcaaattttgggcgacaaaccattaataacattagtattgagggaacaagaaaaagagtttcattaggtgactttaaaacaaccaagtttatatttcccccattgggtgaagcacaatcaatcgtcaacgccttgaatgaaaaatgcgcacaaattgatctcataatatttaaaaccaatcaagcaataatgctaatccaggaacgccgcaccgcccttatctccgccgccgtcaccggcaaaatcgacctacgcaactggaccgcccccatccccgaagcggaaacacccacggaggtcagcgcatga

SEQ ID NO: 13159 - DNA, 2346 bp, Escherichia coli
atgtcatcaactaatttcagccagattgcagccttcctgtggtctgtcgccgacctgttacgcggcgattttaaacaatcacaatatggacgaattattctccctttcactcttcttcgtcgtctggaatgtgtactcgaaacaagtaaagacgcggtcattgccgaggcacaaaaagtaaaagccatgaaactgccagaggaagcccaggagaaaatgatcctgcgggcgactaatggcctcacgttctttaatgcctcagcgatggatctcagcaaaatggggcaaaatggcatacaggacaacctggaaaactacatccagtcgttctcttcggatgcccgcgaaattttcgaacacttcaagttcagcgagtttgtcggacagctggcggatgcaaacttactgttcaaagtggtgcaaatattcgctaaagcagatttatacccggagcacgtcaccaaccacgatatggggctggtatttgaggagctgatccgacgttttgccgagagttctaacgaaaccgccggggagcactttaccccgcgtgatatcgtcaatctgaccacctcgctggtgtttttcgatgatgatgatgcgctcaataaagacggcatcatccgcaccatttacgatccaacggcaggaaccggcggctttctctcctccggcatggagtacgtccataaacaaaaccccaatgccgtgatgcgcgcgtttggtcaggagttaaatccggaatcctacgccatctgtaaagccgatatgctgattaagggccaggacgtcagccttattaaactcggcaacaccctttccaacgatcaactccccgcagaaaaattcgattacatgctttctaatccacctttcggcgtggactggaaaaagatagaaaccgacatcaacaacgagcacaaactcaaaggtgctgatggtcgctttggccccggcctgccccgagtctccgacggttcgttgctgtttctgctgcatctgatcagcaaaatgcgcgatgccaaaagcggtggcggacggatcggcatcattcttaatggttcgccgttattcaccggcggcgcaggcagcggtgaaagcgagatccgccgctacattctggaagcggatttgctggaaggcattatcgccctgcccaccgatatgttttacaacaccggtatcgctacctatgtttgggtgctgtctaacaaaaaagcgccagaacgcaaaggtaaagtccagctaatcgacggcagcaacctgtgcggaaagatgcgtaaatcgctgggatcaaaacgtaatattctcggggaggaggatattggtttaatcacccgcacgtttggcgatttcgaacccgttgccaccactacgcttgcggcgttaggcctggagaaagcacccgaacaaaaatccagccggggacgccagcccgcaacaaccaaaaccgaggcggcaaaaacctttgccagcaaagtctttcacagcaccgagtttggctatcgtcgcatcaccgttgagcgcccgttacgcctgtcggctcagataagtgatgacgccattgccacattgcgctttgcgccgaagccgtttaacgcgccgatggcgcaactgtatgacgcctttgctttccagtggcaggacggtaattacggcgacttaacagcggtagaaagtgaagcccgcgccattcttaaagccgattttagcgagctgaaagagaagcaaattaaagatctgctcgacagcaaattatggctggcccagcgcgggttaatggaaaaagcgcggcgtattcaggcagcgatgaggatgctggcgggtggcaaagagactgttagcaatgactttaatcagttccagttgacgctgaaagaggcgctcagaaccgcaggcgtgaagctggatgcgaaagagaacaagcagtttatcgatgctatcacccgcaaaaacccggacgccgagccggtaatcagcaaggttctgaaagaagcgccccaaccgttgtacggcgcgtttgagtaccacggaaaggttgtggagtttgaatcggatggcgacctgcgtgataacgagaatgtgccgttaaatccggcggtatctaccaacgagttgatcgaggattacttcaaagcggaagtattgccgcatgttgcggatgcgtggatcaatgccgataaacgcgatgcgaaagatggggatatcgggattgtggggtatgaaattccgtttaatcgtcatttttatgtttatacaccgccgcgaccgttggaggagattgatgctgatttggatgcggtaagcgctgagattatgaaactgttgcaggaggtacattcctga

SEQ ID NO: 13160 - DNA, 2100 bp, Escherichia coli
atgaaagccaccgaagcccgattactcgattttctaaaacgctctcagcaattcgttattcccatttatcagcgtacttattcatggtcagaggaacagtgccgccagctctgggacgatgtaatacgtgccgggcagcgtgatgatgtcccggcgcatttcatcggctcggtggtgtatatcgaacagggcctatatcaggtttcggggatctcgccattactggtgattgacggtcagcaacgcctgacaacggcgatgttattgctggaagcgttgtccagacatcttggtgatgacgaggtgatggatggtttctccgccatgaaattacgaaactattatctgctcaatccgtatgaatcgggcgagcgtggttttaagttacttcttacgcaaacggacagagcgagcctgctggcattgattagacaaaaaccgctggcagaaaattgctctctacgcgtgaaagagaattttgagtttttccatgagcaaataggcaaactccacggcaatttcaccgcgttatgtcagggcctttccaaactgctgattgtggatgtcgccttgaatcgcggtcaggataatccgcaactaatcttcgaaagcatgaactcaacaggaaaagcgctgagtcaggcggatctagtacgcaactatgttctgatggggctggagccagaacatcaaagccaactgtacgacgattactggcggcccatggagctggcgtttggtcagaagggatacactgactatttcgacagttttatgcgtaattaccttacggtaaaaacaggtgagattccgcgaattggtgatgtctatgaagcctttaaacgctatgcgcgaaaacctggcgtaatagatagcgggatggaggcgctggttgcggatattcgtacgtttgctgactatttttgtgcgatggcgctggatagcgaaaaggataaaaccttaaagatggcgtttcaggatctgcgggaactgaaagttgatgctgcatggccgttcctgttggtgctttatcacgactataaacaggggatcctttctgccgcggattttttaggtgccacgcgtttaattgagtcgtatatcttccggcgcgcagtctgtgccattcccaccaactcatttactaaaaccttcgctacgttttacaaagtgctggataaagagcgttatctggagagcattgcggcgcatttgctggatctgccttcctaccgtcgtttcccggatgatgatgaatttcaacgtgaactgaaaactcgcgatctctacaacttccgtaatcgcagctattggctacgcagatttgaaaaccacgatcgtaaagaacgggtctatgttgacacttatacgattgaacatatcatgccgcagaaccctaatttatcggtgaagtggcgcgatgaccttggtccggaatggaagcgtatccataaaaaatggctccatacgttgggtaatttaacgttaactggctataactcaagctacagcgaccgtccatttgcgaagaaacgagatataaaaggtggctttaaggaaagtccattacgcctgaacacggggttagggcaatgtgaaatatgggatcgtgcagcgatacaaaagagagcggaacgtctgtccgagctggcaatagacgtctgggcgatccccaaactttcggaagacgtgttggctcgttatcgcactgtcgttgaacgaggaacgggatatgtccttgctgatttcccgcaacttgaagaaggtacgcacatccgcgtactttttgacagcctttcttatgccgttatgacgctggacgctggggttacgcgagaaatattgaagctctatgttgccttcaaagcggagacgaattttgttgatgtggtgccgcaaaaaagtcgcttacgtttatcactaaatatgccattccatgaactggttgacccaaaatgtatggctaaagatgtcacagatataggccgttggggcaatggcgatgttgaaataggtttcagcgatctttctgagcttccttatgtgatgggattaattcgtcaggcatttaaaaagcagatggataacgcgatggtttaa

SEQ ID NO: 13161 - DNA, 735 bp, Escherichia coli
atgacaaccaaactactggacctgagctggaatgcaaatgccatcccggcgatgcaaattgtcggtacgcgcgcggccttgtttaccttcaaaacgcatatggcagggtttgtctgggatgccgcgcaactggaaaataacccctatacctttgttgaagttaaaacgctgctcgatggcgtcaccgttggcgggcataaggtcagtgatactgagcaggtgttgaacctggcagatagcgcaaaaaaactgattgaacttgtgcaatccgggcgtttcgatcttgataagaaaacgttcacgttgcttaacggcattattgcgcgtaatgaggcgctggagtggggcgtttttcgcggcgaaggtgatgagttacattacaatgcgcgcgttcacctcggcgagttgggcacccatttcccaccagccacagaagcaggtgcacctgaactgaatcgaatattcgccgcaggtgtggcacaaataaaagagatgccaccgttcgaaggggcgctggcaatgtttttatttggtgcttattttcagtttttctttgatggcaacaagcgtaccagtcgccatatgatgaacggctggttaatgcgccacggttacaatcccattagtgtacccgcagctcgtgcgctggagttcaacagcaaaatggtgcgcttttatcacagcaaagatgccagtgaaatgatggcatttttggtggattgctatcaggtttga

SEQ ID NO: 13162 - DNA, 513 bp, Escherichia coli
atgcaattagatgaacaacgcctgcgctttcgtgacgcaatggccagcctgtcggcagcggtaaatattatcaccaccgagggcgacgccggacaatgcgggattacggcaacggctgtctgctcggtcacggatacaccaccgtcgctgatggtgtgcattaacgccaacagtgcgatgaacccggtttttcagggcaacggcaagttgtgcgtcaacgtcctcaaccatgagcaggaactgatggcacgccacttcgcgggcatgacaggcatggcgatggaagagcgttttagcctctcatgctggcaaaaaggtccgctggcgcagccggtgctaaaaggttcgctggccagtcttgaaggtgagatccgcgatgtgcaggcaattggcacacatctggtgtatctggtggagattaaaaacatcatcctcagtgcagaaggtcacggacttatctactttaaacgccgtttccatccggtgatgctggaaatggaagctgcgatttaa

SEQ ID NO: 13163 - DNA, 1563 bp, Escherichia coli
atgaaaccagaagatttccgcgtcagtacccaacgtccgttcaccggggaagagtatctgaaaagcctgcaggatggtcgcgagatctatatctatggcgagcgagtgaaagacgtcaccactcatccggcatttcgtaatgcggcagcgtctgttgcccaactgtacgacgcgctgcacaaaccggagatgcaggactctctgtgttggaacaccgacaccggcagcggcggctatacccataaattcttccgcgtggcgaaaagtgccgacgacctgcgccagcaacgcgacgccatcgctgagtggtcacgcctgagctatggctggatgggccgtaccccagactacaaggctgctttcggttgcgcactgggcgcgaatccgggcttttacggtcagttcgagcagaacgcccgtaactggtacacccgtattcaggaaactggcctctactttaaccacgcgattgttaacccaccgattgatcgtcatttgccgaccgataaagtgaaagacgtttacatcaagctggaaaaagagattgacgccgggattatcgtcagcggtgcgaaagtggttgccaccaactcggcgctgactcactacaacatgattggcttcggctcggcacaagtgatgggcgaaaacccggacttcgcactgatgttcgttgcgccaatggatgccgatggcgtgaaattaatctcccgcgcctcttatgagatggtcgcgggtgctaccggctcgccgtacgactacccgctctccagccgcttcgatgagaacgatgcgattctggtgatggataacgtgctgatcccatgggaaaacgtgctgatctaccgcgattttgatcgctgccgtcgctggacgatggaaggcggtttcgcccgtatgtatccgctgcaagcctgtgtgcgcctggcagtgaaactcgacttcatcacggcactgctgaaaaaatctctcgaatgtaccggcaccctggagttccgtggtgtgcaggccgatctcggtgaagtggtggcgtggcgcaacaccttctgggcattgagtgactcgatgtgttcagaagcgacaccatgggtcaacggtgcttatttaccggatcatgccgcactgcaaacctatcgcgtactggcaccaatggcctacgcgaagatcaaaaacattatcgaacgcaacgttaccagtggcctgatctatctcccttccagtgcccgtgacctgaataatccgcagatcgaccagtatctggcgaagtatgtgcgcggttcgaatggtatggatcacgtccagcgcatcaagatcctcaaactgatgtgggacgccattggcagcgagtttggtggtcgtcacgaactgtatgaaatcaactactccggtagccaggatgagattcgcctgcagtgtctgcgccaggcacaaagctccggcaatatggacaagatgatggcgatggttgatcgctgcctgtcggaatacgaccagaacggctggactgtgcctcacctgcacaacaacgacgatatcaacatgctggataagctgctgaaataa

SEQ ID NO: 13164 - DNA, 939 bp, Escherichia coli
atgaaaatatctttacgctcactatttgtggcgtgcctgattgcgccagtggcattcacctacgcctccgaactgcaagaaatgaaaattgtactacttggaacgaaaggtggcccttctttattaaaagctgaccgtttgccgatggcaacggcacttattattggcaataaaacatggttaattgatgctggttacggggccagcttacaactggtaaaaaataatattccactgcgccagattgataatattttactcacccatttacacagtgatcatattctggactatccctcagtcttaatgaatgcatgggctagcggtctgcaggacaaaaatattcatgtgttcggtccgccaggtacccgagccatgaccgctgccagttggcaggtcttcgatcgggacatcacactgcgtatggaagaagaaggaaaacccgatcctcgcaagctcgttacagctcaagatgttggtgaaggcgtagtttataaagatgataccgtgaccgtgactgcattaaaggttcctcattctcctttccctgacggtgaggcttttgcttatcgcttcgacacacaaggcaagcgaattgtcttctcaggagatacctcgtactttcccccactggcaactttctcagaaggcgctgatatacttgtgcatgaggccgtacatgagccctccgtcgctaagctggcagacagtattggcaatggtaaaacactggcaaaagccattgcttctcaccatacgactattgaggatgtaggcaaaattgccaatgaagcaaaagtgaaaaaactcatccttagccacctggtaccaatcaccgttccggatgaaacatggaagcaagaagcacagaaaaactattcaggccctatcgtcgttggtcatgaaaatatgacgattaccattccattcgccccataa

SEQ ID NO: 13165 - DNA, 891 bp, Escherichia coli
atgtccagtgaagctatctttgaacatggttatgaaaatattgatttggtccgggaatatgatgcccgctacgctggtgaagatgtgcattatgaaacatttgccaggttagcgaatttctttggacgcgatatgcgccctcactggcacgatagatattttcaactccattatctggtcactggacgcattactttacagctggatgagcacttctattctgtgcgcgcaccgctttttgtactaacaccaccatcggtgccacatactttctttactgagcctgatagcgacgggcatgttctgaccgtacgtcaggagttaatttggcccctggtagaaaagctctggcctggtagtggagatgccgcaatgctacaaggtatctgtctgtcgctggagggaatggaacatacactggcggcattaaatcattattggccgataatatccctggagtttcaacaaaataagccaggacgggaaattctattgcaatcactggcgcaaagtatttttacaatcctactgcgtgaagcaccaccaaatgatatttcaacatgcagcgtgcgcggcgagatgtgtttattccagaagtttaatcggctgattgacgaaaattatcgccaacatttaatggtccctgaatatgcagcaatgctcggtatgagtgaatcacggcttaccgagctatgccgacgttttgccaatcaatcgccgaagagattgattttcgaacgagtgagccgggaagccagacggcttctgctctatagcgagcaaagcatcaaccagattgcccttgatcttggctacaaagatcccgcctatttcgcccgttttttcaaccgaatgatgggttgctcaccaacacaattccgtggtcgctga

SEQ ID NO: 13166 - DNA, 1356 bp, Escherichia coli
atgacgacctctaccctgcaatataaagataataaaactgttgaaattgaacatcgtgtcattaataaattatttcgtcgcctaatcatttttctttttattctgtttgttttttcgtttcttgatcgcatcaatataggatttgccggactgacaatgggcaaggatcttggcctgacgtccacaatgtttggcctcgccgcgacactcttttatgtcacgtacgtcatgtgcgggatccccagtaatatgatgttagcgaaaattggcgctcgtcgatggatcgctgggatcatggtggtctggggagttgcttccacctgcacaatgtttgcaacaagccccgaaacactctatctactgcgtatgctggttggtattgctgaggcgggttttttacctggtattttggtttatctgacctggtggttcccggcatatcatcgggccagagccaatgccttatttatgatagcgatgccagtcactatgatgctgggatcgatcctttcaggctacattctggccttggatggactgtggaatctaaaaggctggcaatggctctttttgctggaaggtctgccatcggtcattcttggtgtcgtcacctggttttatctcaacgatacaccagaccaggcgacctggcttgatgaaaacgaaaaacaggctttaaaaacgatgattctccgtgaacaagagagtgcatttgcccatgcatctgttccacgctcaaccttacgtgaagtcctgaccccagccatcatgctatatacacttgcttatttttgcctgaccaatactctgagtgcgattaatatctggacgccgcaaatcctacagagtttcaatactggcagtagcaacatcatgattggtttgctggcggccatcccccaattctgcacaatttttggcatgatctggtggagtcgtcgttccgaccgtcttaaagaacgcaaaaagcatacgattcttccctacctgtttgccgctgccggatggttactcgcttctgcgactgatcacagcctcattcaactgagcggcatcattatggcctcaatgggatcatttaccgcaatggctatcttttggacgacaccggatcaagtaataagcttgcaatcgcgtaccgttgcgatggctgtcatcaatgctgtcggtaatgtaggttcagcagtcagtccattacttatcggtattttgaaagatgcaaccggcagttttagctcaggtttgtggtttgtagcaggattactggtactgggcgcgttagtcatgacccgaattcctatggggagtcgggaacactctctttcatctgaacttatcgcaccaaaaccgcaataa

SEQ ID NO: 13167 - DNA, 804 bp, Escherichia coli
atggaaaacagttttaaagcggcgctgaaagcaggccgcccgcagatcggattatggctggggctgagtagcagctacagcgcagagttactggccggagcaggattcgactggttattgatcgacggtgagcacgcgccgaataacgtgcaaaccgtgctcacccagctacaggcgattgcgccctaccccagccagccggtgatacgcccatcgtggaacgatccggtgcaaatcaaacaactgctggacgtcggcacacaaaccttactggtgccgatggtacaaaacgccgacgaagcccgtgaagcggtacgcgccacccgttatccccccgccggtattcgcggtgtgggcagtgcgctggcacgcgcctcgcgctggaaccgtattccggattacctgcaaaaagccaacgatcaaatgtgcgtactggtgcagatcgaaacgcgtgaggcaatgaagaacttaccgcagattctggacgtggaaggcgtcgacggcgtgtttatcggcccggcggatctgagcgccgatatgggttatgccggtaatccgcaacacccggaagtgcaggccgcgattgagcaggcgatcgtgcagatccgcgaagcgggtaaggcgccgggtatcctgatcgccaatgagcaactggcaaaacgctacctggaactgggcgcgctatttgtcgccgtcggcgttgacaccaccctgctcgcccgcgccgccgaagcgctggcagcacggtttggtaatagttcttctatttcgatggcgaagcaaaacaacaactctgtctactaa

SEQ ID NO: 13168 - DNA, 804 bp, Escherichia coli
atgttcgataaacacacccacaccctgatcgcccagcgtctggatcaggcagaaaaacagcgcgaacagatccgcgcgatctcgctggattacccggagatcaccatcgaagacgcttacgcggtgcagcgcgaatgggtccgcctgaaaattgccgaaggccgtacgctgaaaggccacaaaatcggcctgacctcgaaagcgatgcaggccagctcgcaaatcagcgaaccggattacggtgccctgctggatgacatgttcttccacgatggcagcgatatcccgaccgatcgctttatcgtgccgcgcattgaagtggagctggctttcgtgctggcaaaaccgctgcgtggaccaaactgcacgctgttcgacgtctacaacgccacggattatgtgatcccggcgctggagctgatcgacgctcgctgccacaacatcgatccggaaacccagcgcccgcgcaaagtgttcgacaccatttccgataacgccgccaacgccggggtgatcctcggcggtcgtcccattaagcccgatgagttggatctgcgctggatctccgccctgatgtatcgcaatggcgtgattgaagaaaccggcgtcgccgctggtgtgctgaatcatccggcaaacggcgtagcctggctggcgaacaaactcgcaccgtatgacgtacaactggaagccgggcaaatcattctcggcggttcgttcacccgcccggttccggcgcgtaagggcgacaccttccacgtcgattacggcaacatgggctccattagctgccgctttgtttaa

SEQ ID NO: 13169 - DNA, 381 bp, Escherichia coli
atgccgcactttatcgtggaatgtactgaaaatattcgtcaagaagcccgcttacctgagctgtttgccagtgttaacactgcactggcggcgacggggatttttccgcttgggggaatacgtagccgggcgcactggatcgatacctggcaaatggctgatggcaagcacgattacgcctttgtgcatatgacgctaaaaatcggcagcgggcgcagtctggaaagccgtcaggaagtaggcgaaatgctgtttgatctgattaaaacgcacttcgcctcactgatggagagccgttacctggcgctttcatttgagattgcagagctgcacccgacgttgaatttcaaacagaacaacgtacacgcgttgtttaaataa

SEQ ID NO: 13170 - DNA, 852 bp, Escherichia coli
atgggtaagttagcgttagccgccaagatcacgcacgtaccgtcgatgtatctctctgaactgccagggaaaaaccacggttgccgccagggcgcgatcgacgggcataaagagatcagcaagcgttgccgggaaatgggcgtcgataccattatcgttttcgatacccactggctggtcaacagtgcttatcacatcaactgtgcagaccattttgaaggcgtctacaccagtaacgagctgccgcattttattcgtgacatgacctacaactacgagggcaacccggagttggggcagcttattgccgatgaagccttaaagctcggcgtgcgggcaaaagcgcacaatattcccagcctgaaactggaatacggcacgctggtgccgatgcgctacatgaatgaagacaagcacttcaaagtggtctccatctccgcattctgtaccgttcatgattttgccgacagccgcaagctgggcgaagcgattctgaaagcgatcgaacagtacgacggcaccgtggcggtccttgccagcggttcgttatcgcaccgctttattgacgatcagcgtgcggaagaagggatgaacagctacacccgcgagttcgaccgccagatggacgagcgcgtggtgaagttgtggcgcgaaggccagttcaaagagttctgcaatatgctgccggagtacgctgactactgctacggcgaaggcaatatgcacgacacggtgatgctgctggggatgctcggctgggataaatacgacggcaaggtagagtttatcaccgagctgttcccaagctctggcaccggtcaggttaacgctgttttcccgcttcccgcgtaa

SEQ ID NO: 13171 - DNA, 1467 bp, Escherichia coli
atgaaaaaaataaaccattggatcaacggcaaaaatgttgcaggtaacgactacttccagaccaccaatccggcaacgggtgaagtgctggcggatgtggcctctggcggtgaagcggagatcaatcaggcggtagcggcagcgaaagaggcgttcccgaaatgggccaatctgccgatgaaagagcgtgcgcgcctgatgcgccgtctgggcgatctgatcgaccagaacgtgcctgagatcgccgcgatggaaaccgcggacacgggcctgccgatccatcagaccaaaaatgtgttgatcccacgcgcttctcacaactttgaatttttcgcggaagtctgccagcagatgaacggcaaaacctatccggttgatgacaagatgctcaactacacgctggtgcagccggtgggcgtttgtgcgctggtatcgccgtggaacgtgccgtttatgaccgccacctggaaggtcgcgccgtgtctggcgctgggcaataccgcggtgctgaagatgtcggaactctccccgctgaccgccgaccgcctgggtgagctggcgctggaagccggtattccggcgggcgtgctgaacgtggtacagggctacggcgcaaccgcaggcgatgcgctggttcgtcatcatgacgtacgtgccgtgtcgttcaccggcggtacggccaccgggcgcaacatcatgaaaaacgccgggctgaaaaaatactccatggaactgggcggtaaatcgccggtgctgatttttgaagatgccgatattgaacgcgcgctggacgccgccctgttcaccatcttctcgatcaacggcgaacgctgcaccgccggttcgcgcatctttattcagcaaagcatctacccggaattcgtaaaacgttttgccgaacgcgccaaccgtctgcgcgtgggcgatccgaacgatccaaatacccaggttggggcgcttatcagccagcagcactgggaaaaagtctctggctatatccgtctcggcattgaagaaggcgcaaccctgctggcgggcggcccggataaaccgtctgacctgcctgcacatctgaaaggcggcaacttcctgcgcccaacggtgctggcagacgtagataaccgtatgcgcgtcgcccaggaagagattttcgggccggtcgcctgcctgctgccgtttaaagacgaagccgaaggtctgcgcctggcaaacgacgtggagtacggcctcgcgtcatacatctggacacaggatgtcagcaaagtgttacgcctggcgcgtggcattgaagcaggcatggtgttcgtcaacacccagaacgtgcgtgacctgcgccagccatttggcggcgtaaaagcctccggcaccgggcgtgaaggcggtgagtacagcttcgaagtgttcgcggaaatgaagaacgtctgcatttccatgggcgaccatccaattccgaaatggggagtctga

SEQ ID NO: 13172 - DNA, 1290 bp, Escherichia coli
atgaaaggcactatcttcgccgtagcgttgaaccatcgcagccaacttgatgcatggcaggaagcgttccagcaatccccctacaaagccccgcctaaaactgcggtctggtttattaaaccgcgcaatacggtgattggttgcggtgaaccgattccctttccacagggtgaaaaagtactgagcggtgcgactgttgcgctgattgtggggaaaacggcgacgaaagtacgtgaagaagatgcggcagagtacatcgccggatatgcgctggctaacgacgtcagcctgccggaagagagcttttaccgcccggcaatcaaagcaaaatgtcgtgatggattctgccccattggcgaaaccgtggctctcagcaatgtcgataatctgactatctataccgagatcaacgggcgtcctgccgatcattggaacaccgccgatttacaacgtaacgccgcgcagttgctgagcgctctgagcgaatttgccacgctgaatccaggcgatgccattctgctcggcacgccacaggcgcgcgtggaaatacagccaggcgatcgcgtgcgtgttctcgcagaaggtttcccgccgctggaaaatccggtagtggacgaacgtgaagtgaccacgcgcaagagcttcccaacgcagccacacccgcacggcacgctgtttgccctcggcctgaactacgccgaccacgccagcgaactggaatttaagccaccggaagaaccgatggtgttcctgaaagcgccgaataccctcactggcgataaccagacctccgtgcgcccgaacaatattgaatatatgcactacgaagcggagctggtggtggtgattggcaagcaggcgcgtaacgtcagcgaagccgatgctatggattatgtcgcgggctacaccgtgtgtaacgactacgccattcgcgactatctggaaaactactaccgccctaacctgcgggtaaaaagccgcgacggactgacgccgatgctttcaaccatcgtgccgaaagaggcgatcccggacccgcataatctgacccttcgcaccttcgtcaacggcgaactgcgccagcaaggcaccaccgccgatctgatcttcagcgtgcccttcctgatcgcctacttaagcgaatttatgaccctgaatccgggcgacatgatcgccaccggcacaccaaaaggcttatctgacgtggtgcctggcgatgaagttgtggtggaagtagaaggcgtgggccgcctggtgaaccgaattgtgagtgaggatacagcgaaatga

SEQ ID NO: 13173 - DNA, 447 bp, Escherichia coli
atgcacgactcactaaccattgcgttgctccaggcgcgagaagcggcgatgagttattttcgcccaatcgttaaacggcataatttgactgagcaacagtggcgcatcgtgcgtattctggcggaaagcccatcaatggattttcacgatctggcgtatcgcgcctgcattttgcgcccaagcctgaccgggatcctcacgcggatggaacgcgacggtttagtgttgcgattaaagccgatcaatgatcagcggaagctctatatctcgctgaccaaagaggggcaggcgctgtataaccgcgctcagacacagattgaagaggcctatcggcagattgaagctcagtttactgccgagaaaatgcaacagttaacccatctgttagaggaatttattgctctgggtaattcccgacaagaagacatcccgggcgataatgaataa

SEQ ID NO: 13174 - DNA, 1656 bp, Escherichia coli
atgttaaaacgtatcaaaattgtgaccagcttactgctggttttggccgtttttggccttttacaactgacatcaggcggtctgttctttaatgccttaaagaatgacaaagaaaatttcactgttttacaaaccattcgccagcagcaatccacgctgaatggcagctgggtcgcgttgttgcagacgcgtaacaccctcaaccgcgcgggtatccgctacatgatggatcagaataatattggtagcggttcaaccgttgctgagctgatgcagagtgccagtatttcgctgaaacaggcggaaaaaaactgggcggattacgaagcgttgccgcgtgacccgcgtcagagcaccgccgcagcggcagagatcaaacgtaattacgatatttatcacaatgcgctggcggagctgatccaactgttaggtgcaggcaaaatcaacgagttctttgatcagccaacccagggatatcaggacggtttcgagaagcagtatgtggcttacatggagcaaaacgatcggctctatgatatcgccgtcagcgataataatgcctcctacagccaggcgatgtggatcctggtgggcgtgatgatcgtcgtactggcagtcatcttcgccgtctggttcggtattaaagcctcgttggtagcgccaatgaatcgcctgattgacagcattcgtcatattgcaggcggcgatctggtgaaaccgattgaggtggatggctctaatgagatggggcaactggcagagagtttgcgccatatgcagggagagctgatgcgaaccgtcggtgatgtgcgcaacggggccaatgccatctatagcggtgccagcgaaatcgccaccggcaataacgatctctcttcgcgcaccgagcaacaggccgcttcgctggaagagacggcagccagcatggagcaactgaccgcaacggtgaaacagaacgccgagaatgcgcgtcaggccagccatctggcgttaagtgcttctgaaacggcgcaacgcggcggcaaagtggtggataacgtagtacagaccatgcgcgatatctccaccagttcgcagaaaatcgccgatattatcagcgtaattgacggcattgccttccagaccaatattctggctttgaacgcggcggttgaggctgcgcgtgcgggtgagcaagggcgcggttttgcggtggtcgcgggagaagtgcgtaatctggcccagcgcagcgcccaggcggctcgtgaaattaaaagcctgattgaagactcggtggggaaagtggatgttggctctacgctggtcgaaagcgccggggaaacaatggcggagattgtcagtgccgtgacccgcgtgacggacattatgggcgaaattgcttctgcttctgatgagcagagccgtggtatcgatcaggttggattagcggttgctgagatggaccgggtaactcaacagaacgccgcgctggtggaagaatctgccgccgccgctgccgcgctggaagagcaggccagtcgcctgaccgaagctgtggcagtgttccggattcagcaacagcagcgtgaaacatcggctgtagtaaaaaccgtgacgccagctacgccgcgtaaaatggccgtggcagatagcggcgagaactgggaaacgttttaa

SEQ ID NO: 13175 - DNA, 390 bp, Escherichia coli
atggaaaatggtgaaaatattattattggtaaggtcggagctctttgcggaaacgttcggtatgttcaaggtgatatttgggtgacaaataactcattaattattaagaattatttaccaaataaagttttaacaccctaccttgcaaagttattatctactttaaacttaagaaagctcgccgttggtaccgctcaacaatatttaaccacaacacaaataaaaaatgtagaaattaacattccacctttaacgacccagcataaattaaatatgtggcttgatgagttagataatacccttgaacaatataataagctcattgaaaaaataatgaatgataagcgagaacttaaagagaatttgtataaaggtcttttaatagaatag

SEQ ID NO: 13176 - DNA, 3063 bp, Escherichia coli
atgtttaacgaacaaaccgttacagaaaatggaattatcgaccgtttaaaaggtttaagcggagtcaagtggacttactgccacggtgaaaacctgcctaaacaagcgcaggatatcttcgttgatgagtggctaaaagacgcgctttgttcgttaaaccctgatatcggcagacagcctgactatgccgatgaggtcatttacaaactgcgaggagtggttttagaagcccgccataccggcttggtaaaggccaatgaaaacttccaggaatggttgatggccgacaaaaccttgccttttggtaagaatggcgaccatatcaccatcaatctgattgattttgacaatatagagaacaaccactttgtggtggcgcagcaggttcactatatcgcggccactgaagtctattttgatattgttctttatgtgaacggcataccactggtagtaggcgaagttaaaaccgcaacacgccccagcgtgacttggcaagacggtgctgccgatttcatgggtggcaaaaagtactactggaaaaatgttgaatctttctttgtacctaacttgctgtgctttgccagcgaaggtaaaacctttgcctatggagccattaatgcccgagttaaagactggggaccctggcataatactgagcttcgtgatgaaattttgccgggtctggcatcggtactcaatagctgtgagagtttgttaaatccgcaaaccttattgcagttactggaatcttttgcattattttcaaccgtcaaaacgggcaaaaatactccacctaaacgcgttaaaatcttgccgcgttatccgcaatttgaagctgcaaaacaaattgttgagcgtgttcgtagaggctatccaaaaaaaggtcttatttggcatttccagggatcgggtaaatccttgttgatgctttacgccgccaaaatgctacgtgccgataatgcgttaaaaaacccgacggtacttatcgttgtggaccggcgagatctggacagccaaattaacgagacctttggtggagccgacgttaagaatctgattaaagtgcaaagctgcaaaaagttgggtgaatacattgaacaagacagccgtggcattttaatcaccaccatctttaaatttaaagatatcgaaattgacgatagcaaccctaatggcctgaacaaccgtgacaatatcattgtgttggttgacgaagctcaccgtacacaggaagggggattaggcgagaaaatgcgctgggcgttgcccaatgcccacttctatggcctgactggtactccgatttctggcattgatcgtaatacgttcaaattgttcggtgccgaagaagatccgggtcgctatatgagccgctatagctataagcagtcgatccgggatggcgcaactaacccggtgaagttcgaacctcggctggctgaactccgagtggatcgtgatgctatcaatgaagagttcgagcaactggctaccgaaaacaacctggatgaagaagaaaaagcagcattgtccagacgcgccggcaagctggctattatgctgaaatctcccagacgtatggctgcggtgagtaatgatattgctgagcattttaccaaccatgttatgccgaaaaagatgaaaggcatggttgtggtatacgatcgcgaagcctgtgtgcagatgtattatttgctcggtgaaaagcttgggtttgatgcggttgaagtggttatgaacgttgaccaggctccggttaaagttgaagagggtggcaaaaaagacaagctcaacaaggattggcttaaatggcatgatgagttggagctgcctgtcaaacaagtcgattttgaacgctggcagcacatcgatgccgaagagcaggtgcaaaaggatctaattgagtgctttaaagatcctgaacatccattacagcttattatcgtaaccgccaagctgcttacgggctttgatgccccgatttgctactgcatgtacctcgataagcctctacgcgatcatacccttctgcaggccatgtgccgaactaaccggctgtacgaaaccgatactgtacgcaaggacatgggattaattatcgactacctcggcgttttcgaaaatctgcgtaccgctctggcctataaccctgaagaaattgaaggagttgtagagggaattgaggcatttaaagagctattgccgttacaactgaataaatgtttgtccttcttccctggtgtggatcggtccatagctggttttgaaggtattatggccgcgcaggaatgcctgccgaccaacgagaagcgcgatgaattcgctgccagctttggtgtgttatccaagttatggtcagctatcaacccagacccttttttgaccccttatcgtcaggactataaatggctggcgcaaatttatgaatcggtgcgtccggtagggcagacaggtgcgcttgtttgggctgcccttggccccgaaacaatcaagatgatccatgagcatactgatatcaatcgtattcgcgatgatattgacgagttggtcatggacgagcacgctatttttaccctgaccgctaaagagcaggaacaacgtgccaaacgcctggagattgatcttatgggacgtttgcgcggcagtcatgatcctaaatttgtggcattgggcgagcgccttgaaaaactgcgtcaggactatgaagctggtgttatcaaggccattgactggttgaaaggcctgttggatgcagcgaaagataccgttcaagccgagcgcgaaacgggcgagcgcccagtaactgaagctgataataaacaggcgttgactaagcttttcctcgaaacacgtccggaaactacccctaagttaatcggtgatgttgtagagcaaattgataaaattgtgaaagctacccgctttgatggctggcaaaattccaacagtggcccgcgcgaaatccaaaaggcgcttttactgaccttggcccagtttggactaggaaaagataaagagttgttccagaaggcgtatgggtatattgaggagcattattaa

SEQ ID NO: 13177 - DNA, 1152 bp, Escherichia coli
atgactgataaacaatgtgttaaatttggcgatatttgccgagaggtgaaactcactaccaaagatccgcttgctgatggctatgaacgttatattgggctggagcacttagattctggctcgctcaagataaagcgctggggaatgattgctaaagataacccaagctttaatcgggttttcaaaaaaggtaacatattattcggcaaacgtcgtccttatctaaaaaaagcagcaattgctgaatttaatggtgtctgttccggtgacattatcgttatggagccaacgtcaaaattgaaagttcctgagctattggccttcttagtccaatctgaggtgttttggggttgggctattaaaacgtcatcaggttctttatcaccaagaaccaagtttagctcactggcaacttgtcttctcaatataccaactgaagaagaacatcaaagagcgctctatacactactaataaaaaatcaagaagtaataacacaagcagaaatggcaataaatagtgcggtttcagttgaaaaaatcatggctgccagctggttcagcacaactcaaaaaaaaattaagcatacaacacttggcaaattagctggaaataatggactacaaacggggccatttggcagccagttgcatgcacatgagtactctgaaaaaggtgtgccggtaataatgcctaaagaacttggttttggaacagttgatattactcaatctgcaacgatacccaaaaacgtagctgaccgtttgagccgccaccgattagttgaaggggattttgtttttggtcggcgaggtgagattggtaggtttggctacatatcagcggaacttgagggtgctatttgtggaacaggttgtctaagatttagacctaaaaaccagaacttgagtggcttttttagagctttctttcgaagccaatcagccattcgatggctgaatagtaacgcagtaggtatgacgatgttaaatttgaatacagatatattaggtgagttgcctgttcctgatcttagtgaaaaagattataaaaaaattgaatctgtgttcaataaattagaggcgcataggcttttgttaaataaccataaagaagcaagtattaaccttatgaactcattgataaataggtag

SEQ ID NO: 13178 - DNA, 1485 bp, Escherichia coli
atgagtaataaaaagctggaagagctgctctggggagccgccgaatttcttcgtggccaaattgacgcatcagactacaagcagtatatcttcccgttgctgttttacaaacgcctgtcagatgtctatctggaagaatataacgaagcgctggaactccatgaaggtgatgctgaatatgccgccatgccgatgtttcaccgtttcaacattcctgctgaagccagttgggaaaaggtccgcaataccagtaaaaatattggggaagcgatccagaatgcgcttcgactaattgaagccaataacccgcgtttacatggcgtcttcggtgatgcacagtggaccaataaagagcgccttcccgatcatctgctggctgatctgattgaacatttcagtaaaattccgctcggcattaaatctgtcgcccaggatgatcttggtgaggcctacgaatacctgattaaaaagttcgctgatgattccggtcatacggcagcagagttctacaccaaccgaacagtcgtgcatttaatgacgcgcattatgggcttaaaaccgggtgaaacagcctatgatccaacgtgtggcactggagggatgttgctaaatgcagtgatggatcttcgtgcaagaggagaagagtggcgctctgtgcacctttatggtcaggaagtgaacctgctgacttccgctattgctcgtatgaatatgttcctgcacgatattgaagagtttgatgtgctgcgtggtgatactttggctgagccaaagtttattgaaaacgatcggctcaagcagtttgatgtgatttttgctaacccaccgtactccattaagaaatggaatcgtgacaagtttgcagccgatccctatgggcgtaatctctatggcgtgcctccacaaggttgtgctgattatgcgttttatacccatataatcaaaagtttaaaacccgacaccggtcgtgctgccatgctctggccacatggtgtactgttccgtgattctgaacaagccattcgtaaacaggtgattgaatccgacataatcgaagcggtgattggtttgggaccaaatctgttttacaactcgccgatggaatcttgtgtggtggtgcttaattgcaataaacctgctgaacgcaaaaataaggttttgtttgtcaacggggtggaacatgtcactcgcgagcgggctcatagtcgcttatcggatattgatttaacggtgttatgtgaggcttactttacacccgaaaagcaaagcaatatcaccgcattggttgatatcgatgttattaaagagaatctctataacttgtcgattccactgtatgtgcaagcacaaagtaacgacgaaacgcatgatattgagcatgctattgaggcgtggaaaatcagccgtgtgcagctgaaagcacagacaaaaaaattattcgagagcctcacgcagttaggttatgaggtggaaaaaaatgactga

SEQ ID NO: 13179 - DNA, 1500 bp, Escherichia coli
atgacactgattaacctaaaagatctcgaggcccatctatggcatgcagcccatattattacagggcccattgatgcgtcagattacaaaacgtacattttccccatcctgttcttcaagcgcatttgtgacgtgtatgacgaagaatttgccgatgcgatggagagcattggggatgcagagcttgccaagggcaagatgtttcaccgtattcagatacctgaaaattgccactggcgcgatgttttcgctgagaccaaggacatcggtcaggctttaaaagagtccttccgtggtatagaactggcaaaccctaaactgcatggcatttttggcgatgccagctggaccaataaagaacgcctttctgatgagttactggctacgttactcaatcacttcaataaggtgaaccttggcgtttctagtgtccgtgacgatgatatggggcgcgcatacgagtatctgatcaaacgctttgcagacaaagccaataagaaagccggtgagttctataccccacgaactatcgttcgtttgatggttaacattcttgatccaaaagccggtgagagtgtctacgatcccgcctgtggtactggtggtatgctgcttgagaccatccaccatgtaaaagaaaatggtggtgatccgcgtttactaaaaatcaagggtcaggaaaagaacttaacgacggaagctattgcgcgtatgaatctgttcctgcatggacaggaagatttcgatattgtccgaggggatactttacgcgaacctaaatttttaaaaagcgatcgtttagaaacctttgactgcgttgttgccaacccaccatttagcttaaaagaatggggatacgatctgtggtcgaacgatccctatggccgtaagcaatatggcctggcgcctaaaacaaatggtgattttgcctgggtgcagcatatgtttgcttcacttaacgacaatggacgtatggcagtcgtattacctcatggtgtgctgtttcgtggcggcgcagagggggcaattcgaaccaaattactgcaagagaatcgcattgtggcgattattggtgttgcttccaacctgttctatgggactgggattcctgcgtgtattttggtgctgcgtaaatcacgtccggccgcgcataaagatcatgtattgatcatcaatgctgaagaaatttataccaaggggcgtgcgcagaatacgctgtccaacaagcaggccgatgaaatataccaaatctatcatgaccaggcgcaacaagggccagatgcaaaagaaatcgaaggcgttgcacgctgggttcctctgaaggagattgaagaaaatgacttcaatctaaatattgctcgttatgtgcaaaagccactcgaagaagaaactatcactgtggaagaggcgctcaaagattttcaacggaagctggctgagctggaaaaagcagaagaggagctggaggccctgcttatcaaagaaggtttcgaggtatga

SEQ ID NO: 13180 - DNA, 651 bp, Escherichia coli
ttggcgcaaaatggcggcatttcctcatttctccatcggagcatcttacgcgctataaccactctcgttttttcctattcccatgcagatgaagcactacgcaatgaacttgagaagcatctctccccgctgaagcgaaccgggaagatcacaacatggcacgatcgccgcatcgttcctggtcaggagttcgaacgtaagatcgaccactatttttcgcaagcagatatcatcctgatcctgatcagcagtgactttattgcttctgattactgctatcaggtagagatgaaaaacgcactggaacggcatgaccggggcgaggcggtggtcattccggtaattttaagaaactgtgcatggcatcagttagaattcggcagcattatggcggcgactatcgacggtaaacccatcactaagtttgccacccacgatgaaggctacgttcaggtcgtcgaggccgtctcgcgtgccattgcccggatggaagccaaaaaactacagcaaaccatacatatcccttcaccggctccggcgaatcccatctttcagggagtagattccgtttttacaccgcgttcaagcaaccttactctatctgttatagccaggataatgttgttcgaaacagtattaacgaaattgtaa

SEQ ID NO: 13181 - DNA, 1056 bp, Escherichia coli
atgatcacgtcccggtataacgatgaagtattttcagaaggaattattgtggcgactaagatgtggatgatccgcggtgatggcggaaaattgtacgacgacttcagagacaaacaggttgttgcaattggttggtcgcagctcgctccctatgtgaaacctggatgctcaagagagcagttgtttacccggtatcaggagcttgagccacagactaagcctggcacagttcgttctggtgcttctcaggtctggcgctttgtgaatgaaatgcagaaaggcgactgggctatcacttattcaccttctaatcggacctatttaatagggaaaattgcgtcagattttgagtttcatgccgagtggcttgaagatggcatgggcatcgcccgtaaagtgaagtggaatgcggaagagattaagcgcgatagtctgagtgatgcaaccagaaacacccttggctcaacgctgacagtttttcaggtgcctgattttgctgtgaatgaattagtgcagggcaataagcctgtctcagatatcgtgccggaagtacctgtttcaggtgaagaggatgaggtcgtttctaatcctctgcgcgacatggaaatgatcgcttttgaaggcatcaaggatcgtatcaaccgtctcgactgggatgagatgcagaatctggtcgctggcgtgttacgcagcatgggatataaaactcaggtatcgcctgcgggtgctgaccgtgggaaagacatcattgcttcgcctgacggatttgggtttgaaaatccgcgcattattgttgaggtgaagcaccggcgggaacagatgagcagccagcaaatccgtagctttatcggtggccgtcataaagacgatcgcgggctgtatgttagtaccggcggattcagcaaggatgcgcgttatgaggccgaacgttctacaatcccgttgacgctatggacgctggacgatttggtacgcgcgttagtggaaaactatgagcaggtggatattgaaactaagctgttggtgccgcttaagaaaacgtatttgcctgcatga

SEQ ID NO: 13182 - DNA, 339 bp, Escherichia coli
atgaagatggtgaaaatatattcaacaggaagttgtgatgctgcaacacgtgaaggttcggcggaagttgtgctggaatgtgaagggaaaataaaatatctgaccttctcctacagtaatacgaccgcaaatagatgcattctccagggcttaattgatggtgtgaattatttgaagaaaccctgtaacgttgaattaatcagttcatgtgagctcggtgtgaagaaagcacagaaaggaaagggagttaatgtagatttgcacaaggaattatgtggaatcttgataaagaatgtgaatattctttttctgtcatgcatggtgaaggcgacattttga

SEQ ID NO: 13183 - DNA, 780 bp, Escherichia coli
ttgaatagctctgaagacgatttgcttgaagtggcgtggtatttgtcgaagtatggtaactctcaaccacccgcaggactgggtgttcagaaatggaaagaggcttttgccttgttttatcctcgatttggagcgggcaaaactgccagcgagtttcacaatagtctgaaaaatagtcgtgaccgttttgattcctggcttagtgatgtgcgtgtcggttggcgtgacgagcagggtgctcctgctgcgctttctcattcagcgcagcgtgttcatcagcgattgagtgtgctttctgatagtgcaattgagcagcgcgttctttcgttaatatcgactgatagagatgaacaggcacaacgtgactgtcttgctattcagcaggataaaagtattgaagataccgtacgcgagcagctgattgcggcacggctggggcaaggtacctttcggaaaaattgtctcatgttgtatccggcatgccctgttacgggaacgacttttgcacctttactgcgtgccagccatataaagccgtgggctgcctgcgagaatggaaatgaacgtcttgatccttttaatggaattatattggctgcgcatattgatattctattcgatcagggatggatttcgtttgagaacgatgggcatttattaattagtaaggagctggatattagcgttaaagagcaatgtttgttgccggagaaaataaaggcgttttctgttgaatcgtattgttatctggagtggcatcgggagaatttactgagatag

SEQ ID NO: 13184 - DNA, 1944 bp, Escherichia coli
atgattaagtttagcgcaacgctcctggccacgctgattgccgccagtgtgaatgcagcgacggtcgatctgcgtatcatggaaaccactgatctgcatagcaacatgatggatttcgattattacaaagacaccgccacggaaaaattcggactggtacgtaccgcaagcctgattaacgatgcccgcaatgaagtgaaaaacagcgtactggtcgataacggcgatttgattcaggggagtccgcttgcagattacatgtcggcgaaaggtttaaaagcaggtgatattcacccggtctataaggcattaaatacgctggactataccgtcggcacgcttggcaaccacgagtttaactacggtctggattacctgaaaaatgcgctggcgggagcgaaattcccttatgtaaatgccaacgtcattgacgccagaaccaaacagccaatgtttacaccgtatttaattaaaggcaccgaagtggtcgataaagacggaaaaaaacagacgctgaagattggctatattggcgtcgtcccgccacaaatcatgggctgggataaagctaatttatccgggaaagtgacggtgaatgatattaccgaaaccgtgcgcaaatacgtgcctgaaatgcgcgagaaaggtgccgatgtcgttgtcgttctggcgcattctggtctgtctgccgatccgtataaagtgatggcggaaaactcagtttattacctcagtgaaattccgggtgttaacgccattatgtttggtcatgctcacgccgttttcccgggtaaagattttgctgatatcgaaggggctgatatcgccaaaggcacgctgaatggtgttccggcggtaatgccgggcatgtggggcgatcatcttggtgtggtcgacttacaactcagtaatgacagcggtaaatggcaggtgacgcaggcgaaagcggaagcacgaccgatttacgacatcgctaataaaaaatccctcgcggcggaagacagcaagctggtagaaacactcaaagccgatcacgatgccacacgccagttcgtcagcaagccaatcggtaaatctgccgacaatatgtatagctatctggcgctggtgcaggacgatccgaccgtgcaggtggtgaacaacgcgcaaaaagcgtatgtcgagcattacattcagggcgatccggatctggcaaaactgccggtgctttcagctgccgcaccgtttaaagttggtggtcgcaaaaatgacccggcaagctatgtggaggtggaaaaaggtcagctgactttccgtaatgccgccgatctttatctctatcccaatacgctgattgtggtgaaagccagcggtaaagaggtgaaagagtggctggagtgctccgccggacagtttaaccagattgatcctaacagcacgaaaccacagtcactcatcaactgggatggtttccgcacctataactttgatgtgattgatggtgtgaattatcagattgatgttacccagcccgcccgttatgacggcgagtgccagatgattaatgccaatgcggaaaggattaagaacctgatctttaacggcaagccgattgatccgaacgccatgttcctcgttgccaccaataactatcgcgcttacggcggcaaatttgccggtacgggcgacagccatatcgcttttgcttcaccggatgagaaccgctcggtgctggcagcgtggattgctgaagagtcgaaacgtgcgggggaaattcacccggcggcggataacaactggcgtttagcaccgataactggcgataagaaactggatatccgtttcgaaacctctccgtcagataaagccgcagcgtttattaaagataaagggcaatatccgatgaataaagtcgcgaccgatgatatcgggtttgcgatttatcaggtggatttgagtaagtaa

SEQ ID NO: 13185 - DNA, 1485 bp, Escherichia coli
atgttgccaattaaacccgtttgtctcgcactggctttattttcaaccgcttcgatagcctgctccggcgtgccttatgctgcgttttactaccagccgtgggggcaaggcacaaaatatatcgttgaagatagtgacggttacggtatcgattttccggatattcatttgccgcaggtaaagttcaaacaacttcgccgcgtacccaacggcactgatggtgaatacgattcacctgatgatatcaataatgattttgtgcgggtggctcccttctctggctatcggtcaaatggcggctggcgtttcgactggttaaccgatggccgccatattttatgggcagggaaaatagtccagaacccgccgggaacaccgaaagttgatgttgcaacattccgcgcgtgggggcgttttgccgccgataaagatagtctctattttgatggtgaacgcacggatgataatcgcgacgaaaagcaggtcgatatggattcgttgcaacaagtcggcggttcaggtgattccgcggatgtgctgaaagatcgtcacaatatttactttcaggggcactggttgggcagtgcgcaagggtattctattcttggcgttaaatcctgggaccgacgaattattttattttcccccaatagctgccaaagcaaaagtaatccgggaccctgggatacaatctggcggactaaatcacaggtctttgtgaatggagatgccatcaacgccgatccggatacctttcatattgtgcgctggatagccggttcactgctaatttatcgcgataaagacggggagaaacgttatgcgttcggtaaaaattgtcggagtacgtttgacctgcagcgggataaagtaacatggttgacgcgtgatgcttccaggcgtgctaatgactgccgggttgcgactattcctgatgttgatccggaatattttcgcccgctgacggagaatgtggcgcaatataaagattcgctctatctggtgaagtatgtttctgcggtcgaaaaaacgctgtcggtcattcatttaccagacccgcaacaagaattacaggaaggtgttaatattgtaggggataaagtttatttcattgcgagcgatgatgtgactatttttgatattaatgggcaatggcagtggtataaaagccccgatggcacaccattaaattatttagcacatgacgatcgctatacgtattttattgatgaagacacggttgagcattttgaactgaaaggccaatggacgtggtttaaatacgccaatggtcaattatcagatacctttgctcatgatgaccactatatttattacgtaggcgatggactggtacgtgatgcgaagcggcgtaatgagactcgacaactcgatgcggcgcatcttgataaaaacggcagtttgcttaccgttgaaggtgagtacaccagttacaacaatgaattatttccactgaatgactga

SEQ ID NO: 13186 - DNA, 1347 bp, Escherichia coli
atgccaatgatacttgtaaagaagaatccccggggcaaagtgattcgggagcttcgcagtgaggaagagactgcagtaaagacggtctgtggactgaaaaagccagcaaccatggcactacataacctggccaatgatattctccgggaaatgcgtgagtatgatgcatggttacagtgtgactgtattccgggagattcgccggccatgaattttgctgctcttaaaaacaatacgggtactctttatctgtccagttttaatcatgagcatgcacctgaatgccccatgtatcgtcagttatccggaaatgaagaggaaacatcttccggagcaagccggcatcccgttagcacccgtataaattacagaaactttttaccacctgatgacagtaattctgttatcagactgcaggcccgctctgcttaccataatggtgagagctcctccgttcgcaagaaacgtccgcgccttgcccgtttactcctgtctcttattgacgatgctgggctgaataaactggattccctggctaatccccgtatccggactaattatcgtgaatgtcttgatgccatacggcaggttacactgcagcaggagtatatgcggggaagatccttatctgaaattatccatttccggcctggaatgtctgaaaggtctcaggagcggttaatggaaacgctggagaattcagaacgacactggcctgccagaagaaaacatatgttctttcagatttttatggcgcagcacatctgtcgtgatgctgtggaaattcactgggcgaacggtaatattcaggtcatcagacctgtgcgggggatcagtattaatggtgaagcgcagggcggaatacgtcccccttactgggttattcttgctttttgccggagtgccgatggcagaatcatctgcagtgaagggtatgctcatgctctttatcaactgacatgtccggtgcctgtggacagcaaactggaacgaaacacgctcactgctcttctgaatgtggccagctggcttaaaagaaagccaggtacgccggaattaagtctggaaaggcccctgtttgatacagaagtttatgttaatggtgaaaagaaatatgtcctgccggatttcattgtcactgcaagggctcctgacggaaagacggccagagtggtcatcgaaacgatgggatatgaagacagtgattactgcgcgagaaaatccaggcagcataccggcatgaagcagattggtgttctgcataccgatccaccgaaatggctggataacgatcatcccccttttgagaaacatatgtacggtgtttttatgcatctcaggtactga

SEQ ID NO: 13187 - DNA, 477 bp, Escherichia coli
atgtgtgattcagaagcggagaagattttattcatcctggataaacatgaacgggcatacagatgccagtaccccgtatatatttttttagctatagtattatggattttacctattctcctgattatatacctgcatttctgtataggaatcggtttcggtattgcatggacagcatactactttctttcgcttttcgagtattttgtaaaatacttctttcctctcgatcgtgaagatttgcttaacctgatggatctcgccaaagattctcctgatgcgaaacaggagcttcttgaacgtcttttgtccggaaaaagaatgaccgggcgggatgaaatggatatcaagcgcattctaaaaacaaaggaagcacttgataacatcaggaattttattgataaacagcagttaacgaatagtgatactccgaagaaaagcacggtcccaaatgaagataaaaaaggcataagatga

SEQ ID NO: 13188 - DNA, 216 bp, Escherichia coli
atgtggctactgattttctggctttcatcgccctttaatgtctcttccggtgatgcccgtcagcccacactggcggtgcacagccaggcctttcataccgaacgggcctgccgcgatgcattgcgcgccattaaaaaggagaatgttggcgaattttctctgcggggcgtttgtgtttctgacggaaatacgaaggaggaggcagtgagcccatga

SEQ ID NO: 13189 - DNA, 1068 bp, Escherichia coli
atgagtcaacatcaatattatccacagctgaaatggaagcctgctgaatatgaatctctgatgcttttagatcaaactacgctctctggttttactccgatcattaccattccagacatagactgggattatgaaaacgaatgctacaagaagagtttgagttcttacttatctgacttcggtattaaccttgcggcatcctggaaagccaatcgtcctgttttgctggatgttaaatatttagataaacatggttcgagccgccatcatcctctagatatgtgtatccaagatgctagagtaaatggtaaggaaattatccctgttgtttctcccgcatattcaacaaactatatacatgctgttcaacgcaacttaatcaatgggctcgctatatctatcaccccccagacatggcaccaattcacaagtctggttaaccacttaaatattcatcctagtttaattgatgtaatcattgattttggagatattcaaaacgcaactgatagtttaaaacaacaagcattaagcatggtcaacacattatcaggccaagctccgtggagaaacttgattttatcttcaaccgcatacccagcatcacaggcagggataccgcaacatcaagttcatcatattccgcgccatgaatacgatctttggatgtacgtagtacagaattttagcaatggaagaacgccaagttttagtgattatcccaccgctagctctaccattacgagcgtagacccacgcttcatgtctcagtatgtctcagtgagatattcgaacgatacctcatggatctttgtaaaaggtaccgcagttaaaggaaatggatggggccaaactaaaaacttatgtactacccttgttagttcgccagagtatcaagtctttggttccaaatttagttggggggatgattacatttaccaaagatcattaggcgctaacaaatctggcggctctaaagaatggcgtaaagttgcacatacgcaccatattacgttagtcgtgagacagctttattggttggcgcagactcagcctgccaagccttaa

SEQ ID NO: 13190 - DNA, 621 bp, Escherichia coli
atgaaagatcaagatgttaggttcgcggtgcatcataagcttttgaaagaatcgcatttagatccagactgccttgtggtcgatgaattttccatatcccttggcgccagtagagcagacattgctgtaataaatggtgttatacacgggtacgagctcaaaagtgaatatgactctttggagcgtttgcctcttcaaatcaagcattattcttctgtaatggacaaggttactcttgtcgtagctgagaaacatcttgagggagcattaaagttaatcccaggttggtggggcgttaaaacggtttctgttgggccaaaaggcgccattcttataaagcacatgcgtggagaaaagcttaatcgaaaccatgacacattgatgctcgctcaattgctttggaaagatgaatgtatcgacgtacttgaacgatggggctattccaaaggaatcaaaagcaagccccgatttgagttatggaatattattgcggaaaatattccaatagcgaatctcaggcttgaagtcagaacagccttaaagaaacgcgtaggctggaaagttaaggcttggcaggctgagtctgcgccaaccaataaagctgtctcacgactaacgtaa

SEQ ID NO: 13191 - DNA, 438 bp, Escherichia coli
atgaaccgcgtactgtgcgtggtcatcattgccctgctggtggcctgtggtgcgcttagtctggggctgaatcattaccgtgataacgccataacctacaaagagcagcgcgataaagccacatccacaatcgctgatatgcagaagcgtcaacgtgacgtagcagaactcgatgccagatatacaaaggagcttgctgatgctaacgcgactatcgaaagcctccgtgctgatgtttctgctgggcgtaagcgcctgcaagtcgccgctacctgtgcaaagtcaacgaccggagccagcggcatgggcaatggagaaagcccaagacttacagcagatgctgaactcaattattaccgtctccgaagtggaatcgacaagataaccgcgcaggtcaactacctgcaggagtacatcaggacgcagtgcttaaaataa

SEQ ID NO: 13192 - DNA, 534 bp, Escherichia coli
atgaacgcaaaaatcagatacggcctgtcggctgccgttctggcgctgattgccgctggtgcgcctgcgcctgacattctcgaccagtttctggatgaaaaggaaggtaaccacaccacggcataccgtgatggcgcgggtatctggaccatctgccgcggtgccatcctggtggatggcaaacctgtcgttccgggcatgaagttgtcgaaggaaaaatgcgaccgggttaacgccattgagcgtgataaggcgctggcatgggtggagaaaaacatcagagtgccattgagtgaaccccagaaagcggggatcgcgtcattctgtccgtacaacattggccccggtaagtgttttccgtcgacgttttataaacgaattaatgcaggtgatcgcaggggagcgtgtgaggcgattcgctggtggattaaggacggtggcagagactgccgtattcgctcaaacaactgttacggtcaggtatcccgtcgcgaccaggagagtgcgctggcgtgctggggaattgacagataa

SEQ ID NO: 13193 - DNA, 381 bp, Escherichia coli
atgactgaacgcatagaatttgttttgccttacccgccaacggtgaacacttactggcgtcgtcgtggcagcacatattttgtatcaaaagccggggagcgttatcgccgggcagtggcgcttattgttcgccagcagcggctgaaattaagcctgtccggaaggttggcaataaaaattattgcagaaccaccggataagcgccgccgtgacctggacaatattctgaaagcgccgctggatgcgctgacgcatgcggggttgctaatggacgatgagcagtttgatgaaatcaatatcgttcgtgctcagccagtatctggtggacgtctgggggtgaagatttaccccataatgcttgaagggcaggtcaaaaaatga

SEQ ID NO: 13194 - DNA, 1056 bp, Escherichia coli
gtgcgggtattacttcgacctgttctggtaccggaactcgggctggtgatcgttaagccgggccgtgaatccatgccggtattccacaatacccgggtactggtggagccggaaccgaaaagcatgcgtaatctgccgtccggggtcgttcctgccgctcgccagccgctggcggaggataaatcattactgccatttttcagcgacgaacaagtgattcgtgctgctggtggcgctggcgcattgtctgactggttactgcgccatgttaaatcctgccagtggccacacggcgattatcaccacagtgaaaccgtcattcaccgttatggtaccggcgcaatggtgttgtgctggcactgcgacaaccagctgcgcgaccagacctccgaatcactcgggcaacttgctcaccaaaacctgtttgcatggatgattgacgtcatacgccatgcaatgaatggctcgcaggaacgggaattatcgctggctgaattatcctggtgggcggtccgcaatcaggtggcggacgcgctaccggaagcggtattacgtcgttcgctggggttgcgtgcggaaaaaatccgctcaatgtaccgtgaaagcgacatcgtaccgggagagcagaccgccaccagcatactgaagcagcgcacaaaaaatcttgcgccgctgcctcacgcccaccagcaaaacccgccacaggaaaagacggtggtcagcattgccgttgatccggagtcaccggctcagtatctccagcgccagaaatcacaacgggaagagatgcctgtatacacgcgttgggtaaaaacgcagaaatgcatgacgtgtggcaatcaggcagatgatccgcatcacatcattggtcatggactgggagggatgggaacaaaggctgatgatttgtttgttattccgctgtgtcgtaaatgccatagcgaactacacgccggggtaaaagattttgaagaaaaacacggcagccagctgttgttgctgattcgttttttaatgcacgcgagaaattcgggtgttttgaagtggaaagcataa

SEQ ID NO: 13195 - DNA, 213 bp, Escherichia coli
atgtctcacaaatgtaggttagcctcttacgtgccgaaaggcaaggggaagcaggctatgaagcagcaaaaggcgatgttaatcgccctgatcgtcatctgtttaaccgtcatagtgacggcactggtaacgaggaaagacctctgcgaggtacgactccgaaccggccagacggaggtcgctgtcttcacagcttacgaacctgaggagtaa

SEQ ID NO: 13196 - DNA, 219 bp, Escherichia coli
atgcagaaacgagaacccgtcatcatcgcgccagactataccgatgatgaactttatgagtggatgcaccagaaaattaatgcagcgcaggatctgaaatgggccaatgaagccagggccaagcaggctgaaaatctgtccgctctggagcaggatatcaccaatctggaaaaagcagcggcattaagcattgccagaatgattacatacccgcgttaa

SEQ ID NO: 13197 - DNA, 978 bp, Escherichia coli
atgcaggtcggacttacatcttcgtcactcgccaccggcggcgcgcatagcgctgcggtatcgtcgtcaaccgttgcgcccactcaggcggtgcggcaaaaactcccggcgacggcgagtgaatatccggcctcgccgctgattaccactcgcccgcagcgttacagcgtgcagcttaacgaccagctcaccacgttgcagcaggcggatcactatctcgggcaactggagcagcagttgctcgattatcgtcacagccagcgcaaaggcgggcaggcgcagagttcggcgctgatgcagatgctggacaaacgcaccgcgctttccggcggtgcggtggaccgccagttgcagccagtgttgcagggggaagcgcgggtgacttttcactcgccggatctggcgaatctggtacacaatcccacgccgggaacgcgcatgttcagcgtctctgacgggcggcagactcagctttcggcggtgatgctgtctgaggatgacagcgctgggcagtaccagacgcggctgaccaacgccctgcgccgcgtgggcgtgcagatgcatcaaaacgccgatggtataagtttctccaccactgaaaaacagtggcccaacattgaaagcaccctaagcgtgcgcaccgatggtgataaatcagcgtttatgccactaaaaacctttgccgaaccgtcgcaggcggaccgcttagtgcaaagcctgcaacagggcggagcggggatttctcagacgttagaaagcattaatcagcagcgtgtgcagatggcggtacagcaggaaaaggcgcggcagttgatcgacggcatgtcgcgcttcccgcaaacggaaagcgccgtgcaggcgtcggaaaatctcggcggcgtgctggatagcgccaatcataactatcaggttttattgcaggcggtgaacggtcaggcgcgaatttccagccagacggtgaggagtttattgggttag

SEQ ID NO: 13198 - DNA, 345 bp, Escherichia coli
atgatgtgggacgtcgagacaacggagactttcgacaactggtttgatgcccagactgttgcgctgaaagaagatttacttgctgcaatgctgattcttgctgagtatggcccacagttgggcagaccctttgcggatacggttaatgattcacagttttcaaatatgaaagaattacgcgtccaacatcagggaaacccggtacgtgctttttttgctttcgatcctgcgcgccgtggcattgtattatgtgcgggtgataaaacggggttaaatgagaaaaagttttatcgcgatatgatcaagctcgctgattctgaataccgtaagcatctgaaaaagtaa

SEQ ID NO: 13199 - DNA, 300 bp, Escherichia coli
atggctactctaaaagaactgatggcaaagcaaagccctgaaagccaggcgcgtattgcggcaaaagttgaggaaatgcgccagaccatcgccttgcatcagctgagagaagaactcaatatttcgcaaacggaaatggcggcagcgatgggcattaagcaaccgactcttgcaaaaatggagcaggcagataacgatcctcggttgtctacgctaaaacgctatgttgcggctttaggtggggaattgagtatcgacgttaaactgccgaatggtaagagaattgcatttcagatttaa

SEQ ID NO: 13200 - DNA, 843 bp, Escherichia coli
atgagtattattatcaacaactggcggatggacccgtcgcttaatgccttaatacattgcgaaacgggtgaaacacgtcgtctcggcgaataccattttattttgctggaaacattagcaaaaaatgccgatgtggttttatcgcgatcttatttatgtgccgaagtatggaagaaccgtattgtcggcggaaacagcctgccgacggcgatccatgcgttgcgcgttgctatcgacgatgatggcaaacaacagaacattattaaaacaattccgaagaaaggttacttatgcaataaagagtatgtgtctttgccggagtcatcgcctgcagaagcgctgattattaccgaccagatacaggatacagccccagaagagatatcttcgacaacaccgtatgtgcctgttagaaaaaaacataaaggactgatggggttagcgttggccgcagctgttatattggttggctcaaccgtggggtattcacacttgaaaagtacacctgacgccccgcaactggtaaaagagtcaattaacagtccaagaataaaaatatttcatcttagttctggaaaggaaaataattccgtaccgttactgtcacaaaccctcgcaccaggaaaagacaaactcgataatttattgtcagcgcataatatgacaatgacaacctattataaatatgttcgtaaccgactggagagtgatattgttctgcgcaaccagtgcaacggtagctggcaattaacttttaatgtggatagctggcagaatagcgatattaatagcgcgatgtatcagaatttagagaagttgttaaatactgtgcagaaatgctga

SEQ ID NO: 13201 - DNA, 198 bp, Escherichia coli
atgcgggtattcaaaacaaaactcattcgcctgcaacttacagcagaggaacttgaagcgttaacggcggattttatttcctataagcgtgacggtgttttgccagatatatttggtcgcgatgcactctacgacgactcgtttacctggccattaatcaaatttgagcgagttgctcatattcatctggcaaattag

SEQ ID NO: 13202 - DNA, 492 bp, Escherichia coli
gtgaacggcaaaaccgagcagcttgaggtggatacccgaaccacgctactggacgctttgcgtgaaaatctgcatctgttcggtaccaagaaaggttgcgatcacggacagtgcggagcctgtaccgtgctggtcaatggtcgcaggcttaatgcctgcctgacgcttgcagtcatgcatcagggggccgagatcaccaccattgaaggcctgggttcaccagagaatcttcaccccatgcaggcggcctttatcaagcatgatggcttccagtgcggctactgcacctccgggcaaatttgctcatcagtagcggtgctaaaagagattcaggacggcattcccagtcacgtcacggtcgatttggtttcccctccagaaagaactgccgatgagatccgtgaacgtatgagcggcaacatctgtcgctgtggagcatacgctaacatccttgccgccattgaagacgctgcgggggagataaaatcatga

SEQ ID NO: 13203 - DNA, 918 bp, Escherichia coli
atgaaaatttctttagtcgttccggtctttaacgaagaggccacgatacctattttttataaaactgtgcgcgaatttgaagggcttcagcagcatgaagtcgagatagtcttcataaacgatggcagcaaagacgctacagaatcaattatcaacgagcttgctgttgccgacccgcttgttgtttcgctgtcgttcacacgtaacttcggcaaagaacccgccctgttcgcaggtctggaccatgctaccggggaggcaattatcccgattgacgttgatctgcaagaccctatcgaagttattcctcacttgatagagaaatggcaggccggtgcagatatggttctggctaaacgctctgaccgctccactgacagcaggctgaagcgtaaatctgctgagtggttctataaacttcataacaaaatcagcaaccctcagatagaagagaatgttggcgacttccggctcatgtctcgcgaagtagtagaaaacattaagctcatgccagaacgaaacctgtttatgaagggtgtgctgagctgggttggtggtcgaaccgatgtcgtagaatatgcgcgagcagaacgcgttgcaggaagcacaaagttcaatggatggaagctatggaacttggcgctggaagggatcactagcttctcaacattcccgcttcgcatgtggacctatattgggttatttattgcatgtatatcatttacatacggttcatggatgataattgataaattaatttttggtaataatgtacctggatacccttcaattcttgtatcaatattatttcttggcggcatccagttaattgggattggagtgctcggtgagtatattggtagaatttacattgaagttaagcagcgtccaaagtatgtacttaagggtaaaaaatga

SEQ ID NO: 13204 - DNA, 1476 bp, Escherichia coli
atgagcaagaagcttgagcttttatattggctggcaacatttattgtattatcaataatttactcaatgattgctaaaaacataattccaaactcagatgtcatgtcttcattcagagaggcaagggatattactgaaggaaatatttttctcagtgggtgggatttatcaactgtatcattctatttcacagaaataataccatatgctatagcgataaaaataataggatttaatgaaaatctgtactatattgtgcctggaattttcatgtctatgttagtaacactatcgctatatatctctcatactaaaagcagggcatcgttatggcctgttctttctgtatttggaattccaacggttttctcatcaagtataatgcttatagcatgtatacatattggtgcgtacatttacatgctggcgatcatactaataatagatagatacagaaagaaaaatgatttaaaattactttttccatatgtatttatgttatcgttgcttgtttttagtgatgatatatctaaatatgcctttataatacctatagtttttgtttgcatatatagaatgtatgcttctctaatgaaaagagattcgttgaatactaatgatttgttattgttggttttcactatatcatctatatttattgctgagctcatatcatttatattcattaagcttggtggatttaacctgccaggcataaccaaacctcacatagtagagtttcaacaaataacaagcaacatatctcttgttatcatgggcgtattcaaattttttggtgggtacgcgtttggaatggagataggtagctttaactcattattcaccatgataaaggtgtttttcatttttgtattcttatttttatcttataaaaacattcttaaatttaaagaaattgattttattgaccaggttcttattgtatcatcattagtcatgttgattgcctatgtttcaagtgacaggccaacaaatcttttctcaattagatacatagtcccaacgtttattttcatgtcaattgtgattgctagaaattctttctccttaccagtgaagacaaatttactaatatcattaatcgttattgcgttatcgttgccaacgatggcaacaacaaaaaacattgttaataaaaatgatattacaatagaattaagagatttcttaataaaaaataaactacaaagaggttatgcatcattttggtttgcatcatctgttgctggatttagtgatatcaacgtagctccatttgagtcgtatggtgatagattcacaccatataattggttatcaaaaaaagaatggtaccaaaaaggagctaattttttaattgctgatgatgtagagcaagaggaaaaggccataaaacagtttgggcagcctgatagcactcataaaatacaagacaaaaaagttcttatttggaaaaatggaatagattcactttag

SEQ ID NO: 13205 - DNA, 405 bp, Escherichia coli
atgaatgatgtctatgcagttgttgataataacgttgttattaatgtcattatctgggacggaatttctgaatggaaaccagaggctggtaatttagttccgttaaacggcgatgctggcatcggttggtcatattcagacggagtatttaccgcgccacctcccccagaacgctctcacaacgcgttagttgcggaggctgagctgcagaaatcagcactactgaccgtagcaaataacgcaatagcaccgctgcaggatgccgttgatttggaaatggcgacagacgatgaacagacgttactgctggcgtggaaaaaatacagggtactgctgaaccgtgttgatacctcagcggcacccgaaatagagtggcctacgcaaccgggggagcgggccagttga

SEQ ID NO: 13206 - DNA, 549 bp, Escherichia coli
atgtttgattttactcattttgaagagttgactttagcatcccatcaacccgatagaataatgactatagttcggtcccaagatgacattggtatctatctccgcactcaccttttgattgaacaaatcttggaagcttggattatctgtgcctctggtaacagggatttcttcagcggttttggcgaaaatatcaacatggattttgccattaaagctcagcttgcgatgaactatgggatgagctcagagctaaacaaatttattcgaaggttcaacaacttcagaaacaaacgttcacatcaaattaacaactctgacatcactaacagtgagattgactccttaacaagtctaatggagcacggttaccctgatagcttgacccccattagagattttaagcttggggtttacggagcagaaactagggttgtaagtttcacgggatcctctacaagcttacgcgataagctcattatgttattcgctatgttttccatgagggtacattacgaagcaaaatgcttaagcacgccacagagctag

SEQ ID NO: 13207 - DNA, 561 bp, Escherichia coli
atgatccatacggtacattttttgacagatgttacagttgcctctgtaactaatctgatggatgtctgcttaaaagcagtttcaaatactaatcaaccagcaacagaaattaagctctatatttccagcaaaggtggagatacagtttcaggctttactgcttacaattttttaaagtcacttggtgtaaaggttactacgcataacctcagtaatgttgaatcaatcgcaaacgtgatctatatggctggagaagtgcgaactgccaacccactttctcgcttccttcttcacccactgcattgggggttcgccgcacccagcgcagatcacctacgattgagagaatgggcttcatgcctcgatgacgatctaaatcgatttattcaaatcatggatattgaaacaaaaaagaaaaatccaagtgagattgctgattggaaggatttgatcacttcggcaaccatccttcatcccggaagggcctccgagttgggaattgttcatcaagtcgaggctgcaaccatacccacggaatcgatccgctggtgggtactttaa

SEQ ID NO: 13208 - DNA, 393 bp, Escherichia coli
atgaagttgagctataagctggttatcgctgcattcttctttactgtcattggttctttcatctggtctgccaaccactactacagcaaatatcagcacgaaaagaaacgtgctgatgaggctgtacaaaatgctgaatctgcaacagccattacccgtaacgtcctgcaatcactgcaactcgtcaatacagttatagaggttaaccagcatgcaaaacagcagatcgcactggagtcacagagaacccagaaagatatcaaagtggctgttgcggatgatgattgtgctgcaggccttgtgcctgctgccgctgctgagcggttgcggaagtacgcgaacagtttacgtgagcattccggtggttccgttaccagccaccctgacggctga

SEQ ID NO: 13209 - DNA, 480 bp, Escherichia coli
atgtttacagctaaagacgatgcctacatcttaaaacgtgatggcagcagatgcggcccgtataaggccaagtttgcaggtgatacaattatcgtaaacgaccaaatggccgacatcgatgacggggatactgttgttcgactccttccaaacggtaaggaagaacataaagaaatttataaagctaatttttacgacactagcattggcggttttggcccacacttccaactcaaggttggccccaaaaagatacaaccaactatttcttctcagcaaatcaacattcacggagggaatgtacagattggagatcataaccgtcaggagattaccaatagcatcgagacgctgaataacttaataaatagctctcagggtacgccacagcagaaagaagaagcaaaggggctgctaagaaagttagcagaacatcctttacttactgctattgccggtggcgctataggtctgctctag

SEQ ID NO: 13210 - DNA, 579 bp, Escherichia coli
atgattaatccttctgaaattggcaaaacgggtgaaatggttcgtcttcgtactctggaaagtatctgggttcagggtaagctccgcatgtggggacgctggtcttatatcggcggtggtagtggtgggaacatgtttaaccagctactggcatctggaaaaattaccaaaacggcaattaaagaagcgctacgccggatgaaaaaagcgggtatcagcaaaccagagctggaagcgtttttcaaagagattcaggaagggcagaataaaagcggtctggcgttctgtaccgatgaggaagcgctgaccatcaacgctgtactcagcgatgtccttgtgcagtcaggacataagaatttatacgctcttattgaagatcgttatatcaaacgccttagcaaaaaggcaatggcaagagacctaaataaaaagcatcctgaatggtgtttgcgaacctgtgaaagccggattgatgtttggctaaatgtagcagaatcgatgctatacaagccaatgtgtgatgcatttggcacaaatggcgacagattccgcttgaatagttgcgcggaaagtgcttga

SEQ ID NO: 13211 - DNA, 672 bp, Escherichia coli
atgcgacacgcgccgggtgcaatccgtctgtgctggcactgcgataaccagctgcgcgatcagttcacggaacggctggaatcaatggcaacggataactgtgcccgctgggtgttgtctgttgtgcgtcgggatctcggttttgatgacagtcacgttgtgacaatgccggaactgtgctggtggctgattcgtaatgacctggcggatgccttaccggaaagcgcagcccgtaaggcactgagattaccgaagcctgttgtgccgtctgtcacccgggaaagtgaccttgtgccttcgattcctgccaccagcatcatccatgataaggcgaaaaaggtgctggcgctgaaagtggatccggagtcgccggagtcttttatgttacgcccaaaacgtcgccgctgggttaatgaaaagtacacgcgctgggttaagacacagcagtgtgcatgttgtggaaagcccgcagatgatccccaccacctgacaggtcacggtcagggtggaatgggaacaaaagcgcatgacctttttgtgttgcctttgtgcagaaagcatcacgacgagctgcatgcggataccgtggcatttgaagagaagtatggctcccagctggagctgatatttcgttttatcgatcgtgcgctggcaataggcgtactggcgtaa

SEQ ID NO: 13212 - DNA, 615 bp, Escherichia coli
atgaacgcaataattattgatgaccatcctcttgctatcgcagcaattcgtaatttattgatcaaaaacgatattgaaatcttagcagagttgactgaaggcggaagcgccgttcagcgggtggaaacacttaagcctgatatcgtcatcattgatgtcgatatccccggagttaacggtatccaggtgttagaaacgctaaggaagcgtcaatatagcggaattattattatcgtctccgctaaaaatgaccatttttacgggaaacattgtgctgatgctggcgctaatggattcgtgagtaaaaaagaaggcatgaacaatatcattgcggctattgaagctgcaaaaaatggctactgctatttccccttctctctcaaccggtttgttggaagtttaacgtccgaccagcaaaaactcgactccttatcgaaacaagaaattagtgtcatgcgatatattcttgatggcaaggataataatgacattgctgaaaaaatgttcatcagcaacaaaactgtcagcacgtataaaagtcgcctgatggaaaaattagaatgtaaatcactgatggatctttacacattcgcacaacgtaacaaaatcggctaa

SEQ ID NO: 13213 - DNA, 1038 bp, Escherichia coli
atggatttatcgttattaaaagcgttgagcgaggcagatgcgatcgcctcctcggaacaggaagtacggcagatcctgctggaagaagcggatcgcctgcaaaaagaagtgcgatttgatgggctgggatcggtgctgatccgcctcaatgaatcgacaggtccgaaggtgatgatctgtgcgcatatggacgaagtgggatttatggtgcgcagcatctcccgcgaaggggcgatcgatgtgttgccggttggcaatgtacgcatggctgcccgccagcttcagtcggtgcgtatcactacccgtgaagagtgcaaaattccaggcctgcttgacggcgaccggcaggggaatgatgtcagcgccatgcgcgtggacattggtgcgcgctcgtatgacgaagtgatgcaggcgggaattcgtccaggcgatcgcgtcacctttgataccacttttcaggttctccctcaccagcgggtgatggggaaagcctttgatgatcgcctcggttgctatctgctggtgacgttactacgtgagctgcacgacgccgaactgcctgcggaggtgtggctggtggcaagttccagcgaagaggtgggattacgcggcgggcaaactgccacccgcgcggtgtcgccggacgtcgccattgtgcttgataccgcctgctgggcgaaaaactttgattatggcgcggctaaccatcgccagattggtaacgggccgatgctggtattaagcgacaagtcgctgattgcgccgccaaaacttaccgcgtggattgaaaccgtggcggcagaaattggcgtaccgttgcaggcggatatgttcagcaacggcggcacagatggcggagcggtgcatttaactggcaccggcatacccacggtggtgatggggccagcgacgcgccacggacattgtgcggcatcgattgccgattgccgcgacattttgcagatgcagcagcttttatctgcccttattcaacgtcttacccgtgagacggttgttcaactgacggatttcagatga

SEQ ID NO: 13214 - DNA, 258 bp, Escherichia coli; identical to SEQ ID NO: 5104

SEQ ID NO: 13215 - DNA, 516 bp, Escherichia coli
atgaaacagatttctttatttattccgctgctggggacgttattactttccggctgtgccggaacgaactccgattttgagtgtgatgccaccacatccgatacctgtatgactatggagcaggccaatgagaaggccaaaaaactggagcagtcctcagaagcaaagccggctgcggcatcactgccgcgcctggctgacgggaacttccggaccacgtcggtgcaggccgttgcggcgacaacgccgtcccgcagcaggcctgctgtgacagcacttccggagcagaaactgctggcaccacgcccgctgtttaccgctgcccgggaagtgaaaacggttgttccggtcagttcagttgcgccggtaacacctccccgtccgctaagaacgggtgagcagacggcagcattatggatagcgccttatattgataatcaggatgtttatcatcagccatccagtgtgttttttgttattaaaccgtctgcgtggggaaaaccacgtattaattaa

SEQ ID NO: 13216 - DNA, 384 bp, Escherichia coli
atggccagagtaattttgtatatcagtaatgatgtctatgataaagtaaatgcgatagttgaacagcgtcgtcaggagggggcaagagataaagatataagtgtttcgggaacagcttcaatgcttcttgaactggggcttcgtgtatatgaggctcagatggagcgtaaagaatctgcgtttaatcagacagagtttaataaacttcttcttgaatgtgttgtaaaaacacagtcatcagtagcgaaaattttgggtattgagtctctaagtccccatgtctccgggaatccaaagtttgaatatgccaatatggttgaagatattcgtgagaaggtgtcatctgagatggaacgattttttccaaaaaatgatgaggaataa

SEQ ID NO: 13217 - DNA, 822 bp, Escherichia coli
atgcgattagcttcccgttttggtcgatataattctattcgccgtgagcgcccgttaacggatgacgaattaatgcagtttgttccatctgtcttttctggtgataaacatgaatcccggagtgagcgttatacatatatcccaaccatcaatatcatcaataagttacgtgatgaaggtttccagccgttctttgcctgtcagagtcgggttcgtgatttgggacgccgcgaatacagtaaacatatgttacgtcttcgcagggaagggcatattaacgggaaagaagttcctgaaattatcctgcttaattcacatgatggttcatccagttatcagatgatcccaggaatttttcgttttgtctgcacaaatggcctggtgtgtgggaataattttggcgaaatccgcgttccacataaaggtgatattgtcgggcaggttattgagggagcgtatgaagtgctcggtgtctttgataaagtcactgaaaatatggagacaatgaaagagatacatcttaacagtgacgaacaacatttatttggcagagctgcattgatggccaggtacgaagatgaaaataaaacgccagtgacgccagaacaaataattactccccgccgttgggaggataaacagaacgatctctggacaacctggcagcgggttcaggagaatatgataaaaggtggattatcggggcgaagtgcctccggtaaaaataccagaacaagagccattacaggcattgacggtgatatccgaatcaacaaagcattatggatgattgccgaacagttcagggagtggaagtcatga

SEQ ID NO: 13218 - DNA, 183 bp, Escherichia coli
atgcgacataattacttgatcatgccagtcatgcccctgccggatccggatgtggtccggcgctttgttccgcggacggtggctcactggctgtgtctgctgatgatcctctttatgcgacattcagacaggggagacatcgataaacatcatcatctgcgggcaaatagttacacagaatga

SEQ ID NO: 13219 - DNA, 234 bp, Escherichia coli
atggcaaggtccgattacgatattatcaatctgtctctggaacatgaactgaatgagtggctggcagagagaggttatgccggactggtggataaccggaaccgcctggcagaggtggttacccggaaattgcaggacagcttttatatcaacgtttcctgggatgcgctgaacacagcatacagtgaacacccggagtggttttcagggcttgtctccggggatgagaattaa

SEQ ID NO: 13220 - DNA, 498 bp, Escherichia coli
atgagcagttcgtttcagaatgaaatcccgaaagcaagggtaaatctgaaattagacctacatacgggtggtgggcagaagaaagtggagcttccgctcaaacttctggttgccggtgatttcagtaacggacaggaagagcgtccactgtcagagcgtgtaaaaacggatattaataaaaacaattttaatgatgttctggcagatatctccccgtctgtacatctgaatgtggagaacacgcttgccggtgatggctctgaagagagcatcagcctgactttccgcaatatgaacgatttcacgccagagcaggtcgcccgacagattccccgtcttaaagccatgctggccatgcgtagccttctgcgggacctgaaagccaatctgctggataacgtgactttccgtaaagagctggaaaaaattctgcgtgacccggcactgagtcagacgctgcgtgatgaactgcgtgcactggtgccggaaaaggcgtga

SEQ ID NO: 13221 - DNA, 1545 bp, Escherichia coli
atgctgatgtctgtacagaaagaaaagaacgttgcagagagcgtggtatctgaagcgcatgccggcgacagcgtatatgcttccctgtttgaaaaaattaacctgagtccggtatctgccctgagtgcactggatatctggcaggatccacaggccatgtcagaagcatctgcagatgaacgtctgacggcagggatgcaggtgtttatggagtgtctggcaaaagccggcacgcaggtggaaaaactcgataaagcgctgattgaccatcatattgcagagcttgattatcagatcagccgtcaactggatgctgtgcttcatcatccggaatttcagaaagtggagtcgctgtggcggggcgtgaagtccctggtggataaaacggacttccgccgtaatgtgaaaattgagctgctggatctgtccaaagacgatctgcgtcaggattttgaggatgcgccggaaattattcagagcggcctttatctgcagacctatgtggctgagtatgacacgccgggtggtgagcccattgccgccctggtttcagcctgggagtttgatgcatctgcacaggacgtggcgttgctgaaaaatatttcccgggtggcggcatctgcacatatgccgtttattggttcagttggcccggcgttcttccagaaagaaaccatggaagaggtggctgccatcaaggatattggcaaccactttgagcgtgccgagtacatcaagtggaatgctttccgtgagacggacgatgcccgctatattggcctggtgatgccccgtgtactgggacgcctgccgtatggcccggataccgtacctgtccgcagctttaactatgttgaagaggtgaaaggaccggaccaccataaatatctctggacgaacgcgtcttttgcctttgcagccaacatggtgcgcagttttgtcaccaacggctggtgtgttcagatccgtgggcctcaggccggtggtgcggtgcaggatttgccaatccatttgtatgatctgggaaccggtaatcaggtcaaaattccgtcagaggtgatgatcccggaaacgcgggagtttgaattcgcgaatctgggctttattccgctctcttactacaagaaccgggattatgcctgcttcttctctgctaactccgcccagaaaccggcgctgtacgatacgccggatgcaacggcgaacagtcgtattaatgcccgtcttccctatatcttcctgctgtcccgtattgcgcattacctgaagatcattcagcgggaaaatatcggtaccaccaaagatcgccgtctgcttgagctggagctgaataactggatccggggactggtgacggagatgaccgatccgggtgatgaactgcaggcctcgcatccgctgcgtgacggaaaagtggtggtggaagatatcgaagacaatccgggattcttccgcgtgaaactctacgccgtaccgcatttccaggtagaaggtatggacgtcagcctgtcactggtttcgcagatgccgaaggcaaaagcgtaa

SEQ ID NO: 13222 - DNA, 1338 bp, Escherichia coli
atgaagatttatcgcccactatgggaagacggggcttttctgatgccccagcagtttcagcagcaggctgcctgggatgttcatctggcagacagcgttgccagaatggggctggcgcatccatggggcgtggtggctgcagagtttgatgactctctgttaccgctttcacggttgaatgccacccgtctgattgttcgtttcccggacggaacgcttattgatacggaacgcgcggataatctgcctccggtctgtgatttatcgacggtttctgatcgttccctggtggatattgtgctggcactaccgttactgaatgctaacggtggcaaccttgataatggcagtgagagcgagcgtccgcgtcgctggaaatcagaaagggtgaatgtgcaggagctggccgggcatgagcaaagcgaagtggcggtattgcggcataacctgactctgcgcatggctcatcaggaaaatgctgcctggctgacctgtcccgttacccgtcttgttcgtgatgcacagggacagtggtgcagggacccgcgttttattccccctctgctgacgctgtctgccggtccttcgctgatgactgaacttgcggagttgcttcatcacctgcaggcgcgtcgccagcgactgatgtccatgcgtcgggagaacaatgcccgtcttgcggattttgctgtggcggacgtgtcgttgttctggttgctgaatgccctgaacagtgcggagcctgttctgaaagagttgcttgacatgccttaccgccacccggaactgttgtacagggagcttgcccggctggcaggctccctgctcacattctcgcttgagcataatgtggatgcggttccggcataccatcatgaaacacctgaaaatgttttcccaccattgctttctttgctgaatcggctgctggaggcaagcctgccttcccgtgtggttttcattgaactgaaacaaaagggtgtgatgtgggagggggcattacatgatgcgcgtctgcgcgaaggggctgatttctggctttcagtgcgctcttccatgcccgggcatgaactgcagacgaagtttccgcagctatgcaaagccgggagccccgatgatgtgtctgaggtggtgaatgtggcgctgagcggggtcattatccgtccggttacgcatgtaccggcggccattccgctccggctggaaaaccagtatttcgcgctggatttaagtacggatgcggcccgggcgatgctggacgcggggcgttgtactttctacaccccggcatcgctgggagatgtgaaactggaactttttgcggtgctgcggacatga

SEQ ID NO: 13223 - DNA, 654 bp, Escherichia coli
atgaataaacctgttatctcccgggctgaacagattttttatcccggctggctgatggtcagccagctgcgcagcgggcaaccggttgaggatggtaaggccctgtatcgccgtgcctgtcagctggtgaaacaggcgcgtgaagagctggccgaagcaggattcagtcagaaaagcagtgacatcatgttgtatgccttctgcgccctgctggacgagagtgtactgaaccgcgaaaaaacagacgatggctggcgcacctggcagcaggacccgctgcaggctcatttttttggtacgctcaatgccggtgaagagctctgggagcgtattcgtgaacaactgaaattaccagcgccggatgtggcggtactgacatgcctctgccgtacgcttcagctcggttttaccggtcagtaccggtcgcaggatgatgagcgtcgcgaagatgtaatacgcgcactgacagcgcgtgttcctgcatttactttcgcacaggatgcgccggtggtggtgcgtgcaccgggttaccgtgctggcagaacgatgtactggttgtcatggggggcgggtattgtgacgctggctggtctctggtgtgtgctttcttctgtgcttgcagaccaggtggcacggcttaccgggcagggataa

SEQ ID NO: 13224 - DNA, 1731 bp, Escherichia coli
atgcacgtacgttcccgtctctggctgacaatactgagtctgttcctgacactgtggctgatttcgggattcctgccgctgtctgcagtaaaccagataatactgaccctggtttcagttgtggcggcggggcttgtgctgtggtaccagtggcgttgtctgtcttcccgtcgtgatatcccggagaaggccggcgatgacggtctgccgcctgagtattttcagggacatgtgctgcttgttgccggaaactcagatgcgtggttcgaacccggtcaggcataccgggaaacagcatcgggatggtatcttcgtgtggatacgccggagcagatgagaatactggcagaacggttgtcgtacagccgtccggccctgtgtggccaggtcgtggtcatgctgggacttttaccggagcagcatacctcagatgaagctttcctgtcgtggttgcggaactggcagcgtgcagtcatgcagtgccggcagtggctgaataccacgccaccggtgctggttacattgatggtttcagagccgtcaccacaaaacacatccttaaataagcactctacacactggtttacactgacaccggacctgccgggaatgcatatacgcctgacggaagccggagcaattccggcagaggaatggctgcaggcgtgtgatgcagcgtccaggctccggtgcgtcagtgaactgttatggctgaatgccatgttgtcctggtacaaccgggttactgatgccctgacagctatttgccggcaggagcacttttatttccggccggttgccgttggattctgtctgacgtcggttgcggcccgccccggtaatctctggcaacaacaactgacgtccctcactgcattgccaccgcctgccggcgtgtcatcacaggtattgccgttgccggatattctgctgtccggtattccccgtcatcgtggactcagtcactggcacagactttgtcgccagacgggggcgattgtcggtgtttttcttctgctggctatgctggcgtcttttatgaataaccagcggctggttcgcagcgtgggggaacacctgacggcctggcaccggatgcgcggatattcatctgaatcgaaaacaacagcactgcaacgtcttcaggctgacagccagttactgaacgactggcagcaacgtggtgtgccacagcgttacggactgggattgtatcagggaatgtggctgataccgccggttgagcgtgcgactggtgagtgggttgcaccacggcctccccgtccggtgatacagaaagttactcagacgccgaaaacggttcgccttaacagcctggcactgtttgatgccggtaaatggacgctgaagccgggcgccacaaaatggctggtgaatgccctggtggatattaaggcaaaagcaggctggctgattgtggtcagtggtcacacggataataccggtgacccgctgcgcaaccaggccttgtccctgaagcgtgcagaggccgttcgcgactggatgcgggataccggcgatattccccaaagctgttttgccgtacagggatacggtgaaagccgccctgtggccccgaatgacacggcggaaggccgtgcgcgtaaccgccgtgttgaaatcagtctggtaccgcaggccgatgcctgtcgtctgccggacgtttcccctgcgccggaagagggcgcatcagaaaacataacggagtaa

SEQ ID NO: 13225 - DNA, 492 bp, Escherichia coli
atggcaattccagtttatctgtggctgaaagatgatggcggtgcagatatcaaagggtccgtggatgttcaggaccgtgagggcagcattgaggtggtggctcaggagcactgcctctacatcccgacggataacaataccggtaagctgaccggtacccgtattcacacgccgtttctgtttaccaaggaaattgattcttccagcccgtacctttacaaggccgtgaccaccgggcagaccctgaagtctgctgagtttaagtggtacaaaatcaatgatgccggtcaggaggtggagtatttcaatacgaagcttgagaacgtgaaggtggtgaaggttaacccggtcatgcacgacatcaagaatcccgcttacgagaagcataaccaccttgagcaggtggaactgcgctacgagaaaatcacctggacttacaaggacggcaacatcattcattccgacgcatggagtgagcgtaccaccgcgtaa

SEQ ID NO: 13226 - DNA, 2658 bp, Escherichia coli
atggaaaattcggcagccctgttacgtcgtcttaatcattactgtgcccgtgcactggaaggcgcagcctccctttgccagacccgggcccatgcggaaatcaccccggagcactggttactgaaactgctggagcagggggaaggagaccttaccgtgctgggcaggcgttatgactgggatatggacgcgatatggcagtcgctgctcggctggctggataaccagccccgtagcgtacgcagtcgcccgcagcttgcgcagtccctgaatgctctgctgaaacaggcctggatggtggcctcattacagggagaagaacatatccgcagcgtgcatctgctgggtgccctgacggaaaatccgcacctggttcgctgtgacgggctgtggcctctgctgacactgagtcagagccagttgcagcgtctgtccccgctgctggatgcgcagtctgatgagtgtccggagacgttacaggatgcagagcctgtgctgcctcagggagacagtgtgacctttatcgggcgccctgtcggtgcggatacggcaggtataccgtcaggtgacctgccgccggtgttacagggtgcgctggataaattcacccgggacatcacggccagcgcgagagaggggaaaattgacccggtatcgggacgcgatacggaaatccgtcagatggtggatattctctcccgccgtcgcaagaataacccgattctggtgggggaccccggtgtggggaaaacggctctggtggaagggctcgccctgcgtattgtggaaggtaacgtaccagaatctctcagacccgtcaccctgcgcacccttgacctcggcctgctgcaggccggtgccggcgtgaaaggtgaatttgaacagcgtctgaaaaacgtgattgatgccgtgcagctgtcaccggctcctgtactgctgtttatagatgaagcccatacccttatcggtgccggtaatcaggccggtggcgcggatgcggccaacctgctgaagcctgcgctggcgcgaggcgaactgcgcaccattgctgccaccacctggtctgagtacaaacaatacctggaacgtgacgcggctctggagcggcgttttcagatggtcaaagtggacgagccggatgatgagacggcctgtctgatgctgcgctccctgaaatcccgttatgcggaacatcataacgtgcatatcaccgatgaggcagtacgtgctgccgtcacactctcgcgccgttatctgacagaacgtcagttaccggacaaggccgttgacctgcttgatactgctgctgcccgtgtgcggatgagcctcgacacggtgccggaacagctgacccgaatccgttcacagctcgcttccctcggtatggaaaaacaggcactgctggaagatattgccgttggtcatcagaatcacggcgaacgcctgtctgccattgagcaggaagagaacgtgctgatgacagcacgtgatgacctggagcagcagtacgcccgtgagtgcgaactcaccggtgagttacttgaaagccgcagcgatatttcccgccagagtgagacacatcacctgcagcaggcactgcacgacattcagcagaatcagcccctgctcagtgtggatgttgacgtacgcaccgttgccggtgtggtcgcggactggaccggagtgccgttatcctcactgatgaaggatgaacagacggaactgctgcatctggaaaaggatatcggcagacgggtggtcggacaggacgtggcactggaatccattgcacagcgtctgcgtgcggcgaaaacgggtctgacatccggtaacggcccccaggaggtgttcctgctggtcggccccagtggtgtgggaaaaaccgaaacggcactggcgctggcagatgtgatgtacggcggcgaaaaatcactgattaccatcaatctgtcggaatatcaggagccccatacggtttcccagcttaagggttcaccgcccgggtacgtgggatacggtcaggggggtattctgacggaagctgtacgtaagcgcccttacagcgtggtgctgctggatgaagtggaaaaggcccaccgggatgtgctgaatctgttctaccaggtgtttgaccggggctttatgcgcgacggtgaggggcgtgaaattgacttccgtaatacggtcattctgatgacctccaatctgggcagtgaccttctgatgcagcaactgagcgaaaagccggagacaacggaatcggagctgcatgagcttatccgtccactgctgcgcgaccacttccagccagcactgcttgcccgtttccagaccgtgatttaccgtccgctgacaccgtctgctatgcgcaccattgtggagatgaagcttgcacaggtctgcgaacgcctgcactgccattatgggctgagcacatcggttgatgaacgtgtgtacgatgccctgacatccgcctgcctgctgccggatacgggcgcccggaatgtggagagtctgctgaaccagcaactgctgccggtactgagccggcagttgctgagccatatggccgcgaagcagaaaccgcaggcgctggctctggcatggagtgacgaagacggtatggtgattgagctgcggcaggaatgcgcgttatga

SEQ ID NO: 13227 - DNA, 567 bp, Escherichia coli
atgaccggctatggcagaaatcaggacgctggcgcaggtaaaaatcaaagggaagaaggctcattgcggttactgacgccgggagagattgcgctggcgaggctggtattcaggtggacaatcccttatgaaaaggtctggatccaccatgacagttttctgccttttggtcttcagaataagcaaactgccatgccccccgatggtaagatttatttccgtgagcactatcgggatgattattcactcagcgttcccttttatcagcatatgtttattcatgaaatggcgcatgtctggcagcgtgaaaagggaatgaatgtcatcggtcgggggatgttcagttgggcggtgaattaccgttatgttctggacgggcgtctgttaagcgaatatcccatggagcagcaggcacaaattattgctgatcattttactttgcaggctgaaggatacgggacatggtgtgatatgagaagggacggtgatatcacactggacggaaatatgtctgagtatgttattcgcagcctgtataccagcacgttgcgggggttcccatggtaa

SEQ ID NO: 13228 - DNA, 543 bp, Escherichia coli
atggtaaaaataagagcctttcgttatcgttctgctttactgctctgtctgacgttactgacaggatgccccggacgcggggattattatcggtttgatgaaacagtaacggtcagcacaagaggcgacaatgtgtgtttcagtgtcccggagccagaggactaccagccagtcagcgtttccatcgctccacggggaacccgattcagggagcggcaaattacatctgaaccctcgcttcgtatcgtgaacggccagctgtgcattccgccttcattctgtctttttcctgataaaggccagttcattgtcaggtctgttctgcactctgagcgcgataaggacacaccgcgcatcatggttgccggcatagagattgccgacgggtgtattttcgatatcccgcttaatgacatggaggtcgtgaggccatacggtgagctgaaaagcagtaatgttcagactgaccagagcgaacgtcatggtccctgcaaataccctttcagagctgttcgtggagtgataaatcatgaatctcactga

SEQ ID NO: 13229 - DNA, 2526 bp, Escherichia coli
atgaatctcactgactccctgcaaaatgttttatccggggtgggaaccctgaaccgctacagactggatataccttcctgcccgtcatcgctggatgttgaagatttcagcggaactgaaggcataagtaagatttaccggtatgacatcatttttaccagtacggacaggtatcctgatgctgcctggttcctgcgtaaatccgcaaccctgataatgggaaccggattactggaaagcctgactgaacagaaaaaagtgcacggtgttattactgatttcagacgtatttctggctctgaggaccaggcacaataccggatcacacttaaacctttcatttccctgctggataaacagttccgtacacaccgttttttcgttaataaatcagtgcctgaggtggtggagcaaatcctgacggaacacgggctgaaaggctgggagtatgagttcagcctcaaaaggacatatccgaagcgcgaacagattaaccagtatcaggaaagcgatctgagatttatccagcgcctgctggcagaagtgggcattttttacttctttacgttgcacccggatgcgcagacagaggtgatccacttcggtgacgtccaggcggcgttgatatttgataaaacactgcccgttaacagcccgtccggtatgagtgacagtggcacagactcagtatgggcattgaatgtggagcaccgggtggtggaaagccgtgttatcacgaacgactataaccaccgcgaggcccagaacatactgatgtccgtaccggcggacatgacccgtggagaaggttacgacaccagttatggcgaggtttatcattaccggccacgccatacagaaaggggcgataaaattgaccctgcgccggagacggctaacttctgggcccggctcgatcacgagcgttttctggctgagcaaacacgtatcacaggtaaaagcaccgatgccagtctgttaccggcacaggtgctgactattactgacagtactccaccagtgttgcctgcaccgttacaggagccggttctgctcacgcagcttctgttcaccggtagccggaaatctgcgctacaggtgatgctgagtgctgttccttacagcgagattgtctgctggcgaccaccgttacttactcgtccgaaaatcaccgggaccatgacggcccgtgtgaccagtgcaaaagaaggggatatctacgcctggcaggatgcttcaggcatgtaccgggtgaaatttgatgctgaccgtgatgataaaaatccgggacaggaaagtatgccggtacgtctggccaaaccctacagtggtgatgcttatggttttcattttccgctgattcagggaacggaagtggccattgcttttgaggaaggtgatccggatcgtccctatatagcgcatgccctgcatgattcacgtcatgttgatcacgttaccgataagaacggtacgcgcaatgttatccgtacgccggcaaataacaagttgcggatggaggacaaacgcggtgaggagcatatcaagctcagtaccgagtatggcggtaagacacaacttaatcttggccataacgttgatgcctcccgggaactcaggggagaaggcgctgagctgaggactgatgactggataagtatccggggaggaaaaggaatatttatcagtgcagatatgcagcctcaggcacaaggaaagatgctggatatggatgaagctatccgccaattggagcaggcattatctctggcccgaagtatggcgaaggccgcaactgctgcaaatgctactcagggagatataagttgtcagcaacggttgaatgcatcactaacagatctcactgcgccgggaatgctgttgcatgctcctgatgggattggcatggttagtgcgcgggcgttacgaattgcttcaggtagtgaaagcgtgggcataatgtcgggagataacactgatattactgccgggcagtcatttacagttgtagcagaaggtgctgttagcctgttgagcagaaaccaggggatgcaactgttagcagcaaaagggcgggtaaatattcaggctcaaagtgacgatttgtcaatgagttcccaacagaatcttgatattcaaagttctgagggcaaagtgactgtttctgctaatcaggaactgatactggcatgtggtggagcttatatcaaactaagcggtggaaatattgagctgggatgcccgggacagattctgttaaaaagcacgaatatgcagaagatgggaccaacaagtcttgatattgcgtctgttgaaatgccgcgagggtttgggggcggttttattcttaccgatgaagcgggagtgccgcaaccttcgacgccttatcgattaacaacggctgaaggtgatattctacaggggatcaccgatgaaaatggtaaaacagcgccagtcaacacctccattccgtcagtagtaaaagttgagtttgggaaggtaaaaattcatggagaaacagaatga

SEQ ID NO: 13230 - DNA, 1683 bp, Escherichia coli
atgacaaaatatcagggatatgacgtaacagatgccacccataaaaccagtattcataatgactggaaagttgttgttgcaaagaaaaaaccggcgcggggtgtgactttaactattggcatatttttcgatggtaccggaaacaatcgggagaatacagcatctcgcctgatgaaatttaatgagtgtagtgcagccagacagggggtaaatcaaaaagatgcacaaagctgtgaggactttcttaaagaaattaacaagaacagtatctcgaatggcagttatcgtggatattattccaatattcactggcttaatatactctatcatccagatcaggtacttaaaaaagaccagacgtcagctcaaattaagacttacatttccgggatagggactgcggctggtgaagcagattcagtcataggcatgggattaggcaccagtattctggatatatttgaaggtgtggtgacgaaaaccgacgaggcaatggaacgaatcacccaggcgttatcagaatttatggggttcaatttaagtcctgatttttgtatcgcaaaaatccagtttgatgtttttggttttagccggggagcagcggcggcaaggcactttgccaatcgggttatggaacaggatcctgctatagccagagctattgctaaagggctcagaggcgatttttatgatggtaaaccttctggtgaagtacgttttctggggctttttgatactgtcgcagctattggtggaatcagtaatttcttcgatattaatggacgtagcaacccgggagtaaagctggagttgcgtccttcagtcgcgaagaaagttttccagattactgcaatgaatgaataccgatataatttcagcctgaacagtattaaaggtatgtggcccgaactggctttaccgggggcgcattcagatattggaggtggttacaatccggtaggttcacctctgcaggaaaatgaaagtctgtttctgagttgcccggaatttgaaattgtcagtgacgataccagagaaatggatacgcgagtataccgtaaagcagagcaagtcagaaaaatgttgatgactctgccagccttaaaacatattttgcctcatggaaaactaaccaccaaaattcgttccataggtgtgaacaacagcaatcaacgtcgggctggtgtgatacaaaagcaggtgggagccgcagtattttttgagcgtatggcagtacctaatgactgggctaatgtttgcctgcgtgtgatgctggatgctgctcaggaagcaggggtattgtttgaaccaattcgacaaacaaatactgagttacaacttccatctgaactaatatttcttgctgacaaagccattgctcagggaaaagcggtacgtttggggcaagagcctcaggcttttactgaggaagagttgtatattatcggaaaatacacccattgttccgctaactggaatattgagtctgatggtaatttatgggtggatcctacaacgggagagatttttatccatcgctttggtcctaaaggtaataaggcgttcgtttttccgaataaaccaaatgatcgctggattcgttctgtatggtacatggatgatcagcagcgattgaatgataacgcagtaaaaaatactaaagttatgatgtctggtgtttaa

SEQ ID NO: 13231 - DNA, 678 bp, Escherichia coli
atgaccagagataaaatcatttttatcgcaccattattggcattgttaactgggtgtaattcggttagctcacggtatgctgatttggataagactgaatggggttataaaaaattaccctatgatgaatggaaatttctctttatttatccaaaggctctgcctgcgctggccacccaggcgttgatggtggacggggaaggttataagacgacttatcagtatcttgataataccgagccgagtcaggtcagtgtagggcgctggaatgaccatctgggcgcgactgagtcgtattataacaaggggaaagcattacccctgatgttgcgtttttgctgggattcaataattgataaaaagagttatgaaactctgattttttttaaaaaagggacctgggagcagatggttacgccttacgcagacaaccgctggaacgaaacctattatcgttcaacgatgattattggtctggctcctgaagggaaggtaagagtctggctgggagatcgcggtaatccggtggtacctcagttggatgctaaaattactacagtatcgggtgataaaatgaagatgtgtaagggggttactaaaagtgatttctcatatggatatgatgaagatattaaggagtttatcagagataaaacttatccttacggtaactggtga

SEQ ID NO: 13232 - DNA, 678 bp, Escherichia coli
atgaccagagataaaatcatttttatcgcaccattattggcattgttaactgggtgtaattcggttagctcacggtatgctgatttggataagactgaatggggttataaaaaattaccctatgatgaatggaaatttctctttatttatccaaaggctctgcctgcgctggccacccaggcgttgatggtggacggggaaggttataagacgacttatcagtatcttgataataccgagccgagtcaggtcagtgtagggcgctggaatgaccatctgggcgcgactgagtcgtattataacaaggggaaagcattacccctgatgttgcgtttttgctgggattcaataattgataaaaagagttatgaaactctgattttttttaaaaaagggacctgggagcagatggttacgccttacgcagacaaccgctggaacgaaacctattatcgttcaacgatgattattggtctggctcctgaagggaaggtaagagtctggctgggagatcgcggtaatccggtggtacctcagttggatgctaaaattactacagtatcgggtgataaaatgaagatgtgtaagggggttactaaacatccagatggatatgtttattacggtgatacaccagattttatcaaagggaaaatttatccctacggcaactggtga

SEQ ID NO: 13233 - DNA, 267 bp, Escherichia coli
atgtctaaaggttttgtattgcttggtgataataccacacatggtggtaaagttatttctgcatcttcaaccatgattgtcgatggtaaaaaagtagctcttgttggagatatggttagttgccctgtttccggacatggtaccaatcctattgtggagggctctcctgaatggatatctgatggaagagctgttgtgattgatggatgtaaatgtctgtgtgggtgtaaggttatatccagtgcaccggaatgtgcaataggataa

SEQ ID NO: 13234 - DNA, 1149 bp, Escherichia coli
atgggatggagcagaacaaaatcattatcaacagaattacctcataaaccatcaatgatgttgtggtttatgacaggggcatttatggctgttgttggtgctctgttgtttattatccgggcatcagaatatgtgaaagcattaaataatttcagtatctggtggcttgcattgactcctccggggtgctggtttttcctgttttgcctgcgacactggcagtggagcaaccagatggatgaacatttgtttcttaaaaaagagggggagtatgctcagaaacagtgggaatcctgggccgaaaggtatcttgttattactgccagttgtgtttatttgcctgataaaataacggtagctactctttgtgatgaattgcctctgcagtacggccttgtaaagaaaatagattatctttctgacagtgggcataaggttgaagcctctttacgtgtcttgcttagggagataacggataaattttgtcagttacctgccgctctccctgtaaatgtgacgctgataaccgatcagcctgattctgaaatcagatctgcttttgtttctgcatgggaagcgttatttccccaacgcgtcgttcctgacaatatcgaggttactcctgacttttccatggggtgggttgatgagcgtctgaaacaaccagtgctgactgtggatttgatactggtaatacagcttaatgggggaaatacatactctgacggactggctgcacttttgttgaccagcgatgatgttgcgcaaaaatataatctgtcgcattcagcccgtctgctacgcccgatgtcgctggatatcaacaagtttaatgatgaattcacacttttccttgaaacccagacagcagcctgtcgtaccgctcgtgtactgggagactgttatcactgggaaaagattgctgcaccgctgatgactattggaaaccagtatggtgccggatgggaaccgtccggacgtatgttactggaaaaatggtgcggtatcccgggacctgctgctccgtggctgcttactgctctggcagccgatctggtctgtcttggtaatgattctctcctgactttattctcatccggagaagaacattttatcagtactgttacatcaggaaaccagaatgaataa

SEQ ID NO: 13235 - DNA, 3390 bp, Escherichia coli
atgaataaactggcctgtctgtctggtcgctttgggcgaccggggattgtatttattggtgtggctgcgctctggtggctgataacccgatatggagcatatctgggggcagaaacacgccgggatcaaatactactgctgatattgctgagtctgggggtgctctttgtctgttacctgcctgtgatgaaaaaatatgttcaggaactgacatatcgacgcagggcccgtaaggagcaaaggttacctgacgatgaagagcgattggctcagacgccaccgcgctatgttactgttcaggatattcgtcatactctgcggcgccagtatggcagattctggggacgtaagatacgcattctgttgataacaggtaccgcctctgaggttgagttgttgaccccgggcctgacagaacagttctggcaggaagagcaggggacattgcttctctggggaggagacccctcgcagccggaaaacgcagactggctggctgcgttacgccgtctgcgttaccggcctgctgatggcattgtctgggtaacttccggactgagtgaaacattatccgcaccactgacagaagatgccctggacagggtttcccgtgcggtcagttcatgttgtgagcgccttggctggcgtctgccgctgtatgtctggtcactgcaggagagtccggatgagcgagggcgtattactcagcccgtgggatgccttctgccagcagaatgtagttctgacaaactgaaagcacaactacaggccatgctccccgggcttgttgctcaggggatacagcagatatgctgtgcccctcggtattattttttgttgtcgctggcagagcgattcagacgaaatattgatgctgtggtggagccattatccgtattactccgtccataccgtcagttgttgctggcgggtattgttttcagtccggcaactgtcggcggtgaacgaagtgtcagacatcgctggcgaatggataaccgctgggaggcgttgccggagacagtgcagcaattacctgtccggctacagccttcccgcacaggtcataactggcgcagaagtctggccgttatggcggccatactgatgatggctcagggaacaggaatggtggtttcctttctggcaaaccggagtctggttgctgaagtacaggaacagattcgtccggctcagaaccagcaactgtctcctgcagaacgtctgcaggcgttgctgaatctgcagaaatccctggcccgccttcagtaccgggaggagcacggggcgccatggtacctgcgggccggtatgaatcagaatgcagacctgctcgcggtcgtaatgcccctttatgcacaaaatgcacatcttttactgcgtgatgccgctgctgctcatcttgagcagcagctcaggacatttattcgtcttcctccggacagcccgcagcgggggaaaatggcaaaagccgcatatgaccagctcagactgtatctgatgctggcgcaaccgcaacatatggagcccgcctggttcagtcgtacgctcatgcgggaatggccacagcgtgacggtgtgagtgccgttttctggcaggctaatggcccgacgttgctggcgtattatgcctccgggattattactcatcctcagtggaagctgacggctgatgaagagctggtcagccagagcagaactctgctgcttcgccatctgggaacacagaacagcgatgccatgctgtatcagaaaatgctggcacgggtggcacatcagtttgcggatatgcgtctgacggatatgaccggtgatactgatgtctcccgcctcttttttacggatgaagtggttcccggtatgtttacccgccaggcctgggaagaggccgtattgccgtcgatagacaccgtgattaatgagcgtcgtgaagaaatggactgggtactgacggatggcaggcagaaggcaccgtcaccggtatcgccggaagcactcagacagcgcctgacaacgcgctattttgctgattttggtaatgcctggctgaattttctgaacagtctgcacttgcgtaaagctcagacgctgtctgatgtgacagagcaactgacgcttatggctgatgtgcgccagtcccccctggttgctctgatgaatacgctggcggttcaggggtgtactggccagccccgggaagcggttactgattcactggttaaatctgccagaaacctgctttcacaggaaaaacagccagtggcagtaccggaaagccggcttcacggtcctctggcgacgactttcgggccggtgcttgcactgatggataatcagaacaacagtgcggatatgctgaatctgcagacatatctgacccgggtgacacaggttcgtctgcgtctgcaacagattgccggctcttctgacccgcaggccatgatgcagttgctggcacagacagtattgcaggggaaatcggttgatttaaccgatacccgggattacggcagcctgaccgctgccggactcggacaggagtggtatggcttcggacagacggtctttgttcgcccgatggagcaggcgtggcagcaggttcttacgcccgcggcagaaagtctgaatgcccggtggcgtactgcggtggtggatggctggaataatgcattttccgggcgttatccgtttaaaaatgtcagcagcgatgcttcgcttcccctgctggcaaaatacctgaatacggacacgggacgtattgcccgtttcctgcagaataacctgagtggtgtgttgcacagggaaggcagtcgctgggtacctgataccattaatacccggggactgacattcaaccctgcgtttctgaaagccatcaataccctgagtgaaatagcggatgtggcgttcaccacaggtaacgcggggctgcattttgagctgcgcccgggaactgctgccggtgtgatgcagacgacgctgataaccgataatcagaaactgatttatgttaatcagatgccggtatggaagcgatttacctggccggctgatacggaagcacctggcgccagtttaagctgggtaagcactcaggccggtacccgtcagtatgcagacctgccgggaagctgggggctgatacgtctgcttgagatggcccgacggaaagccgcaccgggcgttgccagtggctggagcctgagctggcaggcgcaggacggtcgtatgctgaattacacactgcgaactgaagcgggggaagggccgcttgtattgctgaaactccgcaattttgttctgccggaaacggttttcgaactctccggcacgtcagcgtttacaggcaatgacgaagatgccggggataccgtggaggagactgactga

SEQ ID NO: 13236 - DNA, 1599 bp, Escherichia coli
atggcttccattcattcgctcctcagtgcatgccagacgacaccccgggatgtggctgaaccggctcaggtgcgtattgcgctgtgggataaatggcttgctcccgtgacgccagataatcccgcaggtgatgatgcggggtacgatgatgattttcagcagatgcgtgaagaggtcaataaactctccggagccgatgccggaattgtcagccagcttgcagaaaaattactgaccaccagaaccaaagatatccgggtggcgacctggtatatctgggcccgtctgcggcaggatggtgaaaaaggtctggccgacggtctggagctgctgaccggtttgttgcagcgttttggagagcacctgcatccacaacggtcacgggccaggaaggcggcgctggagtggttatgcagcgcccgcatactggacagtctgtctctgtatccggaggtggtgaaggcggataccctgcgcattgccggggcgctgtggctggcagaacagacctttacggatgaggcttccgccccggtgctgaacgggttatatcaggcacttgaaaatcgcctgatgaaggccggtggtgttgatgcagtggtgcctcaggaggctgccgcgccggcaccgacggtaacatccggcagcgtcatggcattatctgccatcacctccggacaggaactgctgtcacaggcccgtgttctggcaaaatatctgcgtgaccagcctgagggctggctggcggctcatcgactgatgaaaagcgtccggcatgacacgctgcatcagttaccgccgttatctgctgatggacggacccgtattgccccaccggggccggaccggcgtgcgtcactgaaacggttgtatctgcagcagaactggttgtcactgcttgaacagtgtgacgatatgtttgcccggggagccagtcatctgtggctggacctgcagtggtatattcatcaggcgctgttgcagaccggaaaagaaaattatgctgccattattcagtatgacctgaaaggattgcttctgcgcctgccggggcttgagacactggcttttaacgacggcatgccgtttgccgatgacgtgacgctgagctggatacagcagcaggtgatggagtgtggtgaacgctgggcggaagaaccttctgtaacgataacggcagctcccggagataacgacattttatctcttgagccggaagccctgcagattgcggataatgaaggaacagaagccgctttaagctggttacaggcacgtcccggtattcagtctgaccgcagcaactggctactgcgcctgttgatggcccgtgttgccgaacagacaggaaaaaatgaccttgccctgcacctgcttgcggagctggatgaacgtgcaacccggctgaccctgtcacaatgggaacctgaactggtatttgaggtaaaagcccgccgcctgaaactgttgcgtatgaagtccgcaaaaactgaaagtgacagggtgcgtctgcagcctgatatggaacatcttcttgccgggctcatcgccattgatgctgccagagctgctgtgttgtgcaattcgggaagttcatga

SEQ ID NO: 13237 - DNA, 693 bp, Escherichia coli
atgtctgtcatgcattatcttcaggacaaaacatttcaggatatagtcaaaaatctggtgttaccgcttctgtcgggcattattattcctcttgtcaaatggtttgtgcagcattatggctatgcgccgaatatcaggaaatacagatttgaaaaaattcctgtatctgaaaaggagtccattcttgcccgtattgacaaactgacaaaagaaccagcaacgaaaaatacactggtaagaataaaatactgttatgaacagatggggatatatctcccgacgtggtgttgtaataagctgatttgttttatatccgacagaaatatcagctcagtggataacagactgcattgttttcttaaatattcttttgtcggtatatttttagatggcaaatttactgttaatactcgtcgtgtgcataaaagttactggatgatagcagtgttttcggtgttttctttatgtgttcagtttacgggagggatacttacaaccatgccatttctgtcggggagtaatacagttttatttatgttattttctctcgtttattttatcatgatatttctgacagttatattcacatgtaatctgattaatgaaatccggcttgccgttcagttcgggcgattgtttgaggcatggctgaagtcagagcgcgagtctccggaacagttagctttattctga

SEQ ID NO: 13238 - DNA, 1764 bp, Escherichia coli
atggacgatttaaccctgcgttattttgacgctgaaatgcgttatctgcgtgaagccggaaaggcgtttgcacaggctcatcccgatcgggcggcgatgctggatctcgataaagcgggtacgcctgatccctgcgtggaacgcctgtttgaaggtttcgccttttccatgggacgactgcgccagaaaatcgacgatgatttgccggagcttactgaaagtctggtcagtatgctctggcctcattacctgcgtactatcccgtccctgtcggtggtggcactgactccccggttatccgtcatgaaaatggctgaaaccgtaccagccggactggaagtgacttcccgccctgttggccccggaaatacagtctgtcgttaccgtaccacccgggccataccactgaatccactggcagtggagaaggttgttatgacgacggagccggacgggcgttcagtgttgaaaataggttttgcctgcagtgaactggctgactggtctcaggtcgatttgcatcgtctgagcctgtatctggcagcagaagccccggtcagcagcacccttcatctgatgatgacaaagcgtctggctgcgctgtatctgaggctgccgggaaatgatgagcggatccgcattgacggatggttttcacccggtggttttgcagaagaagatcggctgtggccgaaaggtgacagtgctttcagtgggtatcagttattgctggaatatttcacctttcgggaaaagtttatgtttgttcatctgaacggactggagaatgtttctctgccggcaggtatttccggattcgatcttgaggtggtgctgagtcagccctggccagcagatttacctgtgacagacgatgccctgtgtctgcattgtgtgccggtgattaacctttttacgcttgaagccgatccactcatcatcaatgggctggagagcgaatacctgctgcgcccgaagcgtctgcaggatgggtatacggagatatattcagtggatgcggtgacgggctccgggcggaccggcagtgcagagtacgtgccttttaccagcttccgtcaccgtgggggaatgctgcgccatgatgcacccgaacgttattatcatacccgggtgaagcggggtgtcacggggatgtatgacacatggcttatccttggcggtcagcggtgggaggcggatcggatgccggagcgggaaacgctttcattacgtattacaggtaccaatggtcagcttccccgtcgtgcgttgcagagtacgctgcttgatcggtgtgaacaggtactgcaggccccggtcagtgtacgtaatctttgtaaacccacgctaccggtttatccgccgacagaagatcgttttcactggcgggtgatgagtcatctggggacaggatttcttaacatgctgagcagtgcggaagtgctgcgtggcacgctggcgctttataactggcgggacgatgaacttaatcaccgtcggcttgatgccattctggctgtacagcatcatcgtattcagcgttttgaaaagggttttctgctccgggggcttgatgtggaggtaactcttgatggcaacgggtttgccggagagggagatattcacctgtttggcgaaatgctcaaccgtttcctggccctgtacgccgatatgaatcagttcaatcagctcacactgattgttcagcctgaaggaaaatgcatccggtggaaagaaaatcacaatccgcgcctgcccggttaa

SEQ ID NO: 13239 - DNA, 1092 bp, Escherichia coli
gtggaaagaaaatcacaatccgcgcctgcccggttaattacccgttaccggaaacagcttccgtatattaatttttaccgcttctgtcagttgctggaacaaagccagccagaccagcctcccattggcagtggctggcaggcccgtcaggaagcggttcgcttttgtccatacccgggaatggggtttcctgcgagtgaaataaaagacgctgtaattcctgaagaatcccatctgccacccattgtacatgtgacgtttatgggactttacggggtcacgtctccgttgccggcacactatatcagtgatattgcacagcagcgggaaggccatgaggccgcagcggattttctcgatatattcagtcatcgtctgatcacccagtattaccgtatctggcgtaaatattcgtacccggccacctttgaggcgggaggacaggataaaacatcccagtatctgctcggtctggccagactggggatccccggatgtgcacagaatattgccacgccggtatcgcgttttctggcgttattgcccctgatgttgttacccggaagaacagctgaagggctgacatcactggtaacgctgctggctcccggaacacaggcccgtgtctggcatcatgaccgacgacggatcccgctgaaaacaccgctgaccatgcgtgttcatcacccggtcagtctgaagagtcgcccggtgatgggcgatcatgccacggatgtgaacggacaggtgttattacagctttcaacacagacgggcagcgaggtacagggctggttaccaggcgggcatctgtattctgatttgttggcgttgttgcatgtttatctgggaagccgtctggatgtacgtctgcaactttgtgttgagcgttcactgttaccggatgcccggctcagttgccgaccggcagccggtagtccgcaactggggcgcacggcagtaatgagaacacaggcaaagatagcgacttcagcggcacgcgtcatgaccatcagtctggggcgttatcagcgggttcaggaacattatcaacgtaaggagactcaggaaaatggcgattatcgctggtaa

SEQ ID NO: 13240 - DNA, 537 bp, Escherichia coli
atggcgattatcgctggtaaggctggttacggtctgattattgcgttgttttccctgtcgttatcaggatgcggtctgacgcaaagagtggcagacggtacggtatctgccacgaaatccctgttttaccgacagataaaaacacttcacctggatattcgtgccagggaggccattaacaccagtgctgccggtattcccctgtcggttgtggtgcggatttatcagcttaaagacaaccggagttttgacagtgcggattatcaggcgctttttacaggggacaatgaaattctggcaggcgatatcattgcacagaaagatgtatggctgcagccaggtggttcagtagccgtggatatgcctctggatgatgcggcgaaatttaccggtgtggcagcaatgtttctggagcctgaccagaagaaaaatacctggcgggtggtgctgggccgggatgagcttgagccggacacgccccgtcttattgaagtatccggtaacaccctgaccctgttaccggtgaaggataaatag

SEQ ID NO: 13241 - DNA, 432 bp, Escherichia coli
atgccgcgtccttccctttatgaaattctctatggcaatttcactggcgggctggagttaaaccaggtcggtgaggaagagcaggttattctttcggtgctcgataacatgcagcgtattctgaatacccgtgccggaagccttaagcatcttccggattatggtctgccggatataacaaccattctgcagggaatgccggggacggcgcatcaactgatgcgcgtgctttcagacgttctgctgaagtatgagccacgtattaagcgcgtcgacgtgacgatgcaggaacagactcagcctggtgagttgcattatgtcattgatgcagaacttaaagatgccgggctggttcgttacggaacaacatttataccggagggcagggtgttgttgcgccatctgaaacagcagcgctacgtgcagacgtga

SEQ ID NO: 13242 - DNA, 402 bp, Escherichia coli
atgaagaaaattatcttttttctgttcgtggggcttttattttcggttcaggcagatgctgcgcggggaagaaaaccctgctcgggtgctaaaggtggtatttcacactgtacgtcagacggacgttttgtctgcaatgacggaagtctgagtcagtcgaagcgcctttgttctggttatggcgtggcacccggcaaacgtcaggtgaaatcaccggtcaccacgaagccggttcagaaggaaaaatcagcggctgtccggaaggtgtcacaaccgtcggtggctgagaaaaatgaggctgtgccggtcactgaaccccgcaaccctacctgtgcgccgctttatatggccagcaaacccggatttacgcatctgcccatttgttccggtaatcagtattaa

SEQ ID NO: 13243 - DNA, 1245 bp, Escherichia coli
atggcaggaggaaaaaaagatgataatgcagcgggatttgtcctgattttagtttgcgttattctctgggggatttatgtggcggtcagggcgctgataaatcttaatgagcgctttattgatgcagtatcgaatccggcaggtattattggtttgttttttggtttgcttactgtatttgcaattttacttcgtttttttatttaccggagactcagaaagaaaacagcagcctttgagcaggccgtttcagagctggttcagagagagcggggttttaatgaaactgtcaatgccgcgatagcccggggaatacgacaggaaaaggagcaactggccagacgtcgtgaggaatttcataccgccagacagaaggccagccgtgcaatgcaacggattgttgattccgcctggaaatttaaggcgaagactctgctggctggtgtaacgattaataactggcaaagcaaatatgaccagcttcgtaaggaaagagaggcttacgctgctgtcagtgagaaaatagcctttcttaacctggaagataattctgaccgggagagtatcaggcaacagtttctggacaaagtggcattgctggaaaaagcgcaggaagagaaggaatatcaggcagagcttaagcgtcagatgcgtgaagaaaaagagcgtcaggatgaacctgaacggcgccagcgggaagcggaagaggaagaacggcgtcttgctgagcagcagaaactgattgaggaggcgctgcgcgcagcagaaggggctcacagggaggagttagagaaacaacgcctggagctggaacagaaaattcaggaagcgcatgcgcagtatgaacgtgctaaatccatggctcagcttacgaaacaggggcatgtttatatcatttcgaatattggttcgtttggtgaggatgtctttaaaattggcatgacccgacggctggaacccatggacagggtcaaagagttaagtggtgcttctgttccgtttgattttgatgttcacgccatgatttcctgcgatgatgcgcctgcgctggaaaaaacacttcatgacagtctggaaaaataccgcattaacaggattaacctgcgtaaagaatttttccgcgtgaagcttgagaaaatcattaatgaagtggagcgtcaccacgggcaggtggaatatgtggctgacccggcggcgctgcagtacctgcagagtctggaatacgcggaaaatgaagctgcctga

SEQ ID NO: 13244 - DNA, 309 bp, Escherichia coli
atgatgaatccattattcagtgacattcagatgcgtctttttcatcttaatcattccccgtattcctggtactggaatgtcagattcagaccccaggaagccgtatatattggcaacgatacctgtcatatcaccattacctgtaatcagtcaggttttcatttaaccagggacggacaacggctgttcactgagcgttatatcagaaaccttaatgagctgttgccggttctgaaacggcggtgggatgtgacaccggcaattatccgcgcggtggaatacctttcccgggtaccggtatcacactga

SEQ ID NO: 13245 - DNA, 561 bp, Escherichia coli
atgataattaacatcctttttagattgctgcttacattcaatgccacttctttgttgataattatatttttggtgcaaaggaaatatacgttgttttacttttttcagcatgaacagagtttacagtggttaagtggtattcctcaggtagggtcgtatcttttttattttttaatacctgttgttttgactaaagtcagtcttgtgcttagtgctgcgctgggaaaagatgagtttaaaaaaggtgaggtgatttcagttgagcatgcgaataactcttttttaccgagttatctggggtacttttttgttgccctgagtataaataactggggggcgttgttctttgtttatggagtgctgtttatttttacatttttatctcaggccttatatttcaatcctttgtttcttgttttcaggtatgagttttataatattaagacaaaaacaggagcgtcgatttttcttatcagtccttataggtataaagtaccgcaagatattgtagtgcccatggctttcaggattaataactatacctttatcgaaaggaaataa

SEQ ID NO: 13246 - DNA, 831 bp, Escherichia coli
atggataatgtatttgttaaagcaaaaggtctcaggaaaaaaccatattttaagattgtctcagatcataccctttttgaaagggttgatctgtcagtgtgttcattggttccgtatgcaccggatcataatcttgatgaagattcctggtttagtctcagtgaatttagtaaacgggaatactgcccatcctttttgaaagatgagtttgattcaaaaaattatgatgaattgcctaaaaaatatttttcaaagatagcatttattttttcatttcaaagtggtgacttttattttcagaaggtaacaccatcattatatctcaagaaaaaaatgatcgaacttggtgatagagcaaagatagagagcgggaagaatcgtctggttgttaaccagaccccggatgcagtatatcttgctgcaaaagacacgcttatatttaaatccttgtcagccatttcttccatgtttaatggtatcgatactctttataaagaggcaacagaacaggatgttgaacagtttctgggggagtcgtttattgctctctctggtgaatataaagcatgtaatgtttcaaaaccaaacagaaaaagaatagcgttagcgatggatacgttaaaccaaatggatgtaagtgacagggggaatatgctaacttatataaatgattattgctctgaaaaattaaagtttgatgatggcactggctgtttcgaaatttcttgtgacgaagagcttaaacttttgctgtatggtatcgaagagagatattacacaactcgatttggtaatgaaaaaaggttggccaactcgatacaaaaattatga

SEQ ID NO: 13247 - DNA, 198 bp, Escherichia coli
atggcagattactataactgggaacgtcctcatagcgctcacaacggtaaaactccgatggaacgctactttgaacttgctgagaaaacaccatactctgatgccgttcatgcaaactatcagcccaatgaagagcatatacaggaacagaattacaagcttgaacttgaactgagaaaattaaaacgatgtctatga

SEQ ID NO: 13248 - DNA, 207 bp, Escherichia coli
atggcgctagcgggtggcttcacgtttcgcatggaggatcagcgcagctatgaatcgcacggtgatgggctgcaatcagaggatggcctgattcatacttttgacgtgcaggcgagcagcagtggtttgggcatggtgctgcttgatacgcttacaggaagtggcttacaccccgcgtcacgggcgtttctccgccccggtgcgtaa

SEQ ID NO: 13249 - DNA, 309 bp, Escherichia coli
atgccgatcataacaccaatccccagaacagaacgacgcctgatgcagaaaactatccataaaacaaaggacaaaaaccacgcccggcggctcaccgccatgctgatgctgcatcgtggtgacaccgtcagttatgttgccagaacgctctgctgtgcccgttcatcgattggtcgctggattaactggttcacgctgtcgggtgttgaaggcctgaagtcattgccgtcaggacgtgggaggcgctggccgtttgaacatatttgcgcattgctgcgtgagctgttaagcattctcctggcgatttag

SEQ ID NO: 13250 - DNA, 477 bp, Escherichia coli
atgagcaatacacaacataaacttgataaaacccgccccccacgagtacagataacgtatgatgttgaaaccggagatgctgaaactgcgaaagagttaccccttgtcatcggggttttgggtgagtactcttcgtcagaaaaaccattgagagaacgaaaattcattagtatagataaagacaattttgatgaagttatggcatcaatgagtccgactgctcattttatggtggacagtgttatcccgggaaatgaaggaaaactggatgtcgaactgaggtttagttgcaaagatgatttttctcccgataatgtgattcaacaggttgagtgtctaagaaaattatcggaattgaggttgcatctttgtgacctacgaaacagggctgcaagtaatgagaaactgaaagaaaaacttcaggaattgctggtgactactaatggcaatcctgaaaacgatgaaagtaaggaataa

SEQ ID NO: 13251 - DNA, 1479 bp, Escherichia coli
atgacagttgcatcaacattagggctgaatgaaactcagtatgctacagatgattgtcttgaagagattataaataataccagagctgtgagacaggattctgaaaagaccaggtttaaactacagattaataatttccttgctgaagttgccagtggttctttggtcattaacagcgatttaatcggtagtattgaaaagcggattgctgatattgataagttgatgtctgagcagcttagtctgattatgcatgcgactgaatttcaaaaaatagaatcagcatggacgggactttataagctggttcaggccagcgttactgaaaatgtaaaatacacggtgttacactgtactaaaaaggaattgctcaaagacttcaagtcagcctcagatttcgatcagtctgtcttatttaagaatatttatgaaagcgagtatggaacgttcgggggaacaccgtattctgcttttgttggtgatttctattttgataatacaccgcaggatattgatttgctggagcatatttcccatgttgctgccagtgctcatgccccgtttctgagtgctattgctccgggtatgttgtccatgagttcatttagcgaattaccctacccgcgtgatctggcaaaattgtttgagacaacagattatgcccgttggcgtagtttcaggcagacagatgacagtcgttatgtgggattgactttgccacagtctctggggcgtattccatatggcatgaagactatacctgccgaaacgtttaattttgaagagcacattagtgaagataactcaggcaaagactatctgtgggtaaatacagcttttgaacttgcctgccggatagttgatgcttttgaggagtatggctggtgtgcagcaattcggggcgtggaaggtggcggtttggttaaatcattgccggcctataattatgtatcccatacaggtgagcgacttttacaatgtccgacggaggttgctatctcagaccgtcgggaaaaagaattgtcagatctcggttttattcctctggtttattgtaaaggtactgattttgcggcatttttcgctgttcagtcggtaaacaaagcacgactgtataatactgatcaggctaatgcgaatgcaaaattatccagtcagcttcagtatatattagcaacatcacgattcgcacattatcttaaagtgattgttcgtgacaaagttggaagctttatgtcgaggacagaatgtcagacatatctgcaaaactggatcatgcaatatgttgtggcatcagataacgctggtcaggagacaaaggctcgttatccattacgtgaggcatctgttgaagttattgaagtccctggaagtccgggaaattatcgtgcaattgcatggattaaacctcattttcagcttgagggtttaagtatgtcattgcgtcttgttgctgatttaccatcaagtgtaagttaa

SEQ ID NO: 13252 - DNA, 507 bp, Escherichia coli
atggtcggagttatgagtaattcttctgctcttagcagggagtttgtcaaaatagagataggtggaaaagttataaagggaaattcaaaagttgaaaacagtggtgactactttgatggacattgtcctcaggcatttcacgctttttcaggaattgacggtactgtttttgatttaattaatttgaagcttagggttactaaacacatacaagaccttctggagaacttttttaagagaggtgaaaaagaagttaaaatagaaattttacgtagggaatcaactaaatcaggtagtgcatactcatcatttaaggttgtttatcaggggtgtcgtatgcataatatgttgttggctcatgataatgattcaaatctcattctggaattgtcgtttaccccagaagagagtgtctcaattgagatgaatattccgtcagatgatggaaaaagtacggagaaattgggaccaatgacgtacaacttatataaagaggctcttgtataa

SEQ ID NO: 13253 - DNA, 423 bp, Escherichia coli
atgcattcgtttcttcagttcttacgtgatgataatccgggctctctggaagatcatctgaattttgttccttcagatgatctgaaatatgagctcgggatgttattatcatcacgacctttataccttgaaacagatgagctgccgtttgttagtagttctgtcctgaactatggcataaagtcatcagtatatgtagtttctgcaggtgaacatagtgattctgttaatgatgaaatttcttcaagaatattgatgatgctccagcgttatgagtcccggctggaggaaccagttgttgaatatctttccagtgatgataattattctttcttttcagttacagccctgttctttatggacatggtaagactctgtattaaatgggataagaactcaggagaattttcactggatgaataa

SEQ ID NO: 13254 - DNA, 1803 bp, Escherichia coli
atgaataaactattatcttactatcagaaagaactcgcttttcttagaaaacaaggtattgagtttgcaaaaaaatatccaaaggtagcccggcgtcttggatacaatcagggggggtctgaagatccacatgttcagagattaacggagtcttttgctttcttaagttcaaaaattcatcagagattagatgaagatttacccgagttaatggaagcattacttcgtaatcttgctccccaatttttgtataactatccttcatcatgtattgtatcatttgaaccagacagaaaatccagtggaataacttcaacttatagagttccttctggcacatcgctatattccagatataaatataaaaccatctgtcagtttcggacggtatatccactgactattgtccctgcaacggttaataaagcaagaattcactatgataattcgtcctccttatggaaaattgaattgaatttagacgttttcgacggagctaatttttctcttgattttgtaagattttatttgaatggtccggcaacggttactggtataatatatacattattgtgcgatgaggtcgataatatcgttttgcagagaaataatgatgtgttatatgatatcagtgctaatatatccggtgccggattttatgagagtgaagtaacacttccacaaaaagggaacgtttcttatatacataacctcatactggactatttttcttttccagaacgatttaacttcattgatatagaatttgactccggaatcgaattatgctcaggggattctgtgagaatagaaataacattaaaaagcagtgcagaaaagtatgagccagacagaatagaaaggaatgtttctgaaagactttttaaagtaaactgttctcccgttgtcaatctcttcgagaagaaaactgaacccctacgattatctgatggccaggatgagtatcaggtaaataccgatttatattcacgtaatgaagtcttaatctgggatataaataaagtgacattgcacagatatgaaaatgatatagtcaagcagtttccgttaaaaaatttatttggacttgaacattctgtcattaaacaatcgtgcaatatattctggcatagttcatgttatcgctcgtcttctgaaagagggaactttgaggaaagtgtatatattcgtctgagcgatgatggcggagcccagtcatgtatcatgactggggatgtcctttcaattgatgcaatatgtacaaatggtaatattccatcatcaattaataatggtgatcctgatggtgattttgattgtgatatagatattgctcagctgcgaataactgcgctgaaccgtccatcaagaatgttgccggctatggcattaaaaggaatgaactggagaattgtttctcagttatcccttaattttgtgttgctcagtggtactgatggggcaatgaaactgagagaaatgctatccatatataactacaacaataaccactcaatatcaatttttattgaatggattaaagagttacaaatcacaccagtttcatcccgtttacccggcatatatccgcctgtaactgctcgtggaattgatattaccgtaactctttcaaaggatgcagatatgcaccctgaatgtttcatgttttgctctttccttgatcactttcttgggctacatgcccctgtcaatagctttactcgcatgattactgtcattgaacatgaggagcacactcgtcgtgtatggccgataagagcaggaaagttaacatggctttga

SEQ ID NO: 13255 - DNA, 933 bp, Escherichia coli
atggctttgattaataaccggagtaaattcagctttttcaataaagtccgtgtgttattgaaaaatattctgaaaccagatgaaagcgttgaagacgttgttgatgaacatttcagatttacatcaagtctgtctttagatgcacctgacggtcagatagagaacctgtatcaggatgagaaggacggaaagtatcatctcacattattcgataatggattaaccggggctacagggattcttcctgccgcatatacagaatggctgattgaaaggaaattacgttataatgatgacgctcctaaggcattcatggacatgtttgaccatagaatgtattgtctttcttatctcgcatggcaaaaaatgcatctgtcaggagatgaaaacagaagggataataatgttcttaacaatgttcttttatctttaggcgggatcactcctcagacagttagtgtgacaggtctggcatacgttgcattctattcacaaccagtaagatccctggccgggcttgagcagttactctcgttaatacatcaaatcagagtgtccattaatccttttcgtggcacttttgaaaatacagaacccagtgagcagggggttctggggaattgcctctatactctgggggaaggtcctgtcataggcaatgttcgttgggtggttgattcacattttgatgttgtattggggcctgtggactatagaaaagcacaggaacttatgccgggaaaagattcccactattttatcagacaacaaataagatcgtatataggtgatgttcttaagttcaaaatatatgtgaaaatctatcccggtaacaatgataatcaacttaatataaacaataagcttggtttcaatctttcactcggttctgaaacagaaaattataaagaacggtgcttttgtatattttga

SEQ ID NO: 13256 - DNA, 1983 bp, Escherichia coli
atgactaggcaaagatttatatctgacgatcattataaattccagagtgaacattttatccggttgcacggctgtgatatatcattatttccacttgagattaaaggtaaagagtcaatatctgatgtatatagttatgaaataaaatgctttagtaggaccgaccacaactctctggataagttacacggcacgcgtttgagttgtgagatcggggaacaatacaattcgttacctgcgcgcttcattcatggtgtggtcacaaaagtgatatataattatgataacagcatgcaacatacctgcattattatcttacaaccagagatagccgaattggcatctggtaaaagaacaagagtatggtcaaatataaagccatcagatattgtaagcacaattctggaagacagtttatttagtccgccacaagtaattttatataaagaacagaatttgctggagtataagatccagtaccaggagtcagatcttgactttattaatagaattttgtctgaggcgggcatttactatttctttgttcataatagagataaacatattatgacattggcagatgatcctgcatctcatcctaaagcatcttatgataaactggaacacttaccctgtgaaaatctgaaggaatcgcgtcatggctatatcagggaatggtctttcacagaaagtctcaaatgtccttctgtgacactttcaggttataatgagagtaatgtcagtgaaattactataaagtcagaaagtaaactgacggatgtaaaacccagtaagggagtttatgaagatattatcccagagagaaagcgtgagttgataaagaaacgttctgaagcactgatagcatcatgtgacagtgaactcaaaatctggtcaggaaaaacggattcatggtggttgtcatgcggggagtgtttcagtctggacaaacaggattacagaattacttcgttatatcttaatgctgtcaacaatgacaatgaacatgctggtttgtgttattgtgatttgtgtgcttcagataataaaagctcacttaatttcagccgtgaatttaaaacacctattattcccggtgttttacttgccagagtggtcggtcctgactccgaagaatattatacagatgataatgggcgtgtaaaaatcagctttctctggggagaaaagtcagcggcaggtacagataaaacctcctgttgggtccgtgtatctcaggtatggtccggggagggattcggtagtcagtttattcctcgcattggcagtgaggttctggttagttttatacagggtaatcctgactatccagttatcgttggtacagtgtataatggtcagaatacatcgcctttttctcttcctgagaataattgtaagtctggatttatcacccgtagtgttaagaatggtaaaaaaggagaaggtcatcaactggtttttgatgataaagaaggtgaggaaaaagttatagtgacttcatctggtgattctctcctgactgtaaagaaggatatgatcagcactattaaccgctctatgtcgttaactattgctgaagggcgtaatgctgaaataaaaagagggaatgacaggcttgttcttaaagaaggtgacctacataatgatgtacatggtaatattaatataaaagtttcgaacggagattataatcttaaagtgagcgggggaagtggtagtcttatcaccgataagaatcttactcttgaatcaacacagtcaataaaaataaaagtgggtgcaaatgagataacgatatccacatcaggtatagatataaaagccgctaaaattactatagaagggcaggtatcggcagaggtcaaagcggccacacttaagtttgaaagccaggctatttctgaggtaaaaggcaccatgttgacgcttcagggctctgcaatgacacagataaaaggtggaatcgtgaatataggataa

SEQ ID NO: 13257 - DNA, 468 bp, Escherichia coli
atgtcagagacaaagaatatcactgttccggaaattaataaaacagttgagcaaatgctgataaaagggagatggctggatgcacttgatttctggattaataatacagattcgttagtattaatcagatggctggcacaatttatctctcagttatctcctgaagaggattcactgcttttacagtctattgtcagatggaaggaaggcgatgatgagcaacgctgggaaatatttagacacgctgagtctgttggattttccactcagacaggtgcactgggggtgtcattatttgtatcacaggggagtctaagtccggccccatatgatccggtctatgcaccgtcatgttcagaaaaaaaaattatttatggaatattaatgcatcagtcgaataaatattatgatgcacctgatgaaggtgtgttttttctttttcggcattggtgtaatagtcattcctag

SEQ ID NO: 13258 - DNA, 300 bp, Escherichia coli
atgcctcaacctgctgcaagagttactgatatgcatgtatgtcctatggtgacgcctggtttaccacctgttccccatgttggggggccattgttaccaccaggctctccgtctgtatttattggtggattaccggcagcgacattggggaccctggctctttgttctgggccagtggatgttgtcattatgggaagtgttaaggtcttgatatgcggcaaaccagctgcacgaatgggcgatatctgtgctcacggagggacaattgtcagtggatatcctcaggtattaataggatga

SEQ ID NO: 13259 - DNA, 1077 bp, Escherichia coli
atgaacaaaatagaaacggatacattactgcttcctgttataggagaatcgccggcaggtgatgatattgagtatgatccggtgtatagcgaaatacgggaggcaagacaaaatgatccggactatatgtctcagggggaatgggctgtcagtgaaccccgcagagctgactggagaaaagtaagaaaattatgtgaggttactttacgtaataagagtaaggacctacaaattagttgctggtatgtggagtccttgacgcatttatatgctctggaagggatgcattgcggattggaatatcttgcaaagtttatttctcagtactggactacatgctggccatcgcaggaagaaggtcaggaaattcgttacagtaaattggttcgtcttgatatagatttatcagagtatctgaaagcatatcctcttcttgaggataaggaaatcacactttctgaatggtataaggtgttatcgtttgaacatggagcaagtttgtcagaagctggaaaagaaagattaatagagagcgaaggtgatcactctgttgagtccttcaaaagagctgtaggaaaatataatccccgcaaggttagtgagcaacttctccagctttatgatctacctgacaaaattgatgagattgaatcttcttacttctttcatacgcatgaagatatacatcatattttcgcaaaaaccagacatatcatcagtgagataaccgagttactgagtcgttttttgccgcaagaaacactggatcacagttcagtttctcaatttctaggcaaacccgatagcagagacacaaggacagcacttcctgaggagaaaaaggaattttattctgcattaacaccctcaacagataaagagatgtcaagggagaaagctatagagcaactggagaaaatagctatttttttcaggcaatctgaaccaaccagtcctgttccttatcttctggagagggccatacgttggtcaacaatgactatgtcagaatggcttgaggaactacttaaagataatgactctatggaacaaataaaccgtgtcttaaaaggatga

SEQ ID NO: 13260 - DNA, 552 bp, Escherichia coli
atgactattaagtgcctgctactagcggttatggtattcccctttttcatcactgcctgttctgataagtattctgaacaggatagagtgcaggctatcaacaatgccgatgctccatttggcgccggcttgcttacttttcagatatcatctgatacgcaattaaactcacttaacgagatatccaacagctgtgcattattattcttacaggcttcagataaaaatacattacaggacataatgaataatcctgtgttaatcaaacagttttttatcgggacaggtaaggttgatggcattcttaaagttgataaatacgtggctatgccggggcaggagataacgctacatatagacaggaatgaagggactaaatatgtaggtgtggttgctggatactatccatttcctggaaaacagcatatgttactcttagatattccggttgatgttgttgaggaaggttggtggaataaatcattacatgcatcactcttacctctttccaaaaagatatcgatgggtaaagaaagtatcagtatgaaataa

SEQ ID NO: 13261 - DNA, 2436 bp, Escherichia coli
atgagtaatagaaataatattttgtatctcacttatattttaattccttttttatcacttaacgctaaggcggaatcattcgatagctctttgcttggcgatggagggtatccaaatatagatctctccgttttttctaagcctggtgggcaacttcctggaagctattatattgatatatatctaaatgggaattttgttgatgcaaggtatattcacttcgactataagaatgaagatttaataccctgcatatcagataaactaattgaaagctatggagttatcattcctgaaaaaagtaaagggaaatgcgtagattttaaatctatggatggtgtaaaatataaatttcatttcgatcgtcaggagcttcaccttattattccacaaaaatatataaaagaaaactctgacaatgaagcacctatcaacttatgggactttggcatacctgcatttcttatgaactacaacatcacaggttcatcatggataaataaaaaatcaaactcaaatgatagttattatgcaacattgtcacctggatttaatatatacaaatggcgtttcagaaataatggggtatggcaaaaaacaggaacaaaagaaaacggctataaaaatataaactcgtatttgcaaagagcattacctgaattacatagcgaacttactttaggtgattccatttcaggagcatatatttttgattcattttcttttcgtggtttaaaattagaaaccgctgaagaaatgtacccttacagtcaacaaggattttctcccagagttgttggcatagccaaaacaaacgcacaggtaattgttagacaacagcataatattatttacacgacaagcgttcctcccggacagtttgatcttagcaatattattccatcaaaggataatggggacttatacgtaacggtaaaagagtctgatgggacagaacaacatttcatcgtcccatactcaagtgtgccaatcttacaaagaaaggggcgaataaaatatgacataatattaggcaagtataggtataataatacagacgttgctgataacaaattcttacaattaggagctgcgtacggtttatctaatgtaataactgtttatgggggtacacaattatcagaagactaccgctctatagctgcgggaattggcggactttctgatttaggagctgcatcaatagatattacaggttcaaatgcaagagagaaatataaatcagataaaaaaatatcggggaccgctttacgagtcagatacagcaaaacacttgaaacaaccggaacaacaattgctgttgcgggctataagtatcagtccaaaaattatactacattgtctgatatatatcagaaacacaatggtaataattatcaactatggtatgacaacaatcaaaagaatagaattgatgtttcagtaaatcaaggtttagaaaatgatttagggagtttctatcttaattttgtaaaagaaaactattatggcgataatagcgttacatcatttggtggtggttatcttttacagataggaaaaataagtttatctctgaatgcagcaaaacagaaaatagcacatagtggtatgagagataattatttaaatcttatgctatcgatccctcttggagataaatcctattcacagtttggagttgacagcgaaggtaaagataccagttactcagttggtgttttgggtggagcattagaaaacaatgaattaaactggggtgcaaaaaagataattaatcgcaaaaataaatacaaagaacaatttgctgcatatagtagttataatagtgaatatggtaatatttatggtggctatagtacatataacttcggtgataatttaaactattctctaaatggttcggccgtagtatatcaagatggattaatattctctggtcaaaggaatgagaatatagctattgttgaagcaaaagatgtacgtggaattaatgttaatatgatgtctggtgtttatactgattctaatggcaatgccatagtgtctggattgatgccatataaaaggaatcaaatttcacttaatcaactatcctttccagatgatgtagaagtatttcaaaccacaaagtacgttatacctacatctggatcgatagtaaaagcaccatttaacgtagagtctggaaaaaaagcactctttacagttagcgatagtaaaggtgaatcaattccatttggttcaattgccaaagtagataatactaaagcaactatagttggtcctggtggggagttatattttgctggactacctaaaaaaggaaccattataattaagtatacaaaaaataaagaatgtaaattctcatataatttagatagagttacaaaaaaaggaggcatatatttcatgaataaaatctgtcaatga

SEQ ID NO: 13262 - DNA, 702 bp, Escherichia coli
atgaaagctaatctcctattattatctttcttctttccaacaattgttctctcagcatccaacaatacaaatgtatcaagtataacgtttagtcagtctagagttatataccatgaatcaaataaacatggcgtacaattttcgatctctaacaaaaacgagtcaccatatctagttcaggctaccattaaaactctggatggaaaaaaaaacgaaaattttataacgagccctccattatttagactggatggccaagaagaaacaagtataaaagtaatcaaaattggagcagaaccaaataacatagaaagtatggggtacatatgtgtaaaaccaattccacctaaagatgaaaaaaataaggacactgttgttagtatagtaattgatagttgcattaaacttatatatagaccaagtggtttagaacaaccttcatttaatgactttaaaaaaaatgtaaaatggaagatcgttaatgatgaagtttacattacaaacaatacaccgtattacttaaatctaaatgcagttatttattctatgcataacattcccgtaacatacatcccacctaaatcaacaaaaaatctaggtcgagtttctgcgatagactcgaacattataaaatggaattatataaatgatttaggtgagataggtccaatggtagagagtaaacttgatagcaatgagtaa

SEQ ID NO: 13263 - DNA, 447 bp, Escherichia coli
atgaaaaaatatacattaggtattatatcggctattgccatggctgcatcagtgagctcatatgccgaaacaagcaatcaaacagtaaatatgactcatgttgttaacgcacctgcgaatattacagcaacctgggttgattcaaacccagggaaagcagttgccgccggttctgccgttggtaacgtaactgtcgcaatcactggcggtacgatgacaagttttagcgtcgggaacggcttacctcgtttctatagaaatggtgctacttccggacttgattatgtaacttatggcgtgaaaaaaagtaatggtgcgagcgctaatggctcaaacagtctgagtggagcagaacaaaactcattcacattgggtattattgctcaacaggatatgggagtaggtagctgggctggtactttgcctctggtgattacttataattaa

SEQ ID NO: 13264 - DNA, 810 bp, Escherichia coli
atgtactggattattaacgataatatcgagttctggcctgagcaccgaaaattaatatcggtacataacgccgatcttaacgtcgttctgacaacgccagccagtcgttgtttatcacttctacttgaagcttttcctgatgtggttgcacaacaagattttttcaccagagtctgggaagaagaaggtatgcgtgtgccaactaacacgttatatcagaacatatccattatcagacgcggatttcgcgctgttggtgataccacccactcgcttattgcaaccgtgccgagaagaggattcaagattcataatgacattaacatacaaaatcatgtaataaactcttcaacagacgcacatacacacaatgccccacctgccgtaaaaggtaatgcggggtacaaagagagcattggtggcgcaaacaatttcaataacaaaatcctcaaacatataaaaagttatctaattatgttgagcatatttgctataggcgtatattctgcacattggctatggaataataatcaaccgaagccattcttcaaggattacaagactgttgcggaaattaatggctgccattttaatgtgacagaagatacaattgatgggttgaaagagttcgataaatataagacacggatactggattcggggattaactgtaaaaaatatccgtggttatacttccctcttgcaaaatcctcaccagggatgattgttatggcatgcaataaaaactataaccaacatgaagtggcaggctgtttaaccctgtcttaccgtgaggttaatcgtgattga

SEQ ID NO: 13265 - DNA, 483 bp, Escherichia coli
gtgattgattataaaaaaaacttattatttattttagtttttatcagtgggtttattctcttcattgtttactcttatactgcagaaaaaatgatatataatgaaacatgcactgcaaattgggtgatttttaatgacaaggggcgagcaaatcttaccatcgactttatgtataaccaaaaaaataaaacaggaactgttgcgttgagcggaacctggcaacaaggtaacagagaaagtaagtcaatacggcgaaatattgaatacacatggattgaaaactatgacacagcccatttaacatcaaagaaagttaataaatttgagatcatggatcaagtcgatgatgatagacttgcagaacttattcctgatttttatgtctttccagaaaaaagtgtaagctataatatactaaagcaaggtaagcatgcttttattttgagtattggtaacagagcaataatgcattgtgcaaggtaa

SEQ ID NO: 13266 - DNA, 270 bp, Escherichia coli
atgaaatccaccacagttatcagccagcagattaacaaagtgcagtcagccattatggcacttaaggcgacgaatacggatatacagagcatcaccatcaggggccataaacctgtcatccgagtttcccggagtgcgcattgcatacacatgcttgaacaggggaaagccagttatctgtataccggtcatgaccacaggggtcatttccgtcagggcgttttcgaactgcacggctgtcgcgtcgtgtggccggaatctttgtggtaa

SEQ ID NO: 13267 - DNA, 1539 bp, Escherichia coli
gtggatgagcttcgtatctgtgcctcctgcgggctgacagaagtacatcatgccccggaaaatcataagccggatccggaatggtactgctcctctctttgtcgcgaaacagaaacactgtgtcaggaaatttatgaacgcccctacaacagttttatttccgatgcaacggcgaatggtctgattctcatgaaactgccggaaacctggagtacaaatgagaaaatgtttgcttccggagggcagggacatgggtttgccgctgaacggggaaaccatattgtcgacagagtccgtctgaaaaacgcacggatcctcggtgataataatgccagaaatggagcagacagactggtcagcggaacagagatccagacgaaatattgttcaactgcagcccgtagcgtcggtgcggcattcgacggacaaaacggacagtatcgttacatgggaaatcatggccccatgcaactggaagtcccccgtgatcagtatgccggcgctgttgaaaccatgaggaataagatccgcgaaggtaaagtacctggtgtaaccgatcccgcagaagcgtcccggctgattcgtcggggacatctgacttatacccaggcccgtaatatcacccggttcgggaccatcgaatcggtcacttatgatattgccgagggttcggttgtcagtctggcggccggagggatcagttttgccctgacggcatcggtcttctggctcagcaccggcgatcgcgatgctgccctgcagacagctgctgtccaggcaggaaaaaccttcacccgcacactggctgtctacgtcacaacccagcaacttcaccggctcagtgttgttcagggtatgctgaagcacattgatttttcgacggccagtccgactgtccgactggctcttcagaaggggaccggtacaggaaatatcagtgccctgaacaaagtgatgaagggtacgctggtgacatctctggcactggtagctgtcacaaccggccctgacatgatcaaaatgttgcggggacggatctccggtacgcagttcatcaggaatcttgccgtggcatcttccggtgtggcaggtggagctgtcgggtcagtggcgggcgggatactgttcagtccactgggaccatttggtgcactgacagggcgtgtggttggcggtgttctggggggaatgattgcctccgctgtatcaggaaaaattgccggagcgctggttgaagaagatcgcgtcaaaattctggcaatgattcaggaacaggtgacatggcttgccggcagtttcctgctgaccggacatgaaacagaaaatctgaacgagaatctggcccgtgttatcgatcagaatgctctggagatcattttcgccgccggtatacaacaacgggccgcgaccaatatgttaatcaaaccactggtggtcagtatcatcaggcaacgccccgtcatggaatatgatgcatcccatctcggcaatatggttaaccggctggaagaagcattacccccggagttaccggcataa

SEQ ID NO: 13268 - DNA, 1209 bp, Escherichia coli
gtggcaagaacgacacgccccctgaccaacacagaagttctgcgcgctaaagcgttagaaaaggatctaacgttgcatgatggcgatggtctttttctgctcgttaaaacgaacggtaagaagttatggcgtttccgttatcaacgtccagcaacaaaacagcgaacaatgatggggctaggtgccttccccaccctttcacttgctgacgcccgacggttaagagcgaattacctttccttgttagccaacggaattgacccgcaaattcaagctgaaattgcagtggaacagcagcaaatcgcactggacagtattttttcaaccgtcgccgctaactggttccagcttaaaagcaaaagcgttacccctgattacgcgaaagacatttggcgttcactagaaaaagatgtattccctgccatcggtgagatcccagttcagcaaatcaaagcccgaatgcttgttgaagccctagagcctatcaaagcacgtggggcactagagacggtacgtcgtctggtgcagcgtattaatgagataatgatttacgccgtaaacacaggtctgattgataccaatccagcatcaggtattgggatggcctttgagaaacctaaaaagcaaaacatgccgacgctccggccagaagaattaccgaagctgatgcgttctttgattatgtctaatctgtctgttccgacacgttgtcttattgagtggcaactactgacccttgtacgcccttctgaagcctctggtactcggtgggcagagatcaatctcgatgcaaagctctggacgattccagccgaacggatgaaggccaaacgtgagcacattgttcctctatctcctcaggcattagaaattctggaagtgatgaaaccaatcagtgctcatcgtgaacatgtttttccgagcagaaatgacccaaagcaagcaatgaatagccagactgcaaatgctgctttaaagagaattggatatggtggtaaattagtagctcatggtttacgggcaattgctagtacatgtatgaatgaagcagaatttaatcctgatgtgattgaagctgcattagctcatattgaaagtaatgatgttagaaaagcctataaccgctcaacctatctagagcatcgaaaagaattgatgaactggtggggtatgcattgcacttctgcaaaaaatgggattgttagatag

SEQ ID NO: 13269 - DNA, 363 bp, Escherichia coli
atggatcttagtttctttaagagcagcttgaaatacaatgcaacagcaacgattttctgtgtttttgcattatatttatcaatgcctattttcgaaaatgttaatttcatatcgagccatccaattatcgtctcagtactatttactttacttgtaaattctttacttttaataatttactggacatcccatacaaaaaaaacaaattcaaagtcgggtgtaaaaggaaacaaaataatcggaaacaaggcaaaaaacattaacatactttccaatggagaaataactaaaaacatcgtcagtaataatgatagtaatggtgacattaatattgggcaggtcttcaaaaatggaaaaaaatga

SEQ ID NO: 13270 - DNA, 582 bp, Escherichia coli
atggaaaaaaatgaaagcctagtcatttctgataatgaaataactaataataatcctgggagagatctgaacattgggacacacataagtttcaatgaggttaagaatcggagcaatgcattagcaaatttattagaacgttctaaaaaactttgtgaaacagatcaagaatataaatacatgctcgaagagttacaagagtatcttcagccccgtccaggtcgaaaaatcatagggttagaaggaaaactaaaagaaggcaatcgacttgatttgttagaagatgcagcttatttagaaaataagtttgcaagacgagttagcaagcatcagttttccatatcagaagaaatcatttactgtcattgcttaagtaaaataaactcatctttttcacaatatgtcaaaccactgtttaaaaacacagtaaacactgctataattgacagagtcatttatgacagaatagttgaacctctttatgaagaagtgtctgaagttagtaccgctatttctagcgaattaattagaggcatgattttcttcttaacgggtaaatgtcacttacggtgggttggttaa

SEQ ID NO: 13271 - DNA, 492 bp, Escherichia coli
atgattatttatcatccatttaaagatgcaaaccattgctcatatcgtattataagcttgctatataaaaacaataacaagattagggatgagcaccttaattttatggatttctattaccttttcccttgtcaaataaagaacattgatggatggccgcgttcaaattcgaaacttgcacgccgaatttctactatagaggacacttatgaaacaattgaaaatcctcgtagaattttctttgaattaaatataatacgtagaaacaccttagcacatttattttcgaagggcattctatccttgatagatgaatatatccacctgaatattgaaagaataccaacatccctgattaatacgcttgaagctgacacctttagagccaccttcgaatttactaccattgctaacgaaatacccaaactagcaatcaaaggtaaaaaaggccttaaagcaaaaactaatttaatggaatatcgttatgattaa

SEQ ID NO: 13272 - DNA, 1920 bp, Escherichia coli
atgattaaaaaaccgtcatatctcaagttaaatagattagtcataactaaggctggtaaacagttatatgacgaaaaatttcacgatggtataaacataatcagaggggagcactctgtaggaaaatcaacaattttagatatgattttttatattttaggcggagaattaaaaaaagacgactggaaatatccagccgataaatgctcgaatgttaatgcagagattacaattaatgaccgcattattaccttaaccaggccagtggatcctagtggcgcagctcctcatattaaaatctatgaaggagagtatgataaggcaatgaaagatgcagatggctggctagactatggctcaaggagaagcaatgagcgattaagcttctcagaaatgatgtttgaacttttcgattggggacaatataaatctgacagccatcaaaatttaaccatgcatcaaataatgcgactcatttatttaagtcaatcatcagattctaacagaatatttcgcaaagagtctactcgctctgacaatgaaaataccaggacagctatcgctgagtttcttttcggtctcgatgatttggaaactcactcagttcgtcaaaatttattgaagtatgagagagattatgaaaataccggaacagaattaagagcatatttcgagcttttaggaaatgactctaatctaactgttgatataattaacgaattattgaatgaaaaatacactgaactatccaaaatagactcaaagaaagaaattttattgcgttcaacagataatattgatggtaacaatgaatataacctagctatcgaacgcaatgacatccttttaaaaatacaatcactaacaaacaaaatatcacttaaaaacaatgagttacattcaataaagaccgaaatccaggactgtttgctttttggaaaaaatttagcatatcgtttaaaatctttgaatgaatcacaagaaacatataaaggcttaggtcgaatttcttttgaatactgcccttgttgcttaacaccaatatcagaacacgataacactgatagtggttgcgcactttgcaaatcaacagtcaacaattcctcattagaggaaaaatatattgaatcactgaacgaactgcaatatcaacagcgtcaaaataataaaatcatagaaaaactatatagttcagcagaatatatagagggctatattaaagagcttcaaaaagagcttgaaagcttacacaatagattgtttgaaatcaatttagtctcaaattatcgagaattggctataacttcaatcgtagaagaaagaactgcaaaattaattgaaatcaactccctgcaagataaaattgattcaatagctaaagttgacgacttaaaatcaaaacgtgaagacatcgcaaagcaaatggaaaaatttcgttcacgaataaccgctcttgaagcaaaaaacaagcgcagaaaagaatatgtttactcaaaactatctgaattttccacttttattcttgaaggagactcggggaatgaagagctatttaaaacagcaactcaactttcctcagagattgactttgcaaaagatcgctggcttttgaatgaacgggtaaattactcagatagttcaaacgttgtcaaaaaagcagctctacatttagcatttcttattttttcaatcgttgattcagcttgccgatatcctcgtttttccattatggacttcgaatgcggggatataaatgaagctcgaagccataaccttcaaaaattaatcactacaagccttagtaactttaaaggttttcagcttattatgactacatctaaaattgattcatctttgaacaacaacacttacggggttggtcgttattatgacaaaaatgactacattttgaagatttga

SEQ ID NO: 13273 - DNA, 240 bp, Escherichia coli
atggggcgctggcttgctggcagactcatgaaagagctggggcgggtcagttgccagcagccgactcaccggtataagcgtggcggtcatgagcacgttgctatcccgaatcatcttgagcgacagttcgccgtaacggaaccaaatcaggtgtggtgcggtgatgtgacctatagtgtgcccggagttcagggcgggcatggatgcttaaatgaaccgcgagtctgtctggaatattga

SEQ ID NO: 13274 - DNA, 822 bp, Escherichia coli
ttgtttaaagcaaatcatgttccggtattaatgtatcatcatgtcagccattgcccaggactggttacactttctcccgagacattccggaaacaaatgaaatggttggctgaaaacaactggaaaacactgtcatcagatgaactggagtttttttatcggggcggaaaacttccccgtaaaagcgttatgttgacatttgatgatggataccttgacaactggtttcaggtatatcctttattaaacgagtttaatctcaaggcacatatttttttaattaccagttttattggaaatggtccggttcgtcactctcctggaaaggaatattctcatcgcgattgcgaacatcaaatagcaaccgggaatgctgataatgttatgcttcgctggtctgaagtgaacgaaatgttgcaatctggtctggtcgaatttcatgttcatacacatactcatacacgttgggataaaaagttcacttcacgagaagaacagtgtaaacatcttcggcaggacttattgagcgggagagaatatttaaaaaaaatgacaggaaaatgcagtaaacatttgtgttggccggaaggttattataacaaggattatattcagatcgctgaagaacttggattccattatttatatacaacagaaagaagaatgaatgctcctgctaaaggaactacacggataggaagaataagcaccaaggaacgggaaaattgcgtatggctgaaaagacgacttttttattatacaacaccgtttttttcatcgttgctggcccttcataaggggccaagattaccggatgactaa

SEQ ID NO: 13275 - DNA, 1089 bp, Escherichia coli
atgaatatactatttacggaatcatcaccgaatataggtggtcaggaattacaggctgttgctcaaatgaaggccctgaagaaaatggggcattcagttctgcttgtctgcagggagaacagcaaaattgcttttgaagccagtaagtttggaattgatatcacattcgcgttatttcgaaacagtcttcacattcctactgtatggagattactcggaatagttcatagttttcagcccgatgcaatcgtttgtcacagtggacatgatagtaatattgttggtttggtacggttttttacctggaaacatccattcagaattatcaggcaaaagacatatttgacacgaaaaacaaaatttttttcaataaatcatttttgcgatgaggtgattgttcccggaacaaatatgaagacacatctggagcaggaaggatgtcgaactcgggttactgttgtgcctcctggctttgatttccaggaattatacgttgattcccgaaacagtttgcctccgagtgttctttcctggctggcgtcccgaagaggatgccccgtaattgctcaggtaggaatgttgcgcccggaaaaagggcacgaatttatgttgaatttactgttccatttaaaaatgaatggacgacagttctgttggttgattgtggggtctggttcacctgaactgcgggaacatttacagtatcagattgacagtatgggcatgcatgatgatgtttttattgctgacaatgtttttcctgccgcccccgtatatcgggttgccagtctggtggttctgccttcagaaaacgaatcttttggtatggtgctggcagaagcatcggcattttctgtgcctgtagtggccactcagattggtggaatccctgaggttattcagaacaaccagaccgggacattgttaccagcaagtaataagcacgcatggatgtgcgccctgaatgatttttttaatgaccctgggcgtttttatcagatggctcgcctggcaaaacaggatatagaagagcggtttgatattaataaaactgcgttaaaaatactcacattagcgaagcaaaagtaa

SEQ ID NO: 13276 - DNA, 951 bp, Escherichia coli
atgttttctataagtaacttatcatttatcggtttccttaaaaggattattttttcctcagattcactaccggggaagtgggaacacagaaaatttcggttcatgtacattttgcgatgttctataaatccggttgtcagtattcgatattattatgaactgcgttccttgccgtgcattgaggatattctggcaatacaccccacgttgccagcaagaattcatcgcccttatttgcataaaggggggcgcgcctggacccgtggacaatatattcttgagcattatcgctttgtgcaaaatttgccagaaaaatattctaaatttttgtttccacaaaaatcggtatcattagtccaattcatcgggaaagatggagagaattttgatatccagtattctcccagtggttttgaccgggaaggagagttgatgttgtcattgttttacaataaaacagttattgcccggttaacattttcagtcattctgactcaaaatggacacattgcttttattggcggattacagggagcccctaaaaataccggacctgatgttattcggtgcgcaacccgggcctgttatgggattttcccaaaacggattatttttgaagcattttgtgcgttgatgaaagcttgcaatatctctgagtgtctggcagtcagtgagcacagtcatgttttccggcaattgagatactggtatcagaaacgcaaaacctttgttgcggtctatagtgatttctgggagtctgtagcaggaaaaacctgtggtgactggtacagattaccaacccaggtgattcgaaagccgctaagcgatatagccagtaaaaaacgctctgagtaccgaaaacgatacgctttgctggattatatccatgaaactactatccgctctttggatgcatatcctgtacactcagaacatcagaatttaaattaa

SEQ ID NO: 13277 - DNA, 945 bp, Escherichia coli
atgaaaaaatataaatctgagtttattcctgaatttaagaaaaattacctttcccctgtttactggtctacatggttccttttgggaatgattgcaggtatttcaatgtttcccccttcattcagagatcctgtcttggcaaaaatagggcgttgggcgggcagattgagcaaaaaagctcgtcgcagggcgacgattaatttatcgctttgtttcccagaaaagagtgatacagaacgggaaataattgtcgacaaaatgtttgtcacagcattgcaatccatagtgatgatggcagaactggcaattcgtggtccggaaaagttccagaaacgagtgttctggaaaggcctcgaaattcttgaggaaattcgacacaataatagaaatgtgatttttctggttccccatggctggagcgtggatattcctgcaatgttgctggcagctcagggaaaaaaaatggccgccatgtttcatcagcaacgaaatccagtgattgattatgtctggaattcagtacggcgtaaattcggggggcgcttacatgcccgggaggatgggataaaaccatttattcagtcagtacgccagggatactggggatattacctcccagatcaggatcatggtcctgaatacagtgaatttgctgatttttttgcgacctataaagcgacattaccaatcattggacgtctgatgaacatcagtcaggctatgattataccacttttcccggtttatgatgaaaaaaaacatctactgactattgaaattcggccaccaatggatgcttgcattgccagcgcggacaataaaacgattgcccgacaaatgaacaaaacagtggaaattttggtggggccacatccggaacagtatgtctgggttttaaaattgttaaaaacacgcaaatcaaacgaagcggacccgtacccttga

SEQ ID NO: 13278 - DNA, 219 bp, Escherichia coli
atggacacgataggagaagcagtattgcgttcatgtcaaccatatgtaagaaccgtatttaactctgtagtggtgttgaacataatgagaaccacccacatagtgagcatggatgttgctcatctggcgaatatcagtgccagtgggcaaatgttcaattacagtttatcatttttggggatgaaacatgttatacttatgttgtggaggtgctggtga

SEQ ID NO: 13279 - DNA, 591 bp, Escherichia coli
gtgaatattgttgaatgctatatgccagtatttaaactcatatcatctgtcagagttttccctgaagaatatagtgattacgacagtactagaaagaatataattaacactgttgaggaggctgttcgcaatagtgaaaaaatgtcgttgagtgacagcgaacttgatgcggcattttatgctgtaatcgtcatgcttgatgaggcaatattgtgttcagagcttccctgtagaaaagaatggcgtgataatcttttgcagataaaatatttcggacactccactgggggggtcgagttcttttataaacttgataaagtcatcgaatcgggaagtcaggctggatgggtctttctcctgtgcctgttactgggtttcagaggtaaatattccgtgggtagtaatgatgaaatcaataattatatatcgaggctgaggcgacaatgtgaattgaatgttgcaatcgacgaaggaaacaatatttcactcagggaaaaaaagtataaatcatcgaggcttggtttctatttattacttgtaggtattgttgctgtctattttgtggttttatccatgatttatatgagatga

SEQ ID NO: 13280 - DNA, 3405 bp, Escherichia coli
atgcttaagaagacattttcattatttctctggttttttgtttctgtcttcgttctgtctgtttgctatgttatcggcgtgttcagaaactggacagatactacaactgcactttactggatttctgtgattcttgttactctttcctttaaatttattatggattgtatccataattacttttctgcaggaaaatacagaaattttctaaagtctttctctcgtaaaaagagagcattgacgcttgattcgtatttcaaaaaaggtctgaatatcataagtaaaaggggaagaggagaggttccttggttcttacttacgggagattcagaaaaaaacaactctttgcttgaagatatcaatcttcctgtctttcaccgtaattgtgtaaatagcactccccaacaattccggacaattcgttggtggtttttcagagatttaagcgtgctggagttgtcaggaaagatatatgataacccgggagtaataaactctgtgataagttctttatcagcacgtaaatgtaaaaaacagccacctcgtggcgttgttctcgtcatttctgctgataagctaattaatcatgattacacctatattcggacattgtctcaaaaaacaaggagttttgtagaacaactgtcgttacacttacatcacaacattccggtctttatagtgattagtggatgtgagcacatcagtggatattcagtgctggcacaaaaaatctatcaaaaacatgaaaaatggcatccagtgttttgggcaaccaataaatcagggacgaatgcatctgaatatgattcatcatacatattatcatcattaagatctaatataatggcatcaatatgccatgcgcttgatgattcattaagtgacaaggaaaaaaatgatatactgcagtttcctgatagattgaaaggtctaaagtattcacttgacatatttatttccacattctgtattgagaacgtttttttctctcagacggaaattgccgggatctgtttatctggtgaactcatgggggagaaggacaaaaactgtatttttgctgatatccttatttccgagatactgccacaaatacatgattcagacgttattcatgttaacaaacaaagagtgaatgtatcgtttaaatcagttatagccatgactgcattgtgttttgttggatatagcggatattgttcatataatgtgtataacatcagacatggttctgttgataccagccatgcatttctgacagagcagatatcaaaatatgaagacaaagttaggtctaacatgcggtatttcccttttaagcctgcactagatgataaatatctatttttcagagaatctcttcataaaacaacaagattcgatatcagtcctgtctcatggcgcgttactgaatataagaagaatttcatgcaagcttcaccatcaggaaagcgagaactaattctgtcgctctcatcatcacttatcagttgggataagatgatgaaagatgaatccctgagtgacttagcaaaatctcctggtattcatgagttactgaagataaccagacctcatgataaaatatcatcaatagcttcacttgctgtagaaagagatgagatacagaaaaataatggaattgagaatatttatgtgttcagaaacctcctgactgagttggttcagagtgacccgtcttattcatggtttgtttctgaagatgttaatattcctgctgtaagaattacggacttttgggaagatgaaaactcttctgtctatctttccggaatatggacacaaccgggacagaataaacttcatcagtggtatgagactatcaaagaggcatatggacgtgatacggttccggaggcgttctcatcctttgtgctatacctggatgaaagtcgtcaggagcatttcagacagtttattatgtctgttgcaagggcacgtaaagactcacattcaggtttaatgaatccgctgcaactgaccaatattatacacaatcgctcatctgagcatagattctttcagtttgtagatgatgaattacacaatataccaacgagttcggcgcaggactggctttctgaattcagactgcttaaccatctgttttcacttaaagtggataacggaatgaaacgtcaaatagaacaatttgatctcatgttacgtatatacctgatttctgttcttaataacagtcaaatgaacaggacactgactcatgttaccacatggagaagctggcagaatgctctacgtaatgccgtgaattcagtgttacatacagcatcatcagttgaacttattcgtaatgccatgcgttcagatccagaaaacaagctggtaatattatttgatgagtttgaaaaggttcgctcagtcattaacagcaataatagagagccggtgattgattctgtatgggatatttatgagcggcagatttatcaacttctcgaccatgctgtcacttatacagggtgttgggttggtgaacaatggaggaattctgttttaggccggtttaactcaggaaaacataatctcagttattctgagatgcagggaaaagtatataaggacattattggctttttgaaaggtccgtctaacggagttttagcgcttgatccagacggtgtcagactgttgtccttcagggaaagaagtatacctttttccccttcattcattactttcattaatgacattgtttccccggatgatctgcttgatgtttggctcagagagcgaacgcaaaacaaggatgaattaataaatgtacaggggcaactagacttactgaatcagaccctacaaaatgctgagtcacagccttacagagttacgatagatagtgcacctgcgacaattccggataatccccgagtcaaaccaacaggtacaactctgactcttgagtgtaaaacaggtaacagcagtatacgaagtatgaattttgctgattcaggtatttttacctggtatccgggaagctgtcactctgtaagaattgacattttgttccctaatttttctgccacctataagtttacaggagaaacagcctggattgattttatcaacaagttttcggatggagagagtgagttaatgacaaaggatttttctccagaatcaagaaattttctcgaatcaatggggattaaaggcattcttgtccgttacaaactgagtgatacaggcaatctaagtcaggcatatatcgaatgggaacaactaaaacaggaaaaggataaacttaaagatttacaggtgaatctgagtaataagctgcttaccacacatagctgggagaaaagtgcctggatttccagactgcccggcaatataacaatatgtccagtagtacaggagtga

SEQ ID NO: 13281 - DNA, 2550 bp, Escherichia coli
gtgagtatctatctgaaaccaattattaataaattaactccagaaagtcgaaatactctggattctgcaattaattacgcaatatcaaggtcacatcatgaagtagactgtctacatcttctatggaagttattgcaggaacataaatatatagccgaagtgctttatgagcagtccttatttaatcctgagtgggttcttaatgctattgaaagtgaacttatccgtatcaatacagtaccacaatcctcacctgtattttctgagtcgatgcagactctactggagaaaacatggatacatgccagtactaaatggcaaatcgatcatatagatatccctgtctttttgagtactatgattaatttcagagattcaatatttcctctcaatgtttctgatgcgttatgttgtgatatggatgtagctgaggagttacttatctctttttcagacgaagcagagcattctgcttctcatcgtcccaccgataggtcttcacatgaatatctcagtaaatatactgagaatctctctctgcgggcagaaacaggtaaattagatccggttactggcagagagaaggaagtcagacaacttatcgatattttgcttcgtcgcagacagaataatccaatactgaccggtgaaccgggagtagggaaaagtagtatagtagaaggtttagcactgcaaattgcgtctggccgtgtgcctgatgtactgaagaatgtccggatccatgcccttgatatgggggctctgcttgcgggagccagtgtcagaggggaattcgaaaatcgcctaaaatcactgttgaccgaacttaattctttggatggcacagctattttgtttattgatgaggctcattcccttatcggtgcaggaggacttccgggacagactgatgcagctaatttgcttaagcctgctcttgcccgtggagaattgcgcattatagccgcaacgacatggggagaatataaaaagtattttgaaaaggatggggcgttagcccggcgttttcagatagtaaaagtagcagagccaaatcaggatgtcacagcggaaatgctacgttctcttttgcccatgatggaaaaacaccataatgtttctatcagggaagaagcaataactgcaacggtacatctatcagaccgttatctgcatgggcgccgtcaaccagataaatctgtaagtctgttagatacagcttgttctcgggttgctgtatctcagtctacatcaccagatgccattcaggatgtcgaagcttcattggtaagataccaaggggaacttgcgctgctgacacaggaaaggtcagatgttttgcgtcaggaaatgcttgcaaataaaattgctcaacttgaggaggagcttgagcaactcaaatcagcgtggcgtcatcaaagtgaactggttgcaaaaatacaaagttcagatgatatttcatcaaagaatatgtacagaaaagaactggaaagtgcatataagaaagacagtcctatggtttttgagtgtgtggataaaaattgtgttgctgatgttgtttctgggtggacaggtgttccactgggtgtatgccttgatggtgaacaacaaaaagcatccggtctgttaagatgcttggagcagcgagttttggggcagcgatatgctatgtccgctattgcatcacaagttcttatttgtcgggcagatcttaaagatcctgtaaaacctgatggggtatttttacttgcgggcccttctggcacaggcaaaacggagacagccagggcgctggccgagtttgtttatggggatgagaataaactcatcacgattaatatgactgaatttcaggaagctcacactgtttccactctgaagggggcacctcctggatatgttggttttggtcagggagggactcttactgaaagggtgagtcataatccatacagtgttattctgcttgatgaaattgaaaaagcacatccggatgtcctggagttcttcttccagatatttgactcaggtattatcgaggatgctgaaggtaagatggtgtctttcagagattgtctcataataatgacatcaaactttgccagtgaaaatatcacaaacatatggaatgatggtgagacaaatagagacagaataaaagaaatgcttcttcctttgtttaatgagcattttggggcggcatttatggggagaactaacttaattccgttcacaccgttgcattccaaaacactgagagatatcgtactcattaaaattgataagatctgccaacgttttgaacaggcatcaggtcagatgtataagatagaatacaatgattctcttattgactggattacacatcattgtcaatgtgataagtctggagctagggatatagactcagtacttaacagcacggttcttcctgtcttggccagatatttgactgactctgaagataatagaacccccaagaaaataagaatatcagtaaggaaaaataacattacattacgtagttcgcaatttgcaactcgtaattga

SEQ ID NO: 13282 - DNA, 150 bp, Escherichia coli
atgcgtagcctacttcgtgatttgaaatctaatccccggagacatgttcagaatgtgctgctgaaatatgagcctcactttaaatttattaaagtggtgatgcagaaacaagaccaacccagggagccgagttatgtcattgatgcctga

SEQ ID NO: 13283 - DNA, 210 bp, Escherichia coli
atggaggccgtatatattggcaatgatgtttgtcatatcactattacctgtaatcagtctggattccacctgacaaagaatggcgtgcgtgtattaacggaacgtaatatcagaagccttaatgaactgttacctcttttgagacgacgctgggatgtgacgccggcaatcatcctggcagtggagtaccttttacgtgtatcggtatag

SEQ ID NO: 13284 - DNA, 567 bp, Escherichia coli
atgattatttactttttcccatttcaaatggatgaaaatgacacttttcttgatgccgaagttaagtatcagaaaatgaagaataaagaatgttatggtgtgaaagcttcacacaaaacacctttatcctttcttaaatcgagcgatacgttatacatcgttgctcatggcaacacatcagttattgggacaggttcagcaactgggccaacgttgaatcccttagcattagccactctattaatgaatagacgtttaccaaagaacttcatagatatcagagtattgacttgcgcctcggggatacattcgagaacccctgccttcgcacaacggctgaaagaaattatgaatgaacatgggtatcatagtctggtcgttaccggataccttggtgaggttgatatatcgagagactggagattaaaaaatgatgatggtatggcgttttattcctcaagaaaaaaagggattattcctgttaaggatgtattaagtgaatcccagagagctctttgtggttctgatctgaaatacgccctttctgatttcaagaaacgattttga

SEQ ID NO: 13285 - DNA, 1155 bp, Escherichia coli
atggataaaaattttatactagatattgcagtaagtactactgatccccggaataataaagagtttctttggattagttatagtatgaacaatctgagtccggccaaatgtgaaagagcatattggatgactctggaaaaaagatgtctttctttatttatggaaaacggatatgatcttcagacaggagcatggttctgtcttatttcagccaatctatatagctgggaaggactggcgctttcctcatggaaatttgcagattcatttgtaaaagaaaaatgctggcctcatgttacggccactcagatgcggacgaatattcttatctggtatattaaaaatgttattcctgctatgcaaagtctgcctgatgatgagaaaacctactcgtcattaaccttgctggaggatgcattaacattattggctgatctcgaatacaatcttctttctggcaaattttttatcgtttcagatatgctggctgaactcaagagacaaaagagtgatgactcagaaagtactgatgccgcacatcatgattcaggatcacatgatgcgaaagatattcggtcttttagcagtggtttacctacgaatattgactccaattatactgctggaccagaacacaatacgttaattaagaaagataagaaactgcgcatatattataacgtcgtttctttcatatcgggtgctctaataaccgttgtaatgaactatgctggcaggccggaaacagtactgaaacttaggggcatcatacctgatagctttattactgaaatggttatgaactattctggatgttcagtctccctccctaattcagcagactcctggtctaagcttggaaagaagattgatgattttacggaaacactgaatgtaattgaaaatgatggggggtatattactatatctaagttgaaaacgattgcttacgatctgaaaaatacctttcttgagtatgacatgcctgtaaatataaaaatatcagacttatataataaccagaatatgagtaaagttgatatcaacagagagcttgaaatgatacagcataatattaacaagttcaattgtgagattggctatttaaggctgagaaatgagggactattaaaggataaggttagagaaaagtga

SEQ ID NO: 13286 - DNA, 1656 bp, Escherichia coli
atggaattttcgttttcacccaaacttcttgttgtggctgtcgccgccgctcttccactcatggccaacgcagcagataccccgtcaaccgccaccgcacgcaaaggctttgccggatacgatcacccaaaccagtatctggttaaaccggcgaccactattgccgacaacatgatgccggtgatgcagcatcctgcacaagacaaagaaacccagcagaagctggcagaacttgagaaaaaaaccggtaagaaaccgaacgtggttgttttcttgctggatgatgtgggctggatggatgttggctttaacggcggcggcgtggcggtgggtaaccctacaccagatatcgacgccgttgccagccaggggctgattttaacttcggcgtattctcaaccgagttcttccccaacccgcgccacgattcttaccggacaatactccatccaccacggcattctgatgccgccaatgtacgggcaaccgggcggtctgcaagggttaaccactctgccgcagttgctgcacgatcagggctacgtcactcaggccatcgggaaatggcatatgggggaaaacaaagagtcgcagccgcagaacgttggctttgatgatttccgcggctttaactcggtatccgatatgtataccgaatggcgtgatgttcacgtcaacccggaagtcgccctgagcccggatcgttctgaatacatccaaaaactgccgttcagcaaagatgacgttcatgccgtgcgcggcggtgaacaggaagccattgccgacattacgccgaaatatatggaagacctggatcaacgctggatggactatggcgttaagttcctcgacaagatggcgaagagcgataagcctttcttcctctattacggcactcgcggctgtcacttcgataactacccaaatgcgaaatatgcgggtagctctccggcgcgcacctcttacggcgactgcatggtggagatgaacgatatcttcgccaatctgtataaagcactggagaaaaacggtcagcttgataacacgctgattgtgttcacctctgataacggtccggaagccgaagtaccgccgcacggtcgcacaccgttccgtggtgcgaaaggatctacctgggaaggcggcgttcgcgttccgactttcgtgtactggaaaggcatgatccaaccgcgtaaatctgacggcattgtcgatctggcagatctcttccctaccgcgctggatctggccgggcatcctggcgcgaaagtcgcgaatttagtgccgaaaaccacctttatcgatggtgtggaccagacatctttcttcctgggaacaaatggtcagtctaaccgtaaggccgagcactacttcctcaacggtagactttctgctgtgcgtatggatgagttcaagtatcacgtcctgatccagcaaccgtacgcgtatacccagagcgggtatcagggtggattcaccggcacagtaatgcaaacggcgggatcgtcggtgtttaacctgtacaccgatccgcaggaaagcgactccatcggcgtgcgccatatcccaatgggtgtaccgctacagaccgaaatgcacgcgtatatggagatcctgaaaaaatatccaccacgcgcgcagattaaatctgattaa

SEQ ID NO: 13287 - DNA, 597 bp, Escherichia coli
atggatacgctgcgctatctggctaaaaattcgcgctttcgtcgtggtattgtggctcaattcctttatgtgggtatgcaggtcgcagtatggtcatttaccatccgtctggcactggagttgggcgatatcaacgaacgtgatgcttcaaacttcatggtctacagctttgcctgcttctttattggcaagtttatagccaacatccttatgacacgttttaatccggaaaaagtcctaattctctattccgttataggggcgctgtttctggcatatgttgcactggctccaagtttcagcgcggtctatgtcgccgtcctggtaagtgttttgtttggcccttgctgggcgacgatctatgcaggaacactggatacagttgataaccaacatacagaaatggcaggagcagttattgttatggctattgttggcgcagcggtggttccggcaattcaggggtatattgcagatatgttccactcactacagctttcattcctggtttctatgctctgttttgtctatgtcggtgtctacttctggcgtgaaagcaaagtacgtaatgcactggctgaagtcacagagtcctga

SEQ ID NO: 13288 - DNA, 1014 bp, Escherichia coli
atgagtacgcgtatttatttgtggcgggcgctttttggcgaaaaacctcgtatcttgctggaaaatagtgattttactgtcacgtcttttcgctatgacagtggtgtcgaggggcttaaaattgcaaacagtcgtggacatttaattattcttccctggatggggcagatgatttgggatgcgcaatttgatggacacagtctcaccatgtgcaatatgtttcgccagcctaaaccggcgacagaggtgatagagacctatggctgttttgcctttcattcaggtttgctggctaatggctgcccatctgcggaagatactcatctgctacacggtgaaatggcctgtgccgcgatggatgaagcatggatggaattagagggagatatgttacgccttaccgggcgttacgagtatgtaatggggttcgggcatcattatctggctcagccaacagtggtccttcacaaatcctctacattgttcgatattaagatggccgtaaccaatctggcttctgtagatatgccactacaatatatgtgccacatgaattatgcatatataccaaatgctacgttcagccagaatataccggacgaaatattaaggttgcgtgaatcagtaccttcgcatgttaatcccaccgcccagtggctggcgtttaatcaacggattatgcagggagaagcctctctgtcgacgctgaatcaaccggaattttatgatccagaaatagtcttctttgcagacaaactggacgcttacacagatcagccagagtttcgcatgatcgctcccgatggcactacgtttgttactcgtttctccagtgctgaactaaattatgtgacacgctggatcctttataacggcgagcaacaggtagccgcctttgcattaccagcaacctgtcgacctgaggggtatcttgccgcgcaacgtaatggcacgctgattcaggttgcaccgcagcaaacgcgcacttttacagtcaccacaggtattgaataa

SEQ ID NO: 13289 - DNA, 621 bp, Escherichia coli
atgaccacatttaccgataaagaactgattaaagaaatcaaagagcgtatcagcagcctggaggttcgagacgatattgagcgccgtgcttatgaaattgctctggcatcgctggaagaggagccggtggcatggctacattcagacaatggcttaggtattccagcaataaccaggagtaaaaacattgctgacagttggttatcaaagggctggtatgttcagccgctatatatagccaagccagtgccggtggtgccagatgctcgtccgactttaaataatggcatagtcggttttgatgaaggctggaacgcctgccgcgccaccatgcttcacggtgtcaaacctgtaagccagacttacaagttgaacaagctgtctggcaactctccggtaactccggatggttggataagctgtagtgagcgaatgccgaacgataaacaatatgtttggtgttggggtaagtcttacggctggactgagtgcgataccttcgaagggtattacgattgttcgagaaacaaatggtgggcagttactgacgatggggaagaaccggcattgaaagtaacccactggatgccgctaccggagccaccgcaggaggtgaagtaa

SEQ ID NO: 13290 - DNA, 408 bp, Escherichia coli
atgactatgtacgcaaaatcctttatcgctcttgatggcaacggacgtctgacgggcgcccgtactgcacaggccgcaccttatgctaactacacctgccacttgtgtggcagtgcactcagataccatccgcaatacgaaactgaacttccctggtttgaacacactgacgacaggctgacagagcacggtcaacagtgcccttatgtcaggccggagcgcagagaaatacagttgattaaacgtctgcagcaattcgtaccggatgccttacccgtggtgcgtaaagccagctggcactgcagacaatgtcaccacgattattatggggagcagtactgcacacactgccagaccggaggattcagtattccccggacaactcagggggaaatatgcgaattctga

SEQ ID NO: 13291 - DNA, 213 bp, Escherichia coli
atggaagttaaaaccaaagaagactggctgtatcagttccgtcgttgttcatcccgggagacgctggaaaaagtgatttcccacacacgttataaacttacccttgcggagctggaagccttcaactctgcggttgatcaccgactggcagaactaaccatgaacaaactttacgatcgcgttccggcttctgtctggaaatatgttacctga

SEQ ID NO: 13292 - DNA, 174 bp, Escherichia coli
atggtgatacacaaaacggtgtgcagggattgtggtaaggcaattactcataatacggatgttgcccattaccggaataccgatcgtcggcgctgtctactgacgtcactgctggtgctgactctgcctgtcggtttatgccgtcaatattcaacgcaccggatccccggctaa

SEQ ID NO: 13293 - DNA, 582 bp, Escherichia coli
gtgaagcagttcaccgttgccgcagtaaatggcggcatgattagccaccgatgcgccgaagcagcacagcaggatatcgcccgcctgtgcagaggacaggggcacccggtaaaagccggtgaccgccatattgtccaggtacaggttctggccgttgcgccaccagtcatcctcgcgatgaaaatccggcatttcagtccccgccagatgataagcatcccggaacagcgtgtaacagtccgtcaccccgtgctcaaagcgccgccctgtcagatgtggcacacagcggaatttgtgaatgtcaccccggcagaccagccaccagggcagtgcgctttttatctgcagccgccggtcagcctcgctcagccagggcagcccaccgggatgactgtggaccagtgccacaatctccccctgcatctctgcccgcagccagtcttccggtgcgatacgaaaatacgcctccggctctgcggaaatattcacacaagggatataccgctccccctccggcgtgcttatcacgaagccgcacgactccgcaggcgcacaccgccgggcatgcgccagaatcgctga

SEQ ID NO: 13294 - DNA, 963 bp, Escherichia coli
atgggaactggattttgctctaacgataaccagcaaaaaattcgcagtaagtttaatattgaagagtcatattgtgccattaagactaatggcgtcctcgggttcagtaaccgaagaagtgcctggcgggcaaatggtgattcaaccggggccatatccagcaccaatgccatgatgctgatggcgaatggagaaaatgaaatcagtctggagattggggcattaggatggttttctgacaagcctgccagtatggaagaacgggggcgtttttttccaaaagcaggatgcagcctggatttggttcgttttattaaacaggaggaaacgctgctttcttcaataaaagtgaccatcaaccagcagggcatacctgaagcccggccagacagcgtgcatcccgttatccggaaagagattttggctgagcaggcggagccaggatttattgatccagattattttgatgaaacctatttcccgaaagggatgaaggtgtatcagttcactcaaaaagttaccgtgacagggcttcctgaatgggcctggacgcgggcaaccccctataccggaagcgacgagcagttacggaagttaaaagccgcctataccgaaatggcaagcatcatcagtagccgggacagggcacgtctgaaagcttataacaaagaggcgctgaaggcatggtcagccacaaccggtgactctgaggatgacatattactctcactcttctcaaaagataatgtggagggagggaaagccagaatgcagcccatcaggtgggacgattatgccgtccgggttatgaatggtggacgtatggtgcagctatataataaatcgaaaccaatatattccccactgacttaccgttttacagatgaaagtggtgaagagcgtatggggtattacgctccggtattttcgctgattgatggtcagtttatccctgttacttga

SEQ ID NO: 13295 - DNA, 1572 bp, Escherichia coli
atgacatctccatcttcgacagccggaaagccctgtgtggaatgcggcattcctgatccatgtatttttgatgttattagtgattttccagaggccggcgagaaacatttctggtcaaaagaaggagtggcgcgttttaagctactggatgatggttccggatgtgatggtataattaccattacctaccagtgcgataaaagtggaacacatgaggcatggttagaggaagaatcagaaaataatcataagatactgcaacctttcggaatacctaataaggtcactttggatgataacttgtctgaaggtgaaataattgctatgggtacatttcgagtaccatgggattatttgggggcaatatcctctccacttaagaatcattatgaacctgcccattattcagtcagaattgacagttgttacgaatgtggcaattatgttgaaattgatgtttatcctacagtggaaattaggtttactacagggttcagctatgagatttcgtcatcaaaacagacgagaacagtaaaagagcggcgtgacgaaagaataaaagccagggacgcaatggagaacaccaagcccagggataaaaataaactccgtagcggctggacaaataccactgctgagtttgagtggataaacaagacttccctgactgtcgattttggcgtaaaaatagctaatgttgaacacacaagtgaatatgaaaaagagataaaaaaacttcgacaaacaaagcaactggaacagataggaagaattgactctctggtcaagaatgtcaataaatattttgcgccagatcctgacaataataatggtacgcgcaaatatgcattgttcagtgcaaaaatagaacccgttaaactgggtatatcgtatgcctatcaatataccgatatccaggatggcccctgtcatttttatggtttgtttggtgccccattttttgaagcgtcgttcagattcgatattatttcatttatatgtgcatattgtaaagtcgagtcattggtcaacagatgtcgtgaatatctccgtaaaaacggagccagtgttgaatgctatatcgagatttcagcggagattaatcttgatcttggcgcagtatacgctgaaaaggataaaaaatgggagtttaatgtaaaggaaagtaacatcaagctcggtttaaaaggtgtggtgagtgcgacgtttgaggcgaatgtttttgttgtacaactgaccgccgaagcgactgcctctatagaagcgaaagctggatttggatttgattcacatgatgacggactggacctagcattatttcatgacggcattaaagggaagtttgaatttaagattgatgtgtctcatggtgaagttgatgaaaaaggaaaggggaaggaaaagagcgaaaaacctgagaagaaagataccgttgagtggcagttatgtgatcctatggaggtaaaggattcaccattacgggttaatttatacggtaaagaacgcactgtggagaaaaaagtaacaccgccgaagccagtgacaacgtggacgataggtatggattattaa

SEQ ID NO: 13296 - DNA, 1323 bp, Escherichia coli
atgttccgttatgaggcgtatgtccgcccgtcgtcggtgcagagccaggattacacgtttaaggtgccggactggccggggatgtatgagcagcagggtgagaacctgaacggacagctggagcagtatgagatatttgattatccgggaaggttcaaggatgaacagcacggcaaggatttcacgctgtaccagatggagagcctgcgcagtgatgcggaaaaggccacagggcagagtaattcaccgaagctgtggccgggaacgcggtttacgctgacggggcatccgcagaagatgctgaaccgtgaatggcaggtggtacagagtattctgtcaggggaccagccgcaggcgctgcacggcagccaggggagaggaaccacgctgggaaatcagttagaggtgataccggcggaccggacgtggcgtccacggctgcaaagcaaaccgaaggtggacgggccacagagcgccattgtcaccggtcctgcgggagaggaaatcttctgcgacgaacacggacgtgtgcgagtgcagtttcactgggacaggtataacccggcaacggaggcgagttcatgctgggtgagggtgtcgcaggcgtgggcggggccgggatttggtaacctggcgataccgcgcatcggccaggaagtgattgtagacttcctgaacggcgacccggaccagccgataatcatggggcggacgtaccatgaggacaaccgttcgccggggagtctgccggggacgaagacgcagatgacgatacggtcgaagacctataaaggaagcggctttaatgaactgcggttcgaggacgcgacggacaaggaagaaatttacctgcacgcacagaaaaatatgcaagtcgttgtgctgaacagcaaggataagcgggtcaactatgaccggacggtcagcatcgggcatgatgaatccctggtggtggcaaatgaccggaaagtgacggttgaaggtaaacaggaccataaaaccaccaaagaccatgtcagcctgacagagggcaatcaggggctggaggtgaaaggcgatctggcacagaaaataagcggcgcgctgggtatcagcgtacagggcgatattgttttacagagcgacagcaaaatcagtctgcgggtgggcggttcatttgtggtgatccattccggcggcgtggatattaagggcgcgaaaatcaatcttaacggcggaggcagtccgggagacgtgatcctgccgatgcgcccggtgatcctgaaagccgcagccggaagcgggacaatgtttgtggcgcactgcccgaaggaggataagtga

SEQ ID NO: 13297 - DNA, 570 bp, Escherichia coli
gtgagccgattcatccctgtcgaattacaccatgccagccgtctgttaaatcatggcccaactattttgataacaacttttgatgaaaaatcacagcgacgtaatgtgatggctgcggcctggtcgatgccggtagagtttgaaccgccacgtgttgcgatcgtggtagataaatcgacatggaccagggagttgattgaacgtaacggtaaatttggcatcgttatcccgggcgttgcagcaactaactggacgtgggcggtgggaagtgtgtcgggtcgtgaagaagataaatttaattgctacggcattccagtagtgaaaggtccggtacttggtttgcctctggtcgaggaaaaatgtctggcgtggatggagtgccgcttgctacctgcgacttccgcgcaagaaaaatacgacacgctgtttggcgaggtggtatcagcagcggcagacgcacgggtatttgtcgaaggccgctggcagtttgatgatgataaactcaatacactacatcacttaggtgctggcacgtttgttaccagcggcaagcgagtcaccgcgggctaa

SEQ ID NO: 13298 - DNA, 636 bp, Escherichia coli
atgaataaaggtaatagattacaacagttagaagatgcgtgtcgtgatattattaaaattaacatgtggtatgaactccccgattatgtatttttttcaatatctgacaccatcgatgggacgagtgatgaattcgcaataaatgtgtataaaaatatcgataaaagtcttcttgaaatattattgcatccatctgttttactgtcagttgttgagtccttacaaagtaatactatagctgagtatatcgtgaaattgtctgaaatagagatgaattatgacgacttgctaatatcggatgttaaatcatgtctttttatcaactatggattcaataacagtgaatcggttgcgctatttaataagatttaccgcgaattaaaagatattgtaaaatcatcaagagtacatatagatcatgagaaagatatttttgatggccttaatcaaatcttggctttttccgataataataaacatgagtattttttatatataaaggcatattggctcagtttatacttttgtgaaatttcacagaacgtgagagaaagagataagttgtcattttattataatgaattttctgtccgatttcctaatgttgtcctatatccgtcatgctacaaattgtaa

SEQ ID NO: 13299 - DNA, 561 bp, Escherichia coli
atgaaaaaaagcaaaaaaattaaaacaatgaaccatcaaaataatagcgggatacaaaatcaaccagactatcacatcgaaatagaaagaaaaaatatggtaagattgcttgatgaacgtattgataaagtttacggttcattgctaggaccaatgaaaaagaaaaatatagataaaatacgtcattttacacttgatgtaatggtgtttattcttgacacgaaccctcgtgtttgtaataaattatccagggaaataatatctttagcgcaaaataccttcattgaaaaaaacgttaatttttcaacttttaataatgaacagcatagaataagggagtatatgaatgaaggtggtggaatacgatggtttacatgggataaccccgagatatcttttgttcgtgcatcttttggcctttttgtcaaaatggaaacaaaaggtgatcatgaacatacactaagtgacacatttcttcagattgttgagtgtgttaatttaaatataggacttattgcaaaagatgaactggtaaaaatcatcaataaacactttatgtaa

SEQ ID NO: 13300 - DNA, 1299 bp, Escherichia coli
atggtttggctggaaattatcgtagtacttggtgcaatattttttggtattcgccaggggggaatcggtattggtttatgtggcgggcttgggcttgccattctgactctgggatttggtctgcctatggggtcgccgccagtcgacgtgatcctgattattatgaccgttgttgtggcggcctcagccttacaggccgcaggcggaatggattatctggtatgcgtcgctggtaattttatgcggcgtaacccgaaatatatcaacataatcgcgccgattatcacctggtctatgaccattatggccggtactgggtttattgttttttccacgctgccggtgattgctgaagtggcgaaagagtccggtatccgtccttcccgcacgcttgccggttcggttgtcgcttcgcaggttgcgatttccggttcgccgatcagcgccgcaatggcggctatgctcactattatggaggtaaacggtgtcagttttattcaagtgatgtcggtatgtcttcccacctcttttgctgccgcgatggtcgccgcttttattgcttcccgacagggatgtgagttgcaggatgacgaggtctaccttgagcgcctgcaaaaaggactggtgcaaaaatacgagaataatagcagcatcaagccaggtgcgacgctctccgtcggattgttcctgctggcgacggtcgctattgttattcttgctgccttcccccaactgcgtccgggttttgatatcggtaaaccgatggaaacacgcgatatcattattatctgtatgctctctgccgcctgcctgatggtggtgctgtgtaagacggcgaccgatgccattattctcacctccacattccgtgcggggatgagttcgctggcggtaattctcggcattgtaacgttaggcaccacttttattgatgcgcatttaactgagattaaagatattgctggtgatattttgcaggcgtatccgatgttgttggcgctggttctttttggcacttgcgcgctgctctactcgcaaggtgctaccacgccgttaattatcccgcttgccgtcgcgcttgacgtgcccacctgggcaattctggcgtcctatgtggccgtcaccggagtatttgtactgccaacgtatccaacatcactggctgccatggaatttgatactaccggcacaactcgtgtaggcaaatatgtgctgaatcatccatttatgctgcctgggttggggggaattattgctggagtggcattaggctttgtgattgcgccaatgattatttag

SEQ ID NO: 13301 - DNA, 720 bp, Escherichia coli
gtgaaaggtttaattggtgtactcggtggaatggggccggcagctaccgtcgacctgtttaataaatttgtaacttttaccgctgcacaatgtgatcaggaacatattcctttaattatttcttcgatcccggatattcctgaccgtaccgatgcattaatgcatcatgggcgttcaccattacccgttatgcgtgattatatgcataagctggaagatgccggggcagaatgtattgttattccctgtaataccgcgcattactggttcaaagaattaaaagatgcttgtcatattgatatattaagtatcgtagaaactacgatcaatgaagttcgcgcctgtggtaaaacccgaattggcttgttagccaccaatgccacgctatatatgggtttataccaaaaaggaattgagtcgctgggatttacctgtgtcagccccgatgccgacggtcagaaaaaagtgatggaaagtatttattccttgaaagctggcaatatagcgcacgcacaaaagttgatgaatgagcaggctgaaatattattttctcgcggtgcagaaatccttgttcttggttgtacagaaattccggttattctggcgcaagccgttaaagagcagacttcccgctatattgactcaacggcgtcactcgttcgtgccggaataaaatggtacgaaaatcgtgtcggtaaacattatcttttaacccaataa

SEQ ID NO: 13302 - DNA, 939 bp, Escherichia coli
atgaagaatatcgagacaaaatggttatacgatttcctgacactggaagcctgtcgccatttttctcaggcggcaaaagagcgtaatctttcgcaacccgcattcagccgacgaattaaggcgctggaggcagcgatcggcgttgttttattcgatcgcacgaccacccctttacaattaaccgaagagggcaagctctttcattcccagactcgcagcttattacagcagcttgaatgcaatttgggggagttaaacggccagagtttactcggcgttcccaacattaaaattgcagccgcgcactcactatccctgagcgtattacccaaactggtgcattcacttaccgcctatggcggagaatttgtctatcatgttgaagcaattgatgttgtccaggccgtaaatacgttacgcgaaggcaagagtgactttattatttcgtttcgcgatgaagatcttatgcaatcgcctttttgctgcctgaaactgtttgaatctgagttgtacccggtatgtgccgccgacgcacaggggcaccctgtattcgatatcactcagccccaggttcctttgctcaactataccgccacatcttatatgggcaggttggtcaatcgtcatctggcagaggttggaggtattaccgggcgcacgatatttatctcttcgatgagcgagttattaaagaatatggcgctcaacggatacggcattgcctggttaccgatctggtcgatcgtcgatgaactacagaccaaacgtctgatatgccttgatgctgctaaattgacagtccccattcaggcttatatttaccgaatgaacacccgactgaatagaaccgccgagaacctctggcgtattttacagaaacatatgccagacgatttaatccagcagatatcaatggaagagccagcacgccgcaattga

SEQ ID NO: 13303 - DNA, 285 bp, Escherichia coli
atgcttgaagcccgagtcgctaagttagaagcgaatgttgaggatataaaaacaaatctcgcagagatgagagctgacattcgtgatttgcgaaacgctctctccgacacccgacgcgatgtcgctgttatccttcaaaaacaaatagatatagatgaaaagttgtcaaaaaaacctagcctaagtgaagtcaacagcgctatttcatcagccgtaaataaacagatcgcatggactgttgcaacaggcttggcgattttaggtctcgccaaatttatgttttga

SEQ ID NO: 13304 - DNA, 348 bp, Escherichia coli
atggctagtgagcagggattcgaaaagattaacatggatatgttggtctcttatttctcagaaaagaatatatatctaaaatgtacactatgtggacacgacagattgactgtgcctcaagtcagcgcgaatgtgggcatgccatgtactatgaaacttggtagttatgtgaatgtttttactgaaaaaagcatttattctgatactgctaaccagtattacttttcactaatatgcaacaattgtggaaatgaaattcatataaatgcgttttcagttttgaactgggtaaatgaaaagttcccagcaaaaacggaagatgaaaaaaatgccgacgccgcaaaataa

SEQ ID NO: 13305 - DNA, 723 bp, Escherichia coli
gtgagtaatcttctacctatggtagaagaacagaagtatccagatttcgccaagagactaaacgagttaatgacaaacaagggaatttctgtcacccaactcaaaagtcttgttggcgttacatatgaaatggcgcggcgatacacaatcggcgcagcgaagcctcgtgcctctgtcatgaataaacttgcgttggctctgggggtatcggcttcatatttagaatatggtgttggcgagagagaaggatgtaaggaaatggcaagcatccccaatccaacaaaacccgacgtatacaggatagaagttttagatcttagcgttagcgcaggacctggaacctatatgctttcagactatgttgatgtgctctacgccattgagttcacaacagaacatgcccgttctcttttcggtaaccgttctcaggatgatattaaggttatgactgtaaatggcgatagtatgtcccctactctcgtttccggagatcgactgtttgtcgacatttctgttcgtcacttccagactgatggaatttactctttcgtttacggtaagacttttcatgttaaacgtcttcaaatgcaaggtgacaagctagccgttctttcggataaccctgcctatgagaaatggtacatcgatgaaaaatcgcaggatcagctttatgtaatgggcaaggcgttgattcatgagtcaataaaatacaatcggttatag

SEQ ID NO: 13306 - DNA, 264 bp, Escherichia coli
atgtcatctcaaaactacaccgagaaagcagtaaaggctgcgggaaagtctttatctgaagtagctcgtcgctttggttttaaatctactcaatctgtcgctaattgggtaattaacaatcaagtcccgtcggaacgagttttacaactttgtgagctggggaactggtccgtaaccccccatgagctgcgtcctgatatttatccaaatccaaatgatggattaccagagtgctattcaaaagttagcggttcagttgcgtaa

SEQ ID NO: 13307 - DNA, 492 bp, Escherichia coli
atgaagccacgaaatattaataatagcctaccactgcaaccattagttcctgatcaggagaacaaaaataagaaaaatgaagagaaatacgtgaatccagttaaaattacgatgaggtctggtttaaattatattgaacaagaatctcttggaggaaaatatctaacacatgatttgtcaataaagatagcggatatttctgaagaaataattcagcaagcaatattatcggctatgagcatatataaatttccgataacagatgatttaatgagtatggctacaaatgaactcataaaactggccaaaatagagaataatctagacctgaataaattctctactatatgtaccgacgttctatcccccctcgtcaccagacataataaagaaaaaaaaccagacgacttactacccttcgcaaaaatcccttttttaattttcatcgaaaaaatggaaattgataatatgaatccaggtcatgcacattaa

SEQ ID NO: 13308 - DNA, 726 bp, Escherichia coli
atgaaaatactcaattcgaatctcataacaaacatatcatcaacaataagaaatcaccttctaacatcatccaaaaatataaaaacacacccatcaccaaacatggacgtaacaagtcatcgtcgtttattccagaaagacggaataggattgagccaaacaggaaaagcaacacaacttgtcattatgtcgcatggtggatggaaagagatctcccatccacaaacactattcacgcgtcaaaaaggcgatggatggactgtagtccccaaaaacctaagaattgatttttatacaaaagacaacgacttcacaaagggactaagcgttctttcagaggtaaacaaacgccatactgaagctcaaaaagggttaacaccatcactaaacataagcaaagatgacctaaaagttctagcgaacgcgcgcaatatacctcaatcaaaattagaagaagaaatgatgtcacaagccatatatagaaaagaatacgcaacaagtaatgagaagataaaaaactatgctctatattaccatgaacaagcccaaaatattatacaaagacatcaagatggcttaggaaacaaaaatattgatatagcatttataactgataaaaatcataagaagcacctttctgacatatttaaagtaataaatgaatcaggagtaaaatatgatgtaattcactttggcgcttgccgagtaaatagagaggagaaataa

SEQ ID NO: 13309 - DNA, 1251 bp, Escherichia coli
atgacaaagacaaaagcgtttaacattgataagtcactggtggtcagcgcgtacaggcgagtgaagaccagtgcaggcgcggcgggaattgataagcaatcgctggcggactttgataaacggttagttgataatctgtacaaaatctggaaccgactttcttcaggaagttatttcccaccggcagtgaaagcggtggcaattccgaagaaattgggtggagagagaattctgggtatcccgacagtcagcgatcgtatcgcgcagacggtggtaaaactggcctttgagccacaggttgagccacattttctggcagactcttacggctacagaccgaataaatcggcactggatgctataggggtaacgcgtaagcgttgctggtattacgactgggtactggaatttgacatcaaagggctgttcgataacatcccgcacgaactgataatgaaagccgtggacaaacacaatccggcccggtgggtaaaattgtatatacagcggtggctgacagcgccgatggtgatgtcagacggagaagtcagagcacgaacaatgggaacgccgcagggaggtgtcataagtccgttgctggcaaacctgttcatgcattatgtgtttgataaatggctggcaaaatattatccgaaagtgccgtggtatcgatatgctgatgatggcattttgcattgtcacagcgaagcagaagcgactgaaatgcgagaagtattacgcaaaagatttagcgaatgcggactggaaatgcatccggagaaaacgcgagttatctactgcaaagatggaagccggaagggtgattatgaacataccatgttcgactttctggggtacacattcaggcgacgcgtagtaaagaacgttaagcgaaacagtctgtttgtaagttttacccccgcagcgagcaaatcagcgctaaaggcaatgcgtcgggaaatcaaagcgacagggataaggaaaagagtggatttaagcattgagcagatagcgaaatggataaatccaaaactgaatggctggataaattattacgggcgatatacctgttcggaattatacagcgtgttcagatatatcaataaagcactggtgaggtgggggcgtaagaaatataaaatgctcagccgatacaagacaagagcctcaaaatttctggaagaaatggcgaagcgaagtccacagttgtttgcccactggcgtctgaagatgagaggcggacttgtttga

SEQ ID NO: 13310 - DNA, 1149 bp, Escherichia coli
atgaggcgcttcgcaggcgcatgtcgtttcgttttcaatcgcgctctggcacgtcagaatgagaatcatgaggccggtaataaatacatcccttacgggaaaatggcttcctggctggttgagtggaaaaacgccactgaaacgcaatggcttaaagattcgccctcacagccattgcaacagtcactgaaagaccttgagcgggcttacaaaaacttcttccagaatcgggctgcttttccccgattcaaaaagcggggacagaatgatgcattccgctacccgcagggcgttaaactcgatcaggaaaacagccgtatttttctgccgaaacttggctggatgcgctaccggaatagccgtcaggtcacgggtgttgtgaaaaatgtcactgtcagccagtcctgcggtaagtggtacatcagtattcagactgaaaatgaagtatcaactccggttcacccttcagcatcaatggtcgggctggatgctggcgtggctaaactcgccacgctgtcagatggcacagtctttgagcctgtaaacagttttcagaaaaaccagaagaagctggcgagacttcagcgacagttaagccgcagggtcaaattcagcaacaactggcagaagcagaaacgcaaaatacagcgactgcattcccgtatcgcaaatatccgcagggactaccttcacaaagtcacaacgaccgtcagcaaaaaccacgcaatgatagtcattgaggatttgaaggtcagcaacatgtcaaagtcagcagcgggtacgctcagccagccggggcgcaatgtccgggcaaaatcaggtttaaaccgttcgatactggatcagggctggtatgaaatgcgccgccagcttgagtacaagcagctctggagtggcggtcagttgcttgctgttccgccagcgtacacaagccagcgttgcgcgtgctgtggtcatactgcgaaagaaaatcgcctgtcacaaagtcaattcagatgccaggtatgtggatatacagcgaacgccgatgtaaatggcgctcgtaacattttagcggcggggcacgccgttcttgcctgtggagagatggtgcagtcaggccgctcgttgaagcaggaacccaccgaaatgattcaggcgacagcctga

SEQ ID NO: 13311 - DNA, 462 bp, Escherichia coli
atgaatcatataacgaataaacaagtgatgagtgtcctgttgcaaaatggatggcactatggcagaaaagaaaacatagataaatatataaagtgtttatccattaagaaatattttgttaatgaaattatttgtgattttttatcagagtttggagggttgatagtacggcatgaatcttattcagatcctaatgagtatgataaatccgattttgatccaataaaagctgctggttggatagactctaaatggataactgaagtctatgaaccattggtcaataagcgtttatgtcctgttggtgttggtttttctgagcatatgacatattttatttcagatgatggtgctctttatggtggttttgataactatttttgtattataggcggtaatattaatgacgctatgctacatttatttttcgaacacgaaaaaataaaaaccttgtcaagttaa

SEQ ID NO: 13312 - DNA, 201 bp, Escherichia coli
atgactgattcgctggggcataccaccattatccgcttcagtgaagaccggcttccggtgtgtgaaattgacccggagggcggcgcgacgtttttcctctatgacgaattcgggcagacggtcagtatcacctcccagggaaagatcatcagaagtacactttttgtactaaataattcgcattttatgtttacaaattga

SEQ ID NO: 13313 - DNA, 537 bp, Escherichia coli
gtgatcgctgagatatttcagggaggctttgtagtcttccagcaacagttcagcaaagtccatttcgaagccgcgacgacacataatgcgcatcaccacgatgtcggtggcttcaccgccgagagtgaaggccggaacctgccagccgcgcaggcgcagacgttcagagaggtcgtagagggtgtatcccgggtcttcaccctctttcagtttgaagcaaaccgccgggatgccttcgtccgggcgaccggtacagatgaactcatacggccccagtttggcgatttcatccgcgagataagcggcaacctggtaagaggcgttctgtactttggtatagccttcacgaccgaggcgcaggaattcatagtactgtgcaattacctgacccgccgggcgggagaagttgatggcgaaagtcccaatctgaccaccgaggtagtcaacgttgaacaccagttcctgcggcagcgcttcttcatcacgccagataacccagccgcagcccagcggagccagaccgaatttatggcctga

SEQ ID NO: 13314 - DNA, 519 bp, Escherichia coli
atgccaaccccatgttacatttcaattacaggtcagacccaggggaacatcactgccggtgctttcaccgcagattctgtcggcaatatctacgtgcagggacgcgaagatgaaatgctggtgcaggagtttctgcataacgttactgttccaaccgatccacagtctggtcaaccttccgggcagcgcgcgcacaaaccgttcattttcaccgtggcgctgaacaaagccgttccgctgctgtacaacgcgctggcctccggtgaaatgctgccgaaagtggagctgcactggtggcgtacttcagttgaaggcaagcaggagcactacttcaccacacgtcttactgacgcgacgattgtggacatgaacctgcacatgccgcactaccaggaccctgcacagcgtgagtttacgcaattgctcgcagtatcactggcataccgtaaggttgagtgggagcacatcaaatccggtacttctggtgccgatgactggcgtgcaccgctggaagcataa

SEQ ID NO: 13315 - DNA, 618 bp, Escherichia coli
atggttgcagtgactgtactgatccccgccgtctggctggtgacagagatctccaccgtgccgtccggctgcgtggtgaccgtcggagcagtcgtggcaccgttgcctgccatcacgctgaccgtctgtccggcaagcgcattaccgaacgcatcggtcaccctcgcccgcagcgtgttcgccattgcgccgtcagccacggcgttatcctgcgtcacctccagactcgcgatctgcgccgtcctgacatcggcgataaacgtcacatcccggctctggctgctgttgttgatgctggcggtgactgtactggttcctgccgtctggctggtgacagagatctccaccgtgccgtccggctctgtaatcaccgtcggggcaaccgttgcgccgttgcctgccatcacgctgaccgtctgtccggcaagtgcattcccgaacgcatcggtcaccttcacctgcagcgtgttcgccgtcgaaccgtctgcctctgaaccatccttaatgaccaccagatcagcgatcttcgccgtgctgacatcggcgacaaacgtcacgttctggctcaggctgctgttgttgatgctggcagtgactgtactggttccggcggtctga

SEQ ID NO: 13316 - DNA, 279 bp, Escherichia coli
atgcagataaaccagatgcacattcccatgttaaaaaaacgtggaataataaaagatgaacgagatttgttagataacccctgtctgaacattaaaatagggaccgagattttatataatcatttttcacgttgtggggtaacgtggcaatgtctggggacttataacgcgggttttgcaatggaaaaccaaaaaaagaggctgcaatatgcaaaaaaaatatatgttgtatataccagacttaatgaaatagacaaacgtaaggctttagcaaaatga

SEQ ID NO: 13317 - DNA, 633 bp, Escherichia coli
atgggaaagattaaaattgtagtttcagatcagcagccgtttatgattgatgggataattggatttctcggacattatcccgatttatatgaggttgttgggggctataaagatctgaagaaagctatagcggagtgtaacaaatctgcagcccaaatatttattttaggagaatttgcaggtggaatgatggggtccgaactcattaaatgggttaaatcgcataaaatagatgctcatattattacatttgtagcaaaaatgccgtatattgattcaataaaattgcttgaagccggtgcaaaaggatgcgtatggaaaaccagtcacccggcgaaactaaatcgcgctattgattcgattagtaatggttacacttattttgatagtgtacacatggattgtgaaaaaatatcttcaagatattcctctgttaatcaacttacaaatcgtgagtctgaaatactacaactcatagctgatggaaaaacaaacaaagaaatcgctaatttcttgcagttaagcaggaaaacagtcgaaacacatagactcaatatcatgaagaaattagatgttcacagtggtatcgagttgatcaaaacagctttacgtatgggcgtttgcactatataa

SEQ ID NO: 13318 - DNA, 474 bp, Escherichia coli; identical to SEQ ID NO: 8364

SEQ ID NO: 13319 - DNA, 378 bp, Escherichia coli
gtgtcagacacactccccgggacaacgcctcccgacgacaatcacgaccgcctctggtggggactgccctgcaccgtgacgccctgtttcggggcacgtctggtgcagaagggtaaccggttgcattaccttgcccaccgcgccggtatcagaggccggttcagcgatgcagatgcataccacctggaccaggcctttccgctgctgatgaaacaactggagctcatgctcaccagtggtgaactgaatccccggcatcagcataccgtcacgctgtatgcgaaagggctgacctgcgaagccgacaccctcggctcctgtggttacgtttatctggctgtttatccgacaccggcagcgcccgcaaccaccgtataa

SEQ ID NO: 13320 - DNA, 222 bp, Escherichia coli
atgaaaatcatcacccgtggtgaagccatgcgtattcaccgtcagcatcctgcatcccgtctttttccgttctgtaccggtaaataccgctggcacggtagcacggatacatataccggccgtgaagtgcaggatattcccggtgtactggctgtgtttgcagaacgccgtaaggacagttttggtccgtatgtccggctgatgagcgtcaccctgaactga

SEQ ID NO: 13321 - DNA, 573 bp, Escherichia coli; identical to SEQ ID NO: 5894

SEQ ID NO: 13322 - DNA, 357 bp, Escherichia coli
atgcgtgctgacgccgcgctccagatcgatcgcatctacaccaagaaacagcatatcgaagtggtaattttgcagcgattgctcagcctgatcgccgtaaaaagattgcgactgacggcgcaaatgcccgccggtcatcagcagctcaacgccttccgcttccagcaacgcattagccacgttcataccgttggtcatcgcaattacgtcagtgtgcttgcgcatcagacgagcaatctcaaaagtggtggtcccggaatcgaggagcacccgatgacctggctgaatcaactcaacggcagctttcgcaacgctgcgtttcatcgcggtgttcagtgcgcttttgtcttccactga

SEQ ID NO: 13323 - DNA, 378 bp, Escherichia coli
gtgtcagacacactccccgggacaacgcctcccgacgacaatcacgaccgcctctggtggggactgccctgcaccgtgacgccctgtttcggggcacgtctggtgcagaagggtaaccggttgcattaccttgccgaccgcgccggtatcagaggccggttcagcgatgcagatgcataccatctggaccaggcttttccactgctgatgaaacaactggaactcatgctcaccagcggtgaactgaatccccggcatcagcataccgtcacgctgtatgcgaaagggctgacctgcgaagccgacaccctcggctcctgtggttacgtttatctggctgtttatccgacaccggcagcgcccgcaaccaccgtataa

SEQ ID NO: 13324 - DNA, 222 bp, Escherichia coli; identical to SEQ ID NO: 8360

SEQ ID NO: 13325 - DNA, 327 bp, Escherichia coli
atgctggcagtgaccgcactgattccggcggtctggctggtgacagagatctccaccgtgccgtccggctctgtaatcaccgtcggggcaaccgttgcaccgttgcctgccgtcacgctgaccgtctgcccggcaagcgtattaccgaacgcatcggtcaccctcaccagcagcgtgttcgccgtcgaaccgtctgccactgagttatcctgcgtcacttccagcaccgcaatctgcgccgtgctgacatcggcaataaacttcacgctctggctctggctgctgctgttgatgctggcggtgactgtactggtacccgccgtctga

SEQ ID NO: 13326 - DNA, 381 bp, Escherichia coli
gtgcttggtgcctgtcagaaactccaggaggctgttggcttaccgaatctggcaccgcgctatgccattgatgctcctgctgacgcgcctgatggctcaagtcgccccacgctgtcgctgagtgcactgctgaaacagtatggtatccgcctgacggctaatcaggcatatcaccagatggtgaagctggggatcgtcgagcagcgcgaacgatacagccgtaccgcgattaacaacatcaaaaaattctggtcgctgacagcgaaaggctgcatgttcggcaagaacatcaccagtcccgcaaatccgcgcgagacgcagccgcatttcttcgaatcccggttccctgagctgttaaagctgctcgataccgttcattga

SEQ ID NO: 13327 - DNA, 381 bp, Escherichia coli
gtgcttggtgcctgtcagaaactccaggaggctgttggcttaccgaatttggcaccgcgctatgccattgatgctcctgctgacgcgcctgatggctcaagccgccccacgctgtcactgagtgcactgctgaagcagtatggtatccgcctgacagctaatcaggcatatcaccagatggcgaagctggggatcgttgaacaacgtgaacgatacagccgcactgcgattaacaacatcaaaaaattctggtcgctgacggcgaaaggctgcatgttcggcaagaacatcaccagtcctgcaaatccgcgcgagacgcagccgcatttcttcgaatcccgattccctgagctgttaaagctgctcgataccgttcattga

SEQ ID NO: 13328 - DNA, 375 bp, Escherichia coli
atgattttacaacgtgctggtggcactcacttcattgctgacgctgtggcgcagtctgcaaatggcgtctttgtgtctcttcctgacgtcgaggatgtggacaatgccgatattaaccagcgtttactggaagtcattgaacagatcggcagttattcaaaacagattcgttcggcaatcgaagacggtgtagtggaaccgcatgagaagacagcaattaacgacgagctgtacctctcaatttcgaagctgcaggagcatgcagcacttgtctacaaaattttttgcgtttcagaaagtaatgacgcccgcgagtgtgcagctccgggcgtcgtggcgtcgattgcttctggttgtggagaaactaacgcatga

SEQ ID NO: 13329 - DNA, 369 bp, Escherichia coli
atggttttacagcgcgcagctggcactcactacattgcggatgctgtcgcacagtctgctggtggggtgttcgtatcgcttcctgaaattgaggaagtagagaacgccgatataaaccagcgcctgctggaagtcatcgaacagatcgggagttactcaaagcagattcgttcggcaatcgaagatggggtagtggagccacacgagcagacagcaattaatgatgagttgtatctgtcaatttcgaagctccaggagcatgcagcactggtctacaaaatcttttgcgctccagaaaagagtgacgcccgcgagtgtgcagctccgggcgtcgtggcgttttgtgtctgtggagaaactaacgcatga

SEQ ID NO: 13330 - DNA, 216 bp, Escherichia coli
atggagatcatcaataacgtgagagaaaaccgccaggtgaccgtccctgctgaactgctggcgtccctgattcagaccgccgaacaggcactgtggaaacgtgagtgggccgcccgtgataacggcctcgccgtcccggaatgcgtcacccgccgacaggcggtggttaatcaggcccgcgccctgctgaaaaacaacacacgcgaaaacgactga

SEQ ID NO: 13331 - DNA, 216 bp, Escherichia coli
atggagatcatcaataacgtgagagaaaaccgccaggtaaccgtccctgctgaactgctggcgtccctgattcagaccgctgaacaggcattgtggaaacgtgaatgggccgcccgggatcatggcctcgccgtcccggaatgcgtcacccgccgtcaggcggtggttaatcaggtccgcatcctgctgaaaaacaacacacacgaaaacgactga

SEQ ID NO: 13332 - DNA, 249 bp, Escherichia coli
atggagcataaccttgggctgacctgcgatccggttgccggacaggtacaaatcccgtgcattgaacgtaatgccattaatgccgtgaaagcagtaaacgccgcgcggatggcgatgcgccgcacctcggcaccgcgtgtttcactcgataaagtgatcgagacgatgtatgaaaccggcaaagatatgaacgataaataccgcgaaacatcacgcggaggactggctattaaagtggtctgcggctga

SEQ ID NO: 13333 - DNA, 222 bp, Escherichia coli
atgaaaatcatcacccgtggtgaagccatgcgtattcaccgtcagcatcctgcatcccgtctttttccgttctgtaccggtaaataccgctggcacggcagtgctgaagcgtataccggtcgtgaagtgcaggatattccctgtgtgctggccgtgtttgcagaacgccggaaggacagttttggtccgtatgtccggctgatgagcgtcaccctgaactga

SEQ ID NO: 13334 - DNA, 369 bp, Escherichia coli
gtgtcagacacactccccgggacaacgcttcccgacgacaataacgaccgtacctggtggggactgccctgcaccgtgacgccctgttttggtgcccgtctggtacaggaaggcaaccggttgcattaccttgccgaccgcgccggtatcagagggcggttcagcgacgcggattcgtaccacctggaccaggcctttccgctgctgatgaaacaactggaactcatgctcaccagcggtgaactgaatccccgccatcagcataccgtcacgctgtatgcaaaagggctgacctgcgaagccgacaccctcggcagttgtggctacgtttatatggctgtttatccgacgcccgaaacgaaaaagtaa

SEQ ID NO: 13335 - DNA, 1746 bp, Escherichia coli
gtggaactgcaagcaaatgctcgaaccttaacaaacgtgttatctgtaaataaaaaatatatagtccctagattccaaagagaatattcttgggggaaggaacaagtaagtgaactttggcatgatatagtttccaatattcattaccaggaggatgggcagtatcaatatgatgagtatttcatcggtgctctcgttttggtcgggcaggaaactagctctgagctgatgattgtagatggtcaacaacgtcttacgactcttactatattgttatcagcattatgtgataaatttaagttgataaatgagttggctgtagctcaatcaatatataataattatatatctggtatggatgacgatggcagacctttttttaaattagttaatgaaactcctaagccatactttcaaaacaacattcagcatattgataagagaaatgaagggccggagtcccttgaagaaagaaacttgcaatcttcatataatgatttaactgagtatctttcagaagataatctttgccagacattaggagtagatagagagaaatttatctacttggaagcgttgaaggctgtgcgggatcaagttctacggtatctgaaagtgatttatattacagttaatgatgaagatgaagcttatacaatctttgaaactctgaatgctaggggattaaacttaagttatgtagatcttataaaaaacaaattatttaagaaactgaatggcacacatcctgatgatgatgcaaaaactaaatggaataaaattaggcaaataattgctagtcgtaatggtgtcggttctatcgagacatttatccgtcattggtgggtgtcaaaatattcttatgtaagtagtgacactctttataaagcttttctggataagtggaaaaaaggcgacattgatgcttcagcgttcattgatgagctactttcagatgccgagatatatgtgaaaatatcatcgcctacagaacaggattttcctgaactggaaatgaaaccagtttatcgaggtttgcaggcattaaggctgtttaacatatctcagaacaaaccatttttgttatctttatttaaggcaagagcaagaggaacgctaaaacttgttgatatgaataatgcagtgctgtcaattgaacgctttcattttatgtttaatgctatttgttcattgcgaccatcaggtattgaaagtgcgtatgctaaagctgctagggctttagtggatgaaggttctactaaagctagtaatagacaagtaataaagtctttgcttgaaatgttggtgaagagaaaaccagacattaatatgtttgttgaaaagtttgttatgcttaaattttcaaatcaagagttgaaaaataaaaggttgattcagtacatttttaatagacttgagttacatcacatgaaaacgggggagtatatgcctgattcattaacattagagcatattcagcctcagagtgtgggggattctgaagtatatagcatgataggaaatttattaccactttcaaaagaattaaatgaaaaagctggaaataagtctgttgtggataagcttgaaatttataaacaatcacaatatgcgctagttaaaatttttattgatgaatttgaaaataaatatcaaggagaatggacgcccgatcatatgagatcaagagctgctgaactaagtattttatcgtataattcagtatggaaattggggcgtgagtaa

SEQ ID NO: 13336 - DNA, 4479 bp, Escherichia coli
atgacttacagtgaaagcgatattgccattgttggcatgaactgccggtaccccggcgtgcacagcgttgcggcattcgaaacggtgcttcgcaccggatgcaacattttggaccccaaagtgaccccgagcaacggccacaatcacattacgctgaacaacgtctatgagcacatggcggagttcgatgccaacttttttggctacagccgtgcagaagcagaaatcatggatccacagcagcgcgtatttctgacctgtgcttgggagatgtttgaacaaagcggttacaacccgaagcagcacgatgcgcgcgtcggcctatatgcgggcgtgagtaccagcttctatttgcttactcacctgatgaacaacccagacaagcttgcacaactcggtggtctccaaatcatggtcggcaatgacaaagatcatttgacgtcccaactggcttaccgcctgaatattaccggcccttgcgtgacggttcaggccagttgtgccacctcgctggtggcagtgcatctggcctgcgaagggctgctgagcggtcagtgcgatatggcgctagcgggtggcgtcacgtttcgcatggaggagcagcgcagctatgaatcgcacggtgatgggctgcaagcagaggatggcctgattcatacttttgatgcgcaggcgagcggtacggtctacagcagtggtttgggcatggtgctgctcaaacgggctacagacgcgcaggtgcaaggggataacatccttgccgtcatcaagggaagcgccatcaacaatgatggcggtgcgcgcagtggttataccgtgccgggtgttgatggtcaggaagctgtgatgattgaggcgcatagcttggcggaggtgacgccgcagcaaattcagtatctagaactgcatggcagcggcacgccgttgggtgacgctatcgaattcgcggccatcaaacgtgtgtttgggacgccagcgccgaatgcgacaccgtggcgtctgggggctgtgaaacctaacgtgggtcacgtagaaatggcatctggcatcaccagtctcataaaaacggtgctgagtcttactaaccgggtgttttaccctacgctgaattttcaacgggctaatccgcaactggggttggaggacagcccgtttgaagtggtgtcccgtttaacgccttggccggagggcaccacgccacgcaccgctggtgtgagtgcgttcggattgggcggcaccaacgcacatctggtggtacaagcgccgttatcgacgccgcaggcgagggcgcagcagatggggccttgtgtcgttgtactctcggcaaaaaaccacaatgccctggaacagatgcaaaacgccctgctggcgaaactggccgcacatccagagatacgcttacaggacgtggcttacaccctgcgtcacgggcgtttctccgccccggtacgtaagtgtgtcatcgcagagaattgcacccagctagcccgacaactccgcgacgcaccgatggtggaggcaaccacgggttgcacgatctactggagattggggcaccgtttcgttgttgcactcgagacgcttagtgactggctggcgtgctctgaggtgttgtcacaggcggtgggacaactgctcgagcattttccgctcgaaccagcctgtctgcaagatctctcccctgcgcaacggacgtttatcagccagtatgcgctgatcgcgttgattgacgaacgggaaacgttgaatgtggtgctatgcggcgacggtgatggtggctatgctgccgccgtactacgaggagactgcacactagagcaagcatggcacaggttgaatgcgggccaaccgtttgatgatgtgccgacgaatcccctcttgcagcccgatgtctgctctttgatgctggacgacgcggcgagtgatgccaatcgcaccgcgctagaggcgttagggcagttatggttggctggcgtcagcctagattggcgctgggtggatgcggcggagcgtatgttgggcagtcaacgcatcgccctgccggggaccgtttttacaccgcagcgctattgggtcgaggccgtacggcctgccacgttctcccacgaatcgtcgaataatctcttatcccgcgcaacaaaatccgatattattgcagtggtgacggagatatgggaacgcacgcttggtgtcagcattgatgatcaccacgccagcttcttcgaactgggtgggcattcgctgttagcgtcaaccattttatatgatattcagcaacgttacggcatcacctgtacgctaagcgcattctttgccgatcccaccatcgagggattaagttgctatctgctcgaacaaggcggcagtgagacagcggtttcagcattgcctgatacggtctttgcccctgaccagcagcacctaccttttccgctgactgacgtgcaacaggcctattgggttgggcggcgaaaatccttgggattgggcaatatttccacccatatctatgtggaatatgaactacaggggctagatgaaacagcgttcaaccgcgcgctcaatgcggtgattgcgcggcacagcatgttgcgtgcaattgtcaacgatgacggtatgcagcagatattgccaaacgtgccggaataccacgttgccttctataccacccagtgcgaggatgcgtttcaacagcgttgccgtgagctgcgtgacaccctctcacatcagatgattgattgtagtcgctggcctctgtttcagatggaggtcgtggttgatccgcagcaaaaagcccggctacatgtatctatcgacctgctgatagccgatgcatggagtctggagttgttcattcgggaactagcttatcactaccgccatccgcaggcggcattgcctacattgacgtacagtttccgcgactatgtgctgaccttaaaatcctacgagaaaacgccgcagtttgaacgggcacgtgactactggcgcgcccgcatcgaaactctgccgccggggccacgattgccgctgcgtaccgaccccacgaagctggaaaaccccacattcgtgcgccgtagctattgtctatctcgtgctatctggcagcgcttgaaaacgcaggcgggtcagatgagtatcacgcctactacactgctgctcacggggtttgctcaggtgttggcgcgctttagttcctcgccgcactttagccttaacctgacgctgtttaatcgtctgccgttgcacgcagatatcaatcacttaattggcgattttactgcactgacgttgctggagattgatatgtcgcagggagaaaccttgcaggcgcgggcaaacgtgatccactctcaactgtggcgcgatttggataaccgcttgtttggcggtatccaggtctctcgactgctggtacaaactcaccgcgatccggcgaaatcggtgattcctatcgtgttcaccagcttgctcaatcaatatgaggcgagctgggaaacggatgatacgctgttcaaccaaccgcaggatgatctgtacagtatttcacagacaccgcaggtgtggctcgatcatcaggtaatggagcgtaacggggaattgcactttaattgggacgtggtggaacaattgtttgaaccggcgctaatggatcagatgttccagtgttattgccaactcctgcacgccctagcccagcgaccacagctctggcatgagactcaagatgtgctggcgctgcccaccgttagtgcaccggtcacgcaggctcctgcacctacggccttgttgcaccatgggttactgcgtcaggcagcactgacgccacaggaaactgcgctgatcagtcctatccgtgaattgacctatcgccaactgtcgacggcggcggatcatgtggcccgcgccctgttagcgctgggcgtgcagcatggcgaccgcgtggcggtggtgatggaaaaaggctggcagcagattgccgccgtacacggcattttacgactgggtgcggtctatctgccagtggatccggtgctaccgccacagcgtcgccagcttttgctgacggtgggcgaggtgcgggtacaagtaacgcagccgggtctcacgcaattggagccgtcgctgcccgtgctgatcatcgacgacggaatgctggacacgcctgctgcgccgttgcctgaagtggctggggatgtcacggatctggcctatatcattttcacttccggctccaccggtaccccgaaaggagtgatgatcgaccaccgtgcggccatgaacacgctggaagacatcaacgaacgctttggcctcaatgcgcaggatagggtgttcgggctgtcatcattgagctttgacctgtcggtttacgatgcctttgcgcttttatggtgggtgcagcgctggtactgccggaagcaggacgggaaaaagatccgcgtcattggcagacagttatggcacacggtcatgtaa

SEQ ID NO: 13337 - DNA, 600 bp, Escherichia coli; identical to SEQ ID NO: 9274

SEQ ID NO: 13338 - DNA, 3693 bp, Escherichia coli
atgggaaaaggtggcggtaaggcacacacgcctcgtgaggcgaaggataatctcaaatccacgcagatgatgagtgtgattgatgcgattggtgagggaccgatagaaggtccggtgaagggactgcagagtattctggtgaacaaaaccccgctgacggacacggacggcaatcccgtgatacacggtgtgacggcggtctggcgtgccggggagcaggagcagacaccaccggaaggctttgagtcctccggagctgaaaccggactgggtgtggaagtgacgaaggcaaagccggtgacgcgcaccattacgtccgcgaacattgaccgcctgcgggttaccttcggggtgcagtcactggtgcagaccacgtcaaagggcgaccgtaacccggcatccgtccgcctgctgattcagttacagcgtaatggccgctgggtgacggaaaaggatgtcaccattaacggcaagaccacctcgcagttcctggcctcggtgattctggataatctgccgccccggccctttaacatccggatggtccgggagacggcggacagcaccacggaccagttgcagaacagaacgctctggtcatcgtacactgaaatcatcgatgtgaaacagtgctacccgaacacggccattgtggggctgcaggtggatgcggagcagttcggcggccagcagatgacggtgaactaccatatccgcggtcgcatcattcaggtgccgtcaaactatgacccggaaaaacgcacgtacagtggtatctgggacggcagtctgaaaccggcatacagcaacaatccggcctggtgtctgtgggacatgctgactcacccgcgctacggcatgggaaaacgtctgggggcggcggatgtggacaagtgggcgctgtatgccatcgggcagtactgcgaccagacggtcccggatggtttcggggggaccgagccgcggatgacctttaatgcgtacctggcacaacagcgtaaggcgtgggacgttctcagtgatttctgctctgcgatgcgctgtatgccggtatggaacggtcagacgctgacgttcgttcaggaccgcccgtcggatgtggtgtggccgtacaccaacagcgatgtggtggtggatgataacggcgtgggattccgctacagcttcagtgccctgaaggaccggcacacggcggtggaggtgaattacaccgacccgcagaacggctggcagacatccacggaactggtggaagacccggaagccatactgcgctacggacgcaacctgctgaagatggacgcgttcggctgtaccagccgcggtcaggcccaccgtgccgggctgtgggtgataaagaccgaactgctggaaacgcagacggtggatttcacgctcgggtctcaggggctgcggcacacacccggtgacatcattgaaatctgtgataacgactatgccgggaccctgaccggcggacgtgtcctgtccattgatgctgccacccgcaccctgacgctggaccgtgaagtgacactgccggagaccggtgccgccacggtgaacctgattaacggcagtggtaagccggtgagtgtggacatcaccgaacaccccgcgccggaccggatacaggtcagtaccctgcctgatggtgtggagacatacggggtgtggggactctccctgccgtcactgcgccgtcgcctgttccgctgtgtctccgtccgggaaaacacggacggcacctttgccatcacggcggtgcagcacgtaccggaaaaagaagccatcgtggataacggtgcccgctttgagccgcagtcaggttccctgaacagcgtcatcccaccggcagtgcagcacctgacggtggaggtgagcgcagctgacggccagtatctggcgcaggcgaaatgggacacgccgcgggtggtgaagggtgtgcgcttcagtctgcgcctgaccagtggtaagggagcggatgccagactggtgaccaccgccatcactgccgatacggagcaccgtttcagtggcctgccactgggggaatacaccctgacggtcagggcgattaacagttatggccagcagggcgaaccggccaccaccaccttccggattaacgcgccagcaaaacccgccaccattgaactgacgccggggtattttcagataacggcggtcccgcgtcttgcggtgtatgacccgacggtacagtttgaattctggttctcagaaaaacgcatcacgaacacagcacaggtggaaaaatctgcccgttatctggggaccggcagtcagtggactgtccaggggagccggattaagccggggacggatttctggttttacgtgcgaagcgtcaacctggtgggaaaatctgcttttgtggaagccagcgggcagcccagcaatgatggtgaagggtatctggaaattttccgggggctgatagatgagacgcttctgggccaggcactgaaagagcgcattgatgcttcagcgctgcgtacggaggtcacgcaactggaagaagatatccgtcagcggatggacacggatatcgcagaagtgacccggaaaatcgggaaggcggaaaacagcctcacgcagctggttgcgaaaaagaatgaggaccagacactggccatcgcgcaggtgagccagaaagtggaccgggtgagcagtgaaatctcacagactgtcagccaggggcagtcagaaaacgcccgacagatagcacaggtccgccagtacgtggataaaaaagggagtgaaattacctcgaccacggataaaaagctgggtgaccaggccgtgaccatacagcaaatccagcgggttcagtcagacacgcgcaatgagctgaatgccatgtatatgctgaaggtgcagaaaacaaaaaacggtattccctatgtggccgggattggcgcggggattgaggatgttgatggtcagaccctgagtaacattctgctgcaggccgatcgcattgcgatgattaccccggagaacggcaacaccacgccgctgtttgtggcgcaggggaatcagctgttcatgaacgacgtgttcctgaagcgactgtttgcggtgagcatcacgtcatccggcaatcctccgacgttttccctgacgccggatggcaggctgacagcccgcaatgcggatatcagtggagccatcacggcgaataccggcacgctcaataatgtcaccattaacgagaactgtgtcatcagagggaaactgtctgcaaaccagattgaaggcgatctcgttaaaacagtgggtaaggctttccctcgtgactcccgtgcaccgaagcgttggccatcaggaaccattaccgtcagggtttatgacgatcagccgtttaaccggcagattgttattccggcggtggctttcagcggtgccagacatgagcgggagaacagcgatacttattcgtcatgccgcctgatagtgaagaaaaacggtgctgaaatttataaccgtaccgcgctggataatacgctggtttacagtggtgttattgatatgcctgctggtcgcggtcacatgacgctggagttttctgtatcagcatggtgggtaaatggctggtatcccacagcaagtatcagcgatttgctggttgttgtgatgaagaaagccactgcaggcatcacgattagctga

SEQ ID NO: 13339 - DNA, 276 bp, Escherichia coli
atgtcgactgaaaatgatgaaatcattaactccctgatacgccagattaataattttgataaagcattgcagcatgctgcggcgcgtagtgatataactcttttagcaatttcatttcttgcatctgttatggataaaaatgaagtcgtacgacagagtcttgttgattatatcgactcgcttcaacccggcactttcaatcatgagagcttcaatcatgagaaagagcatgttaagtctgtaattaattctcttattttgaatcaaaagaattaa

SEQ ID NO: 13340 - DNA, 240 bp, Escherichia coli
atgcagaaacgagaacccgtcatcatcgcgccagactataccgatgatgaactttatgagtggatgcgccagaaaattaatgcagtgcaggatctgaaatgggccaatgaagccaggactaagcaggctgaaaatctgtccgctctggagcaggatatcaccaggctggaaaaaagcagcggcattaagcattgccagaatggttacatacccacgttaatagctaaccaacgaggctaa

SEQ ID NO: 13341 - DNA, 771 bp, Escherichia coli; identical to SEQ ID NO: 9299

SEQ ID NO: 13342 - DNA, 297 bp, Escherichia coli; identical to SEQ ID NO: 8064

SEQ ID NO: 13343 - DNA, 462 bp, Escherichia coli
atggatgatccaagaaattcactttttatgcattataaatctctcttaaatgagataaaaccaaacggttttatttttgaaaatgttgctggtttgttgaatatggaaaaaggtaaggtctttgaaagagtcaaagaagaattctcatcaaccatgaaaactatgaatggatggatattaaactctgaacattatgcaatccctcagcgccgaaaaagggttatattggttggttcaaacgaccctttattttcaattgaacctccacaaaaattaacagaagataaggaatcttgggtatctgtaaaggatgcattatctgatctgcctcctttgcaacatggtgaagatggaagtggtaaatattatatccatcaccccgaaaatgactatcaattattcatgagaggtaatattactccttcagaatattatgaaaggaatataaagccctctttataa

SEQ ID NO: 13344 - DNA, 192 bp, Escherichia coli; identical to SEQ ID NO: 8188

SEQ ID NO: 13345 - DNA, 1929 bp, Escherichia coli
atgatttcagacgcacagaaggcagctaatgcagccggtgcgatagctacagggcttttatctctcattattcctgttccactgacgacagttcagtgggccaataaacattattaccttcctaaagagtcgtcttataccccggggcggtgggaaacactgccgtttcaggttggcatcatgaactgtatgggcaacgatttgattcgcactgttaacctgattaaatctgcccgtgttggttatacaaagatgttgctgggagtggaggcttattttattgagcataaatcacgcaacagccttctttttcagcccacggactcagctgctgaagattttatgaaatctcatgttgagccaacgataagggatgttcctgcattgctggagctggctccatggttcggaagaaaacaccgcgataatacgctcaccctgaagcgtttttcctccggtgtggggttctggtgtctgggtggtgcggcagcaaaaaactaccgtgaaaaatccgtggatgtggtctgttatgacgagctttcctcgttcgaaccggatgttgaaaaagagggttcgccaaccctgctgggggataaacgtattgagggctctgtatggccaaaatccattcgcggctcgacgcctaaaatcaaaggctcctgccagatcgaaaaagccgctaacgagtcggcacacttcatgcgtttttatgtgccctgtccgcactgtggggaggagcagtatctgaaatttggcgatgatgcctcgcctttcggtcttaagtgggagaagaataagccagaaagtgttttctacctttgtgagcatcatggctgtgtgatccatcagtctgagcttgaccagagtaacgggcggtggatctgtgaaaacacgggcatgtggactcgtgacggtctgacatttttcagcgccgcggataatgaaattccgccgccgcgctccatcacattccatatctggacggcgtacagtccgttcaccacctgggtacagattgtctatgactggctggatgcactgaaagatcccaacggcctgaaaacctttgtgaacaccacgctgggcgagacctgggaagaggccgtgggcgaaaaactcgatcaccaggtgctgatggataaggttgtgcgttacacggctgcggtgccttcccgggtggtttatctgacggcgggcattgactcgcagcgaaaccgttttgagatgtatgtctggggatgggctccgggagaggaagcctttctggtggataaaatcatcattatggggcgtcccgatgaggaagagacgctgttacgtgtggatgtggcgatcaacaaaaaataccgccatgcagacggaaccgaaatgaccatttcccgtgtctgctgggacaccggggggatcgatggcgaaattgtctatcagaggtcaaaaaaacacggtgttttccgggtgctgccggtaaaaggtgcatctgtctatggcaagccggtgatcaccatgccaaaaacccgcaatcagcggggcgtgtatctgtgcgaagtggggacggacaccgcaaaagaaattctctatgcccgtatgaaagccgatcccacgcctgcggatgaagccacgtcgtatgccatccgttttcctgatgatccggagattttttcgcagacagaggcgcagcaactggtggcggaagagcttgtggagaagtgggaaaaaggaaagatgcgtctgctgtgggataacaaaaagcggcgtaacgaagcgctggactgcctggtgtatgcctacgcggcattacgtgtgtccgtgcaacgctggcagcttgatctggctgtactggcaaaatcccgggaagaagagacgacccggccaacccttaaagaactggcagcgaagctgtccggaggagtgaatggttacagtcgctga

SEQ ID NO: 13346 - DNA, 207 bp, Escherichia coli; identical to SEQ ID NO: 12856

SEQ ID NO: 13347 - DNA, 306 bp, Escherichia coli
atgcagatgcgtcagcgtgatgttgctgcgctcgatgcaaaatacacgaaggagttagctgatgcgaaagctgaaaatgatgctctgcgtgatgatgttgccgctggtcgtcgtcggttgcacatcaaagcagtctgtcagtcagtgcgtgaagccaccaccgcctccggcgtggataatgcagcctccccccgactggcagacaccgctgaacgggattatttcaccctcagagcgcgactgataataatgcaaaaacaacttgaaggggcacagctatacattcgagagcaatgcctcagataa

SEQ ID NO: 13348 - DNA, 819 bp, Escherichia coli
atggcgaagcccttctgcacccacgctgaagtccacggtctgcgtctccagcagttccgttttaatcagccacagcccggcgcggtgtgcctgcccccggctggtacagccaaaggcatccatcttcgtgacgttacgaccgtaacgggcaatggcctgcgtgtcctccacaagctctgtcgccgtctcccagccgttatccgggtcaatccagttcacctcaacagcattatggcggtctttcagggcgctgaagctgtagcggaacggcgcaccatcatccggcatcaccacattactgcggttataggtccacaccttatccgacggtcggtcctgcacgaacgtcagcgtctgcccgttccataccggcatacagcgcatcgccgagcagaaatcactgagaacatcccacgccttgcgctgtgtggtcaggtaggcattacaggtgatgcgcggctccgtgccaccaaagccatccggcaccgactggtcgcaattctggccgatgacatacagcgcccatttgtccacatccgccgcaccgagacgcttccccatgccgtagcgcggatgggtcagcatatcccacagacaccaggccatgttgttgctgtatgctggcttaaacgttccgtcccagataccgctgtattgccgcgtctgcgggttatagttcgacggcacctgcagaatgcgcccgcgaagatgataattacggctcacctgctggctgccgaactgctccgagtccacctgtacgccgaccagtgccgtgttcgggtagcactgtttcacatcgatgatttcggtgtatga

SEQ ID NO: 13349 - DNA, 642 bp, Escherichia coli; identical to SEQ ID NO: 8795

SEQ ID NO: 13350 - DNA, 261 bp, Escherichia coli; identical to SEQ ID NO: 10209

SEQ ID NO: 13351 - DNA, 222 bp, Escherichia coli
atgaaaatcatcacccgtggtgaagccatgcgtattcaccaacaacatccggcatcccgtctttttccgttctgtaccggtaaataccgctggcacggtagcacggatacatataccggccgtgaagtacaggatattccctgtgtgctggccgtgtttgcagaacgccggaaggacagttttggcccgtatgtccggctgatgagcgtcaccctgaactga

SEQ ID NO: 13352 - DNA, 261 bp, Escherichia coli; identical to SEQ ID NO: 10209

SEQ ID NO: 13353 - DNA, 249 bp, Escherichia coli
atgaagaagattttactcgttgctggcgcagctctggcactggcgggatgtggtgagaaaggtgattttgagaaggcgatcaatgccaagatagggcaggacaaatattgcttctcgctggataacaataacaccagcttccccatccgtcttgccaagccacgacttgattcgactggtacagggacgaattcagtgatcctcgatggatttgtagagcagggaatgatggtctttgagcagggctag

SEQ ID NO: 13354 - DNA, 504 bp, Escherichia coli; identical to SEQ ID NO: 9343

SEQ ID NO: 13355 - DNA, 432 bp, Escherichia coli
atggacggtaccgtctggcgtcttctgaatggttttaagctgttccgcgaaaaactggatacccgtcgcggttcaaattctcaactcgaaacggcagtgaaagatctgggcgcagtggtgtccttcaaggggtattacggcgatctggccattgtggtggcgaaaacgtcttatatagcagaagacggtatcgaaaaacgttatcttccagatggcatgctggttctggggaatactgctgcagatgggatccgttgttacggtgccattcaggatgctcaggcgttgtccgaaggtgtggtggcctcttcccgttatccgaaacactggctgacggtaggggatcccgcccgtgaatttaccatgacgcagtccgcgccgctgatggtgttgccggacccggatgagtttgtggtggtacaggtgaaataa

SEQ ID NO: 13356 - DNA, 171 bp, Escherichia coli; identical to SEQ ID NO: 12692

SEQ ID NO: 13357 - DNA, 186 bp, Escherichia coli; identical to SEQ ID NO: 9349

SEQ ID NO: 13358 - DNA, 1041 bp, Escherichia coli
atgagcgacaacatccgtgttgggttgattgggtatggttatgcgagcaaaaccttccatgcgcccctgattgcgggcacgcccgggctggagctggcggtaatctccagcagcgatgaaacaaaagtaaaagctgactggccaacggttacggttgtctctgagccgaagcatctgtttaacgatcccaacatagacctgattgtcattcctacacccaacgatacccattttccgttagccaaagcggcgcttgaggcgggtaaacatgtggtcgttgataaaccctttaccgtgacactgtcacaagcgcgagagctggatgcgctggcaaaaagcctggggcgagtgctgtctgtattccataaccgtcgctgggatagcgatttcctgacgcttaaaggtttgctcgcggaaggcgtgctgggtgaaattgcttacgttgagtcccattttgaccgcttccgcccgcaggtgcgcgatcgttggcgtgaacagggcggcccaggcagcggtatctggtacgatttagcaccgcaccttcttgatcaggccattacgttatttggtttaccggttagcatgacggtagatttggcacagttacggcccggagcgcagtcgaccgattatttccacgctatcttgtcctatccgcagcggcgagtgattttacacggcaccatgctggcagcagccgagtcagcacggtatatcgtgcatggatcccgaggcagttatgtgaaatatggcctcgatccacaggaagaacgtctgaaaaatggcgagcgtctgccgcaggaagactggggctacgatatgcgcgatggcgtacttacccgcgtggaaggtgaggaacgtgtcgaagaaacgctgttgacagtgccggggaattatccggcttactatgcggctattcgtgatgcgttaaatggcgatggtgaaaatccggttccggcaagtcaggcaatccaggtaatggagttgattgagctgggcatcgaatccgccaaacatcgcgcgactttgtgccttgcgtga

SEQ ID NO: 13359 - DNA, 144 bp, Escherichia coli
atggaattagaacttcaggaaggtatattatatttctgtgcttttatttatcttaaatatattattatttgcaatagctcgagattattttcggaatatatttatattcatgcaaaaataattaccacttatctaattcattaa

SEQ ID NO: 13360 - DNA, 378 bp, Escherichia coli
atgagttttcttttgccgtgtggtggaattatgaataatatagatttattaaaaactataacaaactacaaaaaaatcaaaaatccggcatacccggctcaggagagtctgttaatacacttatatattagagtaaatgacaaaatccagagtattatagaaaatgaattgagcgagtatagaataaacacttcaacatttatggtgttagtttcattatatatgtctgatgattattgtcagtccccttctgatatttacaaggagttacaattctccaaaacaaacatcacacacatcatagacaaattagaaaaaagaatattgccaaaagaattaataataaaaacgatcgtcgaagcaaaagtatttgcttaa

SEQ ID NO: 13361 - DNA, 1002 bp, Escherichia coli; identical to SEQ ID NO: 846

SEQ ID NO: 13362 - DNA, 393 bp, Escherichia coli
  misc_feature (26)..(35): n is a, c, g, or t
atgtgcttaacggcgttgttaattcnnnnnnnnnncgcttatcacgctgtgactgaaagaattgaggtattcgctgctcagaagcgcaaatctaaagaagaaaaatatgtgcaagatttgtttgattcgttaactcttggagaaagagcgtatttggcattcgctgtagccgctaataaccagctacaaacggaaaagggcgctcatgaatcaatttcattgctcaaaaaaggactcctcgttcgaaggcctcctgctgttggatatcctgataccgaccgtttcgttatccctgaaagctatagacatgagtgctacattaggtttgccgggaaggcagacagccttatggatgaacttatcgctcaggataagcatggcaaaaacaagtaa

SEQ ID NO: 13363 - DNA, 273 bp, Escherichia coli
atgtccagaaaaacagaatttaaaggcaccgcagcttctcgccgtagagctcgtcgcgcaaatctgcaaagtcaggaggcgatcagctccgacaagctacacaggccaaccccttcacgagtggtcttgcaatgcaagctcaaaccagcaatgagagcagaagtgataactctgacaacgttgaccagaaaatatgaaggttcaacttgtcttccgaacgtagctctttacgcggcaggctaccggaaatcaaaacaactgacggcgagatga

SEQ ID NO: 13364 - DNA, 951 bp, Escherichia coli
atgtcttcggatgctgatgctcacaaagtgggcttaatccccgtcaccctgatggtgtcggggaatattatggggtcaggtgtttttctgttacctgcaaacctggcctccactggcgggattgccatttatggatggttggtgacgattatcggtgcgctggggctctcgatggtatacgccaaaatgtcgttcctcgacccaagtcctggtggttcttacgcttacgcccgccgctgctttggcccgtttctcggttatcaaaccaacgtcctctactggctggcctgctggatcggcaatatcgctatggtggtcattggcgtaggatatttaagttacttcttcccgattctgaaagatccattggtattaaccatcacctgcgtcgtggtgctgtggatcttcgtcctgctgaacattgtcggtccgaaaatgatcacccgcgtacaggccgttgctaccgtgctggcgctgatccccatcgtcgggattgccgtatttggctggttctggttccgtggtgaaacctatatggcggcatggaacgtcagcggcctgggcaccttcggtgcgattcaaagtacccttaacgttacgctgtggtcgttcatcggtgtggaaagtgcctccgttgccgcaggtgtggtgaaaaacccgaaacgcaacgtccctatcgccaccattggcggggtattgattgctgccgtttgctatgtactttctaccaccgcgattatggggatgatccctaatgccgcactgcgcgtttctgcttcgccattcggtgatgccgcacggatggcgttgggtgacaccgccggggccattgtttccttctgcgcagctgcgggttgcttaggttcactgggcggctggacgttgctggcgggtcaaacggcgaaagcgctgccgatgacggactgttcccaccgatttttgcccgtgtaa

SEQ ID NO: 13365 - DNA, 762 bp, Escherichia coli
atgaggatttgcagcgaccaaccttgtattgttttattgactgaaaaagatgtctggataagggtgaatgggaaagaacctattagccttaaagctaaccacatggcgttattaaattgtgaaaataatattatcgacgtctcctctcttaataacactttggttgctcatattagtcacgacatcatcaaagattacctccggtttctgaataaagatctctcgcaaataccagtatggcaacgtagcgctacgcccatcctcaccctgccatgcctgacgccagacgtctttcgcgttgccgcgcagcatagcatgatgcccgctgaaactgagtcagaaaaggaacgaacacgtgcattattattcactgtgctatcccgttttctcgacagtaaaaaattcctttcactaatgatgtatatgttacgtaattgtgtaagtgacagcgtttatcaaattattgaaagcgatatccacaaagactggaatcttagtatggtagccagttgtttatgtcttagcccaagtctgttaaagaaaaagctgaaaagcgaaaacaccagttatagccaaataatcaccacctgccgcatgcgttatgccgtaaatgaattaatgatggacggtaaaaatatctctcaggtatcacagtcctgcggctacaacagtacgtcgtactttatttctgtctttaaagacttctacggtatgacgccgctgcattatgttagtcagcacagagaacgcactgtcgcctga

SEQ ID NO: 13366 - DNA, 2271 bp, Escherichia coli
atgatgaaagtattaattgttgaaagcgagtttctccatcaagacacctgggtcggtaacgccgttgagcgtctggcagatgctttaagccagcaaaatgttaccgtgattaaatccacctcctttgatgatggttttgccattctctcttcaaacgaagccattgactgcctgatgttcagctatcaaatggaacatccggacgaacatcaaaacgtcagacaattgatcggtaagcttcatgagcgccaacaaaacgtgccggtcttcctgttgggcgatcgggaaaaagccctcgccgcaatggatcgcgacctgctggagcttgtcgatgaattcgcctggattctggaagatactgccgagtttatcgccggacgcgccgttgccgcgatgacccgctaccgccagcagctattgccgccactgttcagcgcgctgatgaaatatagcgacatccatgaatattcctgggcagcgccaggccaccagggcggcgttggttttaccaaaacacccgccggacgtttctaccatgactactatggtgaaaatctgttccgcaccgacatgggcatcgaacgcacttccctcggttctttgcttgaccatactggcgcatttggcgaaagcgaaagatatgccgcacgcgtatttggtgccgatcgctcctggtcggtagtcgtcggtacttccggctctaaccgcaccatcatgcaggcttgcatgaccgataacgatgtcgtggtcgttgaccgtaactgccataaatccatcgaacaaggcttgatgctgacaggcgcgaaaccggtctacatggtgccaagccgcaaccgctacggcattatcgggccaatctatccgcaggaaatgcaacctgaaaccttgcagaagaaaatcagtgaaagcccgctgaccaaagacaaagtcgggcaaaaaccgtcttactgcgtggtgaccaactgtacctatgacggcgtgtgttataacgctaaagaagcgcaggatctgctggaaaaaacctccgatcgtctgcactttgacgaagcctggtacggctatgcacgtttcaacccgatctatgccgatcactatgccatgcgcggcgaacctggcgatcacaacggtcctaccgttttcgccacccactccacccacaaactgctgaatgcgctgtcccaggcctcttatattcatgtacgtgaaggtcgtggggcgattaacttctcccgcttcaaccaggcctacatgatgcatgccaccacctccccgctgtatgccatctgcgcatccaacgacgtggcagtgtcgatgatggacggcaacagcggcctgtcactgacccaggaagtgatcgacgaagcggttgatttccgtcaggcgatggcgcggctgtataaagagttcaccgctgacggtagctggttcttcaaaccgtggaacaaagaagtcgtcaccgacccacaaaccggcaaaacctatgactttgctgacgcaccaaccaaactgctgaccaccgttcaggactgctgggtcatgcatccgggcgaaagctggcacggcttcaaagatattccggataactggagtatgctcgacccgattaaagtcagcatccttgctccgggaatgggtgaagatggtgaactggaagaaaccggtgttccggcggcgctggtcacagcctggcttggtcgccacggcattgtgcctacccgtaccactgacttccagattatgttcctgttctctatgggcgtgacccgtgggaaatgggggactctggttaacaccctttgctccttcaaacgccactatgatgccaacacaccgctggcgcaggtgatgccggaacttgttgaacaatatcctgacacttacgcgaacatagggattcacgatctgggtgacaccatgtttgcctggctgaaagaaaacaaccctggcgcacggttgaatgaagcctattccggcctaccggtggcggaaatcaccccgcgtgaagcgtacaacgcgattgtcgacaacaatgtcgaactggtatccattgaaaatctgccaggacgtatcgcggcaaactcagttatcccgtatccgccaggaatcccgatgctgctgtctggtgaaaacttcggcgataaaaacagtccgcaagtaagttatttacgctcgctgcaatcctgggaccatcatttccctggatttgaacacgaaacagaagggacagaaattattgacggtatttaccacgttatgtgtgtgaaagcgtaa

SEQ ID NO: 13367 - DNA, 330 bp, Escherichia coli
atgtcgccagatggctatcgccaactgctggaacaagttaaagcaaccggtgttaatgtctgggtacaggatggcagcggcgtggataaactgaccgctgaacagcgtgaacgttatctacaggccagcgccgattgccaaagttccgccccagcaagcggcattgtttatgaactgtttgtcgctggtaaaggtaaaacgtttacagcgaaaccgaaaccggatgcagagatcgcctcgctgttagcgaaacgttcctcttgcggtaaagacacgctctatttctctctgcgctatttgcccgtcgcgcagagtatccttgagtattaa

SEQ ID NO: 13368 - DNA, 237 bp, Escherichia coli
atgacaaatacaatatctgtcgcagtaagtatgttgtgcgaagaactcccaaaagtaatgaatgctattcaagagcgttttgaaatatttgttgccattacgggatattcagtagaagaaatcatggatgacagcaacttgcttgacgagttaaatcgatttattaataacgaactagttaatgatttagggttggaatatggttccgttatcataaatatcggttataacaactga

SEQ ID NO: 13369 - DNA, 501 bp, Escherichia coli
atgcacttgacggtttctctactgattgaatgtaatggcgaaatcaccaatggtgaatatggcagaaaagttctttgtgactatctgaaaatgctttgccagagccacaaactggcgggcggcagcattgtcagtatgcgcgatccgcagctttttcatgcgcctgaagatgaaaagcaactgcgtaaaatcgtctggcggttaatgccgggttatgcgctttacgatcgcagtgaatggctggctgaacatcaccaacaacatcccgacatctcgttgctggatgcctggcttgatttcgccgcgattaaatatcaggccgaatctccggctgaagacaacagcgcaaaatgggtataccagccgaagccaatacctggtttcctggtaccgttaatgtgtggctaccaacgcatttctcctgtttacgcacccggtgaagttgaaaatgcgcgcgacaccgtgacgccatttgcctttgccgaagcggtatatgtatga

SEQ ID NO: 13370 - DNA, 3234 bp, Escherichia coli
atgaatgtcctaattatctcacgctgtacgaaaaatgctcgcgtggaaagctgccgtattattgatcagtttgccgaacgcactggtgacgcagcatggcaaacggtgattactctggaaggcgttaatacactccgccgtttactgcgcaaaaccgccaggcgaaataccgcagtggcttgtcactggctgaagaagaatgggcaaacggagctgatgtggattgtcggcaatattcgtcgctttaatgctcaaggccgcgttcccacaaatcgaacaacgcaaatcagcctggtgaacaaagaagaaaatcgctggcagtgcgcggaaagtattgcactgctggcggctatcgctgggctatttcatgattttggtaaatcaggacgcagctttcagcaaagcctgactcaaaagaatacccgcagttatcaaccttaccgacatgaatggatttcactgcggctctttcagacgtttgtcggtgagcggcccgacgatgtgtggctggcgaagcttggcgaactcacggcagatgatgaatctgcgattcttgagcgcctgcaaaaagacactcctcaattttcaaatagcccgttcagttcgctgcaaccattagccaaaacggtaggctggctgatcctttcccatcatcgaatgccggagaatctttctccacagtcggaacaatcatgtaaagggtgtgaaagttggctggagaagcaacttaatgctgactggaatgccgttaaccaccgcagagatgactggtcacaacaggattttgcgcacgtctggcagtttccatcaggaacgccgcttcaaagcgcgagctggcgggaaaaagcgcgtcagatagcccgccgggcaagcaacgcgctcggtttaaagacatatgggcagatggaacagttgttccccttacatatggcgcgtttttgtctgatgcttgccgatcattactattcctcaagcgatgcgcagcaaaaatggcaggacccggattatatcgtctgggcaaatagcgatcgccaaagcggcacgctcaaacaacgggtagacgaacaccttgtgggcgtcgcgcatcatgcgtatctgcttgggcggcaactgatgcacacacgggcatcgcttccggcaattgcccgacataaaggttttagccagcgggctacagatgtgaattatcgctggcaagataaagcctgggatgtggcgcgagcgttacgtgaacgaagtcgtgaagagggatttttcggcgtcaatatggcctcgacggggtgtggtaaaacctttgcgaacgcccgcattatgtatgcacttgccgacgagcgagaagggtgccgctttaccgttgcgctgggattgcgcacgctgactttacaaaccggcgatgctctgcgcagtcggcttgggctgggtgaggatgagctggcggtactgattggttcggcggcagttaatcaactgtggcaacaggaaaaaatagacaatgattgcggaagtgcttcgcaagagtcgccggcagaggagcaacagttcgttaagtacgaaggcagcctgcataccggggcgctggaaaaatggttgaaggatgacagcaaacttaaggagttagtaagcgcgccgattctggtctcgacgattgatcatcttatttccgcgaccgagggcgtgcgaggcgggaaacagcttccggcgatgttgcgcctgttaaccagcgatttagtgctcgacgaacctgatgactttgatattgctgatcttcatgcggtatgtcgattgatgaactgggccgggatgctgggaacgcgggtattactttcttccgcgacgttaccgccaggtttgattcaggcgctgttcgcggcttatcttgctgggcgaaaaatgtggcaggcgtcttgtggtatcaacggcaggcctgtcaatatatgctgcgcctggtttgatgaaaaagatgctgatgccacgcaaatttacgacggacctgggtttcgtgatgctcatgccaaatttgttgcacgacgagcggtaatgctggctgaaaaagaacgactgcatttcgggcgtgtagcttcggtttcatcagcatcaggcgcgatacaagatgttaccgaaagtgtggcccagacggtgcatacgcaaatgctgaagttgcatcaggcgcatcgccagcgacacgaaagcggtaaaaccgtttcgctgggcctggtgcgcttcgcgaatatcaatccactggttgcggtgaccaaagccctgattgccattccttcaccagaagatgtctgcattcattactgtgtttaccactcccgacatccgctggcggtgcgttcagatattgagaagcgactggatcgcgcttttactcgtcataacgaactcgatttctggaacaacgaagatatcgcagatgccttacataaccgtccggaatcgcaccatctgtttgtggtgttggggacatcggttatagaagtggggcgtgactgggatgcggactggggaattatcgaaccaagctccatgcgttcgataattcaatttgccggacgtattcagcgccaccgtagaaatgtgccgaccagtgagaatctggttattttgcgtagcaatatcaaatcattgcagaaaaaagcccccgcattttgtaagcctggtttcgaaacaaaagaacacttgctgaatagccacgatatttgcgaactgattccgatcgcggactaccggacgattaacgccttgccgcggatcctgtctgccaataatgccaacaaactggcggagctagaacatagtcgtttatccgccgaattgatgagcagtaaaagcaaacatgtggtggcggcgcaatggtggcgtgcaccgctaagctggaacggctggatgcagcgccagacgccatttcgttattcccctttgccggaggcggtgttttttctgcatatggatgatgaagaaagcgaagcgcgtttctattcccgcacgggcgacaacgagcgtaaagcgcaagggaatttcaggcgagaagaggtgagatgcgccagcggcgtcgcttgctggggcgtgatggattaccaacacgttttgttgaatttagctgataagcaaagttgtgagatagcaaacgttggggaaaagtttgcggaggtgagagtacccgtcagtgaagaagatgcggtcgatgactggcgttatcacccctggttaggtgtgtttcgcaacatgtga

SEQ ID NO: 13371 - DNA, 984 bp, Escherichia coli; identical to SEQ ID NO: 842

SEQ ID NO: 13372 - DNA, 723 bp, Escherichia coli
gtgattgaatttaaaaacgtctccaagcattttggtccaacccaggtgctgcacaatatcgatttgaacattgctcagggcgaagtcgtggtgattatcgggccgtccggttccggtaaatcgaccctgctgcgctgcatcaacaaactggaagaaatcacctccggcgatctgattgtcgatggcctgaaggttaacgatccgaaagttgatgagcgcctgattcgccaggaagcgggtatggtgttccagcagttttacctcttcccgcatctgacggcgctggaaaacgtcatgtttggcccgctacgcgtgcgtggcgcgaataaagaagaggcggaaaaactggcgcgtgagctcctggcgaaagtcggtctggcagaacgtgcacatcactacccttccgaactttctggtggtcaacagcagcgtgtggcgattgcccgcgcgctggcggtgaagccgaaaatgatgctgtttgatgaaccgacttccgctcttgacccggaactgcgccatgaagtgctgaaggttatgcaggatctggctgaagaagggatgacgatggtgatcgtgacacacgaaatcggttttgccgagaaagtagcttcgcgcctgatctttatcgacaaaggccggattgcggaagatggcgatccgcaggtgttgatcaagaacccaccgagccagcgcttgcaggaatttttgcagcacgtctcttaa

SEQ ID NO: 13373 - DNA, 2226 bp, Escherichia coli
atgcggtggatcctgttcatcctcttctgcctgttgggcgcacctgcccacgcggtatccatacccggcgttacaaccacaacgacaacggactcaacgactgaaccggccccggaaccggatatcgaacaaaaaaaagcggcctatggcgcactggcggatgtgctggataatgacacctcgcgtaaagagttgatcgaccagttgcgcaccgtcgccgctacgcctcctgcggaacccgtaccgaagatcgtgccgccgacgttggttgaagagcaaaccgtgctacaaaaagtcaccgaagtcagccgccattatggtgaagccctttccgcccgcttcgggcaactttatcgcaatatcaccggctccccgcataagccgtttaatccacaaaccttcagcaatgcgctgacccacttttcaatgttagcggtattagtgtttggtttttactggctgattcgtctgtgcgcactgccgctgtatcgcaaaatgggccagtgggcgcggcaaaaaaatcgtgagcgcagtaactggttgcagcttccggcgatgatcatcggggcgtttattatcgacctgctgttactggcactgacattatttgtcggccaggtattaagcgacaacctgaatgcgggcagtcgcaccatcgctttccaacaaagtttgtttctcaacgcctttgccctgattgaatttttcaaagccgtactacgcctgattttttgcccaaacgtggctgaactgcgcccgttcacgattcatgacgagaccgcccgttactggagtcgtcgcctgagctggttaagcagcctgattggctatggtctgattgtggctgtgccgattatctctaatcaggtgaatgtacagataggtgcgctggcgaacgtcatcattatgctgtgcatgaccgtctgggcgttgtacctgatttttcgtaataaaaaagagatcacccagcatttgctcaactttgcggagcattcgctggcctttttcagcctgtttatccgcgcctttgcgctggtgtggcactggctggcaagcgcctattttatcgtgctgtttttcttttcgttgttcgatccgggcaacagcctgaaatttatgatgggtgcaacggtgcgcagcctggcgattattggtatcgcagcatttgtttccggtatgttttcccgctggttggcgaaaaccatcaccctctcgccacatactcagcgaaattatccggagctgcaaaaacggctgaatggctggctttcggcggcactgaaaacagcgcgtattctgacagtctgcgtggcggtaatgctgctgttgagcgcatggggattgttcgatttctggaactggctgcaaaacggcgcggggcagaaaaccgtagatatcctgatccgtatcgcactcattcttttcttctcggcggttggctggacggtgctcgccagtttgatagaaaaccggctggcttcggatattcatggccgcccgctacccagcgcccgtacgcgaaccctgctgacgctgttccgtaacgcgctggcggtgattatcagtaccatcaccatcatgattgtgttgtcggaaatcggcgtcaatatcgcgccattgctggcaggtgccggggcattaggtctggctatctcgtttggttcgcaaacgctggtgaaagatattattaccggagtatttattcagtttgaaaacggcatgaacactggagatttggtgactatcgggccgttgaccggcactgtggaacggatgtcgattcgctccgtgggcgtgcgccaggataccggggcgtatcacatcattccgtggtcttcgataaccacctttgctaacttcgtccgcggtattggttcggtagtggcaaactacgatgttgatcgccatgaagatgctgataaagccaatcaggcactgaaagatgcggtagcggaattaatggaaaacgaagaaattcgcgggctgattattggtgaaccgaattttgccgggattgtcggcttaagcaataccgcgtttacactgcgtgtttcgttcaccacgctgccactcaaacagtggacggtacgctttgccctcgacagccaggtgaaaaaacatttcgacctggcgggcgttcgcgcgccagtgcagacttatcaggtgctgcctgctccgggcgcgaccccggctgaaccgttgccgccgggggaaccaacgctttaa

SEQ ID NO: 13374 - DNA, 927 bp, Escherichia coli
atgtccgcccagaaaccggggttgcatccgcgcaaccgtcatcacagccgctacgatctcgccacgctttgtcaggtcaatcctgaactcaggcaattcctcacgcttacacccgccggggagcaaagcgtagactttgccaatccgctggcggtgaaggcgctcaataaggcgttgctggcccatttttacgccgtagcgaactgggatatcccggacggttttctctgcccaccagtaccgggtcgggcggattatattcatcaccttgccgatttactggcagaagcaagcggaacaattccagctaatgccagcattctggatatcggcgttggtgcgaactgtatttatccgctgattggcgtacatgaatatggctggcgttttactggtagtgaaaccagcagccaggcgttaagcagtgcgcaggcgatcatcagtgctaatccggggcttaaccgcgccattcgtctgcgtcggcaaaaagagagtggggcgatttttaacggcatcatccataaaaacgagcaatacgatgcgaccttgtgtaacccgccattccacgattccgccgctgcggcacgggcaggtagtgaacgtaaacgccgtaacctggggctgaacaaagacgatgcactgaactttggtggtcagcaacaggagttgtggtgtgaaggcggtgaggtcgcttttatcaaaaagatgattgaagagagcaaaggcttcgcgaagcaggtgatgtggtttacctcgctggtatctcgtggtgaaaacttaccgccgttgtatcgtgctctgacggacgtaggtgcggtgaaggtggtaaaaaaagagatggcccaggggcaaaagcagagccgctttatagcctggacctttatgaacgacgagcagcgccgccgttttgtcaatcgccagcgttaa

SEQ ID NO: 13375 - DNA, 168 bp, Escherichia coli
atgcgctgcgcttatcaggcctacaaggttgtgcaatacactgaattcacatcatttggtaggccggataaggcgttcacgccgcatccggcacctgagcaccattgcctgctgttaaaaatcggtgtggggcgggcgcaggccccactttttggagaacttgtatga

SEQ ID NO: 13376 - DNA, 678 bp, Escherichia coli
atgatgtaccacattcccggcgtgttatcgccacaggacgtcgcccgttttcgcgaacaactggaacaagccgaatgggtggatgggcgcgtcaccaccggcgcacaaggtgcgcaagttaagaacaatcaacaagtagacacccgcagcgccctgtacgccgccctgcaaaatgaggtgctgaacgcggttaaccaacatgctttgttctttgccgcggccttgccgcgtaccctttccacgccgctgtttaatcgctatcagaacaatgaaacctatggttttcatgtggatggcgcagtacgcagccatccacaaaacggctggatgcgcactgacctttctgccacgctgtttttaagcgatccagaaagctacgacggcggcgaactggtcgttaatgacaccttcgggcaacatcgggtaaaactcccggcaggcgatctggtgttgtatccctccagcagcctgcattgcgtgacacccgtaacccgcggcgtgcgagtggcatcatttatgtggatccagtcgatgatccgtgatgataaaaagcgcgccatgctgtttgaactggacaacaatattcagtcgctgaaaagccgctacggcgaaagtgaagagatcctgtcactgctcaatctttatcataatctgctgcgggaatggtcggagatctga

SEQ ID NO: 13377 - DNA, 216 bp, Escherichia coli
gtgaccgtagaagatattatcaccaagtaccaaagcacaatcatcaccaccaataaactcttcaccgataataaatgcctgcgcaagaccatccggactcggttgcactttgtactgaagattcaggccccactggctaccgtcacccagcagttgttgaaaacgaggagtatcctgtggcgtactaataatcagaatatcgcgaatacccgctaa

SEQ ID NO: 13378 - DNA, 606 bp, Escherichia coli
atggcaagcgatggcgatatcactctggtgccggttggtccgttgtcaaacatcgcggtggcaatgcgtatgcaacccgcgatcctgccgaaaatccgtgaaattgttctgatgggcggtgcttatggtactggcaacttcaccccatctgctgagttcaacatctttgctgacccggaggccgcacgcgtggtgttcacctccggcgttccattagtgatgatgggcctcgatcttaccaaccagaccgtttgcaccccggatgtgattgctcggatggaaagggctggcggccctgccggagagctgttcagcgacatcatgaacttcactctcaaaacgcagttcgaaaactacggcctggctggcggcccggtacatgacgccacctgtatcggttatctgattaaccccgatggcattaaaacccaggagatgtacgtcgaagtggacgtcaacagtggcccttgttacgggcgtaccgtctgcgacgagctgggcgttcttggcaagcccgccaatacaaaagtcggcatcactattgataccgactggttctggggattagtcgaagagtgcgtacgcggctacataaaaacccattaa

SEQ ID NO: 13379 - DNA, 780 bp, Escherichia coli
atggaacataagcctaccatccgggtgttagagatactggaagcactggcagcggagaatcagggtgtttcattaactcacctttcggaaaaaacaggcatcctgaaaggaacgatttttcccatcctcaaaacgctggttgaacagcggtacatcagttatgacgctaatacccagctttataatctggggatctcctgctcgattctgtcccgtgctttcctcgacagatcgtactggttaaaaatggtttacaaagagatgaacaacattgtcaaagagtgcaatgaggtttgtcagatggggatcctggacggtgcagatgttttatatatcaataaggtgcaggcggcacaaaccgtacaactggtttcacatattgggactcgtctgcctgctatctattctgcgctgggaaaagccattatctgtgaatacagtgatcaacaaattcagcaactctaccctgacggttttgttcccatgacatcgtatagcgttacgaccctggaacaattgcgccaacaacttgaggatgccagagtaaatgggtatgcatttgataacagggaaatcaatgaggagacggtatgttatgctgttgccttaaaacagcgaaataaaacgcttgccgccatcagcatttcaatacccgtatttcgtgcgacaaaagaaaaaattgccgatgtcacgcgtatcctgctgaatgcacgttcgcgtattgaacaggaactcaacaccttacaggatatcaatatcggtattgattcccaccattaa

SEQ ID NO: 13380 - DNA, 894 bp, Escherichia coli
atgaaaagtcgttacataacccccgttgtcaccatatttgatgaacaagggcgaatcgatcctgagcaaaacactcaggtttatgattttattaaaaatcacgtgtccgggtttgttgtgatgggcagtactggtgagtttttttcgcttaatatggaaaacgcccgccaaatgattaaaacctgtagtgagttttcccgaggcgatatgaaggtttatgccggagccagtcgcatggacgtcaatgaatcaatatcactggccaattacgcctgggagcaaggattggatggtgtgatgatcatcagtccttattatttccctctggatgatgaagctatttttgatttctacagtacgattgcaagccaaaccccggctcatatttttatttataacttcccggagagaaccgggtacagcgtatcaccagagatttgtttacgactggcagataaatatcccaatattattggtatgaaagataccgtccctgatgctttccatactgcgcaggttatcaataccgtaaagaaaaatatccctcattttgaagtgtatgcaggatatgacaataattttgcccacaacatactatctggtggagatggctgtattggtggtttatccaatattgtccctgaattttttgcctcctggatgcaagcattcacgaatgacgatttacttgcagtcgcgcagcatcagcagatagtcgatcaactaatggccgtttacagcgtgaattctccttttattcccactttcaaaaaagcccttcagttaaagggggttattcaatcagaacggtgttcttcaccatttaatatacttgatgatattcaatcccggagattgcaggaaattttatctgtcaccgattattataaataa

SEQ ID NO: 13381 - DNA, 1302 bp, Escherichia coli
atggctaatataacccaatacgataatccgctgttgaattccgcaattcaaaaatcgtggaaacgtttagtacccttaatgttcataatgtattttgttgcctttattgatcgggtaaatgttggctttgccaaagatgcaatgaaactggatattggattatcagagtcggcattcgctctcggtgcaggaatatttttcgctgcctatgcacttttcggcattccagctaacctgatcctcaataaaatcggcgcacaaaagtggttaagtattacaactgcaatttggggccttctctcggcaatgatgggatttgtcaccggtgaaacgcaatttattattttgcgctttctgttagggctgggcgaggcggggttctatcccggaattttactgctcgcatccatttattttcctaacaaggttcgcggatcggtcgtgggaatatttgtgttgggggtgccgctggcgttaacgctcggttcgccaatatcgggagctttacttgaactacatggctggatgggacgtccaggatggttctggatgtttgtcattgagggattgccggcattagtgcttggtatctttacctggttctaccttgatgataatccgacgaaagcgcgatttcttacccaggaagaaaaagacgctttgaataagcaactggaatctgaacgacagaaaacagaaaccagttcagtgatttcagcattgaaaaatgccaaagtttggcatctggcattaatctacggcaccatccagatatcagtatatggtttaatgtttttccttccgtcacaggttgcatcgctgatgggagaaagccttggctttaagcagtcattagtcgcggcaataccatgggcgtgctctgcttgtggcgtctattacattccgcgaattgctgaccgcaatccttcccggcgtgtggccatttcggttatgtgtatgttggctgctgctgtcggccttgccctttccgcatttgcggggcctgttgtggcgattggtgcactttgtttaagtgcggttggtttcctctcagtacagccaatattctggactttccctccacaacttcttactggtccggcactggctgcggggatcggtttttgcaccacgatgggcgctttctgctcgttccttgctcctcttatccgtgttgaggttgatcgggcaatggatagcagcatcgccggattgatggcgttgtctgtaattactatcggctgcgcattattgattggattgctgcaaaagagccaacaggcagcaaaagcatacagttaa

SEQ ID NO: 13382 - DNA, 1602 bp, Escherichia coli
atgattatgcaaaaaatattacgtatcgacagtaacgataatctcattgtcgcgttgaaagacctgcacgctggagaatcgtactcgtgggatgacgacaacataacgttagtaactgatgttaaggctaaacataagtttgcgacgcaagatattcctctggatggcattgtttcgatgtacggtacgccagttggcaaggccacgcgtcccatcgttaagggagaagcgattaccgttgataatattcgccactatgcagctcctgtcacactggaggatgttgaaccctaccactggcaggcaccggatgtctctgaatggagcacccgcacttttaaaggttatgtccgtgacgatggcagagtgggtactgccagttactggttagtctttccattggtattttgcgagaaccgtaatgtcagtaagttaaccaatgctttgaatgatgctttgggttataccaataactcactgaaaaagtttgctcttaatctgacgtccggtagcgatgaactgatcgaaaccgcgagaatgttcccgcatattgaaggtgttcgctgtattacggtcaccagtggttgtggtggtgcaacttcagactgtgaaactatgtgcgatgtattagctgcttatgctgaccatccgaatgtaatcggtatgacggtattcagtttaggatgtgaaaaagcgcagcagaaaatgtttaaggatgcgctggcgagacgtaatcctgaatttgataaacctgcgctctactttctccaacaggagtgggacagcgaagagcggatgatgcagaccgctttacagcagactttcgaggcaatgaaagcggtgaagccgacagaaagagtagaggtccctctttcctgtctcaaagtggggatgaagtgtggtggttccgatggtttttctggtatctccggcaaccctgcaatggggctggtttctgactggttgacaacgcttggtggcgcttccgggttagcagaatttccagaattatgtggggcagaaggtgatatggttaagcgttgtattaatcttgaggataaaaaaaagttcctcaatctaatgcaaggctacgaaaagacagcgaactttttcgataccaccattgcggataacccaagttttggcaacatcgcggatgggttgattactgacgcaataaaatctaccggagcagcgaaaaaaggcgggcgagcgccaattgtgagtgtatgcgattacgctgaaccgatgcccgatagtggattatcgttggtgtgtactccgggcaatgacgtggacgcggtaaccggattggtagcagcaggatgtaatgtggttatcttctcgacgggtcttggtacgcccaccggtaacccgattgttccggtgttaaaaatatccaccaacagcacgattgccagacgattgtctgacatgattgatttcgactgtggcccagtgattgacggcactccgctggaagatgtgagtagagaattatttgaaaaagttattgaaactgccagtaaggactacgtcgtgaaggcagacaaacttgaacagtttgactttatgttgtggaagcggtcgttagacttgtag

SEQ ID NO: 13383 - DNA, 237 bp, Escherichia coli
atgggaattttaaaaagtttatttacgctggggaaatcgtttatctcccaagcggaagaatccattgaagaaacccagggcgtgcgcatgctggaacagcatattcgtgacgctaaagctgaactcgataaagccggaaaatctcgcgttgatctgctggcgcgggtgaaattaagtcacgataagctgaaagatttacgtgagcgcaaagccagtctggaagctcgtgcgctgtaa

SEQ ID NO: 13384 - DNA, 660 bp, Escherichia coli
atgtctggttttttccagcgtctgtttggcaaggataataagcctgctatcgctcgcggtcctctgggacttcatctcaatagtggctttacgctcgacacgttagcatttcgtttgctggaagatgaattgctgattgcgctgccgggtgaggaatttacggtagccgccgtcagccgcatcgatctgggcggcggtagccagattttccgctactacacttcgggcgatgaatttctgcaaatcaataccaccggcggcgaagatattgatgacattgatgatatcaagctctttgtctatgaagagagctacggtatcagtaaagagagtcactggcgcgaggcgatcaacgccaaagcgatgggggctataaccttaaactggcaggaaaaacgctggcagcgattttttaacagtgaagaaccgggaaatatcgaactcgtctacatgctggaaaaagtagaaaatcaaaaccatgccaaatgggaggtccataattttagcatgggctaccaacggcaagtgaccgaagatacttacgaatatttgctgttaaatggtgaggaatcatttaacgatctcggcgagccggagtggatattttcgcgcgcgctgggtgtcgatatcccgctgacatcacttcatattattggttaa

SEQ ID NO: 13385 - DNA, 867 bp, Escherichia coli
atgagtaaagtgaaaagtatcacccgagaatcctggatcctgagcactttcccggagtggggtagctggctgaatgaagaaattgaacaagagcaggtcgcccctggcacatttgcgatgtggtggctaggctgcaccgggatctggctgaaatcagaaggtggcaccaacgtttgcgttgatttctggtgcggcactggcaaacaaagtcacggtaacccgttaatgaaacagggtcaccagatgcagcgcatggctggcgtgaaaaaactgcagccaaacctgcgcaccaccccgtttgttcttgatccgtttgcgattcgccagatcgacgcggtactggcgactcacgatcacaacgatcatatcgacgttaacgtcgctgctgccgtgatgcagaactgtgctgatgacgtaccgttcattggaccgaaaacctgcgttgatttgtggattggctggggcgtaccgaaagagcgttgcatcgtggtcaaaccgggcgatgttgtaaaagtgaaagacattgaaattcatgcgcttgacgctttcgaccgtactgcactgatcaccctacctgccgatcaaaaagcggctggcgtactgccagatggcatggacgatcgcgcagtaaactacctgttcaaaacccctggcggttccctgtatcacagtggcgattcccactactctaactattatgcgaagcacggtaacgaacatcagatcgatgtggcgttaggatcgtacggtgagaacccgcgcggtattaccgacaaaatgaccagcgccgatatgctgcgtatgggtgaagccctgaatgcgaaagtggttatcccgttccaccacgacatctggtcaaacttctag

SEQ ID NO: 13386 - DNA, 663 bp, Escherichia coli
atggcttatcgcgaccaacctttaggtgaactggcgctctctattcctcgcgcttcagctctgtttcgtaaatatgatatggattactgctgcggcggtaagcaaacgctggcgcgcgcggcggcacgtaaagaactggatgttgaggtcattgaagctgaactggcaaagctcgctgaacaaccgattgagaaagactggcgtagcgccccgctggcagaaatcattgaccatatcatcgtgcgctaccacgatcgtcaccgcgagcaactgccggagctgatcctgcaagcgactaaagtcgagcgcgttcacgccgacaaaccgagcgtgccaaaagggctgacaaaatacctgactatgctgcatgaagagctttccagccacatgatgaaagaagagcagatcctcttcccgatgatcaaacaaggcatgggcagccaggcaatggggccaatcagcgtaatggaaagcgagcacgatgaagcgggtgaactgctggaagtgatcaaacacactaccaataacgtcacaccgccgccggaagcctgcaccacctggaaagcgatgtataacggcattaatgaactgattgatgacctgatggatcacatcagcctggaaaacaatgtactgttcccacgcgcgctggcgggtgagtga

SEQ ID NO: 13387 - DNA, 966 bp, Escherichia coli
atgattagcggcgtgctgtacgccctgttagcagggttgatgtgggggcttatttttgtcgggccgttgatcgtaccggaatacccggcgatgttgcagtcgatggggcgttatctggcgttagggttaattgcgctgcccattgcctggctgggacgcgtgcgtctgcgtcagttggcgcgtcgcgactggcttaccgccttgatgctcactatgatgggcaacctcatctattacttctgccttgccagtgccattcaacgtactggtgcgcctgtttccacgatgattatcggcaccctgccggtggtgattcccgtttttgccaatctgctttatagccagcgcgacggcaaactcgcgtggggaaaactcgccccggcactggtttgtattggcatcggcctggcgtgtgtgaatattgctgagttaaaccacggactccccgattttgactgggcacgttatacctcaggcatcgtgctagcgttagtttccgtggtctgctgggcatggtatgccctgcgcaacgcccgctggctgcgggagaatcccgacaaacatccgatgatgtgggcgacggcgcaggcgctggtcacactgccggtttctctcatcggctatctcgtcgcctgttactggctgaatacgcaaacgccggacttctccctaccttttggcccccgtccgctggtgtttattagtctgatggttgcgatagccgtgctttgctcatgggttggcgcactctgctggaacgtcgccagccagcgattaccgacagtgattctcgggccgctgatcgttttcgaaacactggcaggtttgctgtacacctttttgatacgccagcaaatgccgccgctgatgacgctgagcggtatcgcgctgttagtggttggcgtggtcattgcagtcagagcaaaaccggaaaagcctttaactgaatctgtctcagaaagttga

SEQ ID NO: 13388 - DNA, 432 bp, Escherichia coli
atggctcaagttattaatgaaatggatgttccgtcccattcgtttgtttttcatggtacaggtgagagatattttcttatttgtgtggtgaatgtgttgttaacgattataacgctaggtatctatttaccatgggcattaatgaaatgtaagcgttatctctatgctaatatggaggttaacggacaacgattttcttatgggattaccggtgggaatgtttttgttagttgtcttgtttttgtttttttctatttcgcaatcttaatgacagtgtcagcagatatgccgcttattggctgtgttttgactttgtcactgttggttttgcttatatttatggcagcaaaaggactgcgttatcaggccttgatgactagtctcaacggcgtaagatttagttttaattgctctatgaaagggttctggtga

SEQ ID NO: 13389 - DNA, 1245 bp, Escherichia coli
atggctctaacagatatcaaagtcagaacagctaagccaacagataagcaatacaagttaactgatggcagtggtatgcatcttcttgtccaccctaatggttctaagtactggcgtttgcagtaccgttttgacggcaagcaaaagatgctggctttaggtgtttatcctgacgtgtcgcttgccgatgcacggactcgccgtgacgacgctcgtaatttgttggcaaacaacatcgacccgggagacaaaaagaaaagtgataaaattgagcaagaagaagcccgcacttttgaacaactcgcagttgagtggcatgcaacaaataaaaagtggtcggaagaacatagcaggcgagtactgaaaagcctggaggataatctgtttccagctattggtaagcggaatattgcggatctcaaaacccgagacctgctagccccaatcaaagccgttgaactgtcaggacggcttgaggttgcttcacgattacaacagcgaaccacggcaattatgcgctatgccgtgcagagtggtttactggactataaccccgcgcaggagatggttggcgctgttgcttcaagtaacagacagcatcgacctgctcttcagttgaagcgaatcccagaactattacggcgcatagatagttataccggtagacctcttactagacttgccgtcgaactcacgctcctggtattcattcgttcaagtgaactacgctttgctcgttggtctgagatcgatttcgaaacatcaatgtggacaatacctgcagagcgcgaagctattgacggagtaaagcattcacagcgtggttcaaaaatgcgtacgcctcatctggtgccgctttctcatcaagctttagcaattcttaaagatgtttacaaacttagtggtgatcgcgattttgttttcatcggcgatcatgaccatcgcaaaccgatgagtgaaaacacggtgaacaaggcgctgcgcgttatgggttatgacacgaaggtagaggtttgtgggcacggtttcaggacaatggcctgtagttcattgatcgagtctggattgtggtcgagggatgcagtggaaaggcagatgagccatatggaacgtaactcagtacgcgcagcttacattcataaggccgaacatcttgatgaacggcgactgatgctgcagtggtgggctgattttttggatgcgaatagggaaagcgaagttagcccttatgactttggcaaatag

SEQ ID NO: 13390 - DNA, 234 bp, Escherichia coli
atgaaaactttcgatactcaacttgcgatgagcattgtatcgcactcaacgggaggttttagttatgacaccctagctagagcgttgatttctaaagataaaaatgaaaatcctgacgaccttcttgagtcgtgtcgaaatttttgtctctctcttgaggaaaaaggtattctgaggcgatgccaaagatgttctcattctcaagatgagtatttcgagtatattcctcactaa

SEQ ID NO: 13391 - DNA, 894 bp, Escherichia coli
ttgagtctgagtcaattttcatcaggccgaaccccttcaaatgtgctcgtgaattcttggtgcaatgctctgaatgaagctatttctacatctgcaactatatgtgcagaggatctttataaaggtgggcactgggcgacggctaaagccatcttagatgattatcctattgatttatggattctttctgctggtttaggactccttcaccacaaagacaatgttgtaccttataaagcgacctttgctgttggatatgacgaatcaataccattatattctcaagaatatgtagggaaaagttttcatagaacatggtggaaagaaataaccaatagatctatttttaaatctaagcatcctacatctattgtagaattaatgaaaaaaagaaaaagagactattatattatctgtggttctccagattatattaatgcaattgaactagatatcattaatggtcttgagtatctagttgatgcaaaaaaacaactgcttattataacttccaaaaaaatcaatggtaggttaactacataccttttcaaaaccaaccaaaatatggctcagtggctgagatgcaatatgctcatgcttaatatcagtgtggcaaaatacattgtgaaggaatttacgtcaaaacaactcaatgatttaaatgagttatctcaaaagttaatagaagaactcaaggagttacctgagcgtgaagtgaaaaaaggaattcgtcgtagtccggaggaagttaagtctttcattttaaagattatggagaaaaatcctggtatcagtgctacacacgcgttgcgtgaatttcgtgactcgggaaattcatttgaggaaaaacgttttcggactgagtttatggccctgagagaggctaaaccttaa

SEQ ID NO: 13392 - DNA, 1272 bp, Escherichia coli
gtggcgtcacaggagagtaagttgtcgaagctaaagtattttttccctgatagtcaggattttatcgatcccagtttcgacttcttccgcgaaacgcgtaacgaacatcgcgtgcgtcaacgtgacgatcagtatccgcatgaggtttttcctcatccttacgatggtatgctggtttctaaagctgtagttgatggtcttggcggcggcgagagcaaatatactcgtgcccagcgtttgcgttacttccgtaatggaatgaagcactttttccgtctgccggaaaatatggaaactatgggtgattgcggagccttcacatatgttaatcaggacgtcccgccataccgtgtggaagaggtgattgagttttacgaaacttcccgctttaaccatggcgtttctctcgatcatatcgtttttggctatgaaaaacctggtgaggtattcagtggcgaagtgttggctgaatgtcgccgacgccaggatatcactctgaccttggctcaagagtttttaaacaagtctcaaaagtcctgtttcactccctttggcgttgcacatggatggagcaaaacctcctatcgtcagtctgtagaggccctgctggccatgggatacagaaatatcaccatgggggggatggtgccgttgaaaacggcgcagatccttgagactctcgaagagattaaaccgctgctgaaaagtgatacacgtattcacttgcttggcattgcccgtccagagagtttcgccgactttatcaagtttggtgtgaccagtattgactcgacaacaccgctgcagcaagccttcaaagatcggaaaaacaactatcatacgcctgatggcccggcctataccgctgtgcgtgtccctcagtttgatgcgaatccaagtttgagtcgcaaaataaaatctggcgtgattgatcaggatattgcacgacatctagaaaaggatgccatggctgccctgtttgaatatgataaaggggctttgtcacttgagaagactcttgatgcagtcctggcatatgaacgcctccattcgggtgaaaaagaggccgataaaatccgtgcggattatgaacgtacgctaggagaacgtccttggaaccaatgccagtgcaatatttgccaggccatcggtatcaacgtcatcattttccgcggagcagaacgtaaccgtcgccgcggtttccataatattcaggtgttgtacaaccgtttacagcacacattgtcattacgctcagaggaactgtcatga

SEQ ID NO: 13393 - DNA, 1134 bp, Escherichia coli
atgagtgaatatcgtgttcccgccctgcgaatccgacagggtgaggagaggcaactctatagccttgcgatagaaggtaaacagatcagcaaaattgcagcgatttcgcgtattcgtcgcggagaagagagtttggttggttatcagcgtccagaagtacgtaaccatattcgcgaaattcagcgctatattgagagcaaaaacccgatgataccaaacccggtgattatcgcttttgataagcgtgtgcgttttgaaccgcttacagataatggcgacatggggcatctggtgatacctttctccgaagataaggattttgagaagccagggtttattgtggatggtcaacaacgtactgctgctttgcgggatgcggaaatcgactcgtttatgatgccggtctctgcatttatcgctaatgatgcagaagaacaacgcgagcagtttatgctggttaactccacaaaacctctgcccaaaacgttgttatacgaactggcaccgcatacccacggtcgtttgccatccgatctgcaaatgcgtaagtttccttcgctgttggctcaacgactgaacttcggggaaggtccacttgcggggcgcatcaaaacggcaaccaatcctgatggggttattgctgacaactcgatgatcaaaatgattgatgctagtcttcgtgagggagcattgtatcgcttccgtgaccctgcgacagggttgggggatgaagggaagatggtgaaactgctgaataacttctggtcggcggtggaaaccgtgtttaccgatgactgggacaaaaagccgcgctattcccgcctattacacggcgtcggtattcttgcgctgggtagcctgatggatgaaatcgatcaggtgcatcaggactataaaggtgaaccaggctggactgagatcccttcctatactcgttttgtcgaagagttaaaccgcatcaaaccgctttgtgcatggagtggtggcgtgtggaacttcggtacggatattgatggtcagcctatcgtccgtaaatggaatgaactgcagaacctgtccaaggatatatcattagtaactgattttttggttatgaattatatcaaagctgtaaacgcggatattaatacctaa

SEQ ID NO: 13394 - DNA, 3057 bp, Escherichia coli
atgactacactacccaatacattctctgaaggtgatctagttacttctcttttgtttggcggaatcgccaaaattgtacgtcttcacccgcctggcaaggctcagatcgcctggtttgtctcacctctcgaatacgaggttaaccgccagatggcggagaccgtatcactgacgccggcaaaactgtatgaagagagcacggtattcttccgctcacccgagagcggactgtggtgtcgggggcgttatggcgggcaacgtccggataataagcatctggtgatcgtccgctctgataagaacgtcgtcatcgatctagctgatattttttatccaaactacggacagggactggcaatgaacccggcccatttcctcgccgctcgcgccaacgacgcaccttttttctacccactgcgcgagaagtttgtaagtgcatggatcaaacagcgcgccgcctgtcggtcaatgtcgtcgttaatcagcagtcgggtggagattgagcctcatcagatagcgattgtccgccgcattctccaggatcagaaccccaaatacctgctagcggacgaagtaggactgggcaaaaccatcgaagcgggactggtcatccgagagcatattctggagtgtaaacgtgaagcccgcgtattggtggtggtgcctcaggtattgcaaggccaatggacgcaggaactggtcgatcgttttgcgctacaggaagtgatgagcggaggacgacacacccagattcgtctgtgccttccggaagaactttgccagccggaactgatcggctggaagcccacgatggtggtgatcgacgaggcccatcaactgactcgacaggcatgggccgatgatgaagatgacctggcgcagtatgccgctatggccgcgttgtgccatcaggcccgtattgtgctgctcctgtctggcacaccgatgcacggtaacgagcgtcacttcctggcaatgctgcactgcataaatccacaggcgtggcagcttaatgcacagggaatcgaaaaatttatgcaacgcgtggcagagcgcgagcgtctggggggaatttacagctctctgacccctgaaacaccaaacggggtgctggaagagatcctcgaagagttacgtctgctttttgctgatgatgagcaactccaggcgcgcattgttggtctgagtccgttggttgatttttttgcacctgatgaaagcgaagagcgaacggcgggcattttggcattacgacagtggataggagagcgctaccgtctttttcaccgcttgctgcgtaaccgacgtgaagatcccgcgctggaatacctatttccaggtctggccgggttggaaaaatgtgtctggcccgtcgcatcgaccgagatcacgcttgatgaaacccttgatgcctggcgtgccgcggcctggcgcaaccccgcacagcatcaacatctggattccacaacgcttgatgaatgggtggaagcgctgtttctcaacccgctggtgatgtcccgccaagccaaaaaggcactggtaaaagggaccgccagcgaagaagagttcaattttcttgagcagattattgaaacgtcccagcaggagcagaaagccaaagatgtggcgctaatgaaggcgctgaccgactggtttgaaaaatgtcctgatggcaaagcagtcatcttttgcggtgaaggatcagaagccgccttcctgtttaccaaactgcaaattcaggccccctgggcggtagttcgccatgcgccggaccagcgtaagcagagcgagttgttggatgacagttggcaggtattgatctgcgataggcgcggcgaagacggactgaatctgcacggaaacaaccggcttgcggtccactatagtctgagccgcgactttaatcgctttgaacagcggttggggcgctttaaccgctattccggaaatctacgcggcgttaagccagtgaaaagcctagttttactgcctgagcgtgatgggctgcgtgctgactgggtgaaattactggacgaaggcacgggattgtttcatcgaagcgtcgccagcctgcaatttgttctgtctgaacaattagacgtggtatggcgcgattacgttgggcaggggcttgccgtcttccatgaggcgcaacagcgcttttcgggagaaaatggcttcatcgctcaggagcgtaagcgcgttctggctcaagaaaacttgttatcgatggaacaggaggtcattgctgcccgcgagttttctgagcaactggccgaatctgaagatgatgccgaagagcaggcaaaggatatgctggcttggatgtgcaaggcattagggtttaagcgagaaaaatatcctgaaggcggatttcgcctgcgcttcgagcgtggcgaatatcaacggcaaacgctggtggacgtgggaacttttattgataactgcctgctcggtctggatttttcagagggatatccaccctccacggcgatgatgagtctgtctcgtacggaagccggcaaccataaacatgtttaccccttgcgctacgggcagcctttcgtcgaaaccgtatggcaactgatgcagagcgatccgcgaggtgccagtatggcgctgcttcgggttctctcctccgcggttgcgctgaagcaaccccacacctggttccattttcagtggctgagtgaagcacaggttgaaggtgaaaatcagctagccgcgcagcgtcgtggtgatgagtgcttcagcccagtggtccacaatttctggctggatgacggtggaaaagaggctgacccgcagatcgtcgtctccctgctggataaaccttacgatgaagagggcaaccgtttgttccaggatatcaatctgcgagaagaggtctggacgcgaatgccggactggtttgatccgcatagctggaaagagaccgtactcgctgcggcggagcaggcccggcagaacgtgcatgctcactatggtgatcggcccgtccgccatcaattgcttgcaatgaaggcgattattctgtgtacccgtgacatgctgtaa

SEQ ID NO: 13395 - DNA, 2451 bp, Escherichia coli
atggaaaatcagtggcaacaacttcgtgctgttctgaacggagaactcaacgaacgcgacgggctgagtgggcagttttttaaccgcctgctttactgcttggatgatgtacgggcgggagaatgcgaccgcctccacgcattttatgatgcactgcaatgcgctcgggcactcgggctgacgccgttaaggttgccgtaccgacaccttaccgaaggcacaatgctccagcattttggtttgagacgggatcatgactacccaggcgaactgctcctgacgcgcgaagcggaagagattgacccccatctattacccgtctggaaaggcgagcagcgccgttttctggaaaccccaccgctggatgtacttttgccctctgtactcaacgatccgcgttatacgcactacacgtcggcagggcaacagcaggcggtacgcacggtgttgacctgcggcagggataaaacgctactggtgaatctgcccaccgggtctggtaaaacctttgttattcactcccagatgttgacttcaccgcgaaggcacctgacgctggtgattgtaccaactgtggcgctggcgatagaacaggcgctccgggcgcaagaggtgatgcaacaggctgggcaggatcacggtggtcgttacgtctggcatagtggccagtcgacagaagaacgtaatgaaatgaagtcgcgactggcatccggcgagcagcgagcgttgttttgctcccctgaagcagcgacaggtgggctcttgttacaactgttctcgcttgcggagcgcggactactgggcgccgtgatagtggatgaagcgcaccttatcgatcaatggggggcggagttccgtccagaatttcagctactggcgccactagtgcgatcgttgaaggctacctcgccagacggtgtaaaagtcgtgctgctttctgccacttttagccaaagcaccttgaatactctcaaagcgctctttgcaggtaaacgccaagggtcagtgattgaagtgaacggcagttttctgcgtccggaaccagtgtggtatgtcagcgaggctgccagccacgaggatcatcttgcacaggtggaaaacgcaattgctcgcttgccggcgccgatgatcctctacaccaccgaagtggaacaggccaaattctggtaccagtatctgcgcgagcgtggttatcggcgctgtggattgttccatggtgcgacgccaatgcaggaacgagaaggtcttatccacgcttggcgtaacgatgggctggatatcatggtggcgacttcggcatttggtgttgggatggataaaaacaacgtccgttccgtcttgcatgtcgcagttcctgaaaatttagatcgtttctaccaagagagcggtcgtggcggtcgtgatggtaaagcatcggtcgcgcacattattttccatcacaaacagctacaggtcgcacggaacattaaccgtaccaaactgatcggtgccagcaaaggatatttgcgctgggccaaaatgcaccagttgcgcgagcagcatcagccgggtcagttcatcgttccgctacgcgcgaagcatgctgacattcgcatggattcgcagagcaatgtggactggaacctgcgtaccttactgttaatgcagcgggccgggtttatcgatatcgcctatccgcctccggatcttagcgctatcgccccggacgagcgtgatgaagcaaagatccgggcgtggtttgaccattatttcaaccatattcaggtttccgtacgccgtgatggccatatggatgaagcgcggtggcatgagggcattcaggcccaccgttcgcatgaactggggatgcgaaaacagggatatagcgcgttggaggagtggctcaatgacccttcaatctcgttgtgccagaagttagcgcaattttacaccttggatggctttgtgccggaaatagcctgcggcggatgcccagcctgtcggagtaaagggtatcctccctttactccgacgctcggtcgtatcgcgcacgtgacgggcgaggcggtgcggaacgtcatgggaaatgagcaacgcgtttattatcctgcgacgctgacgaaccggctactgcttcgtcaatggagtgactggattgcccgactcctagccaatcgccagattcaggctatccgcgccagccagagcgtactcgcccaacttagcgcggtactgcccgcaggtttgcctttctggtgttcgcttgccgttgatgaagaaaacacctgctgggacgaactggtgctggtgttgcccgacgaagcgatgccggaactggacattttcgccaccatcaatcgcattattgttgcgccggaacgcttacaggaaccgggctaccgcgggcgtcgctggtgggaggttgataccagtgccgtggcattagaacaatttcagaggaatattatctag

SEQ ID NO: 13396 - DNA, 900 bp, Escherichia coli
gtggcaattaccaataacgctgccgcagggagccagatccgtctgctgtgcatgatcgaccgggtactgaatcggcggaccggacaggcgatcccgatggtagatttgattgaattactgcgcccggagatgctgcccgtcagcgatggcgcgagaaaacgtctgcccgccgaagtctctttctggacaaaagaagggttgtggaaaaatgagagcgctggcctgagtcaacagtcgccgctttccagcgaacgtaatctgcccgcacgggttttgcgtacgctaattaacagtgagaaaacgacgccgctgctgactggaacgcgcggtcagcccttgctgatgtgtgtcacctccatgcttgcacaggaaaaatatacgttacgtggaagcacgccgctgacaaaagaggcggtgccgctggccgttggccccatgattaataataaattagcaggtgaggggcgacgtaacctcaacgtctctaacgaagcagaatccttcctgaattacgcgtattttctcggttttacagaaccttatctgaatggctgggtgatggaccctacccgcgccattgaaggaattttggataacctggggcttaccgccgggatgccaattcaggagttcctcagccaactggcggagtttctgccaatgctggatgggggagcctaccgtcagcaggtagaaccgatgatctctgctgacaactggcaaccgctggagaaacatatgattagtgcttctttgagccaggcgttgcttcgtcttgagctgactatgcagttggttttcagttcgcgttctgatgacctggacgccatggtcctgcaaggtccggatggcagcctgcgtcgtatcagtaccgttagccctggggaggcaagaaaatga

SEQ ID NO: 13397 - DNA, 3150 bp, Escherichia coli
atgagaatgatcgaatactggccttccttgaaaaacatcaatgaatgtattcgcaccgaggcggaagagttggcggagtacaccttactggccgtgcatcaaccggtgaatttgctgcgtcgtgataaagacggcaacaacctcggatatgcgaaagaagaggatctgctcaaccactttctggaaacgccgcgcccaatcccggtagtgggtaaagctggggtggggaaatcgcacatcatccgctggttggatgcgaaactgcgattgcgccaggagtacaaagacaagaagtggcacattgttcgtattcccaaaagtgccagcctgcgtgaagttctcacctcaatgctggctggcctggaaggcgagatcttcgacgaggcgcgggaagacatcaataaggtgtcggataaacgcactcctcgcgagattgctgaatggctactgatgctgatggggcaagagctgcgcaacctgcatgaacgcaacaagcaggatatggaagcactgaaaaaacagatggcggggagtactcctgagcagttaaaagccatgaagcctcaggcgacacggctccagaaaatccacatccacgctgaagataatgcattgccaacgctgattaacgatgcctacttcaagcagtttttgttgaaagaagagcactgcctctatcgtcttgccagccgtctgaccaacggcgcaaccagcagcgatctcgacgaaggggaacagcaacttcaggccaaagaccttgatttcagctttaacatcaatgacctcagtctgccggcgcgtcagtatattcagaaaagccgccttaatacgcatgaggacgggcgcaaagatgcctccgagatcctcaacctggtgctgggtaaagcgacgcaggcgctgtttaaccagctcttcaacttccgtggccgcagtttctccgacctgtttactcagattcgtcaggcgctacatgaaaagcatatgacgctgatggtgctggtagaggatatgtcgctcatcaccgcgatcgaagatgtgctgatcgacagcctggaaagggaagggatccgagacgggaaagaggtgctgtgccctgtgtgttcagccattgccgttactgacggttatcaggggtatgcccgccgccgtcaggggatgctggatcgcgcgaagggtgaatgggtgatcgaagaggtagggagcgggcgcgaagagacgcgactgcgtattgtcgatttttgtggtcgatacatcaacgcggcccgctttgggagcgaagccttattacagcgctgggagcaagccgccgataaatctcactggccacctgactgggaagccagcgcaaacggtgacgaaatggccgaagtgtttgggcgaagcgagcaaggtttttctttgtatcccttcaacgctagcgctatccatgcgttggcagaggcattctgccgcgacgatcgcaacgaattaaaattcaacccacgtcagatcatcaaccagatactgttgcgtgtactacagcactgtcgccgtgatgccgatgagggacgctttccacctccgcgtcttggcgatattgctgctccggcagggcttcgaagctggctgttccgccagggctttgccgataccgagcgtgccgaatccgtggtcgcgctgtggggttatcccgccgattccgacgccactttggccagtacgctgccgcctgacgttgcgcgcagtttcgatctggaagatctggcgcaggtgctggaaaacacaaaaagtgccccgctagttgaacaatcggtgatgccaacgcgggtgaccaaagttgagcagcaggttaaaaaaaccgtgcagccacctaaaccagtgaaacccgtgctcaaggaggataaagataccttggctatccgcgcgctggatgcagcggtgggcgactggatgctaaaaggcgcgccgcttgagatcgatcctgcacgatatatcaaaagctccctggcctttttctttgataagcgcgccgtggcggaatgggcgggcagcagctatcggccgaccctttggttgggtaaatccaactttgttgccgttgagttacctaacgcgcagggtaaccgtggcgtacatgtggtgaaatttatttcccagtccgaatacgacaagcgctcggtgcaattaacggatgccgcgatggcgctggcgcggtttggctactacagagaaaactccttaactaagaccgaggactggagctacccggagggcaaaacggattacctgattattcagagcttctgcgatcgctgggttaactatgcgctgacggaactcgttaagcataagcgcaacgatctgccactgcttctcagcgagcagattgcacttgccgatgcgctgggggtgattaaaacggccgatggtccgaaagaggtgcttgggcgactgctgcaaaacagcaaaacgctttcttcacagttccgcaccgggatcacgaaggcaattaccgaactgcgaggagaggcgttagcaaagtgggatgatgcccaggacgcatggctcagcctggtggcgctaaacgatcatgcgctggaaggcgatctcctgctgagtgcgatacaaaaggtgttaaaaaaacgctcaaataacacacacgcagccgtggtgaaaaagtcgctcagtgaaatccgccccgcactggatactgctgctctgtttgccgactgtgaaaatgcggatgatttttccgaactcgtcaccggcctgactcagttggttaaatcccttggggatagcggtgattatcctgcggatatgacacccgacagtagtacgcttgcgaactctctgactgggttaacggaaggtggagtctggttgacgatcctcaagttgcgaggcattacgcaatctgaagatccgcttcgccaatggcagttactttgcgaactggacggtactttaattaaccgactcatattcacaatcagtggctggcagcaggtcaacaagcgggtgctagcgaatattaccgcctacaaccattcgcatggcagtcaccagatcagcgaatttcgcacgcagattgaaagcacgttgcaggaacttcatcaggtcctcgacgccatgcagtccgtcgcaggggaacagtatgacaacgcttaa

SEQ ID NO: 13398 - DNA, 735 bp, Escherichia coli
atgacaacgcttaagacccaacttacgcaactgcgggagcagtatcagataaaacagcaggttcagtcgctggaagaggtctacgatcggtaccgcaccattcgtgacggcttgctggatgttgccgaaccgctgcaaaaagcccaaaagcaacttgaagtgatcggaacgctaccggaaccacactccgctatcgatttttcgcaagaggcggcgcttttcggcggtgccaaaacgcagttggatgcgctgacggcgcgcttcaaagaaagtggcgataaaaccgagcagtgcgggttttgggaaacggtgcgggttctgaagagcgtacatgaaagtattgatgataaggtggatgcaacctggaaagcgtttgttgccgatcttgaagcgcgcgcaacgctggatcccgtctttctggaacaacagcggacgctggggaacgtgttggtgtatgacgattatcgcaaagcgcgcgataactttaatcggcagaagttaagcgggccagacagcctgtcggtggtaaaaaacctgcagaagtatagcgatgagatgatcgcgcttaaacgttcaatggacctggatgcgccagacgatgttctgcgcttttttgaggcgctggacagacataatcatgcctcgcttacgctgctgacgccgggcgtgattacctggctggaagaaaaagatatgctgccagcgtttaacgtgacacgtaagagaatgatttaa

SEQ ID NO: 13399 - DNA, 4515 bp, Escherichia coli
atgaagggaatcgatctttcgcttttgcaacgcgtgctagatgcactggaagaacaagaaaatgcgctcctggtatggggtgacacgggcggcttttttaatctggatgaacttttaagcgttatcggacgggttttacctgacgaagatgccgaagtggttctggatcaaatgctagaggccgctatgctgatccaggtgccgcacgtcagtggcacgcctgtctggcgaacccgaatgggggagacggtccatctcatgcgcaacctgcgccagtggatgcataagcaaaaactggaccagagcaaaacgctggtatcggactatcgctttattcgccggccgcgcagctatcccgaccgcgtttacgaaccggcaacgctgattagcggctggaaaaaacagctgaaattaagcgatcgcgtttgtgacatcatgcgccaggcgctggcgtcagataagcccttccttctggcgggttttcaggtgcgcgctaccgaacgcattatgcagtgctggcaggatcatcaggtgaaaagcaacacggccagcgggaccattgtctgtgctggcaccggtagcggtaaaacgctgtcgttttacctgcctgcgctaacccgtctcgctgaggatatttgcaacaaccctgagcgcaaggtgcgcattctcgccatctatccgcgaaaagagttgctcaaggaccagtttgccgaaactttttcacagtgccgcaagcttgacgactatatgctcacggcggccggaagaaaaattcgtatcggtgccttttttggcgatacaccggtgaaggcggaatggtctaaggaagacgttaaggggaaggttggtctgccgttcgggttgatgaaatgccagcagccccacccgcatcatcctaagcagaggtgcggaggggctctcatttggcgtcgtgaggacgtatttggcgagcgtgaggtacttacctgtacgcagtgccagcatcaggtggatcagagtgaaatcatgatcacccgtgatgcgcagcaacatcgcggcgacgcgccggacattctgtttaccacaacggaaatgttgaacctccagatgaactccacctggagcaaccacctgtttggcgtcggcgagggctatgggccgacgctggttctgctcgatgaggtccacacctacagcggaaccaccggcgcgcaaactgcgtttctgctgcggcgctggatgcagcgcaccgattgtttgccgcattttgttggcctgtctgcaacgcttaccgacgcgcagcacttctttgccaggttggtgggtgccgctgaggagcaggttgcgctgatccagccctacatggaagatatgatcgaagagggggccgagtacctgctggcgctgcgcggcgatccggtttctgaaacggcattactctccaccaccatccaggccagtatgctaatggcgcgcatgctggatagcaaagcgaataagtcgcaaggtacgtggggcaagaagaccttcatcttcaccgacactctcgacggtaacaaccgtttgtaccatgacctcagcgatgccgaaggttgggagacgggcccagggcactcgcgcattgatcactcaccgttggctgtgttacgtagcccttttgataatactgcacctgagcggtctaaaaccgaactggggcaaaactggagggcggccacggatattggccacgacctcgcggaaaacaaagtcatttcccgaacgtcgagccaggatgccggcgttgatgcatcagcggatgtcgtggtcgccacctcttcgctcgaggtggggtataacgatccgctggtcggtgccgttcttcagcataaggcgccgaacgatgtcgcctcctatttgcagcgtaaaggtcgtgccggacgtccacgaggcatgcgtccctggatgctggtggtgctctccgagtttggccgcgatcgcgtcgagttccagcgttatgaagggctaatgagcccggagatcaaacgtcagggtctgccgctggacaaccagcacgtacagaaaatgcaggcagcaatggcaaccctcgactggatcagcaaagtcggtcagttcaaagatctctggagcatgttgaaaaaagctgagcataatcagctgaaatacaatcgaatgtatggcccgcttatcaaactgattgaagaggtgctgagcggcggcaggcggttgaacgaattgatgcgctaccttcaggatgctctgcaattatctgatggcgcggtgcagaatatcctctggagcccgccgcgctcgatcatgtttgagtttctaccaaccatactgcgtaacctcagaacgcgctggtcggttaacggcgtggagtgggccggactgcgtccgaatcagccaaatagcgagggcgaacagcaccggagcaattcacccgtcccggaatacatcccgcagaacctgtttagcgagctaaacttgccggaactggacattcgcctgaagcgtggatttgacgatgaagaccactgggaaactctctctttctggcagggaatacgtgaatttgcgcctgggcgactctctaaacgctatgccgtcaaatcgaacaaaagtaccgactggctggtgccacaatcctacgagccgatgccaggggaagggcggcaatttgttgatttccagataagcgatgcgttcggcgatagctggcaaaacgagtatgaagttgactatatgggaaaaaccatcaaggttgttaaaccgtcgaaggtcatgaccactcgggccgacattcgccggatcaatgataaaagtaatgcgcaactgcaatgggtgttcaacgtcattaaccccgctattgctacgccagacgaggtgccgaagggaccctggaagcacacgctgagcgatgtcacgttctacaaccaccagcatatgaccccgctggaactggtccgcttttctactggatcgcaggcgtcgctccggttcaggaataaggaacgggctcacgttgatttcacctgggttaatggcgaggaacaggttggcgtaggaagtcgtcaatgggtggatgcaatgcgcctgcgttttaacctcacctgtgatgatgtgcttggtctgctacatcaagaagaaatccagcgaggcatgcgccccgtttattttcaacatcttgtaagacagtcgccggaatttgaatttgacagcttcaacgcggactgggccattgagtgttttatggctcagcttgcggagacactggcaaacggcgctcacgcctcggttgagtcggcattacgagaaatggcctccgaaaaagggggagaaaggctggcagatattccggccagcctgttccagccggataccgacaatgaaacaggcactgatcaggcgctacagattggcctcaacaaacttcttcagcgaccggaaatacagcagttgctgctgaactgcgcgcaagcgctctggaaacccctggatgaaatcgacggttttgttgaatgggcacgccaggtattagcggacaccctggctgcgggtgtgcagcaaacgctaagcacgctgcttccggacgttgatgagcgagcggtagtgacggattccagttggatgagcgatccccgcaagggagcagaatggctggaaatctggctctgtgagatggagtctggcggcagcggtattctgattcgtttacagcagaagtgggctgaagatcctgtctccttcctcaatgtactagtgcgtaatctttcagccagcgactacgagcagatcgattacgatctgcgaactgtgttgcagatgatgcaaacggatgacacgcttcgtatggcgatctcagccgtacgtgaagccagcaacatggacgcccggcgggaggctaacaagaatctgcatttgcagctttcacagcgcggtatgcgcctttcccacagctttaccacggtgctgtactcgcggattctgcgggcgggcagcggcgagcacacagatacccagctttatcagctactgtcggactggttgtcgcttgaagcgagcgcgggtattgaattcagtatgaacaccatggcgcacgcgttggcggtgaactcgcttggcgtagaaactgatgcttccgtcgtgtttgacgagcagtgccggaatcaaaacctgctctggccacgaggctatacgatccgacaggctgagctcggcttttacaatatgttttgctcgcgcaaagtcacaaccgagcgtctgcttgctggcgcgttatttagcgagcaaatcgaaaagatcgcccttgacgatgactggcttgggcatttgcatgcggcgctgcgtaaaggcggtcgtgcggaactgatcctcactcgccagcagcgaaatcaattacatcaggtcattaccaccgtgcaaattgaacccgtcgatcatttgggactgctgctgtatccgcgtctcggtgaagtccgccgtgagcaggatgtgctcatattgcgtattgaactggcagaggcgatgcaatga

SEQ ID NO: 13400 - DNA, 546 bp, Escherichia coli
atgatcggacgtgcaaaacagcggcagatttttttacatggctccgcagggcaccggcagttgcgagaagtcctcagcgcccaggttgttgctctgattatgcagccagagccaatctggctggtttcgccgtgggtgagtaacttctcactactggacaatcgctcaggcaattgggacagcattgatcccgcgtggggaggccgggaggtggatttcattgagctgttagcctgtgcggtgaataacggcgcgccgctttcgctggtcacccgcgacgaaccgatgaaccgtatctttgtaaaagcgctggaaaaacgcctgagtaactttgcgacctttcgtttggaatggcgtaaccagttgcatacaaaaggttttctgacgccaaatttttttctcaagggctcgatgaattttacccggagcggtgttaatcgaaatgaagaatttgtcgaactgaactgcgattcgcatatgatcggtgaagcgatggccgaatttgaaagtcagtatctttttattggatcaaaggaagcgttctga

SEQ ID NO: 13401 - DNA, 2172 bp, Escherichia coli
atgtgtgcagactggctgaaaaattattacgctgaagataactatctggattatgacaaggcgatgcagggggggtatggaatcccacaaatgaatacgctgattcaacaggccgcagcgctacggatgccctgtatcgttccttcaacgcgaacgggaagaacggtgttttatgctctggctgagaatgcgaaaagcctagacgaattacgacgtattttaaccgcggcgttgggttccgctgacactactccggatattaaatcactcaatcattctgacgatggcggggagcagttgctgctggagaaatccccggacggaattctggccttcgatttcctaccggtgccggacggttcgccgcaacaggtaaaagaatggcaggcagcacgaatgaaacgggtttatgccatgctgcaaacggtgatggatctttatcatcagcgacctgtcttacattcgctggtcagtcggcaaaccggacgaattctcagggatttctacacagcatgccaggctcgcgatggcaagattgccgaacagtatctggaagagttacgcggaaatcagacgctttcttctctgaatctcctgtttcttgagctacaggggatggcggcttcagcaaaatgggacgcgattctcaaccaccctcggctggaagtattattgcgcggccgggtgccggagcgtatccagcgcctgctgttgcgatcctctggccatttaatgcttaacgccatccgcgatgcgcacttcccactggacaggcgtgaagatgccaggcgactggtgctgggcttattgccgctgtacaagcataagccccgctttgctcatcaggcgagtttcctgcctgactggcaactgtgggccatgggggccgcgctgctggggatcgacgaatggcaaacggcgacgcctctattagctcctgactggatacagcaggtcgaggggtgggcgacaggcacaacctcgctgcccgcgccggtagcagcggaagaacaggcgctgatccaggcgccggttatcatgctgataagccttgaaaacgcgaccgatttattactcgaagcccttctggcggacgctgagcgcgaaagtgagatctacgcgcaactggcggcgatgcctgaagcaacacgacaggcattgcaaaaaatacccaaactctgggaggcatggcaggcgctgaaaaaacgctgtgagcctcaggactatggctggtgccgctggcttgcagatttacaacagactacggaatccgaacggtttgaatcattgcgccagcaggcgaccgttcactacatggactgggcaccgtcaaccttcagcgaaacgcagtggcaggcgctgcttgagcatcagtccaacacccagttgagtaaggttttgcgagacgtactgccaactcttctgaactggttggaagaatatgacgttaaggtatctgcctccttgtggccagactggcttatgctgctggcagttgaggacatacgctcagaagaagatgtacgtctcggcgggatgattctggataaattcctttccagtccctttacctgcgaagaatattcggcagcgattgaatcgacagagattctatgtgctgaaaacgtgtcggtgaggacgttgggttattctcttgatattgctgaacttctgtatgacagggtcactgcaaacgaagcctccagattaggtttctggattaagttgcaggagttactcaagcatcgctgggagcgcctggatgccagtatgcagttttctgcacgcatggtggaaaggctctatctcggcgaacatgccgggaacgttttcccgtcggaggacaatacgccgggcgtagcatcttcgcttcatcgcgatctcagcggtaaaaccttagcgatttacagcctgatgaaaggggcggcaagacgcggaaaagaggcgttgcttcagctttatccaggactggaagtagagctcaaccacgatcatgtcgctacccctgcgctggtgaatctggcgaaaacagcggactactttatcttcgctagtagcagttcaaagcatcaggcgttctatgctgtgacggattatcgcaaagagatcatctacccctctggaaagggggcgtccagtatgatcgcatctttcgtcagggccatggagtaa

SEQ ID NO: 13402 - DNA, 363 bp, Escherichia coli
atgaaaacaacgttatacaaagatttcacctttgaagccgcgcaccgtcttcccaatgtgccgaatggccataaatgcggacgcttacacggacactcttttgtcgtgcgccttgagataacaggtgaagtggataagcataccggttggattatcgactttgccgaactaaaagcgatttttaaacccactctggatagactggatcactactatctcaatgatataacgggactggagaaccctaccagcgaagtgcttgctgaatggatttggaatcagattaagcctcagctatctatcctgagcgcggtgatagtgaaagagacatgctccgcaggctgcatttaccgtggtgaatag

SEQ ID NO: 13403 - DNA, 390 bp, Escherichia coli
atgtttgctaaatcttttatcgctctcgacggtaacgatcgtcttaccggtgccagaacggcacagaccgccccttacgaccgctatacctgccacctctgtcacagtgcactgaaataccatcctgaatacgacactgaacgcccgtggtttgaacacattgatgcgggttccgccgaaaatggtcagcacaattgcccctacgtaaagccagacgcgagtgaaatacacctcgcaagacgcctgcaacgcttccttcccgatgcaacaccaagggtatataaagccgactggaactgtatacaatgcgggaaaaattactatggtgaatgctattgctctgcctgccgtaccggagacttcagccagctaacaaagatgggatcatga

SEQ ID NO: 13404 - DNA, 240 bp, Escherichia coli
atgggacgctggcttgctggcaggctcatgaaagagctggggctggtcagctgtcagcagccgactcaccggtataaacgtggtggtcatgaacatgttgctatccctaactaccttgaaaggcagttcgccgtgaccgagccaaatcaggtgtggtgcggtgatgtgacctatagtgtgcccggagttcagggcgggcatggatgcttaaatgaaccgcgagtctgtctggaatattga

SEQ ID NO: 13405 - DNA, 375 bp, Escherichia coli
atgaaagcgctggaaatggcatgggaaacccgtggtaagcccggcggggtgatgttccacagcgatcagggcagtcattatacgagcaggcagttccggcagttattgtggcgataccagatcagacagagtatgagccggcgcggaaactgctgggataacagcccaatggaacgcttcttcaggagtctgaagaacgaatggatgccggtggtgggttacgtaagcttcagcgaggcagctcacgccataacggactatatcgttggatattacagcgcactaagaccgcacgaatataacggtgggttacccccaaacgaatcggaaaatcgatactggaaaaactctaactcggtggccagtttttgttga

SEQ ID NO: 13406 - DNA, 837 bp, Escherichia coli
ttgacgacctggcgcaatggcgagcagtgcgcgccgcataagccattactgctgttatacgtactggcgggttatcggcaaggtcatgggcgtctgtttaattacgcttcggaagatcgcgacaacctacatagtctgctggagcgatttggcccccaacgagcccagtaccgaccggatatgcctttctggcgcttacagggggacggtttctggcaactgcaaaacgcggagcgctgttccacatttggcagcagtcgacgacctcccgcaggtgagctggttgagcataacgttgctggcggctttgataagcaacattacgaccaactgataaaaagtaagagcctgattaattccctcgcccgacaaatcctcgaagcccatttcaccgagagcattcaggaagaactcgccgatgaactaggatttgagctcttgttgctacgtaagcagcgcgatcccctgttccgccaacaggtactgcgagcctacaactacgaatgcgccatttgcggcttcaatatgcgccacgacaatacttctgtcgcgctggaggcggcctatatcaaatggaagcagtacggtggcccttgcgaaattcctaatggtctggccctctgcgcaatttatcataaagcttttgataagggatccattggtttagatgagagtatgcgagtacaggtttcagaagcggtcaacggtagcgggatcgtcggtaggttgttttgggattttcaggggaagagcatttctctgccgcaagtaaaagcatactacccgcaggacgaattcgtggagtggcataggagggaggtgttcaggagaggatga

SEQ ID NO: 13407 - DNA, 1914 bp, Escherichia coli
atgtcacataaaacgttacccaatctggccttaattaccccctatccagcactggcagccgtagtgactgagcagtgcaccggtatttttaactgccatgtttttcacggaagtctggaaaaagccgcggggattgcccgtaatctcgaccctgacttctatgacatcattatcagccgtggcggtacggcggactatatcgatcgcgtgaccaaaattccggtagtacgtattctcacgtccgcgctggatttgcttaaatcactcacgccactgaaaaaacatccgcataaaatcgccttttttaattatcagaactatttatctgacgtaaatctggtggcaaccgcgctggaagtggagattgaagaatttatctttctgtcgcacgccgacatggtcgataaactcaaaaaatgccgtacacgcaatttccagacggttgcaggaggattaccggtgtcagacacggcggaacactatgagatgcaaggaattctgatcgaaaatggtctggaatcggtgaacagcgcgctgcgcgaagcgatggctatcgttgagacgacccgccgcaagcagcaggatatggcgcgactggagatcatcctctcctcgattacggaagggatcatcgtcaccaatgaaaataacgagatccagatcttcaataaatccgccgagaacatatttggcctgatggcctcgcaggtaattggcaaaccggtagatacggttattaaaaatacgcggattaatcaggtattgctgacaaaatccgccgaaattcgggaaattatggatttggacaacacgtccatcattaccagtcgggtgccaatatttcgtggtacgcagtgtattggggtggtgtgttcgtttaccgatacgccgcaaatccagaaagtggaacggattattcgcggcaaactgatgaaaaaaggcttcaccgcccggtaccggtttgagcatatcctcacgcaaaataagcacatggagtcggtgattcatctggcaaaaatttatgccaatacccactccccggtgatgatttatggggaatccggcaccggtaaagagttattcgcgcagagtattcacaaccagagtcaatgccaccgtggcccatttgtcgccattaactgtgccgccattccggaaaccctgctggaaagcgaactgtttggctatgaagggggctcttttaccggtgcgcggcgcgaaggaaaagaaggcctgattgaactggcgcaccagggaaccttatttctcgatgaaattggtgagctgccgctacctattcagagccgcctgttacgcgtcttacaggaatacgaaattatgcgcgtggggggaaaggacattatccctgtcgatgtgcggattattggtgccactaaccgatcgctggaaaaaatggcggaggaaggctcgtttcgcggcgacctctactatcggttgaacgtcttgccgctaatggtgcctccgctacgggaaagagagggcgatgtccgttttctggctgagcacttcctcgaaaaatcgggctgcgggcataaactagcgcagttcatcgcgctgttttccacctacaactggcccggaaacgtgcgtgaactgaattttattattgagcgactggcactattatccgccggatttcccaacgcttcgctgtttgaaatattaaatctgaccggctttaacgcgctaaaatcctgcaacacgtcacagacgaatgggaggatcgtcgcggatctgagtaaaggacaactgaaagccgtcattaaagatcttgagcgacagattattgccttctacatggatctttttgaacaggatcaagagaaagtcgccgcccatctggggatcagcaaaatgagtttatggcgtaaatacaatcagatggatcgctaa

SEQ ID NO: 13408 - DNA, 1197 bp, Escherichia coli
atgaacaaacagtctggtgtattaagtggcgttcgtgtgctggatttaacccgggtgctggctggcccttattgcggaatgatgctggcggatttcggcgcagatgtaattaaaatcgaattgccgggaaaaggggatgattcacgagccaacgcgccgcagatcaatggcgaaagtgcctactttatgaatttaaaccgcaataagcgcggaatgacgctgaatcttaaatctgaagaaggtcggcagatatttcttgatttagttcgcgacagcgacgtggtactggaaaattaccgtccgggtgtgatggaaaaactgggacttggctatgaggatttacgtaaggtgaatccggcaattatttacggcgccgtatccggctttggtcataccggtccgtattcgaaacgcgcgggttacgacattattggccaggccatgagcggactgatgagcaccaccggttggcctgatacgccgcctacccgcaccgggaccgctattgcggatgtggtcgggggaatgagttgcgcaattggcgtgcttgccgcttacgtcaaccgcctgaaaaccggcgtcggagaaaaagtggatattgcgctggtcgattcgatggtgtcgtcgctggaaattatcaacattatttaccttaataccggacgtattccgacgcgtattggtaaccgctatgaagcaatttatccgtatgactctttccaggcgcgtgacggttacgtcattattgcctgcggcaacgataaattatacggcctgctgaaaaacgtcctgcaaattagcgcgctggaagatgagaaatttaaatctaacctcgaccgcgtcgcccatcacgccgagctgaaagaaattatcgaatgctggacccgtgatttagatattgacaccatcgtgtcgatgctactggatgccggtattccttctgcgccgatcaataccatcgaccgcgtgacgcaggatccgcatattgctggcgcccgcgaaatgtttgtcgatattgaacaccccgtcgcagggaaaattaccatgaccggcaatcaggttaaattcacacataacaaggcgaccatcagaatgcctgcgcccacgcttggtcaacacaattacgaagtgcttaaagaacgtctgaactattcagatgaaaaaattgagaagctcattcgttccggcattctgtaa

SEQ ID NO: 13409 - DNA, 918 bp, Escherichia coli
atgtcgacatttattcagattactgaagtcgggccaagagacggttttcagaacatcaaagcgtttattcctaccgatttaaaaataaaaattatcgatcgtctggtcgagtcggggatcggcgcgatggaaatcacctcgatggtcagtccgaaagcgatcccgcaaatgcgtgatgctcgtgaggttattcagcatgttctgaacacgcatccgcatattattccatcagtgttagtaccgaatgtgaaaggggccagtcttgccagtgaggcaggcattcaaaatattaactatgtggtttcggtcagcccggcgcataacaaggccaacattaatcggacgcatgccgaatcgttggaggacctttataaaattcgccacacgttcccggagatgaccatcacgctgtcgctggcgacggtatttggctgtccgtttattggcgagaccagccgtgaaacgctgatggatatgatcaagtttgccgatgatctcgggatttcggcggttaccctgtgcgataccattggcgtcgccaacccgacccaaacgttatccgttctgcgtgggatccagcagaaattccccaaaatggacatcggtttgcatctgcataacacccacggtatggcgctggcctgtatgtttgctggcgttcagttgggcatcacgcgctttgagaccgctgtcggtggactgggcgggtgcccgtttgcgccaggagctgccggtaacgccgccaccgaggatgcggtgaatatgtttaatcgaatgggtttcgataccggtatctcactgcctgacctgctggatatcgcaaacctgatccgcagcacgattgagccgacgttgttgagcagtctttcacgtgccagaacctacagtgaatttgatttttgcagcgaaaaaatctga

SEQ ID NO: 13410 - DNA, 1350 bp, Escherichia coli
atgatgaataataatatcgggaagccgaagatgacccattacagatggtgggtcatgagttttatctttgtaacctacaccgtggctaatgccgaccgcgcaaatatcggctttgctattccttttattcaggaagagtttcaaatctcgaataccatggccgggttgttaatcagcctgttctttgccggatatgcgttttttcagatccctgccgggtacttgattaagaagttcggcatgcgtaatgcctttgcgatgggtatgttattaacctccgtgtttacggggttgatggggatggtgaacaacattttcctgctgaagatcctgcgttttatggtgggcatctgtgagtcaccggtggtcattggctcgacggtgacgattaaccagtggttccccccgaaggaaaaagggacagcgaccgggctgtttctggcgggatccaagtttggtccgttgatcgtcccgccgctgtgcgcttggatcatcaccgtctggggatggcgctatatttttgtcttctttgccattcctggcttgctgttggcgatcttctggtatctgatggttcgcaataagccggaagaaagccgcttcgttaatgagcaagaggtcgcttacatccgcgaagaacagcttccgacgacgacccaggaagccgccgcacccgtcgcgcctgagttcaattactgctggctcgacaagctgattcgcacaaagcaggttgaagaactgtcctgttcaaaacaggtcttccgctgctgggatatttatggtgtcgcgctgggatacttctcgatggtggggatcgtcagcgtgctaatgtcctggctacccaagtatctgatcaccgaacgcggattcgatctgacgagttctgccgcgctggcggcggcgccattcttcgggacggtaatgggcaactttatcggcggcgtgctttctgaccgggtgctgaacaagcgtcgtaaaccgctgatgttgctcagtgcaggggcgacgatcttcaccatgtacgcgctggtttatgcgccggaaagtaaaatcgttctgtcgctgatgctgtttctgctgggactgatgctgtcgctgggttattccgcttactcggtctacgcgatggggcgggcgaataaagacatttacccgatcgcttacagcgtgatcaacatgggtggtcagttgggcggaatgtgtatgccactgattgtgggaattattctggatgcttacaactgggatgcggtgttcatggcgatgaccgggttctgtgttctgtgctttattctggtctccacggtcattgaaccgttgtcgaaaaatatgaaggtcaactaccggtaa

SEQ ID NO: 13411 - DNA, 345 bp, Escherichia coli
atggttgatcgaatgtacgttccgccactggcttcacggcgggggaagcaaacccaaattcgctcacgcgataaatgggctgaaacggatttgtttgttgagcagggcgtcaggtatttctttcgtgtcatcggaaagtggtgtgatatgaatcattgttgtgatgcgaatggttataccgtcgactatctgaattttgcccgaatctggctgcgttgccgccacgaacctgcgacctggtttgccttaattggcactatcgataaatcaaccgacaccatgtttgtgattggcgacggtgcccggctaaataacggctggttgcgcctcgcagcggtgagttag

SEQ ID NO: 13412 - DNA, 327 bp, Escherichia coli
atggaaacatgttttaaagtcctgcagctcaaattcgaccggaagctgtccaacaggactatcgggctgacactaaatatcagcccttccaccgtctttgaggtgctggctcgcttcaaagcatcatcaacgccatggcccctgccagaaacgctgacgccggaggccattgaatcgcttatattcccggagaaaaaagcgtctgtgctgataccggtgctgcccgactggcttcacattgataccgaaatgcggcgaccgggggtgacgcggcaacttctgtggacggaatacagggctcaggacggaaaacgggcactgatataa

SEQ ID NO: 13413 - DNA, 681 bp, Escherichia coli; identical to SEQ ID NO: 11860

SEQ ID NO: 13414 - DNA, 189 bp, Escherichia coli
atggaaacgttattaccaaacattaatacgtctgaaggttgttttgaaattggtgtcactatcagtaaccctgtatttactgaagatgccattaacaagagaaaacacgaacgggagctattaaataaaatatgcattctttcaatgctggcccgtttacgtccgatacaaaaaggatgctggcaatga

SEQ ID NO: 13415 - DNA, 234 bp, Escherichia coli
atgacggcagggttcaactttaataactatgcagcaggtttttgttccgctaccccggcgttaaggggaaatgaggtcagcatggatactatcgagcttggcaacaacgaatctctggtatgcggcgtgtttcccaaccaggacggcacgtttaccgcgatgacatataccagaagcaaaacgtttaaaactgaagctggcgcgcgtcgctggttaaccagaaacactgactga

SEQ ID NO: 13416 - DNA, 324 bp, Escherichia coli
atgaaaaaagataactattcattcaaacgagcttgtgctgttgtcggtgggcaatcagcaatggctaggcttttaggtgtatctcctccaagcgtaaatcaatggatcaaaggtgtacgtcagttacctgctgagagatgtcctgcgattgaacgagcaacaaaaggtggtgtcctgtgtgaagaacttcgtcctgatgttgattggacatacttacgacgctcgtcatgttattcgcagaatatgtcgatgaagcaaccaaatgacgaaaacgatcatacccgaagcatcaagaggcaaatgattcatgaaaatcaaacatga

SEQ ID NO: 13417 - DNA, 426 bp, Escherichia coli
atggcaaaagtatttacacaagaagagcgggaaaaaattaaagggcaggttgttgaacttgtacgtctgagcggtcgcgagacgttgcggcaactggaagccaggacaggtgcgacaagatatctgatgagtgttctcgccagagagctggttgccagtggcgatgtatacaactctggttacgggttattcccgtctgaacaggcgcgtaaggactggcaaaatgctcgcaaaaaactctcaagggcaaaggtgaagaaacctgcagtggttgatccggaccttatctggtcgttaccagacggcgaaatacgccgctacgacaggcgcctgaatataatctgtcgcgagtgccggaagagcgaagctatgcagcgtgtactggcattttatcaaggaaatgttaggtattttagacgttactag

SEQ ID NO: 13418 - DNA, 489 bp, Escherichia coli
atgaaactggccctgacgctggaagccgacagcattaacgtgcaggcactgaacatggggcgcattgtcgttgacgtcgatggtattgagctcgctgaactgattaacgtggtctgcgataacggccacttccttcgtgttgttgatgaatctgaccggacctcaacagactgcatgccaccatttgctgccctgaccggcatacgctgcagtaccgcgcatatcatggcaaaggacaacgcctggctgtactcactgtcacatcagacgaatgacactggcgaatcagaatggattcatttcacaggtagcggatatctgttacgtaccggtgcgtggtcatacccggttctgcggcttaaacgcctggggctgtcaaaaacgttccgccgtctggttgtcacacttacccgacgttatggcgtcagtctcattcatctggatgccagcgccgaatgtctgccggatttacccactttcgactggtaa

SEQ ID NO: 13419 - DNA, 237 bp, Escherichia coli
gtgattgagcagcatattgaggcaggcatttcactgtgtgacgcggtgaactttctcgttgaaaaatacgcactggtgcgtaccgaccagccggaattcagtgcctgtacccgttctcagttaataaacagtattgatatcctccgggcacgccgggcaaccggcctgatgacccgcgacaactacagaacggtaaatgacattaccctgggtaagcatccggaggcgaaacaatga

SEQ ID NO: 13420 - DNA, 492 bp, Escherichia coli
gtggcccgaaaccagaagtgggcgggtgacatcacgtacttgcgtaccgatgagggctggttgtatctcgcagtagtcatcgacctgaggtcacgcgccgtcattggctggtcgatgtcactgcgaatgacagcacaactggcctgtgatgcactgcaaatggcgttgtggcggagaagacgcccggaaagcgtcattgttcatacggaccgtggtggtcaatactgttcaggggattatcaggcgctgctgaagcgacacaacctgcgtggcagtatgagtgcgaaaggctactgttatgacaatgcctgtgtggaaagcttctttcattcgctgaaggtggaatgtatccacggggaacgctttagcagccgggaaataatgcgggcaacggtgtttaattatatcgagtgtgattacaatcgctggcgtcgtcacagtgcctgtggcggtctcagcccggaacaatttgaaaaccataatctcgcttag

SEQ ID NO: 13421 - DNA, 519 bp, Escherichia coli
atgatgctgctcagtattataataatgttattatcaccaaagataactcatgcaaatgagaaagtaatatgtcaaaacagtgcatcttttgtgaccaaagagtttatctgcggcactatacttgtctcattaatactcagttctctattttgctacatatcaatatcaccatcaattttcatgcatacttatggcctgagtacttttagttactcaattattttctccttctcagttttatttttcataatcggaaatcaattatcaaagattgaaaaattatccaacctatggtttttattacccaatagccaattttatcgcattacaaataaatggttcaaaaacaggatttgccgcatctattacaggttttactcaaacaataagcgctggtacaatcagtttcctgtcagtaaccgtaagcgacaacggtgttggtcccgggactactttaggtcttggttcactaataacttcattactgtcaatagccgtaatcgccattgcaggaaataa

SEQ ID NO: 13422 - DNA, 180 bp, Escherichia coli
atggatttatcaccagaagacgcaaagtttttacgagaactgcaacaccgtatgctcagagaagccattatcgaacagcaaacgggcatgagcgccatagacccattgcgatacaaacgggcctcatctcctttagttgacgacaattccaatgcggataaaacacgtccaccacactga

SEQ ID NO: 13423 - DNA, 153 bp, Escherichia coli
atgcctgtgcgtctggtgtctattatattcccaacattattggcgctattcttgctggcgtgggcatcgccacattatgaatattgtgtttgtcgtgattcaatttttatttataacctctacccggagcaaattcaggtaggtcatgcataa

SEQ ID NO: 13424 - DNA, 204 bp, Escherichia coli
atgaagtatgtctttatcgaaaaacatcgggctgagttcagcgtcaaagccatgtgccgtgtacttcgggttgcccgcagccgctggtatgccgagctcctgcgtcgccatcaaataagcccgcgccagcagttccggctcatctgtgatgctgctgtccgtaaagcattcactgaggcaaaacaacgttatggtgcgtattag

SEQ ID NO: 13425 - DNA, 129 bp, Escherichia coli
atgactaaaccagtatcagccagcaaaaagccccgtaagcaacactcgcctgaatttcgcaatgaagccctgaagcttgcagaacgcatcggtgttgctgccgctgcacgcgagctcaacctgtattaa

SEQ ID NO: 13426 - DNA, 303 bp, Escherichia coli
atgtttatgaaactcgatgagcatatattacggcacacgctctcctgttatagatgtagtgttaaattaactgcggctaatatttgtaatgagcacttttggttgctaatagaattatcaggtgttcgcagtgaaaaaatcatcatgtctttaaaagactatttggttgatggtttttccaaaaaagaagcgtgcgaaaagaacggtgtgtcactcagctatttttctgtcaccttaaagaaactatcttatataaataatatctcagcattacttagtgaatattatcatggtgatttctag

SEQ ID NO: 13427 - DNA, 1185 bp, Escherichia coli
atgaatgatccagctgttatggaggcccgagccgagttaaattctgcacaatcccgcacagagcaggctcgttctgcacattggccggttatcactgctacgggaagtaaactcctttcacagagtcaccgttattcttatgattatgactctgaagatattttgcctggtattcgtggtgaagtgaatattttcgcttcaggagcaattgaggcggatgtacgtcggagtgaatcagaagcagagtattatcattataaagtgaaagaaacaggggaagaaagaattcgttcctttgtatctctatatcttgatgcactcagggaaaaacaatccattgaggtacttaaacagagtctttcccgacataactcgatacttgatgatcttaataccatcagtattcacgatacagggcgggaatctgaatttgtacaggcagatgcacgcagattaatggtccggcagcagcttaatactcggaacagagtgcttaaaagtacactgggaaaactttcgacttggacaataaatccggtaaccgaagccgatcttgaaaatcctttttctctgatgacagagtccaggttgttaactgattttacacaggcacctcagacaggaaatccatcgtggcttgctagtcaggctgatgttgagagtaaaaaggcggcgctgagagctcaagaacttgcccggtatccccggatagatttaacgggctctgtcacccgagatgaccggcaaataggtatcaatctgtcctgggacctttttaaccgtaatgccagttacggtgtcagtgaaaaagctgcgcagatagccgcagctacgggccgactggactctgttgcccgactgattgatgaaaccgggcgattatctctgataacggtcagagaaagtcgggtggaaatggaaacgctcagacgtcaggaacaggcctctgccaaagttgtagacttttatcgtctccagtttcgtgtggcaagaaaaacactgattgaattacttaatgcagaaaatgaactgtacagtgtcgggctttcccgggttcagacagaggatcagatgctccacggaatgctggattatctctattcccagggaatgctcctgaaatggagcggagtgaatctttctgatgcaaaaaataacggggctgaagggcaggtaaataagtga

SEQ ID NO: 13428 - DNA, 2148 bp, Escherichia coli
gtgaagagtatttttgaaggattatcacaggtaacggcattactgggtacacctgtatctgctgaggctttggctgccagtactgtccggacagatgtatcggggattgattttcgttctgttggcgaatttctccgtagcgaagggtttgataatcatctttccaggcgggctctggaggatattccttcacttgcggttccagtgcttcttttactgaatgctcaggaagcaattgttgttgtacgtattaagggtacaggtctgactcgggagtatcatgtgcttcagcccggtgggctccgtaataaactgtctcacgaagcgttaatggctgtttattctggttactgctggtttgttcagccacaggcaacacaggatcgtcgttctgacctgccggagtatgacatgagcgggggatggttctggcgggttctgtggcgcttcaggccatattacggacaggttattcttgcaagttttatcattaattttcttgcactggttagctccttatatgtaatgaacgtttatgaccgggtcatacctaatcgatcctgggaaacgttatggatgctgagtatcggagtgattgcagccattctgtttgaatgtgctgcaaaattaattcggagctatctgacggatattgcgggtaagaaggcagacctgattatcagctctgccctgctacgccgggtgatggcggtgaaaatgtcggacagaccagcatcctccggttcatacgccagcaatttgcgggaatatgagtctgttagggagtttatgaccagtgccacgttgctggcttttgtggatttgccttttatcctgcttttcatcggtgtcatcggacttgtggggggctggcttgctgttgttcctcttacactggttccactggtgattctggcaggaatattactgcagcgaccgctttcccgtcatattaatgcctccatgcgggaatcatcgcagcgccagggattacttgtggaggctctggacggaatagaaactctgaagctgaataatgcggttaactgggtccagcgtcgctgggatggatatactgccagtgtcgcccgttcgtccatccgggtaaaaaataccagtaatgtcattatctgtttttccacagcagttcagcaactgaatactgttctgctggtcattctgggaacttatcttattcataatgatgacccacataaccgaataaccatgggggcactgattgccgcggttattctttccggtcgtgcgctggcaccacttggtcagattgcatcactggccacccgttttcagcaggcccgcttggccatgcagggggtgaatgaaattgtccgccgtccggtggagcgggaacgtcagacacattatctgacagtgaaggatatccagggagagtttcgtttcagtgatgtctccttttcttataagtccggattacccgaggcattgtccggtctgtcactcagtatccgacctggagagcgggtgggtattattggctcaatagggtgtggcaaatcgacgctactgaaaatgatggtggggctgtaccgtcagaacaggggacaaattactcttgacggtgttgccctgcagcaactggatcccagttttgtccgagacaaagtatttcttcttgaacagaatccccggctttttctgggaactctgcgtgaaaatctgcagctttcgcgtctaccgggaagcctgtcggatgtggatatgattaatgcagccggacgtttcgggtttgaccgttttatccgacatcatcctcgcggacttgatatgcagataggggaaggcggtctggggctgtcaggaggacagaggcagatggttgccctgacgagaatggttctgggttctccccgggtggtactgcttgatgagcccacgacaggccttgatctgcagactgagtctgttgttctgaaaggtctgagccactggagtcggggacgcacaatggtggtggtgacacatcgtctgcaggttctgaatattgttgaccgtattgtcgtgatgaatgaagggcgggtaatgatggacggttcccgtgatgaaatactgaaaaaactgtcagggaaacagcagaatgatgagaacagaccggcagcttcctga

SEQ ID NO: 13429 - DNA, 1248 bp, Escherichia coli
atgacagaaaaaatggaacggaataaagcgtcgtcagaagtggtcaggcagtcagacctggcgctgttgacagatgtacaggcagcccttcagcaggaaaaacatcatgcccttttcctgatggtgatttttctgctggtactggtagtgacgtttattatctgggcatggaacagccctctggatgaagtgacccgtggtcagggaagtattattcccggtagtagggagcaggttatacagactcttgacccagggattctgaaaacacttgaggtcagggaaggcgatattgttgagaaaggtcaggtactgctgacactggatgatacccgaagctcagccatgttgagggaaagtgaagcccgggtgaataacctggaggccgtcagggcaagactccgtgcagaagcttattctgaatcactgacatttccggataacgttcctgaggatttgcgggagcgggaaagtacggtctattttctccggaagacggagctggcgcagagcatcgccggccttaagcagagtaaggctctgctggacagggaaatagcaatgacacgaccaattgtacgtgaaggggcgatgtcagaagtcgaactgttacgtatgcagcgccagtcagctgaactgcagttgcagatagacgagaaacagaataaatacctgacggaagccggttctgagctggtgaagacagaaacagaccttgctcaggcaaaagagaatatggctggcagagccgacccggttgagcgttcacgtctcagggctcctctgagaggtatcgtaaaaaatatacgggtaaacacactaggaggggtggtttccgcaggacaggacataatggaaattattccgctggaagatcagttactgattgaagcttatataaatccacgggatgttgcctatgtcagaacagggatgccagcacttgtaaaattgactgcttatgattatgccatttatggtggtcttgacggagtggtaacactggtaagtccggatactttacgtgatcagaaacgtccgggagatttaaaactggaccctaatgaagcttattatcgggtattggttaccaccagtaataattatcttacagacaggaatggaaaaaaattaccagttattcccggaatgatagccagcgtagatataaaaaccgggcgtaaaacagtattccagtatctgattaaaccgataaccagaatgaagcaggcacttcaggaaagataa

SEQ ID NO: 13430 - DNA, 2178 bp, Escherichia coli
atgaaaatgattttcactggcaaggtcagtggagaaaaaacagtactggcagccggagcccgtcatacagtaaaggcacaggccggggaacagtatggactggttgatgaggtgacaggtctggttccggatggggtggaagctgaccgttcaggcgatgatttaattctacgtaaaaaggaagatagtacagaagtccggattgaaggattctgggaagaatgccagccgggtgaaacacagtgtacagcagtatttaatgttgtgggtgaaaatggccaggtaactgaagctgtcctgacccaggatggccctgtactggagaattttactgcagggcaaagtggcacattagctggaggtatcaataacgggattatctggggggggattgcttttggtgcagggctggctgctattgcactggctgccggaggcggtggtggaagcagtcgtcataagcgtacagctgaaggtgagcagaagccgcttcagccggacggtaacggcaaggcggatgcagaggaagcggcagtggcagcggccacggcggcagtggaagcagcggaagcagcggaccaggccgcgaaggacaagctggcagagctgaatgcagacaatctgatcacgccggaagagaaggcgcagctggaagcggcgaagcagaatgctgacaccctgaagggagaagcggacagtgccgtgaaggcgttgccggatacagccgcggagaaaggtggcctgcaggatcgtgtggatgcactggacggtatccaggtaccggaagtgaacgatcaggacggtaacggcaaggcggatgcagaggaagcggcagtggcagcggccacggcggcagtggaagcagcggaagcagcggaccaggccgcgaaggacaagctggcagagctgaatgcagacaatctgatcacgccggaagagaaggcgcagctggaagcggcgaagcagaatgctgacaccctgaagggagaagcggacagtgccgtgaaggcgttgccggatacagccgcggagaaaggtggcctgcaggatcgtgtggatgcactggacggtatccaggtaccggaagtgaacgatcaggacggtaacggcaaggcggatgcagaggaagcggcctttaataatgcaaaagcccatttagaaaaggcactaaatactgtctatcagccaaatgatgacctttatgctgtatataaatcagcattcaataaaccgactggtaatccagaagcaagtactacttcatggagagaagttcttaatcaaaatggtgtttctggcttcagcgtagataaaggtcatgatgcagcataccgttacacttataatggattagatggtgatgatgttatctcaacggcatactctgtcggtggtactggcagatcaatggtatctcgtaatgacatggttattaatactaatggtggcgatgatatcatttctgttggtatggattatggtaggagctatagtgctggctatactgacaagaaatatgctaccaacacgggggccggggatgacattatgatgattggccttggtaataataaagttggagtacatctaagggatgatttaagtttacgaattgtagatagagatgacaccattaataatggtgagctattgctccctgtatctcaatatgataaggggacgggagggattatttcatctacaagcattaatatgggagatggtaacgatactcttcttgcttttggctatgagggatttggtaaggctattgttaataccaacattgatttaggtgcaggaaatgacatcattcatgttaatggtgatgtggaagccgtaaatattaagggtggggaaggcatggatactttagccattagccatggaactctcagtactacagatttctcaggatttgaggtaattgaacttggtgataataatggagggataaatgtaatcgcatctgcccttgtgcacagtggtgttgatgctatagagggagggatcttaaaaataactggtacatctaatgcacgcgttaatttagatggtaatgactggaagtctggtggagttctatctgaggatggtgttaactataatgtgtatacacatgacgcagcaccagacattaaaatattaatcgatgaacacattacgaatgtagtgtaa

SEQ ID NO: 13431 - DNA, 1869 bp, Escherichia coli
atgggattattcaattataagtcttatgctccagcacaaataagagagcttgtttctggatcttataatcttgccatatattccaacactggaaaggttcttggattaggaagttttctggcatccaggctatttgcaaagcacccagataggattgattattctaccgatgttcttaatgaaggctggcgtgatattacagtggaagaactcaggttatcttcggaatatgtcgattcaagagggttttatcgttttcccagtccggttacaggaaacccttcatcaggatttggtcctcagttgaaagtggttgggttgtttgatacacaacagaatctacagaaaattgcaatatcattctgtggaacaaatgatatctgcgatattgttgattatacacagctcaataatggaaaagcactatctgaagcagaaaacctgcttaaaagtatcagagacttcgcagtcaataacggtttgagtggtgaagatatcattgttactggctatagtctgggcggcgggttgactaacattatggccaggctcagtgaatctctggttgatggattttatgttaattctgattatattgcatgggcttccccgctggtatttgacggagatggaagagtattaaatatcggctttgaaaacgatccggtatttcgtgtgctgggagatgagtccgggttctgggaggctgttaaagccatggggccaggattgacaaccccggatcgcgaatatgattctgctacagataatattgttttatacacagacctttatggttcatttctctggaatgttgtgcccttttcagtgcttgctctgccgctgggaagctggaatgcgcattttgcgggttcaaagactgacgccttcgcaagaatttggggatctcagttttacaactacatgtcaccggacagtacagttattgtggatgagcaaagtagctggacatcctggtattcatgggttcatgacaagggggatgagagtcgtgaaagacctgtattcatcatcggtaatgatggcaataatctgctggcaggcgggaagggtggcgactatatagagggagggggagggaatgataagattgaaccaggtaagggagcaaacagggttgatggtggcagtgggtatgacacgctgcttcttagcgatgtaatggatgactggaatatatacagggtcagtgatgggacgctgtttttccactcagaacggggagccggtctgactgaggcaacaggtattgaaggtatctctttttctggtgactggaggagtaaactaagcccttatcagatagaagaagagcagattacagaccacaggtatcttctgaagtggcgtaataaaaatgttgattacggaaaacatacagaaggtacaaacggagatgatagtctgttcggaaatattatttttggtcttgacggaaatgatatattacatagtgccgggggagaaggagtaagtcttttacacggaggtcgcgggaatgattatcttcatggggcttctggtaatgatgagttgtacggagcagaaggtaacgactggttatatggtgggggaggtaatgattatctgtatggtggtaccggtaatgatgtgtttatttttgactcatcttgtggcggaaatactgttattatggatttcaataaaaacaaaggagagatggacaaattatttctttcaagagaaattgtgtccagcgcagatgaattcatatcatgtttaaaacaagttaattcaaatgttgatgttaattttggtgatattaatatatcgctaataaatacatcacttgacaacatcactcatagttgtgtcattgttgtctga

SEQ ID NO: 13432 - DNA, 570 bp, Escherichia coli
atgcttattatacttgttacaaaagataaatttcttgaaactggcttcatcaccctaataggtaatgttaatgtaattatgggccgtgatttgtttacactcgacaataaaagagatatattgaataatgacaatttcattattttctgtgacgagcagtttataagattgatgagctgtattttttgtggtcgccatttttctataatatcaacaaataaagtgaaatccatctctgatataataacgcacattcgtaggggtatttattgttatggtgattcgttttgctccctcagtatgagggaaatggtggttctgtttagtcatatttttcatagtcacagcacaaagtatattgctaacaaattaaatataagtaataaaacagtctatagccacatctatcatgcaatggaaaaaaaccttctttgcagatatagtgtaaaatatctttgttaccttcagaatagtatgaaaaaaacatccactcaatgtgatggcaaactggactcgggaaaagtcaggataaaacaaggatgtcgtggttcctgtaaaaaatttccttga

SEQ ID NO: 13433 - DNA, 222 bp, Escherichia coli
atgctgaaacgcccgcttttaaacaatcaacacaacactattttttcaaaaaaacagccactccccgtcgtcgaatccgtcgaggaggaagatgaaccaggcgtcgcggttgagaatgccccctcttcttctgaagacgaagaaaatactgtagaagaaagcgacgagaaagccggtttaagagagcgtgtcaaaaatgcgctgaacgaacttgagagataa

SEQ ID NO: 13434 - DNA, 1953 bp, Escherichia coli
atgaagggactcaataaaatcacctgctgcttgctggcagcactactcatgccttgtgcaggacacgctgagaacgaacaatacggcgctaacttcaataacgccgatatccgccagttcgtggaaatagtgggtcagcatcttggcaaaacgatcctgatcgacccttcggtacagggaaccatttccgtacgcagtaatgatacgtttagccaacaggagtactaccagttctttttaagtattcttgatctttacggttattccgtgatcacactggacaatggttttctgaaagtggtgcgctcagctaatgtaaaaacatcgccagggatgattgctgacagttctcgtccaggcgtaggtgatgagttggtcacccgaatcgtaccgcttgagaacgttcctgctcgtgacctggctcccctgctccgccagatgatggatgcgggtagcgtcggtaatgttgtgcattatgaaccctccaacgttcttattctgaccggtcgtgcctccaccattaataaactgattgaagtcataaagcgcgttgatgtcatcggcacagagaagcagcaaattattcatctggaatatgcatcagcggaagatctcgccgagattcttaatcaattaatcagcgaaagccacggtaaaagccagatgcctgccctcctttccgcgaagattgtggcggataagcgaaccaactctcttatcatcagcgggccggaaaaagcacgccagcgcataacttcattactgaaaagccttgatgtagaagagagcgaggaaggaaatacccgggtctattacctgaaatatgctaaagccacgaatctggtggaagtgctaaccggtgtttccgaaaagctgaaagatgaaaaagggaattcgcgtaagccttcttctacttctgcgatggataatgtggccattaccgccgatgaacagaccaactcgttggtcattaccgctgaccagtccgtccaggagaaactcgccacggtaattgcgcgtctggatattcgccgtgcacaggtgctggttgaggcaatcatcgtcgaagttcaggatggaaatggactcaacctcggcgtgcaatgggcgaataaaaacgttggcgcacagcaatttaccaatacgggattaccggtttttaacgctgcgcaaggtgtagctgattataaaaagaatggcgggatcaccagcgcgaatcctgcctgggatatgtttagcgcctacaatggcatggctgcaggcttcttcaatggcgactggggcgtattgttgactgcgctggccagtaacaataaaaatgacatcctcgccaccccgagcatcgtaacgctggataataaactcgcgtccttcaacgttggtcaggatgtgccggtgctatccggctctcagaccacttctggggataacgtctttaatactgtcgaacgcaaaacggtgggcacaaaactcaaagtcactccgcaggtcaatgaaggcgacgcggtactgctcgaaatagagcaggaggtttccagcgttgactcttcgtctaattcgacgctcggcccgacatttaacacccgtactattcaaaacgccgtgctggttaaaaccggtgaaacggtggtcctgggcggattgctggatgatttttctaaagagcaagtgtcaaaggttcctctgcttggcgatattcctttagtgggacaactcttccgctatacctcgaccgagcgcgctaaacgcaacctgatggtatttatccgtccgacgattatccgtgacgatgatgtttatcgctcactgtcaaaagagaaatacacccgctaccgccaggagcaacagctgcgaatcgacgggaaatcaaaagcgctgattggctcggaagatttgccggtgctggatgagaacacgttcaacagtcacgctcctgcgccatcgtcacggtga

SEQ ID NO: 13435 - DNA, 1359 bp, Escherichia coli
atgagcaattacgcactgacacaaactatcgttaccggcagcgatccgcgcgccctgccggagttcagcgccatccgcgaagaaattaacaaagctaaccacccgtcacagccggagctgaactggaaactggtggaatcgctggcgctgtcgatttttaaggccaacggggtggatttgcataccgccacctactatacgctggcacgtacacgtaatcagggactggcagggttctgtgaaggcgcggaactgctggctgcgatgatcatccacgaatgggataaattctggccgcagagtggtccggcgcggactgagatgctggactggttcaacacccgcaccgggaatatcctgcgccagcaggtttccttttccgaaaatgatctttcgttgctctaccgcacggaacgggctttgcagcttatctgcgacaaactccagcaagtggaactgaagcgccagccgcgcgtggaaaatctgctttattttgtgcagaacgcacgcaagcggtttgagccgcagcccagaaaccgtactgatacggcggcacagaccatggtcagaacgctggtctatgcgcctgaaggcacggcttccgccacagcggaaaccatgccccccctacccgacctgccggaaatgcgggtgggggtgcgcggtgtggcagataacgccgacaaagcaaaacagggcgacacggtaaaaggttttgttgccggtgccgcctgtactgccgttatcgcatctgcactctggtggtggcaggcgtatccgatgcagcagcagcttacacaggtcagggataccacacagggagccgccaccgtctggttggcatccccggtactgaaagaatatgaacagtacctgcaacagcttctgaatgccccgccactacagccgctggaaaccggaatgcagatgatgcgcaccgcagacaccctctggccggaaagcctgcaacagcaggaagccagcaggatgtggagcaacacgctgagaaaccgggcgcaagccagtccgcagatgaagggctggcaacaagcgcggcagaatttgcgggattttgcagatttgatgatgaagaaggagacggagaaacagggtttcaccctatcgtatatcaaaacggtgacctggcaggccgaacggttactgaatcaagaaacaccactggagtacctgctgacgcagtaccaggagacccgtacacagaagcaggacacacaggcgttggaaaaagagatcaacgaacggctggacgggctgttaagccgctggctgctgctgaaaaataccggacaggatatggcaacggataacagaaccgaacctgtccatccaactcattga

SEQ ID NO: 13436 - DNA, 360 bp, Escherichia coli
atgaatttaaaaaaggtttgttgtatatgtgtattattctcgctgcttgcaggatgtgcctctgaatctcctattgatgaaaaaaagaaaaaaactcaaaccacacaaatttctattaataaaaacgttccccagcaactaacagacaaagatttatatggtaatgaaaccacactggctgtatccgaggaggatattcaagctgcgcttgaaggagatgagtttcgtgtgcctcttaattctcctgtaatacttgttcagtctggcagtcgcgcaccggaaaccattatgcaggaggagatgagaaaatattatacagttgccacattttctggcattcctgacaggaaaaaactgtaa

SEQ ID NO: 13437 - DNA, 453 bp, Escherichia coli
atgaaatttatggaatgtgctgtccgggatgtgatttatgggaccaatgtccgtattgtcaaaccggtcaacatttatgaatgtgaactcagggacaacgtgtttgtcggccccttcgttgagatacagaaaggctgtgtcattggtagtggaagccggatacagtcgcacacgtttatttgtgagaacgtaacactgggggagaactgcttcattggtcataacgtgacgttcgccaacgatctgtttcgttcaggaacaccagatccgtcaccggataactggatcagcattaccctgggggattcggttactgttggcagtggagccattattctgtctccgtatatatgcagcggagctgttatcggtgcgggggctgttgtagtaaaaccgattgagaacaaaggcatttatgcaggaaacccggcaagactgatcagaatattatga

SEQ ID NO: 13438 - DNA, 597 bp, Escherichia coli
atgaaggaactgggtatcagctcacttatcaggcgcaagaagtaccgtgcctatcgtggagaacaggggcgaacttgtaataatttactgaagagacaattttatgctgaccgcccaaatcaaaagtgggtaacagatgtcacagagtttaaggtcgatggcaggaagctctatttatcaccaatcatggacctgtataatggagaaatagtctcatataaccttactgagcgcccattagcatcaatgataaagagcatgctattagatgcggtagaacaactcaataaagacgataagcccttgttgcatagtgatcaggggtggcaatatcagatgcctcgttggcaacgttggttgagtgataatggcataacacaaagcatgtcccgatgtggtaactgcttagataatgcagcaatggaaagcttttttagtactttaaaatcagaatgttactatctaaataaatacaataagttacatcatctaaagcaagatataattgattacattgaatactacaatcaccatcgcattaaagagaaactcgatggcatgagtccggttcaatatcgacttaaacatttttcatag

SEQ ID NO: 13439 - DNA, 501 bp, Escherichia coli
atgagcaaattttcattagaattcaaaagggaagtatccgaaaaatacctggaaggtgagctgagtttgaagtctgttggaaaaatgtacaatattgaccccagcacggtaaggaaatgggcttatgtttaccgtaagcacggattaaaaacactgactgggcaaaaaggacgttatgacgataacttcagattgaatgtggtcagagatgttattgataattctctttctataagggaagctgcagtgaagtatgggatccctgcttttaacaccatatccaaatggattaaaaaatacagtgaggttgatttttcgatgaagggacaaaaggaagatttgaggccgaaaactcctgctgtttatcaacgaaatcgttcgacacaactgacaatcagtgaacgggaagaacttgagtttctgagagttgagaacgcttatctaaaaaagctgaaagccttagctcaggaaaaattacgattggaacaaaagaaaaagtaa

SEQ ID NO: 13440 - DNA, 180 bp, Escherichia coli
atggctatctttcaggaagtgggactgcctaataactttttgctgattggatttattgctggtgattattatcttttattcgtatttccgactaagttgctttacaacattgagccaagcatgaatcactgctggagtcactttacccaaaccactgcggccagtagttgcgacagttga

SEQ ID NO: 13441 - DNA, 1035 bp, Escherichia coli
atgcagtcagctagtaaattaatctaccgcgggaagttgcttggcagtttacccactgtgggcgagattcataaagaaatcgcagtatcggaagaaaccgtaacatggatctctctgcaacgagatattatagcgaatattttgctgggaaaagatcctcgcttacttgtgattgttggtccatgctcaatccatgacgttcaggccgcagttgattatgcgaagcgattgttcgtattacagaataagtacttatcgaaaatgtacattgtaatgcgcacttattttgagaaacctcgaacccgtaaaggctggaagggaataatgcacgatcctgatctaaatggaagttatgatgttgagaaagggatacgatatgctcgccagtgtttgtcttcaatcacaacgatgcgtgtcgcaaccgctacagaattcctcgatcctttccttactccctatattgctgatttaatatgttggggtgctattggtgccagaaccactgaatcacaaacgcatcgtcaacttgcgtctggtttacattgtccagttggatttaaaaacagtactgatggaaatattaacctagctattgacgctattattgcagcccgtgaacaacatattgtatatatgacatctttaacaaatagtatatctacactattaaccgatggcaatccacatggacatctaatattacgtggaggtagagaacctaactatggtttgtctgatataactaaggctgtgaaattaatgcatgatgagggcattaaccatcgtctgataattgattgtagccatggtaatagcggtaaagtggctaaacggcaaatttccgttgcacgtcaagttataaataatcggaaaaaaataccaggatatgtagctggcattatggtggaaagctttttacaagatggtaaacaatccgatagttttccgctagagtatggtcagtctgttactgatgaatgcatatcatggcaacagacagaacaattattatcaactctggcagcacagctttaa

SEQ ID NO: 13442 - DNA, 177 bp, Escherichia coli
atggcgggacaacagcggttttggtgtccgaaatcgtacaattctgaacatctacgcaagggaatgtacggaagtaagccagatggttatcggacggtaggaacatttcgtacatcctttacgttcagtgagttagctggcttggatgtaaccactcgttcaactcaattctcttga

SEQ ID NO: 13443 - DNA, 699 bp, Escherichia coli
atgaaaaaacaaaatctggcattaatatcatgtctgctttttagctcattatcttttgcagcgactgacactggcgagttaaaagcaggggcaacattatcagagcttacggagcaatacccggtacattgggtatctgttgagcaggtgattcagggattgaaatccgcaccactgaatgtgggctttgatattgatgacacgttgctttattcaagtcctggtttttttcatggaaagcaaaaatactcaccagaaagtgatgactatcttaataagcaagagttctggaatgaagtaagtggtggttgggatcgttttgctatacccaaaaaatctgcaataaaattaataaaataccatatggaacggggtgataatatttactttattaccgggagacctgctcctgataacgggaaagaggatgtgacagcaactttgagagattattttaaaattcctgaagggaaactgaataaggttatttttgctggtacagataaagatgcaaaagtgaagtatataaaaaataatggcatatcagtttattatggggattctgataatgatattcttgatgccagaaaagccggtgctgaggggattagggttctccggccattaaattcaacaaacagccctgagccccgtaatggtcagtttggtgagagggtgatcattaattcacaatactaa

SEQ ID NO: 13444 - DNA, 309 bp, Escherichia coli
atgatagttcccgtcgatgcagagcgtgatgagcgggggtactggacgcaccctgcactgttcggcagtggctgtgagagcgctgcagactttcattactggctgagaacacaagggttgcagtgctttgttatgactatgtgggatgaagtgccagagctttttgctgtcaggtctggcggggaggagccggatgcgcgtgactggatgccggagccgccagatgatgatggctggttcctgggatctgtccatgatacccgctacgggcctgcctgttactggttacgtcatatcagaacgggctga

SEQ ID NO: 13445 - DNA, 453 bp, Escherichia coli
atgaaacggtggtatctgtgtccgcaggtacggggcgcggatatcgtccagctgaacgggaatatccggccacgatcacgccagtggtggcagttattcaggatggtgtctcagtggcatgttgatgttgttatcgttgagcggcgttcgttcagtattgttgcagcagtagagctggatgatgccagccatttacgaccagaacgcagacgccgggatattcttctggaagaggttctgaggcaggctggtattccgttgctcagaagctacgatgccagaaaactgctgcagatgaccggagaatggctggataccttcagaacagatctccagtcagaaccggaaggcagcaggggcgaaaatgtgcatcggtttacgcgtcaacagcaggcatcagaaacagcggtatggaaggtgaaaagtgattcctgtacggagggcaataaatga

SEQ ID NO: 13446 - DNA, 717 bp, Escherichia coli
  misc_feature (677)..(686): n is a, c, g, or t
atgacgtttaacgaaatcaataatcaggtgaatttcagcgaaagcctgtgtccatttactaattccggtatcttgtattcgccagaggaagatctcaatgagcgcgaacaaataatgtaccaggcggtacattatgagttagttgccagtgccctggcggtacagactggaaaactgatcaatcctgaatttaatatcggctgtatgattgctatgtgccccatctatcctctgacgtgtgcacccaacgatatgatgatggccacgaaagcgatgcatcgtcgttactggtttactgatgttcatgctcgtggatattatccgcaacatatgctgaattactttgcaaggaaaggattcaacctcgatatcacaccagatgataacgcgattcttgccagaggttgtgtcgactttatcggctttagctactacatgtcttttacgacgcaattttcgccagataatccgcaactggattatgttgaaccacgagatttggtcagcaacccttatatcgatacatccgaatggggatggcaaattgatccggcagggctacgttattcactcaactggttctgggatcatttccagttgccgctgtttattgtcgaaaatggatttggtgcggttgaccagagacaagctgacggcacggtgaacgatcactatcnnnnnnnnnngattacttttcctcccatattcgggaaatga

SEQ ID NO: 13447 - DNA, 123 bp, Escherichia coli; identical to SEQ ID NO: 3258

SEQ ID NO: 13448 - DNA, 1215 bp, Escherichia coli
atgaaatttgaacgccatcatgaaatattgaaacgactcagtaaattcggttctgtaaaagtatccgatctgtccaatagcctcaatgtaacgaaagaaactattcgatcagatcttaatgaacttgccagacttggctatctgactcgatgtcatggcggtgcttttatcgtcctagactcgcttgatactattgcgaaaaatgaaatcgcttatgcgcttgaaaattatgatacagcccagggaataaaaaaaggccactcaactatgaaaagtcaagtatgcgttattggttcgtttaatgttgatatcatcagttatttgccgaggcttcccactatcggagaatcgcttctggcaagtaattttatattttcaccggggggaaaaggttgtaaccaggcgctggcagcaagctttgccgatactgatgtttatttcataacaaaagtaggtacagatcactttagtgattatgcgatcaactttatgaattcgtctaagatttataaaagtataatttatcaaacgaaagaaacgcaaaccggaactgccacgatccttgttaatgaaggtactggcgataatgttattgcgatctatcccggtgccaacatgacaatgtcgtccgatgaaataactattcagaaagaagcgattattaattctgatgtcatacttctgcagctcgaaacaaattataccgctctgcaacaagcgatcacattggcgcaaaaaaacagtatcccggtcattattaacccggcaccctataatgatatcgtcaacgaacttattcaggatgttgattatatcacccccaatgaaacagaagctggtttactgtccggcatagacgtacacgatcttgaatcagctaaacgagctgcagaagctatccacaataaaggggtaaaaaacacggttatcacgctcggtagcaagggctcactcgcatttgatggcaaaaaattcattcattcgccagcgtttccagcggtcgttaaaaatacggcaggagccggggatgcttttaacggcgctctggcatcaggacttgcgaaaggaaaatcactggaatcagcactgtgttatgccagcgcctttgcatccctggcggtggagacaagcaatgcttccgacatgcctgaacatgaatctgtgatacatcgaattcagagtatacattatcagcaaactatttttacgcattaa

SEQ ID NO: 13449 - DNA, 759 bp, Escherichia coli
atgaataacaccaaaaaatcactaaaggtgctctttattggagaatcctggcatattcatatgattcattcaaaaggatatgacagttttacctcaagtaaatatgaagaaggtgcgacctggttactccaatgtctgaaaaatagtcaggtagatgtcacctatatgccggcacatacggtacaaattgccttccctgaagatgtggcacagttagaacaatatgatgccatcgttattagtgatattggtagtaatactttcctgctacaaaatgatactttttatcagcttcgcataaaaccaaacgctctcgaactgattaaagaatatgtgaataacggtggtgggttattgatgattggcggctatctctcattcatgggaattgaagcaaaagccaattataaaaatacagttctggctgatgtgctcccggttacgatgttagatggtgacgatcgtgtcgaaaaaccagagggtgttattgcacagccatcacaacctgaccatccggttattaaagggttctctgaatatccttttttcctaggttataaccgggcgatcgctaaagaaaatgctgaggtggtattaacaataaacaacgatccattactggtctttggtaactatcacaacgggaaaatagcctgctttatgagtgactgttcaccgcactggggtacacagcagtttatgtcctggccgttctataccgcgttgtgggtaaatatactgactcatattgcaagataa

SEQ ID NO: 13450 - DNA, 198 bp, Escherichia coli
atgttgagtttcagcgttgttaaatcggcaggcagtgccggaaactattacaccgacaaggataattactatgtgctgggcagcatgggagaacgctgggccggtcaggggctgaacagcttgggctgcagggcagcgtcgataaggatgtttttacccgtcttctggagggcaggctgccggacggggcggatttaa

SEQ ID NO: 13451 - DNA, 534 bp, Escherichia coli
atgaacgcaaaaatcagatacggcctgtcggctgccgttctggcgctgattgccgctggtgcgcctgcgcctgacattctcgaccagtttctggatgaaaaggaaggtaaccacaccacggcataccgtgatggtgcgggtatctggaccatctgccgcggtgccatcctggtggatggcaaacctgtcgttccgggcatgaagttgtcgaaggaaaaatgcgaccgggttaacgccattgagcgtgataaggcgctggcatgggtggagaaaaacatcagagtgccattgagtgaaccccagaaagcggggatcgcgtcattctgtccgtacaacattggtcccggtaagtgtttcccgtcgacgttttataaacgaattaatgcaggtgatcgcaggggagcgtgtgaggcgattcgctggtggattaaggacggtggcagagactgccgtattcgttcaaacaactgctacggtcaggtatcccgtcgtgaccaggagagcgcgctggcgtgctggggaatcgacagataa

SEQ ID NO: 13452 - DNA, 468 bp, Escherichia coli; identical to SEQ ID NO: 7045

SEQ ID NO: 13453 - DNA, 327 bp, Escherichia coli
atgactaaaaatactcgtttttcccccgaagtccgtcaacgggcagtccgtatggttctggaaagtcagagcgaatatgactcacaatgggcgacaatttgttccattgctccaaagattggctgtacgccggagactctgcgtgtctgggttcgccagcatgagcgggataccgggggcggtgatggagggctcaccaccgctgaacgtcagcgtctgaaagagctggaacgtgaaaatcgtgaactgcgccgcagtaacgatatccttcgccaggcttccgcttattttgcgaaggcggagttcgaccgcctctggaaaaaatga

SEQ ID NO: 13454 - DNA, 522 bp, Escherichia coli
atgaatatcgttccactaaattacaaaggcgaacctatccgcttcaatactgatggctggattaatgccactgatattgcaaaacgtttcgggaagcgtctggatcactggttgtccaacgctgaaactctcgaatacgttagagctctggatgaggtttattcaggtgaaccatcgaaaattctacatacccgtgattccgggtatgtaaaaacaagcaaggcacgaaaggacaggggcggcggaacatggctgcatccaaagttatcagttgcctttgcaagatggtgcgatccgaaattctccgtatggtgcgacctgcacattgatagtctgcttcgcggtgaactgactgagcagcagaaatatgagcaagcatgtcgcattcgcgatgaccggaaatcaaaagccagcaatggggcaagagagatggctcgctggcgatgggataagccggttattgaagcaaatgtcgagtactggcgtgagcaactgcagttgactctcgatatcgcgtgctga

SEQ ID NO: 13455 - DNA, 2199 bp, Escherichia coli
atggcagaaaaaaagatgactgactggcatcgcaaggtgctgtgcaactttgataatgcctggtcagcaacgcaggatatgcgtgagcagattattgaggctcagcgtttcgtccgggtgtccggcgcacagtgggaaggcagcacaaacgctggttactcatttgatgaaggcaggtttgagcattatccgcgttttgaactgaataagatttcccgtgaatgtgatcgcatcattggcgagtatcgacagaatcgcatcagcgttaaattcaggccgaaggatgacaaggcatcggaagctttagccgaaaaaatgaacggcaaattccgcgctgactatcaggaaacatccggtggcgaagcgtgtgataacgcatttgatgatgccgtaacgggtggattcggttgtttccgcatgtgtgccgattacgaagatgaaatggatccgagtaacgagcagcgccgcatcagccttcttcctgtttacgacccagcgacatgcgtcttctttgatcaggacagcaagcaatatgaccgctctgatgctatgtgggctatggaaatgttctccatgacgcctaaagcgttcgaggctgaataccctgattccatcgcggcaagcctttctcgtgatgacactggcactcaatatgactggtcaacgccagatgccatctatgttggacgttactacgaagtccgcatagagaaggtgaagctcacggcgtggcgcaaccctgttagcggagaaacggcaatctatgatgaagatcaaatcaaagatattgtcgacgagctaaccgatggcgcattcgaactgattggtgagcgaacggtgaagaaacgccgcgtttattgcggccttctgtctggcgctgaatggctggaagaaccgaagcgtattccgggcgaacatattccactcatcccggtatatgggcgtcgctcatttgttgataatcaggagcgaatcgaaggccacgcagcaaaagcgatggatgcacagcgtcttgagaacctgatggtttccatgattgcagataacgccactcaggctggcggtgatggcattcctatcgtggatgttgatttcattcccggcccattaatgaatcactgggcagagaggaataagaaaagacctgcagttcttcctatgaccagcaagaaggacaaaaacggaacagtcatttcagaagctcaggttgctggctggacacctccgacacaaatgccgccagctcttgccgggctattgcagtacaccggaacggctattcagcaaattacaggtgcgtcgcagcttgagaacatgccgagcaacgtcgctaccgataccgttgatagcatctttaaccggatggacacgcagtcctatatctacatggacaacatggctaaatccatgcgccgtgctggcgtcgtgtggctttctatggctcgtgaagtctatggcagcgatacgccaatgcgcatcgttaatgaggatggcagcgatgacgtggcgctgatgactggtgaagtggttgaccgtcagacagggcaggttatcgcgcttaacgacctttcgcagggtaactatgaagtgactgtcgatgtcggtcagtcgttcgctactcgccgtgacgcaacggttaagtcgttactttccatgctggcacttatcccgcccggaacgccgaaacacgaccttgtatcgtcgatgatcctcgacaatatggacggcgaagggatggacgaccttaaagaatacaaccgcaatcagttgcttctgtctggagttatcaagccgagaacgccagaagaacagcagatggttgagcaggcgaaacaacaacaggccagtcagccagatccggctatggttgctgcgcaaggtcagcttcttgctggtcaggctgaattgcagaaagcgcagaacgagcaggcagccattcaggttaaagcattccaggcacagactgatgctcaggttgcagcggcaaatgttgtgaaaatcctcgcatctgccgatagccagcagaaatctgatatccgcgaggctctgaaactgctcggacagttccagcaacagcaaggagacaatgcccgtgctgatgcagagcttgtcctgaaaagtcaggcacagggccatgcgcagcgcatggacatcagcagcatcctgcaaaaatcaactcagcaacaaccacagcagtaa

SEQ ID NO: 13456 - DNA, 1260 bp, Escherichia coli
atgtctaaccagttaacaaaagacctcgaaatcctctttgagagcgtcattgatagttttgaggcgtccaatgtcgtttcccgcgagtgcagcaagttccgaccgggcgacattgaaatgcagcgcgctggcgacgttgtttatcgccctcagggctaccacctgaaaaccgtgagcggacttgatctgacttcggccactgcaaactcactcgttcagcgtcaggtgcctgctcgcttccgcgagccagagaacgtcatctacgaactggacgcaaaagaaatgcgcgatccgtggcacaaagagcaggctggcaaggcggcgggtcgccagttggcggcgtgggttgataacatgatcgtcgatgaggtggtcgctcgctccaccaacgtggtcaccattaaatcggcgtccaccggtagcactctcggcgaagaactctggaacgcatcggctgacgttgatgcaatgatgctgtccattggtgtgcctcagggtggtcagcgcaaggcgttctacaacccgttcaactacaaagacctggctaaggagcttggctctcgcgcatatgcggtcggtgcaactctgacagcctatgagaaagctcagattccacctgtggcatccttcgacagtttccgcgttgattatgctggcgcaatgaaggctggttcagataccgctgtaactctcggcggcgcagtaaaacacaaagttaccgcgatggattccaacggcgcgcctaccgataaccgccagggtgacatcaccgtatccactgctggcgtactggctgtcggcgatgcattcactatcgcaggcgttaacagtgtccacatgatcaagaaggtggatacaggtaagccgcaggtattccgcgtcctggcagtaaatggcactaccgttaccatcagcccgaaaattctgccaccagacaacgcggataaggcgtctattccttaccagaacgttaccgccaatccggtggcaaacgcggcgatcaccatcctcaacaagaaggctgcggcttccaacatcttcttcgctgagggttctgttgagctgatgtatggcaagttggcattccctaccggccagggtccgcaggttatgaccgcaacgaccgagcagggtgcgaccatcatcatggcttaccaattcgacgctaaatctggcaaaacgtggactcgcttcaccacgctggctggcgcaagcgtactggtcccggaattcaccggcctggtattggctaaccagtaa

SEQ ID NO: 13457 - DNA, 189 bp, Escherichia coli
atgtctcaaatcatgctttataagccgggatcgatgatcacctgcggcccccactcgctggattacatcatcgttgatgacgaagaagttaaatctcacctgaaaaaaggctgggtaaaaactcctgaagaaaccgcaacgaagcaaaaagtggctaaggcggaagaagatggcgaaaacgaagggtga

SEQ ID NO: 13458 - DNA, 288 bp, Escherichia coli
atggcacaaacaggcgaagctgaagatagccctgacgagcgtgaacaggctgaaggagaaagtccacagtctgacgacgggaaaccggagcaaatcagtgaaagcgacaatcaatgctctgacaccagtgctgtgtggatggataagctacttcaggctgacggaagtcagaggagtgctggaggagctggatggctggatcaaacggaaactgcgttgcttgttgtagcggcagtggaagagaccgctaacccgggcaaagaacctgcaaagagcaggactgagtaa

SEQ ID NO: 13459 - DNA, 1536 bp, Escherichia coli; identical to SEQ ID NO: 5172

SEQ ID NO: 13460 - DNA, 762 bp, Escherichia coli
atgtcgctcgtttgttctgttatatttattcatcatgccttcaacgctaacattttagataaagattacgccttctctgacggcgagatcctaatggtagataacgctgttcgtacgcattttgaaccttatgagcggcatttcaaagaaatcggatttaatgaaaataccattaaaaaatatctacaatgcactaacatccagacagtgacgatgcctgttcctgcgaagtttttacgtgcttcaaatgtaccgactggattgcttaatgaaatgattgcttatctcaactcggaagaacgcaatcatcataatttttcagagcttttgcttttttcttgcctgtctatttttgccgcatgcaaaggtttcattacactattaactaacggtgtgctatccgtttccgggaaagtgagaaatattgtcaacatgaagctggcgcacccatggaagctgaaagatatttgtgactgcctgtacatcagtgaaagcctgttgaagaaaaaactaaagcaagagcaaacgacattctcacagattcttttagatgccagaatgcagcacgcaaaaaatttgatacgcgtagaaggttcagtcaataaaattgccgaacaatgtggttatgcgagtacatcttattttatttatgcgttccgcaaacatttcggcaacagtccaaagagagtttctaaggagtaccgttgtcaaaggcacacgggtatgaacacggacaacacgatgaatgctttagctatttga

SEQ ID NO: 13461 - DNA, 600 bp, Escherichia coli
atgcgtaaattatgtgctgttattttgtccgcagtagtctggcaggtcgccgctgctacgccagcgagtgcagcagaacatcagtccacgctgagcgcggggtatctccatgcctcgacgaacgttcccggtagtgatgatctgaacgggattaacgtgaaataccgttatgagtttacggacgcgctggggctgattacgtccttcagttatgccaatgctgaggatgagcaaaaaacgcgctacagcgatacccgctggcatgaagattccgtgcgtaaccgctggttcagcgtgatggcggggccgtctgtacgcgtgaatgaatggttcagcgcgtatgcgatggtgggtgtggcttacagccgtgtgtcgactttctccggggattatctccgcgtaactgacaacaaggggaaaacgcacgatgtgctgaccggaagtgatgacggtcgccacagcaacacgtctctggcgtggggggctggcgtgcagtttaatccgaccgaatccgtgaccattgaccttgcttatgaaggttccggtagtggcgactggcgaacggatgcatttattgttggtatcggataccgtttctga

SEQ ID NO: 13462 - DNA, 2094 bp, Escherichia coli
atgggaaaaggtggcggtaaggcacacacgcctcgtgaggcgaaggataatctcaaatccacgcagatgatgagtgtgattgatgcgattggtgagggaccgatagaaggtccggtgaagggactgcagagtattctggtgaacaaaaccccgctgacggacacggacggtaatcccgtgatacacggtgtgaccgcggtctggcgtgccggggagcaggagcagacaccaccggaaggctttgagtcctccggagctgaaaccggactgggcgtggaagtgacgaaggcaaaaccggtgacgcgcaccattacgtccgcgaacattgaccgcctgcgggttaccttcggggtgcagtcactggtggagaccacctcaaagggtgaccgtaacccggcaaccgtccgcctgctgattcagttacagcgtaacggtaactgggtgacagaaaaggacgtcaccattaacggcaagaccacctcacagttcctggcctcggtgattctggataatctgcctccccggccctttaacatccggatggtcagggagacggcggacagcaccacggaccagctgcagaataagacgctgtggtcgtcatacaccgaaatcatcgatgtgaaacagtgctacccgaacacggccattgtggggctgcaggtggatgcggagcagttcggcggccagcagatgacggtgaactaccatatccgcggtcgtatcatccaggtgccgtcaaactatgacccggaaaaacgcacgtacagtggtatctgggacggcagtctgaaaccggcatacagcaacaacccggcctggtgcctgtgggacatgctgactcacccgcgctacggcatgggaaaacgtctgggggcggcggatgtggacaagtgggcgctgtatgccatcgggcagtactgcgatcagacggtcccggatggtttcggggggaccgagccgcggatgacctttaatgcgtacctggcacaacagcgtaaggcgtgggacgttctcagtgatttctgctctgcgatgcgctgtatgccggtatggaacggtcagacgctgacgttcgttcaggaccgcccgtcggatgtggtgtggccgtacaccaacagcgatgtggtggtggatgataacggcgtgggattccgctacagcttcagtgccctgaaggaccggcacacggcggtggaggtgaattacaccgacccgcagaacggctggcagacctccacggaactggtggaagacccggaagccatactgcgctacggacgcaacctgctgaagatggacgcgttcggctgtaccagccgcggtcaggcccaccgtgccggactgtgggtgataaagaccgaactgctggaaacgcagacggtggatttcacgctcgggtctcaggggctgcggcacacacccggtgacatcattgaaatctgtgataacgactatgccgggaccctgaccggcggacgtgtcctgtccattgatgctgccacccgcaccctgacgctggaccgtgaagtgacacttccggagaccggtgccgccacggtgaacctgattaacggcagcggtaagccagtgagtgtggacatcaccgaacaccccgcgccggaccggatacaggtcagtaccctgcctgatggtgtggagacatacggggtgtggggactctccctgccgtcactgcgccgtcgcctgttccgctgtgtctccgtccgggaaaacacggacggcacctttgccatcacggcggtgcagcacgtaccggaaaaagaagccatcgtggataacggtgcccgctttgagccgcagtcaggttccctgaacagcgtcatcccaccggcagtgcagcacctgacggtggaggtgagcgcagctgacggccagtatctggcgcaggcgaaatgggacacgccgcgggtggtgaagggtgtgcgcttcagtctgcgcctgaccagtggtaagggaacggatgccagactggtgaccaccgctatcaccgcagacacggagcaccgtttcagcggcctgccgctcggggaatacaccctgacggtgcgggcgataaacagctatggctag

SEQ ID NO: 13463 - DNA, 801 bp, Escherichia coli
atgaccatccactttcacggcagcccaatatggggggatgagcatgcccctacagatatgctgattaaagccctttaccgtgatggtggggcttttgtttcatttgccagaccagagcagatgaaaaagattgccatgttcccttgtgatatacgccttgataacggcgcttttagcgactggatgaaagcattaaagaaaggcactccggtagactggagtaagagacgagcaaaattctacgactttgttgggaagtggttcagcagaattgaatggtttcttatacctgacgttatcgaagggacagaggcagaaaacgacgagcagattgagtgtgttcctgattggctaaaatcaaaagcggttcctgtctggcataccgacgaatcaattgaacgtcttttacgcctttctggcaaatttgaatgggtggcgattggatgctgcggcccacacaggcacatacgctctaaatggtgggaacagagaatggatgaagttttcactgaactttatatcaatcgtaatttgaaagtgaaaattcatggtcttcgaatgctcgacgtgagagttcttggtatgtatccgttcgccagtgcggattctactaatgttgctgttaacgtaccgaagacagagaagcgatttcctgagattaccgacaaactggcacgtacagctgtacttcgcgctgctattgaaaaggtgcacccgccatcgatatcagcatgggtagacagaaagatgagagagccggcgcaagccggttttttatttgaattcaccgacgccgcttaa

SEQ ID NO: 13464 - DNA, 432 bp, Escherichia coli
atgaaatctcttgacccgcagtcagtcgttcgtgaaggcgaacaggttcaggtaatgcggtctgatggcatatggggacaaatcaaaggatacatagaccagcttaatgctggaaacggcctgtcgcaggaggcaaaggataacattgttaacgccgcaaaaatcaacgccaatgctatggggcagcagtttaaccagcaggttgacgaatatctcgatacatatggagaaactattcctcaggggctaagaaaaagccttgaaagaaggaaagcgaagctatttgacgatgtttccgggcagcctacatcacaggctggcactggacaggcaaaagcggcaaccggaggaatatcagaaggcgcaacggcaaccaaccctaaaactggtcagaaaatcatttacaggaacggaaaatggcagcaaatgtaa

SEQ ID NO: 13465 - DNA, 963 bp, Escherichia coli
atggctgttccggttaaggttcataaagaatatgatgaacttgtcgatttattgctgtctcggggtatggatgtgccagatcgcgaacatgctatcaagaaaatctcacaagtaggctactaccgattatcaggcttttggtacccctgccgaatcccccatataacaacagacaatattagaaccagactcgatcaggttcgtccaggtactaattttcgcgcagtatatgacctctatttattcgataaaaatctgcgtttgcagatgatgaatgcgttagaacgcattgaggtttatgttcggtcagttattgctcatgagcttggtaagatatctcctttagcatatcttgatgactcgctaataaatccaaaacactttagaccacgttcccatggtcgcccaagcgccagagaagaatggataaataaacataatgccgagattgctaaaagtcgcgaagactttatcaaatggcatgaaaacaagtacgaaggtcttcctttctgggtggttattgaagtgtgggacttcggcttaatgtcaaagtattatgcgatgctaaaagacagctatcgcaacaggatactatctaggctagggatagcggcaggcaatggagctatcttccaaaactggcttagcgcaatgaatgtgctaaggaatcggtgcgctcaccattcacgcatctggaacaaggtcaacgaaccaagattaatgcctttgccaaatgagccgtactttgaacaattaaatatgaatgatgatgcgtacgaaagaatgtacggaatgatcgctgtgttatggtttttagtgaaaaaaattggaccgggatctgactggataaaaaaagttgccaaccttgtagataacaagcctaacttaccaggatgtaacctgacagccatgggattacctgataataacggtttcccaaggcatttatttgatattgaataa

SEQ ID NO: 13466 - DNA, 528 bp, Escherichia coli
atgaaaaagataagaggtttgtgtcttccggtaatactgggggcagtgttaatgtctcagcatgcacatgcagctgataatctgacctttaaaggaaaactgattattccagcctgtactgtaacaaaggcagaggttgactggggaaatgtagagattcagaccctgagtcaaaatggaaatcacgaaaaagagtttactgtgaatatgcagtgtccttataatctgggaacaatgaaggttacgataacagccacgaatactcagaataacaattctatactggtgcctaatacatcaactacgacaggtaatggattgcttatctatctttacaacagaaatcaaaatggttctattggttcacctatagtttttaattcgccatttacccctggctatattacagggggggttccggccagaaacatttctctctatgcaaaacttggatataaaggagatatacagaatttgcgggcgggaacattttctgcaacagcaacgctggttgcatcatattcgtaa

SEQ ID NO: 13467 - DNA, 543 bp, Escherichia coli
atgattttggtgacggggggcgcacggagcgggaagagtcgccacgcagaggcgcttattggggactcttcacaggttctgtatatcgctacctcgcaaatccttgatgatgagatggctgcacggatagaacatcatcggcaaggccgcccggagcactggcgcacagtggagcgctggcaacatcttgatgaattaattcatgcagacattaacccgaatgaggttgtgttgcttgaatgcgttaccacaatggtgactaatctgttgtttgattatggcggcgataaagaccctgatgaatgggattatcaggcgatggaacaggcgattaatgctgagattcagtcgttgattgctgcctgccaacgttgccccgcaaaggttgtattagtgactaacgaagtgggaatggggattgtgccggagagtcgtctggcacgacattttcgtgatattgccgggcgggtaaatcagcagttggccgctgcggcaaatgaagtatggctggtggtttcgggtattggagtaaaaatcaaatga

SEQ ID NO: 13468 - DNA, 744 bp, Escherichia coli
atgagtaaattattttgggcgatgctctcatttattacgcgtctgcctgtaccgcgtcgctggtcccagggactggatttcgagcattattctcgcggtattattacttttcctttgattggattattgcttggcgcgattagcgggctggtcttcatggtgctgcaggcatggtgtggcgcaccactggcggcactgtttagcgtacttgtgctggtgctgatgaccgggggattccatctggacggcctcgctgatacctgtgatggcgtattttctgcacgtagccgcgatcgcatgttggaaatcatgcgtgatagccgtttaggtacccacggcggtctggcattgatttttgttgtactggcaaagattttggtgttaagcgagttggctctgcgtggcgaaccgatccttgcatcgctggcggcagcatgtgcgatcagccgcgggactgccgcattattgatgtatcgtcatcgttatgcccgggaagaagggcttggcaatgtgttcattggcaaaattgatgggcgacaaacctgcgtcacactcggcttagccgctatttttgctgccgtattattgccgggtatgcatggtgtggctgctatggtggtgacgatggtggcgattttcatcctcggtcagcttctcaaacgtacgctgggcgggcaaaccggcgatacgctgggagcagccatagagcttggtgaactggtcttcctgctggcactgctataa

SEQ ID NO: 13469 - DNA, 1080 bp, Escherichia coli
atgcaaacacttgccaatttactgaatacgatccctgccatcgatcctgccgctatgtcgcgtgcacaacggcatattgacgggttactcaaacctgttggtagcctgggaaggctggaggcgcttggcgtacaactggcgggaatgccggggttgaatggcataccgcatgtgggcaaaaaagcggtactggttatgtgtgccgatcacggcgtctgggaggaaggggtcgctatttccccaaaagaagtgacagccattcaggctgaaaatatgacccgcggaacaaccggcgtgtgtgtgctggcagcacaagcgggcgctaacgtccacgtaattgatgttggtattgatactgctgagcctatccccgggcttatcaacatgcgtgtcgcacgaggtagcggcaatattgcttcagctccggcaatgagtcgccgtcaggctgaaaagttacttttggacgtcatatgttatacgcgggagctggcaaaaaacggtgtcacgctgtttggtgtaggtgaactggggatggcaaacacgacaccggcagcagcaatagtcagcacaatcactggccgggatcctgaagaagtggttgggattggcgcaaacctgccgacagataaactggctaataaaattgatgttgtgcgccgggcgattacgttgaatcagccaaatccgcaggatggcgttaatgttctggcaaaagtgggtggatttgatttggtcggaatggctggcgtgatgttaggcgctgcttcctgcggtttacccgtgttgctggatggatttctttcttatgctgctgcgctcgcagcctgccagatgtctcctgcaatcaaaccgtatctcattccttctcacctgtcggcagaaaaaggggcgcgtatagcgctgtcgcatttggggctggagccttttctcaatatggatatgcgtttaggtgaggggagtggcgcagctctggcgatgcccatcatcgaagctgcttgtgcgatatacaacaacatgggcgaacttgctgccagtaaaattgttctaccggggaatacgacttctgatttgaacagttaa

SEQ ID NO: 13470 - DNA, 936 bp, Escherichia coli
atgatgcgtcgtgtaaatattctttgctcatttgctctgctttttgccagccatactagcctggcggtaacttatccattacctccagagggtagccgtttagtggggcagtcgcttactgtaactgttcctgatcacaatacccagccgctggagacttttgccgcacaatacgggcaagggttaagtaacatgctggaagcgaatccgggcgctgatgtcttcttaccgaagtcaggttcgcaactcaccattccgcagcaactgattttgcccgccactgttcgtaaagggattgtggttaacgtcgctgagatgcgtctttattactacccaccagacagtaatactgtggaagtctttcctattggtatcggccaggctgggcgagaaaccccgcgtaactgggtgactaccgttgaacgtaaacaagaagcaccaacctggacgccaacgccgaacacccggcgcgaatatgcgaaacgaggggagagtttgcccgcatttgttcctgcggggcccgataatcccatggggctgtacgcgatttatattggcaggctatatgccatccacggtaccaatgccaattttggtattgggctccgggtaagtcagggctgtattcgtctgcgcaatgacgatatcaaatatctgtttgataatgttcctgtaggtactcgtgtgcaaattattgatcagccagtgaaatacacaacggaaccggatggttcaaagtggctggaagttcatgagccgctgtcgcgcaatcgtgctgaatatgagtctgaccgaaaagtgccattgccggtaaccccatctttgcgggcgtttatcaacgggcaagaagttgatgtgaatcgcgcaaatgctgcgttgcaacgtcgatcgggaatgcctgtgcaaattagttctggttcaagacagatgttttaa

SEQ ID NO: 13471 - DNA, 918 bp, Escherichia coli
atgaacttcagacgcctgaaatacttcgtaaaaattgtagatattggtagcctgactcaggctgctgaagtattgcatatcgcacaaccagcgctcagccagcaggttgccacactcgaaggtgagttaaatcaacaacttttgattcgcacaaaacggggcgttacgccaacagacgccggaaaaattctctatacccatgcgcgggccattttacgtcagtgtgagcaggcccaactggcggtgcataacgttggtcaggcattatcggggcaagtctcgattggctttgcgccaggaaccgctgcgtcatccatcaccatgcccttattacaggcggttcgcgctgaattcccggaggtcgttatctatcttcatgaaaatagcggtgcagtgcttaacgaaaaactgataaatcaacaactcgatatggcggtgatttatgagcattcccctgtggctggtgtatccagtcaggctttgctgaaagaagatcttttcctggtaggaactcaagattgcccggggcaaagcgttgatgttaatgctattgcacaaatgaacctttttctccccagtgattacagcgctgttagacttcgtgttgatgaggcgttttccctacggcggctcacggcaaaagtcattggtgaaattgagtctattgctacgcttaccgcagcgattgccagcggcatgggcgttgcagtattacccgaatcggccgcgcgttcgttatgtggcgcagtaaatgggtggatgtcacgcattaccacgccttccatgagtctctctttgtcattaaatttacccgccagagcgaacttatcgccacaggcacaggcagtgaaagagttgttaatgtcagtgattagttctccagtgatggaaaaaaggcagtggcaattggtgagctaa

SEQ ID NO: 13472 - DNA, 951 bp, Escherichia coli
gtgaatttccaacaactaaagataatccgcgaagctgcacgtcaggattacaacctgacagaggttgcgaatatgctttttacctcacagtcaggcgtcagccgtcatattcgggaactggaggatgaacttggcatcgaaatatttgttcgacgaggtaagcgactgctgggcatgactgaaccgggcaaagcattactggtcattgcagaacgtattctcaatgaagccagtaatgttcgtcggcttgcagacctgtttaccaacgatacgtctggcgttctcactattgcaacgacgcatactcaggcacgttatagcttgccagaggtcattaaagcttttcgcgaacttttcccggaggttcggctcgagctaatccaggggacgccacaggaaattgcgacgttgttgcataatggtgaagctgatattggtatcgccagcgagcgtttgagtaatgacccgcagctcgtcgccttcccgtggtttcgttggcaccatagtttgcttgttccacacgatcatcccttgacgcaaattacaccattgacgctggaatcaatagcgaagtggccgttaatcacttaccgacaggggattacggggcgctcacgtattgatgacgcatttgcccgcaaaggtttgctggcagatattatattaagtgcgcaggattctgatgtcattaaaacctatgttgctcttgggcttgggatcggattagttgccgaacaatccagcggtgaacaagaggaaaagaatttaatccgcctggatacgcggcatcttttcgatgctaatactgtctggttgggactgaagcgaggacaacttcagcgtaactatgtctggcgctttctggaactttgtaatgcaggactttcagttgaggatatcaagcggcaggtgatggaaaacagtgaagaggaaattgattatcagatatag

SEQ ID NO: 13473 - DNA, 2397 bp, Escherichia coli
atgcacgaaaagaacatcgccctgctttgtgatgaagccgaccgacttttgcaactgaacattaatctgctccggcaaatggttgaggagccagatgtgttatctgacagtaagaacgaaaacagactgctttttgataaacagaaagcactgaaaagaattgaggagctggagggcgaacaaatcaaaaccgcccgcagggagatggtgctggctgttgtcggcacgatgaaagcaggcaaatcaaccaccatcaacgccattgtggggcaggaaattctgcctaaccgtaaccgccccatgacctctgtaccgacgctcatccgccacgttcccggaaaaactgagccggttctccatctggaacatattcagcctgtccgcaatttattaatcacactgcaggaaaaactcgccaccccggcaggacagcaggtcgcacagaccctgcagcaaatcggggatacccgcgaactgctggatattctgacggatgatggctggctcaaaaatgaataccacggggaggaggaaatctttaccggactggcatcgttaaacgatctggttcgtcttgctgcggcaatggggactgaatttccttttgatgaatacgcagaagtgcagaaactgccggtgatcgacgtggaattcagccatctggtggggatggatgcatgccagggaacactcacactgctggatacccccggccctaatgaggccggacaaccgcagatggaagtgatgatgcgggatcaactgcagaaagcctctgcggtgctggctgtgatggattacacccagatgaactcaaaagcagatgaagacgtccgtaaagagcttaatgccattgctgacgtatcagccggccgcctgtttgtactggtcaataaatttgatgagaaataccgcaatggcgatggggcagatgccgtacgccagaaagttccggcaatgctgaacagcgatgtgctgcccgcctcccgcgtttatcccggatcctcacgccaggcatacctggctaaccgtgcgcttcatgagttacggaaaaacggaacccttcctgttgatgaagcctgggtcgatgattttatcagaggtgccttcggttgcatgaaaaaagaatacgtctgtaaagacagtgaactggcaactgaaggggcgacagacctgtgggaaggctcacttatcgatcaactgataacggaagtcatacagagctcacattccagagctgcggcactggcggttgactctgccgccgcaaaactgatgcagaatgcagaaaatatcagtgaatacctgttgttacgccatcaggggctacagcaaagcattcagtcactgcagtcgcatatcaccagcctgcttgcggatatccgggaaatcgcggactgtcaggagcagatgaccgctgatgtcagaatggccatggaggagatcgatactaaaacccgggaattactgacgggggtctgcacctcactggaagaggagctgaatgactatttcagaagcggtaaacgcaaagaacagcaaatgttggaggaagaagacgcagaacaacgaaggtctcagtccggattatgggggaaaatttctcaatggtccggtatcaacaaccagggccgggaggattacaggaaacgagattttgccccggacagccccgaaataaaattcagtgatcgcagggaagcccttgaactgatgacgcaaatcgaatcgaccgtgaccagcctgcaccgtgaggctgaagcacagttccggcctgagctggagaaaatcgtcagcgggattgaaacaggttttcgtggcacggccctgtacgccacagaaaacattgccggtcgcatcaatgcccgcctggaggatgagggctttaccgtaaaaatcagttttccggcagtcagccagttacagacccggctcgcggtaaaaataaatctgagtgcgcttatggaggaaagaacggagaccgtcacccgtcgccgtcggcagagtggcgtatggggaaccgtttgtcgatggtttggcaccagtgacctgggctgggaaaactatgacgaggatgtgagtcgcagcgtgatcaatatcaacaaggtcagagaggaagttatgtcactgacccgggcatatttcggggagctgcaggcatccattgagcaggatattaaccagcccgtccgccaggaaatcgatgcctttttctgcgcattcagggagaaagttgagcaactgcgtaacacgctgattcagagctctgaagatcataaacgcgatcagcaggcgcaggaacggcttaccgggcgacttcaggcattaaatgaaagggttcctgagctcattactgacagtaaggcgctgagggaagagctggagacaatgctgtga

SEQ ID NO: 13474 - DNA, 288 bp, Escherichia coli
atggcacaaacaggcgaagctgaagatagccctgacgagtgtgaacaggctgaaggagaaagtccgcagtctgaccacgggaaaccggagcaaatcagtgaaagtgacaatcaatgccctgacgccagtgctgcgtggatggataagctacttcaggctgacggaagtcagaggagtgctggaagagctggacggctggatcaaacggaaactgcggtgcctgttgtggcggcagtggaagaggccgggaactcggacgaagaacctgctaagagtggggctgagtaa

SEQ ID NO: 13475 - DNA, 162 bp, Escherichia coli
atgacaaaacgtcgtaagaaataccaggaaaaagaagagattcgacaccctgattcacctgagggattagtggtagccgcagcaaataacagggcgttcgcagagcgccttgttggtgtttacagactagccaaagcaggagtgaaacatgggcgtcgttaa

SEQ ID NO: 13476 - DNA, 300 bp, Escherichia coli
atggaaagaacaagttacagcaaactatcacagcgtgacgttgatcgcgcagaaacagatttacttatcaatctgtcagctattacccagcgcggtctggcaaagatgattggctgtcatgaatcgaagataagcagaacggactggagatttattgcttcggtcttgtgtgctttcggaatggcatcagacatcagtccgattagcagggcttttaagtatgcgcttgatggactcaccaataaaaaacgcccggtgtgcaagaccgagcgttctgaacaaatccagatggaattctga

SEQ ID NO: 13477 - DNA, 216 bp, Escherichia coli; identical to SEQ ID NO: 7091

SEQ ID NO: 13478 - DNA, 654 bp, Escherichia coli
atgaaatggtatgaactggctagatccagaatgaaagagctcggcataactcaagagaagttagccgaagagctaggtatgacgcagggtgggattggacactggttgcgcggatctcgtcatccatctcttagtgatattggtgtggtgtttaaataccttggtattgataacatatcattcaaccacgacgggacattttcacctgttggcgaatactcatcggccccagttaaaaaacaatatgagtaccctgttttttctcatgttcaggctgggatgttctctccagaactcagaacctttaccaaaggcgatgcggagagattggtaagcacaaccaaaaaagccagtgactctgcattctggcttgaagttgaaggtaattccatgaccgcaccaacaggatccaagccaagctttcctgacgggatgttaattctcgttgaccctgagcaggctgttgagccaggtgatttctgcatagccagacttggtggtgatgaatttaccttcaagaaactgatcagggatagcggtcaggtgtttctacagccactaaacccacaatacccaatgatcccatgcaatgagagttgttccgttgtggggaaagttatcgccagccaatggcctgaagagacgtttgggtga

SEQ ID NO: 13479 - DNA, 1578 bp, Escherichia coli
  misc_feature (1527)..(1536): n is a, c, g, or t
atggcaaccgatgtaggtttacccgaaggatttgttctcgataatcagcctgataactcacagcttcctgatggttttgtgcttgattcccaaccagagcagcagcaatcacctttggtttcaccagaggaaaactccagacaggaaaatgttgttaataatgctaacggcttcgaccgttttatgtatggcgttctcagtggattgatggatgttggtaaaggtgttggtctatttcaggatatgacaccagaagagcaagccgcaattcagtctctacagcagaagttagcggcaaaaccatcaaccgcacaagatgttggtgagttcgttggacaagcagcaccatttgttagtggtggtgggattatttctcaggttccgaaaggggcggcaaggctggctgccgccgcagggcttggtgctggagaaggggctattgtagccaatggaacaaatagcgatgttgcttctggagctgctattggcgctgtggctggccctgtagcagagattgttggtccagcgcttgggaagattgcaggaaaaattaaaaatagtgccggagatatttatcgctcatccgtagggatgggtagtaaatcatctaaagcaacgttaaagaaagctgctggcgcaatggacaataaatttatcggcgggcaacgagctattcaagatttcgccgatgaagttaatcctgattttaacgcgataaatgctattcgtgagctagaactggaaaattatgccactccaggcatgatctctaataatcctgctgtcagggctcttgataatgcagtggcaagtctccctggcacagagattagtgaggcgcataagcgttttattactgaattaggaagaaaagctgatgaaatgataacttcatttgggggaagccttgataagcaactggtttctgacaggcttgcagataattttgataaaaccatttcatcattacaaaatcagtcagataacatctacaacaaaattgccgaaaaggttcctgtaagagaccggattgaggcaactaatacattgaattttttagaggattttgctgatgatataggtggaattgatgaattatctccaataatgaagcggacattgaaccgacttgatccaaacaccttgccaacgtatgggcgtttagatctcgctagaaagcaggttggacaagctattggcaaaggctctggtccattcaaggatgaagaaacaggtgttcttaaaaagttatatgcagccataacagatgaccaacaggctgtcgcagaaaaatatggcgcaggggaattatggacgcttggtaaggagttggtaaaaaaacgaaaatccattgaagatgatgctgtaaccgtcttgggtagaaaacttcagcaatcagcaattccaaaagttgaaagtgctgttgttaatatggcaaaaggaaacggtggcgactttaggcaattaatgaagtcgattccaaaggatatgcggcaggaagttgcgctcacctcaatgaataaagcnnnnnnnnnnaagcatttaccagctatgccaaatcacctggtcagcaattag

SEQ ID NO: 13480 - DNA, 528 bp, Escherichia coli
atgtcacgcaatggggccaatatgaaggctctccgtgatgctattggcacagatgcatcaaagcgccttgatacgatttatcaagcagctaaggctatgaatagactcaatactggtaagcagtatgctagtagtcttgtggatcagcaagttaataactttctgaaagaaaagggtagtctagcaaaaatttatggaatagcctcaaaagctgctgcggcggaaggtattacaagcttatctggtcttcctggtgtaggtgcaacaggggtgataacgtcagcattgatgtcagggaaaacaagcaggataaaggctgctgatgctctactgtcttctcctgagtttaaatcaatgctatttcgcctgcaaaacgcaccagtagacagagcagaagtgagacgcgtaatagaaaggaaactgatgcaatctggggcatttaagagatgggagaaaaccttatcaacagatgaagcaaaaaccattgcccgcacggggattattacatggctcgctagtgacagttag

SEQ ID NO: 13481 - DNA, 228 bp, Escherichia coli
gtgaagcgatggttcctcataattactgttttcgcgatcatttacactattttccctgcattaaaagcaccaatgcaaataatttcgcttgcaataattgcaattggtgctttcattgcagtagccgtacttgtgtttaaggttttaaagtttttagtttggctatcaaaagacgatggatgcaaagttcatcaagaaaaagaaggcaaaataaccaaagttgactaa

SEQ ID NO: 13482 - DNA, 420 bp, Escherichia coli
atgaagaggattattggcgtcgttgctggcgctatgatgttatctgggtgcgcaactattgttggtgatgaaacgcaacttgtgcaagtgaacagcaacccttccggtgcgagctttaaggtaaaagatgaatcaggcgtgattgttgcgcaaggcaagactccacaaggagtaactcttgccaagtcagatggtagttattttggcaaaaagagctaccagatcactatggaaaaggatgggtacgaaccagttaccctgccaatcaaagccaatgctaatggttggtatattggtggaaaccttgtgtttggtgggttaatcggttggcttgctgttgatccatttaatggtgggatgtatacattgaagccaaaagaggcaaatgcatctcttataccttctacgaagcaagattaa

SEQ ID NO: 13483 - DNA, 177 bp, Escherichia coli
atgctgaccaaaaagagatttgttccgtggaatggaacgttgattgtatgttctgcaattgctacactcgtcatgtcgttaattcctatgcgtggttttacgatactgcatccaagcgaatcacaccgttaccccctctctcttcaggctgtctatcaggcgcttgataacctctga

SEQ ID NO: 13484 - DNA, 288 bp, Escherichia coli
gtgttttttacctttgcactccccaaactcccgggcccagacgtaatgcagggttgtgggatgcacgcgtttaccttcccgatgcttacgtttctggtaagcgtcgattcgggctttcagggcattgatgaagcgggatatcacagctgcgtccgttgctgccggtacatccgggagacgcaggtcaacccgcaatgccgtcaggcggggatgaacattcagtgcgtgccgcaccgtctcacgaatacgttgctgccagaaggggttgtatttgtaggtcatggttaa

SEQ ID NO: 13485 - DNA, 1557 bp, Escherichia coli
atgagaattaaaaagcctcaccttcgtccgatagtcataaccttgtccgttggtgggattttgttaacttctatttttctgattgccgttattatggtttttcagcgcgaaaatatagaaaaagatttgcttgatgctaattcatcgtacgctatgaaaatgtcagatgtaatgagtggttatattgaaatggctcaaggtgaattagcatatggagcaaaaaaaataaaatcaactaatgatattgactcacttaaagatgaggcggataggttaagattgcagtctggtatgtttaattcagtttttgttgttagtaatgatgctgttgttctggcgacttcgccagaatctcttgatttagttggtacccgcttgaattcaagtgccagcaaattggcgattgaggaaaagaaaccattcatatcttcaccgttcaaatcagttactgggaatttgattattttgttgtcacatcctatttatgataagaatggcaattacatagggcatgtcggtgggtctatatatctaaaaaaacatagtttatttagcgatgttttgagcaggcattttttcaagagcgacactgaaattagcattgttagtgatgatggaactgtgatctttaataacgataacagtgctgttggtcggcccatggttatgtctgatgatttgaaatcaaagttaacggagtctgatagaggtgagggggaattttttttttcggggaatagatatcttctgggttatgctcatatgaaaaatactgcttggaatgtgttggtttatagccatgctgacagcgcgactactattcttattacttatgctaaaagtgtacttgttctgctaattgtaataattattacattttcacttctttcatatttcattgcctcccgtatttcacttcctttagaaaagcttgctatatctaccaatgctaaagatataggggcttcgttagtttatattaaagctatcaatgcttggtatgccgaagctgatcgacttaaaaaggcactttttacgcatgttaaggtaatgatggaaagggttgattctttaaatgaggtggcgcttaaagatccccttaccggcgtgaacaatagattggggttttcaactaaaatacagaataacaagtatggggcaggagcttcagttattgctattgatgttgatttttttaaaaaaataaatgatagtttcgggcatggggtcggagatgaggtgcttgtttctttggctcagattattaagtcttgttgccgtagtgaagatattatttgtcggtttggtggagaagagtttgttgtttttctgccgaatacatctgtggtaacagcggagtgtgttgcggagcgtattaggagtgttattgaacgtactgttttccctaataacttgcgtgtcaccgtatctgctggtgtggcaacacaagatgatcctcttggtgggatcgattttttgctgaaaaatgctgacgatgctctttatcaagctaagagagaggggcgtaataaagtgattgtatatagcgctatttga

SEQ ID NO: 13486 - DNA, 1500 bp, Escherichia coli
atgatcgttaaatttcatccacgcggtcgcggcggtggcgccgggccggtggactatctgctgggtaaagaccggcagcgtgaaggcgccaccgtcctgcaggggaagccggaagaagtccgggagctgattgacgcgtcgccttacgttaagaaatacacctccggggtactgtcgtttgcggaagcggatttaccctccggccagcgggaaaagctgatggcaagctttgagcgggttctgatgcccggacttgataaagaccagtacagcatcctgtgggtggagcatcgtgacaaggggcggcttgagctgaattttctgatcccgaacacggagctgctgaccggcagacggctccagccgtattacgatcgcgccgaccgtccacgcatcgatgcctggcagaccatcgtgaacggcagactggggctgcacgacccgaacgcaccggagaaccggcgggcactggtcacaccgtctgcactgcctaaagcgaagcaggaggctgcagaagcgattacacgcggtctgcttgctcttgcctcatccggggagctgaaaacccgtcaggatgtcactgaggcgctggaaagcgcaggttttgaggtggtccgcaccacaaaaagcagtatcagcattgccgacccggacggggggcgaaacatccgactgaagggagccatttatgaacagtcttttaacgctggcgaaggacttagagcagaaatcgaaagcgcagcagcagagtaccggcgagatgctgaaagccgcattcagcgagcacgagaaatctgtaaaagcggaactgaacgaaagcgcgaagagaatcagcgccgccatcctcgaccacgaccggaaactgtcctcagccatgagccagcgcacgaaaggcatggtgcgcatggtcagccagacgtggctgaccatcgtcctggtctccgcgctgctgatcgcctcgagcgcgggcattctgtggtggcaggggcagcagatactcgacaactacacgaccatccgggagcagaagagcacgcaggccatgctgtcagagaggaacagcggcgtgcagctctcgacctgcggcgagcagagacgccgctgcgtgaaggtgaacccggaagcgggacggttcggagaggattcgagctggatgatactggcggggaaatagcacatgacggagctggaaaaacagttgctgagcgcattagagcagctacagcaggactactcgaaaaggctggacgagtgggagagcgccttcgcggaatggcggacgatgtctggtcttatgcaacgggagaacgcagcgctgagcgagcgcgtcacgggcttgagcaggcaggtgcagagtttgagcgagcagctgcgccggttgtcgagcgactgaatgccgtcgagctgcaccgggagcaggagcgcgtggtgcagcatcagaaagcgctggagctggagcgatctcagcgacagcggacgtataacagcccttcactgtga

SEQ ID NO: 13487 - DNA, 174 bp, Escherichia coli
atggtcgacatggcgtttatcactcaactgaccggcttaaccgataagtggttttacaagctcatcaaggatggtgcctttccggcccccatcaaactcggccgcagctcccgatggctgaaaagtgaagtggaagcctggttgcaggcgcgtattgcacaatcccgtccgtaa

SEQ ID NO: 13488 - DNA, 573 bp, Escherichia coli; identical to SEQ ID NO: 7168

SEQ ID NO: 13489 - DNA, 333 bp, Escherichia coli
atggcagggttccgttttgtcagcctgcgtcaccacaaacagcacctgctgatgtccccggtgcaggatgtgtcgccagaaatactcatccacagacagggcccggtcatcggctttaatcagccacagcaccaggtccagttcaggcagaatgtcacggtacagagcttcatactctgcatccctgtcccggctctcgcccaccccgggcaggtcagtgataaccatgctgtgaccgtggccactcagacggaagcgctgcacttcccgggtgccggcgtgaacatcactgaccggtgtgatctccccctgaaacagcgcattacagagtga

SEQ ID NO: 13490 - DNA, 246 bp, Escherichia coli
atgaaacatatccctgaaggcgtgattcaggcacccgtatcacccgacgccccggaggcgctgccgggatgtcgttccatttctgatgatgacctgtgcgcctggtgtacctgtctgctttaccgtcccggagaactcagtctgtgcagactgagtacaggcaatggcatctggccatccgtctgtgaccggaacggttacgcgtacggctgtccggaatttcagccgaatatcattcatccctga

SEQ ID NO: 13491 - DNA, 483 bp, Escherichia coli
gtgagcaaactgtatgaaattgccaatgaatacgcaaagctgatagattcagatttagagccagagatgattgctgacacaatagaaggcatggaaggagaatttaccgataaaatagagcaacttcttgccattattaaaaatgaatctggttatgctgaacgcctcaaggaagaggcacagtcactaaatgagcgagccgcagtaattcaaaataagattgacagcattatggcgtatatagcgtcatcgcttgaaatggttggcaagaaaaagattcgagcaggtattcaccaggtaacaatccgcaaaccgtcagaaactgtagaaatcatcgactcaagcgcccttcctcctgaatacgttgagtttgaaacgacaattaaagccgacaaactggcaatcaaacaccaactaaaagcaggaataaatatccccggcgctcaactcaaagttgggaaaccttcacttcttatcaaataa

SEQ ID NO: 13492 - DNA, 903 bp, Escherichia coli
atgagcaatatcgttgaattcgttaaacagcaggagcagttattctgcggagcattgactgaacagacggtgacatgggctaaggaaagccagtttgcaattcagtatttccagaaaaatgattacctggctaaaacggcactggcaaatccaaccagcgcacagaacgccatcatcaatgttgcggcgatcggcatcacattaaacccggccagcaaacttgcttatctagttccgcgcgacggcatggtttgccttgatatcagctatatgggattacttcaccttgcacagtcgacaggatcaattaagtgggggcaatgtaaactggtgtactcaaacgacacctatgaatcaaacggccttgattcagcgccaacccacaaatacaacgcatttggtgagcgaggctctattgttggtggttattgcacggttaaaacagcagatggtgactacctgactgaagaaatgagtctggcagaaattaaagctgtggaagcaacgagcaaggcaaagaatggaccgtggaagacattctgggaagagatggcgcgtaaaacaatagttaaacgcgccagcaaatactggcctaaagcccagcgactggataatgccattcacctgcttaacgaagatgagggtatgcatcaggaaccggttatgccgcacaaatcagaggaagatatccgcgaagatgaacggaaacgccagcaggaaataatggaaaaagcacaacttctttgtgatgaaatggctcaggctgaaaacatggatgatttgaagagatattttgcagaagcatatcgcctgacatctggaatgaaattgcagcagaacgtacaagccatttacgcagaatgcaaagcgaaactggaggttgccagtgagcaaactgtatga

SEQ ID NO: 13493 - DNA, 309 bp, Escherichia coli
atgattctgactctgaatgataagcgtgaaatatcgcaaatcatcgcaagttttactgatgaagattacgaacgaatcaacagtgaagttgatcgcctctgcaaacgctgcgacccaataagcgaaatgcttcgctcatataagccagatgaacacactaaggacgctatcgactggctggaagatgatgactgtgactatcaggaaaaagccgctgaatggttctgggatgcaataaccgaaagagttaaggctgaatatgccttcgcaatattcaaacgcagacacatttatggagaagcagcatga

SEQ ID NO: 13494 - DNA, 375 bp, Escherichia coli
atgaaaatacgcaatggtatccttcgccggcattcccgtcatttcgccatgctttacttttctgaccatggtctgtcggtcagcgacagcgctaatcctgttcatcatgatggtcatgtgcagggaggctacagcgttcccctgattattaccgccagtgacatcacgtctcatcagtccgtcagcagaaaaatcagtgcccgtcatttcgcaggtatttttcagtggctgaccggcattcgtactgaaaatataccgccattcaatccgctgacagacgaagataatgaacccgttatggtttttaacggggagaggaatgtaccggcagacagtctgaaaccgcagcctctgattcttccggacagaagataa

SEQ ID NO: 13495 - DNA, 183 bp, Escherichia coli
atgcgaaagctgaaaatgatgctctgcgtgatgatgttgccgctggtcgtcgtcggttgcacatcaaagcagtctgtcagtcagtgcgtgaagccaccaccgcctccggcgtggataatgcagcctccccccgactggcagacaccgctgaacgggattatttcaccctcagagagaggctga

SEQ ID NO: 13496 - DNA, 177 bp, Escherichia coli
atgaaatcattaaccacggaaacagcgctggatattctgattacgtggctgcaggacaatatcgactgcgaatcgggaattatcttcgacaacgatgaggataaaacaggttcggcagcactgttgcgctgtatcgaacaggccagggagggtatccgtaccctgcgccaacagtaa

SEQ ID NO: 13497 - DNA, 1374 bp, Escherichia coli
atgcttcgcattaaacctctttttattctttgcgccgccttactgacggccatacccacagcgtcagcggatgtgaacagcgacatgaatcagttctttaacaagctgggcttcgcctccaataccacacagccgggcgtctggcaggggcaggccgccgggtatgcctatggtggctccctgtatgcccgcacccaggtcaaaaatatccagctgatttccatgacgctgccggatatcaatgccggatgtggcggcatcgacgcctatctcggctcgttcagttttattaatggcgatcagttgcagcgttttgttaagcagattatgagcaatgctgccggttacttttttgaccttgccctgcaggcaacggtgccggaaatcaaaaccgcaaaagacttcctgcagaaaatggcaagcgacattaacagtatgaacctcagctcctgtcaggtggcgcaggggattgtcggaggattatttcctcagactcaggtgtcacagcagaaggtctgtcaggacattgccggtgagagcaatatttttgctgactgggccgcgtcccgtcagggctgcacggtcggaggacagtcatcgtctgttcgtgacaaggccagtgacaaagataaggaacgggtgctgaagaacatcaatatcatctgggactcgctgtccaaaaacaggatgcttgatggtaacaaagaactgaaagaatttattatgacgctcaccggtacgctgatttttggggaagacagcgagattacccccctgccggcgcgtaccactgaccgcgatatcctccgggcgattatggaggggggaacggcaaaagtttatcactgcaacgattcggacaagtgtctgaaggtggtggcggatgcaaatgtgaccatcgcccgggataaagccctgaaatcacagattacaaaactgctcaccagtattcagaataaagcggtgagtgatactccactggatgacagggaaaaaggcttcatttccagcaccaccgtccccgtctttaaatatcttattgacccgcagatgctcggtgtgtccagcagcgtggtttaccagctgacggactatatcggctacgacatcatgctccagtacattcaggaactgcttcagcaggcccgggccatgattgccaccgggaactatccacagaccgtgctggacagtgtgctggagaatctgaatcaggcacagcaacagattgcggttttccaggggcaggtaaaggtccagcaggatgcattgctggttgttgaccgtcagatgagctacatgcgccagcagctgtccgcccgcatgctcagccgttaccagaacaactatcacttcggagggagcacgctgtga

SEQ ID NO: 13498 - DNA, 234 bp, Escherichia coli
atgacagcgcttcccgaccatgccgccagtcccctgatgacccgactgcaggacgagctgcgcacggaatctgtccggtctcaggcccgtgaacagtttaccggtgcggtggaccggatatttgacacggcggagagcgtctgtattgcctctgttgcacgcacggttctgcgtgccgtccgtgactcggtggtctctgttgcccgcgctgtatggaactggattttcttctga

SEQ ID NO: 13499 - DNA, 756 bp, Escherichia coli
gtgagcaatatccatcaccttgaacgcagcctgcgtaaactacgcctgacacgagttggagctgaatggcacgctctggaaaaacgagcactggcagaaggctggacaccatcgcgctatcttctgacgctatgcaatgaagaactcctgtggcgcgagagtgaaaaactgcgtcgttataaaaaggaggcccggttgccagttgccaaaacgctaagcgaatacgacttcagtcaggtgccggaactgaatggagctcagttccggcaactctgtgaaacgacagactgggttgatgcaggagaaaacgttctgctgttcggagccagcgggttggggaaaagccatctggcggcagcgatcgtggatggcgtagtaggccagggctaccgggcccggttctacagcgcaggagagttgttgcaggaactacgtaaagccagagcgcagttgaaactgaatgagctgctactgaaactggatcgctaccgggtgatagtggtggatgatcttggctatgtcaaacgcgacagcgccgaaacgggagtactgttcgagttaatagcgcatcgctatgaacgtgggagcctggtgataaccagtaaccatccgttcagcatgtggggcagcatcttcgtggatgagactatggcggtggcggcggcagaccggctgatccatcacggatatatgttcgaactgaaaggtgaaagctacaggaaaaagacagcgaaggcagtaacaagcgcgacttga

SEQ ID NO: 13500 - DNA, 516 bp, Escherichia coli
atggcactggcctttgatagtgtagacgatgtgaacgtgagacgttcggcagatgtcacaagctaccccgtagaaaatggtgctactgtgtctgatcacgttcaaattaaaaacaataagttttctcttaaaggaaggatcactgaaacaccgattaaaagcgatcctggcttgttaaagagtgcaggggtgaacgggaacagaagatcattagctatagactacctgaatcagattatggacagtagacagccttttcttcttgttacagaaaataaaacttttgagaacgttgttttaacaggcatcgaatacacagaagaggcaagcgaatccctggtatttgatcttagctttgagcagatcaggctcgtttcgtatggcactgtaaacactgtagctatcaaaacacagccatctaagaacataggggcgaatatgaaaaaacgtgttaacactgaaaaatcaagtagtgaaggtgaagacactattactcctgcctttaaacaggaatag

SEQ ID NO: 13501 - DNA, 1158 bp, Escherichia coli
atgaatatcagaaaactgttttgtccgggcaatacaccccggattttattgtttttattcttttttgttgtttctgtcataaccacaattgcatgcggatacactgagaagaatgccaccgggaatgtgttgctgctgttccttcttctgctccttgcacacagaaataccctcacatccattacagcgctgttatttctgttctgttgtgcactgtatgcgcctgccggtatgacgtacggtaaaatcaacaacagttttattgtcgcgttgttgcagaccacaactgatgaggcagcggagtttaccgggatgattcctgtttatcattttctggtcagtgccgcgattcaggtattcatggtgattttctggcgaacacaccgccgtggtcaccgtaactggctggcactgctgctgttcgtattatgctcagtaaacagctggccgttgcggatggttaaaggaactgttgtggggacaactgacacattgcgtgaaatgcagcgttataaacaactgaatcagcacggggctgacaactggaaaatcctgccgggtgtaccgttgtatgacacgattgttatcgtcactggtgagagtgtgcgcagggattatatgtcggtatatggctatcccgtgccaaccacgccgtggctgaatacagctcccggtttatttattgacggctatacatcggcagcagccagtaccgtaccttccctgagccggacactgatttatgactatgagcagaaccctgactccggcaacaacgtggtggcgctggcagcaaaagcaggatacagcacatggtggatatccaatcagggaaaactgggggagcatgatacacgcatctctgttattgcttctgatgcggagcataccgttttcctcaagaaaggcagctttgcttcccgtaaaacggatgacatgttgttgttacaggaaacagaacgtgcactggcggataaatcctctccgaaggtgatattcctgcacatgatggggtctcatccgaacccgtgtgaccggcttcactcctggccgaatcattacctggagcagtatccccgaaaggttgcctgttacctcgccagcatcagtaaactggataactttctcggtcagcttgatggttgcgtattaccgtga

SEQ ID NO: 13502 - DNA, 747 bp, Escherichia coli; identical to SEQ ID NO: 9873

SEQ ID NO: 13503 - DNA, 501 bp, Escherichia coli; identical to SEQ ID NO: 5312

SEQ ID NO: 13504 - DNA, 222 bp, Escherichia coli; identical to SEQ ID NO: 9129

SEQ ID NO: 13505 - DNA, 477 bp, Escherichia coli
atgcaacagatttcctttctgccaggagagatgacgcccggcgagcgcagcctcattcagcgggccctgaaaaccctggaccgccatcttcatgaacccggtgtggccttcacctccacccgtgcggcacgggaatggctgattctgaacatggcgggactggagcgtgaagaattccgggtgctgtatctgaacaaccagaataagctgattgccggtgaaaccctcttcaccggcaccatcaaccgcacggaagtccatccccgggaagtgattaaacgcgccctgtatcacaatgccgctgctgtggtgctggcgcacaatcacccgtccggtgaagtcacacccagcaaggcagaccgccttatcacggaacgtctggtacaggcactgggcctggtggatatccgggtgccggaccatctgatagtcggtggcagccaggttttctcctttgcggaacacggtctgctttaa

SEQ ID NO: 13506 - DNA, 306 bp, Escherichia coli
atggaccatctttgcgaagactactgcggtggtatctggaatctgtacaccctgaacaacggcggggcatttatggcacccgaaccggatgacgatgatgacgagacatgggtactgttcaatgccatgaacggtaaccgtgctgaaatgagtccggaagctgccggtattgccgcctgtctgatgacgtacagccatcatgcctgtcgtacggaatgttatgccatgacggttcattattaccggctgcgggattacgccctgcagcatccggaatgcagcgccattatgcgcatcattgactga

SEQ ID NO: 13507 - DNA, 1287 bp, Escherichia coli
ttgcgtcgtaactgtaaaggtatttttatcaataacagtagtcaccgtcatattcccggtaacatctgtaacaccagagttaacgtcaatgagtggagtctggataatgtagagtgggttaatgttactgatcagatttatcagggcggaatagttaactctgcggttggtgttggttcagtttgtatcaaagacaactggctgtactacattttcggtggggaagattttctaaacccatggagcataggggataacaacagaaaatatccttatgttcacgatggtcacccggctgatttgtattgtttcagggtgaaaattaaacaggaagaatttgtttcaagggattttgtctacggagccactcctaacagaacgcttcctacttttatgtcgacgtcaggcgtgaggacggttcctgtacccgttgatttcacagatgatgttgccgtccagtcactgactgtccatgcaggtacatcaggacaagttcgcgcggaagtcaaacttgagggtaattacgccattattgcgaagaaagtaccgtctgatgatgttaccgctcagagattaatcgttagcggcggtgaaacaacgtcttcagcagatggtgcaatgataacgttgcatggttccggaagcagtactccacgtcgcgcggtatataacgcactcgaacatctttttgagaacggagatgttaaaccttatcttgataatgtaaatgctcttggtggtccgggaaacaggttctcgacagtttatcttggctccaatcctgtggttaccagtgacggaacattaaagacagagccggtctctcctgacgaagcattgctggatgcctggggtgacgtcaggtatatcgcttataaatggctgaacgctgtcgctataaagggggaagaaggggcgaggatacatcatggtgtaatcgcgcagcaacttcgtgatgttcttatttctcacggactcatggaagaagaaagcacaacatgccgctatgcctttctttgctatgacgattatcccgcagtatatgatgacgtcattactggccaaagggaaatgccgctgactgataatgacgggagcatcattgttgatgaggatgataatccagtgatggtaatagaagacatcattgagcgcgttgaaataacgccagcaggatctagatggggggtcagacctgatctcttattctatatcgaggcggcatggcagcgcagagaaatagaaagaataaaagctaggttagacttaatagaagggaagcactaa

SEQ ID NO: 13508 - DNA, 573 bp, Escherichia coli
atgattaagtcggttattgccggtgcggtagctatggcagtggtgtcttttggtgtaaatgctgctccaactattccacagagccagggagaagtagctttcaaaggaactgttgttgacgctccatgtggtattgaaacgcagtctgcaagacaggaaattgattttggtcagatctctaaatccttcctgcaagaggggggagagactcaaccgaaagatttgaatattaagcttgtaaattgcgatatcacaaattttaaaaagaacccagcaggtgctggtggagcggctaaggcagggacagtaaccctgacattttctggtgttggtattgggaataatcatgacatgctgcagacagttggggggacaaatacggctatcattgttactgaccctaacggaaaaccagtaaaatttgatggcacaactccgacaggcgtatcaactcttgtggacggagataataccattcatttcactgctctggttaagaaagaccccagcggtaatgcagtaaaagaaggggtgttttctgccgtgactaactttaaccttacttatcagtaa

SEQ ID NO: 13509 - DNA, 291 bp, Escherichia coli
atgatgaaactggccctgacactggaagccgacagtgttaacgtacaggcactgaatatggggcgaattgtcgttgacattgatggtgttaatctcgctgaactgattaataaggccgctgaaaacggttatttactccgcgtggtcgataaatccgaccaacacgcaaccagtacaccaccaccgttaacaacccttaccggcatacgctgcagtaccgcacatatcacggaaacggacaacgcctggctgtactcgctgtcacaccagaccagttgcgtattaccgtga

SEQ ID NO: 13510 - DNA, 819 bp, Escherichia coli
atgcaattagccagtcgttttggtcatgtaaatcagatacgccgtgatcgtcccttaactcgtgaagaactgatgcaggtcgtccccagcgtattcggggaagataagcacacatccagaagcgagaactatacctggatccccaccatcaccgtgctggaaagcctgcagcgggaaggttttcagccattcttcgcctgccagacccgtgtgcgcgacccgggccgccggggatacaccaaacacatgctgcgtctgcgccgtgacggggagataaacggacaacatgtccctgaaatcatcctgctgaactcccatgacggtacctccagctaccagatgctgccgggttacttcaggttcgtctgccagaacggatgcgtctgtggtcagtctctgggggaagtgcgtgttccacaccggggaaatgtagtggagaaagttatcgaaggggcttacgaggtggtgggggtttttgaccggattgaagaaaagcgtgacgccatgcagtcgctggtcctgccgccaccggcacgccaggcgctggcacaggcggcactgacttaccgttatggtgacgaacatcagcccgtcaccaccgccgacattctgacgccgcgacgccgggaggattacggtaaggacctgtggagcgcatatcagaccatccaggagaatatgctgaaaggcgggatttccggtcgcagcgctaaaggaaaacgtatccatacccgggccattcacagcattgataccgacattaagctcaatcgcgcattgtgggtgatggcagaaacgatgctggagagcctgcgctga

SEQ ID NO: 13511 - DNA, 342 bp, Escherichia coli
atgattaaatactcttgtgggctaattgggaactcctcctctggtttaattgaggttccatctttaaaagttgcaacaattaacattggtgataggcagaaaggccgtgttcgtggagccagtgtaatagatgtacccgttgaaaaaaatgcaatcgtcagagggataaatatatctcaagatgaaaaatttattagtgttgtacagtcatctagtaatccttattttaaagaaaatgctttaattaatgctgttagaattattaaggattttattaaatcaaaaaataaagattacaaagatttttatgacatcccggaatgtaccaccagttatgactag

SEQ ID NO: 13512 - DNA, 441 bp, Escherichia coli
atgaaaaaactaatctttgaaattcgatctccagcacatcagcaaaacgctattcacgcggtacagcaaattcttccagacccaaccaaaccaatcgtagtaaccattcaggaacgcaaccgcagcttagaccaaaacaggaagctatgggcctgcttaggtgacgtctctcgtcaggttgaatggcatggtcgctggctggatgcagaaagctggaagtgtgtgtttaccgcagcattaaagcagcaggacgttgttcctaaccttgccgggaatggctttgtggtaataggccagtcaaccagcaggatgcgtgtaagcgaatttgcggagctattagagcttatacaggcattcggtacagagcgtggcgttaagtggtcagacgaagcgcgactggctctcgaatggaaagcgcgatggggagatcgggctgcatga

SEQ ID NO: 13513 - DNA, 528 bp, Escherichia coli
atgactatcaaatcaaatacgccagcacacgacaaggactgctggcaaacgccgctttggctttttgatgcactggatattgagtttggattctggctggattcggcagcgagcgacaaaaatgctctgtgcgctcactggctaactgaggacgacgacgcgctcaattctgagtgggtaagccacggtgcaatctggaataacccaccgtacagcaatatcaggccgtgggtggaaaaagccgctgagcagtgcatacaacagcgacagacgatagtgatgcttgtgccagaggatatgtctgtcggatggttcagcaaggctctggagagtgttgacgaagttcgcatcattactgatggacggattaattttatcgaaccatcgacagggttggagaagaagggaaacagcaaaggttccatgctgctgatttggcgaccgttcatcagtcctcgacggatgtttactaccgtatccaaagcgacattgatgacgatcgggcggggcgtcaggagagcggcatga

SEQ ID NO: 13514 - DNA, 939 bp, Escherichia coli
atgttacagatagtcggcgcgctgatcctgctgatcgcaggatttgccattcttcgccttttgttcagagcattaaccagcacggcgtctgcgctggcaggattcgtattgctgtgtctgttcggcccggctttactggctggctatatcactgaacgcataacccggttattccatattcgctggctggcaggcgtatttctgacgattgccggaatgatcatcagcttcatgtggggacttgatggtaaacatatcgcactggaggctcatacttttgactctgtaaaatttattctgaccaccgctctcgccgctggtctgctggctcttcccgtgcagataagaaccattcagcagaacgggctcacacctgaagatatcagcaaggaaattaacgggtattactgctgtttttatactgcttttttccttatggcgtgttctgcatacgcaccattgatcgcattgcagttcgatatttcaccctcactgatgtggtggggcgggttgttgtactggctggctgcattagtgacgctgctatgggcggccagccagatccaggcgctgaaaagactgaccagtgccatcagccagacactggaagaacaaccggtgctcaacagtaaatcatggctgagcagtttgcaaaacgattacagccttcctgaaacgctgacggagcgcatctggctgacactcatttcacaacggatttcccggggagaactgagggaatttgaactggcagacggaaactggctactggacaatgcctggtatgaaagaaacatggcgggtttcaacgaaaagctgagagagagcctgtcatttacccctgatgaactgaaaaccctcttccggaaccgcctgaatttatcaccggaagcgaatgacgattttctcgatcgttgcctggatatgagacgacaataa

SEQ ID NO: 13515 - DNA, 708 bp, Escherichia coli
ttgcataaacaggcaattgcaaaacatgctgtacttgagcaggagaataaatatgtcgaggcagcaaatgaattacgggtttataaatcgcaactggagcaaattgagagtgagatattgtctgcaaaagaagaatatcagcttgtcacgcagctttttaaaaatgaaattttagacaagctaagacaaacaacagacagcattgagttattaactctggagttagagaaaaatgaagagcgtcaacaggcttcagtaatcagggcccctgtttcgggaaaagttcagcaactgaaggttcatactgaaggtggggttgttacaacagcggaaacactgatggtcatcgttccggaagatgacacgctggaggttactgctctggtacaaaataaagatattggttttattaacgtcgggcagaatgccatcattaaagtggaggcctttccttacacccgatatggttatctggtgggtaaggtgaaaaatataaatttagatgcaatagaagaccagaaactgggactcgtttttaatgtcattgtttctgttgaagagaatgatttgtcaaccgggaataagcacattccattaagctcgggtatggctgtcactgcagaaataaagactggaatgcgaagcgtaatcagctatcttcttagtcctctggaagagtctgtaacagaaagtttacatgagcgttaa

SEQ ID NO: 13516 - DNA, 162 bp, Escherichia coli
atgagctgctccattaattggatcctgcacacggatcagtttcatactccatgcgccagccataaaccatccgtctttctggacattctctttgaaatcatcccactggtcgccagtggagaaaactgttcgtactgcagtatcaataatggatacatatga

SEQ ID NO: 13517 - DNA, 309 bp, Escherichia coli
atgacggtaatcgtatgcgggaaatcaacatttgcaggaaatgccaaaactcgccgtcatgagcggcgcagaaagctggctattgagcgtgatgctatctgtaacatcattgattctatcttcggcacagacagtgaggaacctgttcagaaaggcacgagaaagcgtttaagcctttctgaaaaagcaatatcactcggcaacattcgtaaccaaaataccgacgaatgcagtggaagtatttgcctgccaaacgtagctctttacgcagcaggctaccggaaatcaaaacaactgacagcgaggtga

SEQ ID NO: 13518 - DNA, 474 bp, Escherichia coli
atgtcaaacatcaaaaaatacatcattgattacgactggacagcatcaattaaagagtgggtagatataaggaaccccgaaatacttccagatcactggatgtattacgcaatgcttttgtgtatcagttatgttctgaacagggtgatggagtttatatttctggcatcttcagacagatataaaaaatatctcagtaagagagatgaggccaaagtaattgtggagactgagcgcctgttcaattctctgggtattcaggaaaaagaggttttagcatttgctgttatggcaaataacaaaatcgtacttaagcacggcgatccggtcgctttatctcttatgagaaaaggccttctccatcgctcaggtgtgacttacagcgcgtcaggtaaagagaaatttgttatacctgacgtctggttccatgagtgttatatgcgctttgctggtaaagctgatgagctaatttag

SEQ ID NO: 13519 - DNA, 312 bp, Escherichia coli
atgggagttgagcagaataatttcaggcacatgctgaccgtttatctctccggcccgccgcagacgcagcatgtgttttgtgtatccccggcggcccgggtcgcgcacgcgggtctggcaggcgaagaatggctgaaaaccttcctgctgcaggctttccagtacggtgatggtgggaatgtacgcatatcgtttactgcgggaagtatgccggtcttcaccgaaaatactgggaacatagtgcatcagttcttcgtgtgtcagcggacggtcacggcgtatctggttcgcataaccaaaacgactggctag

SEQ ID NO: 13520 - DNA, 159 bp, Escherichia coli; identical to SEQ ID NO: 6188

SEQ ID NO: 13521 - DNA, 480 bp, Escherichia coli
atgctgccgggttacttcaggttcgtctgccagaacgggtgcgtctgtggccagtctctgggggaagtgcgtgttccacaccggggaaatgtagtggagaaagttgtcgaaggggcttacgaggtggtgggcgtgtttgaccggatagaggagaagcgtgatgccatgcagtcgctggtcctgccgccaccggcacgccaggcgctggcacaggcggcactgacttaccgttatggtgacgaacatcagcccgtcaccaccgccgacattctgacgccgcgacgccgggaggattacggtaaggacctgtggagcgcatatcagaccatccaggagaatatgctgaaaggcgggatttccggtcgcagtgcaaaaggaaaacgtatccatacccgggccattcacagcattgataccgacattaagctcaatcgcgcattgtgggtgatggcagaaacgatgctggagagcctgcgctga

SEQ ID NO: 13522 - DNA, 294 bp, Escherichia coli
atgtcgcgccagtgcacgcattatgggcgttggcctcaacacggttttacgtcacttaaaaaactcaggccgcagtcggtaacctcgcgcatacaaccgggcagtgatgtgattgtctgcgctgaaatggacgaacagtggggctacgtcggtgctaaatcacgtcagcgctggctgttttacgcgtatgacaggatacggaggacggttgtggcgcacgtcttcggtgaacgcactctggccacactggagcgtcttctgagcctgctgtcggcctttgaggtcgtggtatag

SEQ ID NO: 13523 - DNA, 210 bp, Escherichia coli; identical to SEQ ID NO: 5053

SEQ ID NO: 13524 - DNA, 408 bp, Escherichia coli
atgctgcagggcgtaatcccgcagccggtaataatggaccgtcatggcataacactccgtacgacaggcatgatgactgtacgtcatcagacaggcagcaatgccggcagcttccggactcatttcagcgcggttaccgttcatggcattgaacagtacccatgtttcgtcatcatcgtcatccggttcgggtgccataaatgccccgccgttgttcagggtgtacagattccagataccaccgcagtagtcttcgcacagacggtccatccagccgaagacacggggctccagggtcacccactgtggaatgaggccaaagtgctgcggccagaagctgatgcgctgttcatcagggacgagggtggcaaccaactgaggcggattattctctggtgttgtagctga

SEQ ID NO: 13525 - DNA, 279 bp, Escherichia coli
atgattattgatttagacactctttttccaagtcggaagacgtttacagatctggtggcttattgtactgatccgtttgcctctgtagaaaacaaggtttttgcttctcttcctgctgatgttgaatgcggagacttgatcaccagcactggcgctaaatatgaatcaggagatgatatctatgttgttatgagtgaatttgtaacggctggagaaaacaagcctgtagatgtgctacgtagcaatgctggccttgtgtgcctggaaaagcggggctaa

SEQ ID NO: 13526 - DNA, 213 bp, Escherichia coli
atgttgttcttaaatgataaagagcaaatcatcaagtataaagatgaaatgctgaaaattaatccacaaattaccgaaatggtagctaaatacgctgggtgttctgtagaggaagtagaaagatgtgttgaaaaatatttttctccttcttctccgtctacaccttcccttaatgaattaatcaaattaaaagctaaggagattactaaatga

SEQ ID NO: 13527 - DNA, 489 bp, Escherichia coli
atggtccggcacccggatatccaccaggcccagtgcctgtaccagacgttccgtgataaggcggtctgccttgctgggtgtgacttcaccggacgggtgattgtgtgccagtaccacggcagcggcattgtggtacagggcgcgtttaatcacttcccggggatggacttccgtgcggttgatggtgccggtgaagagggtttcaccggcaatcagctgattctggttgttcagatacagcacccggaactcttcacgctccagtcccgccatgttcagaatcagccattctcgtgccgcacgggtggaggtgaaggccacgccgggttcatgaagatggcggtccagggttttcagggcccgctgaatgaggctgcgctcgccgggcgtcatctctcctggcagaaaggaaagctgttgcattgttccagcccctttcagtcaatgatgcgcataatggcgttgcattccggatgctgcagggcgtag

SEQ ID NO: 13528 - DNA, 405 bp, Escherichia coli
gtgtttcctgctgaagaatggaatgccacagaaaaatgcccatcccgtcaccaggaactctcactggcaactgttacagccagggtggcaaccctgttcccgtcatcatttccggtactccccgttgctgcgcctgtcggctggaatcttccggcgtttgtgtcgctgatgatccacgccctgccaccgcaggcaaccagtgcggtttattcacatatccggggggaaaaccgctctgaacaggcccagaaacacgcacaacagacttttggtgacgccatcgggaaaagttttgacgacgccgttgcccggttcacttttccggtctggatgttacagcttctgcgtaaagcccgggaccgcattatccgcctgctggaaacactgtgggatcgtctgttctga

SEQ ID NO: 13529 - DNA, 288 bp, Escherichia coli; identical to SEQ ID NO: 13484

SEQ ID NO: 13530 - DNA, 189 bp, Escherichia coli
gtgaatgcctttgagcacctctgtaagcgtgtagagatgctctgtaagcgtgagaacgcatacctgacagccgatcagatatgggaattatcaaactggatagaagatattgaatctgatgttcgctatgtaggagatggccttgttgaactagctcaacgcttaggcgctgctatcacagaagaataa

SEQ ID NO: 13531 - DNA, 489 bp, Escherichia coli
atggtccggcacccggatatccaccaggcccagtgcctgtaccagacgttccgtgataaggcggtctgccttgctgggtgtgacttcaccggacgggtgattgtgtgccagcaccacagcagcggcattgtgatacagggcgcgtttaatcacttcccggggatggacttccgtgcggttgatggtgccggtgaagagggtttcaccggcaatcagctgattctggttgttcagatacagcacccggaactcttcccgctccagtcccgccatgttcagaatcagccattctcgtgccgcacgggtggaggtgaaggccacgccgggttcatgaagatggcggtccagggttttcagggcccgttgaatgaggctgcgctcaccgggcgtcatttctccgggcagaaaggaaatctgttgcattgttccggcccctttcagtcaatgatgcgcataatggcgctgcattccggatgctgcagggcgtag

SEQ ID NO: 13532 - DNA, 201 bp, Escherichia coli; identical to SEQ ID NO: 7224

SEQ ID NO: 13533 - DNA, 360 bp, Escherichia coli
atggattattcacagttaagtgattttgaaattaacaagcgagtggcaatttgctgtggatttgctcccgaagattgcgaaatcgcaaagttgggaacatcaatcgttggtgttgagtgggatgacgaaactggttatgcaataaaaacggttgattactgtaaaagcccatcagacgcagagccgattatcgtagagaacagaattggaattattccagcaccagaaaatggattatggaaggcagcgcatagaaaagttggcggtgatagtaccccatatcatatgactcaagatgaaaacccactccgcgctgccatgattgtctttctcatgatgcaggacgccaataatgcttag

SEQ ID NO: 13534 - DNA, 375 bp, Escherichia coli
gtggccttcacctccacccgtgcggcacgagaatggctgattctgaacatggcgggactggagcgtgaagagttccgggtgctgtatctgaacaaccagaatcagctgattgccggtgaaaccctcttcaccggcaccatcaaccgcacggaagtccatccccgggaagtgattaaacgcgccctgtaccacaatgccgctgccgtggtactggcacacaatcacccgtccggtgaagtcacacccagcaaggcagaccgccttatcacggaacgtctggtacaggcactgggcctggtggatatccgggtgccggaccatctgatagtcggtggcagccaggttttctcctttgccgaacatggtctgctttaa

SEQ ID NO: 13535 - DNA, 405 bp, Escherichia coli
gtgtttcctgctgaagaatggaatgccacagaaaaatgcccgtcccgtcagcaggcgctctcactggcgacggtgacagccagggtggcaaccctgttcccttcatcatttccagtactctccgttgctgcacctgtcggctggaaccttccggcgtttgtgtcgctgatgatccacgcactgccaccacaggcaaccagcgcggtgtattcacatatccggggagaaaaccgctctgaacaggcccggaaacacgcacaacagacttttggtgaaaccatcgggaaaagttttgacgacgccgttgcccgtttcagttttccggcctggatgttacagcttctgcgcaaaacccgggaccgcattatccacctgctgatcacactgtgggagcgtctgttctga

SEQ ID NO: 13536 - DNA, 264 bp, Escherichia coli
gtgaacaaccctaaaatacttatttttgatgaagcaaccagtgctctggattatgagtcggagcatatcatcatgcgcaatatgcacaaaatatgtaagggcagaacggttataatcattgctcatcgtctgtctacagtaaaaaatgcagaccgcattattgtcatggaaaaagggaaaattgttgaacagggtaaacataaggaactgctttctgaaccggaaagtttatacagttacttatatcagttacagtcagactaa

SEQ ID NO: 13537 - DNA, 249 bp, Escherichia coli
ttgcattaccttgccgaccgcgccggtatcaggggccggttcagcgacgcggattcgtaccacctggaccaggcctttccgctgctgatgaaacaactgaaattaatgctcaccagtggtgaactgaatccccgccatcagcataccgtgacactgtatgcgaaggggctgacctgtgaagccgacaccctcggctcctgtggttacgtttatctggctgtttatccgacacctgaaacgaaaaagtaa

SEQ ID NO: 13538 - DNA, 405 bp, Escherichia coli
atgaccgcgtattggctggcccagggcgtgggtgtcatcgcctttctgattggtatcacgacatttttcaaccgtgacgaacgtcgcttcaaaaagcaactttcggtctatagcgccgttattggcgtacatttttttcttctgggcacctatcctgccggtgccagtgccatccttaatgccattcgtacattgattaccttacgcacgcgcagcttatgggtaatggcgatttttattgtgctgactggcggaattggcctcgcgaagttccatcatcctgtcgaactattgccggtaatcggcacgattgtcagtacctgggcgctgttccgctgtaaagggctgaccatgcgctgcgtaatgtggttttcaacgtgttgctgggtgattcacaacttctag

SEQ ID NO: 13539 - DNA, 1128 bp, Escherichia coli
atgaaagttaaagtactgtccctcctggtcccagctctgctggtagcaggcgcagcaaacgctgctgaagtttacaacaaagacggcaacaaattagatctgtacggtaaagtagacggcctgcactatttctctgacgacaagtctgtagatggcgaccagacctacatgcgtcttggcttcaaaggtgaaactcaggttactgaccaactgaccggttacggccagtgggaatatcagatccagggcaacagcgctgaaaacgaaaacaactcctggacccgtgtggcattcgcaggtctgaaattccaggatgtgggttctttcgactacggtcgtaactacggcgttgtttatgacgtaacttcctggaccgacgtcctgccagaattcggtggcgacacttacggttctgacaacttcatgcagcagcgtggtaacggcttcgcgacctaccgtaacaccgacttcttcggtctggttgacggcctgaactttgctgttcagtaccagggtaaaaacggtagcgtagatggcgaaggcatgaccaacaacggtcgtggtgctctgcgtcagaacggcgacggcgttggcggttctatcacttatgattacgaaggcttcggtatcggtgctgcagtgtccagctccaaacgtactgacgctcagaatggtacttacgtagttgataatgtaactcataactacatcggtactggcgaccgtgctgaaacctacactggtggtctgaaatacgacgctaacaacatctacctggctgctcagtacacccagacctacaacgcaactcgcgtaggttccctgggttgggcgaacaaagcacagaacttcgaagctgttgctcagtaccagttcgacttcggtctgcgtccgtccctggcttacctgcagtctaaaggtaaaaacctgggtgtcatcaatggccgtaactacgacgacgaagatatcctgaaatatgttgatgttggtgcgacctactacttcaacaaaaacatgtccacctacgttgactacaaaatcaacctgctggacgacaaccagttcactcgtgacgctggcatcaacactgataacatcgtagctctgggcctggtttaccagttctaa

SEQ ID NO: 13540 - DNA, 132 bp, Escherichia coli
atggtcataactgaagcatccgacgacgtggtgtctaccagagtgtcagatatgcaggaaaatatgagttccgacagaaatgcagtaaaaaaggagtctcgcactcctctccagaaaactccagggctgtaa

SEQ ID NO: 13541 - DNA, 4026 bp, Escherichia coli
atgaacaaaatatactcactcagagttaatgacagaaaagaactggttgctgtaccggaaacggtggggggcaggaaaaagtcgtccggcattcccggtgcggggatgctttcccgtcttcttctggcctctggtgccgttgccggtgttctgttttcttatccgtcgctggcatccgttgtcgggaataccctcccctggcagacctacagggattttgctgagaacaagggcgcgtttcatgccggtgccacaaatattccgctttatggcaggaacggggctgtcggtgggcggctggacaaggcgccgatgatggatttcagtgttgtggaccagatactgggggtggcaacactgatttctccgcagtatgtggcgggggttaagcataacggcagctacaacacggtgcgttttggttatgcggatgatacgacatatcgccttgttgaccgtaatgagcactggcgtgattttcatactccccggctgaacaaactggtgacagaagttgccccggtgagcgtcacggatgccggaaccggcaagggggtataccagaaccgcagtcgttatccggtgttttatcgtatggggagtggaacgcagtacaccggagctgcttccggtgcgctgaccagaatagcgggtgcttacgcctggaagacgggcgggacggtgggaagtccgctcatttctgactggagtctggtgtcaaacccggggtatctgtaccagagtgtcaatggtccgctggcatcttacgggacaccgggagacagtggctcaccgctttttgcctgggatgcggtgaagaagcagtgggtccttgttgctgtacttaatggttatgccggtgagaaagggaagacgaactggtttacggtgattcccgcaggggatgtgaataacacgataaagcaggacagttcaggcactgtcgtgccggcagttgccggtggtgacattgtgtggaattacaataagggaagcggagagggaaccctttctcaggacgggaaggtatggaagatgaacggcttcaggggagggagtctgaatgacgggaaagatatcacctttgggggtaagggcacggttgttctgaaggatgatgttgtccagggggcgggttcgctcacgtttaatggtgattatacggtcagaccggaagggaatcagacctgggtgggcgggggaatcatcgtgaacgacgggcaccgtgttgactggatggtgaacggacttgcgggagacgcacttcataaaactggtaagggaacactggtggtggccggcagtggtgaaaatcctggcaccctgaatacgggggacggaacggttattctggcacagaaggctgatgctgcaggcagggtccgggcattcagtgaagtccgtattgtcagcggacggccggttgtggtgctgcaggacagtcatcagattgagggggagcgcatccgctggggataccggggaggcacgcttgatatcaacggcaatgatatgaccttccaccggctggctgcggctgatgagggggcagtactcacaagccgggcgggttctgccacagttcgtctggatttcagcccgtcagggcagaaggccgtgatgtggcatggtcattttaccggcaacctcagtgtccagaacaacacgtcatcagcggtggatttcatcatggatggcggagcggatatgtccggcagttttacacagcagggcgggggactgtatatccaggggcatccggttgttcatgccgtgagcagtgaggcggttgcggctgcattgcgaaagcagggtgataattctgttctgacgcggccggtatcatttacccagaaggactgggagagcaggacgttcagcatcgggcaactgaaactgaaggaagcgtcattcagcctttcccgcaatgcgacactgacgggagatattgatgctgataatgccaccatggtgctgggaagtgactcgctgtatctggatatgaaggacggcacggggagcagcagtgcgccggttaaggggacgtctgctgcgggcggtgcatccggtaccagtacattccgcgggaatgtgaatatgcgtcattcttccctgacggtccgcgaccattttaccggcagtataacggcatcggacagccggatagtcgtgaactcagagaatgtgcgtctggaaggggattcccgcctgacgtcttctgcacttactgtcagtgacggcgggcgtttacatgtgaaggggggactggagacagatggtggtgtgacactggatggaggaacccttctggttgacgggggaagtgtcaggaatgatgtgtatgaacgtctgctggcctggtcagaggagcgtggcgggctgaacggaagcggtgagtatgattttatgacgggggcagctggtctcctgcggggttatgtcagagggagtgcaggtaatgtgaatctgcagaatgcggcctggatgatgacgggaaactcatccgtgaagcatcttgagtcatcgggaagtgctctgtatttcagcaggccgggcggggagttccataccctgacggcaggcagtatggatatcagcgacagtgttctggtgatgcggacggaccttcaccactcagaccagcttcgggtgacagaatcgctgcggggtaagaataatctgttgttggttgattttactgagcgttctgacgggcagaaggcgctgaatatccctctggtgacagcgccggccggtaccggcgcggatgtgttcagtgtgaaaacgcgtgataccggcttcagtcatatcacacctgttgtcagggctgaacaggggacgggcggcacggcctggcagctgaatgttgtgcagccggaaactgccgcagagcctgtggtggatgaggtgagcaggccgtcgttgccggtggtgatgcggcaggatgcaaagacgccgaatcctgtggaagccgtatcaccgctcccttcaccggtttctgctccgtcaccggctccggaggcgtcagtgacggatgtactgaccggagagaatgcgggggaatcaggtgagtaccgtgatgagacccggtggctgctgacaggataccggagtacggttaatgcctctgcggtcagggatgccgggatgctgatgtcaatggggcaccgtaacttcattaatgaggtcaacaacctgaacaaacgtatgggtgacctgcgggacatcaacggcgaggccggtgcatgggcccgtatcatgagcggaaccggctctgccggtggtggcttcagtgacaactacacacacgttcaggtgggtgcggataaaaaacacgaactggacggtctggacctcttcaccggggtgaccatgacatataccgacagcaacgccggcagcgacaccttcagtggtaaaacgaagtcagtgggtgcgggtctgtatgcttcagccctgtttgattccggggcctatatcgacctgattggtaagtatgttcaccatgataatgagtatacggcgacctttgccggactcggcacaaaagactacggctctcattcctggtatgccggtgctgaagtgggttaccgctatcatgtcacagaggatgcctggattgagccacaggcggaacttgtttacggtgctgtctccgggaaacagttcagctggaaggaccaggggatgagcctgtccatgaaggacaaggactacaatccgctgattggccgtaccggtgtggatgtgggtaaatcgttctccggtaaggactggaaagtgacggcacgagccggtcttggctaccagtttgacctgctggcgaacggagaaacggtactgcgtgatgcatccggagagaagcgtatcaagggcgagaaagacggccgtatgctgatgtctgtgggtctgaacgcagaggtccgtgacaacatccgttttggtctggagtttgagaaatcagcctttggtaagtacaacgttgataatgctgtcaacgccgggttccgttattcattctga

SEQ ID NO: 13542 - DNA, 474 bp, Escherichia coli
atgaaagtgattctggcgacccgcaaccgttatctggagtatggcctgcagcagatgctcgaggggtacaggataatactggcgagggagttttttacaccagagaacaggaagagcgtaccggcacatgatgagtcatgggtgataatctgtgatgccctccttggcaggctgatgtgctgcatgtttcagggacgccgttatcttcagattgatgcggaagatgttacggggcgcctggagacgtacaggaaaatccggaatggtgagtgggtacataatacgtatgcgcgacctctgacgatgtccgagatggtggtgatgtttggatacgtgtaccgggagtcaaagccctgccatcttgcccgtgaaatggggataaacacgaagacggtgaacacctttctgtatctggggcttggtaaaaacggtcttaagtacaggagtgtgaagcacctggttggacgtgcgtag

SEQ ID NO: 13543 - DNA, 999 bp, Escherichia coli
atgagtaaaaaattcacaaagacacttctgtcatcttctctggtagggcttctggttgtgagtgctgagggtttcgcacaggcatcagtatatccgaaagactcgcagtatagcgttttagtggatgacgcgaaacaggatgtattcggtagcaaattcaaagtttattacagtaagtcatctcaccggggagttgtgcgatatgtgcaaaatggaaaagataatgttctatttcacttcggtgatgacggcaatattttggtgctgagcaaggatgggcaaataggatataccgtccatgagcctgtgttgaaggactttgcccgtatggctgaaggtcttaaagttggtaaaggccataagctggagctggatgaggctgaagtacagcgtatttacaataaagtttataacatgtctaacactgttgtaaatcctgcattgaaaaatcaagttggtgagctttctggtcgcgttgaccagctggctcaggatacgaatacccgccttgtggttgaagcgaaaaagtctcgtgaatatacagactccagaacgacagttggtgttaagtccgacggaaccctgaccagcgctgatggcgctacaaaaacgattgctgttaatgacggtctcgttgctctgtccggcagaacagacagcgttgaccgccgggttactaaaaatacacaggctattcagtccaatactcgccagttgcaggagcataatgcacgcctgaacagccagcagcgccagattcgtgaaaaccacgaagagatgaagcgtgcagcagcacagagtgcagcgctggcgggtcttttccagccgtacagtgtggggaaattcaacgccacggcagccctgggtggttacagcgataaacaggcgattgctgtaggtgttggttaccgtttcaacgagcagaccgcagcgaaagcgggtattgcagcgagtgatggcgatgtgtcctacaacatgggcgttaacttcgagttttaa

SEQ ID NO: 13544 - DNA, 8367 bp, Escherichia coli
atggcttattccgatgaacagcgccctgaagcgcaatttggcaaccagaaccgcaacagcctgaacattcagctgccgggcgagactgacagctatgatgcgtttttctccgatcccaatcgctggaaggacaacagcacgtcgttcagcctgggcgatgtattgccaactatggggaaaggtgtcgcccagtccgtccggggggcaggggaaatggcccgtggactcggtgatgcgatgattcagaacccggtaaaaacaggggcgcgtattttaaatgagttcagccgtatggggctgccgggagtcgcaactgttcaggatatttttgtcggtggcagcaagggggcggatgaggtcatcgacactctgcctgatggaaaaaatgcggttactgatactgtcggtaaaggtctgaaggtcacaggcaaggcagtcagtggcggcgctaaagcctcggatgaatggctgactggcaagatgtcgccgggggcgcagcgggcgctgaatacaccgatgactgaaggatatgatgattctgcggtctgggtggcgaagggcgtaaacctgattggtgcccttgtacctgatatggttgcaggcggtgtgactaaaaagctgggtgaagtcactctgcgaaaagtgctgaccgccgggctggagaaaaaatacattgcggcagggatgcagccggaaagagctaccgcactggcagcagaagctgtcgataaaaaaatgccggatttattccaggcaggcctgatcacccattcctcagccagcgcacaggggcagagtgcaatggcagcagcagactctgttcttaacgcggattactctgagctggcgaagtccccgaaatttcagcagacgtttttgtcaattgatgcagatccgcagcacgcacagcttactgatcgccagaaaatggatctggcaaaagagcgtgttgccgatgaggtgcgcgcgcagctggcaaccgatcctgaattgctggctgtgaatgccatggcggcaaaactgggcgatgctcagttgtttaatctggcgatgcggggcacggcgaagaccgttaaaagcggcattgtcagaaatgccacggaacaggggacgattaatgcggcgcagggcggctattcgcgttaccaggaaaatatgacgttgcgtgagactgccggaatggatatatcaccatgggagggggtagctgacgcaacgatcgaaggagccgctcttggtgcagcgatgggcgcaccgttcggtgcggttgccggatatcgtggaaaacgtcaggccgcagaagaaaccgccatgcgtgaggctgaagtcgtacagcagggtgaagcagccccgcaacccgaaccggctgatccggtggcacagcatcgcgaatccatgcagggcatgaatcgcgagcaacttctggaacagtatgctgatgcggatatggcacctgagggagacacgtctgccgttcatcgccgggaagccgccagccagctgttaaatgaactggatgaacaggcgaagcgacaggcggtgatggatgagctgaaggcgaagccgcgccctgaactgcttgaggaataccgaaaactcagcctgaaggaagggcgtactgatactgaagagcagcagttacaggctatccgtgatgtgcttcgccctcagcaggaggccagaccggaggcacagccacagccggaaaatgcggatgatggcgacgggagtatttacccgacggtgcggttccgcgatccggatgaagttcgtattgaaattaacgggagtggtgcgtccagaccagcagaacgcattgaaaaggtgcgtccggacaaccgttatttcacggatgaaaaaagtgctctggggagcgacgttttccgcaatgccagcgccaccggcctgaaaccgtccgtagtgaagaaaggcgagaatcagtatgccgttgaaatggataatcctgcgttctctgaagatgtggcaacggagaccattaacaccctggctgacggagagcgtattgctgatgctgaaccgatggagcagcccgcgttcatgcgtgacccgcgattccgtggtttcacgggggatgatacagaagtgcaggcccgccttgcccgtggcaacgcgccgacggcagaggagcttgtacgttcacagatggctgaaggtgatgccggtccgacagcacaggagttaactgagcgtccacgccttcccgctcccggcgatattcatcccggacagggatatccgttaccaggagaagtggcgcgtacgccggatgaaaatcaggccggacgtggtggtcgttttaccacaaccggtgaggtgaagggccagagtttccagaaaggacgtgcgcaggcaccggaaaatgccgctggtcgccagggggaaatactggagggcgaaccggttcgtcgtggtctgccatcaccggatgagcagaacgccacagcaccagtgcgtgaaggacttcctgcacctgaacagcgtggggttgatatgccacatcctgaatcactccctcgtatggttcgtgactcccttccggaactggcacagcaggcagaagcgcgcagacagaccggggataatcgccagaccataaccgatgttccggatactgaggtgccggtgccggtagataaaccgagcactcaccagcaggcgcgtggtgcaaaaattgaagactttggcgaggagattaagggcgcggcaaaacaccgttatgcacagcttgccgaaacactgggtaaaacgctggaagacagggattatttcacgcagccgctgagcaaagtgttcccgaaaccggactatgcaaaactggcgaacgaaggggccgacgctgacacactggcaatgattgcgctgtaccgcagtgatattcccgcgaaaacgaaactcaatgcggtgaagtgggtggagagtgtaaagagcatccgcacaagcgtggcgggaatgctggaaggaaaagtgactgccggacggcttgctgagtggatggagggaagaatgccttcccgttatgcggatacctggcaactgttacgcacgctgccaccttcacagatggacaaggcttctgcttatcgggtggtatccggtgtgtatcaggcggccggagggaagcgttacgatccgccacagaaactttattcactgcgcaataaggacaataaggggagtaacctctttttctcggaaagcagggatgaattactgacaaaggcgaaagcctggtttgcagagcaggaggaaaagtcacgggcgaaaggtgatgaaaaaacagcaccgtcaccagatgacaaaatcagctttgacgtttaccggaatacccgtagtggcgatatttttatcgcttacggcaaaaacaaaatgcgggtgagaggtggttttaagtcagccagtgatgcgcgtaagtacattgattcacatcgtgatgagcttgttcgtcatgtgaaggagatgcgggagatttcgcgtgaggagcagcgtaacgccactaaccgcgaccgcaccggaccagaacgccgcaaaggggatgtttcgccggagcagttcagtgatgcgtttggtttccgtggtgtgcagtttggtaattatgtggaaggtccgcgtcgtcaggctgatttgaaccgggcttatgactcgctgcatgacctggctgacgtgctgaacgttccgacaaaagcgctttccctgaatggtcgtcttgggcttgcttttggtgcccgtggtaagggtaaggcggcggcacactatgagccgggtgaggtggcaatcaacctgacaaaaggtaacggaccgggggcgctggcccacgaatggttccattcactggataattattttggtcgttatgatgtttccactgacgggaagatcacgtcaggtggcgactatatgacggaagcacaacgtgccgggcgcgtatttaaagacggcagatatgttgatgcggaatatccggtacgtcaggaggtttacgacgcgtttaaaggcgtgatgaaagcgatcaacagcagtgacatgccgcgtcgttcagcgcttctcgatgaggtgcgctcaaaaccgtactggtcaacggatgttgaaatggcggcgcgtgcctttgagcgttatgttcaggataaagcgcgtacggctggcgtggagaatgattatctggtcaatatccgtaaggcacctgagcacaacacagataacacctgggcttatccgacgaatgcggaactggatggcggtattcgtgatgcattcgatcacctgttcagtacgctgaaaacccgtgagacggacaagggcgttgcgttttattcccgtaagggcgtgacccgcacacctgaaggcaatctcatttcggatgttaaccgcagtgcggaagccaaaggcagcccggtcccgcaggttgaagcggttgcccgtggcgtgatgagtggcattaaggacagtgacctgaaggtccgcgtggtgaagtcacagaaagaggctgaagcgctggcgggtgaatcgttcgacggttacggcagggtgcatgcgttctatcgtccggataaacgtgaaattgtcctggtggcggataacattcctgacgggcggaccgttcgcgagaagctgcgtcacgagattatccaccatgcaatggagcatgtagtcacgccagcggaatatcagacgattattaagaccgtgctgaaaacccgtgacagtgataacgccaccatccgtgaagcctggcgtaaggttgatgcgtcttatggtaaggaatcaccggaagtgcaggcgggtgaatttctggcacatatggcggagaaacagccgaataaatttgtggcggcgtgggagcgtgttgttgccctggtcaaaggggtactgcgtcgcacggggttactgaagccgacagagctgaacgatatcagacttgttcgcgaaactattcgcacgttaggccagcgtgtgcgggaaggttacacgccgcgtgaggatggcgcgggcgcatcgtctcagtacccccgtagtggtaaacctgatccgttcaaagtgccggaaggtgagggcgagcgttatcgtgatgaccttgccagaatgatgaagtcgttacgttctggtgcaatgactgcaaacatcgggcgtacgccgccggtattgcgccaccttggcgcaccagatttgccgctggttatctcccgcgacactgtgcggaaggcaaccaatggagtgaaacatgtggtgccaatggatgttatcgagagacttcctgagctgatgcacgatccggatgcaatttaccgttccgcgacagaaagaaatgcggttgtgatgctgcttgatgccgtggataaaaatggtgatccggtggtgtcggcagtgcacatgaaggcaacagataaacgaatagaaattaacaaggtggcttctgtatatggaacaaaaggggggatgaacaaagctaatagcctggataaagcaggtttgacgctttaccggaaggaaaaattaagccgcgataaccctcagtacagtgggcttcaattgcccaaagaggagcgttcttatcgcggctctgtagataaaatactctatcctgaagatattcgcaaggggccgtattactcccgtaccagcagtctgacaccggaagagacaattgcatcgcgttttgtgcgtcagatgcaggataaattccaggtgctgaaagctgttcaggagaacatccgtaaaactggcggaaaaatagacgacagtaacaacgcttatatggcggaagaactcttccacgggaaggcggaaaacgacctgaacgtgatgaaggagcgctacgttcagccactggctaaattactggcggactacaaaattgcgcaggccgatctggatgagtacctctacgcccgtcacgcgccggaacgtaacgcgcatatcgcgaaaatcaacccgaaaatgccggacggcggttcggggatgaccaacgcggaagcggcggaaatcatgcagcgtgtacgtaacagtggcaaacaggcacagtatgaccgtctggcagggattattgacgatatgctggcccgtcgccgtgagcttatccgtgaggccggacttgaagagagtggtgtggtggatgcctggcagaacgcctaccgttactacgttcccctgaaaggtcaggatattgacggtgtggtgtcactgccccgtacaggtaagggcttcactatcggcggacgtgaaagcaggcaggccatggggcgtgcatcccgtgcacagtctccgtccactcaggcgatacaggatttgagcgaatcgctgatccgcaatcgcaaaaacgaagtgggtaacgccttcctgaaactggtgcaggataatcccgataaggattactggcaggtattcactgatgacaaaccggacaccatgcgggcgattgcagagcgtgttgatccggaaaccggcgaaacccgtcgcgaagttgttgaacgtccggtgcctatggcaatgatggcggatcgctacttcaccaccaaaaaggacggcaaaacttactacatcaaactccatgacccgcgcctgatgcgtgcgatgaagaacatggggccggaaaccagtaacgccgtaatccgtacgctggggaaagttaaccgtttcctggcaacggtgaacacgtcgtataacccggaatttctggtcagtaacttcatccgtgacgtgcagacggcggtgatgaacctgaaggctgagcagggaaggagcgacggtaaactgaaagggctggataacttatccgccctggctgtggtgaaagacagccggtctgccatgtctgccgtatacgccagtctgcgtggtaaaaccctcacgggcaacggtgcgcagtggcagaaggtgtggaaagagtttgttgaggacggaggtaaaaccggctggtttaacatgggtgaccttgaaggccagcagaaggaaatggatcgccttgtatcgctggcgaagggaggatggaaaggccagagtatcggtgcatggaattcgttccttaaccttgtcgaggatgccaacggggcggttgaaaacgctctgcgtctttctgcctataaacacgcccgtgatgctggtttgtcacgccagcaggcggcgtctcttgccaaaaacatgacggtgaactttaaccgtcgtggtgagcagggagcgctgatgaactcgctgtatatgtttgccaacgccagcattcaggggaccgcaaacctggtgagaacgctcggacatcttaatggcgacgggccgttaccggagcgccttcgctggaagaatctcaatgtaccgcagaaaatcgcgcttgcagctgtgggagcgggttatctgcttggctcgcttaaccgcagtgttgcgggggaggatgatgacggggttaactggtatgacaaggtgccgtctcatgtgaaagagcgtaacctcgtcattatgaaatcggtgttcgggggcaaggccggagagtactggagtattcctctgccttacgggtacaacgttttcttcctgctcgggcatactgctgaaggtgtggcagcgggcgacctgactgcttcacgtgctgccggtaatgttgtcggtggtatcctgggggcattcagtcctgtgggcagtgaaacgtcggaaacactgtccggggcattgctgaaaaatgcagcgccgaccattctgcgtccgtttgcgaaccttgccatgaatgaaaacttcatgggggcgcagatttaccaggagaacatgccatttggcacaccgaaaccggacagccagctgggcagacgttcaacgcctgaggcgtacaaggcgtttgcatcctggctgaatgcgttctcaggtggtagccagtatcgtcccggcgcggtggatatcacaccggaatcgctgaaattctggattgactatatctccggagggacagggcgcttcatttccaaaaccacagatgcggcggtgaaatcgctgaacggtattgatataccggagcagcaggtgcccttcctggggaaaatttcgggtgaggtgatgccgtatgctgaccagcagaagatgtatgaccggatgacggaggttgcgcagtaccacgcagagctgaagagtctgaccggtgcagaaagaacggcattcattgacgagaacaacggaaaattgtcgatgaacgggcttatgcaggatacccggaagagactgaaggatttgcgtaaacagcgtgatgccatttacgccgacagtactctcagtctggcgcagcaggcggcgatggtgaaatcggtagagcgggatatgaaaattgccgtggatcggtttaaccgcgagtacaacaaaaaagtgggagtggattaa

SEQ ID NO: 13545 - DNA, 1266 bp, Escherichia coli
atgagcggatttgcacagggtttacttgccggattcagcacggttgaccaggcaatgacccgtcgtaaggaacttggtttgcgagaagcacagcttgctcaacaacagaaaaataacgagcgcgattttgaatttgcacagtcgcagtttgaacataataaagacgttgatcagcggaactttgattacagagccaaagtcgacgaccgtaattatgcactgcaggaaagggagtttaacgccaaccagaattaccggaatgcgtcgctgggtatggagcagcagcgactccggatgcagaaatacaaccagcgacggcttgagtataacgatatgctggcgcgcgatcagcctgtgatggcggcgcttggaaaggctgtggatgctggcgatcgggatgcagcaatgcgtctttacggccagttgtcagagggtaatccgctgaggctgatggcgaatgatggctatgtagcgaaagcgggtcaggccgtgaacaacctgcaaaaaatctttgatgacaagccggacagggcgatcgcttcactcaataccccggaaaatctcgatgtgctttccggcgtgtttgccccggaactacaacagcgtattggcatgcctgattcaaccggggaaaaaacgataaaaggggccaggattggcagtatcgtaccggcgcagcaggaagggtacgtacttattggccttgatctcacatacagcgatggctccaccgcgcataaacctgtaacagaatacggcagtgcgcaccctgatgatcaaaccgtgctggcgatacccgttgataaggctatcgctcaggtcagggatcgcagcaaatttgcagagatatcgaaaaattatggttattttatgccgaagcagcagggactttctctgaaagagcttcagaagggggccagcaacgtagcggcggacgcgatcaagaatggcggtaatgcacaggctgcggtggatgaatattatgctgcaactggttcaccgcaacatcagcagaaaattcagcagcaaaaaattcaacaagggattaccagttgggcgggtgatgatccggataagcaggcattcgccagagaagttgcttcccgtcagccagaaatgctggagcctcagaatcagaaattgctggagaacgggtatgcgaattttctccgtattcaaaaggccaggggggaacaggccagagatgatagtgcggcctctgcatctgagtttatccgtggtctgaaacagaattacgcgcagtaa

SEQ ID NO: 13546 - DNA, 252 bp, Escherichia coli
atgggatacggtttactggatattgcgaatcagtcgcggcgtgaggcattacagggaataagtgatgccgacagacgacgtgaagaaattgaggccgcgaacaaacagatggcggcgcaacagaaagcgcagaacaaacagaatatcggcacgggaattggtacgggtgcagctatgggcgctgctgttggtggtctccccggtgcggctattggtgctgtcataggtggtattgctggttctttgttttaa

SEQ ID NO: 13547 - DNA, 447 bp, Escherichia coli
atggagtatggcaaatacgaaactctcgcaagggctggttattcaggcgcagcccgcccacagggtgactggcagacgtcagcagcgctgacacgccaacaatacgacgactggcgaaccagatatttgccccgcgtggcaaggctggctgaccttggcgagaacaacagcctgatgaatgcgcagcttgcccgggtgggcggccttgccacttccagtctccgtacagcgcagatggcgcaggataaccagatggcgagatacggggtaagccgcccggataatcccaacagtaacacactgggtttgcgtaatgctctggcaattgctggcgcgaaaaatggtatccgtgaagcagagcaggatcgccagatgaacatactgacgggggcttctgcacctgcaagacaacaactgagtgttggcggaaaactggtgtcagcgtaa

SEQ ID NO: 13548 - DNA, 657 bp, Escherichia coli
atgggcggaagtaaaggtggtggtgataccaaagtaaaaccaacagcagcgcaaatagcacaggaagaggtggcctggaaagggtggcaggattacaaaaatattctccgtccggcagaagataacttcatgaaaaaggtcgatgaccttaacagtgagcagcagtacgaaaatatcgcaggcacaacaaatcttgggtatcagaaacagtttggtgaagcgcgaagggagctggcgggtaatcttgctcagtccggcgttgacccatccagtggtcgttttaatgcagtaatggatgcaaatcaaagcgaccaggtgatcgggcagattgacacgaccacacgggggcaggtatcgcaggcagataaatatattgccgggctacaggatgttgcggctctcggttccggtcagaaggcagatgcgttacagagttttaactccctggctgacagcagtctggcaaaagccaaatcggatgcacaggcggcgtttacgaaacaacaggggcgagcttctcttgttggcgctggtctgggagctgtaggtgcgtacgcgatgcataaggctggcggtaacggaggtggtggcggcgctaaaacgccaggcaccggcgctaatgctattcagcatcaggctcagaactggagactgtaa

SEQ ID NO: 13549 - DNA, 402 bp, Escherichia coli
atggcacccgtttctggtgagagaatggacgacacaattctccggtatatgcagcgtgttgtgagaaattcccgcaaccctgaatttatgaatgaagttaaagacgccggccttaaaaagcaggcgttttgctttgaggcaccggatggttttctggtgctgcgttctgtgctcagtgacgatggtatcccttatgttctggtgttactgggcgtgtgtacggggagtaagagtgttgagcgttatctgccggaggtgaagacattaacccgcctggctggcggacgctgggccgaatttcatacggcaagacgaggatttatccggctgggaaaacgtctgggctttgagcgaatgccggatgatgaggatggcttcatggtgttcaggatagcagtctga

SEQ ID NO: 13550 - DNA, 141 bp, Escherichia coli
atgtcgcaaaaatcgctcatcaccgtcacaatttgtatgacggtaatcttcaccatctggatgttacacggctcgttgtgtgagttccggctgaatttgtggggagcggagtttgcggcgttcttacagtgtaagcagtag

SEQ ID NO: 13551 - DNA, 738 bp, Escherichia coli
atgaaaagtatcatgaaattttttgcgtgtgcagttctggtgatgagttgcttaactgcacaggtaaatgcagcatcaggcgatagtacggtatctctcgggtttgcacacatacgcttccccgggctgaaggattttgttagagacgcgggtgtttataaccgggatacgttcaggaatgttgtaaacgtaaaccattttaattcatcagctgaatacgaaaatgctattgcccgggggcatgacggcacagccaaaagccccctggggatgagcatcaggtatcgttacgagataactgatgaactgggtgttatagcctcttttacatgggcgcgctccatgactaatgcgcaggcatttattgatgttaagccttccgatccatcacgagaggtaaaaaacccggcagcttcagcgagaactgatatcagggctaattactggagtctactatccggtccttcgtggcggtttaacgaatacctcagtgtgtatgcaatggctggcatgggggttgcaaaagtcaccactgacttgaaaattaacgacaatcttaatcatggtgccggtagtttttctgaaagtaacagcaccaaaaaaacgtctattgcatggtctgtcggcgcgcaatttaacttcaatgaaagtgttactatggacgtcacttatgaaagctcaggctctggcgactggaaaactgatggtttatttgcaggcattggcctgaaattctga

SEQ ID NO: 13552 - DNA, 438 bp, Escherichia coli
atgtacacgcatgaacaaattgatggatatcatgccttaaggcttcatcaaattgtcaggggaacgaatcccggtgttacgactgtttatgcttttgcgaatatggttactcaaccttctgagtatggtatcgccatgtataacccgtcgggtgagatgatttaccatggcgaaatgatgctgcttgacgcgaagttaataccagttgatatcaagtttgagaaggaccttggatatccatgcgcaattatgcctgcactggttggatattataactggaaacgaacaccttatgaccgaccgatttacaccacatccactggtgctacaggaaataaaatatattcctgtgagcattattccggtggtgcaacatgggatatccgaaagccgtatatagataaagttctggttattaattcctcaatatatgattag

SEQ ID NO: 13553 - DNA, 1269 bp, Escherichia coli
atgacaaaaaaaccgtggcgcgcaggaaaggatttatctgcggttgtggaaaatatggagattggcacagggcagcgtggagatggtcgtcatgcttttgtaacccgtgaagagctggttggtctgaagcttgcccgtcgccgggcttcaggaggtgtctcatacgccctgaatccggggatcgagattgacagtagcctgatggtcgttgatttcccctcgaagccgcagaattttaaggctaccgggggatttggttcggtgcttcttgaatgggatatgccgaattatcgcggtcattcactgactgaaatctggcggggtacggaggatgacctttcggatgcggtgctggttgccacgacgccggggcaggtttacggtgatccggttgatccgggctggtcgggattctactggatacgctttgttaatgcagcgggagtgaaagggccatggaacgcggtaaaaggcactcccgcacaaacccagataagcgttcaggccattattgaccagatcaaggaggaggctgcaaagtcaccggtggtggaagagctgcgtaaggaaataaagaatgctcaggggcaggcagtaaaggacgcggcaatcgagacgacggaagttgtgggtaatctcagggaagaaacactgaaaactatcggtggtattgatacccgtgttacggggatgaataagtcaaccagtgaagagcttaataaggtaaatgagcgcatcactaaggtggataaagaaggcggtgaagctttcctggccatgtggtcaaaaaagaccggcgttgagggaattactgcggggatcggaattgttgcaggaaaagatggtgaagggaagccggtaagccaggttgcaatttcggcatcgcagttgtttgtctttgacccgaacaacccggataacacagcctatccctttgcggtgtcaggtggaaaagttgttattcccaaagcgatgatttatgacgcggtgattgaaacactggtgtcgcggaaggttgtggcagatgaagtaaaagccggggcaagtatcacgtcgcctgttatccgtagtgctgttattcagaacgggaactttcaggttgattctcagggtaacctgaatattggtggcctttttagtgttacgtcgcaggggcaactgacaattcgttactctaatcagaatgtggggctggtgatccgcaatgataaaattgaagtttatgaccagaacggacgcctggctgttcgcataggcaggttaagctga

SEQ ID NO: 13554 - DNA, 1626 bp, Escherichia coli
atgccctatatcgatatcaccacgatgcgtgggatgatgccgcgcgttgtgacatccatgctgcccgagcattccgctgtactggcggaggactgccatttccggtttggtgttattacaccagaacgtcagatatccggggttgagaaaacattcacaattaagccaaaaacaatttttcattaccgtgacgatttctggtttgcatggccggatgtggtggatgtgatccgcagtccgatcgctcaggacccccacgggcgtatttactacactgacgggcgttttcctaaagtgacggatgcgaccattgccacaaaaggggacgggaatcacccgacatcatcgtatcgtctggggatccccgcgccgacgacagctcctgtctgtactgttcagcagggcggtgatgtttctgacgataacccgaatgatgatgaaacccggttttatacggaaacctttgtctcagattatggtgaagaaggtccgccaggtccggcgtctctggaggtaacactccgtactccgggaactgcggtacaactgacgctggctccggtgccattgcagaatgccagtattaaacgtcgtcgtatttatcgttctgcatcaggtggaggggaggcggattttttacttgtggctgaactggatgcatccgtgctcagttacacggacaaaataccggcgaaaaaccttggaccttcgctggcgacatgggattacctgccgccgccagagaatatgacaggcctttgcctgatggctaacggtattgccgccgggtttgccggtaatgaagtgatgttttcggaagcgtatctgccgtatgcatggccggaagtgaatcgtcacacgacggcagaagatattgtggctatctgtccgctcggaacatcactggtggtggcgacaaagggtgagccttatttgttcagtggggtctcaccgtccacaatttctggttccagaatcccttcaatgcaggcgtgtctgagcaggcggagtatggtcgcgatggagggctttgtgctgtatgcaggaacaaatggcctggtgtctgttgatgcaaacggtaatgccgctctggcgacggaacagattatttcaccggaacagtggcagagtcagtttaatccggcctccattgtggcttatccctggcgtggtgaatacattgcctgttacacgaaaccggatggtaagcaggatgtgtttgtcttcagcccggcgaacatggatatccggtacctcagtacgccgtttgactgcgcatgtgttgacctggttaacgatgttatgcgggtggtatcaggacaaaacatgtctgcgattgccggagggagtttgccgtcgacaatcagatggcattcaaaggtattttcccttccggaaagaacctctttttcctgtctcagtgtgaagtctccgacgccagagcgggtgggaattactgtgctggctgatgatgtgccggtgattcaccttgcaccaggaagcttttcaggacgcgttgtgaggttacctgctgcaaccgggcaaaactggcagatgctggtttctggttttggtcaggttgaacgtatcacactcagtacatcgatgtcggagctgccggtatga

SEQ ID NO: 13555 - DNA, 183 bp, Escherichia coli
atggcggtcctgccggatgcgcggcatcttctgatgattcagaaggtgcagatgatgaacaaagacagagaccggagatacgggagaaaacgttacaccacaggcgcaatgtgcttcatgctgtttgtgtggcttggtggtgtgctggctcttgttgctacagctgcggtggtaatgcagtaa

SEQ ID NO: 13556 - DNA, 471 bp, Escherichia coli
atgaaggtgattctggctaccaggaaccgctatctggagtatggtctgcaggcgttactgaaggggcacagtgtgatactggcgagggagtttttcctgccggagaaccgccgttatatcccggactttgacgaatcctggctgataatcagtgatggcctgctgggcaggctgatgcgctgtatgttccaggggcgtcattttctgcaactggatgcggagttgctccgtgatggtgagcagataagtgatgccatacacaacggcgtctggacgtataacagtgctgcccgcccgctgacgatgtcagagatggtggtgatgttcggttatgtctaccgccagtcgagaccctgccgccttgccagtgagatgggtattaacacaaagacggtgaatacctttctgtatacgggaatggcgaaaaacgggctgtatggtgtgagcgtcagacggcttgttggtgcctga

SEQ ID NO: 13557 - DNA, 1512 bp, Escherichia coli
atgagtaaaaagtttacaatgacactcctgtcatcttctctggccgggcttctggtgatgagtggtggggtgagtgcgcaggaagaaaaatacacagtgccgtatgccacaggtaacaataaatgggggaatacctatgaagttgtaaagacaggcgataatggtaacttcaaatacgaagtaaaagagaagaacaacggcaagaggacacttttcacatttgattcaaatggggatgtaataatcaatggcagtggcattacgtacacaattcatgacggtgcgctgaacgattttgctcaaacagctgagaaaaaaaagaatggaccgtctcagtcgcacagaatgactgatagcgttgttcgtgatgtatataacaaagtatacagtctgcagagaacaaaaattacaggtttcagcgtcgaagatggggagaatgggaaggtttctctgggtagcgatgcgaaagcctctggtgagttctcagtagctgttggtacaggggccagagcggataaaaaatttgcaacagcagtgggctcatgggctgctgcggacggtaaacaaagtacagctctgggagtgggagcatatgcctatgcagatgcttcaacagccgccggaacagctgcttatgttgatggttctgctatttatggtaccgctataggtaattacgcaaaagtggatgaaaatgcaactgaaggtgttgcattaggagccaaagcaaaagtggataaaaatgcaacagaaggtactgcgttaggggcaaaggcaacagtaacaaataaaaacagtgttgcattaggagctaattcacgcacaacccgtgacaatgaggtttatatcggttatgaagcagagccgggtaaggcttataaaacccgggtgcttggtggtctgagtgacggtactcgtccctcagatgctgcaaccgttcgtcaggttgaccgtgtaaaagacagtgttgagcaactggctcaggatacgaatacccgccttgtagtcgaagcgaaaaagtctcgtgaatatacagactccagaacgacagttggtgtgaaccctgacggaaaacttacccgtgcagaaggtgcgactaaaactatcgccgtcaatgatggtctcgttgctctgtctggcagaacagaccgtattgattatgcagttggtagcgttgaccgccgggttactaaaaatacacaggctattcagtccaatactcgccagttgcaggagcataatgcacgcctgaacagtcagcagcgtcaaattcgtgagaatcacgaagagatgaagcgtgcagcagcacagagtgcagcgctggcggggcttttccagccgtacagtgtggggaaattcaacgccactgctgccctgggggggtacagtgataaacaggctgttgccgtgggtgttggttaccgtttcaacgagcagaccgcagcgaaagcgggtattgcagcgagtgatggcgatgtgtcctacaacatgggcgttaacttcgagttttaa

SEQ ID NO: 13558 - DNA, 582 bp, Escherichia coli
atgaatgtggaaaaaataagcaatccgcaatgggcagataaagagcacactgctgtcaattgcatggtgaagtttgagcacattgagcaggcggttcctttcactgcaacagccagcgataccgaagcatacgggcgggatatttatgccgcttgtctgagaggagaggccggtgaaattgcagaatatgtacagccatccatcagcccggaaaaagccagagaactcaaaaccgccgggatcaacgcctggcgtaatgcgatggaagcggcgaactacacgtttgagcacaatgggcgtaaatgggactacgggaagtcaacgcagacgcgtcttgagccgtcggtggcggcagcgaaagcggggaaactgccggaggcgtttttctggacggatgcggacaataatgacgtaccgatggacgctgaaacactgattgctctgagtgctgctgcagagcaggcgatgtttaccaaagggatggaaatccacgtccggcagcgcaccatgaagaaagagctggaaaagctgaccagtgcggatgagatactggcatacagggttggctgggcacaggaataa

SEQ ID NO: 13559 - DNA, 1935 bp, Escherichia coli
gtgagtgttgttgtttcggggacgctgaaatctcctgatggtgaggcgatatcaggcgcaaatattaccctgacggcgctgacagtttcaccggatgcgctcagcggcaccagtgcgtcagcagtgactcgtgacggcgggtattacggaatgacgctggagccgggggagtatgcggtttctgtgacggtgaaagggaagactgctgtctacggacgtgtgcgtattgaggggactgaaagtacggtgacgctcaatatgctgttacgccgcagtcttgttgaggtgagcatacccggagaactgctgacagatttccggcagatacagaacaatgtggcggatgaccttgccacgattcgtcgtctgaacgaagacacggcggtgaaaaataatcaggcttcacagtcgaaggaaagcgctgctgccagtgcgaagactgcatcagaaagcgcgaaggctgcgaccagcaaagcgacggagtctgcacaaaaagccagtgaggctgcagaggcggcgacccgggcaggtgagtctgaaaaggcagcggcagctgacgctaaagaggccagacgacatgctgaaaccgccagagtggctcaggaggccgccggagacgttcttaaacgtgctgaggctgctacagttagtgctgaagaagccagacgtatggctgagaatgcacgaggacctaaaggcgatacagggccgaaaggtgatgctggtcctcgtggtgaaacaggtccggcgggtccgcgtggggagaaaggtgagcagggagagcgcggacctcagggcataccgggccagaaaggtgatacaggagaacggggacctcagggagtgcaggggccagctggcgcaacagggccatctggcccacgtggtgcgaccgggccacagggagcaatggggccgcgtggtgaaaccggggccagaggcgaaaaaggagacccgggggggcctcagggaccaaagggggatgctggtccgagaggtgagccggggccgaaaggtgacaccggcccacgtggagaggccggaccacccggaccacagggtccggcagggcaaaccggcccgaaaggggataaaggtgaacccggcgcaacaggtccggcaggtcccgcaggccctcggggagaaaccggccccgcaggtcctgcgggtcccgcaggcagtgtcgccagtgttccggatgccagcacatcacagaaaggtgttgtacagctgagcagcgataccaacagcgatgatgaaacaaaagcggcaaccccaaaggctgtgaaagcggtaatggcagaagtgcaggcagcaaaaacgaaggcagaagaggcagcaacccgggcagcagtccccggaccgaagggggacaggggggaacctggcgcacctggtgcagtggggcccgcaggcccacggggaccggctggtgcagctggtcccaaaggtgatgcaggcccggcagggccacgaggtgaaaggggtccagcgggggcacagggtgttccggggccggttggtccggcaggtcctgcgggtaaaacggggccacgaggtttgcagggagaaacaggaagacagggcccgacaggtccacagggcccgacaggtgaacccggaccacagggaccacaagggccaaccggaaggctggtacccggggaaatttacagcatcggaacatacattattgccgcactagccccgtatataaccgacatcggcagaacctatcagccaggagaaactgtatcgggttcacgccttaagcgatgcgccctaatcaaagacgaaaacggaaactatatgaaagctaacaccgatggcattgacggcaacctatcctcagttccgggctcatggatggtgtgtaatgaaattacgtcgacaaatgacaatgaaagcatcgggctgttccagcgcgcatactga

SEQ ID NO: 13560 - DNA, 651 bp, Escherichia coli
atgacgacgattactgaaatcatcggacgagtgaacacgcaactggttgacccgatgatggtgcgctggcctctggctgagctgtgtgattattacaatgatgctgtgcgggcggtgattctggcaaggccggatgcaggcgcaagtctggagacgctgaattgtgttcctggtgcacgtcagactttgcctgatggcgcaatacagcttcttgacgtgatatgcctcagcgatggcagtgctataaaaccgcaatcccgtgaggtgcttgatgcacagtatcccgactggcacatgctgagggggaaaccggaatgctttatcagcagtgaccttgccccgcgcgtgttctggctgtttccggcaccggaggaggctgtgagtgttgatgctgtggtcagccgcattccggaggcggtgtatgttctgacgcaggatgatgacacgcctgtaccgctggaagaggcttatgttaacccgctggttgactggatgttgtttcgtgcattcagcaaggatgcagccggtggtgcagagtcaggactggcagcacaacattatcagagttttgttgagcagctcgggattaaacagggtgcagacagtgcattgtctgcccgcaagaaggtgtttaacggaggtggaatgtga

SEQ ID NO: 13561 - DNA, 564 bp, Escherichia coli
atggcggaactgactgattttttaccgtatgtccgtcgccatatcagcggtccgctgagcattatgatgacggatgcattatccatgtcggcagtggcattctgccgtcagtccctgttgtgccgccgtgaagccacgctgtcaccgtcagccggagaggactgtgtgctgccatatgacgcggagaatgaagagtgcgtacatattattcgtatcctcgctgacgggcgtgagctttttgccggtcatgatgtggaaatccgcccggggcgggtaatgcattttgcctgttcgcccggagaggtgagtgtgctttatgccgttgctccgaaagcagggagccgtcaggtgcaggatgaactgcgggcatggtctgaagaagtggctgcaggggcgcttgaacggttgttcatgcagaccggggtttcatggtcagacccgtcgcgcgcacagtatttctctgtgctgttttctgagggtatccgtcgggcatatcgcgacacactggcgacaagtccgtactcctcataccgcaatcctgtccgcagacaaaggttttactga

SEQ ID NO: 13562 - DNA, 462 bp, Escherichia coli
atgagcgagaaaattgccgttgtctatatcggccccaaacccgtgaaaaaggatacccttaccgggagtcgtacactgttcccgcgtcttgagccggtgcatgttgacagcgcgcttgcctggcagttgctggcctttccggatgtctgggttcgtcatgaagagcttgatggtgtgctcaaaaagcaacaacaggatgagcagttgcggcaggcacagcaggcgcaggaaagagaacaggttgctcttacagaagcggagaacagttttgtggttagcgttggtggtcaggatgtggatttgagcaaactcacgtccgcacggctggcaacgttgtgtgaggcagaagagctgaatattcacaaagacccgaaagaaacggctgatgcatttcgtgtccgtgtgcgtgaggcatttcgccgtcgtgttgcggagactgaacagcatggcggaactgactga

SEQ ID NO: 13563 - DNA, 393 bp, Escherichia coli
atggcaaagaccatccttgccccgtcactgagtgaacgggtctatacgggtacgcacggtaatgagtcggtggcagaaggtgtgtttactgtgaatgctgcggaagcggacagtgttattcatcttttttcgttgccgatcggtgttcgtattaatgcgttacagctggtttctaccaagggacttggcggcacagcaactgtcagcgttaaatctggcgaacatgaactcattggtgacagtggtgcagtaactgccagctttgctaaatatgtgccagtggagccgtacaccacacagcgtgacggagagctggttacggtcaccattaagacagctgctgcgaccggtaccctgaatgttctgctgcgttataccgtggtgggatactga

SEQ ID NO: 13564 - DNA, 1215 bp, Escherichia coli
atgaccacagtaacaacagcccaggcgaataagctgtatcaggtggcgcttttcacggctgccaaccgcaaccgctcaatggtgaatatactcactgaacagcaggatgcaccaaaagcagtttcgcctgacaagaaaagcacgaagcagaccagtgccggtgcaccggttgtgcgaatcacggacctcaacaaacaggccggtgatgaagtgacattcagcatcatgcacaaactctctaaacgtccgacgatgggggatgagcgcgttgaaggccgtggtgaagacctcagccatgctgatttttccctgaaaattaatcagggccgtcacctggtggatgcgggcggacgtatgagccagcagcgtacgaagttcaacctggcatcctctgccagaacgctgctgggtacgtactttaacgacctgcaggaccagtgtgcgatagtgcatcttgccggtgcccgcggtgattttgttgctgatgacaccattctgccaacggcagatcaccctgaattcaaaaaaatcatgatcaacgacgtactgccgccgacgcatgatcgtcattttttcggtggggatgcgacgagttttgaaggtattgatcagtctgacctgttcactcttgcgctggtcgataatctctcactgtttattgacgagatggctcatccgttacaaccggtacgcctgtccggtgatgagctgtatggcgaagatccgtattacgtcctctacgtcacgccgcgtcagtggaatgactggtacacctccacgtccggcaaggactggaaccagatgatgacgcgtgccgtaaaccgctcaaaagggtttaaccatccgctgttcaaaggcgaatgtgcgatgtggcgcaatatcctggtccgcaagtatgcggggatgccgatccgtttctatcaggggtcaaaggttctggtatcgaaaaacgacctgacggcaaccacagaagagaagcaggccgcaaccaacattgaccgcgccatgctgctgggtgctcaggcactggcgaatgcgtacggtcagaagggcggcggtcacttcaacatggttgagaagaaaacggatatggataaccgtactgagatagcaatcagctggatcaacggtctgaaaaaaatccgtttcccggagaagagcggcaggatgcaggatcacggtgttattgccgttgataccgcagtgaagctctga

SEQ ID NO: 13565 - DNA, 1008 bp, Escherichia coli
atggattttgaatttacgggtgaagaaaccccggaacaactggaaaaaatgctggaagggcttggggatgtggatattgacggtcacgaacaggacggcgtgacagaggccgccacagaaaatcatgcggatgaggcagcacagacacagacgggcgataacactgcggcaccgacgccggatgccagtgctgagcagacgcaggacgtgaaggagccggaggcgaagggtgtgctcacccgcgatggtaaacacgtcattccctatgaagtccttgaggctgaacgttccggtaagcagcgggccgaacaggaagccgcacttcttcggggacagatagccgaagaaaaacgcctggttgaactgctgacgtctcagatccaccaggccggtatgaaacccgcaccgttaccggaaaacgaaaaaatctctgatgagaagattgcccgtatcagggagatgtatccggaaattggtgacgcggtggcttcgctcatccgtaaaaataactatctccagtcccgtgttcagcaatcagcacagcaggcagaaggtcatggtggtgaggatttatcaccggttcttgatgcgatgaatgccgtgccggtgctgaaaacgtggcagaactccgatccggatcgcttctcggttgccgtatccatcgacgggaagctccagaatgaccccgcatggaaagacaaaccgctcactgaacgtttcgccgaagtggcccgccgtacgcagctcgcttttggtgaagccagtgagccgccttctgatgacaaggcagacaacacggatatccggaaaacggcggaagaaaaagtgaaagccgctgaacgggagatggcagtgcctgcttccccgtcagagcttggcaacacggcttccgtcggaaccggtgataattttgaacggttacttggtgcttcccataccgaaattgaagccgccatgcgaggcatgacggacgctgaaattgacgcgattctggaaaaactcgggtaa

SEQ ID NO: 13566 - DNA, 2145 bp, Escherichia coli
atgaaaaatgaaactaataccatggcgacgaaaaacgacaacggagccacgccgcgtttttctcagcgccagttacaggcgctttgttctgatattgacagtcagcctaaatggcgcgatgccgcaaacaaggcctgtgcgtattacgatggtgaccagttgccaccggaagttctccaggtgttgaaagatcgcggtcagccgatgaccatccataacctcatcgcgcctaccgttgatggtgttctgggtatggaggccaaaacgcggactgatctgttggtgatatcagatgatcctgatgatgaaacagaaaaactggctgaagctattaatgctgaatttgccgatgcttgccgccttggaaatatgaataaagcccgttctgatgcctatgcggaacaaatcaaagcggggctcagctgggtggaggtcagacggaacagcgatccgttcgggcctgagtttaaggtgtctactgtcagccggaatgaagtgttctgggactggctcagccgggaggctgatttaagtgactgccgctggctgatgcgccgccgctggatggataccgatgaggcaaaagccacatttccgggaatggctcaggttatcgattatgccattgatgactggcgtggttttgtcgataccacggttactgaaggccagcccagtccgttgatgagtgcatgggaagagtatcagtcatgggatcgacagcagaacgaatggcttcagcgtgaacgccgtcgtgtgctgcttcaggtggtttattaccgtacattcgagcgtcttccggtgattgaactcagtaatggacgggtggtggcctttgataaaaataatctgatgcatgcggtggctgtggcatccgggcgggtgcaggtgagagtcgggcgggtaagtcgtattcgtgaagcctggtttgtgggaccgcactttattgtggatcgcccctgtagtgcgccgcaggggatgttcccgctggttcccttctggggataccggaaggataaaaccggggagccttacgggctgatttcccgggccattccggcacaggatgaggtgaattttcgtcgtataaaactgacgtggttgcttcaggccaaacgcgtgattatggacgaggatgccacccagttgtcagacaacgatctgatggagcagatcgagcgtccggatggcattattaaactgaatccggcccgaaaaaatcagaaaagcgttgctgatgttttccgggttgaacaggattttcaggttgccagccagcagtttcaggtcatgcaggagtcggaaaaacttatccaggacacgatgggggtttattccgcatttctcgggcaggattcaaatgcatcgtccggtgtggcgatcagcaacctggtggagcagggagccacaacccttgccgaaatcaacgataactaccagtttgcctgccagcaggtgggaaggctgttgctcgcttatcttcttgatgacctgaaaaagcggcgtaatcatgcggtggtgattaatcgcgatgatcgtcagcgtcgccagaccattgtcctcaatgctgaaggtgataatggtgaactgaccaatgatatttcaaggttaaatacacatattgcgctggctcctgttcagcagacaccggcgtttaaggcacagcttgcacagagaatgtcagaggttattcaggggctgccgcctcaggtgcaggctgttgtgctcgatctgtgggttaatcttctggatgtgccgcagaaacaggaatttgtcgaacgtattcgtgcggcgctggggacgccaaaatcaccggatgagatgactccggaagagcaggaagcggcagcacaacagcaggcgctggagcaacagcaggcagaacttcagatgcgcgaaatgacaggccgggtggctaaactggaagcagaagctgccagggcacgcgcggctgcgcaacgggataatgctggcgcacaacgggatgtcgccgtggcacagggacagcgttatgtggatgcgcttaaccaggcacatacggcagaaatcattaccggcatacagaatatggaacaggagcaggaagttcttcagcaacagatgctgcatacactacaacagcggatgcatgaaatgccgctctga

SEQ ID NO: 13567 - DNA, 1707 bp, Escherichia coli
atgacattccggaagaataaaccgcgatgtgatgaatctgcagaaatgactgagaccgaacaacgtctgttcattatgacaaaactgagcaatccctggtggcgcctcaatcatctctacaagatacagaacgaaaaaggtgagctggtcaccttcagaatgcgaccggcgcagcgccagttgttccggagcatgcacaataaaaatattatcctgaaagcacgccagctggggttttccacggccattgatatttatcttctcgaccaggcattattcataccgcatctcaaatgcgggattgtcgctcaggataaacaggctgccagtgaaattttccgcaccaaaattgctgtaccgtttgatcatcttcctgactggctgagagcctcattcaccatcgttgaacgtcgtagcggagccagcggtggctatatcctgtttggtcacggctcgagtatccaggtggcaacctcattccgttcaggtacggtgcagcgcctgcatatctcagagcacggcaaaatttgcgcaaaatatccggctaaggcgaaagaactgcgaaccggtacacttaatgccgtctctgatgagtgcattatttttgatgaatccactgctgaaggtgtgggtggcgatttttacgagatgagtaaccgggcacaggaaatcactgcatcagggctggcgctgacgccacaggattataaattccatttttacgcctggtggcaggatctcaaatacagcgccagagtgccggaaagcggacttaagctgtcacaggaaaaaacagcgtatttttctgcggttgaaaaagcaatgaacatcacgcttaccgatgagcagaaacactggtacatctgcaaggaaactgaacagcgtgaggaaatgaagcaggaatttccctcaacgccacaggaggcgtttctgacgtcaggacgacgggtgttcagtgcggaaagcacgctgcaggcagagtcattctgttcgccaccgctgattgtttatgacattgaaccggttacaggaacgaagaccaaagcgcagtctctgcgtgacgggaataaagccgaacagcaccggacgctgatgaattatctgctggtctgggagctgccggatccggatgaagagtatgtatgcggagcggataccgctgaggggctggagcacggagaccgctcatcgctggatatcatcagatgcagtaatggtgagcaggtggctcactggtttggtcatctcgatgcggagcttttcgctcatctcattgcgcaggtctgccgtatgtacaacaatgcgtttgtggggccggagcgtaacaatcacggacatgccgttatcctgaaactcagggaactctatccgacgcgttatatctacaacgaacagcaccttgaccaggcatatgacgacgatacgccccgtcttggctggctgacaacccgccagagtaaaccggtcctgacagagggaatgaaaacgctgctgaataacggcctgtcggggatccgctggtcgggcacattatcagaaatgaacacctacgtttatgacgcgaaaggctccatgaatgcacaggaaggctgttttgatgatcagcttatgagctacatgattgcccaggagatgcgcgccagaatgccggtgagggtaaaacagaaaacggataaacgcagaaccacacactggatggctcactga

SEQ ID NO: 13568 - DNA, 807 bp, Escherichia coli
atggcaaagctggactggaaaaaactggagcaggcattccgacgcgaacatgccgaaacgggaataacattactggagtggtgccgtaagaaaaagattaattacaacaccgccagaacccgtataaaaatgggcaaaatcgatcatgaaatcgatcataaaaccgatcatgaaatcgatcatgacatctcagatgaagaacccagcaatgacgcgggttccgacgatgaaaaatgcgcaaaaaattctgaaaaaaactgcgcaaattcggcagaaacgaaacgcaacagcagatcgggcaatcctcaccccgttgcccggtttagcgaccgtaacacccacgccgtgagacaccgtggatatgcgaagtatcttgaggcagataacctcatggatgatgcgtccgatatggtgctgttcgatgaactggtgttcacccgtgcccgcgcactttcagtaacaggaacactgaaaaaaatgttcgccgacctgaaagaggcggctgacgtggaaacccgtgttgccctgtacgacaaaatacttaaagccgaacaggctcttgaccggaatattgcccgtatcgagtcaattgaacgctcattgctgacgctggacgttctggcggaaacagcaccaaaacttcgtgctgaccgggaaagaatcaacgctgccagagataaactcagagcggaaaccgatattctgaccagccagcgtcggggcgttgttacgcctgtcagtgacatcgtgtcatcgctgcatgaaatgagtaattcggggagactggatgacattccggaagaataa

SEQ ID NO: 13569 - DNA, 552 bp, Escherichia coli
atgaactatccgacgattgttaacggtattgatttccgcgatcttgtttttgtgacaggcaacgagccggtgacggatacccgaaaggttgccgtagcatttggcaaagaacacaaagatgtattgcggaaaacaagagccgttgttcaacaatgctcaaaagaatttgcagagcgcaattttgcgctttgctatgaaaacaatgagttacagaacggtaaaccccagcccatatatcgaatgacaaaagacggttggacgatgttggtatttggttttacggggaaagctgctatgacctttaaggaagcgtacattcaggctttcaactggatggctgagcttattcagcaaggtctggcgaatctggaggcggagcgcaacgctgtaatgctggagtacatgaaagagaaagatgtcgccagtatgtcaggtcgtttgctcaatcgctggggcagggtgaagaagcctcagttgctggcaaggctggacaggctggagcagcaggggcagattgcgttacccggatttgataaaggcatttcagcctga

SEQ ID NO: 13570 - DNA, 132 bp, Escherichia coli
atgtcagacaaactcataacgctggcgaagatcctctgtgtaattgtcggcatttcattttcactaatgctggttgccattttcttttccaccgcctggcgagtcctgacgttatcgggactggtggggtga

SEQ ID NO: 13571 - DNA, 534 bp, Escherichia coli
atgagcaggaaactccactatggtttatcggtagccgttctggcgctgattgccacaggtgcttctgcgcctgaaatcctcgaccagtttcttgacgaaaaagaaggtaaccacaccacggcataccgtgatggtgcggggatctggaccatctgccgtggtgccatcatggtggatggcaaacctgtcgtcccgggcatgaagttgtcgaaggaaaaatgcgctcaggttaatgccattgaacgtgataaggcgctggcatgggtggagaaaaacatcaaattgccactgactgaaccgcagaaagcgggcatcgcgtcattctgtccgtacaacatcgggccttcgaaatgcttcacctcaacgttttaccggaaactgaacgccggagaccggaaaggtgcatgtgctgaaatccgccgatggatatatgacggcggcagggactgtcggaatcgctcaaataactgttacgggcaggtatcgcggcgtgaccaggagagcgcgctggcgtgctggggaattgacagataa

SEQ ID NO: 13572 - DNA, 207 bp, Escherichia coli
atggaaaaaatatcaacgggcatagcctatggtacttctgcgggcagtgcgggttactggtttctacagtggttggatcaggttactccgtcacagtgggctgctatcggggttttggggagcctgtgtctggggttcctgacatacctgacgaatctgtatttcaagattaaagaagaccggcgcaaagctgcgcggggagagtaa

SEQ ID NO: 13573 - DNA, 291 bp, Escherichia coli
atgacagatataaaacaactggtcactgctgaggcagtgaaggaagtcattcgctctgaagaagtcagaagcgtcctgaaacaaaaactccgccagaatctggaagagcgtcttgatgcagaagtggattcaattctggatgaattgcttggtgcacagccggaaccatctccggaactgcttccggaaccacaggcggaagatgtcaccacggaaaatggtgatattcagccggagtcaccggtgacggatatgacagacacacaacccgaaccgggcacaatgctgtaa

SEQ ID NO: 13574 - DNA, 1974 bp, Escherichia coli
atggcatttaaacactatgacgtggtcagggcatcatcgccgtcagacctcgcaggaaaactgacgcaaaaactgaaggaaggctggcaaccctatggtagtccgattatctcaagcgcgggttatggtgctgaatttatccaggctatagtcgctgaaggggatatgacctctccggtagtttcaccggggggagatggtacccggactgttgttgttgaaccagaatattactttgtcattgcgctggccggacagtcaaacggcatggcgtatggtgaaggcctgccgctgccggagacatatgaccgtccggacccgcgtattaaacagctggcgcgtcgcagtacggtgacaccgggtggtgcggcctgtgcatataacgacatcattccggcggaccactgcctgcatgatgtgcaggatttgagccgtttttctcatccgaaagccagcgcagagcagtatgggtgtgtcggacagggattgcatattgccaaaaagctgttgccctttatgccggaaaatgcgggtattttgttagtgccgtgctgtcgtggtggctctgcgtttacagccggtgctgacggaacgttcagtgaaagttcaggagcgtcggataaatctgaacgatggggcgttgataagccgttgtataaagacctgctgacacgcactcaggccgcgctgaaggcaaaccccaaaaacatactgctttgtgttgtctggatgcagggcgagtttgatttaaaacagggagcgtacgccagtcagcccgccatgtttgatgccatggtggaaaaataccgttctgacctggcgggagtatccggtcagtgcgctggtgcttctccttctctggtgccctggatttgtggtgacacgacgtactactggaaggagacgtattcagcgcaatacgatgccgtctatggcgcatacaaaaccaaagccggtaaaaatatcttctttgtgccgtttatgatggatgacaatggtcagaaagtcgggaccaatgaaccgtcagaagacccggatattccggctatcgggtattatggttccggtggacgaacggatgcgaagagctggacaacatccgatcgtaaaacccactttggttcatgggcgcgtcgcggaattatttccgaccgtctggcaacagccattcttctgcatgtgggcagagtggcagattttgtttccgggaaagtgacaaaagccgcggtttcttcaggcggaggcgtatcgcaaccagcacaggagagtggcgatactcagcctgaatccgttgtcccgacaaagatacagtcagtgctggcttatgatgcgaatgcggaaaatgccgatctggcttcgcagggctggacgctgacagatgtcaaaaacacgctggtcagtgacagtggttcaggtaaaaaagcccttcgtcttgaaaaaccagaaaatggtcttgcacagaaaaagacctggaaagtatcgcacgcaattgatgccggtaaggggaaggagctgttcgataacggcggtgaaatcacgctgcgctttaaaatccccgatgatgtatctctcaatgcttctgcaaatcaatattctgcgggtatttactggcgcggtagtggatggccgggagcggaatcagaggagggttatattgcggccttctatctgcagactgataaaacaaacatcaatgtgatgtatcatgcaaacaccacatcacagcggcttggtagttatggtccgttcgatcacgactggcacacgctgactttccgcttcccgggtggtggctcgctgaacgtcacgccggtgcttgataatgcagcaggaaaaccgtttacgctgaccagatggacgaatgcagcctttgaggccaacgcgctggcaattacggatattaccggaaatgcggcaacttaccctgtgctgattgaaagtcttactgttggtgtgaatgccgtagcagcataa

SEQ ID NO: 13575 - DNA, 1119 bp, Escherichia coli
ttgttctatgtgagcacaggctcgcttatctcctcaggaagattaaaaccaggcaaaatcaaacgtgtttcagcaaagagcgatcaaaacggtatcatcggagagtttgataccgagtttatggatgatgcaaggcattatgaaaattttataagcgttaatttttttggagatgctttttatcatccttattgtgccagcgtagaaatgaaggtgcatgttcttacattaaaatcaagtaagtccgactttaatgcaaagcgcggactgtatgttgccagtatgattaataaagctttaaaggggcgttttaattatggtcaacagttatcgagttccaaactcagagatggagaatatttcatctcattaccagtgaaaaataatgaaattgactggttttttatggataattatatagaagagctggaagcggcccatatagaagagctggaagcggcccatatagaagagctggaagcatacctgatagctgctgggctgagtgattaccaactaacggaaaaagattatcttatcctggaacattttaaaaatattgaattttcaggctttcctgttactgagttattctcagtgtgcaatacaggaaacatattgtctagagacatcatagaaaatagtggggatgttccttatctttgtgctagccgtgataataactctgttagttcttatatcgcctatgatgactcactcttggaaaaagggaactgtatttttattggtggtaagacattcgttgtaacttatcaggagcgagactttttttcaaacgacagtcataatttgcgactctatgttaacaatgaggatggaaggacaaagtttgcttatttgggcattatttcatgtatttataggtctatttcacataaatattcatggggggatagtgttagtaatagaaaaattaaggacgatgttatttggttgccagtgaaaaataagtcacctgacttttgttatataaatgaccttatttcagttgttcataagcttgtcattaaagatgttgtccagtacgcagaacgcaaaatgaacgcatacaggcaagctataacaagtcgcggttatgatgattctggtgtcagttaa

SEQ ID NO: 13576 - DNA, 1962 bp, Escherichia coli
ttgcagaatgcatcacttaacggagagatcgataacgcactggacgcttatttttcgaaaaatggcggcgcaggcggtaatcgtcccgacgtaaaactccttgttaaggacaaatacggcaagcagtatcccgttctcatcgagtataaaggctacaaggacaggcttatcagacttggcagcaacggtattattgagaacaaagatgccagaaaagaatggaattttaaaaatattaatggatacgcggtgaatggcgcagtccattatgccaacgcacttcttcagttcaccaattaccctgatattattgctattggtatgaccggctggcgcgatgatgatacaggcgaactgcatcatgaaatcggcgtgtggtacgtatcaaagaataatttaggagccggacagaaggttggtgaattcaccgacttatcgttccttgctgacaaaaatgttgatggatttctcaacaagataaagctgcttaatcttcctcccgaagaactggaaaaaatcaaggccagcaaagaggaagagatagacacgcgactttcccgtctgaataacgatatttaccagaatgaaaaggggcttggtgaaagcgatcgtgtttaccttgttgtggctaccgttattgcaacgttggggattccgggaaagttagcaccgctggataaaaaagaactgacctcttcaacggaggaggacttgcgtgatggtgatattattttcaggaaaataaggaattttttaaggctgaaagctgttcctgaaacaaaaagagaaatgattttgcgctcgttgcaaaatacgctgtggactgaaaacattaacaaaccagtcaacggtgaaagccagttaaagcgcgtgtttgttaaagttgttgatgatcttggggagtattacaaaattggactgaccaccgattttacgggcaaactgtttaatgagatgtatcgctggcttggatttacgcaggacaagctcaatgacgtcgttctgacaccaccttatgttgccacattgctggcacgactcgccagagtaaacaaagattcctatgtgtgggattttgctacaggttctgcgggattgcttgtggctgcaatgaatgaaatgctcattgacgccagagaaaatattcactcaccgaacgaactacaacttaaggaagcgcaaatcaaggctgaacagcttcttggccttgaggtgttatccagtatttatatgctggccatcctgaatatgattttgatgggggatggtagctcgaatatcctcaataaagactcgctggccgattttgacggcaagtatggatttgggaaaacaggagaaaaattccctgcggacgcatttattctcaatcctccgtattcagctaaaggtaacggcatgattttcgtgcagaaggcgctgtcgatgatggataaaggctatgctgcagtgattatccagagttcagctggcacaggaaaggctacggagtacaacaaaaaaatactcaaggaaaataccttgctggcaagcatcaaaatgcctgcggatctgtttattggtaaatcaagcgttcagacgtacatttacgtttttcaggtaaaaattccgcataacgcgaaacaggctgttaagtttatcgacttttccaatgacggctacgctcgctctaatcgcaaaaaggcaagaaacaatcttgttgatgccgatcgtgcaaaagagcgttatcaggaggttgtggatctggttcacttcgggaaaggttgccttaatatctttacggaggatgaatattttgagggaacaatcgatcctgatagtggtgaggactggaatcagaccaggccagtagatgctaggccaacgctggaggatttcaaaaagacggtaggtgattaccttgcatgggaggtctcgcaattactgaaaaaacaaggtgaaaacaattttgcgggaaagtaa

SEQ ID NO: 13577 - DNA, 126 bp, Escherichia coli
atgttaactggggcttttctccgtctgccttacggcagcatgcccgaggcagaccccctcaagcacccgcagtcattctacagtaaaaccccgcgctttcaatttcccgtatgtccggaaaactga

SEQ ID NO: 13578 - DNA, 426 bp, Escherichia coli
atgcgtgatatccaacaggttctgtcccgatggggtgcatgggtggtaaataatcatgagagtgtggcatggtccggcgtcgctgccggatttaagggcgtgatcccatcaaaggttaaatcacggcctcagtgtaccgatgatgatgcgctgattatcagcaattgcatggcgcaactgaacgtcaacaacagcgatttgcatgattttctgtatgattattatgtgttcgggatgacgcttatgggactgggccgtaagcatgagcgctctgattgctgggccgggcgggtactgcaaaaagctgaaggtgttattgaggggatgttgattatgcagggaataaaactggaaatggacagatacgttgagcgtgaacgatcaggggcacaggtcagtcagttttccggacatacgggaaattga

SEQ ID NO: 13579 - DNA, 864 bp, Escherichia coli
atgcgtacggacaatcaggtacataaagctttattcactatcccgacggcagcgtacagcgccgttccggcaaatatcaaacctctgccagaacaaaggaggatcaccggacataaacagactgatgcttatctctggattctggaggttattcacctgaacgaggccgtacatctggacgcagccgaagcagcactggagaaactcaaaataacgccggaagaagcgagtgaacggtatggacgttatttgcaggagattaatattgatcctttccagattgctttcgcaaccattggcatggataaccccgcgcaggcgatcaggaatgcccgtgagaatatcaaaaaagccgcatcagtcagggccacatttggcagctatgaggcagcactcgacgatgtggaggctgagcggataattcgcacctccccgaaatttatcgacgattactactggggctggactgcggcagagaaaaaagccggaagtattgacggtgttcgctcaaatgaaattgatgatcagcgtcgtgcatatgttgatggctatcgtgatgtactgccagagcctcatacattgtcagacgttgttcgtgagtttatttactgggactggctttatgagatgcgccagacagcggggagagaaacaggggacaaatacggtttcacaggtgaacatcatgagtcagtatatgatcggcagttctggctcgaaaatttgctgggaaaaataaagcctgtgacgcgtgatgaagcggttgaagtgtgtcgctggtttctggcaagcggaaaagatgagtacatggaagacaatggttcagcggtcattctcaatctggttggggagtgtgagcaatga

SEQ ID NO: 13580 - DNA, 1659 bp, Escherichia coli
atgctgaatatcaagccgaattttgctcaggaacgtgcgctgaatatgttgcgtcatgactggaaaacatatcagtccttcatgatgtacatgcctacagggagtggtaaaaccggcctggcggcgttcatcactgctggtctggtaagccgtggcatgcgcgttctgtttgtcgttccttataccattttgatcaaccagacagcacagcgctttgttcagtacgggctttccggggatgaaatcagctttatctggcgtgctcatcccaataacgacccgtcacgactgattcagatttccagtgcggatacgctgattcgccgtgattttcctcagaatatcgacctgctgattattgatgaagcgcatctccgtaagcgccgcatcctcacggaaatcgaacgactggttgcagagggaaatgtgaaggtgattgggttgtccggtacacccttttcatcgttcctggggcgttattaccagcgtcttctcaagccgaccactataggggaactgatccagcgtggcgaactgagcaattacgaattttatgcgcccacgaaaccggatctggaaggtgtaaaaacgaaagtctcaatggagtacggcagggattacgacgaatcacaactggcagagattatgtgcggcgcggatctggttggcgatattgtcgataactggctgtgtaacggaagggatttaccgacagtggcgttctgcgtcaataaaacgcatgccagcttcgtgaccatgcagttcaacaaagccggaattaacgcagaggtgatggttgctgaaacgccacatgatgagcgtcagttaatgatcagtcgttttgaaacgggagcgacgaaaatcattgtcagcgttggcgttctggtggcgggatttgacagtgatgtccggtgcatcatttacgcacgcccgacaaaatcagagattcgctggcttcaggcgattgggagaggattgcgtacagcgccaggcaaggagtcatgcctgattttcgaccattccggtacggttcatcgcctgggatttcctgaaaatattgagtatgacgaactgcccggcaaaaacgacgggatgcaggtgtcatcatcacgtggtaacgaaattcgggaagaaaaactgccgaaagaatgtccggggtgtcatttcatgaaaccggcaggtgtttatgtctgtccgaaatgcggatttaaaccgctggctggtgaggatgtgaacacagatacccgccgcaatatcaggaaactcagcaaggacgaaaaaatttacaccaaaagcgacaaacaggcctggtggagtcagatcaaattctatcagcgtcagcgtgcctctctggggcgaccggtcagcgatggatggtgcgctcacactttccgggagaagttcggcgaatggcctgacgggctgagcggttttccgatggaaatcaccccggaggtcagtaattacatcagacacaaattcatccggtttgccagagggcgtagccgggcagagaagatgacggaaaaatcccccgaagcgctttctctgtccctgcttcatggtgtccggtctggggtgccggaaggcagtgagtcgtggcagatcatgcaggcaaagcaacaacttcagaaaaacagaaacagtctgagtcagtaa

SEQ ID NO: 13581 - DNA, 369 bp, Escherichia coli
atgagcgctgaactgaaactggtactaatcaaccttctggaagaggaattcggacatggaatggacaaggtcacattcgactacgttctgcaaaagaaaatcaaatctctgggctgtgagttgcaacgctgtttcactgtcaggctgaaaggtgatcgcaggggatttatcgatcttctggttatttctcccgatggtcagcgttgcgcagttgaggtggataaccgatcaccccgtcagcgttcactgatgaaaattcgagcgcttcctgaaggcatttcgggatttgtttttctccgtgatggcaaacatccacagcgttatatcgccgatggtgtggatgtcatccgggcgacccggtttaagtaa

SEQ ID NO: 13582 - DNA, 294 bp, Escherichia coli
atgtcccctgattacgttcagatggagatgcctgccaggtacagccaggcagattcagagtggattaagcggcagttacagagcctgccttcctcactgagacagaaggtcgccctgaaatacgcggaggtttacgaagttacttttgattccgagcctgtttcattccgtaaggagaacagagcgaggcatgaagccaatgtacggctgcgcaggttcgttgaaacacacgggcgtgcattacaggggtatacgactcagccgcccctggcaggaacgcaacagcgtacctga

SEQ ID NO: 13583 - DNA, 210 bp, Escherichia coli
atgactctttacgaaattttaaaagctgagtttaaaaccaatgctgcaattggtcgccgtttccctaagagaggaaaacctagaggtagtcagggcgttggaaagtggaaaacccgaggtgtgccggaagatgtggcgatcctttgtcatctggatcccaaaattccttatcagcatccgtcgctcatgaatgccagtcatgaatcgtga

SEQ ID NO: 13584 - DNA, 657 bp, Escherichia coli
atgagaactttgggagagcgccttagcagcgccaggcaacgggcaggattgacacaagatgcattagcaaaaaaagccggcataacccgcgtggctataagcaaagcagagcaaggacttactaaaagcttcaacggagatactttattaaaggtagccacagccctaaactgctctccacaatggctacaaaatggagaagaacaatctgtaaactgggaaaacaatgttaagagttgtcctcaaaaagacgcatttcattcctatcccgttattaactgggtccaggccggactattctctactgctggagatgattacagcatgtatgaccatgataactggagacattctgtcaaatatgcaggtgaaagaggtttttggcttgaagtacatggtgattcaatgacctcgcctgttggaatcacctttcctgagggtatgtctattctcgtaaacccagacaaagctgtacattcaggctgttacgttatcgcaagaaaaaaatcaaccaacgaagcaacattcaaaaaatatgtgactgaaatgggaagatctttcctgaaaccactcaatcctcagtatcccatcattgaaatagatgatgattgtgaaatcgtcggcgtgatcgtggatgcccgatgggatattttctaa

SEQ ID NO: 13585 - DNA, 390 bp, Escherichia coli
atgttccaaaaaactacgctatcatgcattgaagatttaaaaaatcttggctccctcattgctcttatcgcaaaagcagcgccagatacaactcttgccaatgatatcgagtcatgcgccggaatggcgtgggatataataaacaaagtatctcgcacattatctttgttaattcataaacaaaacatttctgattgcccccatgagatccgcacccaacgcgaaagctgcggtctatccaccgctgaactcgccacgctgcttggagttgatgaagaaaccatcatccagtgggagaacggcaaggctgaacctctggcaaatatacttgactgcgatccgatgtggttacttacaagtttccattctgacacgacaaaggaatcgtaa

SEQ ID NO: 13586 - DNA, 201 bp, Escherichia coli
atgaaaactcccctgattatgcttgaggaagtggcagcagaaataaaagaaaacacgtcaatgcttgagtttatatttaaaaactctggtgataacggagagacagatgatttcttactttgtatgattcgttccatgaataaaacctgtgaaaaggcttacgagtatgttgatgctctgagaacgaataaaggaaattaa

SEQ ID NO: 13587 - DNA, 363 bp, Escherichia coli
atgaaagatgaatacatttctgcatatcgtcgccgcataacggttgcagcactgcggcggatgaaacgaaaaacaggaagtaacctcctcactgtaaagcgtcatgatggagagttaacaactattgaaataacagaacagttcataagccagttgctattacgatttgaaggcgttacccgtggtgagtttgggcggaaagatggtgaaacagcaatacgcactgcataccaggatgctgtcggtatcaaccaacatggtgagtatctgactgaatcaggaaagttaatcattgatgaacttttgaatgaatgcatcgattacattaaagaggggcatattaccagatgcgttaatcattaa

SEQ ID NO: 13588 - DNA, 195 bp, Escherichia coli
atgaataattgcgttgaagtactcgataatgtccactgcgagataacagaaagcctgtctttgttacaggtgattattgacagcggtgatattggttcaccagatgcgctaaacatgatgaattgtcttttccgctcattatcctgtacagcagacaaagcagaaaagcatctgtgccggactgaaaacgaataa

SEQ ID NO: 13589 - DNA, 561 bp, Escherichia coli
atgaaagaagaacctgaaatcattgaaattaattctgaagaattcacagaaaacgaatggctgacagaaaccgatccgcgcgttctggcgctgacaatggaaggatacatcgtatttccacctttcttcagtgatgcggaatacagtgcaataaataatgccggaatcgaccgtgcttttcataaatacgaactcgattgcggccctgtttacagagtctgccgccacggacaagttaagaaatgcttcacgcgaaaaacggccatcatacatctcgctcattttatgacaacgaaggtattcgaaagttcaggttttgaaaaacgtctgcctgaccagcgcctgatgcatccggaatatggagaagtctttcatccgggagaaattacgcccgaatactacagagctcacgggcgttgtttttatcgcctgttgcgcatccttgcacgcagaaaacagtttgatgcctggatggaaaaatacaacgcctggattgatcagtattgccggcttgtcgcgcaaagaccatttaagaagagagcaaaccatgactgcaactga

SEQ ID NO: 13590 - DNA, 585 bp, Escherichia coli
atgactgcaactgaacagttattttttcttaccgctgaaggtatccacacaccttacggactgcttgatatcaacaaagcactggaaatgctcgatgaaggctgttttgacgagccgatctggcatggtctggaaatagtgtgttgcatcagtgaagcagaagaaaaaggcatgacaggtgagctcgcgccggaaaagacaatcatgtactggcgctggctttataccgccatgttcttctctgaacagctcaccagaaacggctggaccgaagtgcttaacgagaatggcggtacagacaagggcaccatgtacagaggccacaacggtggcatgacaatctacctgaaaccattacgtctcgctatgcagaactatatggaatgggcactcatagaaacttacggagcggaatcagggctgctcaaaagcattcttatgtacaaagcattcaccggcgctctgggcgacggcgaaaaaaccggcatcacaatggaaggttacagagcgatgcacatgattctggatgggcttatcagtgaagccactgacaactcagaaccggaaaccagagtgttccactaa

SEQ ID NO: 13591 - DNA, 867 bp, Escherichia coli
atgaaaaaatcaactgaacttgtgccggtggcagcccgtgatttgcaaattatcgaatatcgcggtcaacgcgttgtgaccactgaacaactggcggcaggttatggagcaacaccaatccgtattcgccagaatcattcccgaaacgaagaacgattcgttgttggaaagcattattttttgctggaaggcgatgaactacgtgaacttaagcacagagtatctcaaagctactctgtgaaaattgccagcaatgttcgatccctcatcctctggaccgaacgcggcgcagccaaccacgcaaaattgctggaaacggatcaggcgtggaactatcacgaagaccttgtggagttctacttcactcagcgggaaaacatcgatgttcagcgcgtactcactcgcaaggaactcgcgttgatggttattgaggccgaagaacgggctgaagctatggccctggaaaataaaacgctctctgcaaccgtagacagtctggaaaaacatttctctaaaggcatgactgttccccagttctgccgtgcgctgaacggcgtaaataccagccagataatgtggtggctgtctggccgaaaatgggtattcaacgaacaacgcgatccggagaaaacaccccgctggcgcacggcctcttatgcccgtgacagatacctgaccgaagaagcagtacagatcactccacacgggaaagcaacattcacgaaattcacccccgtattgctggaaaaaggatgccaccgtttataccagttttacatgaacggtgaactccctatgaagaaaaactggaacggtgaatttaaacacgacaaagctatttacacaccggaggcagaacatgaatag

SEQ ID NO: 13592 - DNA, 363 bp, Escherichia coli
atgaatagcactactgcggcaatcatgaactacgacccgaacatgacattatgcggccgcatggcaagacagacggttcgtctgacactcgggcaatgggagtaccgcgaaacatttgaagtggacgttgtcggcaatctgacggggctggatgtaataacctgcgcaattgaaaacctttatgaagagctgccgtatgaagaagcacaggatgaatataccggtgaaactaacattatggccacaatacagatcggtgatcttgcatgtacggatgaggacatgctcggcgaagcatggctggcaggtatgcttattgcagcagaaattatcagcattgaaccagcaggaacactttcataa

SEQ ID NO: 13593 - DNA, 225 bp, Escherichia coli
atgattatttcattcaccgattacggcgaacaggcaaaactgattatcaccagttcccgcctgacattgcgaaaacataatcgtgtcgttgatgcggtacttctgtgcacgccggacatcacagaaagccggagcggctttttcctggttaagtcgtcattatcaggaaaaacacgcgacatcctgcgcgcctacaaaacagcaacaagggagtctgaacgatga

SEQ ID NO: 13594 - DNA, 903 bp, Escherichia coli
atgaaagaagctgatctgaaagcactgcgtgacgccgcacaaaataccgtatatggagacaagggatgtgatctggaagcatttcactcccttgccactccgccagttatccttgcgctaatcagtcacatagaaaatctggagaaaaaactggatgaaatcgtaacgtcagagattagcccgaaggcctggctgaataaccttacgggggaagtttgcagtattgatgccatgcctgacgcccgtaatgacagagaaacatacaccccgctttatcctgcctggcagcgcattgccgccgcagatgataacggcagagtggcatggatgtatacgcacaaaaaagcaggttacagggtccccacaatgacatcgtgggaaagtcttgcagaagagcggggaggctctctggataaatatatcgtcagtccactattcactgttcctcagataccgccagtgagaacagaacaggatgcttaccctgatgtgcaggtttcatgggatgcaacacgtcactatgtcaacggctggaacgcctgccgacaggcaatgctgacgacggcagaaaaagtacttgatgtgcgaatccctgaatatatcggacgctggctttccgctgcacttcatgatcagaactcatgcgaggaaatgaaaaacgatatacgacgcttcctggctgaataccaccatgttccatcgaaatataacggctggcgacttgtaccggacaagttaaccgaacagatgaagtaccggattgtgccactactggcgaccatcaagccccgcagcgtcgatgaatatgaccgctcaggagaaaacgcacaatttcttgaatgggtatggacgcaactgatggaagccacgaaattcgcgtatgagggctcagtgaatgggtga

SEQ ID NO: 13595 - DNA, 243 bp, Escherichia coli
atgggtgaaatggttgatattaacgatgaactggtccgcacagtaattaccgttgatgacggatgcgaccatacccagcgttttatctggatgatgaatacacggcgtaatatcagaaacaaagtgttccggcacgaaccaaagccagtcagggtgacaaagatacgcattgaagccagaaaacgccgcaaatacaggccacggaaggcctgggccccagcgcaaccggatgaactggcataa

SEQ ID NO: 13596 - DNA, 255 bp, Escherichia coli
atggaaacaatcatctatcagataacgcccagcaaatggtgcacagaaagaacccttattgctgcaactggactgaaatcaggaaccattgccagagcaagaaaaaaatcctggttactggggaaagaataccgtcattacgcagcagaaggagagcccgggcctttcagtgaatgtgtatacaacattgaggaaattatgcgctggatcgaaaaccagaaacaaccaggtgccaaaaatgcaagttccggttaa

SEQ ID NO: 13597 - DNA, 1290 bp, Escherichia coli
atgagtaacgcatcatacccgacaggcgttgaaaaccatggcggatcactccgcatatggtttcactataacggcaaacgtgtcagagaaaacctcggtgttcctgacaccgccaaaaaccggaagatcgcaggtgaacttcgcacttccgtttgttttgcaataagaatggggagcttcgactacgccgcgcagttccctaattcccctaacctgaaacattttggtctgggaaaaaaagagataaccattaaggcactttcggaaaaatggcttgagcttaagaaaatggaaataacaacaaatgccatggtcagatacaaatcagctatccgaaattgccttgactgccttggagggaacaaactggcatcatcaattacacaggaagatgttctcatttttcgtaaagaattattaacgggatatcagttgccaagaaaaattcagaggaagcctattaaaggtcgtagtgtacctactgtaaatagctatatgacaattatctccgggatgttccgttttgcggcaaacaatgggtatataggcaaaaaccctttcagtgagcttccatcactgaaaagagcgaaaacacctcccgatccactaacaaaagatgagtttgccagactgattgatgcgtgccaccaccagcaaactaaaaatttctggtcgctggctgtatataccgggatgcggcatggcgaactgtgtgggctggcatgggaggatatcgatctggaagcgggtaccttgaccgtcaaaaggaattacactcagacaaaggaatttacactacccaaaacagatgcaggaacaaacagggtaatacaactcatacagccagcaattgacgtattaaaaaatcaggcgacattaaccaggcttggtaaacaatatcagatagaagtaaagctgcgagagtatggccggacaagcactcactcatgcagctttgttttcaatcctcagatattagatcgcacaggtaactcaggagttcattatgccgtaacatccatcaacagaacatgggaatctgcattaaaacgagcaaaaattcgccatagaaaagcgtatcagtctcggcatacttatgcttgctgggctttaactgccggagcaaatccaaacttcatagccaaccagatgggacatgcgaatgcccagatggtttacaatgtttacggtgcatggatgaaagacaataaccagtcccaggtagaagtactaaacagaaagctatgtacttatgtcccacaggtgccccaacgactaaacaaagcatag

SEQ ID NO: 13598 - DNA, 2850 bp, Escherichia coli
ttgaaataccttgcttcttttcgtacaaccctgaaagcctcgcgctacatgttcagagcattggcgttagtgctctggctgttgattgctttttcatccgttttttacatcgttaatgcgttacatcagcgagaatcggaaattcgtcaggaatttaatctgagttccgatcaggctcagcgctttattcaacgcacctctgatgtgatgaaagagctgaagtacatagctgaaaatcgcttatcggcagaaaacggtgtgctttccccgcgtggacgagaaacgcagacggatgtgcctgcgtttgaaccgctatttgctgactctgattgttccgcaatgagtaacacctggcgaggttctctggagtcattggcgtggtttatgcgctactggcgcgataatttttctgcggcttacgatctaaaccgggtatttttaatcggcagcgataacctctgcatggctaatttcggtctgcgtgatatgccagtggaacgcgataccgcgttaaaagctttgcatgaacgcattaataaatatcgaaatgcaccacaagatgatagtggcagtaacctctactggatcagcgaaggtccgcgccctggcgtcgggtatttttacgccttgacgccagtttatctggcgaaccggttgcaggcgcttttgggtgtcgagcaaaccatccggatggagaactttttcttacctggtacgttgccgatgggggttaccattcttgatgaaaatggtcataccctgatttcgcttaccggaccagaaagcaaaattaagggcgatcctcgctggatgcaggaacgctcctggtttggctatacggaagggttccgcgaactggtgctgaagaaaaatctgccaccctcatcgctaagcatcgtttattcagtgccagttgataaggtgctggaacgcattcgcatgttgatccttaacgcaattttgctgaatgtgcttgccggagctgcattgtttactctcgcgcggatgtacgagcggcgtattttcattccggcggaaagcgacgccctgcgactggaagaacatgagcagtttaatcgcaagattgtcgcctccgcgccagtgggtatctgcattttgcgtaccgctgatggcgtcaatattttaagtaacgaactggcgcatacctatctcaatatgcttacgcatgaggaccgccaacggctgacacaaattatctgtgggcagcaggtcaattttgttgatgtcctgaccagcaacaataccaatctgcaaatcagcttcgtccattcgcgctatcgtaatgaaaacgtggccatttgtgtgctggtggatgtttcttcgcgcgtgaagatggaagagtcgttgcaggagatggcacaagcagcggaacaggcgagccagtcaaaatcgatgttcctggccaccgtcagtcatgagctgcgaacgccgctgtatggcattatcggtaacctggatctgttgcaaaccaaagagttaccgaaaggcgtcgatcgtctggtgacggcaatgaacaactcttccagcctgttgttgaaaattatcagcgatattctcgatttctcgaaaattgaatcagaacagttgaagatcgaaccgcgtgagttttcaccgcgtgaagtgatgaaccacatcaccgccaactatttaccgctggtggtacgcaagcagttaggcttgtactgctttattgaaccggatgtgccagtggccttaaatggcgacccgatgcgtttacaacaggtcatctctaacctgctgagtaacgccataaaattcaccgataccggctgtatagttttgcatgttcgcgctgatggcgattatctctctatccgtgttcgcgataccggcgtggggataccggcgaaagaagtggtgcgcttgtttgatcccttcttccaggtcggaacgggcgtacagcgtaacttccaggggactggtctgggtctggcgatttgtgaaaaactgatcagcatgatggacggcgacatctcggtagattcagaaccgggaatgggcagccagtttaccgtgcgtattccgttgtacggcgctcagtatccgcagaaaaaaggcgtggaagggttgagtggtaaacgctgctggctggcggtccgcaatgcgtcgctctgtcagttcctggaaaccagtttgcagcgcagcggcatcgtcgttacaacatacgaagggcaggaaccgactcccgaagatgtgttaatcactgacgaggtagtgagtaaaaaatggcagggcagagcggtagtgaccttctgtcgtcgccatattggtattccgctggagaaagcgccaggggagtgggtacacagtgtggctgctccgcatgagctaccggcattgttggcgcgtatttatttgatcgagatggagagcgacgatcctgctaacgctctgccgtcgacggacaaagcggtcagcgataatgacgatatgatgattctggtcgtggatgatcatccgattaaccgacgtctgctggcagatcagttgggatcgttgggctatcaatgtaaaaccgcgaatgatggcgtcgatgcgcttaatgtacttaacaagaatcatattgatatcgtgcttagcgacgtcaatatgccaaatatggatggttaccgcttgacgcaacgcattcgtcagttgggactgacgttgccggtaatcggagtaactgctaatgcgttggctgaagagaagcagcggtgtctggagtccggtatggacagctgcctgtcgaagccagtaacgctggatgtgataaaacagacgctgacggtatatgccgagagggtcaggaaatcgcgggaatcgtag

SEQ ID NO: 13599 - DNA, 1944 bp, Escherichia coli
atgaactgctgggaaatattagctttacaaccaggtgcggaagaacgagatattaagcgtcgttatgcgcaactggtaaaaaattgccgcccggaagatgatcccgcagcctggcaacaattgcacgatgcttatgaacaggctttacgttatgacgacgaagatcagtggcaagaagatgaagaagagcaaccgatcaatatgtccaggggtattgttcatcctcgtcctgtgatgacatttcgcgcactcaacaccttttctggtcatccacttcctgatgtcactattaaatcagagggggaagtcacctggcaagccgtgctggatatgctctgtgaggagaatgaagctattcccgaacacgcccccatgcaacttgctaaggcgttatctttccttgagaaaaaagatctcagctcacgaatgtgctttgaagaagcgttattactgcatcttcatcgggtattccggccattattaactctcgctgctgcacaaacttttagatggcatttagtcgcaggcagtcgtcaacccgtaatccagacagaaattaacgaaagttgtcttctttattatcgcatcgaaaaacaaattacccctttctttgccagtaacttgtctccactggaagaaatggaaaacgggaaggaaatggctacgatttatcaatcattaaaggataatgaagagagcctgaaatggtttgatatcgcagtattaaataaagttgctgaatttgaactatcagacaactatatggcattgttaatagagtgtttatcatattccttgcgaaaagaaaaaatgattcgcaagtggaaattaacagaacgcttcaataatttagcaatgcaacatcatagtggatataaaaagctgctaaatgccataaaattaaaaggtcttttttattatccatcttctgtataccagtcctgcttacatgctgcagagcaaggctattcgctagcctggtattctcttggcaaaatgtattacgaaggtgatgaggtttcacaggatctaaaattagcctttaactggtttacccgcgccgcgcagcataatgttatcgatgctctgtatgcgctgggtatcatgtatagcgatggaaggggcacggataagaatatttgtgaggcacgaaaatggtttttacttgctgcccaaaatggcaacacatctgcgcaatatgagcttgcccgtatctcacgctttgctgttgagccattacgaaattatgaagaagcattgcagtggtatttatctgccgccacacaaggacatgaggttgcccagtatgagttgggacaaatgtatatacaagggattggcgtggagcgcgatgaggttcaggcccatcgttggtttttgcaatcagcagaacagggatatttacatgcgcaatatcatactgccaggttgtatagcggaagtgagagtatttcacaggaccaggaaaaagcgctgtactggtttaccaaagcagcaaaaaatggggcagatggggcaggggatgccatgtatgaattggggaaatattatttaaccaacaatgatgatcctgaaaataacgcagaggctactcaatggcttactggtgcagcgcagcgtggtcgaatagaggcgatatttttgttagctgaaatgtatctgtacggtacaaaagataccataaaagatgaaaatcatgcgctgcactggtacgaaaaagcggcgcgtttagggtcgaccgaggcgcagcaccagactgcggcaatgtatgctcaggggacgggcactaaaattgataataaacaagcatggatgtggctaacaattgccggaaataacaacccctggattgaaaaagatgcgttgcgatgcttaatgtctgaacaggatattcaggatgcagaacaaacggctgcaaattgcaaacgtctgctaaggatttaa

SEQ ID NO: 13600 - DNA, 150 bp, Escherichia coli
atgaaccgccaacgactggattctcccttggtttatgttggtgcgcataatgtatattatgttaaatttaatttgagtgatgcgaagcgattttccggtcgtcgttattacttcagggttccagaacataaagcctctcctctttcatga

SEQ ID NO: 13601 - DNA, 150 bp, Escherichia coli
atgctgaatgaacattacgatgtcaccactgcagcctatgttgtcggttacgaaagcttatcccatttcagtcgggaatattcgcggatgtttggagagtcacctaagagagatattaccaggttaaaaaagtctgtcggtcagctttaa

SEQ ID NO: 13602 - DNA, 711 bp, Escherichia coli
atgcaaactacgcgtaccccctactctgtttcctttatggcgacagtgttacttttattgctctttgcttgccatagcaccattgccaacgcagctgtcgcacttggtgcgacgcgggtaatttatccggcaaaccagaaacaggttttattgcctgtcacgaataatgatcctgccagtgtctatctcattcagtcatggatagaaaatgcgggtgaccagaaagatacccagtttgtcattaccccaccgcttttttccatgcaaggtaaaaaagagaatacgcttcggataatcaacgccactaatcatcagttaccaggcgaccgtgaaagcctgttctgggttaatgttaaagctatccctgctatggaaaaagaccagaagaatgagaatacattacagctggcaattattagccgcataaaaatgttttatcgccccacgcatctggcaatggcacctgaagaagcgcctgcaatgcttcggtttcgtcgcagcggtagcaaattcactcttattaatccaacgccctacttcattaccgtaacaaatatgaaagcaggaaatagcaatctcccaaacaccatggtgccgccaaaaggtgaagtatcggtggatatcccgcatgctgtaaccggggatatcagttttcagacaatcaatgattacggtgcattaactccgcgtattaaggcaaccatgcagtaa

SEQ ID NO: 13603 - DNA, 483 bp, Escherichia coli
atgaaaaaattagcgatcatggccgcgaccagcactatcctcgcgatgagctcctcgcatgcagcgttcacaggaagtggtagcaccggtacgacaaaactaaccgttaccgaacagtgccaagtgctggtcaccggatctgacgccaccaaaacgcgcggagaactcaccgacggggcccgtgtgggggtcctggccgtaaccgcaaaaggctgtaacaccgagcatgcagcgttgcgtgcacagccagacaactaccaccagggcaagatcgtactgctccgcgatgaccagcaggcacggataaatgtccgcttgcagtccttcgacgggagtgcgtggaataccaacggcgacaccgtataccgcgccgatgctgggaactggggtggcaacttgctcgtagtcgtggacggggacaacgtggacaaaccggccgggtcctacatactgaacctggacgggggctactgggtgagttga

SEQ ID NO: 13604 - DNA, 825 bp, Escherichia coli
atgctggtttctcgacaacaaaaggagtccaacgctttttatcgccgtaacctggccgcccaccgaggctacgactccgataacccacgcgtggcgggcgacgtcggcaaagcgggcgtcgctatcgacaccgtggaagatatgaaagtcctgttcgaccagatcccgctggataaaatgtcggtttcgatgaccatgaatggcgcagtactaccagtactggcgttttatattgtcgccgcagaagagcaaggtgttacacccgataaactgaccggcaccattcaaaacgatatcctcaaagagtatctttgccgcaacacctatatttacccgccaaaaccgtcaatgcgtattatcgcagacatcatcgcctggtgttccggcaacatgccgcgatttaataccatcagtatcagcggttaccacatgggtgaagcgggtgccaactgcgtgcagcaggtagcatttacgctcgccgatgggattgagtacatcaaagcagcaatctccgccgggctgaaaattgatggcttcgtccctcgcctgtcgtttttcttcggcattggcatggatctgtttatgaacgccgccatgttgcgtgcggcacgttatttatggagcgaagcggtcagtggatttggcgcacaggatccgtataacaacgttatccgcaccaccattgatcattgtgcacatcctatgtgtcgggattatctgcatcgctatctggaaaatgcgtccggcggacatattcaccacgatcttagccacgtcttcgacttacaccgtaatttaattgcaaccggatcgatgctgggttaa

SEQ ID NO: 13605 - DNA, 1140 bp, Escherichia coli
gtggttccgggattaaaccgtctccggccccgttcggtttcagggcctgccatcgtcatgaccgtggctgttgtggttgcgctttgcacgtttattcaccgtaaaccggcattgctgggcgttgaaccgggtagcccacagcaaatgtactggatggctggcgtgattgccgcaggcgtggtctttctgattatcatgggggtttatcatctgctgaaccgccacgctgccgtgcagaactttgaactccgcagacagcttgccgccggagatgactatcgtgcggtgacgacaaagaaagccgacagccgtcatccggcaatggtggaactcgccgccttcctgcgcgaccgctacggcccattctggcggcgtaaagtccgcctgctgctggtgaccggcgagcctgaagaggcagaggccatcgcgccggggctgaccgggcaacactggctggagggcgaccacacggtgctgatatacggcggcaggccatcagcggagcctgatgtcgcgctactgaccgccttaaaaaaactgcgccgcagccgtccgctggacggcatcatctggccgctgacagaagaacagagccgccagaccgcacaactcgacaaaggctggcgcggactgataaacggcggtaagcgactcggttttcaggctccactctatttgtggcaggtctgtgacgacggtgattatcagaccggacgccccctgcaaagcgtcggctgcctgctgccggaacgctgtaccccggaacaactggctgtaatgctggaagcacaaaccctgccgctgacggaacagggcatgtcgcaactgctgaccaataaccgccatgatttcctgctgcgtctggcccatacccttgcagagcggggtatcgctcactggcaaagcgttctgaaaccgctgctggcaggcggcgcattttcttccctgcgcctgcgtggcctgatgttcagcccgccgcttgccgccgtgccggaggccgcacctcatgcgtggctgccgtcaccggtctgggcgggcgtgacgggtgataacgcgcgcgggcgcacggtgggttttccgtggctgcgtaccgcactgatgtccgctgtctgcgtgctggtgatatgggggccggaatga

SEQ ID NO: 13606 - DNA, 2517 bp, Escherichia coli
atgaatattcctgccctaaactttgaccactcacaccacaaactcaaaatccgtggcctgcaaagtccggtggacgtgctgacttttacaggccacgaacagctcagctcccccttccgctacgacattcagtttaccagccgcgataaagcaataacgccggagtcggtgctgatgcaggacggcgcattcagcctgacggcaccgccggtacagggaatgccggtacagactgccctgcgcaccctgcacggcgtcattaccggctttaaacatctctcatcgtcacaggacgaagcccgttacgaagtgcgccttgaaccccgtatggtgctgctggcccgcagccgtcagaacgccatttaccagaatctgacggtgccgcaaatcgtcgaaaaaatcctgcgcgagcggcaccagatgcgcggtcaggacttcgtgtttaacctcaaaagcgaatacccggcccgcgaacaggtgatgcagtatggcgaggacgacctgacatttatttcacgcctgctgtcggaagtgggtatctggttccgcttcgccactgacgcgcggctgaaaattgaggttatcgagtttttcgacgaccagagcggctatgagcgcggactgacgctgccgcttcgccatccttcagggctgcacgacagcgccacggaagccgtatgggggctgaacaccgcatacagcgtggtggaaaaaagcgtcaccacgcgggactacaactaccgtgaagccacggcggaaatgaccacaggccagcatgacgccaccgggggcgataaaaccacctacggcgaagcctatcactatgccgacaacttcctgcaaaaaggcgataaagaggtagcggaaagcggcgcgttttacgcccgtatccgtcacgaacgttacctgaatgaacaggccattcttaaaggccagagcaccagttcactgctgatgccggggctggaaatcagggttcagggcgacgacgcgcctgcggtgttccgcaagggcgtgctgattaccggcgtgacggccagcgcggcgcgtgaccgcagctatgaactgacgttcacggcgataccgtactcagagcgctacggctaccgcccggcgcttatcccccgcccggtgatggccggcacgctcccggcgcgggtcaccagcacggtgaagaacgacatctacgcccatatcgacaaggacgggcgctaccgggtcaacctcgactttgaccgcgatacgtggaaaccgggctatgagagcctgtgggtacgccagtcgaggccctatgccggggatacctacggcctgcacctgccgctgctggcaggaacggaagtcagcatcgcctttgaggaaggcaacccggacaggccgtatatcgccggggtaaagcacgactcggcgcacaccgaccatgtgaccatccagaactacaagcgcaacgtgctgcgaaccccggcgaacaacaaaatccgcctcgacgatgagcgcggcaaagagcatatcaaggtcagtaccgagtacggcggcaagagccagctcaacctcggtcatctggtggatgccgggaaacagcagcgcggcgaaggctttgaactgcgtaccgatatgtggggggcagtacgggcgaagaaagggatttttatcagcgccgatacgcaggacaaggcgcagggtcaggtgcgcgaaatggctccggcgatggcaatactggatggcgcacagtcacagatgaagtcgctgtccactgatgcgcagacggcgaatgccgatccggcagatctgtcatcacaaatagcgctgttgcagcagagtgtaaaagatctgacgcaggcggcgatcctgctaagcgcacccaaaggcgtggcgatcgccagcggagagcacctgcaactggccgcatcgaaaaacctgatcgcgaacgcaggaaatcacgctgatatcggtgttgtgaagaatatgtttatcggtgtgggtcaggcgctgagcgtgtttgtgcgtaaagcgggcatcaaactgtttgccaacaagggggcgatctcggtacaggcacagaacgacctgatggaactgttggcacagaaatcgatagtgatcaccagtacggaagatgagatcaagatcaccgcgaagaagaaaatcacccttaacggcggtggcagctacatccggctggatgcctgcggaatagaagcgggaacgccgggagaatataacgttaaggcgggatattatgggcgtaagccgaaggcgaagctgacaccggagttgatggcgtttccagtgattgagagcggggaatttaatgctaagttcctttttactgatgatgatggtctaccttatgccaacacaaaatatattgcatgtttttctgatggcactcaaaaagaaggtattactgatgagaatgggtatacagaaaattttaatactgattccaaacaaacaattgatgtcagattattgaatcaaaatatagacatgatattgggaggcgtgcatgagtaa

SEQ ID NO: 13607 - DNA, 807 bp, Escherichia coli
gtgctctttttttccttcgctgatgaaagctatttttctataatatatggttatggcaaactcaatggggtagattatccacatatttattccttgtcgttagagaataagaaaagctattacgtgcttagttcgttcgataataataaagaacaaaatttgcataaaatttttgcctatttatcagtggaaaagaagaaatatcaggtattagcaaaagtgacatttaacaatttaagtaaagaatcttattttgttcatagaaatagaattacattggataatgacgatgcagaggtcggtattatttcttcgatgtgtggaaaaacatttgctattactacaaataatgtacttcttgattatctgtccagtaaatgtgagttcgatgaatataatttcgatcatgattggattgaaattccggcaagacaatcacgcgtctttagtttcattcttaatgatgcgtatgtttttttaccaggagagcatcgttatgatattggttctttggagtattattttactgatgtcagatggattaggaagaaaaaaatatatagatcgttgtttgatataatgaagtttcgggttggcatatgcagtagtcgactaggcggagattatctttttcaaaaagataatggttattgtgcgtctgaagatgaggattcaattaatattgaatattttttgtggcgatttggtttgaatggagggattgagaaaatgtattttaacattagaactaatcaagttgtgattgatattgatgggagtgatgttcactcattgtacgataactaa
